United States Patent Application Publication US 2004/0031072 A1 - sequence listing, part 28

SEQ ID NO: 128732 - DNA, 1930 bp, Glycine max
  unsure (1)..(1930): unsure at all n locations
  Clone ID: PAT_MRT3847_87250C.1
cacctgatgtggatctgaaacttcggaaagaaaaatctagactagttgaagaaagaaacgcttgtctttccctccgtcctcagtctggagcatcatcatgatccgttcccttccaatttaccccaaaaattaaaatatactatttcattccaatgtttcccaagaagcggcaacgcaccaccgcagcctgccgttcctcctccacactcgccaccatctcttccctctccgacgtaaccctaaccgaaatctcccataaccctcgaccttcctctcccatgcccgacgaccgtccctcccccgcggcggaagacgctctccattataacgacgccgccactgccgacgtcgtcctccgcctcttcatcgacgcttcctctccgctctattccgccaccgccgactccgtttccaactccgacctccacgtctacctccattccgacgtcctccgccgctccaaatacttctccgccctcctctccgaccggtggatcggccacgtccactcgccggagcactcatcctcctccaaccgcgatctcttccgcctcaacctcggcgtggctcccgccgccggctcgatccagttgcatctcatcgtcctggagcttctctacacgaacgacttcgccgccgcggtggacagcgcgtcgacggcgctggatctgttaccggtggcactggaactcctcttcgaggagtgcgtgcgctggtgcgtggatttcctcgaggcggtgccgtggacggaggaggaagagaagcgagtagtgagattaatccccttccttagcgagaaagagtcgaaggaactcgttggctagggtttgggccttcgggagaggactcatgcgaagcgatgctgcaaggattgatttcctcgggatgaacagttacggcaacacggcgttcgtgaaggctttcgtagggaagattcttcgggatctgtcgtcgagggagacggcgaagagagtgttagagaaggcgttcgcgatgagcttgaagacggtgaaggagtcgttggaggattactcgagtccggtgttcagaggggatcacaatgagacggaggctattcagaggctgaatctgcataaggcttccaccaatgggaagcatcttctgtggcttgtggagaggatgattgagcttagggttgccgatgtcgccgtcagggaatggagcgagcaagctggcttcactgctgatttgcagagggcgtttcgtgatgatgcgtggaggaacattgtgcctggccttcctgctgttattctcaggtgtacgtgtaggctcgccaacgctgtctctgctggcaccattctcgcttctagacaggtgagaaggaagcttgtagaagattggttgccggttttggttgtatgcaaagataatgtttcaccaatatcacccagcaacaaatcgttgtatctggaactggaagaaacattcttgcgaatcatctccacattgcctatgtcagatgctcaagaattgttgcagcagtgcctcagcttttcaacccgaaatgttgaagattgtcctcatttggttactgcattcaacacctggttccgccgagcagcccgacccctcaaaccagattctctctttgatcaatgagatgtctgttcgttctgttgcgcctttcttgggtcgcatattgtcaaatattgtgcatatgtaaatactatgttcagaaagtttaagtttaacattgtacatataaatcgaaactaagtcttgtcttctaggacaaaccagccaaaatacagtccttgtcttgaggcctataatgggttccttggaatgcaagattttcagttctaagttttagttcgtaaaaaaaaaaaaaaaaaaaaaaaaaaaaaaaaaaaagagaacactctagaggatccatttntaagggcggccccccggccattgagcccgc

SEQ ID NO: 128733 - DNA, 725 bp, Glycine max
  unsure (1)..(725): unsure at all n locations
  Clone ID: PAT_MRT3847_87251C.1
gtcagggaatgaagcgagcaagctggcttcactgctgattgncagagggcgtttggtgaggatgcatggaggaatattgtgcttggccttcctgctgttattctcaggtgtacatgtaggctcgccaatgctgtctctgctggcaccattctcgcctctagacaggtcagaaggaagctcgtacaagattggctcccggtactgcttgtatgcaaagataatgtttcacccagcaacaaatcattgcatctggaactggaacaaaccttcttgcgaatcatctccacattgcccatgtcagatgctcaagaattgctgcagcgctgcctcagcttttcaacccgaaatgttgaagattgtcctcatttggtcactgcattcaacacctggttccgccgtgcggcccgacccctcaaaccatattctctctttgatcaatgacatgtctgttctgtttggttcgcgtgttgtcaaatattgttcatatgtaaatactatgttcagaaagtttaactttgtacatataaatcgaaactaaatgtcttgtcttgtagggatcaaaccagccaaaatacgtagttcttgtcttgaggccaatggctaatgggttccttggaatgcaagattttcagttctaagttttagttcgtcgttgcataatttcctgtgggtgaaacggtgcttaagaaatttttggtcaaaataaagatnccagccttgatttg

SEQ ID NO: 128734 - DNA, 304 bp, Glycine max
  Clone ID: PAT_MRT3847_87252C.1
agatcatcatcacacctttaggctaacagcagaaacataattagcaaagtgaaaatatgtatatgcacacacatatgtacatgctaatgaaataagggctttcttcccaggatcttatatttccctttggaaacacattgatcttattcctaattactacaatgacaagtatgaccacatcctactaatatataccctaacaccacatacacatgtgaccatcatcatcttggaagcatctctggcacaatatctgggccactaaagggaggtgaatttggttcatggcggttttcgggtcttt

SEQ ID NO: 128735 - DNA, 241 bp, Glycine max
  Clone ID: PAT_MRT3847_87253C.1
ctctagtgatcttaccttggaagaagctctggatgttatattcaatacaaaaatatcattttctagtactgataatggaagaagtaatgggaatgaaatggttcttactgatatatgcttgggcatcgcaaatgatagaatgcttcaaatcaatgccatttgtgggctctcatggataggaaaaggtttacttttaagtggtcatgaaaagattaaagacatcattatgatttttttggag

SEQ ID NO: 128736 - DNA, 478 bp, Glycine max
  Clone ID: PAT_MRT3847_87254C.1
attaccccaatgggaaagaacacgttgaattttaaacatatcacacgctttacagggcacgctgaacactattgaattttggggtggggaccctttactcatttttgccggccaaaaaagaaaaattattttgctcactttatgggcctaaaaccagcttacaacccagattggttacacagaacttttattaacccctaccgtgatccggagataaattctttaatcctttcatataaagctggggaagactataaaaaaacccggattaaacaaaaaggattgcacaaaaagggggaccggccatgataaaatttgcttaacaaggaccttcacttgactgggggtgacacggatcactggcattttttggctttacgtttacatcacccatgtttttttgttttggagaagaaattgtttccattccagggagtgctggagtaattttttgaaatggggcctttttgttaaaccc

SEQ ID NO: 128737 - DNA, 1279 bp, Glycine max
  Clone ID: PAT_MRT3847_87255C.1
caagaacaagatcaatggaaaaagttcgcaggatcgccttgtatctggatcaagatgttgataggttcttcccttcacacttgaaaagacaccaccatttaaggtctcttctttgctaccatgaaaaggcagttaggctaagtgaatgggggctgatgaagtctttttttaacaaatgtaggttacttagagtgttgaatttggaaggaatacagtgtcagggagggaagttgccaaaagaaattggtttattgatccacttaaggcttctcagtctaagaaatacaaaaattgatgagttgcccccatcaataggcaatttgaagtgcttgatgactctggatcttctaacggggaactcaactgtacttataccaaatgtcataggcaacatgcacagaatgagacatttgcatctaccagaatcatgtggtgatagcattgaaagatggcaacttgacaacctaaaaaacttgcagaccttggttaacttccctgctgagaagtgtgatgtaagtgatctcatgaacgtgaccaatttgagaaagttggtgatagatgatcctaaatttggagatatctttaagtaccctaatgtgacatttagccacctagagtcgttgttttttgttagttctgaggatatatcaattgtccatgttgcattaggatgtcctaatctttacaagctgcacatagaagggcctataaagatttttcctgaaccacaccaactttcttccaagcttgtgaagctaaagtttaagggttcaggacttcttgtagatccaatgccaacactagagaagcttcccaatttaaggttccttgaactacaacttgattcattcatgggaaagaagctattttgttccagcaatggtttccctcagctcaagtctcttgttatctatgacttgccaaaccttgaagagtggaagttgggtaagggagccatgcctagtcttaggaagcttgagattgcaaattgcactaagcttgagagggttccagatgggctcaggtttgtggccactcttcaggatttggagatcagatcaatgtttgcagtattcagaactaaacttgaaaaaggtggagaggattattacaaaatccaacatgtgccacctgtggtattctgttattgtgactattaggttggtgtaacaatttatattgcaaatcagcaaatctatgtttacatatatggccaagcagattgtagatgagcattactatttaatgaaatatatctacatgttcttggcttaaaaaa

SEQ ID NO: 128738 - DNA, 2846 bp, Glycine max
  Clone ID: PAT_MRT3847_87256C.1
ggcatacggagcttcctataatgctaagtgtcttgaaggaagaacgtggtcgtgagagagagggacattaggtgagaatgaagttctgatctgattcatagaaaagaaaaagaaagaaggtttggtaaaggagggaaaaacgacccaatatgatcccctttttaggaatttgatcaagatccatttgtccgctttgagtttgtggattccattctgcttcacttattttattttcttttgttgcagtttcatctgttgttgttttctttcaacaaaaaaaagatcctcaacaaaaagcacaaacaaacaatttctttcattctcatcttccctttcttttttttccaattggtagtgcaagtcaagtccatttcaccacccttcaacactaccacaacaactctgggtattatcccccccacattctgcatccgtccaatctttcagtcgcaaaattttcagtgtttcccactctcccttaaatcattcccacccttctcacactcatggatctgtctgtccagtaacccacacagaaaaaaccctgaagaaaaacaaaaccatatcatacatttcatttacagagaaaaaaatgtcatcagcagaaaaacccagctccaaaggacaagcatggttctgcacaacaggattgcccagtgacattgtggtggaagttgatgacatgacattccatctccacaagtttcctctgatgtcaaaaagccgaaagctccaccttctaattacgcagcaagaggcagcgtctaactccactgtcccacagcagcagcagcagcagcaagaaacagaagatgaagacgaaatcgtcgaagagcagtgtcacgtgaccttcacgggcttccccggtggctccgaggcgttcgagatggccgcaaaattctgttacggcgtcaagatcgacctgacgccgtccaatgtggcggcgctccggtgcgctggggagtttctcgaaatgaccgaggattactccgaggacaacctcgtttccaagacggagggctttctatcgcagcacgtgctcaagaacctcaaggactctgtcaagacgctgaaatcgtgtgactccttgatgcctatggcggaaaatctcggactcgggcagaggtgcgttgattctgttgtttccagagcttcctcagcggatcctgcattgttcggctggccggtcagcgacgctacctctgggtcccagcacgtcctctgcggtgcccgcgtcggtcgcggggcaagaaaggttggcgccggtgccggtgagtcttggtttcgaagatctggcgcttctgcgtttgcctctgtttaaacgattgattgttgcggtgagaagtgcggagctgagtcctgagattattgagacttgcttgatgtattatgctaagaagtacattcctggagtttcgagatcgaataggaaaccgttaccgtcgtcgtcgtcttcttcctcctccgttgcgacggaggcggagcagaaggagcttctggagacgtcgtcatcttcttcttcatccgaggcgacggaggcggaggagaaggagattctggagctgttcgtttcgaatcttccgctggagaagagttcgaaggcagcagcctgcagagacgcgctggagaagaagatagggctgcaactcgaagaagccacgctcgacgaccttctcgtgccgagctactcgtacctgaacgaaacgctttacgacgtcgattgcgtggagaggattttgagtcactttttggaaggtatggaagcaagaaccgccacgaagacggaggatgcggcggcgacgaggtcgccggcgctgatgctcgtcggaaagctcatcgacggatacctctccgagatagcttccgacgcgaatctgaagccggagaagttctacaatttcgccatctcacttcccgacgaggccagactcttcgacgacggtctctaccgcgccgtcgatgtgtatctcaaggcacatccgtgggttttggaagaggagagagagaagatttgcggattgttggactgtcagaagctgacgctggaggcgtgcacgcacgcggcgcaaaacgagaggcttccgctgcgcgcggtggttcaggtgctgttcttcgagcagcttcagctgcgacaagccatcgccggaactttgatggcggcggaggccgccgcggaaccgggaaggcaatcagcggcgctggagcgggaagcggaggacggaagaggagaaggattagggttagagcacgtgcaggaacggaacggcacgtggcgcgtggcggtgagggagaatcaggtgctgcgcttggacatggatagcatgaggacgcgcgtgcatcaactggaacgcgagtgttcctctatgaagagagtcatttccaagtttgacaagtttgccgcctccggcggcggttggagggcgtcgctgggccggaaattcggttgcaagtttaagactcaggtttgtgattcgcacgagtcaacggccgttgatacccgcaaaggacgccatcaccagcagcatcatccccatcatgattagttaccatgctcaacttcctccccctcacgtgagaatcattgttggagtaaatttcatatgggccccacttgtaattgttcatttttttctttaattttccataaatttagttttaattgattaatactataataactttactttctcgtcaccatgctaaacttcctcccctcacgtgagaatcattgttggagtaaatttcatacgggtcccacttgtaattgttcattttttttttcttttaaattttccataattttaatttcaattgattaatagtataataactttactttctcgcat

SEQ ID NO: 128739 - DNA, 340 bp, Glycine max
  unsure (1)..(340): unsure at all n locations
  Clone ID: PAT_MRT3847_87257C.1
cgcagatgtggaatatctgaatgttagcagtaactttagtgacatgacagagctacctgaaacacttggtgatctggtcaacttaagggagcttgagctcaggaacaaccaaatccnagctcttccttactcgttcggtaggcttgaaaaattgacaaagctcaacctggaccagaatccaatcatagttcccccaattgagggtgtaaatcaaagggcttgagctttgaaagaattcattggccaatgggggctccatcttattgaaaaaacctaacaaaaaaacattttccaaacacaaaatcaacaagcaccaaccagattgcttccaatgggaggc

SEQ ID NO: 128740 - DNA, 311 bp, Glycine max
  unsure (1)..(311): unsure at all n locations
  Clone ID: PAT_MRT3847_87258C.1
caggctactgccagatcttctgaaaatgcggaatcctctgcatgatctggaatttatgttttctttcgcttgttcgttcctttaattcaataaaggaaaataggcagagcattctcaacaagagggntgaaccttacttccttaaaccaatcagaggagcggacaagcgaacgctaacatgagactctggacctgctgagtcaatacattaatgagaagggtagcttcggagatcttacccacggcaagacatcatttagttcacctgtgaccacttgtgtatctgatacaaccatgaacttgttttctac

SEQ ID NO: 128741 - DNA, 411 bp, Glycine max
  Clone ID: PAT_MRT3847_87259C.1
tattaatattcctttgtttttttttttttatttactgcttccttttttttctcttgagtactgaccaaaggaaacaatcttacggaccatctttgaccaactcctatagacagaaagaaatagcatgcatccaccttttcctgcaatgatgcagacgtttgaataaaacattctattctttttaactaccggtagatatattttcgagcgggggcgatcatatgtctcagagaataaagcgcccttgacatttggcgttcccaaattatatgcctacaaaggggggaaagcttttccctggcagacaaaatgtgggccttctagagaaaaggggggggcttcttcgataaagaggtttagtgaggtcctgcaaaaaaatgccttgtgagacctcacctagggattagagac

SEQ ID NO: 128742 - DNA, 550 bp, Glycine max
  Clone ID: PAT_MRT3847_8725C.1
tataaagcagctaaagcatcacaaaaaattgtatgaaggttatgtaccaatggaatacaaaagctacttgaagaaaatgaaaaaatcaggggagtggggagatcatgttactctacaagcagctgcagaccgttttgatgccaaagtttgtttagtcacctctttcagagacacttgctacgttgagattcttcccgctgacaaaagtcccaccagagagctatggctaagcttttggagtgaagtgcactataactcattgtacactaccggagacgttccttcgagagtgccaagaaaaaagttttggctcttctagactgatggcaatcggcagatatctgaatcacgtgaagaactgacttataatgggcgaaatgtttttttaacttattgttcttttatactgagtaagcccgtcattagtccccctctcctttagggataaaccatagtttatgcataatatttaaaaattaccttgtacaaatcacgtaagtataactaaactctgatttattattgtacagttcttattttctaccaaaaa

SEQ ID NO: 128743 - DNA, 552 bp, Glycine max
  Clone ID: PAT_MRT3847_87260C.1
aaaaaaagtaaaaaggttttttcatatcccccaaaaaggaaaaatatttttttttggggggtcccccccccaaggaaaaaaaaagaaagtacccacggggaaaggggaaaacaaaaaaaaggggttttcaaaataaaaaagcgagaccaagaatcctaaaaaaaatgaaaaggggcatagaaaaccaaaagtataaaaaaaaaaaaaggggggcccacaatctatgcgaaaaaggaaggtatttttcagcaaaaaaacatgtcccaaaaaagaagggggaacaacccccttgggcaaggggggaaatttgaaggccaaaaaaaaaaaaaaccccatttttccaaaaaaaaaggaggaccttttttgcccaaaaccacgggccaaaaaaccctggcggtcccactaaccaaaatggcaggggcccctggggtcccccgattgggccccaaactgccccggggtttccgccaaaaaaactccaggtggaaaacccaacccgacccacattaacggcaacaatcccggggggcccccccgagaacaaaaatttaa

SEQ ID NO: 128744 - DNA, 345 bp, Glycine max
  Clone ID: PAT_MRT3847_87261C.1
aaagcgtctataaaagaaaatttttttttttaaaccctaagaaaccccattaccccttttttaaaaattctttgacccttcccaaaaaaaaaacccttattcctaaaattttagaccagcaagaggttggttaatttaaaacccaaatcccaaaaatttttatggtccccccggggaaacccccttttttggggcccaaggttgggcccaacccgggggtttcccctcattattccacccaaggccttaccctttttttaaaaaaattttttaataaataagggtacctaagaaaattatttaaaaaaaagctttttaaactggcattccaaaagggaaacccta

SEQ ID NO: 128745 - DNA, 700 bp, Glycine max
  Clone ID: PAT_MRT3847_87262C.1
attcctctgagaacaacgtctcgaatcatcagaaacgactctatatagtaatatttacgactctatcacaacatgttcggttacagacgccgtcgtcccattcttggagcggctgtcatcgctggaaccgccacaatggctgcccgaagcggcgctcggcgacaagcagacgctgaatctgatcgccaattccaggcgcagcaagcagccgaactcaggagactggaggaggagagagaccaggcgcggaatcagcgggcaattgaccaagccgtggccgaagctcacgccaaacaacagcaacaacaacaacaacaaggcgaacaaagtcggagccctgtcccccagagacccgatctagtcggcaatcagcaatatgcggatactcctccggtctatacaggtgctgatgtctatgcctcacctaatgttggccagccgatgtatcttcaacctccaaatgcgaccggtggcatctccccgcaacgacgtcagagtcccggtgccgttgatcccgatgtgtgtttctgcgctagctgcggtgccagagcgaacgtgcagttcaagttctgtgccgcttgtgggcagccgatgttggcggcggcttcagagctacaaagaggaccagagaagcacccgatgtagtgcgatagggatccacacctattgccatttcagagtacaatggctttattgagga

SEQ ID NO: 128746 - DNA, 172 bp, Glycine max
  Clone ID: PAT_MRT3847_87263C.1
ggtgagggctagcgtgctgaatgatgctcttaagagcatgtacaatgctgagaaacgggggaagcagcacgtcatgattaggcccttcttagaagcgattataaaattccttctggtgacgctcatgcatgggcacgttgcagagagggaccaccctgcatatcacagagga

SEQ ID NO: 128747 - DNA, 401 bp, Glycine max
  Clone ID: PAT_MRT3847_87264C.1
tacggctgcgagaagacgacagaaggggtgtcttccgctctttatcttttctaagactatcttagtctttcatcgagacttcaaatgtctcccttactttgcaagacttcaaggtcttgtgctgatataccatatgcctcttatgctctttcttttgacaggtttcgctgattaggctttcgctagtggtcgctcgggtggtgagatcgctcgaacgaaattaatgtctttatatttacttcccttttatctccaataaaagataagtgaagaagggcaattgtcataccctaatttcatccggggacaatcattggccaatatttggattcttgtcggccgagttaagctgcttaacattaattgccacacaatttataggggaaagaagaagaaaaatc

SEQ ID NO: 128748 - DNA, 749 bp, Glycine max
  Clone ID: PAT_MRT3847_87265C.1
cccacgctttggctcgctcgcaaagtgaggccactcaaaaaacaatcacttcttagcttgatccttctcagcaagagatccaggtttttaagtttttagcctcttatttttgttttatcgaaaaagaaaaaaagaaacaatcacttgcaagtctttagttttctcctccctgttctctggttttggaattgagacaggctctacttataatttggaaaagtttttttctttttgtttgggttttcttaacttgttcttcgcatatcgtaaaacatgggaaccgctataggcatgtacagcaacaacaacatcgtaccggatttcctagatccgtatagtgaagaactgatgaaagcacttatgccttttatgaaaagtgattatttctctgcctcttcttcttcttcttcacgcgaatcacacccttctcctcttattccatctaattctctcccctcctccaaccaaatcaggctcaaccaactcacccaagaccaaattctccagattcaggcccaaatccacattcagcagcagcacgtggcccaaggccaagcccacctgggcccaaaacgcgtccctatgaaacacgccggcacggccgcgaaagccgcgaagctctaccgcggggtgcggcaacggcattggggcaagtgggtcgccgaaatcagactccccagaaccgcacgcgcctctggctcggaacattcgacaccgcagaggaagcaacattagcgtacgacaacgct

SEQ ID NO: 128749 - DNA, 977 bp, Glycine max
  Clone ID: PAT_MRT3847_87266C.1
gtttcaaaaaactcaacgttctttctatttcatcatttccactcactcaccattcactaaccaacttttactatggcttctcgctacgaactcgagctgaagctcgcatcagcgcgcggcctcaagaacgtgaactggcgccacggccctaaccgcccatacgccgtcgtttgggtggaccccaggaacaagtgttccacgcgtgtagacgaagacggcgataccgaagccacctgggaccaaaccctacttattcctctccccccggagcccctcgagaatctcaccctctacgtggacgcggtccacgccggctccgaggaagataccgagccgcttattggagcggctcagctcaagctcgtcgatattctcgacgaggtcggagtcgcgagagcgtgaaccgcacgctctcgctgaagcgtccctccgggagaccccaagggaaggtcgacgtaaatgttgttataagagagtttggctatcgtgcgcatggcgggtactacgcaccttcttatggcgtgagggagagggattattctgcgccggttcaggatggttataattctgcgcctcgaacggcgtcgtatggacagggatatgcggggcctcaaacggcgtcgtatgggcaggggagtggttatggttacggttatgatcaagaagagaagaagagtaataagtttgggggcatggggacgggattggctgtgggcgcggttgctggggttctagaaggaatcgcgcttgtggaaggtgctgagtatgttgaggacaagattactgatgacgtggcagagagggttgaggatgatcttggttatgatgaagatgatttctagagactcagtactccaatatgaaaaaagagagtaaaaaatatgaacaaatatcttgaagcttttattttttctttgtttaactctgttgttactgtggttaattgataaaggttaatgcatctggttatgtaaaaa

SEQ ID NO: 128750 - DNA, 381 bp, Glycine max
  Clone ID: PAT_MRT3847_87267C.1
aggcttgagctcgagcctaatactctcgcgcagaactatagtctttcagttcagatactattccacaactactgtgatgacgttgatacatatgcaacagcacacaccacataccactcacctgataccttacatgatccatacgagcatcacactagctactacgctcaagtagtaaaagaggacagcgccttaaccgagtggcggctacctcttgattgtcaccttgttgatccttgacgcaaccatcattgtcataaccattgtcacaacaccgcttgtcatgttgactccggttctgagatcctgtggagatcaccagcgagctgtttatcctggggtaccttgcctcgcacggcatcgatgtgcctgatatcacag

SEQ ID NO: 128751 - DNA, 2137 bp, Glycine max
  Clone ID: PAT_MRT3847_87268C.1
tcctcctccttcgcgtctcgtgctgttggtcactccggcccttttatggccaatatgacgagtacagaaagaaatggggtggtggaatcatgggatccaaatctcaagcgaaaaccagagcaaaggagaagcttcttgccaaggatgctgctcagaggatgaattaggaggagtttcttatatcttgttgctttgcgaatgctattaagtttgttttttaatgtactcttctaattattgtcttcataataacaattgttattcacaagatctttcgtagttgcctctgatagcatcctcgaggttactgaaggctgcgagaagacgacagaagggggagagtcagattcgcacgcattgcttcgcctcacaacagcagctgcagcagcaatggctcccaaacgaggtggaaaggctccggctcttgccgctaagaagaagcctgagaaggtcacgaatccgttgttcgagaagcgtccgaagcagttcggaatcggaggggcgttgcctccgaagagagacttgactaggttcgtgaagtggccaaagaatgttcaaattcagaggaagaagaggattctgaagcagaggttgaaggttcccccagctttgaaccagtttaccaaaactcttgacaaaaacctagcaacaagtctgttcaagttgcttctgaagtacaggcccgaggacaaagctgaaaagaaggagaggctcttgaaaagggctcaggcagaggctgaaggcaaaactgttgaagctaagaagcctattgttgtgaagtatggtctcaaccatgttacctacctcatcgagcagaacaaagcacagctcgttgtgattgctcacgatgtggacccaattgaattggttgtctggcttcctgctttgtgcaggaagatggaaattccgtactgtattgtgaagggaaaggcccgcttgggaacggttgtccacaagaaaactgcatccgttttgtgtttgaccactgttaagaatgaagataaattggagttcagcagagttttggaggctatcaaggctaacttcaacgacaaatatgacgagtacagaaagaagtggggtggtgggatcatgggatccaaatcccaagcgaaaaccagagcaaaggagaagcttcttgccaaggaagctgctcagaggatgacttaggaggagtttcttatattttgttgttttgcgaatgctatttagtctgtgttttttaatgttactctcttttaattattgtctttataaaaacatttgttattcacatgagctagagtatttcgttaaaatctcatgccgtctgtcccaattcctgaaccctaagatttatttctttttggttgcagacttttttcggatactttatgaaggaactgcatgcggatgcagttgcatccaatttttgatatttgatatttttgtatttgattctctatgattatagtataaaatagtttgtgatcctctctaaacaaaataactgcaaaggatcattctgctgcaggtgatcattttagctagtcaaattgaagtgttcaagtgaaccgagaattgtatattttcgtgctaaacttgtcgattatactcacaagtctctgtttgtctgcataatatattgaagcgtaataaattgattaatttttaatatttggccccctcttgttggggggccctttcttttgaccccaatatcccttgcctacccggatagtaacccgcagcttcccttggagaagaccaaccagttttggagtagacaagcccccttaattttctcaatttttggttgtatgtaaaggccccattaattttctctattttttttttttgttttgcaattgggaggtagggtggagtaggtgtgttaaaggcccaagaactttaaaggttggtgtggtatagtaggaaaggatatataaggtcagaaaatgtatagtgtttgtatgaacctcgacttaagcattatttgcctgcagaaccgggggcttagttcgttttcgaacattttcttttctttgattgatgaaagaattttgaatttattgattgatgaaacctgcggaaccggttgcttaatttctcttccaaaaaaaaaaaaaaaaaaaaaaaaaaaaaaaaaaaaaaaaaa

SEQ ID NO: 128752 - DNA, 478 bp, Glycine max
  Clone ID: PAT_MRT3847_87269C.1
ggaatgcttattttatatctatgcgtttcactactcgtgcgagaattatacgcaaaaagtgagcaacgaaatagtatactcgagacataatagttatgcacgggacataacaaagaaattttgtatcccagtcactgctcgactgtagtcagacaaacaactttatacagattactactcaattccacctatggcgttcaaggccgtacaatttgaattccaaaaaacatgtatgtaagaaagaaataacccatattgtcacagctaaaatattcattataaggaaatgctcggacaattagcatattaaaagaacgtatacaaaaagcatttcttgcattagatcggcagctggattcctggtatgcacctgggtatagcttaaaaggggacaactacctaagagacagattagtagcatatgctcgaacacgtgaaaatgaagcagatgatagacttatgcacgtagactttctag

SEQ ID NO: 128753 - DNA, 310 bp, Glycine max
  Clone ID: PAT_MRT3847_8726C.1
gggcaaaacggcatgatacactatcaaaatctcatagactgtggagtgctgtgaaaaggtgtaaggaagatggagctggaatcacatcaaaaggggatggcctattggacaaggtttacaaacagacagtcagatttgtcatgtagggcaaaatcgacccatctggaatgactccaaaaggggtgccaacaggtttaaagggagttgagggaaatcaacttatgccctgagtcctatgcatccaacagttacgctttgcattttctggaattccagatttgaaattgctgtatcctctatgccacttttc

SEQ ID NO: 128754 - DNA, 235 bp, Glycine max
  Clone ID: PAT_MRT3847_87270C.1
atcatgccaaccacgtcttaatctcaccgtatccaaaaacaatagcaataatcattcctcatcaaacctctattttgttattattgcagactgcaacattcccatccatctttggacctctaaacctttcaagccaagcagcaccactattactaataaaacccacaataataataagttaatagatgatgaagaaaccatttccaatctctttgttaatttcattcaagccatc

SEQ ID NO: 128755 - DNA, 414 bp, Glycine max
  Clone ID: PAT_MRT3847_87271C.1
tttttttttttttttttttttaaacaaattttgtttggtttttttttataatgtttgtatggttaattttttttgtttacattttcatatgaaaattcgaatctgattaaagggggaaacaaaaaaaaaaaaaataagcttatggttgtaaggagactttaaaaaacaaaaaacctcttgctgtaagagaaaaaagacaaaaaaaaattttagaatttctcaaaaaggggaaaagaaaccgcccaaaaaacaaaatatgaaattctatataatttgagaggccacgaaaaaattaaatcgcacaagagagcccccataaaagttaaaaaaggggagatttatttttgacaaaacctaaaaaaaaatttcggacacaagaaaaatacaaagtcaaaaacggggcttgtaaggccc

SEQ ID NO: 128756 - DNA, 268 bp, Glycine max
  Clone ID: PAT_MRT3847_87272C.1
gccgatcagaaacatcaccatcggaaggcctgaagaggctacttaccccgacacgttgaaggcggtgttggctgagttcatctgcaccttgatcttgccgttcgtcggctcaggttccgtcttcgtctacaacaagtttaccgtcaacggcacccactctcccatctatctcatctccctttccatcgtccatgctcacacactctctacttacctttcgatccacacccacttgtactcatcccactactaccctacttctatattc

SEQ ID NO: 128757 - DNA, 415 bp, Glycine max
  Clone ID: PAT_MRT3847_87273C.1
ctatgatttttcatacgagcaacagaacatctcatgaggacagggtttggttgcctcccttttccaagctccacaggaggctggagctcactatgcccacttgatctcttacacgtgcctcaggactggactacgcctgttcttgcacatctaaatggatgggatctacattgttccaactttgatggacgggcttggtgtgcacatctccaacagctttatgaccctgcccgacatcaaggatcctctcattctaggtgttgggggaggcaagggacaaggaacatctgaccaatgggagcttgactttgccaagatgggaatcgtccctagactgatgagtgctggagagttggaaagcgtaaatgcacgagagccagctagactgatctgcagagataccgtgaagatgctg

SEQ ID NO: 128758 - DNA, 263 bp, Glycine max
  Clone ID: PAT_MRT3847_87274C.1
gctagtgggtacctcccaacaaccccaagtggcaccccaccaaccaccccatcaaacccttctccttctactccctctgagtcaggatccaccaacaaccattcatcagcaaagcctagtggagctgtaaatggtttcaatggcaatgggcttttggtgggggctttccttgtgttagcaattaaggttgggttcaaggggtaaggaagaagcaatgctggtttttttttattccccttttaataatatggtaatggtttgcc

SEQ ID NO: 128759 - DNA, 378 bp, Glycine max
  Clone ID: PAT_MRT3847_87275C.1
ggctcgaggggaatcattgtctgcgtctgtaaattgttaattgcatcatccctgaagctgatcctcaaaaggctagctgggcgactgtctgcatcggtgttggtatgatcagatgagaatccaaatgcatcgagtcggatcatatgaccggggccctgttttggacagatagcgatgaaggcgccgtatccaaaccggaggtatcttccgatgatcggaagcgactcaacgtctgacctcgacaaacacgattgaacgtgtacttggcttgcacatccagagccagacgtatctacggcatggaccggtgctactagctcttctgagccggcgggaacgtctgccgctgcggcttcggatccagcccgagattctata

SEQ ID NO: 128760 - DNA, 1367 bp, Glycine max
  Clone ID: PAT_MRT3847_87276C.1
tacggctgcgagaagacgcggaattcgagaacatctttctccccagctttgcttacagttcctataattttttttctccattagattaccaagctctgcaactttgcttctcaacatggagtatcgtctcctacccatttttactttactcaatattgcactggtggcaacccatgctgctttaccccctgaagtttactggaagtcggtgcttcctactacgccaatgccaaaagccatcactgatatcctttactctgattgggtggaagagaaaagcagctcagtgcatgttggaggtggaggcgtgaacgtgcatacaggaaaaggaggtggcagtggcaccactgtcaacgttggtggaaaaggaggcggaggcgtaaacgtgcatgcaggccacaagggaaagccagtgcatgtttcagttggctcaaagtctccatttgattacgtctacgccgccacggaaactcaattacacgatgaccccaacgtggcactcttcttcttggaaaaggacttgcattctggaacaaagttggacttgcacttcaccaggagtacatctaatcaagccacgttcttgtcacgccaagttgcggattcgatacccttttcatccaacaaggtggactttatattcaacaagttttctgtcaaacccgggtcagaggaggctcagatcatgaagaatactattagtgagtgtgaagagggtggaatcaaaggagaggaaaagtactgtgccacttcgcttgaatccatggttgatttcagcacttccaagcttggaaataatgttgaggttgtgtccacagaagtggacaaggaaacgggattgcagaaatacaccgtagcaccgggagtgaagaagttatcaggggacaaggctgttgtgtgccataagcagaactacccttatgctgttttttactgtcacaaaaccgagaccaccagagcttactctgtgcctttggagggtactaatggggttagggttaaagcggtagcagtgtgccacactgacacatcagaatggaaccctaaacatttggcctttcaggtgctcaaagttaagccaggaactattcctgtctgccacttccttcctgaggatcatgttgtttgggttcccaagtagatttgcattcaagtcctttttccatatatgtccttgaataactagcttcaatagcatcagctacagaactcgatgcatgtatttgctcgtactatatagttctctagatatgtatacttttttgctgtttatttagatgctatgtgtggcttcctatgtataaaccatgatgcattaattatatgcgacttatgtgtttgaatagtaaatcgttatatatagatgt

SEQ ID NO: 128761 - DNA, 701 bp, Glycine max
  Clone ID: PAT_MRT3847_87277C.1
tttcccgtaaaacccgggtcagaggaggcccagatcatgaagaatactctcagtcagcgcgtccggggtggcatcaaaggagaggaaaagtactgtgccacttcgcttgaatccatgattgatttcagcacttccaagcttggaaaaaatgttgaggttgtgtccacggaagtagtggaggacaaggaaacgggattgcagaaatacaccgtagcaccgggagtgaacaagttatcaggggacaaggctgttgtgtgccacaagcagaactacccttatgctgttttttactgtcacaaaactgagaccacaagagcttactctgtgcctttggagggtgctaatggggttagggttaaagcggtagcagtgtgccacactcacacgtcggaatggaaccctaaacatttggcctttcaagtgctcaaagttaagccaggaaccgttcctgtctgccacttcctacctgaggatcatgttgtttgggttcccaagtagatttgctttaatttcaagtccttctttcctgttcttgaataacttagcttcagtagcactacagaactctatatatatgcatgtatttgcactgtgtagttctctagatattaataattttttgctgtttatttagatgctatgcgtggcttcttatgtataaactatgatgcattatatgacttattgtgtgtttgaatagt

SEQ ID NO: 128762 - DNA, 376 bp, Glycine max
  Clone ID: PAT_MRT3847_87278C.1
aaaggggtacaccttatgcgcatcacacttatgaggatgagcggcgggctaaattagctctttggaacgctgtcattttttacaccaccattgtcactaaaatcacatgtgagcggaccatgctatctcgggcatattatttgctggcaggggtagaaaggacggcagaaatgtcctacacataacgccagagcgaagggtattttacgtgcgaaccacaatgctcaccactggcgcgcagtgggataaatgatgccgaaaactttgcaaggcaaagaagtgggtttctaacgaagttgatgccgtaggcgacgaaatgctgcttattagcacttatgcactcttgggcactctggggatgccaaagtggagttga

SEQ ID NO: 128763 - DNA, 260 bp, Glycine max
  Clone ID: PAT_MRT3847_87279C.1
ggattccaacgtttttttttttatgtgatcaagagcatatgtaatttactcttggttttgtagttgattttttattattaccttaatacagataatggtcataaagattttattgtagattgttgcagtttctcttgtccacaaacaaagctatataaaggacatgttttatttatacaaaatatagtaatatacagtggctctatttttaataattggtttggggggacaccccgggggttccaaactttaattcgcgt

SEQ ID NO: 128764 - DNA, 306 bp, Glycine max
  Clone ID: PAT_MRT3847_8727C.1
caatttatatatgaacattttatccttcttatggctaaaaggcgccggaggggaattcccctttgcaatcctaattaaacaatcttagcttgtacgatagacctgatatggggctaattcaacttaaaagtatattgaacacttttggcccctgacctacacaaacgtccacctttagaacttcattgtagcagttctcacacaaaacgcaagggcttttaatatgtcaaaggaggaaaggggtaatctggttatttttatgaaatgaaaccaaatcccacaaacatgtgggttgggttttttggt

SEQ ID NO: 128765 - DNA, 517 bp, Glycine max
  Clone ID: PAT_MRT3847_87280C.1
gggccccaaaaaaattttaaataaaacattaacaaaagcgggccaacagggattgggaaattggaaaacccaaaaggaaaccaggggcaaaacttcactatttaagctttttgggggttccaaacccgggttaaaaaccaaaaaataaaaatttaggggccgggccccaaatccttattccaaaaaaggggggcatgggtttaaggcttaaaatttttggcacaggggaccccggggaaccacaaaggtttcccaaaaaaaaaaacccccggattaaaaaaaagggttttttaaaaaaacaacacccttaccccttagttccaaaaaaaagagcccctcaaaaaacccttcaaagcaaaagccaaaaccggggaaaaatggggcccaacccatggcccttttaaggggggaacccccccccaaacacccaaaagaaaaagccccttaaaaaaaaaaacttggggcccttgaggggggcccaaagggaatccagggggggggaccccctgaaaggggg

SEQ ID NO: 128766 - DNA, 371 bp, Glycine max
  Clone ID: PAT_MRT3847_87281C.1
gaggaggaggggttggataattttaatctaaggaaaaaacccgcgcaagggatatttaattaaaaaatattggatacaaaaaaagattttttattttactaacaagataattttttaggagaattttttatttactaaaccctggaaggtccaacaaaatatggtcaactccttttaacttggcaggctataaagcacaacaggggttactttggaaaacaaaaagctcaagcaactctggggggggggacccgaacttaagcattctttaattcaacaggagggaccgggcggataaaaggggggggggacttctttttaaatcacgaaaaagggctttttcattcaaaacatttttttccccaaaaaga

SEQ ID NO: 128767 - DNA, 260 bp, Glycine max
  Clone ID: PAT_MRT3847_87282C.1
gggagacactgctgaaaaatcgtgatgaacagcacaagatacttgacaatcacacattaatagcacagaaggcacacgactgcacaaagagcggaatggataaggaccaattaataggttgaaccaagggctaacatggagcttcaaacaaacatttgaaaagtgcatacggccaaagataggtcgagatgaggaactgactgcactatcagcaagaagaccaagtagagtcacaggccaggtagtcacgtcagtaaaaa

SEQ ID NO: 128768 - DNA, 1542 bp, Glycine max
  Clone ID: PAT_MRT3847_87283C.1
aaacaagaaagaaagtgatactttaataattatcagtaaaattaaaaaaaaataagcacaaaacattttctaacaataaaaaacgtttatgttcaatactttctcaaaagaatcatatatgcatcaaacagttacagccaatgcccgtcgtcgtaaccaccctttattcttctgcttcctttgtttggcacgtccaaaggacgtcctgcaacttacgctccaagaaggatgcgactgatttttctcattttcaggcaatgccacgtacttcttccaatcctcaagcaaaattttgagatcattgactttgttatctaaaccaacacaacaattggcatgcattgttgagaccttgttgaagtcctttgcatgctgacaaaaccctccaaaataactagtgctaaggaacctaatcttcagcttcatgttggaaatgaaggagttcttttttatcttgttgaggacatcctggtcatgcaactttgggtaggcattcctagagttgaaccaatacttgtagaacgaaatagttcgtttattcgatttcacataattaaagcctccatttggagagttgtttaagtcataggtattgccattgaaaaaatcacatgctatttggaaatctgcatctttgtaaaatagtttgaagggatctctaagccacattatatcagtatccgtgaacacgaagttgtaccccatatcaaggactgtaccaaggaattcaattcttctccacatcatgtgtaggtagtctgcagtcatgaaaaaagcttcaccggtgaaattgtcacctttagtttcaacttggtaacaatgcttgtgcaaagctaggcaacgagcatgtgccttttggtcccaagttattaccaccaagtgattcaaaaacatttttgtctggttccctaggtgaaaactctcaagaaagaggtcaaatatggaacctggctctgcccatgcatcatttagagttgtgattatcactgtcttatccttcatagatgcgtttctaagaacactttgtagcttcggatcatatccagcttttgctgactcatcaatgaagtaatgcgagaagccatggaatccaaagggagaggcagtgttatagagaaacatccacaacacagcaaacccaacaacgaacatggtgaattgcatggcccttctcaccaaaaggtggctgccatcggagctcgacggcttgatgccgtagcctgcggcggtctccacggcggcgccggccgtggtgtccttcatcgattgaatagctagctcaattagggtggcaaaattggtcactatgatttcttgtgaagaagactatatatatatatacacacaaactatgatgtgcctttgaatatcttcgatttcttcaccaacaaaacagcaacatgtatatatgtgtgtgtttggaagtatttacaaaaaattaaggattttccgaagttgttttgtttttcgacaatttttgcagtcacataattttatgaggtgggaggtgattgtggaccccacgcgtccgcggaagatggg

SEQ ID NO: 128769 - DNA, 420 bp, Glycine max
  Clone ID: PAT_MRT3847_87284C.1
actcagtgaggaggattcgtggcgagtagaaaacatctactatgatggagcataagggcttgatgggtgactgggagcgacaggctacgcgagagacaccagactgcaacggcggcgcataaccaagactacggcctggactaccaggagccggcaccacctccactgggtgacccgacagaggccacgacaagatgcttttacagatcacggatagcataagtgagagcccactgtactagagctagacaccaccgtattaaccgtcatgggaggactcctgtgctaagtctaagtgcacgaccgatgggatacaaggaaccgcttgggccttcggtggcatgatcttcgccctcgtttactgcaccgctggcatctcagggggacacataaacccggcggggacatttgggctgattt

SEQ ID NO: 128770 - DNA, 674 bp, Glycine max
  Clone ID: PAT_MRT3847_87285C.1
gtcgcatggcaccgccgtacccgtaagccttggggattcgtctagaagacggcccccgccctttttttttttattttttatttttattttgtttattttgtttgtttattttattttattttattttgtttgtttttgtgtataaaatgcataaaatacattaaatggtgggagggtgggaaaccacaaagaaaaattcaaattgaaccggaagaacatggcaaaaacaaaaaccccaccaaacacaaagcgaaaaacccccaatgtgcctcttgtcaccccttcccttcaagcccacccgccgggggggaaggggggggcgaaagcccaagcatggggggggaccggggccccaaggggggcaacaagggcccccaaaggacccccaccggggacaaaggcccgaacaaaaaaccccaacaaagaaaacagggccaaccccccgggcgggagcccccccccctaaagcccaaaaaaagccccggggccaacaaaaaggcccaaggggccaaacccgcccccaggggaaatggggacacggacccccccggggggcccaccaaaaaaaccaaaacccgcaaaaacccccattaagaaaaccgggggggcccaaaaggcgagggggccccgggcgaggacaaggcttggggagcccaaggagcccaacccacccc

SEQ ID NO: 128771 - DNA, 194 bp, Glycine max
  Clone ID: PAT_MRT3847_87286C.1
ttgtgtttttttttataggtcattaacatattgatcagtgatccaaactgggacataaacattattatgacatcaaacaaacaagcttgaaaaatgaacgtgattattgacttcaaactatcctgcaactctggcagataaacaccaaccgacattttgactgcagattgcatcccatcccgtgaatgaaagga

SEQ ID NO: 128772 - DNA, 1931 bp, Glycine max
  Clone ID: PAT_MRT3847_87287C.1
tattgtccaatactagaatggaatttctacagcgggtgcctgattccaccgtttcaatcttcacaattggaagtacatcacttgctgctttactatatgatgccttggatcattttgatagacgaagtgcctgctgagatgaaaatttgagattgataagatttcctacttagcgaggctgttgaagcatgtgttgatgctgcaggtcatgaatttgatcttgcttgttgaaaaactctcctaagcatagccagttatgcgtctcccttttgtagttgactttgaaggcaattttcaacgtgaggctatccaagagatgtgtaaaattctgcgggtcttgaatgcagtgcgcagccctgagattggcgttcctcttagtattcagcaatacaagttgcttacaccatctgttctgattggtcgcctgattaatgctcaccaacatctgcttgcactgaaaatatcagaatatcttggaatgaatcaagaggtggtgataatgcactgggcatgttcaaagataactgcttcactggcaattcctgatgcgactcttctggagattctgctggataagttaaaactgtgcaaaggcatatcctatgcagcagttgctgctcatgcagacaaaaatggccgacgaaagttatctgccttgcttgttgaacatgagcctcgttcatcgaaacaggttcctctcctgttaagcattggagaagaagatatagccttgatgaaggcaaccgaatgtggtgatacagatcttgtttaccttgtactttttcatatttggcaaaagaggcagccattggagttctttggcaccatacaggccagaccattggcacgggacttatttataacttatgcacggttttataaacatgaatttttgaaggacttcttcttatcaactgggcaactgcaagatgtggcatttcttctgtggaaagaatcctgggaacttgggaaaaaccccatggcaagcaaaggatctccacttcatggtcctcgaataaaacttattgagaaggcacatggtctttttgctgaaaccaaggagcatacctttgaatcaaaggcagctgaagagcatgcaaaactgttaagaattcagcatgaacttgaagtgactacaaagcaagccatttttgtggattctagtataagtgatacaatccgtacttgtattgtcttgggaaataatcgagctgcaatgaaagtgaaaacggaatttaaggtgtctgagaagagatggtattggcttaaagtttttgcattagctacaatcaaggattgggttgccctagagaaattttcaaaggagaagaaacctccaattggttataggccatttgtggaggcatgcattgaagcagacgaaaagggagaagctattaaatatatcccaaaacttgcagaccctcgagaaagagctgagtcatatgctcgaattggtatggccaaggaagctgccgatgctgcttcacaggcaaaagatggtgaattacttggtcggttgaaattgacttttgcacaaaatgcagcagcttcatcaatatttgatactcttcgagatcggttgtctttccaaggtgcttaattttctatccagagctttctgctcccttgttcctgttccaaggtgcttattattttccttttggaatattagttgtgtatattgtgaaaaaaaatgtatcttatctgctaatgtctagaggtaaatgtgctcaaatgttgtctttagttgttcccccttagttgttgcgagaggccattttcgtgtcttcctatgtaattgcttgttttatcttcaatgtacctgtataattcaatttgccaatgagtagagaccacagccgagtttgttaattgtattacacattgatagattcttatttaattgattttgttcgtgtgaccaaaag

SEQ ID NO: 128773 - DNA, 324 bp, Glycine max
  Clone ID: PAT_MRT3847_87288C.1
tttttgctataacactcttattgagatgctcattgcgttttctttgaagaattactgcccccggcctaagctccaagtgtgtttggacactccttaaaaaattttgttacattgtgacagtttggagaagataacttaattagaggacatgaggctgttagaaccttaattttgaggctctaaaccgaaaagctctgtcgctagagctaccgtaaccagatctgctggtgttgaaaaaacaattgcatctcctttaccaagagcggtaccaaatcgtgagttgctcactagagaccgaaagctaacggctaaagttatgcgggc

SEQ ID NO: 128774 - DNA, 284 bp, Glycine max
  Clone ID: PAT_MRT3847_87289C.1
atgcacattctcgaatctttctcgagtacggctgcgagaagacgacagaagggcatcaccagggtgacaagagataccagtccatgcacaaggagactcatcaaactattgccaaaatgggatagagaatgaaaatcgcctaaaaagttaaagtttacaacttcaaactctatttctcatatgaaaaggcatttcacaaaaatttggatagagaaacaaaatcccaaaatgggaagtgaaaggtgaaaatttgaaaactacccagaatgcaaatattcccccca

SEQ ID NO: 128775 - DNA, 424 bp, Glycine max
  Clone ID: PAT_MRT3847_8728C.1
ggcttggaactttgggctgatttatgtgcttggcccggcggaaacctaccggtccgcggcaagaggttaaccacccaaacccgttcatatagggaccctcaacccaagacccccgcacatacctgcgcacgaacttcttccaccattagtagccgaagtaactcgtcccctccccctttacctccctcacaacaactcctgggaggccccgacggagacccaggcgggttcggacatagccggctgccccagactttgggcagaacacccataccaccacccacacacgaaacgcaaggatacttcgttacctaagacacgccgtaaccgcacgttccgaacgggtccccatacaaaaaaaaaaaacaacccaccaacaaaaaaaccaaaaacaaaacaaaaaaaaaaagggtggttttcccca

SEQ ID NO: 128776 - DNA, 236 bp, Glycine max
  Clone ID: PAT_MRT3847_87290C.1
cgcagtgaaagtatacggtctccactgtgcttccatcaagcgggtgctggtttgtctggttgagaaggatgtcgaatttgatgttgttcctgatgatgtctctaagggggagcagatgtgatctgagtacttcaaactatagtcatttggagttgtcctgtcatcaatgatggagattatatcttatatgaatctcgtgctataatgatgtattatgctgataaatatagatctca

SEQ ID NO: 128777 - DNA, 300 bp, Glycine max
  Clone ID: PAT_MRT3847_87291C.1
ggcacacgcgagcataacctacacgtaaactaggaacatctctatgaaaacgcttgaacttgaaccataagcagctcacaagccactgaacagactgataacgatcttacaacatatgagctctccaaaggaacattgtctatcgtgaagctactccgcaagataaatccgccagattgaacctatattgggaaaaccacaacatttatggatttgacaccatatcatactaactcgttctatctccaaactactaccttcatgagaaacatcttctatcaaagtggactacaggtaacc

SEQ ID NO: 128778 - DNA, 177 bp, Glycine max
  Clone ID: PAT_MRT3847_87292C.1
gcgacaaaagcaatacactcaaagatctagaataatttaacgatgcctcactataacgataaatgcggcaatacccgcctctctgtactgcacttatctataacgactcgttccaaatctctggaacgtgccttcagcagatatggaagagatcggggtgacgatataaaacaatga

SEQ ID NO: 128779 - DNA, 385 bp, Glycine max
  Clone ID: PAT_MRT3847_87293C.1
cgacccacgcgtccgctaatttttggaagctatatctggactggggaccggatgagtataacgtattactgctgctttacattataacatgaaggagataggactgctcttgacttccgctgaaatagcccagcttccgatacatccaccggcatcggtaaacggccgtgaactagtgcggcggcaccggcaacgctgcgtatattggtgaaagaaggcattatagcgccggggactgttgctcgataccacgcacacccgatggggcccaaccgaagctgttaagtacataaccaaacgatcgatgcaccggactcccactcgtgaccgttggtgcgacgcttccagaacccgcaatcctacgagcgcttccggatagtagctg

SEQ ID NO: 128780 - DNA, 225 bp, Glycine max
  Clone ID: PAT_MRT3847_87294C.1
cgtagcaaaattaattataatatttttcagtgaaaaacgcacacatcactaattaatgtcctatacctataatattacaacaatcaacagtgcaattcctcagaaatttgatatgttagaacgcatcataatagtaaaatgccttacctacataacttcctcaccagatgtcaaacgtaagaaattaacattatacttcttgtagtcccatataatttaactaac

SEQ ID NO: 128781 - DNA, 169 bp, Glycine max
  Clone ID: PAT_MRT3847_87295C.1
gtacaattcaaaaaaatgcttccaatggctggggctttttagctggggtaagatgccccataaaaactgtgacttgaatcgttcttttgcaggggaaaggcaacataattggcccttggtatgaacttctacaaaagaatcattgcccttcaagcttgaagacatcatc

SEQ ID NO: 128782 - DNA, 402 bp, Glycine max
  Clone ID: PAT_MRT3847_87296C.1
aacggggggccaaaacagggcaggccttggcagcccaaaattaaacaaaaaattaacgggggggtccccttccccaagggggaaaaaaacgcgggttaaaaaacaggggaagtcccggcccccgttgataaacgggacagggggagcagtaccccaaaaacccgccccggcccaaaacccacagggaaaaagggttttttctgggcccaatttttgggggcaaattaaaaaaccccccaaaaaaaaaaaagggggggggggggggcccccttttattactactagggaccctccctttatttttttcccccccaaaaaaacccggaggaagggcttgcccattggcccgggatcttgaaaaaacgaggggaaaaagggcctggccaaaaaaggaagggattt

SEQ ID NO: 128783 - DNA, 143 bp, Glycine max
  Clone ID: PAT_MRT3847_87297C.1
gttctgttttattacctgactgtagtatttatcagtttgtgtaatcactaggtctgctagtgagccagctacgaattgcatttctaaagtatgtactgttatagtacctctggtactcattaatgaatatattatatttttgg

SEQ ID NO: 128784 - DNA, 278 bp, Glycine max
  Clone ID: PAT_MRT3847_87298C.1
aaatattatgttttaaaaaaaaataaataataaaaaaattagaaaattaaagacaaagaaaaacgttatgaataaatacaaagaactagaaccaaagcaaaataaaaagaaaaagaaacagaaaccggatcagaaaaacaactaaagaaaaacacaaagaggacaagaaagctgccagctggacaacggtaaaccctgcaggagccctagatgataagcaaagacccggggaaacaaacccgatgactaaaggacgaaaccatcacaccaacagaaac

SEQ ID NO: 128785 - DNA, 477 bp, Glycine max
  Clone ID: PAT_MRT3847_87299C.1
gtctatcgctagtaatgtgccagatcccgtacaccgcaggtggagcgcactagcgcgcggctacgccagccgactacaatgctgtaggcgtggcagcccgcccctatatctgcgtctgcgagcggctagacatgtaacgtaaggaagtggcacgtctctgctacagatgccataaagttagatattattccagcacaaagctgcgctaagccagtcttaacttaagggctcagcttgagctaccgataacgtgatttgattggaagggccaagaagttggataaagctgggccttggcttgcccaaagcgccatgctaagccatgttgaaggcgccaccgtagtagtgcgactggtaagatatgagcaatagagtaatgatgggtagctcgcggtagcaacaacgtaggaaaggcgttgccatgattatggggatggcagagtcaggaagcaggatcgaatagcgagggaacagctg

SEQ ID NO: 128786 - DNA, 508 bp, Glycine max
  Clone ID: PAT_MRT3847_8729C.1
gtggtagtaaatgatctctgactctgggaacccaccagccatagcacaatgctcttgttaatccgtcaaacgtgacatacttctctcccgagatgttgaatacttcctggctggccttctcattaccaagaacttggataaaagctgtcgccaaatccttaacaatgaccaagttgggtaatctgtagtcctgagctgggaataggaattgggcgtccggctttcattctataaagaacacctcggcatcagggtgtgggcccccacgtatgattcaatttgcagtccagccgaatttggagaagttgggctccgacacccagaataacttgctcgtgttttaggggactaaactagaatacattgtatgtgtatatagtagtttattgttatatataaaataagaattctattaaaaaaaaaaaaaaaggccggccgcaaattcgacgcttgcggacgcgtgcatattattccggaacgcctatagtgatggtaaacgatccggctc

SEQ ID NO: 128787 - DNA, 759 bp, Glycine max
  Clone ID: PAT_MRT3847_872C.1
attcccgggtacgacccacgcgtccggtgttgtttgtctcagatcttttaacagtcgacacaacaccattgcctctctctcgctggcccgtacaaaatgtggaccaacctagccaagcgagcttcctcaaccttaaggaacaccttccgcgtttcttctttatatccgagattctgtaagccccaaacaagtaaaacgataaacccatacccatttcaggctttccctaaagccggggtgagccggtccaagtttcttttttacgaaggcttttctagcgttgccgaggctattgagtccacggacaccgaagatgactacgacgaggttcagaaattgttgcagcaaatggcgaaggcagaacacaaagtggacaacagcagcagcagtagcagctacaagtacaagttgcttaagaggaggcagataaaatcggagacggaggcgtgggcagaagccgcaagggagtatgaggagctcttggaggacatgcgcgagcagaagcttgcgcccaatttgccttacatgaagtcactcttcttgggttggtttgagcccttaaggaatgcaattctcgctgatcaagagctttgcaaggatagcaagtgcaggatgagccatgctccttatttcaatgacttgcccgccgacatgatggctgttgtcaccatgcacaagttgatggccttgttgatgacaaatactaatggggttggcaccgctccggtcattcaagccgcttgtcaaataggtgaagct

SEQ ID NO: 128788 - DNA, 371 bp, Glycine max
  Clone ID: PAT_MRT3847_87300C.1
acaaaattttttattctcattcttaaacacatggaattttgagaggcatcaggaatattttcccccctttcaccaaattaaaaactaatgggacagaattctctataaacaaaaatcaaaggattgtaaaaataccttagcatcacaaaagttaagaattccgaaagttccttctgaaaacccctcaaggatgctccgagcacccttgctgaaatactcgtggaactggtaattgtaagcatgaaagaaatcttttgagattcccgcatgaacacagttgtttttaaaaaacatgcttacagcatttgttatggcacctttcaagcaatacaactctgtattcatgggcctgtcaaaaatgataatagaat

SEQ ID NO: 128789 - DNA, 536 bp, Glycine max
  Clone ID: PAT_MRT3847_87301C.1
aaaaagaaccaatgcctcattgacaattatgatcataaatcatttattattagcatttcttcatggaaacctaaacaacgtaattttcagtctgccagtctgccaccttcaacgagtataatgtaaaataaaagagccaacacaatcggtccatcgttctttacatgcagcctaattgtacttacagcagctcccactcagtttcagaagcacgctgaacttgcacattcttcgagtccatgtacgttctggagataaatggcaatgaagtttgtgaaaatccttgttttggctcaatatcggtgtctccataccatattgctagctgttcatactcctttgataacctcttctttgaagaaaatgcatccagaattcttttcttatatgatctaagcttttgggctctacaagagactgcatagagttcactatcgttcacaaatacacagttttcctcaagctttggatcattaatcaaatcaatgtctttcaaactggatttaacagagctgaacagtgattatcatttgatt

SEQ ID NO: 128790 - DNA, 218 bp, Glycine max
  unsure (1)..(218): unsure at all n locations
  Clone ID: PAT_MRT3847_87302C.1
gaaaaaagggacgaacgcacgcgtnccacgtgtgagaaaacaacatcagaagggtgtttcttattgcagtccctcaataaatgggggggggtttattgcatatacctaaaaaagaaaagcgtgctggctatatgatgcaagcaaacgtacgcgtgcattctacgtctatagcaacactcttgggttggcctatgataagccagtggtcgttagatatg

SEQ ID NO: 128791 - DNA, 324 bp, Glycine max
  Clone ID: PAT_MRT3847_87303C.1
gatgatgaataatctttgcaggacatattaaataatcaatcatgcaaggagaatctgacatgatacgatatatactatgctaaaattgtgcatatgacgcgtaaatgtgaatgtggggcagggtgataaacatgaaaagagaagcaacaacactgaagcgaatgagaaattcaaatatcacggactagaatatctattcactctaaacataaatgtcacggcctcttttgcactcaggacgagagatatgaggatagcgtctagcgacaacgcagaacatgtagatagagtatttctggcgcacccaaacgaacctacaccact

SEQ ID NO: 128792 - DNA, 237 bp, Glycine max
  Clone ID: PAT_MRT3847_87304C.1
agcgaaataagcacacaacagttgaagtgaatggcataaaaatgcatgttgcaaaaaaaggagagggtccagtggtgttgttccttcacggcttcccggagctcttgtacttatggggccatcaaattctttcttttagcttccttggctaacgcgccggcgcttccgatcttcgtgggtaccgggacacccaaacaccacctttaatcaacaactaccactggttccacataaggg

SEQ ID NO: 128793 - DNA, 432 bp, Glycine max
  Clone ID: PAT_MRT3847_87305C.1
cacgtagctttcatggatgaacaaccacacgggcatcagctgcagtagaagagactatgtgataacatgtgcagctggtgactcacacacagaggtgattgggcttgctgcaaactcagggtgtgagacgagcaccttcatgatgaggctgactagtgtgtttgaaagagcatgaataccaccgatgggtgttttccctgactcaaacacactcatgagcgtcaccaccacgtgatatatgcgttggatgattaccactctactgataaaactggtgaaaaggagaatggtgtcactgcccttgatcctataaccaatgagtgagctcttatgtatgaacaagattaagctctcacggatggaactgctgtggaataaccaatctactaccatgttactggtgttctggatccccctcagcgtattaaaccc

SEQ ID NO: 128794 - DNA, 181 bp, Glycine max
  Clone ID: PAT_MRT3847_87306C.1
agacattatcctctatctatcttaacacacagttcacaatactcataatgagattgaatgtgaatctttaacatttaagtatgtaaaattctatgtagcttcttttattattgagtgcaacatatgtttctgcttttttttaataagttttggtatgatttgaaagagatattattggtcg

SEQ ID NO: 128795 - DNA, 331 bp, Glycine max
  Clone ID: PAT_MRT3847_87307C.1
ggctcgagtattcattcaccgattaagatggagaagagatcagcatgcctgacgctgaaacttgcgtccatcacaccatggggtgcagatctgcaggagagccttgacgagcgaatggcgctaccagaggatgtggagacgcacatagacaagcatacaggcgagattctgggactccattctgtgagtaatgctttgagcagcacagcgtgtgaggatgaacatgacttgtgccttaaaagacttaatgaatatcaaacgcagttccgaacacttgatatggaaacgactgatcgcgttcagaaggtcttgcattgcgtgaatgaggtgc

SEQ ID NO: 128796 - DNA, 458 bp, Glycine max
  Clone ID: PAT_MRT3847_87308C.1
cttgactgtaactctctgatttttttaattttatttcttgattttttttaaaaataatttggataaatgttttttggttagatttcagtactacccatgatgttgtctttcattgtttgttgtaactctctttgattaacattaaaattttgatatttttttgtcgtatttttttaatgtcttgtgtgtatttttatatgtataagtacatgttttctgggtagttttcgcttttcagtactataaatgatgttgttgcctttctatgtgattaacaacaaaaatttgatttaatattaattttttgggtgtgtttttgcaggaacaaagcagctattgtgaaagttgggtctgttgagaagatgctcaagttgattgaatctccagatggtctagattcttcggtttctgaagcaattgttgcaaatttccttggattaagtgctttggattcgaat

SEQ ID NO: 128797 - DNA, 467 bp, Glycine max
  Clone ID: PAT_MRT3847_87309C.1
tggtagttgcatatataaaataccggattccaataaaacaaagttgcattttgttgccacccttggttcacaaaattgtcaaggtgtttctttttgtgcaaaatccttgattccggggaaagggaatacggaaaatggcgaagatatcatttgtttttatgctgttggctctgccattatgtttagttttgggccaagaagattgggaggatcttctgggccaaggaggattctctcaagatgctttgaacaaggcccaggcagctttaggtgctgcttctgcccaagcagctgtcaatgattattttggacttgacgactcttctccggaagccgtgcatggagaacaatcattcttggctgactttttagacgccgacaatagtacaagtaacgacaaaggagctttacccacagggttaacaacagtagaagccccagaagattcacctgttgacgacgttgat

SEQ ID NO: 128798 - DNA, 216 bp, Glycine max
  Clone ID: PAT_MRT3847_8730C.1
tcgcgatctacggacgcgtgggggattctacccgccgctcgatgggaattgcgcttcaaggcgtctcgtagggctaatccgcctcacgagggtcaccaacggcacgtgcctttggggggccaacgccttatgatactcctaccctgacatacagtgggtgaccacaagcctaagagaacgtgtatcacctaagtggcaataaaacataatttcaac

SEQ ID NO: 128799 - DNA, 304 bp, Glycine max
  Clone ID: PAT_MRT3847_87310C.1
ccttcggacattatacagggccaggggttcttgtattggaaaggattaatgcgatcacgagctcctatccatagagcatcactggattctgtatcggtgtcgaaagccttttaacaaacggatgatgcaggggacaccaccacttcccagaacttagaataacacaaggccacacctcaccctggaaaaattgggcccagacgtaacgggggaattgcatattttgactaagcctatggggctgctttcagtcaaaacaagagacatagcccaactgctgctgtcgatcatgctgaaattgagg

SEQ ID NO: 128800 - DNA, 475 bp, Glycine max
  Clone ID: PAT_MRT3847_87311C.1
cttaaaccgttggtttgtctttatatctttcgcgttctcggctcgtgaaatccatggagcaggacatcaacccgcgcatattgcaccatgcatgccccgcttgttggatagctctctcacagccttgcgctttctgttttatccaccactgcagcacatcataacacctactactccccacatcacctatgctgccaagtatctcccaccacggtaacatcgcattatctcgctgctcacacaaaacaagggcctacatcgaatgggcatgagagctgtgcaacctaacatactagtcccacagccactgcctctgccccctacgatggaaacagcgaatcatcacccacacgtcatcttgatccaacaccctacgctatattcacgccctacacgccactactcagatagaaactttgagaagatggcctacaacgacagcgcgtgtgagactaccatgaactccagatgtccc

SEQ ID NO: 128801 - DNA, 1118 bp, Glycine max
  Clone ID: PAT_MRT3847_87312C.1
gcgattactactttctctctctttgtaacttgtaagcatggagtcctcaaagatctatgcttacctcttcctttgcatgctcttcctctcctccgccactcccattctcggttgtggctactgtggcaaaccccccaaaaagcacaagcctggtaaaacaccaaagacacccacagtacccgttgttaagccaccagtcacaatccctcccattgttaatccaccagtcacaatccctcccattgttaatccaccagtgacagttccacccgttgtgcttccaccaatagtgaagcccccgggttttctccctccaattcttaacccaccaagtacaccaacaccgtcgccggggaagggagggaacactccatgtccaccaccaaagtctcctgcacaggctacatgccccattgacacgctcaaactaggtgcttgtgtggatcttcttggtggcttggttcacattggcttgggagaccctgttgcgaaccagtgctgccccgtgcttcaaggcctggttgagcttgaagctgcggtgtgtctttgcaccactcttaagctgaagcttctcaacctcaacatttatgtcccacttgcccttcagcttcttgtgggcttgtggcaagtctcctcctcctggctacacctgctccctctaaaccagtgaaaggattgaggaaaatatggtcaaaatcgacatgagaggatgtcgagccacactatctctctttctgtcctgattggaactgctgttgtttgttttgctattatttgaaaaaccaatttgtttttaattgagattgttgcatgtatgttttaatcctaggcaagtagcagcaaagatgcttctctgtgacatgttcaattattaatttatatgaattgcgctttaatttgttgaatatatcaggttcgtacgtgtttctctagttggaaagcatttgcttcaattgtggatctgttgctcaatctcgaatctctataaaggaaaaaaaaaattttaaccatgaactttgtgggtattgaaatcatttgtagtttttgagaaattaataaatattttacttattagggatgtttcaactttacaggtgagattatcgcttttttctttc

SEQ ID NO: 128802 - DNA, 1816 bp, Glycine max
  unsure (1)..(1816): unsure at all n locations
  Clone ID: PAT_MRT3847_87313C.1
tgcgcctccggtaccgaatcggggttcgacccacgcgtacgccttcgtctctctttgtaacttgtaagcatggagtcctcaaagatctatgcttacctcttcctttgcatgctcttcctctcctccgccactcccattctcggttgtggctactgtggcaaaccccccaaaaagcacaagcctggtaaaacaccaaagacacccacagtacccgttgttaagccaccagtcacaatccctcccattgttaagccaccagtcacaatccctcccattgttaatccaccagtcacaatccctcccattgttaatccaccagtgacagttccacccgttgtgcttccaccaatagtgaagcccccgggttttctccctccaattcttaacccaccaagtacaccaacaccgtcgccggggaagggagggaacactccatgtccaccaccaaagtctcctgcacaggctacatgccccattgacacgctcaaactaggtgcttgtgtggatcttcttggtggcttggttcacattggcttgggagaccctgttgcgaaccagtgctgccccgtgcttcaaggcctggttgagcttgaagctgcggtgtgtctttgcaccactctaagctgaagcttctcaacctcaacatttatgtcccacttgcccttcagcttcttgtggcttgtggcaagtctcctcctcctggttacacctgctccctctaaaccagtgaaaggattgaggaaaatatggtcaaaatcgacatgagaggatgtcgagccacactatctctcttctgtcctgattggaactgctgttgtttgttttgctattatttgaaaaaccaatttgtttttaattgagattgttgcatgtatgttttaatcctaggcaagtagcagcaaagatgcttctctgtgacatgttcaattattaatttatatgaattgcgctttaatttgttgaataaaaaaaaaaaaaaaaaaaaaaaaattcctgcggccgcgaattcttctggtgccgcgcggccacaggaatttttttttttttttttttttctggcaaaaagatagccattagctcagggccaatgttaagcaccttatgtctagccatgccttacattcaaacagttgactaattcacattaaatagggtatttgagtcaagactttttggctcaatagtattgcacaaaacctgacagtcagaattcatatgcacatcaagaaaatgttagcacacactctttgtctctaggaatcagcagaagcaaaaatctgtccagcttttttttatgttttcaaccttttgccctccccagcttgatctgaatttgggtataaaaaacaaatattgttgctataacgaatcctttaatgtgctttacatttcaaacccaagaacatggctggagaagttccaagccacccatgcaagcactatgtgcaaaaaatttacttaactacagaatttcgttggtttaataagaagcctacaaggttcttgaagatgctaaaaagtagtctcggatagttctttttagggaggatggagggttcaatacagatgaggggctcttcaaagcagattctggagttttttcagaggatgcatttagatctaatcctgaagaaagttggttgccttcagatatattcattttaggtggtgtgattggagtgggtgacgtaattgggtgtagtgcatcgtatggtaagaaagcatcttcatttgtcttagagtacctttttccattgtttgaaagcattttgcactctacactaggncttgtataactctcctcggatggcagatg

SEQ ID NO: 128803 - DNA, 121 bp, Glycine max
  Clone ID: PAT_MRT3847_87314C.1
gctcaatgtacagcaggaattctttgactcctgtcatgtgtcgggaacagccgctatctatgtgccaatcttgcttagctgatgctctaagtgaagtatgaacaacagcactgacaggccg

SEQ ID NO: 128804 - DNA, 1300 bp, Glycine max
  Clone ID: PAT_MRT3847_87315C.1
tgccttttgagtgtagctagccccatcttcacgtgatctgctcttaacccttttgttttcttctcctcgtttctatatcctattcctatgtgggcagggtcccccatcttcctccacctgcatctccactatattacaattactactttctctctctttgtaacttgtaagcatggagtcctcaaagatctatgcttacctcttcctttgcatgctcttcctctcctccgccactcccattctcggttgtggctactgtggcaaaccccccaaaaagcacaagcctggtaaaacaccaaagacacccacagtacccgttgttaagccaccagtcacaatccctcccattgttaagccaccagtcacaatccctcccattgttaatccaccagtcacaatccctcccattgttaatccaccagtcacaatccctcccattgttaatccaccagtcacaatccctcccattgttaatccaccagtgacagttccacccgttgtgcttccaccaatagtgaagcccccgggttttctccctccaattcttaacccaccaagtacaccaacaccgtcgccggggaagggagggaacactccatgtccaccaccaaagtctcctgcacaggctacatgccccattgacacgctcaaactaggtgcttgtgtggatcttcttggtggcttggttcacattggcttgggagaccctgttgcgaaccagtgctgccccgtgcttcaaggcctggttgagcttgaagctgcggtgtgtctttgcaccactcttaagctgaagcttctcaacctcaacatttatgtcccacttgcccttcagcttcttgtggcttgtggcaagtctcctcctcctggttacacctgctccctctaaaccagtgaaaggattgaggaaaatatggtcaaaatcgacatgagaggatgtcgagccacactatctctcttctgtcctgattggaactgctgttgtttgttttgctattatttgaaaaaccaatttgtttttaattgagattgttgcatgtatgttttaatcctaggcaagtagcagcaaagatgcttctctgtgacatgttcaattattaatttatatgaattgcgctttaatttgttgaatatatcaggttcgtacgtgtttctctagttgtatagcatttgcttcaattgtggatctgttgctcaatctcgaatctctataaaggaaagaaaaaatcttaaccatgaactttgtgggtattgaaatcatttgtagtttttgagaaattaataaatattttacttattaggg

SEQ ID NO: 128805 - DNA, 1490 bp, Glycine max
  Clone ID: PAT_MRT3847_87316C.1
gggcgaaggcaagatgaagggtacagtttttggttggtttaaccggttaagcaacctaagcctgtactttcacgggccaggctcccttttctttcacctcggaggcacacacacacacacacacacttaatctggaaccatatataaaatagaggttaagcaacaagcacagtaactggaacgggttaagtaagtttgtgctgcgagagagaggggttccgttctgggatatggtgtaaactaaaattctgaatgtgtacacttgtaaggtgtgccagcttgcaaaacttggcatctgcctttttgagtgtagctagccccatcttcacgtgatctgctcttaaccccttttgttttcttctcctcgtttctattcttattcctatatatgcaccccatcctcagtctccattctcacacttactagtagtaagcatggagtcctcaaagatctatgcttacctcttcctctgcatgatctttctctcttccgccactcccattctcggttgtggctactgtggcaaaccccccaaaaagcacaagcctggtaaaacaccaaagacacccaaaacacccgttgttaagccaccagtcaccatccctcccattaatgttcctcccgttgttcttccaccaatagtgaagcccccaggtattctccctccaattccaattattaacccaccaaccacaccagggaagggagggaacactccatgcccaccaccaaagtctcctgcgcaggctacgtgccccattgacacgctcaaacttggtgcctgtgtggatcttcttggagggttggttcacattggtttgggtgaccctgttgcgaaccagtgctgccccgtgcttcaagggcttgttgaggttgaagctgcggtgtgtctttgcaccactcttaaactgaagcttctcaacctcaacatttatgtcccacttgcccttcagctccttgtgacttgtggcaagtctcctcctcctggttacacgtgctccctctaaaccaggtggaaaggattgaggaatatatggtcaaaatcgacatgagaggatgtcgagccacactatctctcttctcttctgattggaactgctgttgtttgttttgctattatttgtaaaaccatttgtttttaattgagatcgttgcatgtatggtttaatataatcttaggcaagtagcagcaaagatgcttctctgtgacatgttcaattattaatttatatgaattgcgctttaatttgttgaatatatcagtttcgtgtttctcttgttgtatagcatttacttcaaattgggatctgctgctcaatctcgaatctctataaagaaggaaaaaaaaatattaaccatgttctttgtgggcatggaaacagatcgatcatttgcagtttttgagaaactaataaaaaatatttaccttaggggtgtctcatttttaaaaaaaaaaaaaaaaaaactcgagactagttctctctcgctc

SEQ ID NO: 128806 - DNA, 284 bp, Glycine max
  unsure (1)..(284): unsure at all n locations
  Clone ID: PAT_MRT3847_87317C.1
nnnnnnnnnncacaattttaatngcaatgaatatattgggtgcaaaactaaagtagggggatcaaaaaaaatattcaaattggcataaatgaacttgaacttaacagaccgaaaccttcaaaaaataaaaattttcaagaacattaccattccatgctcctgctataaggcttacaatgagtatgagccacacactcaggttaccatctctattttatgaacaggttagtaaattaagaaagggtggacaccccaattaacaacaacggcttcatcaaaacaaa

SEQ ID NO: 128807 - DNA, 369 bp, Glycine max
  Clone ID: PAT_MRT3847_87318C.1
ttcactaattcattgttacggatgcatctcaataaaagatatgaaaaaggaaaggaacagtaccaacagaacaagagcgatttgtatgcaacttatggatagggtgggatatctggagtagtttggattttactgctgctgatcctcgccgttagtggcttgttaactccaactacgacgtaccgagctacaatatatgaggatctccgggctcagggtcttccgagactgcttcttgctgctggaatagtgaatgactatatgatctctacgagctgtgaaatcgaggagtactttatagaacctatccacgcaaatttccataacgaagtgcactacgactccgatataaacagagttcttggctac

SEQ ID NO: 128808 - DNA, 231 bp, Glycine max
  unsure (1)..(231): unsure at all n locations
  Clone ID: PAT_MRT3847_87319C.1
ggcgagcgacgcgtccgttngctgtactaccgtactctcttctgtttttgctaagcgtaccttccccacctctgcggccaaccttttcaaagtttctgtcctctgtgcttcccgaggtattggccaacctctcttcctttttcttaagaacaacaccctagttactgacctttccttgtaccataatgtcaactccccccgcgtttcccctgattttatccacattaacac

SEQ ID NO: 128809 - DNA, 378 bp, Glycine max
  unsure (1)..(378): unsure at all n locations
  Clone ID: PAT_MRT3847_8731C.1
cccaacccttccaagggtttttggttcaaagttcaaaattggggtgaggttaaaaacatccccgttccggaggaggaaacctggaagattggaatggaatccagacctgtttttgaagttgctgggccattggcaattttggttaaagttaagggacccaagtttaaagagattgttaacattcgcttagaaaaaggaactactcgggttggacaagccctagaagttgatggggaaaaggctgtngttaaagcctttaagggtccatttgggattgacattaaatttacaactgggcaatttactggagaggtgttaaaaactccaagttcattggcaatgcttggccgatttttaaatggttcgggaaaaccaatt

SEQ ID NO: 128810 - DNA, 429 bp, Glycine max
  Clone ID: PAT_MRT3847_87320C.1
gagcaacaagaatcacacacagagcacaaggaatagtggcaattgccacaagatggcacatgcttgtgactgaagcatcttctgaatcaaagcaatgcaaagcgcgggtggcgctagctcgtgctggtgacagtgactctgatgattcctccaacatacacgtgtcagtgaccccaccacaactttcttctttccaaaccagacaaactttagtgacgtatttacaacacaatcacgggggaataacggtgtatgggtactcacttgatcgaggattgcttcatactctgtttgccttcgagttttctctagtgctatggattctgagtaaggttgttgttttgtcctaatcaaatatttcaagtcggaacaaaaggctttaatttccatgaatcaagcagtgtgtatgataaggataccactttctgg

SEQ ID NO: 128811 - DNA, 320 bp, Glycine max
  Clone ID: PAT_MRT3847_87321C.1
gtgatcatgctggcacatactccaggagggaaagagagaacagataatgagtttgaggctctggacgaagggtctggattccaagggttccgagtcctgtgctgagctttcaatagctacgtcatggagtttctgaaaaaggctcaagtcctttggcgcggattcatcaattgcattggagctttgactatgacactctgaatgtggtgctacttacagaagctttcccggagaaaagtaaatttctcttacttcattacgagaagactgatatgcagggtcaatgtatactgccttttatataataacacgtttcatag

SEQ ID NO: 128812 - DNA, 385 bp, Glycine max
  unsure (1)..(385): unsure at all n locations
  Clone ID: PAT_MRT3847_87322C.1
ggccacggcaacagcacctgccacctcatcctttatggggactcgtctcctgaaagctcactccggggctgggcaaatgcacgccccattccgtttcggcaacaaaaaggctcccgcccaaaacaaagcctccacaggatcgggcctaaacaccaacagacccctttggtatactggcaccaaaacacccaaatacctcnattgaactcttgtatgagactactggttctatcctttttgactacatacacccacttagtacctacaattacaacttcactcactaaaccaaaaccttacgaacaacattatctagtacataatctaaaccaggacctaacttacacacatgaaatccacgccatatctatcctacatagacata

SEQ ID NO: 128813 - DNA, 492 bp, Glycine max
  Clone ID: PAT_MRT3847_87323C.1
gcacccgcgcgtgagctcggaattcggctcgagcaggacgcaaaatatttgaataagatggtggtggccatgggtcaatattctaagaaagattgggatattgtggcttatttttccttgtttcctcaatgtggcgagcttgatgctgagagattaattgatctctggaaagcggaaagatttttcgattcttcaagcataggcggtcctgggtgtttgagccagctgggagggatatctatggccctagacgagaagaaagacgactttggccaagtcagaagctgcaaaatgcatcggctaatgcatgacatagcaaaatccaaggtctccaatgaggagaacatcaccaatccaaacagagaccaggttctctccaaagtccagcgagcctcaattgatttgagcaaaattgatttgagcaaaagtcgagttcgtgatcagctttaccaggcaaaacaacttaagagcatttttttcaacaaaagtgag

SEQ ID NO: 128814 - DNA, 429 bp, Glycine max
  Clone ID: PAT_MRT3847_87324C.1
ccacgcgtccgcttaatttctctctgtctcgtttacacatctctccaaccaaagacatatcgattctaagcaaaattaagaatacctatctcaatctcctttcaaactggtcagcgctgaggctgaacacataaccccatcaactgcagccagattatgattcatccgttgtaagcacgacccacgaaacatcccaagtcactgaggctcctgcaccataacagccagcacctgatgttcctgcaacagaacagccccccgctgaggctcctgccccacattcaaccaccgtagcaccataggaagagaccaccgaggcaccaacagaaacagtagaaagacgccttcagaagtggccccaaaggaggctaaacaagtcccagctgagaccgacgaggtggaggcgaaggagacagaggaagagaagcc

SEQ ID NO: 128815 - DNA, 501 bp, Glycine max
  Clone ID: PAT_MRT3847_87325C.1
cacattttcaaaaaactccccttgtcgtgcaaaaaatgccgcctatacgcatacgccgtctcaggctcgactccgattccgacggagaagaacaagacccactccaaccccaatccgagccacaaacccattttccggttgaaatctccgacgacgaggacttcctcgacgtcctcgacagcctccctccgccctctcccgcctgtcctgtcaccgacttcctccgccgccttggactgtcacccaagagggactggctcacttcctgcctcgggaatttccatccttccgttccggcctttgaacacctcgacgtcgccgcaaaagccaaacgctgtttcgagcagtttctctacgccgacatgaatttctgcggaagtggcttactccttcccaacgtaaacgccatgcaccttaacgttctccccggtccctatgtattgcaggttgatgaaataattaatatgacttgtcctctacgaggcagatatgaaaaggcaa

SEQ ID NO: 128816 - DNA, 259 bp, Glycine max
  Clone ID: PAT_MRT3847_87326C.1
ccacgcgtccggggacgcatggctgacaagtccaccatccttgactgccacgagggacctgctctacttgaagtcgttgaccaacgcgcagactcgaactatgccattggaccagcctgtatggctgatctatgccagatgcacgactctgatcaccagcttacgctactgcgccagcaggacgtggatatactggtgttgcaaaccctggaagcgtgaagactattagtatcacatgggctgacacacgttggaaacc

SEQ ID NO: 128817 - DNA, 498 bp, Glycine max
  unsure (1)..(498): unsure at all n locations
  Clone ID: PAT_MRT3847_87327C.1
catggctttaaaaggtttcagaccatgttcaatggaatctagcagctctaagcgattcagaaacctattagtctgtttcattgctgttgtaatggttctgcttggagcatgtttcctcttcacaaaactaaggcagaacaagtttgagaagcaactgaagactacttcatggaatgtcaagcagtaccatgtgctaagattcaatgagaatgaaatagttgatgggatcaaggctgagaatttgattggaaaaggaggatccgggaatgtttatagggttgtgcttaaaagtggggcagaatttgcagtgaaacatatatggacttcaaatctaagtgagaggggaagttgtaggagcacctcatctatgctaagaaggagttcaaggtcacctgaatttgatgcagaagtggccactcttnagctcataaggcatgtgaatgtggtgaagctctattgtagcatcacaagtgaagatagcagtttgcttgttatgag

SEQ ID NO: 128818 - DNA, 199 bp, Glycine max
  Clone ID: PAT_MRT3847_87328C.1
actcaacttaacataactaacatgaattcattctctaatttcatcattatctttttaatcatctctacaacatgcaaattactcatcttaaactactatacaaaaacataccctaaatgtgatattatttattccaattcactaaatcattccactcctatgaacaaaacttttccatcatcaattctaccaatccact

SEQ ID NO: 128819 - DNA, 407 bp, Glycine max
  Clone ID: PAT_MRT3847_87329C.1
tccacgcgtccgggcagacctgggctatgcaccgttctttagggggtgtgtcctgatcatgtttttacactacttccatttgcagactgcgatactgtgtaatcctgttggtgcagaacccagaagaatgcgatttaatctcctcccgtgaggtgacgctagccgcttggtttatctgaagggggccgaacgcgaacgtgatatcaatagggggcttgactcgagtgacaacaaaaagcgctatgtgtatggtgcaccgggatggatcatttaatgtgaagactgtgacgctagcacttattgagattggaatccacagaataactcggggggaaacaggtggtggggagaacagcatcacgctctcctcaattacgcttgagctgaattagttccacaccttatac

SEQ ID NO: 128820 - DNA, 327 bp, Glycine max
  Clone ID: PAT_MRT3847_8732C.1
ggggggacccttgtactaacaccctgggttaaagacatgggttcacacgcaggggcgcctacaatcctaaacttcccattgtatgagcatccggaggaaccgtggggggctggggatggcagtctaggctctaaaaataaaagggtagaagggggggcgacaaaatccttctgaggaaaagagagcgtttagcgtgagggatgggtctaaaatcacgtaaggggagggggagctctaacagtacctacaggtcgtctggaacctccaaacgggggggacttataaatccggggtaaatacacacaacttgtaggcgttcttcaggga

SEQ ID NO: 128821 - DNA, 266 bp, Glycine max
  Clone ID: PAT_MRT3847_87330C.1
tcgcgatctacgaaatagaactcgcccgtgcggttcagagtgattctcgccggcgcgttctcgagtcactgctccctcggccaaaagctgagtattcatgtgactgcagggtcgtcttcccttgctccattatccccgccccttttttttttttttttttttttttttttttttttttttttttttttgtttaacagaacacaaataataatttacacttaacaatactaatacattacatggacagtgccataagttaggctgcc

SEQ ID NO: 128822 - DNA, 285 bp, Glycine max
  Clone ID: PAT_MRT3847_87331C.1
caatatctatatggaatttttttcatattcatattctataacaagttcgggtggtattatgctgattgggccccacctaaggcaacagtgttacctctgcgtaacttaagcagtcccattaatttatttggggtctgaatgtctaaataataaaatagtgatctaaaaccaaatatcgaacctaggaagcaggaccacatgtccaatttgtataccaaacacagggatgacttacaagagcaacgtttttgaggactctcatccaacaagtggtgttgaggaaaa

SEQ ID NO: 128823 - DNA, 453 bp, Glycine max
  Clone ID: PAT_MRT3847_87332C.1
gtggtgaagagggtcctctttggttgccgtaggggtagtggcctgaagaaggcttcggatgaaggcttgttgttgttgataacagagctcagcgagaaagccatgggaacagaagcagaagccacttcggggttgtgttgtgcttgcttacctggcttggcctgaagattctgctgctcaagagattggggctcagagagtggatcacgaaatggacacgataagatgcaaggtgttaactggagattttatgttgacgtggcacctgtaggttatcctacgtgggattttctttacctggtattgggaggataaggttatcgataatctggaacatgatccacttaagagctgtggcttcaagagggataatgttgcttactcttgtgacattaaggagcaaggactaacttccccttctgtcgtcttctcgcagccgtacggacgcgtggg

SEQ ID NO: 128824 - DNA, 990 bp, Glycine max
  Clone ID: PAT_MRT3847_87333C.1
tttttttttttttttcaagggatcaatagtggcattatatagttaaaaagatctagcaatgaaggggttctgttggggatataatataacaagaaaaaattttctttttttttctgctgtactaacattatatatatatactatgcgtgtcatagccattacacaaaacatagatgagtgacaataaaaactcaataaagggatgaaaaaaaaaagtaaagtatcaccatggagaaggaaaaacaaaatatcagcaacagggtaagatgtacatgcatccccttatccacgaaagacagagaaaactacgagatgatcgcattcaataagtctcatcatacattgtataataaccgtcaccccttcttgatttgtcagccctattgatgatattctcaaatgcttctgttccattctcttggatgtacttctctgcagcagtcagaatatcatctcgcttacccaaggcatcctttttccttggaacgtaccagatgttaatggtctgaggattgacatagaaaggtctcacataatgctcataaacataagcggcaccgctaaagtaaggaaggaccaaccagcaggttgcaatcagctttgcatagggccatattggaatccactcaaggactttagcaaaagtaagttcaaagagggtgatcaaggagtagagaacccagtaagtgagccactgctgatcatcaataggagacttgctctcaattgccctaattgaagcatatagaggataaacaagactaatgacaggcccagcaagcacatcgaagtttttgagaagcaccttgaggaaattgccggccccagatcccattattgatctcttgagtgaatgctagtgttagtgttagtgtttgtgtttgagcctttgagggcttcaagaggagagagagagagagagagtgcgtggtttgcgtgtcccccttctgtcgtccactccagccgtactcgagccgattcggctcgagg

SEQ ID NO: 128825 - DNA, 743 bp, Glycine max
  Clone ID: PAT_MRT3847_87334C.1
gcacgagcaaaggtgtgcttcctgacaaatccgttgtggcagtgaagaaaatagggaatataggaattcaagggaagaaagacttctgcactgagattgcagtcattggaaacatccaccacgttaacttggtcaaactcaaaggcttttgtgctcaagggagacaccgcttgttggtttatgagtacatgaaccgtggttcccttgaccgaaacctctttggtggtgaaccggttttggaatggcaagagaggttcgatgtggcgcttggaacagcacgtggacttgcttaccttcacagtggatgtgtacaaaagattatccattgtgacatcaaaccagagaacattctcttgcaggatcagtttcaggctaagatatctgattttggactctccaaactcttgagtgccgaacagtctggtttgttcacaacaatgagaggcacacgtggctaccttgctccggagtggctcacaaactctgccataacagagaaaactgatgtgtatagctttggaatggtgcttcttgaacttgtcagtggaaggaagaactgctattacaggtccagaagccatagcatggatgatagcaacagtggtggaggaaattcctcaacctcatcaacaaccgggttggtttattttcctctatttgcattggagatgcatgagcaaaggagttaccttgagttggctgattcaagcttgaggacgtgtcacatgtgaagagtggagaac

SEQ ID NO: 128826 - DNA, 628 bp, Glycine max
  Clone ID: PAT_MRT3847_87335C.1
caaattggaggtctgcttttacatctttcaccacgccgatgttgtcggttttttcgggttgttcgggttcctccacaacagtggaccatccgccaagttcaatttctggagtgtcaatgttctttgcaatatcaatcacttctgaatcatcatcatgcagtgtttgctgctgtggtatttgatcagtatcgccttggacaaaggcagtagtgggcaatgttgtcttgacttctttctctggtaactgagtttttgtttcttgttcaatctgttttgcatcttcttgatcaaatttgccatcatcctcaatccctagtttctcctcggtgtgagatgcaggaatctctttctgtttctcagtatcatttttgtttatttctgcagtctcctcagtatcatttagtggagacttcacgtcttcgttaatcttctctgtaagttctgcttctggctgtctctcatctcgactactctcagcaactgtttcgtttccgattgatgcttcgtcatgtgttggttgcagggatttatctttatgcacaccttcggtttgtgtctttggtatatccacatcagttgattgatttgcatctgtttctttctctgctgtaatttcgcaatcatcctt

SEQ ID NO: 128827 - DNA, 437 bp, Glycine max
  Clone ID: PAT_MRT3847_87336C.1
ggaaacccaaaaagggggcccacccccccgcatttttttttttccaaaattattaaaaaaatggcttttttgaagcaaggggaaaaataataaaatttttgtctttggctaaaagccctaaatttttggaggcttattttaccccttggttttttttccggcctttaatttttaaaaatttacctggggttaaattggcctttggttagggttttacaaaaacaatattttttttttttttagggttgaatgccccactttttgtaaatttttgttttatttaaattcttttccctgggcaaaagggccttttttttcactgtgttgcgaaaaaaaaaaccccgctttttttggggtaaaagtttatttcccggttcctaactttaaaatggggttcccatttgggttttttgaaaaaattttcgggggagggtttt

SEQ ID NO: 128828 - DNA, 267 bp, Glycine max
  Clone ID: PAT_MRT3847_87337C.1
gcatcttcttctcaaactagtagtattattcttccattcataatgggtgttttcacattcgaggatgaaatcaactcccctgtggctactgctactctttacaagggcctaattacatatcccgacaactttattccaaaaggctgtttgattcctgaaaaagtgcttaaaaccgttaagggaattggggccccaggaccaataaggacaacaacttccctgggggtggttaaaaccagtttggtcttgcccaaattggaaggcttt

SEQ ID NO: 128829 - DNA, 345 bp, Glycine max
  Clone ID: PAT_MRT3847_87338C.1
ctccatataaccaggtccatcaagctctggaacctcattttcaaggtatctgatatttcatgaaatgcagtaacaaattagtaactacttcgtacatattccagaggcaacatacaacacactaagtgctaacatggcataattaacccgtatcacaggttcaatctctcacattcgtatttctccttacggttttaaaatacaactgatgttaagttttttggtctctgtgaccatgttgcaataataagtagtacgtgatacattttctcattgtcatatagtaatttgtgtcgaataattttaaattttgctgtaattgcgcgtgtgtgcgtcatatcgtag

SEQ ID NO: 128830 - DNA, 365 bp, Glycine max
  Clone ID: PAT_MRT3847_87339C.1
ctaaacccatacaattcaaagactaatgcccagaccggaaaactgggatattgtggtgattttaatggcacaaaaacattaaatagatgctaatagctcttataacaaggattttgacatgcatgcaaaatcacaggcaagataacaataacaagacagcaaataccatcagtgctaatgaagctagtgactcatttgatgcataagaatgatttcactgactcaggcaatacacaacattcgtacttggtttatccaactcagatataactagccaggctgctaaatgtcaatttacccatgaccataccgatatggaaacaactgaaagtgctactggttctgcgagtaattttgactggatg

SEQ ID NO: 128831 - DNA, 266 bp, Glycine max
  Clone ID: PAT_MRT3847_8733C.1
cagcgctgagaggacgcgacaaaaggggaccacatgccaaatcacgaagacatacagggtactatcacaagagactcggtatacgatccaatgcgtcatcgcacgcttaacggttgcctgtgtcgctctcatgtgcactgagctgtgcacggagtgcacacaaggatggggcaagccgtgtcatgctatgatgtcactgagaacctagcaccgtgcctagctgacctgatgcagggtggagatggtccagatcgtgctgtagcgga

SEQ ID NO: 128832 - DNA, 234 bp, Glycine max
  Clone ID: PAT_MRT3847_87340C.1
gcttgacatcgagttacactccaactccatcgatggaatctggtttgccaatagacagacgcataattgtggagtattttggaaggatgtcttaccttgttcataacgttactcacccccaagagaaagatttgttagacggaaatttttcctttgatattacctctcgctctacattggataaagttcactgtccaaaagcacaatttgttcttggataaaccttcaaatatg

SEQ ID NO: 128833 - DNA, 220 bp, Glycine max
  unsure (1)..(220): unsure at all n locations
  Clone ID: PAT_MRT3847_87341C.1
gctgatgtttctcttgaagtgattgcantgagancacntngcnttantggngctgatcttgtcgaatctgtagaatgaanctgctatattagctgnncgccgtgganagncagntatttcatctaaannaatngatgattctattgataggaatgnggctggaatggaaggancaggcntgacagatggncanagcaanagncnngtgggcatagcatga

SEQ ID NO: 128834 - DNA, 818 bp, Glycine max
  unsure (1)..(818): unsure at all n locations
  Clone ID: PAT_MRT3847_87342C.1
aaaaaatgcattattccaacatnnntgaagcctctaaataacaaataaatgtgtcaacgcataatatatgcacaccgtccacgaaattgtctaaaatatgcacaaaatcttagattactacaaataaaaaaaatatatggacaaaatctcatagcatctgtcttaaattcctacgaataaaaaaaagatatgcacaaaatatggtgagtcttccctagaagttcacaaaatcagaaatcgatatctgaaagcccggcttgatgtcaaggatgctgtatttgaagcagaggacctccaggacaaaatagacatagccaacaaatatggtggagggggtgggtgttgcctaccaccagtacaactatgacttcattaatagaggaaatcagaacctagaatacaccgtccgaaggtctgcaataactacctcacagcatttacatactgatactgctttacaactaaatatttcaagagcattcattttcaatggcaaaataaacacagacagcgtcaaagtgaaaatgaaaactaatgaaatagccatggttatatgaaggtggagctcttggtgcaggtttttctgtcatttataagacaaactataggtgtcttgaacataggagggtagcagtagttagatcaagtactattgtaaaaaccaccagcagaatttgctgcagagaggtcttcatagttcataggcaacacaggcttgttgtttcctttatcatggtatattgttatattccaaggccaccgcgcgccataccccttcttatgtttaattcttccaacctttcttggagataatattc

SEQ ID NO: 128835 - DNA, 1860 bp, Glycine max
  Clone ID: PAT_MRT3847_87343C.1
tcgccatcacaaagctagctatagctgctacctcttattggcttttttgtcttactgtttcaataacagtaagctctaagccaccgccaagtttcatttccttctttaatttcctccctttctaccttgttgttattcttcttcaccttggttaccctgccctacccaaaagttcaatatcttttttgcagcgtcaataccctccaaattccaataaagatatacacacacacatttatatgttcatatagtatatggtatacaacatgatcattcaatattcatcaaattggagctgcaatttatccatgatggcaaggcttgccttgtgcctccttgtgatgttgagcaataatgcaagttcttcatctgctcgtttattgttcaatagaacaagaggagggttcacgatcatgcctaaagaagtacataggagaaacctgcttgataatggacttggccatacaccccccatgggatggaatagctggaaccattttgcctgcaatattaaagaagacttaattcgagaaacagccgatgctatggtgtcaactggccttgctgctctaggttaccaatatattaacatagatgattgttggggagagcttaaccgagactcaaagggcaatttggttcccaaagcctcaacatttccttccggaatgaaggctctagctgattatgttcataaaaatggtttgaagttggggatatattctgatgcaggaaatcaaacgtgcagtaaaactatgcctggatcacttggacatgaagaacaagatgcaaaaacatttgcttcctgggggattgactacttgaagtatgataactgtgagaataacaatataagccccaaagaaaggtaccctccaatgagtgaagctttggcaaacactggaaggccaattttcttctctttgtgtgaatggggatcagaagatccagcaacttgggccaaaagtgtgggaaatagttggagaacaacaggagacattcaagataagtgggatagtatgatatctcgtgcagatctaaatgacaaatgggcttcttatgctggacctggaggatggaatgatcctgacatgctagaagttggaaatggaggcatgacaacagaagaatatcgtgctcatttcagcatatggtcattagctaaggctcctttattgattggttgtgacattagagcattggatgccaccacaaaagaattgctaagcaacaaagaagttattgcagttaatcaagacaagcttggagttcaaggaaagaaggtgaaaagtactaatgatttagaggtttgggcaggtcctctcagtaataacaaggtagcagtgatcttatggaatagaagttcatccaaagcaaaagttactgcatcctggtctgacataggcctgaaacctggaacttcagttgaagcaagagatttatgggcgcattcaacacaatcatctgtttcgggagaaatatctgctgaattagattcacatgcttgtaagatgtatgtcgtcactcctaactaagctgttaatttcttgaggcagaaaaggaggtaaaaacagaagtcaggagaaacaaatgcattggcaatagttggatgttccatagaaggaaaaagaaatcaataggatatttatttatcaataggaaatatagaaagatatgtatacgttgtttagctccgaaggtttccattttaaattatacattgtcattgagatctacttgatttcaatataatatgcatttcatatccctaattcctgttaatctggtatcaagcatggactgaaaggaagtacatagaatattttctatatatagatatatggttgacatttttatcta

SEQ ID NO: 128836 - DNA, 910 bp, Glycine max
  Clone ID: PAT_MRT3847_87344C.1
ttctatactgaacaggtacatcctgacctgagcaaggcagacaagaagcgcctgtgtgggattctagactgccaaagattgtccccagaagtgcgtgcccatgcagtaaaaaacgagcttctgccattaagaaccgttgtgcaacttctctattttgaacaagacaaaggctctaaggcaaccacaagtcacaaactgccaaagccacatgagatactgctgggagcaaaacatagaccagctacagctacaactaaagaagaattcaatagagaagaaattagagaaagggaccaccacaaaactaaaagatctgatggtaagttgttggccttggacttggaaaaaaagatggctataagaggagaagacattgaggagacccagtctgagaaggccaggggagtcaaagatgcaagtagttcaagcggcaaggtggacttggaccccaaaaaaatcattagaagggcaagaagtaaatcagaacatggcgtcaaaaagtaagattgagatcaccatgataacaataataataatctttggagaattcctacaaaatcactgtctgcaatttgtaacttcaattcttattatttctttcttaccgtgtcataaatgtaagcaatgtataaatcctttgtactacctctttccctaaagagttgtatgtagggaaattatttttttacaccattattattttgcatctttttgtttgataaagagagacaaagagagatcatatgtatcaaaaaatgtttttcttattttattattaaaaagggatataaaaagtatataaaatatagatgtaatataacacaaaaataacattgtctgtttaaccaagaggtcaatgttaattatgttacaaatgcaattgaatttgcagtcaaaaaaaaaaaaaaaa

SEQ ID NO: 128837 - DNA, 580 bp, Glycine max
  unsure (1)..(580): unsure at all n locations
  Clone ID: PAT_MRT3847_87345C.1
cggggattgagtggtgggggggtgataactgtagaaaataacaatataagccccaaagaaggtaccctccaatgagtgaagctttggcaaacactggaaggccaattttcttctctttgtgtgaatggggatcagaagatccagcaacttgggccaaaatgtggggggggggggagaacaacaggagacattcaagataagtgggatagtatgatatctcgtgcagatctaaatgacaaatgggcttcttatgctggacctggaggatggaatgatcctgacatgctagaagttggaaatggaggcatgacaacagaagaatatcgtgctcatttcagcatatggtcattagctaaggtaattaagttgcaacaaaaacttancacgtgctgcttaggcatttccatataataatgtattttgcacattaagtacatttcttctgtgtatataggctcctttgttgattggttgtgacattagagcactggatgccaccacaaaagaattgctaagcaacaaagaagttattgcaggtaatcaagacaagcttggagttcaaggaaagaaggtgaaaagt

SEQ ID NO: 128838 - DNA, 721 bp, Glycine max
  unsure (1)..(721): unsure at all n locations
  Clone ID: PAT_MRT3847_87346C.1
ccacgcgtccgcggacgcgtgggcggacgcgtgggtttgtcgacaacccccagctgctccccatccttctttatgttgtatcataaatacccaaaattggatataaccaaactatttcatactacattgattcctaatacacagtttgtccacattcatttaagccccagctaccatttctatgaccatttaagtgactcatttgaatggcacaacctaacacctttttacgagattcttctaacaactgacattctattgtaaagactgatagacatagtgatgctggtatacagactcaggactgtccttttacacacgtagatcttaggctaagctaagaattagttaaagagagaagatatggggaggatataaggggaattcctttcagttttcttagtccggtatttctgtaataatttattttttccaaaatcaaataatcaatacagatctccctctttttagataggaagttgattcctatcaaagactaaccttcattcaccttggttcactcagttcaatttcatgcaaaattaatcactgtacttgtgcctgccttctgtttgcatagttaaaaaaaggaaagaatgcaagatctgttgcttatacaggccanaaaaagaagtatgtcactgatcttgnttcattttgaggataagcatcttgaagttatttaattaattaatacatttgatacatagtataccagact

SEQ ID NO: 128839 - DNA, 220 bp, Glycine max
  Clone ID: PAT_MRT3847_87347C.1
gtaagggcattcttgctgctgatgagtcaacatggacaatttgcaagcgtttggtcagtatcgatgtagagtatgttttctccaataggcgtggtcttagggactatgcatttcacggatcgctgtgctcttaaatatcacagtggtggcatcctctctgttgatactctgtaccagtgtacagtggcaggtactctctacagttctgactatcctcatt

SEQ ID NO: 128840 - DNA, 393 bp, Glycine max
  unsure (1)..(393): unsure at all n locations
  Clone ID: PAT_MRT3847_87348C.1
ggctaacagacggagtggctgtggaattgttcagttaccatgtagcttagccatgatgcccgaactgtcttcattctacactgattattgcaacaggtggcaatggatagaattggaagaaggtgaagaaaaattgggctcaataatatcttcaaaggcacaattgttttgtgccacgaattgcaatctatgtgatgattttttcttagcaggtttcaagaggtttgctcatgtangatatttaaatctatcggggaataatttcacaatccttcctgaattcttcaaagaactgcaatttttaagaactcttgacgtgagtgattgcgagcatcttcaagaaattagagggcttccaccaatcttagagtantttggtgcaagaaactgtgt

SEQ ID NO: 128841 - DNA, 310 bp, Glycine max
  Clone ID: PAT_MRT3847_87349C.1
aaagagtcggagcccaagaaggcctttgatctacgggataccttgcgtggacatggggaatcagagtagatgaaagagtcggagcccaagaatgcctttgagaggaagatgcagtaccaacagcatcagcagcagttcaccaccaccaccaccaccaactccaactcgcaagccatagatccatcgtgtaaatctgatgaccttttccgtttatgtatttaccaagattccgtgcccgctgacttccagcctgatgttcttgggggtaaacgttgcctttcaatggtggccaataatacctttttccttt

SEQ ID NO: 128842 - DNA, 277 bp, Glycine max
  Clone ID: PAT_MRT3847_8734C.1
ctctaataaaagctatcaagaatatacttgttaatatttttaattcaaaaacagaccaacttcaacatgacctgtgattgggagatgataataataaacaacaaaataaggtgagaaggtaaaattggcaacaatggcttggcttataagtcccaaaaccctaatttattgctacagcaactgcgtgagatagtgtgggatactggaagagtagcaaagacggggaaagagaaaacggcgtctttactgtcatggacgagaaaccactccaggagca

SEQ ID NO: 128843 - DNA, 283 bp, Glycine max
  unsure (1)..(283): unsure at all n locations
  Clone ID: PAT_MRT3847_87350C.1
cgnccttcgacacggacgtcaacatactgacccgcttcgtcatggaggagggcaggaaggaccgctgcacgggggagttgacccagctgctcaactcgctctgcacagcagtcaaagccatctcttcggcggtgcgcaaggcgggcatcgcgcacctctatggcattgctggttctaccaacgtgacaggtgatcaagttaagaagctggacgtcctctccaacgcactggttatgaacatgttaaagtcatcctttgccacgtgtgttctcgtgtcagaaga

SEQ ID NO: 128844 - DNA, 158 bp, Glycine max
  Clone ID: PAT_MRT3847_87351C.1
gggggaaaaaacacttgtatgtgtaataagcaggaatatagcctcccaataccagggctactgacccttaaatagagagcaccacaatgccaaattccgggctagcatggagcgggagggcataacacaagtaaaaaagaaaggcacttttttttttt

SEQ ID NO: 128845 - DNA, 231 bp, Glycine max
  Clone ID: PAT_MRT3847_87352C.1
acaaaacggggcatcattcttattgggtagctacataattcagcgggaaaggaaaacctaatcaacaaaacaatggcacttaaaaccctatccactttattatcacctatatctctaaccaacaccaaattcccgcaattccataacaccaaacattacctcattctctgctatttccctcactctcataaatctcattttctctcacactattcaaaatgcaccatcacc

SEQ ID NO: 128846 - DNA, 446 bp, Glycine max
  Clone ID: PAT_MRT3847_87353C.1
gagaaaaaaaaaccatttactagttaaggactgccatgtaaaaattttaagggaattgacctaatggattgggggttggttccaaaggaaccaccaaggtaggctttggaaatcacacaaaacaggttttaagcctttttaacaatttgaccacttaatatacattaaaccatacgaacttgatattcgtcccgttttaatatggaaaaaatatcacttcaaattaacaaatggcgggcggcaatttcatataattgcatgtccacaaccaatattttcctgtaacaccacctgtggaaatgcacaatgacgggaactgcactttttatttgggacggggttattgtttatctgtgggaacccaacaacaacatggttaacaaattccccactagaataaacaaacatggctttttttaccattactgttatgatttcaaatgggg

SEQ ID NO: 128847 - DNA, 118 bp, Glycine max
  Clone ID: PAT_MRT3847_87354C.1
gcagaaaaaagcctatatcctggaaattcacgttgatggtggtactatcgctcaaaacgtggactttgcatacagtttctttgagaaacaagttcctatcgatgcaatgttccacaag

SEQ ID NO: 128848 - DNA, 259 bp, Glycine max
  unsure (1)..(259): unsure at all n locations
  Clone ID: PAT_MRT3847_87355C.1
nnnnntnntttttttttttttttttttttggaaattaaaaaaaaattttttttttttttttttttaataaaatttattttatttttccccagccttccaaaaaattcctcctccattagcatggaaccaggatttttttactaggggcccttagcctttactggtcgacccatttcctaacatagttaagggattttattttttcacccagtggaaatctttttttttattttagggaccctatgatctatttttttcc

SEQ ID NO: 128849 - DNA, 753 bp, Glycine max
  unsure (1)..(753): unsure at all n locations
  Clone ID: PAT_MRT3847_87356C.1
gtctaagtgaaggttaaagtgacctaagtttgggtattttctacttgaagggggtgctaggaggggttaaaagggagatgagttttgtagtagtggttttcaaagttctgggtgggtgagcaatggaacctcgttagggattttgggcttattgttgaacttcaactgcttactactgcctttcttcattagtatagggctttgggcaacatcaaaggtcacagaagctgatattgtggagtttgaagcaaactataggggatctgacacagaaaaattatttgatcggtctgtacaagaagtgcaagggtaatatgaataggcttcactgttaaaaaagagagagaattttgaatgtgtggtatagatctcagtccataaggagagctaaaggaaacaaatgcctacaagaaatgggcaaagaaaatattagaaacctagccaccaaccagtccctcaagaagatgggcaaagttaatttgcagggtttggtttatgttatctagttaagctgtaatttaggaatattcgatgtttaaatcttctacagatatcaaataggcaattggaaacaaatattctacacgaggaagagaggcagtaggagaagcagaaggaccgtgactctgctcattttggatcagaggcacatccagaaggacattgataaggtnttgatgtgnttggggtgatttatgggacccctgattttcttggccacccacgagnaaatgtctggcaatggggggttga

SEQ ID NO: 128850 - DNA, 348 bp, Glycine max
  Clone ID: PAT_MRT3847_87357C.1
cccacgctaacgcggacgcgtgggcggacgcgtgggatgggggcatggtggaagctttcgagagccactaccaacggagactttgtggaaggaacatatctagctacggtgaaggtggaggtcgcatgcgcgtgcgcagggaagacatccacagggactacaacaacgtggatggaaagggcaatgcggaaagacagaggcttaatcgtgctaaagatcggacggatgtcgtacggggctaaggacgttaaggatccggcaaagggagattgggggcagggtaatacttcgctggggcagagaacaaggtatagatgggaaaaagctcccgatacgtgggcccaaacc

SEQ ID NO: 128851 - DNA, 749 bp, Glycine max
  Clone ID: PAT_MRT3847_87358C.1
tcccaggatccttcaaagaggcttctgagtcaatgatgcaacaggatcagaagtatcatgcacatgttcctcaaaagaagagggaaggcagcagcaacaaagactcaatcttgttggttatggctccaagggccataaaattcatcattctggtcctctgctagttccatcaagcaaccatgatcagatgttgaaggaccatgaccgccaaatccaagaggtggttcgaagagcgcggttggacaaggcaaagatgagaagactccaaactgaggggaaccagataaccaattcattatttgtttctggtcgttgagttgtagaacccgatgctgtcaaagcatcattaagaatatttgattcttttattttgcccctttttttctattttgtctgtacagggagttagtatccccccgggccatgttaggtaactctatagctcagaaatctttcctccactttatcacatcacatgtattttccttccatttacagctgcaattctagtatatggccattcttgcaaagcttatcaaccttaagttgtagtagaatactgggggaccttgtcttccttgtgtttaacttatgatagagtaattatcactgggaagatggctatgtatttatttatgtatagatgtgtattctctttttgtcaaaaaccccatctctttatgatgcatcatttcttcctccaaaaaaaaaaaaaaaaaaaaaaaaaaaaaaaaaaaaaaaaaaaaata

SEQ ID NO: 128852 - DNA, 2352 bp, Glycine max
  Clone ID: PAT_MRT3847_87359C.1
tttttaccacatgacaagtggctatattcaatcatgtactgacgtaccaaaatgcatctcggagacatggggcaagtgacaaaaagagagtacacaaatatacatatccatcttcccagtgataattactctatcataagttaaacacaaggaagacaaggtcccccagtattctactacagcttaaggttgataagctttgcaagaatgaccatataagtggaaggaaaatacacgtgctgtgataaagtggagggaagatttctgagttagagttacctaacatggccacaggggggatgctaactccctgtacaggcaaaataaaagaatcaaatattcttaatgatgctttgcagcatcgggttctataactcaacgaccagaaacaaataatgaattggatatctggctcccttcagcttggagtcttctcatctttgccttgtctagtcgtgctcttcgaaccgcctcttggatttggcggtcgtggtccttcaacatctggtcatggttgcttgatggaactagcagaggaccagaataatgaattttatgacccttggagccataaccaacaagatttgagtctttgttgcggctgcctctcccctcttccttttgaggagcatgtgcatgatgcttctgatcctgttgcatcattgactcagaagcctccttgaaggatcctgggaacctgcttattagttttggggcctctgcttgtgatgatccagaccattctctgcgatcgtcagacaacatactcctccttgctgcaactaagcccgatactgttgataagtcaccccccattgaaatctttggagcatcgtcctggttcttcccggttataccatgccgcacggatttctgagtcagtggacctgaatgggaggctcttttatgttgatgaaccgggggatctgcaattaatcctgcagcctgtgatggtctagggggatcaatgggaaatccagaagcaacttcttcgggatgagggttaaacttctcactcttgctctgagaattggcctgcccttgtctcttctgtattgacaagaccagttcagcattggcatcaggtgcaggaatggctcgtgattctcttgcacctcttctctcaatatcatgtctctggcccttgcttcctgctgctccttgtcttctagcttcttcatcccgaactttggcatcaaattctttgctaggaggatactttggtaagcttgagggatcacaaggtagaggcttggttgagaagaactcactattcaaagcagatgctgaggttccacgatcagcaggatctatggacaaaaggatctctatcaattctattgcaggtgcaggaaactccttgaacgtttcagaaacacatcgcctatagggttgttgaggcttaaatattgttgcatgaggcaactttgattttctccaatagtcctcagaaggtgaaccacaaagtttaaaaattttatgcaattgctccacctcagttcttccaggcattataggcttgcctgcatacagctcagcaagtatgcaacctgtactccataaatccacagcagtgccataataagtggctccaagcaaaagctctggtggcctataccaaagagtgacaactcggcttgtcagtggctgagcttgattgggatcaaaaaagcttgccaaaccaaagtctgcaattttcaatatcccattgttatcaatcaaaagtcgtgattctctagcacctcttctctcaagatcatgtctctggcccttgcttcctgctgctccttgtcttctagcttcttcatcccgcagtgcggcagcaaactccaggctaggaggagactttggtaagcttgagggatcacaaggtagaggcattgttgagaagaactcactattcaacgcagatgcagcagtgccacgcagagcagggacaatgggcagaagaagcctacgtagaatgtgaatttccctagccatgaagcgaacactctcaggctcaagattatcaaatctcacttttttcaaagcaacaacctttctttgttcaagatcacgagctctataaacattgcaaggagaaccccgacgaataaaaaccaactgcacaggcgccaccgcacgccgtggcggccatcccgggatagccgcaccaggcacagcaggcaggcaagcgggccacccagcagccaccggcgcgccatccaaggcggcaggaagccaacgcaccggtggccgatgcgcaagagcgacaacccggttcgcccgcggccgagcaagactgggaccacgcactctagccgaaccaaagcctggcatatcaaacaacgcgcggacgcgagggaaaag

SEQ ID NO: 128853 - DNA, 274 bp, Glycine max
  Clone ID: PAT_MRT3847_8735C.1
ggtggggccaccagagcacgaaaatatgtgagacactctcctctatctcccacaccttgatgatgcactatggtcagaggaggaatttttccttcctagggagggaaggattacttgcttggaattcgaggcggaggcacggctccgtgtaccgagagcacaacaggtcaacaagatactaccagggactctactggaccatgtggaaagtgcctatccttggatgcactgatgctaatcacgagttgaaggagctccaagaggctaagactgg

SEQ ID NO: 128854 - DNA, 282 bp, Glycine max
  Clone ID: PAT_MRT3847_87360C.1
gtttctttcacgtcattagcttgacgactccaatgccttcacatttcgatggtagagttaagcttacacatacgaggtttggatgtctgcagctctagagatatatcggttgcatacaaatgatactctatagctatcattctgcggccaggatctcccatcacactcataggaactaatcctcattttgagagggcttaatcctacgacacaatatggtatctagatgatgatcaacttgttgagcacttctagaaacaggacctgatttgagtggcctga

SEQ ID NO: 128855 - DNA, 355 bp, Glycine max
  Clone ID: PAT_MRT3847_87361C.1
ccgatcgctaaactaatatggatcgagaaatcgccccagaggagaacatgaacaagactaacaatccgcacctaagcaatggccctttaaaaccgcgactcaagggatcccttcacctactctcaaatatgcaacgctaacatcggacaatgaacaccatacaatgactgcatcagactatgttaaatcgaaggaatcgaatagcataatgctgaatacgcctttaagtccatgaccttcgatgttaagaaccatcatgttcaatggaagaactacccatgtgcaatatcaaaattgcaccatgagatagtgccagacaaatgcaacgttgcggacaatcctaaaatggcaatca

SEQ ID NO: 128856 - DNA, 422 bp, Glycine max
  Clone ID: PAT_MRT3847_87362C.1
tattaaaatactagatgaagccatgatttcctttaatagaatttttgttatgaattttggctcttttcataataaatggggctaaaatactttgatttcttagatttttacaaatagaatctcgtaggtcataacttatcatatatgcaaatttcaatctataatttttttagttatgttacttatttaataaggtcgattggtttatgcgaattgattttctgttacgataaattgacgagactatagctaatccaatagctgcttcagcggctgcaattgctataacaaaaatgcagaaaatttccccttttagttgggaattatcaaaaaaatcagaaaatgtttacgaaattcatattaactgcattgagcataagttcaagacacataagagccctatccatattttgacttgtgat

SEQ ID NO: 128857 - DNA, 1707 bp, Glycine max
  Clone ID: PAT_MRT3847_87363C.1
gattgtcagacctattatctgagggtcctttagccatgattgtagtgctggtgtctatcatatttgttattacctaatgcataatttgtttagtttatctactatcaattattagttactgtccactgctaagtgttattgtcataaaatgtgttaaatgtctcagattgtacggcctctagaagacgacagaaggggaacgacaacttccccaacacgttgtgttactctcttcgtcttcgtcgttttcataccccttctcccttcaaaccctgggaaaattctcgaacaatgccccttctccctccgtaactcaccaatccatccataaatacacacacaaacattttcattcaacatttttttattatttctttgtatcggtctaatatccacacatttccacattaaataaatacacacacattttagttttttcatgtacccattcgcgtgcgatagaattttctagagcgagagatttcggcgtaatgggtccaaacgcggcggcggcgaaacaagcggagaaactccgaattgacggcaacacttacttcaaaaaagaccgtttcggtgccgccatcgacgcttacaccgaggcgattacgctgtgccctaatgttccggtttattggacgaatcgcgcgctgtgccatctcaagcgcaatgattgggagagagtagaggaagattctcggaaggcaattcagttggacagcaattcagttaaggcccactatatgttggggcttgcattgctacagagacaagaatctgccaagggaatcaaagaattggagaaggctttggatcttggaagaggtgccaatcccaagggctatatggtagaagaaatatggcaagagcttgcaaaggcaaaataccttgagtgggagcgatcatcgtccaaacgatcatgggaattgcagagcttgaaagaagcttgtgagtcggctttgaaggaaaaacattttcttgattactcccaaatggaaggatttgtggatgacgctactacttcccattcagaacaattagaggctttagaaagagtcttcaatacagctgcagaagctgacatacctactgaggtgccagattatttgtgctgtagaattacactcgacatttttcatgatcctgttatcactccaagtggacttacatatgagagagcagtgattcttgaacatcttcagaaggttggtaaattcgacccaatcacacgagaaccccttgatccatcacagttagtgccaaacttggccattaaggaagcggtggaggcattcttggacaaacatggatgggcctacaagatagattaacgaaagatcaccttgcaaattaacaatgtcttggtaggtttgtctgttgagcaatgcagcaggatgttgtgttctgcaagtgtggccaaagttgtttgctttaattgttaattatgtatgcagtttccttgggggcctgacttttgaacatcttattatgaagtatatatatgcatggttgactgtcatacattgtgtaaatatagtagtaaacataccaatgcctgatgagactgtttcatttgtctcataaaatcaaaattatttaacccatcataagatttttttggcatttttgtaagtttaaagtatttcatacttttccctaaaaacaaaattacttcatacatggaagataaatttattttacttactgcac

SEQ ID NO: 128858 - DNA, 278 bp, Glycine max
  Clone ID: PAT_MRT3847_87364C.1
tttttttgaggagggaaactatctcttccaaggaattgggaaccactatatatcgatgtcacaacatcatgaaacactcttacttctcccaatacaatgataccagaagctaaattcttgaatctggaacactacttaattctcatgactggctcagaatttatgatacaaccctaccgtatttgataatcaaaaagtgtacttttcttcttttgaggaaatttcatagccatcaaactctttacacaaaaaaaaaaagggaggtccattgtctttct

SEQ ID NO: 128859 - DNA, 428 bp, Glycine max
  Clone ID: PAT_MRT3847_87365C.1
ccgtatcttaccgatccatatatacacacacataaccattttcattcaacatttttattttttatttttttgtatccgtgtaatatccacacattttcatttttcacattaaattaggtgaatacacgcattattattttttatgtacccattcgcgtgcgatagaattttctagagcaagagatttcggcgtaatgggtccaaacgctgcggcggcgaaacaagcggaaaagctccgaattgacggcaacacttacttcaaaaaagaccgtttcggtgccgccatctacgcttacaccgaggcgattacgctgtgccctaatgttccggtttattggacgaatcgcgcgctgtgccatctcaagcgcaatgattgggagagagtagaggaagattctcggaaggcaattcagttggacagcaattca

SEQ ID NO: 128860 - DNA, 126 bp, Glycine max
  Clone ID: PAT_MRT3847_87366C.1
ggctcgagcaattctatcttctggattgtaatcggagatggccccgcaattttggaccaatttgttgctcagttacgcctgaagcctgaaaaaatggacgcttctaactgtgctcactggttggtt

SEQ ID NO: 128861 - DNA, 383 bp, Glycine max
  Clone ID: PAT_MRT3847_87367C.1
ggcaccacaatgttcttctagatatatatctgggggcaggaagaataaaagcagcctccttcattacttagctaatcaaattgagatagcatcgcaatgccatacaaacattttcattgctctgaaaacgaacactgaaattaccgcccctgctaacaccaagatccgcacatcttgcacgctctctgcaccttcactcagcattctttgccaatctcactctgaaatcactctgattctctccaacttcatcatactctattatttaacaagttccagcattactaaagacaatatttcagcgcactttcttcaaacactgatacctgccagaaccaaccttggacctactgagattgcgaatatactgtctccacaattct

SEQ ID NO: 128862 - DNA, 356 bp, Glycine max
  Clone ID: PAT_MRT3847_87368C.1
gcgcgcgctcggcggcggccgccctgtgttgttcgttctctttggacttgttggttgttttttgcatggtctgttgtgggggcagggggcgcgttgtcacctggccgcgttccgagaggagacgcagcccaagagccaggaggacacacgggagaccggccggccaccggggcggggcccccaccgacgcccgggcgggggcagacgcccccccacaccccccgggcggcgcacacgcacccgaccgcggggagcccagaccggggggggggccagaccccggggggggggcgccggggggcgggcggggggcagggggggcccccgacgcgaaagaggggccccgcaggcagaag

SEQ ID NO: 128863 - DNA, 285 bp, Glycine max
  unsure (1)..(285): unsure at all n locations
  Clone ID: PAT_MRT3847_87369C.1
gncgcatgcacgcgtacgtaagctcggaattcggctcgaggagaaactctgttaacaaagggagtcccccattgtgtgccagaccccagaaggttatccagtcagtgatagactttgaccttgattagcagttttccccgaatcccagatcaggcatctcacaactgtctataggggtttctacaagattcgatgcccctggcctccttggacacttgtcttcatggtcacagatgcatacatagaattcaaattaaaccagtatagtatngncgnttntaagan

SEQ ID NO: 128864 - DNA, 247 bp, Glycine max
  Clone ID: PAT_MRT3847_8736C.1
cgcattcgctaatttcaccaatgtatgttgtatggtgacgatggtctctgcaggctcttcagctttttgctaatgatattgtgtgtttggagtgaaaggggacaaggctagttgagcttgattgtgttgttcaacagtgaggacaggccagagacagtgtggaaggaggaggagtagaagttgatgtctctggcttcagagaatgcttgtctcggtcctggtgggatcctgaggttcgtcgcttgct

SEQ ID NO: 128865 - DNA, 1201 bp, Glycine max
  Clone ID: PAT_MRT3847_87370C.1
aattcggctcgagctcgagccgattcggctcgagcggctcgagtttctccacattcgattcctcacaccaccaagcccccatttttcacaccaccaacacaagatgtttctccacattgtgttcctccttttccttctctcatccacttcccatgccactgtccaagacttctgtgtggcagacctcaaaggtgcagacacccctgcaggctacccctgcaagccacctgctaatgtcacttcagatgactttgtgtacactggcttagctgaagctgcaaatgtcacaaacataatcaatgctgctgtgaccccagcttttgttgctcaattcccaggtctcaatggccttgaactatctgcagcaaggttggaccttggtcctagtggtgttatcccactccacactcatcccggtgccaatgaactactcattgtgcttcaaggtcacatccttgctggattcatatcttcaggtaacatagtttatcagaaggtgctgaaaaagggagagctcatggttttcccacaagggctgttgcacttccaaattgctgttggtaagagaaaggcccttgcttttcctgttttcagcagtgcaaaccctggcctccaaatccttgactttgcactgtttgccagcaacttctccactcctttggtgacacagaccactttccttgatcctgacctagtgaagaagcttaagggtgttcttgggggtagtggctaggctagccttatggttaattaataattgcttattattttgctcaattcattacttttgtgctttcaattcgctaaacttgtccagctcaattgactgagctacgtgagtgacttgttttaaatcctttaatatttatgtttgattcttacgtataaaaaaataaattcattagacttgtccaggtctcatggtcattgaattgctcgtgttaatgtgaagtaatttaataaactctcgtgcttgatttttgttttccatttctctgttccaaaactaaaaatgtgttgagatttgagtattactatcttaagaagggttgtttgccaatgttgcctgagagtcttatccacattttccctggttgatacatgtcgggctaaggatgctatttgtcctttactatcacgcatgttttaattatttaagttgtccacacgtctcgaaatatgttgttttattttgtttgcc

SEQ ID NO: 128866 - DNA, 166 bp, Glycine max
  Clone ID: PAT_MRT3847_87371C.1
aataggcgcccgaacgttggccacaccacacaggaggagaatgtaccagaagcaaggggcagatgcaacacaacaaataccggcaaccggacgcgcggagagccatggcagtccagcaacggatgcgaacaacccggagaacaacgacgcagaaccaccgactcag

SEQ ID NO: 128867 - DNA, 796 bp, Glycine max
  unsure (1)..(796): unsure at all n locations
  Clone ID: PAT_MRT3847_87372C.1
cagacaccctttcaggctacccctgcaagccacctgcanaatgtaacttcagatgactttgtgtacacaggcttagctgaagctgcaaatgtcacaaacataaccaatgctgtgtacacaaagtcatctgaagttacatttgcaggtctcaatggccttgacctctctgcagcaagattagaccttggtcctggtggtgttatcccactccacactcaccctggtgccaatgaactactcattgttctccaaggtcacatccttgctggattcatatcttcaggtaacatagtttatcagaaggtgctaaaaaagggagagctcatggttttcccacaagggttgttgcacttccaaattgctgttggtaagagaaaggcccttgcttttcctgtcttcagcagtgcttttcctggccttcaaatccttgactttgcactctttgccagcaatttctccactcctttggtgacacagaccactttccttgaccctgccatagtgaagaagcttaagggtgttcttgggggaagtggctagagtactacttatttgtgttcatggatagttttttattattttgctcaatttattattattccttgtgtttgtttcaattcgttagacttgtgcaggtctcatggtcattgaattattatgctcgtgtcaatgtagagcaattaataaatttgcatgctttatttgtcttccatcatttctctgttcaaaactaaaattgtgttgagatttgagtattgctatgttaagaagggttgtttgccaatgtcgctaaaaa

SEQ ID NO: 128868 - DNA, 268 bp, Glycine max
  Clone ID: PAT_MRT3847_87373C.1
cattaatcgaagcccatgttgatgtcaagacaaccgacaactacatgttgcgtttgttctgcatcggcttcacgaagaggcgcccaaaccaggtcaagagaacctgctatgctcaggtcatcccagatccgtcagatccgccgtaagatggttgagattatgatcaaccaggcttctacatgtgacctgaaagaacttgtttcgaagctcattccagaagttattggtaaggagattgagaagtctacctccagcatcttcccacttc

SEQ ID NO: 128869 - DNA, 656 bp, Glycine max
  Clone ID: PAT_MRT3847_87374C.1
cttttcttttttttttttttttttttttttttttttttttttttttttttttttttttttttttttttttttttaaaaaaaaaaacccgatgatttgtttttttcccaggggaatcaatttactttgggaccctaaaaaataagggcccgcctttttaagccaaaattttgcttttttttttttggaagggttgaactaataattttttttccccaatttttttcgaaaacggtttttgtttttattttttgggggccccctaaaaatgttgttttttttacgaagaaaaatgtttaaatcaaattgcctagggccccataaaaatttttacaagggccggggatccttcttttttagggggcccccccaaaccctaaatttttcttaacgggcgggtcttttttttttaaaacccggcaactttttttggagtcttttaccaatatacatgaggcttccgattttgcaactcggggaaagaataaaaacagaaaaccccgtcgggaaaatcccgccttgcaaaaacacaaaggcggttttgccaaaaacacgtttaaaagcttccgaattaacatccggttgacaaaacccgggggattttatagggctaaaccctccttttttgcccatgggccaatccatggaattgcctttt

SEQ ID NO: 128870 - DNA, 514 bp, Glycine max
  unsure (1)..(514): unsure at all n locations
  Clone ID: PAT_MRT3847_87375C.1
gcgtncgttatgctcggaattcggctcgagcaccaatgttgccgtaaacatgttgttcacttttgctattgctcaagttttcctagccatgctttgccacttgaagtttggccttttcttcttctttgctgcatttgtgctcatcatgaccctcttcattgccctgttgttgcctgagacaaagaacatccccattgaagaaatgcatttagtgtggaggtcacattggttttggtcaaagattgttccacaggttgataatgatcgcaagccaactactgctcagagttgaatcaaggatgcccattatactgtatgtatatgtgtatgtatatgtgtatgtatatatgtatatgtatatatatatatattgtatatatatgtgtgtatatatatatatataaggactgaaaatgaaaagaaaaaatagagcttgagtccctatgtatcaaaagaaatgttgaattattgattaaaaaaatgatattgctttcactcacgaaaattttattaa

SEQ ID NO: 128871 - DNA, 232 bp, Glycine max
  Clone ID: PAT_MRT3847_87376C.1
gaacaagcttgcatctttgtcttcacattaatgaagtaacaataatatcatgatgacccgccgttgactgtaggagtagttacatgatgctattgacggtagtttattctcggggtggcaacggttgatcctcctgatttggaagcaaggatgcatccttggtgtccacatcattgaggtaggcatatatcatgatgttgctggtcgttcaaaaaaaaaaaaatgcaaaaag

SEQ ID NO: 128872 - DNA, 421 bp, Glycine max
  Clone ID: PAT_MRT3847_87377C.1
tttactgatttgtctttggagtttggacagtacatgaaggacagcatagatcaaattgtgaaattctttgaaagtaatactgctgtaagtcagaccatagcactagaaactgcagctgctgtgcaggtattatttgacttcacatctctgctatttgggaacatgttaattgtcaaagactcaaagctggaattgtatattaactatgataccaggagtcagtatattaattaagaaggttaagagtgtgagcctttgttaaagacatgagcattcttctccaatcaaatgaaccagaacttggaaaaaccaaaaactttgtaatgaatgccacaaaacttttgcttcctttttttccaaagccttaaaaaacttcacctcaagaaactattcgaaagtaggacataactaaacctcaccg

SEQ ID NO: 128873 - DNA, 759 bp, Glycine max
  Clone ID: PAT_MRT3847_87378C.1
ctaggtaattcggcccgacctgtgctattggttacgggcccaggttgattcaggtcattaccggatcgccgcccaattgtcctcggaggaggcccttgccggagaatctcaattacccgtcgtttgtggcggtcttaccggtgtcgtcgtcgttgttgagcaagacgttcttcaggacggtgacgaatgtgggcccgccgagtgcggtgtatcgggtgagggtggagacgcaggcggagggggtggcggtgacggtgaggccgtcgcagcttgtattttcggaagcagttaagaagcggagttttgtggtgactgtgacggcggatggacggaatctggagctgggtcaggctggggcagtgttcgggtccctttcgtggacggatgggaagcacgtggttcggagccccatggtggttactcaagctcaaccgctttaatttttgcgaaacttgcgctcaggcacttttaatcgatgtggccattcgtcaaaggtcaaacaaagatgccttatagtttcttcttttcttttaattttctagtgtttttacttttacatgatgatgtgtctctcttgaatgcctctctcatcaagaatgtggcaacgtgctttagttatagcatgaaatagttgcatttttccttttttgttttgggtttcccttaaatttcattgtgtatgttataggctagaagattacttatactccatgcaacgaacttaatttatatatgtaatctcagtcaagattattgcgt

SEQ ID NO: 128874 - DNA, 346 bp, Glycine max
  Clone ID: PAT_MRT3847_87379C.1
gaacttcaaagcggtctaaagggagccacaaaagccaaaacagcactaatacagacactttacacacatccacaattatcaataaggcaggtttcatataaccctgaattaaaatgcctactttttcttaacacatgctaacagcacaagctcatgaactacagggccctcgaaacacagacactgcaaacaccaacaataaggaggcaactttgaagacacagctacaaatacaactgaaactgcccaaacacggtgaatttctgcatctacatcagtgtaccctccatgtatcacaagattgcgaccacttacataacttggactcatcacctgccaagggaag

SEQ ID NO: 128875 - DNA, 199 bp, Glycine max
  Clone ID: PAT_MRT3847_8737C.1
ggtttttcttttcttttttactggcctttcatcattactcatagacaattaggatgattaccggggcctacatagtaaaagtaacggccccaacccccattactggctgtgtggacatcatatcagaacgattgctcactgagggggcccaagcctgataaagccttgcgattattcgagttcttatccactcgaatgt

SEQ ID NO: 128876 - DNA, 348 bp, Glycine max
  Clone ID: PAT_MRT3847_87380C.1
ctcgatccgttttcttaatgcagttgcgatgctttttatatttaacattaccaattacatattttcgctacacttcaacactcacgggattggggatgatttctaataaaagcgccctaccactctccacttaaactacaagctgggccgtattgtcatgcgttcgatcccaagattttaattctaacccgcttcatgtaccactacgtcatctacctttatcaggctactctacacatcgaattcttatcgcaaaagatgaatcacgattaacattgctttccgctaccatttcaccacacagtactaccggaaagacttagatgctacacgacatgctgcctttat

SEQ ID NO: 128877 - DNA, 257 bp, Glycine max
  Clone ID: PAT_MRT3847_87381C.1
tacggctgagagaagacgacagaagggggaatccatattgcattgctactgataatggctggaggaactcttagtgctactgggagattcagaggtcacagtcactgtgccccaggggctgaattttgctgtaggtcatgttctggctacttttggcgttcgctcttcgccaaccgatgcatataatacagagattcatgtcaacaaattctccattgatcagtatcagagttgagaggtttcacagttccacaccg

SEQ ID NO: 128878 - DNA, 394 bp, Glycine max
  Clone ID: PAT_MRT3847_87382C.1
ccccaagggggaaatttaaaaaaccgtttttttttacccccttttttaccccccaaatttgaaaatttttggctttccttgtccccggctgggtttgccaaccccataataaaaccctaaggggccatatggtggaagggaaaaaaaagcccattcccccccccaaatgggggtaaaattggcccccattcctttttcaagaaatttaattggccccctaaagcttttttttgtttttccaaaattttttttttttttgctttttaacaaaaatttccctttgggtgacataaaaaagcaaaccgccaaaaaccctttttgggtggtggggttttcccttgcttttgcgccctaatatagcgcgaagggcctttttgtttttttatccccccct

SEQ ID NO: 128879 - DNA, 464 bp, Glycine max
  Clone ID: PAT_MRT3847_87383C.1
attccatcactatgggtctatggccacgtctagcaccatttgcacatgtcctcgtagttaatcaaatgcgtcttggataaacactttcaattcttcactcattttctgcaaaaattaacttgggcttatagtgcttttacaagaaaatttcctccaaggtcaacatcatgaaagtacaccagaatcaccccaattttataaggaagttttttttaacgaagaaaaaattaaggaaaattttaaaaaacattttaaagagtttttcttttgcatttctttattgcaaaacttaagacttaataatacactattcaagaaatattaatttttaagagtttttcttttgcatatcccacaagtttttttaggtgagaagtcaagtttgatcaccttaacttctatgtgtaattttgaattattttatttttcatgttaagaagttaggtatagaaaacttgacttct

SEQ ID NO: 128880 - DNA, 753 bp, Glycine max
  unsure (1)..(753): unsure at all n locations
  Clone ID: PAT_MRT3847_87384C.1
ccacgcgtccggtaaattttaaatagtattttttaattcttacaaatataaaaatagcttattaatttaatgtatattcttattttaaataaggaattatcttaaaaaaataaatagaataaagtaaattacatatatgttcatcaagttatgttaattattttttttaattttttaacaagtttacaaatatttgatcaaataaaagtgtttgagaaatcatttttttattgacttataagatttgcttttaaatataacttaaatttatgattatcatttttctattttcaataaaataataaaatttttcatttttcattttatcttaaattaaattatttattatgataaaattcccctttatcatttattaactaaaaatttattttttagattgatttaattaaatttttcatatatgaagaatatactattttctaattactatctaaaaattcatttttttaaacaaataattgcctaaaatattttcgatttcatcgtaaaatatgttgttaattgtctcgtttgttaagcgataacaatatcaagtcatcacgtcttgtttttctgacatgttattataacgttatataaaaacatactaatttgaatgaaaaatttaatttagccaaaaaaatatcaaaattcaaattaaacatatgaatgaatatgaangatagaacattcattatatatattttattctataantagtctaaaatagagtgagaattaacaagaagcang

SEQ ID NO: 128881 - DNA, 564 bp, Glycine max
  Clone ID: PAT_MRT3847_87385C.1
gatttattttgcttgactggtcgtgaaaactgcctctcaatgtggactttctgttgtgattcaatgatggagacagatttgaagaacgatggcagtttcaataatcagtctgagagtaggtgcttggactgaaattcattaatgtttttgcggccaccttgtactgattagtcacgtggaaagctgtctttatacttgggatttaaagttgtcttcgattattatatacaacaagaagaaacactggtgaacttagccaaagaaaataatggtaggcatctgttagttggttgactagacggacatggacgtgaaagtattattgaggccctctcgaggataaccaggactgctttaagagcatttcactgtaacatgctaatatctaaatatacaatattattaggtttattggagattagcgtcaaaagtggtaaaaggaattcgatccagcaactaaccctttatttctgcactttatggcaatattttatgctgaataaagtcacatacattattgatcactttattaggtcggtggaatctggaagaaagattattatg

SEQ ID NO: 128882 - DNA, 1433 bp, Glycine max
  Clone ID: PAT_MRT3847_87386C.1
ctttagcaaagtacatcgactagaagacaaaaaggggttgacaaaggaaacgtgttgtacgagggccaatttcttaaaaccttttgtctcgcaacctcacctcttcctccttcaatctctttcggaatttcccaaaatccttagtgggaggaagagatggttctgactcagaagcttcacgaagccttcaaaggcaccgtcgagaggatcactggcccccgaaccgtttccgccttcaaagaaaaaggagttctcagtgtctccgagttcgtcaccgccggcgataatctcgttgccaaatgccccacctggtcctgggaatcgggtgatccaggcaagaggaagccatacttgccacctgagaaacagttcttgattactagaaatgtgccttgtcttcggagagctgcatctgttgaagaagaatatgaagctgctggaggggaagttttactcagatgatgaagataatgatggctggctagcaactcatgggaaacctaaagaaaccaaatctgatgaggatgagaatttaccttccatggaaagcctagaaatcagcaaaaagaattctattaagaaaattccttcctacatgggagctgaggaggaagaagatattccagatatggcagagtttgatgatacttccaatgttattgaaaatgatcctgccactcttcagtccacatatctagtcgctcatgaacctgatgatgataatattcttcgaacccgaacttacgatgtcagtatcacgtatgataaatattatcaaacaccacgagtatggcttactgggtatgatgagtcgagaatgcttttgcaaccagaacttgttcttgaagatgttagtcaagatcatgcacacaaaacggtaacaattgaggaccatcctcacttgccagggaagcatgcatctattcatccatgtcgacatggagcagtgatgaagaaaatcattgatgtgttgatgtcacacggagttgagcctgaagttgacaagtacctatttttattcctaaaatttatggcttctgtaattccaacaattgagtatgattataccatggactttgatcttggtagctccagccattgactaagattttagctgcatgttcgggtataacacgggcatattgtccattgttgcttttcattgatccaaatcaccaatacttttctgttatttttctgcgtataattgttgattgtcacatcacacagttggtgtacatgtcatgtaaattatgtccttgagtcatgactatcaggatgttgaacaagtttcctttcagatgtgtacataattgacatacccattcgtaagacgactatccaacgttatggttgtccctataatactataaattagacatggttgacttcttgttcttgtgaattgttaaattaatctgttttgcattcgt

SEQ ID NO: 128883 - DNA, 300 bp, Glycine max
  Clone ID: PAT_MRT3847_87387C.1
ccggaagaaaaagcgggcaaaagggtgtgtctttgcagcgtgagacggggattgccccagctgtaaaaggaaacatgagaggcatgccaaacagcaggctgcctgcatctactcatcctacacctggcgcccttcctatgggagtatgccagaacatgcgttacaccttaaccggagggggaacgactggggctttgactgacattgtttagctcaggaaccttcttagacccctgcttgatctgcgtgatgcacatgctctccgcaaagcccatgaaccattcttcacctcagcgaagc

SEQ ID NO: 128884 - DNA, 516 bp, Glycine max
  unsure (1)..(516): unsure at all n locations
  Clone ID: PAT_MRT3847_87388C.1
accacaacactgtgccctctttctctctttccttcccagaagccatgggctcatttgcgcggggggccccgtctttaaccggcgtggggctttccacttccaagactccccttcaactcatccaccgccgggggctcgcggggcagccatggcctcccaaangtncgctgggggaagagccaatgagcccatctaaatggagggaggagcactttntgagtgtgtctttaactggggggggggtactcatcgatgggggggacaagtgtgggcacaggaggggagggggaanaaanaagaggagtggnggaaancgtaacagtgaggggtnnggagtattaaaaatacaaagtgtgcttngggataatgcggcgancgcccanacttttccaaggttttcaaactcgggcttgtgtgagggggaacaaatcgtttnggtantgattcattaatatttncgaacagtggggagtgggaggggttttttttcagaacaatgtgtgacatttaagttct

SEQ ID NO: 128885 - DNA, 389 bp, Glycine max
  Clone ID: PAT_MRT3847_87389C.1
gtatcggaccatgtattttttgatctttgggcaaaaaccccaaagcaaacgctttttaaggaacacgttttccattggggggtaaaaaggaacctacttattatggcggggagctgaaaaaaaggggccttaactgctgaccatttctggtaacctgagggggccaaaccaaagggggtatcaaagaatttgaaaagaatgatttttgttgttgggaggaaaaaaaaaggccccattgtccgccggacaggggaacctattgaagattacattggggagccgtgcagggggccaaaatattttggggacccgggctcatgaacccatatatctgtgacccaaaaggcttctggaagaactggaataatcccccccataacaacttctcc

SEQ ID NO: 128886 - DNA, 1212 bp, Glycine max
  Clone ID: PAT_MRT3847_8738C.1
cccacgcgtccgcttttttttcctatctcgttgatttttatttgttttttgagagggcgtacctacctcagtgattgcaagatggaatctcggaacctagtcttttccgtcttcgttctcttctctcttgcacttgcaggagaaagccatgctcgtgcatggctatccgacgaaaattattggcaagctgtttggccaaacactcccattcctgacagtctgcaagaccttctgaagcctggccaatctggtgttgaaaacgttaatcgtctgcccatgatgaaaattgaggacacacaatatccgacaaactttttcttcaataaagagctatatccagggaaaacaatgaatgttgaattcagcaagcatccccttacacaaccatacggtgttctcttttgggtacatggtcgtgacgttaaagacattgaaaaagagggatacactcctgagcagctatgtttaagggaaggacccaagggagaagacaaatactgtgcagaatccttggaaaccctaatgaactttgtcatttcaaagcttggaaagaacgttcaggcattttcaagctccttcttgagtaagcaagaggaatacacagtggagggagtgcataatcttggaggcaaagcagtgatgtgtcataggttgaatttccaaaaggctgtgttttactgccatgaagtccatgaaacaacagctttcatggttccattgcttgccggtgatggaaccaaaactcaggcacttgctgtttgccactttgatacttcggtcttgaactttgaattgttccgtcaaataatgaaagttgatcctggaactaaccctctttgccatttccttggaaacaagtccattttgtgggttcccaatttagccacggagggtgcctctcagactaaaattgttgtttaattagtgcatcttgggcaccatcagaaatgtgtgtattataaataaattataatgtgatgttgtgtatttctgccagccggcactaacttttctagcttagagctggaaatggagctacgaacctacgtgtactgttgttagtttggtaccccaccgaagcatgattcatctcgtgatcgacatgctttcatgatgttgtgatcattaataatgcaataaaaatgtaccgtgtttcatgttctaaaaaaaaaaaaaaaaaaaaaaaaaaaaaaaaaaaaaaaaaaaaaaaaa

SEQ ID NO: 128887 - DNA, 349 bp, Glycine max
  unsure (1)..(349): unsure at all n locations
  Clone ID: PAT_MRT3847_87390C.1
ggctagcctcaaagttgcatttttggctgcagtgctctgcatggttgtggtgagtgcacccatggcacatgcagctatcacatgcagacaagtaacaaatagcctaatcaattacatcatttacctccagaacagaagaacaccgccatcagaatgctgcaacagagtgaagatcctcaatgccgccaccaagaccaccaccaaccaccatacagcatacaactacctcaagtcaaccaccagccaaatctccagcttcaaatccaacaacgccacctcactccccaacaaatagcaattctccatcccctacaaaatcancacctccaccaactacgctaccatcaat

SEQ ID NO: 128888 - DNA, 1555 bp, Glycine max
  Clone ID: PAT_MRT3847_87391C.1
aggtaagctaggacatcacttttttcataaaggcctgcttctccaggcatttgtacatccttcttacaataagcttggaggaggctgttatcagcgattggagtttcttggagatgctgtcttggattatttgattacttcatatctattctcagcttatcccaaactaaagcctggtcaattgacagatttgagatcattgtctgttaacaacaaggcatttgcttgtctagcggtagatcgcagttttgataaatttcttttatgtgattcaagtggcctgtctgaggcaataaaaaagtatgttgactacattagaagacctgtatcagataacagcattaaagaagggccaaaatgtcccaaggcactgggtgacttagtggaatcttgtgttggtgccatccttcttgattcagggttcaatttgaacaaagtttggaagattatgacttcgttcttggactcaatcatgaaattctcatcaagcttgcagctcagtcctgttagggatttgcgagaactttgccaatctcataatatggagttggagtttctgccagtgccctcaaaattgactaaaaggttttcagttgaagctaaagtgagtgggaatggtgtatgtgaaacagcttcagcaactggtcaaaataaaaaagaggcttgcagaattgcttcactgctacttttttcaaagttcaaggctcaaggctggaaagcaaagtcaaaaactttggaagaagttctggaatcaacttctaaaatggaaccaaaacttattggctatgatgagactcccattgatgtaacagataccaataaacacatagtggttaatgcagacccatacaacaagtctaacccagaaattcgccctatgcaagagacagatgaaatatgctctccatgtgtgaaacctttcggccaacggcttcaatcttctgctaagggaaagcttagtcaaatatttgaaaatcgtgattgcagcagtgacttgtcagggacaggaacggcaagatcacgattgtatgaattatgtgcttcttattgttggaaacctccttcatttgaatgctgcaaggcagagggacctgaccacctgaaacaattcacttgcaaggtgaccttagagatagaagaggcccagaatttgattttagagtttgttggggaacctctttcaaagaagaaagatgcagcagagagtgcggcagagggtgcattttggtatctacaacatgaaggttacttgcctagtagtggtaattgacatattgtagaacaattatcatgccacataaatcccaaggcaatttggtgtaggcaatgtcttgattattgagggtgtcgaatgtgttgttataggtaatcatataatctagaaggcaataatagtacaggtttagtaactcagggccagggagggttccctaatggtaaatctattgtaaaggtattattcatgttaatgtattattgtagtgtcaaagttacatttatttgtaatgaccctcgattgtaacagtgaattttctatttactacgtttgaaatat

SEQ ID NO: 128889 - DNA, 657 bp, Glycine max
  Clone ID: PAT_MRT3847_87392C.1
tgaatggatgatgataattatagtggaaatttgtaatctttttcatcaatattttagtatatatataaaacttggttcacttgcattccgtgtggtgttttcttaacgactctaggttccttcgtttcagggtacatagaactttccccttgcatttgtttattgttccatttttagatttacttgcaaggtgaccttagagatagaagaggcccagaatttgattttagagtttgttggggaacctctgtcaaagaagaaagatgcaccagagagtgcggcagagggtgcattatggtatctacaacatgaaggtttcttgcctagtattggtaattgacatattgcacaacaattatcatgtcacataaatctgaggcaatgtcttagggtgtcatttgaaatttctggatgcaccctcattgttattgataatcatataaatctagaagacaataatagataatacaggtttagtaacccagggccagagggttccctaatggtaatctattgtaaagcattatttatgtatgtattattgtagtgtcaaagttacatttatttgtaatgaccctcgattgtaacagtgaattttctatttactacgtttgaaatataaatataagctcccgaaacatttgaatggtaactgtt

SEQ ID NO: 128890 - DNA, 196 bp, Glycine max
  Clone ID: PAT_MRT3847_87393C.1
gaaacgagagggtaccgttgcgatttggactggctgcttcagatgactatgatggatgcaaccgttccattcagatatacatcggttgatgatttcgacactcgtgaaatatgtgccctcgaagaacatcgcgaaggatgaaaatgatacacacagggaccactgcgtgggcaagagattggcgccctctattggg

SEQ ID NO: 128891 - DNA, 513 bp, Glycine max
  Clone ID: PAT_MRT3847_87394C.1
ccacgcgtccgtacggctgcgagaagacgacagaaggggagactcccattgatgtaacagataccaataaacacatagtggttaatgcagacccatacaacaagtctaacccagaaattcgccctatgcaagagacagatgaaatatgctctccatgtgtgaaacctttcggccaacggcttcaatcttctgctaagggaaagcttagtcaaatatttgaaaatcgtgattgcagcagtgacttgtcagggacaggtagtataaaaatcatagtattttcattgattcggtgtctctgttaatcctaaacattgtttcatattttttgtacaaaggaacggcaagatcacgattgtatgaattatgtgcttcttattgttggaaacctccttcatttgaatgctgcaaggcagagggacctgaccacctgaaacagtgagtaactctatttttttagttatttgatctttggtaacatacacatctctacccagatttttatttgtaatcttt

SEQ ID NO: 128892 - DNA, 253 bp, Glycine max
  Clone ID: PAT_MRT3847_87395C.1
cgtatacaaaaacctcaatctccgcgggttcaacactgtgttctgtgttctctctcacttctccgtagatctactttctctctctctctctgagaaatgcgtggggtctcgcttctggcgtttcttcttttcctatccctctgcgcctaaacttctgatcacgactacatttttgtgaaattctgccctctaacgttactttcttgtcctcctataatgcatctcaagtattcactttttttcccccaaccct

SEQ ID NO: 128893 - DNA, 1173 bp, Glycine max
  Clone ID: PAT_MRT3847_87396C.1
gagaggtttcgaaaagaaatgaggcagcttatatgccagattgaggctagttctgactacctgaatggaaagcgcctgtcaatttcctttttacctaatgaccctgcagcagcatctttcctcgaggatgaaaaaaagccagcttctagtgcactgtcaaagtacgtcgtgacactacaccagagagcagagcaaaaaaataattcattaatggaatccagtgtgcttgcaaggctggcgacttgccccgtatgccgcgggcttgccagctggcccgtgtgactcctgcggttcaagagcctgctgttctctcggcgctgggggggcgtgctgaacacttggcacagtggagttattctgttgcattcttggagttgtcttttattccacttgtgaggttgcgtagcttttgcaaatcgaccaaagttgagaggtttcgaaaagaaatgaggcagcttatacgccagattgaggctagttctgactatgtgaatggaaagcgcctgtcaatttccttttttcctaatgaccctgcagcagcatctttccttgaggatgaaaaaaagtcagcttctagtgcactttcaaagtatgtcatgacactccgccagagagcagagcaaaaaaataattcattgatggaatccagtgttcttgtgggagaagaatcctctaaatttgggaatgaaatatcggaaagtgatgaagaggatgcgagaaagaatgtggatggtgccgtggtctttagttcatcctggttacctggaaatgactctaagattaaacaacctacagaaacaaaacgaaagaggaaaaagcagcggaaagagaaagccattgatgacgatgttgtggaggacttagtacttagttcggacgaagatgtgcctccaagccacagcccttctgctaggaaaaatgacgacacagatgattcacctccaaaacaaaaacgcaagcagaggagcacaggactaaaaggttgaaaaaaaaattaatctcaccttgacgggaaataatgataatatgacatgtctagttggcgacctcactattcaagattgatacttttaggtggaatgtgacagaaaagttttgatagttttaatttaacaatcgtttcaatttaattaattttgtttggatgcaaaaagaaaaatagattttatatag

SEQ ID NO: 128894 - DNA, 1272 bp, Glycine max
  Clone ID: PAT_MRT3847_87397C.1
tgcaataaaggaagttaagaaaggaacgcaaaacaaaaggcacaagagaataatgaagagaggatagggtgccatatatgcatgccctctttgatttgttgggaagaaaattgacaatggtggcgatgatgaatgggggaatgattgaagatatagcaataattggagggttgataggggtgcaatttgtttacgcagggaatgctgtgttgctcagttatcttatgtctgtgggcccccgcgcccgtacccttgtcatttttacttcctttgctaccttccttattctcctaccccttgccttctattatgaaaggtataaatggccaacgagagtcagtttcaagttgcttatacagcttctcttgctttcgttaggaggggtaacattgttccagtctctattccttaaaggaatcaatctaacctcgccagcaatgggaacagccatgccaaaccttgcaccaggtcttatcttcatcatcgcatggatttttcggttggaaaaagtcgacttgagctgcacatatagtagagtgaaaatcattggcacattcctttgtgtcttgggggctctcacaatgagcatactgcaaagcatctctacaacacctattaccgctaaagagggaacaattcaattattatctccaccaaatgtaacgtttgacagacacaagataatcggttgtctctatctcttggtcgcaatcctcatattatcaagcaacattgtcctccaggcctttactctaggagattttcctgcaccgatgtccttgtgtgcaataacttcgtttttcgggacgttcatgactgccgcagttcaattggttgaaggtcccctagtcaaaacaggttggccaattgtgggtgttggagacatgattgcctattctcttctggcaggtgcagtgaatggaatatgcttgagcgtcaatggttgggcacttgagaagagagggccagtgttgatctccatgttcagccctattggcacagtctgctctgtcattttctcagttgttactctaggacaaaccattaatattggaagctttgccggtatgttcctcatgttcactgggctctactttgtgctttgggccaaagggaaagaaggctttgcaaaaggaggtggcttagagagtgagtatgatgcagagaagcctctcttaagttaacgttttttctaatgtcaaaagtagtatgtagtaatgtatagtatagtatgtacttattttaaccatagaaacagagtaaataaaatag

SEQ ID NO: 128895 - DNA, 362 bp, Glycine max
  Clone ID: PAT_MRT3847_87398C.1
tgccacgcgtccgtctatatcgagctaattggctatgaagcctaccctactcttatcccttacctttctgcctctgtttgctttgatggctctttcagaagatggtgcacaagttgcggacataactggcctccccatcctgccgggtggcacatattacatcatgccatcgactaggggcgctgccgcaggtggcttgaaactaggtcggactggaaactcaaactgtccaaatactcgccatgcaagaatactgagcaatcgtccgtggcacagctgccaaactcagtagacctgggataaggcctggaaccatattacaggtactgcacttggaatcgagttcgcagagaaaccagttt

SEQ ID NO: 128896 - DNA, 542 bp, Glycine max
  Clone ID: PAT_MRT3847_87399C.1
ttaaccctgcactcgaccatctcctattattcggcctcccaaaccaacatatgaaccttcacttgtttgtagggggtgcatgtttagcataggccgaccatgttgaataggagatatcatggaataacttatggtataatgggcatcagatccacccacagaacctgattggcctctcggtatcttcacatactgtcaggaacggtttggagacatgattgttccgaacatatctgtgccaattactgcctcgttactggaactcaggaacgtaggtgatgtgatggactcaccttcaatgcttactcttgctggggacaatccagaagctgtaaatcacaccatgggaaactgtgtgatggatccactcaaagactttagacggaataacccaactatgtacccaagctccctgcagcccgatcaacattgtgggttatgatccataaactgacggagcggatgctaacacagctgaacctggccggatctatcacttctatgcttatcctagagcagacaaagcttgattgagatggccc

SEQ ID NO: 128897 - DNA, 483 bp, Glycine max
  Clone ID: PAT_MRT3847_8739C.1
gacactgcactttctcaaatagttcagctcgttcaagctgctcagctggccaaagcaccagttcaaaaacttgccgaccatatttcaagggtttttgttccaatagtggtggttgtagcactaattacttggcttggatggttcattcccggggaagctggtatttaccctaaacattggataccaaaagcaatggatgcatttgagcttgctttgcagtttgctatttctgttctggttgttgcttgcccatgtgctctgggtcttgcaacaccaactgcagtcatggttgcttctggcatgggtgcttctcaaggtgttctcatcaagggtggagatgcactggaaaaggcacacaaggtaaaaattgttgtgtttgataagactgggacactaacagttgggaagccagaggtagttagtgcagtgctgttttctgaattttctatggaggaattatgtgacatgacaattgctgtggag

SEQ ID NO: 128898 - DNA, 169 bp, Glycine max
  Clone ID: PAT_MRT3847_873C.1
ctgttactaattataattttttataccgtccttatttatctgtttcattcaggatatgtatcattccttggtttttcttccttatttgtggtttgatgactgactaatgactagggcgtttgtcaatggaatcacctaattaattgggcgtttcttgggcagtggtggc

SEQ ID NO: 128899 - DNA, 754 bp, Glycine max
  unsure (1)..(754): unsure at all n locations
  Clone ID: PAT_MRT3847_87400C.1
tgcatgcctgcagcagtatttaggatcgtttcccctcctttttggacctgattttcagaacaagtttatgatgaaaagcataatgatttatagtgtgtttgaattagtttcatagtaaaatagttaattaatttttcatgatgaaagtaaagtagcaagtagttccttttactttttcatgccatcaccttgattttgtggggttgaattgattcttatgtgttaatcaatgtttcctagtttatttatttttttattcatgggataggaatcaaagatttttatgagatttataataattcatatattttattcaatcaattgaattatacaggttggtaaagtgtaacctatgattgttgagtgaaaatcttatactatttttcttttccataatcccagacctagctatcaagaagcgagcgcccaagcccatataaatctacatgagaatctcatatttccaatgtatcatactttggaatttgaccttgactcaacattatccatgtttcaatctcacgcaattttcctagcatcaagaaattacaagatgtcatataataggaacttggaagtaaattgtcaaaagggcaacctagtgcattagttcccatctagntgggtttggggagagactatcataatacaacaccaaggatcgctctaaacagaagtaaacattaaaacttggattcacgttatattattttaagtagcattaanacatcaactaagatgaaatgttcacatg

SEQ ID NO: 128900 - DNA, 187 bp, Glycine max
  Clone ID: PAT_MRT3847_87401C.1
atgaattgcaatccaaattaccaatacctttaccaatttacattccaatatcaatccacttttcaaatgatttgacggttgtgtttttggatgagatgcaattatcataaataactcaataaattgcaagcataaaatgggtggacatgaattaatgttgcctttctaagttctgaggaagtggttt

SEQ ID NO: 128901 - DNA, 1442 bp, Glycine max
  Clone ID: PAT_MRT3847_87402C.1
cacgcgtccgacgtaggtctgactagtacactatcctctttataagaggaagtgcagagattcattgactttcaaaaacccaaaaccctaaaaagcgcaagaaaacaaaatccccaaaatatctctcgctctgaaaccggcatggatttgcagcagagcgagttcgatcgcctcttgttcttcgagcacgctcgcaaggccgcagaagctgaatacgagaagaaccctctcgatgccgataacttaacaagatggggtggagctctattagagttgtctcagtttcagagttttcctgaatcgaagaaaatgacccaaggtactgctaattcactatgccctaggtatttttttactcaattgttttttcggttaattaagggcctgtttgtcacaggtttttttctctccataaaacatcacttttataaaaaaaaaaaaaaaaacatttttaatagttttccatgcgcttcagcttttcaaaataatctgaagctggaaaaaatataaaacctggttaaaataaaaagttatttgaatagtttctcataaaatcacttgtttttaaaaaaatggattttataattgtaaacaaacataattcctgctctttatttataaatctctaaaaaagagtcactaggtcattgtacatcagaagcactttttttagtattcctgagcttgtgattttaattttcgtttttgtttttgttttgtggatttacagaggctgtttcgaagctagaggaggcgcttgcagtgaatcccaagaagcatgacactctttggtgcctgggaaatgctcacacttcgcagcgtttttaattccagaccaggacgaggcaaaggtttattttgataaggcagctgagtactttcagcaagctgttgatgaggatctttcgaatgaactttaccgcaaatcattggaagtggctgctaaggctcctgagctgcatgtagaaatccataagcatggatttggtcagcagcagcagcagcaggcagcagcaacagctggatcttctacttctgcttcgacaaatactcagaagaaaaagaagagcagtgatctgaagtatgacatatttggatggataattctggcagtcggcattgttgcatgggtgggatttgcaaaatcgaacctgccaccacctccccctccacctcctcgataagtggagccatttgattttatctcatacattattgattattgagaatgatatttgatttcgggcagtgccgtttatttagttttttttgacagtagtaatggttgtcatggggcttatcttatccatcatgcgaaattttatcttaccgtgggttgagcagttaaaatgtccggcttagatctttgctagtatttgcaaaatcgaaatcattgccatttgccatcaggcaagtattgaatataataagaattttgctgc

SEQ ID NO: 128902 - DNA, 106 bp, Glycine max
  Clone ID: PAT_MRT3847_87403C.1
gactcactatgggtaagctgggcgcaggtgggtcccgtgcccggactggccgcggtaagacccacgcgtacgcacacgtgcgcgtacgcatacggttctagatcgc

SEQ ID NO: 128903 - DNA, 986 bp, Glycine max
  Clone ID: PAT_MRT3847_87404C.1
taaaaataggaggtaaaaaatttcccttttctattttcttttctcatccaaataaaaaccattagatactgtaaggcccgaaaaatccacataaataaaattgcaattgcacttttgacagcatcattcccccattgctaagtaaaggggggctagtaagcacatcattaaggaaatattctatagtccaaacaagctgggtgttggtaagggccccattgtcatctgtgagccttgcacagcatgcataagctaatgctagtttgtaggaatcattcaatcaatcagagacaatctagtctctggtttgtctccttgccaagtacaggcaagcagccaagcacagtcagaaaaagtttgacttcctgttattgctgttaggtcaatgtcgctgctttacccattgcataatcttcaacaatactaatcgaactcttgctatggcgcagagaaaactctgcaagtagaatctggcattcttccactgttagatcaccatgacggcccatacgagatattctatcacaaacagagtggtgcatgaggattcccgcagcaactgaaacattgaaagagtccaccattcctgccataggaatactgcaatgcaaatctgacagctccaatgcctcatcactaatacccctattttcattcccaaccacgattgcagttgggcaggaccaatctaagtcatgaatagaaaccgcatccattcccacatgagttgtcgcaattcgataaccgcgtgatttcaacattttaaagcactcctttgtagagttccacagttcaatgtccaaccatttctctgcacccatgctcacatggcgattatctttataccttttgttggcgtcacacgacacgacgtggacggactggacgccaagcgcgtccgcggaccggaacgtggcggagacgttgccgaagtcgcagagcccttccacgacgaggcagaccgagtagctccggttccgaaccac

SEQ ID NO: 128904 - DNA, 234 bp, Glycine max
  Clone ID: PAT_MRT3847_87405C.1
cattcatcttctctggtttcgattccaattcgctgggggacagaattcgatacagcgttttcgtaattgtgtagtggaatttcggggatctgaagattgatgacaaatagtctggtttgggtaccagtaacaaaaatcaaggaaataatggaagcacatcctactttctcgcattgaaagatcaaagcaactcaataacatggggatgtctggagcaatttattgcatccttgt

SEQ ID NO: 128905 - DNA, 662 bp, Glycine max
  Clone ID: PAT_MRT3847_87406C.1
tcgacccacgcgtccgcggaacagcctttctggggagatacctggagtggttgaagcattccacttgacagaccttgatctttcagagaataaacttagtgggaaaataccagatgatttgggaaggctcaataacttaaaatacttgaatttgtatagcaatcagttatctgggaaggtaccagaaagcattgctcgtctgcgggctctgaccgattttgttgtttttatcaacaatttatcaggtactcttcctttagacttcggtctgttctcaaagcttgaaacatttcaggttgcatctaatagtttcacaggaaggttgccagagaacttgtgctaccatggaagtttagttggtttaactgcttatgacaataacctgagtggggagttgccagaatctttaggaagttgcagtagcctgcaaattctgagggttgaaaacaataatctttctggcaacattcccagtggtctatggacatctatgaacttgacaaaaattatgataaatgaaaacaagttcactggtcaacttgctgaaagatttcattgtgatctttcagtcctgtgcataagttacaatcaggtgtctggtataattccgctcggagtgacttacttgaagaatgttgtgatcttgaatgccaggaacaacc

SEQ ID NO: 128906 - DNA, 408 bp, Glycine max
  Clone ID: PAT_MRT3847_87407C.1
ctcgaactgagaccattcatagatacaatagatcaacttaactcacatgatcctactggggctctatggctaactcgcgctcacatttactctctgtccatctccatatccatgtgctctcaaggatggttcaagatcgattatgcatcatcaactgtgctcagaggcgatacaaagcgaactgtcttccccctcccattgtactaggagatggataggagcacccttcaagcggtgaatgctctactctactagctgctgcgctagcaatcgtggctacctctttcatcttggtgactgtctctaccattatcacaatgatgtgtgcgctcagaaacaactgcaatgattcatcagaatactatggatacagcgaattggctgcagtttgttattctaccctctctg

SEQ ID NO: 128907 - DNA, 237 bp, Glycine max
  Clone ID: PAT_MRT3847_87408C.1
cacccgtttcgttttcgtgagaatacaggtatagacaggggccggcgctatgaatatggtcccctggggggcgcgccattactgatggtcacactaacagttttgaagactgcgcacgatattatcctgctcacccatattcaatgactatcatattatgtgcagacccaggtggcccctcaatgtaccgagaaacctgtgaaggaataccgcaatacattgagatgccatccttga

SEQ ID NO: 128908 - DNA, 103 bp, Glycine max
  Clone ID: PAT_MRT3847_87409C.1
gcacttggaagacgcgagagggcactcggccagactgcgttcaggccctcatcggtgaattcatagccacctccctctttgcctttgttggcgttggttcttc

SEQ ID NO: 128909 - DNA, 230 bp, Glycine max
  Clone ID: PAT_MRT3847_8740C.1
taacgctctaactacttcaaaaaaaactgtttggtcccatcatatatgaactattaatagtgacacctaatatactctcttgtgttcggtcgcatatttcaggtatattataaaccttcaattcggccaaagcggtgaagggctcaaaaatttatccactatcttaatgtccaagctcatctaataaacaccatacacaccactatatatatatatatatatgccaattt

SEQ ID NO: 128910 - DNA, 271 bp, Glycine max
  unsure (1)..(271): unsure at all n locations
  Clone ID: PAT_MRT3847_87410C.1
gacccacgcgtacgntcatcaatcaattattcttccgtttattgtaaaacaacaacncaatnaaaaaagccgcctttttatccaagtcactatctcaattctacattcttgtacatctattccattctcaaatttcaactccttcactacccctccttaaactacttcgattatccttcccattttttctacctaatactatactacatatcttccttaattaaactttaactctttacctctcatacatatacactctacccttattttt

SEQ ID NO: 128911 - DNA, 731 bp, Glycine max
  Clone ID: PAT_MRT3847_87411C.1
taatttgcctcattgctgtcgccctttgtggatttgctagtgggctcttgtatcgttatgatgcttcatttatttttctgattctggctttagttattgcagctggtgcttctgctgctcttgttttccgccagggttatgcagatgcaccagggttttcttgcccaggggttccccttctgccaaatatttgcatcttttttaacatgttcttatttgcccagttacatcatgaagcatgggtgagatttgtgattctttgtgttgtcatggttggtgtttatgcaatatatggccaatatcatgctaaccccagtgcagaagagaatgtctatcaaagggcacccgaggaagaagctctatgagtcatttgttcaataatatacaatgtgtttcattgggggatggttaaaatgtatccagtaaattagctgttattccttctgttaggaatgtccatcttgtatgaataactatctggctatactcgctactagattgtatatgatatggtcaggttagcatgtatatgatgtatgtcttgttttctacttcatagaaaaagaaaaatcatcatgtattttatgcgagttttaagttgatccatcttttgcatatgttgaggcctacaatttgtcaaagagaggctgccccattaaagaaatgtgatatgtaataatttattttattatatttgtttgtgtgtgaaaaaaaaaaaaaaaaaaaaaaag

SEQ ID NO: 128912 - DNA, 456 bp, Glycine max
  Clone ID: PAT_MRT3847_87412C.1
ttttctttttgagcacaccgaacggtaatcggtacactcaaattattgaacaacaactgttacaacgacaacaacggagaagagtgaagacaggattcttactgtacgtcctgaatggaaaggaagatgttaaaaggagatgagtacttagagagaaatgccaaaagaattttgagaaatgtaaaagattttgcctttgtacaacacacagtgtaccttcttgtcatcataaaaccactgtgtgggaagattttggagaagcaatcaccactggtgaccccactgaagcacttacaattagaaggaagaatgctaacaactgtggacaccctaaggatcagtaatcaggtgaactgttaactgaacatgatgcttagattataactgaatacactgctataaaggaggtgattgctgtaagtgggagacattatgaggagagggataatgcaattt

SEQ ID NO: 128913 - DNA, 427 bp, Glycine max
  Clone ID: PAT_MRT3847_87413C.1
cagaaacaatattgacagtaatgttttttttaatagcattaacagaaatgtttacatttagcttctttatagacggcaaactaaaaggtgaaataatccgttacaacttaggttataccaatcaaaagaatatcaaaataagaataccggtccactggactaccgacaatagggatgttcaaaacacaaacattataagttgacaagaaacaaggggccgatatactattgaggctaaggacattaacacaaaactattgctttgggatataaacattccaggggaaaccaaagaattcatttaaaatctgtaatcaacaatttgaccaaagacctgatataggatctctggaagctatttatcggaaaaccacataaagacctgcatcaagtgcattctcgcacaaaatttttacgatacgagaag

SEQ ID NO: 128914 - DNA, 271 bp, Glycine max
  Clone ID: PAT_MRT3847_87414C.1
ggcattgggatcaactggctacaaattccacgatattactattgcagctatgccgcatattggatgaacatcagcgatactcaatcagctgctagatatcaggtgacaatatttcgtctgccatggtaggaaaaggatccctctgatttcagagagccgatgctattcctctgaataagcgtagacacaatctgctgatcatgaggagctaggagagtttgcttgcgctcacgtttctcacgtcgcatgtgatcacaaatcagcagaagct

SEQ ID NO: 128915 - DNA, 221 bp, Glycine max
  unsure (1)..(221): unsure at all n locations
  Clone ID: PAT_MRT3847_87415C.1
cgccactttattctttttgttttttattttttttgttttgttttttatttcttgttttctttgtttatatcacctttgaatatatttctttgatattttaggatgagatataggacataacaagcagtttgtgcatattacacacttcttttaagcgaacttgaacaagacttaatcacatgtaaacacaaatgatcccaaacactttnttgaatgcggac

SEQ ID NO: 128916 - DNA, 210 bp, Glycine max
  Clone ID: PAT_MRT3847_87416C.1
cccacgcgtccgtaggctgcgagagacgacagaagggtacggctgcgagaagacgacagaagggggccttgagtttttcataaaggagtatattgtgaaaaccaataaagatctaactcaaaagtttaagttagcaaaaagggccctcaacaatgtggaaggaattttaacgtgaaagtaaattttggattcttcccaattttgtagctg

SEQ ID NO: 128917 - DNA, 1274 bp, Glycine max
  Clone ID: PAT_MRT3847_87417C.1
gcaaagcagtcgtcctgcccatggggtcccgggctgagtcaatcatcgcccttcgcttcttgcccatctgggtcaagggcctcctccagtgcatcccatattctggtatatgatcggaagtctcaaaggcttgttgaagaaataattgacaaaaaaattgtattgtccatgagagccatttatcagtcaaaaataggtcttggcctaatggacataggggtgaaggagctcttgcaaagcatttctgaaaagcaaggagcacgaatggattcacctgaatcgtctgcagatataccaaaatttattgaatcttttaaggatcaaatcaatttggctgaagtcaagtatccactggaacactttaagacgttcaacgaatttttcatacgtgagttaaagcctggttcaagaccacttgcttctgctgaacgtaatgatgttgctgtatgtgctgcagattgccgtcttacggcatttaaatcagttgatgatagtacaagattctggatcaagggtcgaaagttttcagttcaaggtcttttggggaaagaaatgtgttccagtgcttttgttgatggaccaatggtgattttccgtttggcaccacaggattatcaccgtttccattttccagtatcaggaattattgagcaatctgtagatatccctggatgcttgtatactgtcaatcccattgctgtaaatagcaagtactgcaatgtcttcacggagaacaagagagttgtttcaatagtttcaactgtagattttggaaaggtggcatttgttgcaattggagctacaatggttggtagcattacttttacaaagaaaaagggcgactatgttaagaagggagatgagtttggatatttctcattcggtggaagcactgtaatttgcgtttttgaagagaattcaattgcaattgatgaagaccttttagcaaatagcgccagatcactggagaccttggtttctgtagggatgagattgggtgtctccacgaggaaattgtcttgatatataggaaatgttgaaattgaactctgatttcttttaatcatgacatcataggataatcatgggagatgttttcccaacttgtaaagtgaacctttttcaacattattgtatggtatttactcttgctgactctatgttagaacttggaattctccggtttgatctatttaaaaaaatcttggatatgtttaagctctatagaaatcccatcttcccatagtcaaaacaaaaaagggcggccgccgagt

SEQ ID NO: 128918 - DNA, 667 bp, Glycine max
  Clone ID: PAT_MRT3847_87418C.1
tcccacgcgtccggccaaaaaagattaccaccaggaactaagctgcaatcgtcacttcctgtcttgtctctgtttcgatctctttcccaacgctttatatccggggcggccttcatttccctcttctataattcttcacaccacaaacaaacaaacctctttctctctctctctcttcaattttcttcacattactctcattagttcccccatttccatttggaattttgtaacacttcacgttcttctaggctcaaccattcttaatttgcaactaaacaagccaacgtgactacatagattcctcttcaataagatttatggtgtgctatgagtgatggtgttagagaattaataatttggacccagttacaagttgtggagaaagtttgcattttgacaagtttgtgaatgtgggaatggaagctcgcatgaggaagtaccggcaagtgagtccagagagggccaaggtgtggacggaaaagcccccaaagtaccatcagaaccggaaggtgccggtgctttactatctttgccggaataggcagctagagcaccctcatttcatggaggttcaactttcatcccctaatgggttatatttgagagatgtgattgatagactaaacgctttgagaggtagaggcatggcttctttgtattcatg

SEQ ID NO: 128919 - DNA, 814 bp, Glycine max
  Clone ID: PAT_MRT3847_87419C.1
cccgcgtccgaccaggaactaagctgcaatcttcacttcctgtcttgtctctgtttcgatctctttcccaacgctttatatccggggcggccttcaattccctcttctataattcttcacaccacaaacaaacaaacctctttctctctctctctcttcaattttcttcacattactctcattagttcccccatttccatttggaattttgtaacacttcacgttcttctaggctcaaccattcttaatttgcaactaaacaagccaacgtgactacatagattcctgtattgcctttcttattggtcactttaacacaggtctttcttttattgtttaataatcattgctttgttattgtttatgatctttcagcttcaataagatttatggtgtgctatgagtgatggtgttagagaattaataatttggacccagttacaagttgtggagaaagtttgcattttgacaagtttgtgaatgtgggaatggaagctcgcatgaggaagtaccggcaagtgagtccagagagggccaaggtgtggacggaaaagcccccaaagtaccatcagaaccggaaggtgccggtgctttactatctttgccggaataggcagctagagcaccctcatttcatggaggttcaactttcatcccctaatgggttatatttgagagatgtgattgatagactaaacgctttgagaggtagaggcatggcttctttgtattcattggtcgtgtaagagaagctacaagaacggatttgtgtggcatgatctctgtgaagatgatataattctacctgcacatg

SEQ ID NO: 128920 - DNA, 696 bp, Glycine max
  Clone ID: PAT_MRT3847_8741C.1
caaagcaacaaaagattgccactagttatatatcgttttgccataagaatgaatgaataactgaaattgagactacaaaaacaaatcaccagtcaaataatgaaaaaacaattgtcaagtggctttggaatcaacagaaaccagcagcacagctagacagccatcatcagtatcaaccgctgataccattgccaacccgattccagcataaagggcagcaacagtcagctacagtaattggttagtgcttcaaattattcacgaacacatgcatttcatattaaagatgcatcagctaccacctcacagctacagtgtcatggagcagtgtgcattgtccccttcactgtgattcgaaataaacaccagcacattaaagttcatatttaatacccacagttttatgtttagtatctgcatctgaatcaacaaatgacaggtccaactcctaggaggcatcagctacatgacaaaatatggtcacctcgtgttcatcacagcatcaagaatccttttcagaacacaatgatcagatcattcaggaaaaaaaccaactcaactaatttgtctgtctaatcagcacacttggtaaaacaatcagttctaaaaaccagcgtacttctttgcaccagcatcaaattcacgaccaatcatcaatgaatagaaacagcatcaacagcaacaaagtcaacatgc

SEQ ID NO: 128921 - DNA, 852 bp, Glycine max
  unsure (1)..(852): unsure at all n locations
  Clone ID: PAT_MRT3847_87420C.1
ccacgcgcggatctgatctcatcggcctctctcttttctttaccactccctttctctcatttcttcaatttccacgttttaactctcagatcaaatgcttcaaaacaacttcgattcctctcactctgtcacggcactcaacaaatatcattccaagtgaaagggcattcacacactgcactgcactgcacttcacttcacttgtcgcttaattcgtcaatgtcatttggcattcattaatggcagcgagttctagaggcttctccactacgcagtttgatttcaagctcagagtaacgcgactcaatgccgctctgcttcctaagagtcccgtgctcgaattaggtcccagaaagcgtagaaagctttgtttcgacgctgaccgagttcgactcggtaatggcgcaatacgctgttgctgttccgactcggttactccgattcgcagaacgagtggacctggcaaaggcggtgataagaacgaggaacggaggttcgacaccaaaaagccccctcacattcacagagtgagggttcaggcctcccctgccgcaatgcctttcgcttctccaccatcatttctgaagcaggaaaaattctttcctcgttgcaccccaagaaattctggcccacagtcacgtgatacgccccccaaaagagacactggtatagcaaatgagaaggactggggtatcagcttgttaaacgaaaatgttaatgagtctggcactaatgaagatgggagtacctggtacagacaaagtgggggagaaccgggtgaaaatggatatccatgtacatggacnacaatgggtggtctatcccatgatggccccctctnaatggaaatat

SEQ ID NO: 128922 - DNA, 270 bp, Glycine max
  Clone ID: PAT_MRT3847_87421C.1
acaaattgatgggctcaataccctaagacagggaacccttccaaccaattttcacatgctcaccactgcctaggaataaaaggaggacaacaagggtatataccacaatttcacaccgcaacacttactccatctaccaaatttaagatttttcaccattacgtacgaggcccaatacctttccggttttcccaacatacaaatcccctgactggatcatgccaagaagccttccttggactgacattaatgggaactgagccacagcta

SEQ ID NO: 128923 - DNA, 625 bp, Glycine max
  Clone ID: PAT_MRT3847_87422C.1
tagctcgctagtagtaatgtctaagggcacacagtatttgcagcaatcatacaaagttagtgattcatttccttttaagtggattaccaaaaagtggagggagggcttttacgtgactgcaatggccacctcagggtcaagatggggagttgtcatgtctcgtggtgcgggattttcggatcaggtggttgaactagattttctatatcctagtgaggggattcacaagcgttgggactgcggatatcgaatcacagctactgctgcaacttgggaccaagctgcttttgtcctgagtgtgccaagaaggaagcctttggatgaaactcaggaaacgcttaggacttctgcttttcctagcacacatgtcaaggagaagtgggcaaagaacctctacattgcttccatttgctacggacgcacagtttcttgaccccgtaaacgtggctgctgagaagcacgatccgccgaaatatttcaagtccaggccccaagaaattttgatgacaaaagttttaatattttgtatgtagcagaatgaatgtctatactgaaacaaactaaaataaccgaagtgccattcgtgtgcaatttgttttatgttaatgattagtttaagttatac

SEQ ID NO: 128924 - DNA, 3243 bp, Glycine max
  Clone ID: PAT_MRT3847_87423C.1
aattcggctcgaggttttcttcatctctttttttatttctctctctcatctttgtccatggtttcttcgttctctgcgtgatcgttatggttttttggaaccctaattcggccgcgacgatctctctttttacacagtttctagcagtctagacagtgtagatcgtttgtagaagcttttcagctcgtcacattttgctccttcttctgttttcgttgttcggcggaaatcagcgcggttccttcggagaacttcttcgaggtttttggccaatttcgcgcgtcgttctgctctgaccgaaacgtttctagaatttcaaatatcttttctttcgtcggaatttgcgaaggaggatgagatttgaaggatgaacgatgccggtactgcgtagcggagcgcgcaagggccgggcagcagcgaaacagcaacaacaagaacaacaacaacagcaacaaaagcagcagcagcagcagcatagtcccgtggtggagggagaggctattgcgacgaggacttcgtcggcggcgtgcggcggcggcagcagcagcggcagtgccggagagtaacaatatcaacaacaacaataataccaataaccagcagcaacagccggagcaggtggcagtggtaaatgagaacgtagctattgcggtgagggaagaagagaataatcgggtagcggaggaaggtgttgttggcggtggtggagcagagagggaaggggttgcggagaaagagatgggtggctgtgacagtgggggaccgagcaatgataaggccaatgccgctggggaagatgacgccaatgctcctcaggttcctgagaagatccaagtgggtaattccccttggtataaagtagaaagaaaacttggcaagggtggatttggtcaagtatatgtagggcgacgtactggtggaaatttgaatgagagaactggatctggagctgtagaggttgcattaaaacttgagcatagaactagtaaaggatgtacctatggaccaccctacgagtggcaagtgtacaacactctcggtggcagtcacggtgtacctcaagtacactacaagggcctagtagtaatgtctaagggcacacagtatttgcagcaatcatacaaagttagtgattcatttccttttaagtggatcaacaaacagtggagggagggcttttacttgactgcaatggccacctcatattggaaaaaatgcactcgtcatgtctcgtggtgcgggattttcggatcaggtggttgaactagattttcctatatcctagtgaggggattcacaagcgttgggactgcggatatcgaatcacagctactgctgcaacttgggaccaagctgcttttgtcctgagtgtgccaagaaggaagcctttggatgaaactcaggaaacgcttaggacttcttcttttcctagcacacatgtcaaggagaagtgggcaaagaacctctacattgcttatttttcttcttcgaggtcgccttccttggcagggtttccagaattgttggtctctaacattattttctcagggggaaaacaaaggctatctgatttgtaagaagaaaattgtaacatctcccgtgacccaatgttgctgtagtcccctaccttttcagcagtttctggagcatgatgtagacttaaagtttgatgaagagcctaactatgcaaaatacatttctctatttgatgggattgttggccctaacccagatattagaccaattaatacagaaggggcacaaaagctcattcgtcacaagagaggacagtttgcgaaggaggaagaggacgatgaccaacccaaaaagaagattcgtataggtttgccagcatcccagtggataagtgtttacaatgctcggagaccaatgaaacaaaggcacaagagaggccggttggcgatggaagaagaggacgatgaccaacccaaaaagaagattcgtataggtttgccagcatcccagtggataagtgtttacaatgctcggagaccaatgaaacatagatatcactacaacgtatcagatacaaggctatcccagcacatcgagaaaggaaatgaggatggcttatatattagcggtgttgcttcatgtcagaacctatgggcgttaatcatggatgcagggacaggtttcactgcccaagtttacgagctctcacccttctttctccataagaagacatgcttgctacacactttccaaccaacatacaattcacccaataatgaagaggaaaacgggagctagctagtagtaatgtcttacgacacacagtatatgcctcaagctgtaaacgggagctcgctagtagtaatgtctaagggcacacagtatttgcagcaatcatataaagttagtgactcatttcctttcaagtggattaacaaaaagtggagggagggcttttacgtgacttcaatggccacctcagggtccagatggggagtcgtcatgtctcgtggtgcaggattctcagaccaggtggttgaactagattttctgtatcctagtgaggggattcacaagcgttgggactgtgggtatcgaatcacagctactgctgcaacttgggaccaagctgcttttgtcctgagtgtgccaagaaggaagcctttggatgaaacccaggaaacgcttaggacttctgcttttcctagcacacatgtcaaggagaagtgggcaaagaacctctacattgcttccatttgctacggacgtacagtttcttaaccctgcaaacgttgccgctgctgagaagcacgatccaggcccaaagaaattttgatgacaaaagttttaattatttgtatgtagcagaatgaaagtctttactgaaacaaactaaaataaccgaagtgcccttcgtgtgcaatttgttttatgtcaatgattagttaaagttatgcagacgcaaaaaaaaaaaaaaaaaaaaaaaaaaaaaaaaaaaaaaaaaaaaaaaaaaaaaaaaaaaaaaaaaaaaaaaacccaaaaaaaaaaaaaaaaaggggggggccgttttaaaggatccaagtttacttccccgggcttgcaacgtaatagtttttttttggggcccccaaatttaaattcatgggccggggtttacaccgtggggatgggaaaaaccttggggtacccaaattaattggctttgaagaaaatccccttttccccagttggggaaaaaccaaaaagccccgcacgaatcgcctttcc

SEQ ID NO: 128925 - DNA, 250 bp, Glycine max
  unsure (1)..(250): unsure at all n locations
  Clone ID: PAT_MRT3847_87424C.1
ggctttctgacaagcccctcaggctaccccttcaggatgtgttcctatatctggttttgagggagacaacatgattgagaggtccacacaccataagagntccaanggtccnactctgctagatgtacttgaccatatctctgagctcaagaggctctctgacaatcccctcaggctaccccttcaggatgtgtacaagattggaggaattggagctgtgcctgtgggacgggttgagactggtgtcttg

SEQ ID NO: 128926 - DNA, 170 bp, Glycine max
  Clone ID: PAT_MRT3847_87425C.1
atttcctattcgcttctattataattggaatttatagttttgtattacacccaattaatgtttacagctgctgtattttatttttacctgctgtcctataatacacatgtaacacctttattattgttataacttattttcttctcctttcatcatctattttctctcct

SEQ ID NO: 128927 - DNA, 496 bp, Glycine max
  Clone ID: PAT_MRT3847_87426C.1
aaaaaaaactagtaattttaactttgagaatttttattttttatatactaagaaaaaattgggacattttcatttcttcaatgtaggaagtgagaagtttgtaaaatgatgaaaggagacgggaaacatgacaaccattggtttcagaggatgcaaaggacggtgtagaccctacagcacagagacacatacagagaggtggcaaaaagcaggaggagggaattgaagaagacaagtcaatttaaaaacggttaccaaacatatacaactacattgtcacaattcaattccccatataacaacacaagaaaaataagacatgggaaagagcgcaaaatcagatgacaacttcacattcaacaaattgaacttatgtatcataaactctatgactgtatgagtgagaagggttcactaattaaccaggcattttttttataagaaaataaaactaagaacaatggcttgtttaattttgtgttactgacattatact

SEQ ID NO: 128928 - DNA, 473 bp, Glycine max
  Clone ID: PAT_MRT3847_87427C.1
cccacgcgtacgaacttggatatcgtatcgtttagctatgcctatggtctcccaggagcgatggttagtggaagcggcgctccgagttgggaacacctttctcttcggacctgacggcgccactcagatgacttgatccttatatgtatatatcatgtattcttatcctttgcttttctaattctatctatatctcggatttttcattttcgttattattgatttttcatttttgttactcatattgttttgattacttttgttatatttttgataactatttttatttttgtacttttatttattatttattattctttttttttttctttttttattctttattttttattttttgttttctgttatttcttttttttttttttttttatttttttttttatttttttgtttttttttttatattttttctttttttttttctttatttttttttttatttcttttttttt

SEQ ID NO: 128929 - DNA, 462 bp, Glycine max
  Clone ID: PAT_MRT3847_87428C.1
ctcgaggttgatgataaataccagtactcctgtgagaacaaggtcaacactgttcatggatggatcagtgttgatgctgctgatgcaccacccgtgggtttctggatgataacgcccaccggccagtttcgtaatgctgggcccattaagcaggaccttacttcccatgatggccccatcaccctctcgatgtttgtgagtactcactatgctggcaaggaggtaaccatggcatctcaagaaggggagatttataaaaaggttcctggccctgtatttgcctacgttaacaatgcttctgacgaggatgacacactatccctctggtcagatgctgttcagcagcaatccaaagaagatcagaagttggccttacgattttcctaaatcagtggatttcattccaccggatcaaaggggaatagtgttgggaagattattagtccaagataggtacttcag

SEQ ID NO: 128930 - DNA, 446 bp, Glycine max
  Clone ID: PAT_MRT3847_87429C.1
ttatattgttcaatatgagtccaccatctcaaaaatatgcgtccaagaatgatcctaagaaagagcacgaaagtgttagcaatcagttgggcaacaaggcaagtccttctggaaaacagggttcacaaattactaatgataaagtgaaatcgaatgataccataggagattttttgggcaatcgacaagattctctacacaaaaatggttctaagagaagccaatagggtaaaaaataaacaggtttattcacaagtggaacttattatgtgggaagaaaatttacaacaacaaattctactattagttaaatattcaatatttatttccaacttgtttagactctggtgtttacaaataagatattgtatgtacaatgaagtggatagatattgatttcgattaataaataaatttatatggctatttataagtaagttttaaaa

SEQ ID NO: 128931 - DNA, 1341 bp, Glycine max
  Clone ID: PAT_MRT3847_8742C.1
ggagtccttcccctcagaggagcacttcccctcctataatctcgatctttgtaatcatcaggtccggacttacccacgtcgacccacgcgtccggcccaaacgtttcctagccgaaaccctagctacctcttccttaatccctaatctctatttctctctctctctttctctctgcaaaacaaaaatgtctcacttcggacgttcgggtcccccagacatttccgacacttactctcttctcgttctgaacatcaccttccgtaccaccgccgacgacctattccctctcttcgacaagtatgggaaggtcgtcgacatcttcatccccaaggatcgaaggactggtgaatcgaggggttttgcgttcgtgcgttacaagtatgctgatgaggctcagaaggccgttgagaggctcgacgggagaatggttgatggtcgcgaaataacggtccagtttgcgaaatatgggcctaatgctgaaaggattcacaaaggaaggattattgaaacatccccaagatcaaggcgatcaaggagccgtagcccaaggaaaaggcatcgtgatgattacagagacagagattataggagaagaagtcgcagcagaagttatgataggtatgaacgtgacaggcatcgtgggagagacaaagattatcgtcgcagaagtaggagccgtagtgccagtcttgattacaagggtcgtggtagaggacgctatgatgatgagcgtaatagtagaagccggagcagatcagttgatagccgctcccctgcacgacgcagtcctagtcctcgaaggagtccctcccctcagaggagcacttcccctcaaaggagtacttgccctcctaccctcccagggggcgacaccccaacggagtgttgcccctaggaagagtccacggggtgaaagtcctgcgaatcgtaacggcgatgggcgttctcctacccctcgcagtgtctcaccacgcggtcgccctcatgcttctcaaagtccttcccctcgatattcaaaagggtatgaataagctatgttcatgaaaaattcttaagaggtttgacttttttacctgtagttgttttgcgtgtatggtatcttcaagtttatttgaatattttaatatctgagtgttatttggtagggtcactacgttctctgatgtttgaatggattttatattggtttgatgctttgttgtttattttctgtgtttggtaactattagaccttgcagttgataggttattatctcagtttgagggattttgccattttattttcattatactgtttgcatttttctctactatccatgagattctgatcttgatctcat

SEQ ID NO: 128932 - DNA, 735 bp, Glycine max
  unsure (1)..(735): unsure at all n locations
  Clone ID: PAT_MRT3847_87430C.1
cactcactcactcattctgccgccacactgtcggcaacgcccacgttacgctccaaccgcgacggcgcgccacccatttcgcctccctacacaatgcagctccaccgtgtctccgccgcatcgaaactgagcctcacgtgcttcagcttcgccttgaaattcgtgctgttgtacgctgcggaggcacagcttcagcaccgcggccccgacctacattggtaccccggaaccgccacctggtacggcgaccccgaaggagacggcagcaccggtggggcatgtgggtatggaacaatggtggatgtgaaaccattcagggctcgagtgggggcagtggggcccttgctgttcatgaagggggaagggtgtggtgcgtgctacaaggtgaagtgtttggacaagagcatttgttcgagaagagcagtgacagtgataattacggatgagtgccccggttgcccctctgaccaaacacactttgatctcagtggtgccgcgtttggtcgcatggctattgctggcgagaatggtccactcagagaccgtggtcaaatccccgtcatttaccgcagaacgctgtgtaaatatcctggaagaaaaattgcatttcatgttaacgaaggctccacaccattnntggctatcacttctggttgagtttgaggatgcagagggagatattggctccatgcatatacgagaagcagggtctactgagtggctacaaatgaacca

SEQ ID NO: 128933 - DNA, 417 bp, Glycine max
  Clone ID: PAT_MRT3847_87431C.1
tgacggtggattttgtgttttttgacagttaaaggaagaaatcgctgtctctgtcgcgcgcaacgatatctgcagattagagtgtgaagtccaaactctgaaaccctcaactcaaatccaatcctttggttggtttcgaattcgactccaaccaaattcccaacacatggactcggttctcttgcacttgcatctccacactctccctcctctctcctccgccactcaccgccctctctgccaccctctcgccgcctcctccgcttctttccaccgctcttctcctcctctcccacgcttccgcttctcgccgcttctcgccgctaacaccctcaccgctaataacatctcgccaagaagtggactatacacggttggtgactttatgacaacagaaagaggatttacatgtggtga

SEQ ID NO: 128934 - DNA, 346 bp, Glycine max
  Clone ID: PAT_MRT3847_87432C.1
ggttcatcctttgggtatctcacacacacatgatggacgcaaatttggccaccattataatacttactttctccgtactttggcttatcacggtaaatggcataaactcttgtgcctctcatgcggcttactcctacctgaacgttattcccatctacaacaaatgctcatcgttcaatgcaccaaagtcaaacacatcgtgggagatcacacttatatacatagcctcattataccactctgatccatatacttgtccaacttactgggccaaaatcacgatctcacagtaccatacactttcgactagatcttcaacatcgttatctacatcctcaaggtcaaa

SEQ ID NO: 128935 - DNA, 1273 bp, Glycine max
  Clone ID: PAT_MRT3847_87433C.1
aatttttcatatcaggtctagcaggggatgacataatactcaaccgtgttttggaagcactatacaggcgtattttgcaagcccacaaagatcagaaagattttagagttataattgtgatgcccctcttgcctggtttccagggtggtctggatgatggtggtgctgctactgtaagagccttaacacactggcagtatcgaacaatttctagagaaaatcactccatattagacaatcttgaagctatacttggtcctaagacacaagattatatttctttctatggtctacgatctcatggcagactttatgaaaatggccctgtggctacaagtcaggtatatgtgcacagtaaattgatgataattgatgaccgtatagcttttattggatcatctaatataaatgaccgtagtttgcttggattaagagactctgagattggagtgcttatagaagacaaagaatatgttgactcgttgatgaatggaaaaccatggaaggctgggaaattttcctacagcctccgctgctccctatggtctgagcaccttggtcttcatgccggagagatcagtaaaatcagtgatccggtggcagatacaacctacaaggacttgtggtcagcaactgcaaaggaaaatactaggatataccattgaggtctttgcttgcattcccaacaatcagatacactcaagagctgcacttcggcaaagcatggttcactggaaagaaaaacttggtcataccaccatagatatgggaatagccccagataagttggtctgtcatgagaatggagaaatcaaaataatagaccctatagataggttgaagtctgtgaagggacatcttgtttcctttcccttggagttcatgcgtgaggaagatcttagaccagctgttattgagagcgagttttatgtcgctcctcaagtatatcattaagtaaatatgttgctttgcgggcactctttagaagggaaatgtggaagataagcttggagacaaaggattgaacccaatggaaaagaaagctgaaggagaaaggatacccaatatggttataaattagttatggctcttagctacagtttagaaaggaagtggttatgcagaatccttcttgcttaaaaaaaaaaaaaagtatgcccggttagtaagtgtggaagtatgtgaaaatcgttgcaaataacattgttcagaattaaatggcagtattttatctccccaaaaaaattgagtggcaatatgccatgcaaccttc

SEQ ID NO: 128936 - DNA, 647 bp, Glycine max
  unsure (1)..(647): unsure at all n locations
  Clone ID: PAT_MRT3847_87434C.1
ggaaccactcctaatctctctcttttcaatgttgtactctatagcactcttggttaggagacattgtggtagcgtactcgttttccttcacttggtgttggtgttggtgccttccctggttggttctacttctacacgaggcttttaagctatagcataaccctccctctatttctgtctctgaggattacttgcatgaaactattacttangaactgcagctttttcagttgtgaatgcttttttctggttcctatcattcaagtaacatcaatgatatgttctcgggtgtagatgaggacaccacatctataaattgaagttcttgcagagttatatgcaaataaatgagggtgtgagggtcattggtatatgaaagttgagaatttgtgcaggctttcaagtagaggtttttttcttgaccattgggtatatatcacaataagtagatatgaagttcatgaaacttggaacaagaccagatactttttacagtgaacaagctaccaggagtcttgtttcagatataccagctgatcttgtgataaaaatctatgacactacttatctgctacacaagtcttcacttctcccaaaatgtggccttctacaaagactttgctcaaattctaatgggtcttgagaat

SEQ ID NO: 128937 - DNA, 261 bp, Glycine max
  Clone ID: PAT_MRT3847_87435C.1
gttactcacattggtggtcccttacggttctcgccataggttgacgcatgagaattgttattctcatgatcgattctatgcataaagaagcggaatggtaggaagcggcagagaggactggcaaagaataaggcgtcggcggtgcaagcacgcgctgcggtgatcacatagtatctcctattatgcatgtgaatgggtcatgtgaaagctatctggactttgaaatctatgacgacgctgctctatttgtggatctcactt

SEQ ID NO: 128938 - DNA, 153 bp, Glycine max
  Clone ID: PAT_MRT3847_87436C.1
gttcgcccgggcggccgtccacgcgatcgaatttgatcaagtccccgacggccaaaactcagttagctaattcacagtacaccctaaatttgaaacaacgggtgacttcaaatctgccacagggtgattaaaataagcgagcagcggtaacac

SEQ ID NO: 128939 - DNA, 569 bp, Glycine max
  Clone ID: PAT_MRT3847_87437C.1
gatactaatgacactactacttatatacaatcttttgctgaccaaaggactagtgggtcatgcatcccctgcaagttgcaacatattttttgtattttgcaattcataatttatcacccatagcctattcgaaggaatatagcatttgaaacatatatggatcttctttgtgaaactttgtataatttttgaacttgactcctgctattatgcttttcgtttcccttgacacttggtttagttttcatcgatctgatggttcaatttttttccttttctccttttcttattcctttcttcctgtctttccttgtttgcccctcttcttttcttccgcacaacactccttctctccaccgcagacaaccagtgggcacctgccggagttttttcttctttcccagcaccgctcaaatgactcacacagaaacacgaaagaaaaaacacaacgccgcaatcattcctcaatgatccaattgaatgtgattaagtgaatttccgtaaagtaatggaaacaacgctcacttgcttcttttgaggtagagtcgcaccgaaagcactacaagtga

SEQ ID NO: 128940 - DNA, 565 bp, Glycine max
  Clone ID: PAT_MRT3847_87438C.1
aggttttggtattgtcttgatttgctgtagtttaaatctttcaattttttcctgcataaaagtccttctatttgtctcagttttcttagtcattgttgatacttttcctccatgattgtcatgagcccctacactgttcaacttttactgcaatggtttgtgatttttatcatttgttgatggacttgcttccttcatacttcttgtacgaaggtgaataataagatactagtgatgacttgtattatgtatatttcctctgtatttttttttaaagtgtggtgtgacaggtgtctttctgaatactttggaaaatgatggtgatgagatgaatatcttagttctagaaaggagcaaatcaataatctttttggtgtgaagtttgtgaactaagttgggatcctcttgtctgctacggagtaactttacttctaactcatccttccaacttttgttgttccttcattttatgtatttttcttattgtttgatgtatatggcgttttagctatagaatcactagagactggagaagatgccacagatgaaattggcaccccaagaa

SEQ ID NO: 128941 - DNA, 469 bp, Glycine max
  Clone ID: PAT_MRT3847_87439C.1
cggctcgagtacggctgcgagaagacgacagaagggttccctaattctttttaattttttaaagtgttgataaaagatgattctttgttaattgctcgagaagtgcatctgcttaatttgctcaatggttcatcaacatttataaacgtagtaattgccaagaacaaacaactaaaatttatatgttttccaccattcgagttttctatctgtgactgatacatggaaattcttgaatattgaattcaatgagattcaaggctacatccaaagcaatgctacaagtgtcaagttattcaaaaagagcaaaaggaaaaaaaactacaaattcaatcttgctggacaaaaaaatggaacgaagatcttagaaaaatgaaaatatggttcagttgagaaaggatgacaatgagtcagttttgattaacgctttatatggttacattggttactgaatgagggcaaaccacta

SEQ ID NO: 128942 - DNA, 577 bp, Glycine max
  Clone ID: PAT_MRT3847_8743C.1
atcacaaatatcaaagcaacaaaagattgccactagttatatatcgttttgccataagaatgaatgaataactgaaattgagactctacaaaaacaaatcaccagtcaaataatgaaaaaacaattgtcaagtggctttggaatcaacagaaaccagcagcacagctagacagccatcatcagtatcaaccgctgataccattgccaacccgattccagcataaagggcagcaacagtcagctacagttaattggttagtgcttcaaattattcacgaacacatgcatttcatattaaagatgcatcagctaccacctcacagctacagtgtcatggagcagtgtgctacaacaaacatatttactacgttagtacagatgtataatcttgaataaaatattgattaaaataccctaaaaaataaaccatggtgttaccattgtccccttcactgtgattcgaaataaacaccagcacattaaagttcatatttaatacccacagttttatgtttagtatctgcatctgaatcaacaaatgacaggtccaactcctaggaggcatcagctacatgac

SEQ ID NO: 128943 - DNA, 352 bp, Glycine max
  Clone ID: PAT_MRT3847_87440C.1
cgagtttgtttgggaaaatccacaatcggagggagaatgtcgctgaatctcacggcaaacgcgatcccggcgataatcggtggcgacgtgaacgcgaaaccgctggttcaggttctggacgtggcgctagtctccaatagcaacaactcgcagcagcagcagcagaggtaccgtcttctgctatccgacgccgttttctctcaccacgcgatgctcgcaactcaggtcaacgaccgagtcgaaccggtcgagttcagaagggttcggttgttcagcttctcgattatatatgcactcctctcaagaaccgcaagattattgtgattctaacatggaaactataatggatgag

SEQ ID NO: 128944 - DNA, 231 bp, Glycine max
  Clone ID: PAT_MRT3847_87441C.1
ctgcacggaataatacgctattcttatcccgtttaaccgctctatgaactctgtctcgtaactcattaacactatcatccattgccagactactatctacgtcatccactagcgttgagacaaatggagagggggatctatgctatccactatgatgcattctcattgatgactacccgcaaaggggataactactcatcatatagccattgggctatttttctgacccca

SEQ ID NO: 128945 - DNA, 189 bp, Glycine max
  unsure (1)..(189): unsure at all n locations
  Clone ID: PAT_MRT3847_87442C.1
cgctccaggaccattactgccctttcactttctctgcctctgcagtatctacgacccctccatctcactctccgttccccatcacacaacaccaactcaatccgggccccacaaacaaaatgccgtcattagcggacgaantcttcgcatcaaccccaggaaagctcaccatggagcggtccccccaca

SEQ ID NO: 128946 - DNA, 193 bp, Glycine max
  Clone ID: PAT_MRT3847_87443C.1
ctttacctcaacatgaaagcttcagctatgagttttctgctgaaaagtttgaaataaccccaggtcatggacaagttagtgcttctggcatgtgcagtgtatgcagatcatcgtgcgtaacatgctggatgctatcagactcacgagcagatacacaagagactagaatatcagtcgtgaggccatgagcatg

SEQ ID NO: 128947 - DNA, 478 bp, Glycine max
  unsure (1)..(478): unsure at all n locations
  Clone ID: PAT_MRT3847_87444C.1
acgtgacttggcaattgacatgcagagtccattttcttcaattttattaaaatagggatacttgactattaagaacaggatatatacatatacacattctctaatattgacagaactcagaaatttttagcatgtatatttatagaaattaaaacaaaataagaatatgatttgacaatattaactagtttacttttgttgcggtgagtgaatgagattcgagtgaaatacgtttaatagaaaacaatattaaacgtctgtaagttatgttatctttgagcccaactttgtttgccaaacattaattgatctatgtcatgcgcctaacacctcattattacnnttgctgttttgaattcaaattcctgctattgtacgaaacaacaatggctgaatatcttaagcctctcctgtgcttggtactaactctagctgttgaatatggttntgtcaaacaaatgctggatccagcactggt

SEQ ID NO: 128948 - DNA, 442 bp, Glycine max
  unsure (1)..(442): unsure at all n locations
  Clone ID: PAT_MRT3847_87445C.1
actcccacgcgtccgctgacgcatgggctcagatgttttgaccgaactgaacacagggcctagagccaagggtggcaaaaacctataaggtttttcaccaactattatggcagtcaaagggctgtctttgcctgcagctttaggcacagaaaaagagaaagacacgactagaaccattctgcaatgcgatcaatgtaacaatgctgacatgtcagaagaatatactgaggccaaacgtattcgtatcactgcttacagggaggatgatctccacacgtgtatttggtatactgtgtgtgctagtacagaaaatggcaacaagaacctcgatgctgcgtatcangaggcacagtcgaagcctgaccgcacccgtgtgtttctctgtatgtagataataccagcgggacacttgtggagcttgcttagatgactggtcctgttg

SEQ ID NO: 128949 - DNA, 358 bp, Glycine max
  Clone ID: PAT_MRT3847_87446C.1
cgcgtcgttccgtactagtgtcaccgctcgaatatcttgttgtttggagcgatccgagataaactgtgtaaacatgtggagctaccagtacctctgtacaggtgatgagcttgtgtttgactcgattcggaacacggctactgagattggaatgctgcgggatgatgttgtgacgcgacacagaacaggtgctgctgctgtacacctggaaaaccccctgcatattttggccttcatggactatggccttattacaaacatggtttatacctatgtaactgtgattcaaacaatcgttctcaggcatctcagatttttcacctcacttttagcttgcagaggaactggcccacacttt

SEQ ID NO: 128950 - DNA, 238 bp, Glycine max
  Clone ID: PAT_MRT3847_87447C.1
ccatgtctgtgcctggcatatggacatggggttttacgccagacagatccaaaatacacatgtgggagggagtttgcttttaagcattcggctaatgatccatatttccagctgaggtctaaaactaaagacggtgatgcttccgtttttaccaagctagggaaggttaaaaatccattgcccaatgttgatgcgcacagttgaatgctactgaacctctatggcctaactctggaaa

SEQ ID NO: 128951 - DNA, 336 bp, Glycine max
  Clone ID: PAT_MRT3847_87448C.1
ccccgaaaaaaaaaccccaagtttttaggggaaaaatttaaaattttacagggccccttttacaacactagaccttttttttaaggaagctaaagtttcctttaccccaatccttattttttaaaaaactttaaataacacttgggttttcaaaagctttggaaaaaaaaattttcccttgggaaaaattatttgggcaaaaaagcttttttttttgtttaaaaacccccttcctttaggcttttttcctaaaaaagaaaagaaaacccaggcccttgttttaaaatggggtttttgaatacccccctttttttggggggaaaaaatcaccccccc

SEQ ID NO: 128952 - DNA, 493 bp, Glycine max
  Clone ID: PAT_MRT3847_87449C.1
aaaaaggggaaaggttaattttttttttaaacggggaaaaaaagggacaagctcatattttttttcgggaaaaaaaagaggggtaaaaaaaaacctttcttatattaattgtgggcccaaaaaaaatccacccgaaccgggggcaccccccgggccccccccataaattcggggccggtcccggggggggacccatttttcctatttagaggcagaaaaaaaattgggctaaccaaagagaaaggctgtttctgggggaaaaattgattctcgaaaaaatacacaaaaaaaaaaaagccgaagattaaatgggaaaacccggggggccccagggggggggccaccccacattaaatggggggcgaaacaggccccttattagaagagaaaaactggggggcctacgttataataaaaatacccacaaccccgggaaaagaaggcgcatttttttttttggggcccccagggtggtttttttttttttcccccc

SEQ ID NO: 128953 - DNA, 1882 bp, Glycine max
  Clone ID: PAT_MRT3847_8744C.1
attcccgggtcgacccacgcgtccggcctaatgctgagaggattcacaaaggaaggattattgaaacatccccgagatcaaggcgatcaaggagccgtagcccaaggaaaaggcatcgtgatgattacaaagatcgagattataggaggcgaagtcgcagcagaagttatgataggtatgaacgtgacaggcaccgtgggagagacaaagattatcgtcgcagaagcaggagccgtagtgccagtcttgattacaagggtcgtggtaggggacgctatgatgatgagcgtaatagtagaagccggagcagatcagttgatagcggctcccctgcacggcgcagtcctagtcctcgaaggagtccttcccctcagaggagcacttcccctcaaaggagtccttcccctaggaagagtccacggggtgaaagtcctgcaaatcgtagccgcgatgggcgttctcctacccctcgcagtgtctcaccacgcggtcgccctgatgcttctcgaagcccttcccctcgaaattcaaatggggatgaataagctatgttcatgaaaaattctggagacgccggactattgcacctgtagctgttttgctattgttggatcttttagtctatgtgaatgatcttatcggagtcattgaaggattttatgatctaagtgctgtttggtagggtcagacttcctgatgttttgaatggttttatattttgacttgctatgtcgtctacttcggtgtttggtaactattagaccttgcagttgacaggttaatctctcagtttgagggattttgccattttatttttgttatactgtttgcatttttctctctccatatctccgttttcatttcccaatttatagtaaggaatggctgtgatctagttaaagctctgttaatttatgttgaacaacttattgggttttatagttatgatcgggaaaagtgatgagagcatgataggcgcatgttgactttgttgctgttgatgctgtttctatgtcattgatgattggtcgcgaatttgatgctggttgcaagagtatgctggttttaggactgtgattgttttaccagtgtgctgattagacagacaattagttgacttggttttttcctgaatgatctgatcattgtttcctgaaaaggattcttgatgctgtgatgaacacgagttgagcatattttgtcatgtagctgatgcctcgtaggagttggacctgtcatttgtagagttggacctgtggggtactaaatatgaactttaatgtgctggtgtttatttctagtcacagtggtaacaccttcatggtttatttttagggtattttaatcaataatttttaacattgatctttcaagattataacatctgctacttaatgtagtgagatacaattgttgtagcacactgctccatgacactgtagctgtgaggtggtagctgatgcatctttaatatgaaatgcatgtgttcgtgaataatttgaagcactaaccaattactgtagctgactgttgctgccctttttgctgggatcgggttggcaatggtattagcggttggtactgatgatggctgtctagctgtgctgctggtttctgttgattccaaagccgtgtgacagaattgtttttcattagtgatttggttttgtagtctcaatttcagttattcattaattcttaggacacagagttatcccccttgtctttttgtgcttggaaaaaataagagatattgcaacattgtgttgtgtttactgttttgcaactgaaatgataaccaatgtgttttagagacgaggttcttttaaatcgacaagttttcctggggtggtaaaaaaaaaaaaaaaaaaaaaggaaaaag

SEQ ID NO: 128954 - DNA, 1315 bp, Glycine max
  Clone ID: PAT_MRT3847_87450C.1
ccacgcgtccgcacttcccctttcattgagaagtgagaatgaagtcaaagatgaaatgggttggtctgttcggccttgtgctctcagctttttccatcttcattcacttcctccttgctagattcactcaaatgggtgttgcagactatgagtcctctgtcacaatcttctcttggagacccatctttgagaaaccaattccccccacaaatgtaatctttttctattcacacaaagatctcaccttttttatccaaattccaagtgggtttttttcttctactttgcattgctttggtaaccccctatattctggaggagtgttcgtggttcaaaattttggctttgtgctccggaaaatgacaaagggtgttgtgttgcatttagtgtcattttctgcatatgggtctagtcagatgctgtgtttgttttttgtttttctccatgttcatggaaattggctcaacattgaactacgttgttttttgttcattggcttggatctgtcggttgctacgtttaactgaatttggagtcggctcgagctcctatgtattcggagtcataggctaatgagcttttggactttgttttcatttgtgtgcaattttttctttaatttttcggtttcaaaatttttggctgttatttgtgctgcagactccctcttatagaaaattatggggtccggtgaagcgtctcgaatcattgtatccggattcaaatccacgaggatattatgctgatcctgtttcagaaacaaatgggtttatttttgtccggatacaagggggttttcatgagatcaggaattcgatatgtgatgttgttgtggttgctcgacttctcaatgctacattagctatgcctgagatccaatcaacaaccagcagcaagggaataagctctcagttcaagagttttgcatacctatataatgaagagcaatttgtcctctcattagcaaaagatgtcactgttgtgagaactcttccgaaagatctgaaaggtgcaaggagaaagaaggagattcctgtttttaaagttccatattcagcatcacctttttattattttcatcatgttctccctgtattaaagaagcattcggtggttgaactagttgtttctgaaggtggatgcttgaaggccactcttcctcccaattttgaagctcatcaaagactgagatgtagagattcttttcatgctcttcagtttcgacaggaagtccaggaactttctgctaagattttgcagaggttacgagctcctggtcggccattcattgcctttgaccctggcatgactagag

SEQ ID NO: 128955 - DNA, 351 bp, Glycine max
  Clone ID: PAT_MRT3847_87451C.1
aaatccctcatgagcctaacccaaatccagctcaacaatctttccatgagccaacaattctggcaagagctacattcttctgactgatctgtcctcagacaaattcccgacttggtccattctgcttattgggtccctacaaagccttatcagctatgagcatccattggcttcgcgacagccatagaattcaacctctgcgatactggcatatgatcgtactcctcatcattgatggcaacatcactacctggatgaacaccgtcgttctactcacatgcatacgcatctttcgccgcaacagaggccccgttttcgacattctcaaaagctttgtcggttttagcaccc

SEQ ID NO: 128956 - DNA, 2105 bp, Glycine max
  unsure (1)..(2105): unsure at all n locations
  Clone ID: PAT_MRT3847_87452C.1
ttctctatgagtcaaaattgtatatgcttcttcaaggaggaagtaagtctaggtctctatttctttttaccattttgggttctaaatgtattagctaatacctcttgctaaaatttcatattaaattgtttctcaatcattgtgtgtatgtgtttgctctatcttctggagtctggagaatagcttaattgatgttctgaatcttcttgtaatgaaaccaaaaccattagtctcaagctattccctcgaagtaatgtaagactgaaaaggtgttagaaaacaattaatatgtctccttttgagtaatgcaatttggttcattattgaagcggggattcctcatctcaagtggtttggagtagagggagactacaatgtcatggcaattgatcttcttggaccaagtctggaagatttgttcaattattgtaaccggaagttaacattgaagacagtgttaatgcttgctgatcaattaattaacagagttgaatatatgcattctagaggtttccttcaccgtgacattaagccagacaattttttaatgggcctaggacgtaaagcaaaccaggtgtacatcattgactatggccttgcaaaaaaatatagggatcttcagactcataggcacataccatacagggaaaacaagaaccttacaggcacagctcggtatgcaagtgtcaacactcatcttggaattgaacaaagcagaagggatgatttggaatctcttggttatgtgctcatgtacttcttaagaggaagtcttccttggcagggactaaaggctggcaccaaaaaacaaaaatatgataaaatcagtgagaagaaaatgtcaacttcaatagaggtgctctgcaagtcatatccctcagaatttgtatcgtattttaactactgccgaacgttgcggtttgaagacaagcctgattattcatatttaaagaggctttttcgagatttatttatccgagaaggctatcaatttgactacgtttttgattggactatattgaagtatccgcagattggtggcagcagctctagaggacggcatgaaagtggcaaggcagctatgcatgcaggaccatctgtacaaaagccagaaaaagtatcagttgggaaagagattcgagaaaaattctctggtgctgttgaagctttctcccggaggaacccaacaagtcctagtcctcgtggtgatcactccaaacataggagttttgaggaagtagcggtacacaaggatgtgtaccgtgatcaagagaaaggacgcaattcatctcgatatggcagcagttcaagaagacccataatctcatcgtcaactaggccaagttcctctggtgatcatactgacagtcgtactggccggctaacttcaagtggaaatcgatcatctgcctcacatagaaatattcaacctatgtatgagacaaaacaaccaacttacatgcgctctggatccaccagaggcaaccgcgatgatcctctgcggagttttgagctcctctccatcaggaagtaacaagtatatccagtttcaatttgttacaaagacattttctaaattctaatgcacttgtttatccaagaactatcaatctcgagcattatggaatcatgttcatgtatattattgaattgccatgagccatgcggtcataatcaacttgacttcctgttaccaatttgtgaaccaaggtggactattttctgccccctcctagattatgccttctgaagaaagatttctcggatgttgtatcatgttcctaaaacatgctcctgagaactcaaccaggggtcctctcctttttactagaaaaaacttgttttctttttttttgaaacaaaatagagtaaagtagagttgtagtttatgatacaattgttattgttttttcgcattgagacccaacactgcctctatgtttcccatgttatgagtggaattattgatgttagaaattggtctcaagctacaagagcggtttgagatcttccgttaaaaaaaaaaaaaaagaaaaaaaaaagagggcggtgccgtctnctagnaggnatnccaaggncttacggtacgcggtgcatgcgacgtc

SEQ ID NO: 128957 - DNA, 536 bp, Glycine max
  Clone ID: PAT_MRT3847_87453C.1
ctggctaaattgtatacatcataaatatttacatgtatgccacactgcataccttatcggattaacaaagtctcatcttgtttgcaggaaggctaatgaacaagctaaaataagcatgtgtgactgaagcacctgagatctctcacgagcatgccaccattatggatttggaagaattctgatcagcccttacaatctctcactttctgcacatactcgaggaaagtaggacactacaagcttccagatgttgaatctctcactctatcctcagacaaatagtattgttagaccaaatgtatgagtgcttgcatccgtgacaataatgaactaacgtatgctatgtaacaccgttcatatgagagtaagacatcgatgaatatacaaggaccaattcatgattgtccttgctgcactcttgaatataaatgcgtgctgtcctatcttctgacacgataaacaatttcaatagtccctaatacatatactccatctatagctatagttgaccacgtgctacattatctcgaaatcga

SEQ ID NO: 128958 - DNA, 387 bp, Glycine max
  Clone ID: PAT_MRT3847_87454C.1
gggaaatactgccggcgattggagtgtccagacgattacaaggtgaggatgctcaggctagccttgaactctatataaacatgccttacttgggggtattaagacctacactgtacaagtgatcgatatctatgctagtggaaccacacacgcgtgtaatcttaacgcatacgacgtggctctacaagtatgtatgccacacaatcttgctccagctgcatatggatgctacacataaaatcataacacattcctcgctgcgtacattccagggctctcacaaaataaagtgtttcagagcttttctaatacattgacactatcatctcattaactctaccgggcagcttgaaacttgcactaaggatcagacccagaaatgtttga

SEQ ID NO: 128959 - DNA, 299 bp, Glycine max
  Clone ID: PAT_MRT3847_87455C.1
ccaagcgacgaaagcgggtagtgaggatcgagctcaaaccacttctacagatcttttcactccttcttataccttaaatactcggcaattttttgaggcttagaggggcctaagaacactccatccttatataaaacaacatggtgctatatcacccgttgactacctcacgtcacctttgcacaacatatggactcagttcctgcaaccggccctatggaccctattcgccgtcacattcaatcttcgcgtacacctctacctagactggtcctccgagttactgtcggcgattccct

SEQ ID NO: 128960 - DNA, 885 bp, Glycine max
  Clone ID: PAT_MRT3847_87456C.1
gcgaccccccttctcccttgccttttcgcttgttttattctcccatattatatagcttgtcttttatttcttagactccatccattcttctccccaattgaatcttctttattttgtttcttcactgtctcgttatggctatagttttgcatagtaaataaactgaactgaagctatctatatagcagcaagtgttgatttaattacttactttagacaataattatattaattacaccaatttataagctctttatctatctatctagctagggaaaattaaaatgtctagcagaaggtccaggcagcaatctgcatccacaaggatctccgatgaccaaatcatcgacctcgtttcaaagttgcgtcaacttgttcctgagattcgcgataggcgctctgacaaggtatcagcatctaaggtcctacaagagacctgcaactacatcagaagcttacacagagaagtggatgacttaagcgaacgactgtctcagttgttggccacaatcgatgctgatagccctgaagctgccatcattaggagcctaattaactaataatatatattaagcgcaagtaatcatctaattttcctatattcaaggagatatattataagagtgtattaatttcttcttctaaattaggtggcatagagtgcagtttgaggtgcgtacgtacgtccttccaatatattatagtacatggcaggaatggtgcacttgtgtaagttaaaggtttttgcaataagaactaaggactctctgtattatggctatagtgctatataataatatatgcatgccacatttatagatggcctcaaaatgtattaattgttaattttatttcatttatttatttaagaactggtttttagtg

SEQ ID NO: 128961 - DNA, 973 bp, Glycine max
  Clone ID: PAT_MRT3847_87457C.1
tacggctgcgagaagacgacagaagggggtagtgatgttattatctgttctaaaaatttctgaagtgtttgtcctgtgtcccccttcactttctttcgaggttgcatttactttccctttcgacttcgaaacgatccaaaatactacaaagcaaagcaaccagctaaaaagcaatcacgcccgaaaacgaaagcatctccctctcccctaagcaaacaactgcccttaaccctcaaaaacaagccacccaaacccatccacttcaacccccccccccaaaatcacctccctctctcaccggcattgattctccatggacgaatcagagcaatacccaaaggagtattaccctaacgaccaaaccctccccagaagagtctcctcatcctcgtcctcttccacgacgagcgtccacgtgacagccctagacggcctggtgaacgtgaactccctcttcacgatcgccgtcttcgtgggtctctccctcaccaccccgggccagcgcagcctcgagaaccgctcctcctgcgacgccgacgttgacgtagccaagaagctcctcgtcttcgaagtggtgtccgttagcttctttctcttctcgtcgctggtagcgcaggggctgaagctggcgctgaatctgctcaacagcaaggacgccgacgaggccttccgggcccacatcaacctcagggccctaaggcttggcatgctgggctccgccattggctccgtcatgggctgcctcttcctcgttctctccatggtcaacgtcatcgagatccgattgggaatgctgtcgtgcgggagcaaggcccccgcgcacgctgtggccgcgatggtcgtgttggtctcctccgctctcgtgctttatatttccactgctatctatgcttttactccctgaaactattataaaaatggaggaagaagataaatttgttgtttgtgtttttatgtggaatggttcttgttt

SEQ ID NO: 128962 - DNA, 358 bp, Glycine max
  Clone ID: PAT_MRT3847_87458C.1
ggacagcggagttatcttttctactccagattttactggtgactggtgcaaagccatcggttctcttgttcgtggtgcggtcgcctcgtcttctttcgacgatttccacaagcgctctgccgatatcattcattctgctgttttcggtaagggccaagacaagttgatcttctctggaaacaacttggtagtgaccaacatcgatgttcaatccgtcgagccagttgaccaacgtactctcgactcactacagaaatccgtccagctcgctatcgagatcaccaccaagtctcaggaagcagctgctcgtcaagaggccgagcgtttggagcaagaagcacgcggaagattagagcga

SEQ ID NO: 128963 - DNA, 559 bp, Glycine max
  Clone ID: PAT_MRT3847_87459C.1
ccacgcgtccgaaagcatctccctctcccctaagcaaacactgcccttaaccctcaaaaacaagccacccaaacccatccacttcaacccccccccccaaaatcacctccctctctcaccggcattgattctccatggacgagtatctctctctctctcttcaattttacacatcagtaaaccttatttctaatttcttcttctttttttctttctttcaatttcattgacacagatcagagcaatacccaaaggagtattaccctaacgaccaaaccctccccagaagagtctcctcatcctcgtcctcttccacgacgagcgtccacgtgacagccctagacggcctggtgaacgtgaactccctcttcacgatcgccgtcttcgtgggtctctccctcaccaccccgggccagcgcagcctcgagaaccgctcctcctgcgacgccgacgttgacgtagccaaaaggctcctcgtcttcgaagtggtgtcgtttagcttcttcctcttctcggcactggaagcgcaggggctgaagctggcgctgaatctgctcaa

SEQ ID NO: 128964 - DNA, 480 bp, Glycine max
  Clone ID: PAT_MRT3847_8745C.1
ggggttttatcaaacggtttcttttaatttaattagaaaaaaaaaaccacaacctgttttttaatgtcaaaaaggtacgccagggctaacaagcctgtctatcatttttatcatacaagggattcttaaattctcttaaacgctccagggtcccgaactaaagagaccccatacttgacaaatggtgggcttaacagaaatgcccgagtctctaaccattagtttaaggcaaaaaactggtcaatttctttgtccaagagggccccatcacaaaagtcttcaaaggggtaaaatatttctatcttcatcaatctttcccttcttaattcttatcccccgaaaggggtcatgggacacaccatgacacctcccactcatatttcacgaaatcgccggccccccctaaatcagaattcaaactctcctgtcgcctttttgaaaagaatggccctattatttatgtgcctgatgccctccttt

SEQ ID NO: 128965 - DNA, 370 bp, Glycine max
  Clone ID: PAT_MRT3847_87460C.1
ggcagagctgaatttggtgatcaacataactagaatcaatgtgatgaagatgaaggtccttgttgtcttcgttgcgggaattgtggtagcatggcaatgccaagcgtacgagatgttccctctccgattcaacactggatatggtgcccgtactccggaggtgacatgcgcaggttggaggcttgctgtggaaccacacatcatctttggctttgacaccattcctgaagactgcgttgaagcatcacatgaatacatccatgacgaacaatatagataagactccatatcagttaagcaagaagcttagttttatgcgagagacctcgaaattcatcccaaggatccatttgtgtacagtatagatggc

SEQ ID NO: 128966 - DNA, 283 bp, Glycine max
  Clone ID: PAT_MRT3847_87461C.1
tttttatttattttttggccactcacaaaaatatacagtgataaaaaagttagtgggtcatttcattttatcgcaattggctatagtatccccaaattttctattggagaaaacataaaaagtacgttattatgttattgctgttgttgctgctactgtgtggtcgggtcaactgtcgtaaattatccaaccacaattttcacatactcttgaaacgtgttattaattaagcagatattttagacttttgtacacaaaacttaatttgatataattaatacat

SEQ ID NO: 128967 - DNA, 656 bp, Glycine max
  Clone ID: PAT_MRT3847_87462C.1
cccggaagcacatagatcaagactcgagtgaacaaaaaaaagatgatggtgacccttaaagtgtccgacagcaggttatacatattgcactagttcctacttattctgatggtgagtgatgatactctgtggatgctccatagcttattccttgtgtgattctgacgcaatctcaagttctggcgattggaatacttatacgagaatggatttatacaaactgtgctgcacagactgattggtatgtaatgacttacttgaaaaaaccagtggagagcgctcactgtggataggtaattgttgattttatgcttcatggactaggatcgtcatatgtgagaccataaatgcaatcaaatgcttcattctattcttattgggctaactgtgcgtcttcagactctactgctactcaggccacaacttgctttttttatagtagcttaacatcatctgccctctatgatgaactcatgctaacggaccttgtcacatgcaaaggacatgaatattattacacagcatcaaggaatcatatggaaccaaaataccttctccatatatatatgtacaggcccttgacacattctatattgggcaaaacgacttacttccaagattgctcccactggtagtattgatggagtgagggggca

SEQ ID NO: 128968 - DNA, 807 bp, Glycine max
  Clone ID: PAT_MRT3847_87463C.1
gggttccattccagttccgatccagaaacctttttctcagtcgccgctccgtcgtcactgccaaattccaattccgctgtcgcttcgttcaaccgagctttttctctctctctagaactttcctttctcaaacccgcacctcgtcaaacaccgcaatctcgctttctccgacgcgatccgtgttcaatttccccccaaaatcaggcacaatgatggctgaggatctcggcgtggaggcgaaggaggccgcagttcgcgaggtcgcgaagctgctgccgcttccggagcttctccaatcgatctcgtccatcaaggctgattacatttcgcgccaacaggccaatgatgcacagcttagtacgatggttgccgaacaggttgagcagtcacaggcaggactaaaatcactctccttctctgagaggacaataaatcagcttcgtgaaaactttgtctccattgagaatttatgtcaggaatgccaaacattaattgacaaccatgatcagataaagatacttagcaatgcaagaaataacctaaacacaaccttgaaggatgtagaaggtatgatgtctatctctgatgaggcagcagaggctcgggattctttgagcgatgacaaagaaattgtcaacacatacgagaggttaactgctttggatggaaaacgaaggtttgctttagcagctgctggatctcacaaggaagagattggaaggctaagagaatattttgaagatgtagatcgaacttgggagacctttgagaaacactatggggccacattttccaatttttataagc

SEQ ID NO: 128969 - DNA, 449 bp, Glycine max
  unsure (1)..(449): unsure at all n locations
  Clone ID: PAT_MRT3847_87464C.1
tcacccactctcctaattctatatgaataaattcgcatattttcattgtattttaggatcttcacccgccacattatcacaaagacctccaaccctctctcttctctcctcctaaattctaacctcnaaagttatcttcatataatcttctctcatattcctnctcctatttctaccctaactaaatnttctccttcaccttctcttaantattctncactctcntctttcatttnttaccattatatttacaaatttaatatatatntnnttaattatttaatctataataataatgtttaatcccaatttaaatctatntcattctattttaaattccattattttcaatttaataactacccattttcaatatcaaaatttcacaattaaataataccatataatatccaatttnttntcaatcctaaaaattcaatcatcacatt

SEQ ID NO: 128970 - DNA, 260 bp, Glycine max
  Clone ID: PAT_MRT3847_87465C.1
gcagtaatatccacaatcaacgaggcgtgtcccaagcttccttactgcagcttccgctttggcaacggagttgactcattcctctcttcctctaccatacaccactcactcacttttttcaacatctatgaccataccactctgtaaaccaagaccagaccactcaccagttctcctgctttcatctgccgtcaggtagggccaactacatcagacagttcttcacccaaatcgatcaaggctgagattctgcacttacc

SEQ ID NO: 128971 - DNA, 454 bp, Glycine max
  Clone ID: PAT_MRT3847_87466C.1
caccattcttcttctgaatcatcctctctcattgcaatggccgcagcgttggagtgctggtcgcgccgcgccaccaccaccgatcacgaggaccacgcgcttctcatgcagcgacccgaacaggacacaacacccagagactcttcttcatcttcttcttcttccctcgtccacaagaagcttcaaaaactcacgcgcaacgtctccgaagccattgcttccctcaaaaacttcctgaacagcaccatcaacgtcgaatcctgcatacttgacgggcctcgcaggctcgtgtggaccaccgtcctatcgaaacctaacgcacctataccccggttcccagctaccggagaagttaatctgcaacattcgcaagcactaccattccttgcctctcagttattctcacgcggagatcgatgtgaaggatgtgtgtcttcacatgaagctgatggag

SEQ ID NO: 128972 - DNA, 327 bp, Glycine max
  Clone ID: PAT_MRT3847_87467C.1
ccaacaaaaacgggaaggaattcctttttattatccccggtcccttaatggcccaaccatttgaggccctccccttttcacagaaaaaaataaaccggggggaaggcccccccacaaagggtctagtccgtaaaaccttgatttaaaacaaaaacaattcccccaaatccaaaaaaaaaaaaaaaaaagaagggggggtatttggccaacacctaaaaccttattaacctggccaattaacatcgggcccgctttttggggacccgggacattgacctcccaatgcttatgggggacccctattttcccagcctttttcttttccca

SEQ ID NO: 128973 - DNA, 510 bp, Glycine max
  Clone ID: PAT_MRT3847_87468C.1
ccttcctcttctttttttttttttttttttttttttttttttttttttttttttttttttttttttttttttttaaaaaaaaaacataaccttacaacccatttccgggaaacataaccctttgaacagggaaaagcaaattcgttgaccctattttaaaaaaactaatcttaagggggcaaactacaggggggggggttagtttttaattaaaaaaaccccccctggccaaggttccaaaccaaaaaacccttttttgcccaacacccaattactttttttaattccctagttaaggaaaaattccttatttaaggccttgaacaggaggcttcatgttttgattctctaaaaaacccaaggagggtctcggccttgaccttaactaaaacaaaggggttttggaaaaaaccaacaagagggggaatccctccctccttgaaagaagggtttttttggcaaccctgggaccccagagctgaacaaaagtaaaaacagggaactttttcc

SEQ ID NO: 128974 - DNA, 385 bp, Glycine max
  Clone ID: PAT_MRT3847_87469C.1
cggctcggaaaaaaagaagaacactccctcttcgtggacccgagcttcttcattagactcgagcctcactccctcttcatcgacccaagcttcatcaacacgagcttttcatcatatgcacacccttgactgttccgaacatttttcttctctcttcatctcttctctttacctcttcatttgaatctactacagttcaaatatcgttggggctgtggtaggcttggccgaagattcatttgggagataagattctatgtgtaggtacgaaagaccagtttgatacatggtctgcaatgctgagagaagttatttactagtggaacaacgctcaaggctcaggatgatgtgggctctattggaaagcttctaggtctgggatctt

SEQ ID NO: 128975 - DNA, 819 bp, Glycine max
  Clone ID: PAT_MRT3847_8746C.1
tcttttccggtgaagagtagctatagaatcgattattattagtgtctctgactgagatgtgtgtttgtgcaggtgtcaatctcatttgcaaagatactaatacaatcaattcgacctgggatagaagttctaggtagagttccaagaacagaagccttctgtgatgttagtcaatatcccatggccacaagcactccaggcatgttggtgattcgcataagctctggctcactctgctttgcaaatgcaaattttgttagagaaagaatactaaaatgggtcgcggaagaagaaaacgagcttgctaagggaagagtccaagcagtaatcttagacatgagcaacctgatgaatgttgatacttctgggattctaatactggaggaactgcacaagaggttgctctcgcgtggcgtacaattggctatggtgaacccaaggtggctagtgattcacaagctcaaagtggcacattttgtggataaaatcggaaggcagtgggttttccttactgttgctgaagccgtagatgcatgtctatcttctaaattccctgacccatgatttcaccttcacgggccttatctataatgtactgcaccattgcatatataggtccacaaagttgtgcattacactgtcttacgtaaaatgcaatgatcgatgtttggcattgtgccctcccactattagtggaattgtgtcctgtacggaaattgttgttttgcggaatagctccttgcatggacaattttgccaggaggaatgccaaagtcaaataatcaaatataaataaaacaagagcatttgttttgcaat

SEQ ID NO: 128976 - DNA, 630 bp, Glycine max
  Clone ID: PAT_MRT3847_87470C.1
ccacgcgtccgggtggctgcaagcaaccgctgagattggttctgggggttgacacgtcccgtttatcttccacactcagttcccacctttccacctttccttctcagtcacacacactcacaccgagttgtgtcgagttgtgtcaagtgtgaactcaaaacatctctctcaatctctctccctgtttaggttttgttttggagtggtgttgctatctctatagctccatgaactttttctgacacaacccaacccaagaggaggagggggatgaggaagaagatcgaagaagaacaagatatgttgcttggaaaacgtcctcgggcaccgattatgaaaagaactacaagcatgagtggtggtttggccgtggaaaccaaaacaaccaacgaggaagtagtagtcatgtctgattcgcaacatgatgaggtggccgctaacaacaaactcgtcgatccacatgttgttgttgccatgggaacaccaaataataatgaattcgtgcctgaccacaccaaacatgtttctgaggccaaaggatcatatgtatatgctgatcgtttgatgggcatcaacatgagcatgccccttttctcccacaacctgcaattatgatgggtgcactgacat

SEQ ID NO: 128977 - DNA, 221 bp, Glycine max
  Clone ID: PAT_MRT3847_87471C.1
tttacacacgacaagatttttttgccctttcattataacggggggaagcaaaaatggaaggaaaaatttccaggaaagtgtgtacaggaaacaaccctattacacatccttcgggcctctcttaaccaacccttgagataatttgtttttcagagaaagaaaaaaaacatatatgagaatcacttttttcgacagtcaagaaaagttttgccaatgatttt

SEQ ID NO: 128978 - DNA, 323 bp, Glycine max
  Clone ID: PAT_MRT3847_87472C.1
aaaacctgggacaagaaatatccttactttaattggggcgggacaccccttaaccaccccaagaccccgtggcccaaattcccacgggactttatttttttttccggggggagggacccttcaaccccccctagggggccaagccccccaaccccccccccaactttttccccccccccccccagggaacattgtacaattttattccgggtgctaaaaaaagcctctaattgggaaagcccggggggtttccccttggatcccgcatagtccaaatgggggcccccgacccaaggacggcgcccccccagggggtggggggc

SEQ ID NO: 128979 - DNA, 393 bp, Glycine max
  Clone ID: PAT_MRT3847_87473C.1
acaaaataatttaaattttgattgtaaagtttttcattgtttataaatttttggactaggtccaaagcaatgaaaaaaaaagagactttttctaggtaaaggagaaaaactagaaggagggaacccaaagcagccacaattataatgcaaagaggaaagaaggatgttacaaacactggaccaaagaaatgcattcccaacccttgtttaaaaaagctatttcagaactcaatattccagagaatgaggaccataaaggctgaaatataaaccgatagcccatgctcgagggggaggatctgcaattagagcaaccacagaactttgcaaaggggccgctcagcatatcaaggatgagagtgatagttccgcggggaaccttctcaccgaaat

SEQ ID NO: 128980 - DNA, 139 bp, Glycine max
  Clone ID: PAT_MRT3847_87474C.1
agatgaccgagattgatgagacccattccaccgacctggccagatctgagggtattgcctatgatatcggagaccaccaacaagacatcacaggacgaatgggctagggggactcccttttgccagctccacaggtatg

SEQ ID NO: 128981 - DNA, 327 bp, Glycine max
  Clone ID: PAT_MRT3847_87475C.1
caaagagactctaaaccttacgggcgttcttccctttatttttcccgtggagccagtttccttttgctacttccttaaagggtgctcggcccattcttgggctgcttagccaggcaaagatgcaacccacgaaagcaccttctccttgctcttctagccttgcggaccaggcttatttagtcacaagcttcaatgacaatgaccaatctcgatcccttcggatccacctcttcaagtggatggaaatctggttaaaagaaatgaccctgacctaaaaaggacaggaggtacctctatactcctttatgaatctccggggcccattct

SEQ ID NO: 128982 - DNA, 1626 bp, Glycine max
  unsure (1)..(1626): unsure at all n locations
  Clone ID: PAT_MRT3847_87476C.1
aattcggctcgaggtttctatattctccggatttaagaaaaccacagcagctaggtggtggcctggaatcgtggtgcggcttctatcagagtataaggccaactcagatgggattgtcacttaatattgacatgtcatcaatggcgtttattgaaccacttcctgtaattgactttgttgctcaaattttgggaaaagatgtgctctcaaagccattgtcagatgcagatcgtgtcaagattaagaaggccttaagaggtgtgaaagttgaggttacacatagaggaagttttcgaaggaagtacaggattacaggattgacatcacagcctacaagggagcttaatttccccgtcgatgagaaaatgaacatgaaatcagtagttgattactttcaagaaatgtatggatatacaatcatatattctcatctaccctgccttcaagtaggaagccaaaagaaggtgaactatttgcctatggaggcatgcaagatagttgggggtcagagatatacaaaagggcttaacgaaaagcagataacttctctgctaaaggtctcatgccagagaccacgtgaacaagagacagatattctacagacaattcaccaaaatgattatgagtataatccctatgccaaggagtttgggatcagcattgacagcaagcttgcatcagttgaggctcgggttcttcctgctccatgttgaaatatcacgagactggaagggagaaagaatacctgccacaagttggtccaatggacatgatgaacaagaaaggtataaacggaagcaatgtaaaccacagatattgcattgagctctgtggcagtagccaggcttgtacttctttcgaaccttgtctccaattcgatcataaatgcatattctcaggcatggaatttagtcaagaccctgtgattccaatatattcagcaaaacctgatctggtaaagaaagccttgaagtatgtacattctgctgtacttgataaacttggtgggaaagaactagagttgttgattgccattcttccagacaacaatggctctctgtatggcgatctcaaaagaatctgtgaaaccgatctggggttgatttctcagtgctgaaaaccagtattcaacccagagatcaataggcagtatttggcaaatgtggcactaaagatcgttgtccagacggccaatgtcaagatgggaggaaggaacacagtacttttggatgccctaagttggaggatcccattggttagtgacattccaacaataatttttggagcagatgtaacacatccagaatctggagaggacccttgtccatccattgctgctgttgtagcctcccaggactggccggaagtaacaaagtacgcaagattggtatgcgctcagcctcatcgtgaggaactcattcaagatctttttaaatgttggaaggatcctcatcatggtatagtttatggtggcatgatcagagagctgttactctcttttaagaaggcaaccggacaaaaaccattgaggataatattttacagggatggnggtaagtgaaggacagttctaccaggnctttgttgtatgagcttgatgccatccgtagggcttgtgcatctttg

SEQ ID NO: 128983 - DNA, 426 bp, Glycine max
  Clone ID: PAT_MRT3847_87477C.1
ggctcgagagaccaaggctatgtctaagaggatcttatggatgaagatgagttctaattatgcataaaacacacctattttatggtttatatatagaaagaaaagcgcttgcggacattaataggatccctcttcctggtgaaggcttgatgaacgaagcatgccaccatgaaaacctgtctacaccctaacatgaaaaacctgggctcgctcagctgaccatgcgggataaacaggtataacgagacacccctaaacagaaaaggtgtttttatatgactctcgagacctgcactaataacatgatctatgaatcctatatatattgcctgccgaaaacactaggaacacccacagcctaacgtactgtctaaagaagtcgctacaagatgcggcatctgatctaaaaggatgccacagagataa

SEQ ID NO: 128984 - DNA, 360 bp, Glycine max
  unsure (1)..(360): unsure at all n locations
  Clone ID: PAT_MRT3847_87478C.1
naccggaatcannncncncccannncngggccancaanaaacngcnggaaaccaccatccncgcagaaacancannccnnaggactacacgacaccnaccgcacaccnganccncacancanaacgncacangcccncgcacncagccgncnanncncgngnngacagcattcaacccaangacaangcaggnccangncaacncaacgacagggacaacaacaannacnagnngacnccaccgagacncnnanngnngccncnnnanagannacnncanaagacncagangananccaacnancaggaancacnngagcncaaagccancngcanannnaaancanannaagnngaaac

SEQ ID NO: 128985 - DNA, 1242 bp, Glycine max
  Clone ID: PAT_MRT3847_87479C.1
caatagaaactttcgaagcattggattcataaattcgtttcattcattattaaaatcacaagaattcctcacaaacattaataaaaacacaacaatccgaaagaggaagttggtgttcaaacaaggaaagaagctatgcgactaatcacgcccttagaattctcagtttcaggatgatagatctgaaagcaatgttcttctccctccactcgaaccagttccacatccccttcccacccactcttcttaacagcatcatagtaccaaatccctctgtccctaagatcatccttccccgccacaaaaatcagcaccttgtggcaccccagagaggccaagctaggcgccccagaagccaaaggattgatcaaagggttatcaatgccacctggtgcatcagggtacacaaatttccaaacttgcatggctgaactctcttcaaacccctcaaccatttcagacaaaaccggttccgaactccagaacaacggaaaagcaagaaccacacccgctattttcacaccccaaaggtgttcactctcaacaccaaacgcgaagaactgcattatgtgcaacattggcacccgcagtgtcaccccccttgtaaaacctgttaaaatcaccatgttcaaccaaccatgggttcacttttgttgctgttaaaatgggaagttacccatttgagagcttcccagctatcttcatatgctgcgggaagagggttctctggggcgagcctgtactcgacggaaactacgagaactttcgcttcggaggctatgaggttgaggtagcggtggtggaggaaggagaacgcggattcgaggcagaacgcgccgccgtggaagtaaacaaagatcggaagcttttgttggtgggagttgttgagtttgggcgggaggtacacgccgcgcggagatggaggggttttcggagatgacgatgtctttcgaggagactaatgtttcggggtctaagagggagggtggcacgtgcggggaacctaggaagcgttccacggttccgtcgttgtagacgcggaggagaggagggagctctctggctatctctttggaagccattgaattgaaggaagcagagagaaagagagagagagagatggtattgggaatgaatgcagatgatgacatgaatgtgtgtcaaataggagcagctgatgagcgatgacttcacatatggtcaaggacgaaacttgggtgattccttcctcgtggtgccacc

SEQ ID NO: 128986 - DNA, 514 bp, Glycine max
  Clone ID: PAT_MRT3847_8747C.1
gccccgggcttttttctttgtttccaaaaaagtaaaaatgttttcagcttactccttttctccttttagtcctaaacacaatcgtttttctttctttttcagtttcctttgtttccaaaaaagaaaaaaactgggtggaaattccccttgtgcctcatgcaaattgctgagacgccggtgcacaaaagactgcaccttcgctccttattttccttctgatgacccgcagaagtttgccatagttcacaaggtttttggtgctaacaatgtgagcaataggttgcaggcacttttcccttaccgtatccaagttcctgcgcttcatgtgcagcatgcagttgcccctgcggggttactctgcttcctgatcgatctcgggcccgtggtgcctgcggcctcggggattcagctaggcctctcgtcttgcgttctccaaaatgacctctctcagtttcttggctttgacacttctagcaatgtaatgcagcaattttgcccatgacatagtttcttg

SEQ ID NO: 128987 - DNA, 1494 bp, Glycine max
  Clone ID: PAT_MRT3847_87480C.1
aacgaaacataagtaacaacgaagaataggtatccattgtatatctgaggccatttctttgtttcctcattacttctttgatccacaatatttcaaaatcctcactctctctcttccactcttttgctgttcccctttcccaatccacacctcattcatcatcccctttccgtgattgatacaggactcattgacttgatagcatacacccgtagcaacatgagggcatggcattagttaagctagataaactataaaatgctgtcaactactgccgctgctcagcttccaagttgctgatagccgaattcccctcagaaacttctatggcctaagtcttcctcaaacccataattgcagcaaagggaaagaaagcaataacagggctagatacaattccaatttaaatcagaaccacagacatttattatttctacagttcttccctgacagtgacacagaagacagcaataatcaaaatccaagaaccagaaaccactgtcaacatcaagtagatgaacaaagagaattcaaggaaaataaagaggccaggttgcttttctcaaacatgtggtgggtagatgtgaaagcagcacttggccaaagaataaatttggagggcattctatgttcaactatggtgatcttaaaagacccgaaattggcaatgccccatatttctgttcctgatataaggtatgttgattgggctgagctgcgtagaaagggatttaagggtgttgtctttgacaaggataatactattacagcaccttactctttgaagtcctggcctccacttgagtcttcattggagtgttgtaaatcggagtttggtcatgatattgcagtatttagtaactctgcgggacttcatgaatatgaccatgacggttcaaaagctaggatgcttgaaggggcaattggaattaaagtcataagacatagggtgaagaagccagccggtacagctgaagaaattgaaaagcattttggttgtgaagcttcacaattaatcatggttggtgatcggccattcactgacattgtttatggcaatcggaatggatttctaactattttgacagagccattgagtcttgctgaggagccgtttattgttaagcaggtgaggaagctagaaacttcatttgtaagtttctggtctagaagagggttggatccacttagccagaagttattgtcagatccaaagccatgtgtcaaagagccatatcattgacaagactaatatccaaacactgcacaattttttggccatcagaagtactgctttttagtaaagtaatgccctttagttaagtaatgcatacatgtcaatatattttttttaaaagcctatctagtttattttttaccacatgttaaatacatatttctctgtcctttatctggtaaagttatctcctcagcttaaagcgtgttttttttgttaaacaacactaacagtaacacaccctcttcaaccagcta

SEQ ID NO: 128988 - DNA, 201 bp, Glycine max
  Clone ID: PAT_MRT3847_87481C.1
gtaagttatgtgtcgatcttcttgtgtggtgttgcttaattgctaaggatatgggtgagttctattcaaaaaaaaccttacatattcaaaataaaatcaaccaacttactaagtcttcattatcaacacattctccagcaacaaggagattttcttgcgtaaactcatcaacaatgcttctgatgctttggatgggggtct

SEQ ID NO: 128989 - DNA, 771 bp, Glycine max
  Clone ID: PAT_MRT3847_87482C.1
cggaattcggctcgaggaacgaaacataggtatcaactgggaatacgaggccatagatatatctgtcgccaattctttggttcctcattacttctttgatccacaatatttcaaaatcctcactctctctcttccactcttttgctgttcccctttcccaatccacacctcattcatcatcccctttccgtgattgatacaggactcattgacttgatagcatacacccgtagcaacatgagggcatggcattagttaagctagataaactataaaatgctgtcaactactgccgctgctcagcttccaagttgctggtacctcattcccagccatcttaacgtccatcatcatgctcaacaaaagagaaaactcaccactctatcacttgccaatgcagatagccgaattcccctcagaaacttctatggccctaagtcttcctcaaacccattaattgcagcaaagggaaagaaagcaattaacagggctagattaccattccaattttaaatcagaaccacagacattttattattttcttacagttctttcctgacagtgacacagaagacagcaataatcaaaatccaagaaccagaaaccactgtcaacatcaagtagatgaacaaagagaattcaaggaaaataaagaggccaggttgcttttttaaacatgtggtgggtagatgtgaaagcagcacttggccaaagaataatttggaggctttctttttcactatggtgatcttaaagacccgaattggcatg

SEQ ID NO: 128990 - DNA, 241 bp, Glycine max
  Clone ID: PAT_MRT3847_87483C.1
aacaaaagaatttattttatctataaaaatggccctatttggttacctagtgatgcccaacaggggaacaaatgaaagaatttaacttcaggagcctccacaataaaactaatactgggagggggctgacattctgatccttgaaaatattaagaatgccgtgcaatggttttctctcaagaaaaggtgcctctctggaagaagaacctggaggaaacgcctaatggctgggcaataattg

SEQ ID NO: 128991 - DNA, 438 bp, Glycine max
  Clone ID: PAT_MRT3847_87484C.1
gttgcattaaaaaaattcattatctttcatcgatttcatggatttcgaattgatcaagggttctttggctgtgttcccttttgttttttgattttgaaaaatgattttaaaacaatgcttttatatttgttataataaaagtacttttgttcaatcggttaaatttatctataatttctattaaaaaatagtctttcacccatatcaaattttacgagccttgaaagagtttttttgctaaatttttttggatggcttagaagattaccctaacacgatttgttggttaaatctttacttccgaataagccattttttgttgctagtgctatttgtttcttgtgtttctggattcatttgggtttgcttaattaatttttctgttgattgtgttgacgcaagactgaatgacctaatggagtctaaaggtgggaaaaa

SEQ ID NO: 128992 - DNA, 736 bp, Glycine max
  unsure (1)..(736): unsure at all n locations
  Clone ID: PAT_MRT3847_87485C.1
caactattatcgaagaagaaatttctttgcgcttggatttgttcattcattcatgctctgtctggagaaaacgctctccattctttcaaggaaagggccattaggtcatagattttagcaattataaatggatttagaagagaagttccttgctaaagtttctggtgttcaaagcctttcttccagtgtgcaaagtactccagataaaaatggccattcagatggtgcttcaaaaagttcagaacttcttcagcagttcctaaaatgtggtccaaagaaggaacttcttcaattgtgttttgacaaggacaaaaaaagcatttcatcaaaaggcagaatgtctgaaactaagtcaaccagtaagataactaagaaacaagacacgaaaaaagtttctagtttcagccatcagccccctagaaagcaacctcggaagggtgaaaaccctactcgaatcatacctcctcttgaccagtcttctgattttggccattcaaacacttggatttgtaaaaatgctgcttgtagggcggttctgtctatggatgacacgttttgtagaagatgctcttgctgtatttgtcacctttttgatgataacaaggatcctagtctttggttggtatgcacatctgaatctgctcaaggagactcctgntgggttgtcttgccatatcaaatgtgcccttcacatganaaggtggggagtgntgatcatgggcaactgatgcactag

SEQ ID NO: 128993 - DNA, 379 bp, Glycine max
  unsure (1)..(379): unsure at all n locations
  Clone ID: PAT_MRT3847_87486C.1
gtcggggccgccctggtttttttttttataaaaacaaaacttttttaaatttgattccccacgagacccaggacaaggggcaggggcacaataaagacaagagaacctgcaaaccgaaaaagggaaacgcacgaaagcaaacccaaacaagaacaagcaccactcaaggggcaacgaccggacgaacacaagagcaaaagcacgcacacgganagaacacacgcacggatgaggcaacaacactcacagacggggcacatccctaacaggtagctattgcaacataaaataattgcaatgctagtgcaaagagctaacttttggacccccccttcctgatggacatgacaatgggatcagaaggaaacaataaccaatc

SEQ ID NO: 128994 - DNA, 1818 bp, Glycine max
  unsure (1)..(1818): unsure at all n locations
  Clone ID: PAT_MRT3847_87487C.1
ctcgagccgaatcggctcgagcggctcgagcgcatactaacaacaaccaccaccaccaccacaacaacaacgttagagtctggtcagagtcagagttgctagggattcataggcagcaataaacccttagattcctctccccattctgccaagagaagggccattctgntacagcgctggacacttgcaaatggatttagaagacaagctcctcgctaaggcaacaaacaactaacacgaagaagaagaaatttctctgcgcttggattcattcatttattctctgaagaaaaccctctcctttctcccaaggatggctaaagacttttacccctcctattgcttggtagcttataatctgggtgttttgttcaaaatctgtgcaatctgactggaggaacttgatttcagtttctggtgttcaaagcctttcttccagtgtgcaaagtactcctgaaaaaatggccattcagatgatgcttcaaaaagttcagaacttcttcagcagttcctaaaatgtggtccaaagaaggaacttcttcaaatgtgttttgacaaggacaataaaacatttcttcaaaaagcagaatgacctgaaaataagtcaaccagtaagatcactaagaaacaagagacaaaaaaagtttctagtttcagcaatcagccccctagaaagcaacctcggtaagggtgaaaaccctactagactcatacctcctcctgaccagtcttctgattttggccattcaaacacttggatttgtaaaaatgctgcttgtagtggcgggttttgtctatggatgacacattttgtagaagatgctcttgctgtatttgtcacctttttgatgataacaaggatcctagtctttggttggtatgcacatctgaatctgctcaagggggggactcctgtgggttgtcttgccatattgaatgtgcccttcagcatgaaaaggtgggagttattgatcatgggcaactgatgcaactagatggtggctattgttgtgcatcctgcggtaaagttacagggatacttggatgctggaagaagcagctaaatatagctaaggatgcccggcgtgtagatgtactctgttacaggatatatttgagctacaggctccttgatggaacctcaaaattcaaagatttgcatcaaacagtacaagaggcaaaggctaaactggagacagaagttggtcctgtcaatggtgtttcttccaagatggctcgaggcattgtcagcagactccatattgccagtgatatacagaaactctgctctcttgctatcgagaaagctgatagctggcttgccactgttcccaatgtaaattcagattccacagagggttcttttcctgctgcttgcaagtttgtttttgaagaggtaacaacttcctcagccaaaatcattttaattgaaatgtcaagtatatgttctgaggaaattaagggatacaagctctggtattacaagagttgggatgaatcacccactaaagatcctgtttccgtgtttcccaaatctcagaggaggattttgatatccaacctcaagccttgcacagaatatacttttcggattatatcttacactgatacacgtgacttgggtcattctgaggctaagtgtttcaccaagagcattgagataattaaaaacaatccctcttcatctgttgctatgaataatgaaaaagagaaccttctaactaggggtaattcttcggcctccaagatagggcccaatgccacaatggaaggctatggattcaaggttcgagaccttggaaaatttttgcgtcttgc

SEQ ID NO: 128995 - DNA, 481 bp, Glycine max
  Clone ID: PAT_MRT3847_87488C.1
cggtccggaattcccggggcgaccacgcgtccgcttcctaacccgatcccccatgggcgggagggtgagattcggctaaccccgacagcacccctacccctccctccctcaagcgcaagtacaacgacgaccaccgccctactggattctccgacgggcccgacccgggggggccgccacccccctcctacaacaacgtgcctcccccttgctgcggggggggcgactttgagctcgccaaacagcgcgcccaagaaggcgccgctcggctcctcagcggggccggtgccctcgaccccaccaaacgccccaagcacgacaacaacgggtgctcctttgactccattgatgtgaagggggcatactccgggccggggatttcgccggccgcgggggcatactcctaccagggggggggggcgagcaacaagattgacattcccaatgggagggggggggggtttattggaaaggggggggg

SEQ ID NO: 128996 - DNA, 582 bp, Glycine max
  Clone ID: PAT_MRT3847_87489C.1
ctttttttttttatcaagacaaatattaatcattagtctcgttagaatgttaatgagaaaaaatttaaactcttgacctctatttttctttttaattattaaatcgaccttataatttctacaacttgtaacctctagtttatcctttccatatctggttatcgtttgagaggtgtaaacaatcatggacgcagtccgaaaaagaaaacaaaaacaaagaaaaaatcgttggaagtattctcacccaaatcaggtctacaaattgtagtttaaataatagtaatttcaactaaaaccattatgatacatagccccctgttaagtatccaaaaggcatttcaaagatttgagaggtgtaaagtaaatttaaaaatgataataataaaagaaaagtttttagatttttttagttattaattattaattttttttaaacaaaagttatgatattgatgaagagttgttgtttattaattattacttacagtatcaataaaaaaattaacggttatttataatattttaattaaaatttattttcaaatataattttataataattttttaaaatatattagtaat

SEQ ID NO: 128997 - DNA, 1066 bp, Glycine max
  unsure (1)..(1066): unsure at all n locations
  Clone ID: PAT_MRT3847_8748C.1
ggccacatcacgaaatagcccacccataaaccctctctttctaatgcccacactttcgtttcattcagtgggaacctttctcaaacaccatgagtgcattcccgaacggttccaactcgagcctcgacaacctcctcctccaaactatgatgggcaggctccagctgcgagctccgataaacaaccccttggtcacacagtccctcgaggactttttattcaacgacctcggcgacgacgacgacgacggcggtgacaacgaggacagcgagaaagccttcgaagggaaatcggagcttgcgagagaggaggccaagctggaaagagaagtcatcaagatcgtcctaagcggaaacggcgagtccgtcctcaagcccaattcgggccaggccgtgtcggttcgcgaccaccacatatgtgtcgggtttcaagacgaagaggattctgggtatcgcgtgtgggagtggcatggccacatcatgtcttttgatgaggaatttgggtataaccctgagtatatatacggcaattactttcagtggtttaaggctagaccttcttctgttgctgctgttgctgatgccgttgttgagaaagaggaagaagaagaggaggatgaagagaaacaggagaatcagggtttgagggagttgattgataacaaggattccgcggatgctcgcattcttcacaggaacatcaacgctgcttgtccaagcctgacaggtactagataagacacgattcttcatcggaaattcaagttcaaagtgttgcgagcagaggttatagccaacatctcatttcccgtgttcaacaaagattgatttcccctgcttttcagagtctaaatctcagaagcccgcatcgaggaatttgtttgagctttaaattacatgtaaaggatgcgagacctagatttctctacaataatacatttatctttgctcagtttttttactgtatagcaattttttactttttttctttaattgtacattctctttgctcagctttttaatcttatagcaattttttaaaaaaannaaaaaaaaaaaaaaaaaaa

SEQ ID NO: 128998 - DNA, 438 bp, Glycine max
  Clone ID: PAT_MRT3847_87490C.1
acgctcacgcgtacgggcatctgtataccttgttgaactacattctaccatctgatatcactgctgaaattaaatataggcggaatttgagtaacattcatatttacggcttataatacgacggtcgatacatattcttgtctaaacacgataaaaatgttgctgtgacaaaggaggaaaatacggaggtgatgtagaaatcgaggctttcctgctgatggtgttgcatagcgagctcatgaatttgaaaatcatggtgctcacgaaagcctcacggatcaagatactcgccgtgacaagttgtattctactcaggctaataggtttgccaaaattatgaaccttatacaaagtgttgatggtgatcctaaacatcttactgatgggaagttgtatcagggtccgcatattcctgtatctaatattagtgccggggaa

SEQ ID NO: 128999 - DNA, 493 bp, Glycine max
  Clone ID: PAT_MRT3847_87491C.1
cttttgaccaagagacatggcaacaactaagccaaagactgaatacgtacaaaccttcggcagaaagaagaacgcccttgccgtcgccacctgcaagcctggaaacggtttgatcagagttaatggtgccccaattgacgtcctcgaaccctccactttgagaattaaggtctatgaaccagttctcttgctcggtgctaagactttcagcaatttagatattagagttagagtcagaggtggtggttacacttctcaagtctattccatcagacaagccatcgctaaggccattgtcgcttaccaccagaagtatgtcgatgagaactctaagagagaactcaaggaaagattattacaatacgatagaaccctcttggttgctgacccaagaagatgcgaacccaagaaggccggtggtagaggtgccagagcaaagaaacaaaagtcttacagataaacgcattatggggaaatctctatattctctcac

SEQ ID NO: 129000 - DNA, 531 bp, Glycine max
  Clone ID: PAT_MRT3847_87492C.1
caaaggtggtgcccaactatatgttccttctagacacatggctaactgggagttttaatctcaccaatcacctcactttgttccttgagagaggagctaccatcattgcatctcaggtttcatttcatttgtctctgccacgcctagtgccttcttaacagcaaagaacaacacatgtagaatagtagaagtaccatagaggaaaaaatggaatcaaatatttaatgtcattttcttctaaaccttgcctagctgtggtagtgtagaactatagatgatgtgatttttctgcatcctgaaaagttactattactaatgaagaatatttaataaagcacttacttttgcccactcttgaaaaaatttatatatatatatatatatatatatatatatatatgtatttatcttgaatcacttcaggattattctcattgggatatagtggatttcctcccttcttatggcagaggaattgggagatatcgcagcttgatctatgggcagaatttaagcgatgtggtaataaca

SEQ ID NO: 129001 - DNA, 452 bp, Glycine max
  Clone ID: PAT_MRT3847_87493C.1
gaagggaaaggggggttctttttaattattataagtcctgggtaaaggacaaaagaaatattcggtacaaaaaaacttaggcgtaattaactccgaaccaaatggattttaataataaaaaaactaaaaaatttttgggcccaggccaaacactaaataaactcgaaaattaaaatttaacattttaacttaaaacctggaatcaaaaaaagacgggatctgctcctttttttcaaagcttaaaattccccccctcctaattaaaaacaaaaaaaatttatttttgaccattccaccccgaaaaagggcccaggcccccacaaaaacccccaatattttaaatttccccacctttgaccaattttttggccactcccgcaatacccttcccgggccccaccatataactttctttccaaccctgggtaaaaaaaggctgaactggagaaccc

SEQ ID NO: 129002 - DNA, 407 bp, Glycine max
  Clone ID: PAT_MRT3847_87494C.1
ctcgagccgtttctgttcgcagctgaagcaagctcgataagtaacaatgccttgtcaaactcaaagtcggagtcaaagcagcttcactcgcggcgggctccttttccagcgcccttggttgcaagtttccactcccatttccattccctaaacgccgctgttttctctctctcatttccattttcattttcgcctaatctctctctctaagggcgttctcgtctccgcctccgacgccggctctctgcttctcgacgacggaaccgacctcgtcgagctctccctcaatagcgagtttcgccaccgtccatggaaactcgggatgtatgtaatggtggttggagggtatgctgcacgtccaaggaagcttcccatgatcaaggttcacaagaattgtgatctttcat

SEQ ID NO: 129003 - DNA, 128 bp, Glycine max
  Clone ID: PAT_MRT3847_87495C.1
ggtaatgctgctcccgaatcaaaatggaacatattttggggggggagaatacgaactaccacctaggatttttgtggatgtgacctaccgacttttatgattttaccaactgccctggagtctgtgct

SEQ ID NO: 129004 - DNA, 627 bp, Glycine max
  Clone ID: PAT_MRT3847_87496C.1
ggaagcatatttgagactaactcggagagaaagagagagagagagagaaaaatggctgatacaagtggaggagatgcagtgagaccggtggtaatatgtgataacaagtgtggctgcacagttccatgcactggtggttccacttgcaggtgcacaagtgtcggcatgacaactggaggcggtgatcacgtgacatgctcgtgcggagagtactgtgggtgcaatccatgctcatgtcccaagactgcggcttctggaactggttgcagatgtggcacagattgctcatgtgcctcttgccgcacttaacatcataccttaattaagtctcaaacttcacaaatcttgaatgtgctttaaatctagctatgtactagatagtctcgttcaatgttagtgttcaaattgtggatgtgatttctaatattagtctactactctatatgtagaggcctttctttatgtggaataggtataacatgctgttatgcccgttttgtacttgaaaactatcttataatgaataagaatatgtgaattttgagtattaaaaaaaaaaaaaaaaagggcggccgctggtaaatcctactaataattaaattgcatctctatgttcataaacacgag

SEQ ID NO: 129005 - DNA, 459 bp, Glycine max
  Clone ID: PAT_MRT3847_87497C.1
acggctgcgagaagacgacagaagggtttcttacaacaatacttaaaattagtttaacaaaataaataataataatgacttaattattcattttgaaataaaaaaatatattaattttatttttattcaaagaggcaataaatgcaacgcgtgattattaaaaaaaaaatctgtatcaatctttttctatatccttaccattaaattcctaaaccaaaagatcatctgtaaaaaatttaatataaaatattttttattatgtttgtgttgtaaaatgtaaatataaaaaatgtttatatgacattgtttaatacgagagtatcatgtaagtttgatcttttttaaggtataaaatttaaatgtaacaattttaatatttttaataaaataattgaaactcattacaataaaatgaaattaatgattaatacttattatcacaattattttcaaaatttt

SEQ ID NO: 129006 - DNA, 314 bp, Glycine max
  unsure (1)..(314): unsure at all n locations
  Clone ID: PAT_MRT3847_87498C.1
ggtttattctttttagctttttttttaaaagtaacgacaacaatatttatgaactgaccagttgaacaatgactgaaaagaaaataaagggatttaaatgaaagaaatgaagtacaaaaaacattttggacccccgggagtgatggccttccctcgttgggagagtgggtaanccaaccggaaaacaaaanccgaaaataaatggctttgacgggggggtggtgggacacactttatttcatgaaaaaagaagaaaaaaactttagggcggacgatcgcgcggacacgtggggggacccggtatttaggaaccg

SEQ ID NO: 129007 - DNA, 1146 bp, Glycine max
  Clone ID: PAT_MRT3847_87499C.1
gctcgcccgcctgtacctgccgggacttacttgctggacccacgcattcgtacggctgcgagagacgacagaagggggacgtgttggtgtgcagagaggcaagagagaagttgaatggaaacggtggtctctcgcgctgtcctcgttctctgcactccgcacccaaccacaactcaccctttcactaaacctaacaaactcctccgttcctccctcagccgcggcgccgcttccttatccgccaccagcaaatgggcggagcgcctcattgccgatttccaattcctcggcgacgccgccgcctccacttccacctccactctcagcccctcctccgtccctccccgcctcgatcctcctgagcgctacgtgtcgatccctctcgacctgtaccgcattctcggcgccgaaccgcacttcctcggcgacggcattcgcagggcctacgaggccaagttctcgaagcctcctcagtacgccttcagcaacgacgctttaatcagccgccgccaaatcctccaagcagcctgcgaaaccctagctgatcctacttccagaagagagtacaatcaaagccttgtcgacgacgaagaagccgccattctcactcaaatccctttcgacaaagttcctggagcgttgtgtgtgttgcaggaagctggagagacggagcttgtgcttgagattgggcagggtttgcttagggagaggttgccgaagacgtttaagcaggatgttgtgttggctatggcactcgcatttgttgacgtgtcaagggatgctatggccttgtctccaccggatttcattgcggcctgtgagatgctcgagagggcgttgaagcttttgcaggaagaaggggcaaccagcctagctccagatttacaagcacaaatagatgagacgctagaagagataaccccacgttgtgttttggaacttttagccttgcctcttgatgacgaacatcgagcgcggagggaggaaggtcttcttggtgtccgtaacattttgtgggcggttggtggagggggtgcagcaacaattgcccggggtttcacccgtgaagacttcatgaatgaggcattcttacacatgacagcggctgaacaggttgaactttttgtagccacaccaagtactatt

SEQ ID NO: 129008 - DNA, 321 bp, Glycine max
  Clone ID: PAT_MRT3847_8749C.1
caacccaacgagaacttgtacttgcttccttaagataacatcaaattccgttttactataaggcacataataaccacttggcatttttttggggcaggggaggggctctgcgggggaataagatcaggtgagaagttttagtctgcctccgcaccaggttgttaagacccttgtgacttttttttctggaaaacatatggggggtgcagggaccctgaagtgaattgcccaggtccttatctggaatccatataatgacagaaatatgtgaaaagaggttgacaagaacgagcatatggtgggacctctccatgaaaatta

SEQ ID NO: 129009 - DNA, 366 bp, Glycine max
  Clone ID: PAT_MRT3847_874C.1
ggaacaaacaaagtggttataagcgttccttaatttctaaccataagactatgttcagggtctgacggaaaggaaaatgtacctgtgatttcaaaagcaaataggttaaactcgtagtcgctaatttgacaggctgctttcaacctattttctaaaggaaagttggggccggacaactttaccatgagaatggtttgctgataatgctgatttaaagacctatgacataggctgaccaaactgttttggggtgaatgagaatactgagagccttttttcagcgataccttaaaacggtgcgtcttttagggcctcttgcttgtcaatgactgacacgcagaccaaatggaggtaaactgatttttg

SEQ ID NO: 129010 - DNA, 210 bp, Glycine max
  Clone ID: PAT_MRT3847_87500C.1
caaccccaaccaccatggtgtgggatttgaattcgcgtaccatttgttcccacacaacaaaggtaaacggcgccagcccgaggccaagctagcaactacgagcgaggccaaagaaaccccctcaacaaaacaacaaacgaacgacacccaacaaagacacatcgccggggaaccgggaacacacttatctaagccggaaccgaagccaga

SEQ ID NO: 129011 - DNA, 256 bp, Glycine max
  Clone ID: PAT_MRT3847_87501C.1
tatggggaaaggtgggccggctcgcgggtccgggtccggggttcgcgggacgcgccaggcttccggtagagtttagttacacacgaaagttattaaagattagatagtgatggctgacactccataaccattgggaggaactattacagcggatattcggaaaccaattctgggaggtgacatgggaagagaacctccgaactaagcttgagatgcgaatgggacatgggaacgggacgggtggttcaagaaggac

SEQ ID NO: 129012 - DNA, 343 bp, Glycine max
  Clone ID: PAT_MRT3847_87502C.1
atgctgataacctactggaaaagatggaggtctaaattacctccaaggatggtctggcggtacatcaccagtgtgggtcccttctgataccaacaggttcactccatgcacagtggtgcggaaggctgctgaagatatcgttcagttacagcattgctcaactgagaaggctagcctgcttcttaaactacattcatttgcgagcttgaatctgtggaacatctggtgatcacaggtgttagaaggatcagggttaggcgctagttgtggagctgattcataagatggagggcttacataataacgcacttttgatagttaatccctagacaaggcactcatc

SEQ ID NO: 129013 - DNA, 347 bp, Glycine max
  Clone ID: PAT_MRT3847_87503C.1
aaaaaaaaacataaacaaaaaaggataaaaaaaaaaaaacaaataaaagcatatgggggatatgaatacaatggatataaaaaatggacaacttaatgttgctcgatgcacttggtgactgacacatgagaacgaatgaaaagcagagacggtggaccactgactgcagatccagaacttatgactacaaaactgactgccgatgacgaatttctcatcattgattgcgatgggatttggtatgtatttcggagccaaaatgcactggattttgctcggctcatgcttcacgagcataacgatccatccatgtgtagccaggatctggttgacgaggctttaaagag

SEQ ID NO: 129014 - DNA, 696 bp, Glycine max
  unsure (1)..(696): unsure at all n locations
  Clone ID: PAT_MRT3847_87504C.1
gttaaatatttattcttttatgagtatacagtgagaaatacacgtgaaattctagaggaatttcactgcatgatgcatattatttaattatacaagatcctaaatgtaactcataatgactcagcttctagtaaaaaagctagctagttgttcattgcaagacctagaaagagtgcatttgtcattgcacaaatgacaagctagcactactaatatttgtcaccttgatctaatgatttcttccttcatggcaagtgacaaagcactaagattgccctcactctctatttgcacacctggcatcgccacagctctactccctgcaaacccatattctccaattttgatctctccaaacttcaccattcctccttccccttcatatacatgtccaaagagcaaggcttctctccccacacaaccccctctctcaatcttcaccatttcagggttcaataaggcccccatgctatctacataaactgcatgttccatatccacttttgcacccatcaacttcatccacagcacaaaccaaaatgatccacttgtcatgtccataaaatagtctccaactaaggttctaatggcctgccatgtgctgtccaatggtgatcctttgactncatataggcactgcttcacctgcctttttctttcctgcaagaatccattttgctatcacacacgccaatg

SEQ ID NO: 129015 - DNA, 205 bp, Glycine max
  unsure (1)..(205): unsure at all n locations
  Clone ID: PAT_MRT3847_87505C.1
gtggtcagacanactttgataagntatatnaatnntancgntatnaacatgcaaatcaancatttacatncacattatattaccataaaaaatganctgagatttaatctgttcatantctgttctggatcntgncatggctctttcgnnttntcnatttcttctgttctcaatcagcaattnctncctcgcntcttcntnncaa

SEQ ID NO: 129016 - DNA, 1603 bp, Glycine max
  Clone ID: PAT_MRT3847_87506C.1
ctttttcctcagtggaacaaacctcagaagcagaaaaaggtcttctctctttctctctccttttccctcaagctcagaatctcccgatcgacagtcgacttttggcgcatattttacaaattaagaatcttgttaaaaagaagaaggatgtcaagcggagcaacacactggtgtcatgcatgcagatcgagcagattcggttcgagctttttcctctgtggaacaaacctcagaaaaagattttacaaattaaatattgtttaaaagaaagatgtcaagtggagcaacacactggtgttatgcatgcagacagccaattgtgcttgatgggagagatcctgtttgcccttactgtgatggaggatttgtgcaagaacttgacgagttgcgaggaattgcacccaaccataaccataccttttcgtcacagtcaggagactttcatcaaatgcctgacattttcgatgctatacatgcttttatggggcagagaggttctgaccagagatttgggcttatggacgccgttgataatttcatgaggcatagaatggccggaagaaactcaaactttgatgttagagggaggtctggttctctcccagttcctgaacagagttggggcgtttatagttccggtccttatttaatatttcacggtcaagttcctggattcaccttgtctgctggcagcccaagaggtggtcctaggcgtgttgattttggtgactactttatgggtcctggactggaagaacttattgagcaactcaccatgaatgatcagcgtggtccagccccagctgcacgatcttcaattgatgcaatgcctactattaagataacacaggcgcatcttcgctcggattcacactgtccagtttgtaaggaaaaatttgaattgggcactgaagccagagagatgccatgcaaccatatttaccattctgactgtattgttccttggttggttcagcataactcatgtcctgtttgccgtgttgagctgccacctcaaggacaggctagttcccgtggtactcgaagttggggaggaaggaatgccagcaacagcagcagcagtggcagcaatgatagctccaggggcagagagaacagccatcagaaccatggaaggagaaatccattttcatttttgtggccattccgctcgtctaactcgaacaataatcattattctgagactgggggaagcagctcttcaaccactcctgaccagaataatggaacaagttatagcggttggccctttgatcgctaaaagtatcctttcttctcctggataagtacaatttgctgtctaataatgcttgtaatttaaaatgccaaggaaagagtttattagtattgtattttaaacttaagctcatgtaaggaagatagaagtttcttaaaatctttgtacatgaaattgcctggtttgttgaatctctttgaaactttaatgccgcacctgtcattattcaatttgattgtatcttgctgcttagttggtttgtttggttcctttggggtcttggcagcaagcccaatatgctaaagactaaagagagtgaatttggtttgttaaatgaatctttta

SEQ ID NO: 129017 - DNA, 426 bp, Glycine max
  Clone ID: PAT_MRT3847_87507C.1
gtattctttgaggtcatgactattcttcacattcagcatgaaacaagacaccatatgagatttgaattagtaaaagatgacattgaaaaacaaagaaagaaataaaagaaaagaaaagaaaagaaaaggagtggctttgcagtatatcatctgtgacatgcaaggcaataacatttcaggttccacccaataagtaggttttttctacataacctctgaatttactggatgggggaccggagaatattcatgtttaacaactacaatccatctcaccttgaaatctgtgaacctagcattctgcatggtattatgtcggcatctaaatgatacggcccgaacctgctgcctccttggtattaaaagaggtaagccgtatttctaaagtcaaaaacgggcctattggctgaacttttattaattttt

SEQ ID NO: 129018 - DNA, 248 bp, Glycine max
  Clone ID: PAT_MRT3847_87508C.1
gatgctctctcatgctctcttcgaggctctaggctccaccactccgtgatccatgctctattccccactgcgatgctgaggtacatcttgaggagtgccttagcgtagagaggcagagcgataccatgacaatgctcagttgggtcttcatcattgcgtccttattcctctccctgtgctacggcaacgtctacacctgcacgatgcatgaccgtcactcggagactgtcaggaagtggtctcactcc

SEQ ID NO: 129019 - DNA, 322 bp, Glycine max
  Clone ID: PAT_MRT3847_87509C.1
ctctagagggggcgcccctttttttttttttttttgtggtggttgtaggcaaacagaaaattgggcttttgaaaagcctccaaaacagcagaaaatgttgacacctcctttgggaaattataagaaaaaagggttaccttatttgggctatctttcctacagggatcctggggggaaatctggagaataatgttactatgctaaggccccagggggttttttttggaggctagcgctacaattgcattaaagtactgctaacctatgtgtgggccaacctaccagatctggatcctttccttggggtaccccccttttggcg

SEQ ID NO: 129020 - DNA, 235 bp, Glycine max
  Clone ID: PAT_MRT3847_8750C.1
gcagctggtacaaagtgcgcttgatgggtacaaggtctgtatctttgcttatggacagacaggctcaggcgaaacctatacaatgatgggtaggccggatgcccccgatctgaaagggttgataccacgttctctagaacagatattcgagattagtcagtccttgaaggatcaaagatggaccttcaaaatgcaagcttcagtattggaaatatataatgagaccatcagagat

SEQ ID NO: 129021 - DNA, 262 bp, Glycine max
  unsure (1)..(262): unsure at all n locations
  Clone ID: PAT_MRT3847_87510C.1
gtcgcttctcgnccggcgaaannggcggagcgggccgattgaaacgaggagacggncgagcccacggagaagggngcaaagacngnggaggccgaggagccgacggnggaggagaggaancnccncncngnggcnaacaagaacgngannggngcgaggagggcnncgnggaggaacanancccccanngagcagaaggaggagagcaggggcaangaggaccacgnggccannanaaaggagnacaggggcaaaanngagg

SEQ ID NO: 129022 - DNA, 661 bp, Glycine max
  Clone ID: PAT_MRT3847_87511C.1
gggaaattaaagctaaaaccagcatctatcgccttagcaactaactctaaaaatcctcactgtatggccatcaatctcagtagcactgcttctcttcactctaagccttcctttctgactcataaacacaacaacctcatcaaattctatcatcctttttcctctttgctcacaacatgtgctcaaacacatgggactgacactggagttacacagaaagatgatgcttctgctggatctttatcttcttctcgtgcacagctggatcttttggagcaacttacatctacaagctcacctaatagtggttatgaaagtgatggaagctctcgcaaacttacaatccgagagcagctcgtgcagttgtttggagaaagggatgatgatttcaccatacccccatctaaaaaaagagaaatatcaggtgacaagcttacctcaatgaagtgtctcaaaggaatgattcagttttctttgcaaccataggagcatttgtgattcttccaccttttataatactaggaatagctatattaactggctatgtacagctttttccttgaaatactatagttagcgatacttaagtgatatatcaatgtgatattaatagaatttcttacctaaaaaaaaaaaaaaaaaaaatagaaaaacttgcctt

SEQ ID NO: 129023 - DNA, 151 bp, Glycine max
  Clone ID: PAT_MRT3847_87512C.1
gccgtcacacaagacattcagaatcaagaagaagttggcaaagaagataaagcagaacaagcccatcccctactggatccacataaagaccgacaacaccatcgaatacaacacaaagcaccgtcactaacatcgcaccaagcttaaattc

SEQ ID NO: 129024 - DNA, 356 bp, Glycine max
  Clone ID: PAT_MRT3847_87513C.1
tcgcctttacagcctagtcgataatcgtaccaggatcttatgcataatcatattcaatctgagtctctggagaggctacaccgccatgactgtcatattgctgcttcttggactattatcttacactggagtactctctaccgtggcactatctgccgatgcgtcttatggacgaaatggaaacaatgtaccagcatatcaggcattgactgatctttccaaatccgtcagaataggcgacattcgtcatactatgcagacgaatgagccctctatgccctcagaggatcaatcctatctgagagcctcggtgaacctaatgaccaactactatctatcaccaacgctggagctga

SEQ ID NO: 129025 - DNA, 765 bp, Glycine max
  unsure (1)..(765): unsure at all n locations
  Clone ID: PAT_MRT3847_87514C.1
agctcggattcggctcaatggctacactttccaacccttcattcctcctctacctttccctgatcatcactgcaatgtgctttgctgtttcgcagcccttcatcggcgtgaactacggccaggtcgccgacaaccttccggcgccggaggcctcggcggagctcctcaagtccacgaccgtcggaaaagtccgtctctacggcgccgatccggcgataatcaagtccctggcgaactccggcatcggaatcgtgatcggcgcggccaacggcgacattccgagtctggcctccgatcccgactcggcgactcagtgggttaacgcgaacgtgttgccctactaccccgaaagcaacatcactatgatcgccgtgggcaacgaggtcatgagctccggcgacgagagcctcgtctcgcagcttctcccggcgatgcaaaatgtccagaatgccctcaactcggcgccaaaaataaaggtttccacagtgcactcgatggccgtgttgactcactcggatcctccatcatccgggtcattcgacccggctctcgtaaacaccctccaacagttgctcgcgtttcagaaagataacgaatcacccttcgccttcaacccgtacccgttcttttcttaccagagcgacccgagacccgaacactcgcgttntgtctttntcaaccgaatcggggtcggtcgatacgggtagtggggaggtttattctaacatgtttgatgctcaggtggatgcagtgcatgctgctttg

SEQ ID NO: 129026 - DNA, 487 bp, Glycine max
  Clone ID: PAT_MRT3847_87515C.1
ctcttcttttctttctgctagggttgcagctcaggttctatgtacatctaatgataaagtgtaagaaaaaggttcacatcaatgttgacattattgtccatgttatcgctcatgaaccctctaccactgcccatatgattttttacctggtatgcatgcacaaacgtgttgactagagatttattaaggaacctgctgagatgaccgataagactatcaagtatgcctgggcgcttgactagctcatggctaagcttaaagcaggactcacaagtgatattgccttggatattgcctagaccaccaagtactccagcacaatctatgacacacctgtacacacgcctttcctcaggaacatgatcactgacacgatcactgctacctgcactgctgttagcactgatctcactactgacggcactgatgctggattttcaactgatgtactgactgatgaacatgctcgtgtacattccatccttga

SEQ ID NO: 129027 - DNA, 418 bp, Glycine max
  Clone ID: PAT_MRT3847_87516C.1
tgctatttccacaagaggaataactcacaggttgggcttttaaggtgcgtcccacatcgtctccgctggctgatgggggcccatatttgtatgctatggtgcatgatagttcattgtctacaataccaggtgattttcgcattggtgttaagttgacaaccataaacaatatgtgtgcatttgggctcaatcctggtatttcaggttcttcgcttttgggcaccatttcttattccatttcacagtatactgtttggaatcaaaatggctacagtgagaacaccattgaattttgattctagtaagcatagctttttgtcaattttttattgaccttcttggtggaggaatttttagtggacaataactggagatttggttcacacttattcaaaatttctccaattagtaactttgt

SEQ ID NO: 129028 - DNA, 601 bp, Glycine max
  Clone ID: PAT_MRT3847_87517C.1
gcggtcgtgcgatactttcctaactaattcatatcgtttatttaattagacagggttttccttcttgacttttactttctacgatcttgaaagatttttttagatgaccaaaaataaacaataggtctacctagtatcttataatactgattaaggaattaaacgataaaattttaattagaaatcatataagaatcttttttaaaaactatagaaaaacatattttaatgtgtctcattaaaaaagtctttcatattacttttttaatcagtactctaagcacagttgttaagattgtcataattcataaacaatttatcaaacaaatatctgacattgcgctgagtgttgtaatttttttcccctttttcttttctcgttttgtacaagtcatgcatacgaatatgggagtttgttatttgaccttttactttttggtctagttgttacgatctgatgcatatgccctctcccaccagaagaaaatctagaatactttgatttcactcctacgttgccaaaattctataaagttttttgtgaatttggtaatggtcgattcctttctttatatcttacctaataattcaatacgtgtga

SEQ ID NO: 129029 - DNA, 186 bp, Glycine max
  Clone ID: PAT_MRT3847_87518C.1
aaaaaaaaaaaataaaaataataaaacataataagaaaggatgacgagacaaaaaactacatctttgaaggagtgcattatcacatagctgatccggtaggagagaattctaaagataatggtggcattctgagatttggacaagtttctggactaggtgtatcaccttcatctatattttggggg

SEQ ID NO: 129030 - DNA, 397 bp, Glycine max
  Clone ID: PAT_MRT3847_87519C.1
gttgttttgctgcttatgagcggaaaggcgttcagtacaggtatcccaatgcccgaataaaagactgggatgaagggattaaggtaacaagcccttgcccactcttgaatacccaatccgcccagggcatggactgctggactactttctgtcgtgaggaaaactctgtgtgccctgctggaaatatcataccagatcttaatgtgctagtataccaaaacaggtggcgtgaagcattagccaggcttcttgagacatacaaccccccagaggttactgagggggcatgcccagcaccttgtgaaggtccttgtgtcctctgattgatcgagaatacaagatctattaaatgcatagaaggtgctagtctacacaatacttttgaagaggggatgat

SEQ ID NO: 129031 - DNA, 735 bp, Glycine max
  Clone ID: PAT_MRT3847_8751C.1
tgttgatgtctaatacgaaactgtcaccgcctatgaagaaggcgaaatctatcgactccaagaacgacgacgccgttttgaaatcccccgccgccgcttccgatgaccccaatgcgcccgctctcgtcgccgccaatctgtctcgcaaaaaagccactcctccccatccccccaagaagcttctcattaagttccacaaaggtataccaacattgcccccaaattttgaggaggatacatgggcaaaattgaagtcagctattggtgctatattcttgaagcaacctgtttcttgtgacttggagaatctttatcaggctgtgaatgatctttgcctttacaaaatggggggaaatctttatcaacgaattgaaaaggagtgtgaagcacatatatctgcagcactgcagtctttagttggccaaagcccagatttgattgtttttctatcgctagttgagagatgttggcaggatctttgtgaccaaatgttgatgattcgtggtatagccttgtttctggataggacgtatgtgaaacaaacaacaaatgtacagtcattatgggacatgggtttgcaacttttctgcaaatatctttctctatctccagaagtagaacataaaactgttactggtcttcttcgtatgatcggaagtgaaagatcaggtgaatcagtggatagaactcttctaaatcatcttttgaagatgtttactgctctgggaatttatg

SEQ ID NO: 129032 - DNA, 339 bp, Glycine max
  unsure (1)..(339): unsure at all n locations
  Clone ID: PAT_MRT3847_87520C.1
atnnttgcggctgcaagacgacaacagacgggggggggagaatgaatttagatcttaccggggagtgtgataatatcctcattcctttgcctcagcttccactccttgtgaacataaaagatgggggacagattcgccaagcgttgtacccggctctttactaagaaagagatgcgtcttcttaagggacgtcttagagctgatgtggagactaccatatgagacaagcgcaagcgggacattactgtcacacccatggccacaaatatactcaatgtggatactgagcacggtaggaaccttaatcgacctggctccgagtgcagtgaccatctactt

SEQ ID NO: 129033 - DNA, 367 bp, Glycine max
  Clone ID: PAT_MRT3847_87521C.1
gggctgcgcgggataattgtgatcactcatcaaattaatatttttttggtaccaactcatcaagttatttgtttttttggtacaaacttatcagattaatttgaaactagcgtcacttgattgtaccatttgttttctggaatgaatcctttctcatgaagtgataagattatgagaagagaggtagatgcaaagcccttaaatagtaacttgaaacttttgtttataaggtcaacttatttaagattgccttagttggatgtttctttattcccttgaaaaatatgatgtaaaaattcacgaaaatcaatgcactgtaccttaatgttaaaacaataatccaaggtctcataatctatctttcacc

SEQ ID NO: 129034 - DNA, 165 bp, Glycine max
  unsure (1)..(165): unsure at all n locations
  Clone ID: PAT_MRT3847_87522C.1
cttttgctgtgtttcttcctcgattgagtttgagttcgtgctatcttntatcgctcttgactttggaagactaacatggaatacggtgaatgcgaagctgtgacaagctagaacgggcctacctctgcgagttggaggggcactaaaccaagaagtaccaggagc

SEQ ID NO: 129035 - DNA, 526 bp, Glycine max
  unsure (1)..(526): unsure at all n locations
  Clone ID: PAT_MRT3847_87523C.1
gtgaaagttgtcattgttcacatgatcatggtaatggtcagnncacctgcaagtactaacttttattctcaataacaagaattgcgacaagaaattctttagtgcaaaagttgcacatgagttgtgccaatccctgattcagccaaaaaacattaaaggtttttcaatcattgagctcattattgaaaaaaaatcataataggtttctcaatcattgagttcattatggacactgaagacttgaaagaaaatgtcagaaaagccaagaagctcaacatcaacatagaagaaaagataatgtcaaagaaagaaaaatatgggttcacagaagttacttctaaccactagctcaaatacaaggaggaagnnnnggaaactggaaatgtaaaaagaaaaggctaaatgcaaattaattaaaagaaaagccgctcactcctaaatagtgttataaaatactagtcattaatacagggaaggcactattcattgattcgaccatgnncaaattagcgataactaaatattt

SEQ ID NO: 129036 - DNA, 503 bp, Glycine max
  Clone ID: PAT_MRT3847_87524C.1
cggacgcgtgggtaaatttgtatcctatacaaaggtctcattcaagtaagagttatggaggatcttatgccaatggtctttggattagtcctgttttgaacctaccaactccttgcatttctaaaggaagtggtactagtctcttcgggttgggttcttttttacgtgttgggaaggccaagaaaagcaacaaatgatttgatcatgtcatggattaattgttaattttgcttggcttgtcaaattcgtcattgtttactctgatcagtgatcaatagaggttaattagcatggtacaaaatgaagttgattatgtttatgccaagctaattattcggagggataaaaaaaatctttgatggtcctgcagataatagggtacaagcttgttgggcagaacaatgggaatctgtccatttttaatgctttgtcccatcttgttttctgtgatgaatcctccaataaatggaagcttttgtggttaaaaaaagcttccatttatt

SEQ ID NO: 129037 - DNA, 196 bp, Glycine max
  Clone ID: PAT_MRT3847_87525C.1
gtaatacagggcttcatctcaccatatccattccccattagcgcagcacgcgagcctgtagcatggttctactcaaggcgtacagtttccagcaacctcagggagcccgggctctcctcgcgggacatcttcctcggtgtcccatcccactcgccgcatctccaatatccttcctctgattacctcgatttctcca

SEQ ID NO: 129038 - DNA, 478 bp, Glycine max
  Clone ID: PAT_MRT3847_87526C.1
aaaaaaaaagagggaacaggggggtgatgttaaaccaacccgggaaatggtttaaaaaaaagcctttttagggccctttttggcaggagaccgcgggagaaaatttttttgggatcctttagggggaaaatgaccaaccgggggcagttttccccccccaaggggcccagaccccccccccccctaaaaaaaatctggccgaaaagggaagccgctaaaacgggaccccctcggctttgaaattggggggcccacccccccggagaggggacccggaagttttgaggggggggggggtcctcccaaaggaggctctggggggctcaagggacctgaagggggaacctttttgacccttggaaattttagggggggctcccggcctaccatccctggggggggggaaaaagggcccagtctcattgccaaccggtgggtaacaactggtcggtacaccccccccccttgggggccccct

SEQ ID NO: 129039 - DNA, 499 bp, Glycine max
  Clone ID: PAT_MRT3847_87527C.1
gaacatggaaacatctgtgattgtacatatatagttttaatgaacgtgataaattattatataaataaggtttgaaataattgttagacatgattttgtttgatgggattgttattgggataatgattacaaatattcatactattgacaaatagtatgatatataatttctatacaattaatatgattaatgatttaaggagaatgaattgattttgcttggaaatatgttaggagaaattaatttgttatatatcaggttgaagattctttatataagataagttttatttaaaatgttagcgaagtataattcatgtatttatcaacaataattgtttttaaaatttttacaaaattctttaaaatcttaaaaattcataatatttgttcaaatattataaattcattaaaatataaactacaaaatcctaatcataaaaatcttaaaaagttattatattgttataaaatcttttaaaattttcaagattttttt

SEQ ID NO: 129040 - DNA, 290 bp, Glycine max
  Clone ID: PAT_MRT3847_87528C.1
ggcagttcaattccaatatattccattctctctgtgtatttccctaactctcccttcaagatgcagatcttcgtcaagaccctcatgggggaaggcatcatccttgaagtggatagctcttagatcatcgacaacctcaaggccaagatccaggacacggaatgaatccccccggatcagcaacgtctcacttcgccggaaagcacctttaggacgggcgttcgcttgctgactacaacattcaaaatgagagtgatcttcagctcgtcctccgtctccatggtagcatg

SEQ ID NO: 129041 - DNA, 250 bp, Glycine max
  Clone ID: PAT_MRT3847_87529C.1
gcggctagggttttagcgcacttcttctagatttaaggaagatgggtaaggagaaggttcacatcagtattgtggttattggccatgttgacttttgcaccaactggactgacaaccgaagttaagtctgtggaaatgcaccatggagctctcacagcagcacttccaggtcccgatctcgtagatggttccagagaggcctcaccagaaagcccttggccttgttcaagaagctccgtaaaccgaaaag

SEQ ID NO: 129042 - DNA, 462 bp, Glycine max
  Clone ID: PAT_MRT3847_8752C.1
gagaagaataaatcatagtccagagccacaccaatataagaagaacttctggacagtagaacacatttgcctcatacaaagtaaaatgctcaaccatttaccacgcgggtcactgatgccaagcaattcatttatcagaccggtgaaaacgacagaatctgtggacaaaggctggaacttaattagaacagactgtactaggtcgtatgactatattggcttaacatattcccgtgctcttagagattgggggatcactcgccggtcgataacatcaggatgcatcaactaatatgacaaaccggaatcttttaatgctgagctgacacactctagagagcagtagttggttgccatggagcatatacaccttgaatgcctactccatgtggaactcgaatactgataagagattatgagtgtctctcactgcaaactcctgcttgctcttctttaggtgac

SEQ ID NO: 129043 - DNA, 213 bp, Glycine max
  Clone ID: PAT_MRT3847_87530C.1
agctgcgcagagatagaagggggcacaagtgagtttgttgatcgacatatctagatccagtgtgatgaacatgcaggtccttgttttcttcgttgctacaattttggctagcatgcgagtgccatgcgtaccacatgttccctctccgactgaacactggcgtatggtgcccgtcctcctgatgtgaactgcgcacgttggaggcttgctgtc

SEQ ID NO: 129044 - DNA, 1463 bp, Glycine max
  Clone ID: PAT_MRT3847_87531C.1
acctcgagccgattcggctcgagcggctcgagggcaagaaggcctacattgttgtctctggaggcaattactgcccttgtgaagatgctgcaagagctctcaaatggcctgcattggtctgcaaagaacgccggtttaagatttttgacttggccattgaagcactttctggggtgtcagattctgaggcaccagtgatacatgcagtgtacaccagcttgaagggtttgatcaaaattcacaatcccagtgtagtgatcagtctggctgacattgaccctcatgtgagaaaagctctcaagatggcctcagaaaccaactcaaatgacaccacatttgttcttttaccaagttcttcagtttctcaagttcttagccgaatcggctcgagcaaattttgtcttgcagactggaatcggatgagggtttctgtgaacatcatcacccaaaatagagccaattcactagcaaggcttctcaaatctctcagcaatgcctactatctcggagatgaaattcccattaccttcaacatggatagcaaggtagatgaggcaactataagactagtaggttcatttgagtggcctcatggacccaaaaccctgagaaggagaatcgtccaaggaggtctcatccgcgctgtgagtgagagttggtatccatcttctgatgatgactttggactcctactagaagatgacattgaagtttcaccttactactacctatggatcaaatatgcactcatggcttaccactatgaccctcaagtctctctacctgagctctcatccatttcactctacactccaaaacttgttgaagttgtcaaagagaggccaaaatggaatgccacagaattcttcaaacacatccaccccaacacaccttaccttcaccaactaccttgcagctggggagcagtgttcttcccaaagcattggagagagttctatgtgtacatgaacatgaggttcactgaggatgccaagtccaacccagttcaaattccaaagtctagaacaaatggatggcaagcttcatggaagaagttcctcatagacatgatgtaccttagagggtatgttagtctctacccaaatttcccacaacaagcaagcttttcaaccaaccatatggaaccaggggcacatattagtgctaaagacaatttggttaagcacaacaaacgagactttgaggtgccactaatgaaagaagactttagaaactttttgccagcaatgaaaatgcctccagcaccaaggcttccatctctgaacctcttcaatcaaccagtttctctaaagggtctcaaagctgctggagctaagttgggacaagatgtgctgagatgtgacaatgccactgaggttgttgctgttgacaaagatactggtctacctcacacttgctccaaattctgaagtacttcattattctgattaattaattattct

SEQ ID NO: 129045 - DNA, 449 bp, Glycine max
  Clone ID: PAT_MRT3847_87532C.1
ccacgcgtccggtccacaacttcaagagactcaccaagcgtcagaaacgacttgtgcctcatcagctcattgagtccaatcctatttggggccgcaaaaacaaatctagtggtcaaaacttgagtgctacacctgcatgagctgagcttttgcttgtttccaagtttccatgcttatggcatttttcgtgtaatagaagattcttcttggccatcacataatatggaaacagttgagaaatatgtctgtcccttgttgcaaatgatagaattttgtactggatcatgcttattagcttattatttttcttcctactaggtgctataaaggatatgtcctgttcaatcagcagcatgaatctcctcttgttttgtggggaagtataaacctatgattttttattttaaaaataagtttacacttgcatcaaaaaaaaaaaaaaaaaaatt

SEQ ID NO: 129046 - DNA, 515 bp, Glycine max
  Clone ID: PAT_MRT3847_87533C.1
gccattcgtacgttcacgcggacactgtaatcaatcatcatatttatatttgcacgctgatatggcctagtctcaaccagagatggagcatgcaaagaaggttacaggttgggctgcttggaattcatctggggttatttcctcattaaacaactccagaagagaaacgggggatatagatacggtatcaaaagtgcaatactgcgtgatatgccagtcaaatatacatatgttaaagaactagaggtgcgacacaacctatcccttggttactgggtgctagatggttggtgttgtaacagaaatggggagtaaggtgtaaagaatcaaatctagacaccgggtcagtgtcgcgggcatgattggatccagcgggacatgtgaaagctgagtttaatatctggataattactgaatctaaatgattctcacatacggtgtgaagtatgttgatggcaacatgacgaacatgagctgctctgacgtgacgcctgactacgaacactttgaggtta

SEQ ID NO: 129047 - DNA, 189 bp, Glycine max
  Clone ID: PAT_MRT3847_87534C.1
gtcgcacttcggcaagtacctaaccggagccagtgggttctctgggactaaagatgggaggctacgcgccagataaacacgccttcaatatgttcgaggcggtgggaaacgcactgaggagcgtgtatggcaaaacaagagcaggcccgccttgacactgggagttgggaccggtatgtgggcattgtg

SEQ ID NO: 129048 - DNA, 150 bp, Glycine max
  Clone ID: PAT_MRT3847_87535C.1
ccatgatgttgttcttggaagacggaacactaggactcacaatggtcatcagttgaggctatgattcatcaacggatatgcactttgcaagagtattaacccatatgaagctgctgcttatggtgctgcagtgcaggctgcgattctcag

SEQ ID NO: 129049 - DNA, 406 bp, Glycine max
  Clone ID: PAT_MRT3847_87536C.1
cttcttgttttcatttttaataaattactacatgttatgcttataaagctttgagaaggaacgggcataaaggtcgaacatccatgctttctaattccaaaatatctgcccgaaaattacatttttttttactaagggtatctttttccacaagtgttcaatggcttatctcatttttgctggtatgtgatagtttttggcatttgtattccgcgtgaatctggtaacatcttggttaaccaatataacatctaagaaaaatgtaatataacttaagagttccagcttgaataaccatttaacagtgatttttacagtaagcacaatacctggtttgggtcatattattttagcttcactgtttcatccgtgttgcctaatgggttaacaattcatagcctgaatt

SEQ ID NO: 129050 - DNA, 523 bp, Glycine max
  Clone ID: PAT_MRT3847_87537C.1
gtcgtcgagaagttgaaaatcagagatgttagaaatggtattagagcaaatttttcccctagtatggtttggttcgaggatgaacggggtgaatgttggtggacatgtaacaccttgatgaatcacaccaaaaagaaagaaatacataggttgtgcaagtatgagactgtacaaatgatgatgacttaaaggaattaattagtattacctataccaacaatatgcatttattttttggtactagcttttgggaactttctccctgagtaaggataaaacatgctaaaaagtcttgtgttaatttgtggggttagtcattgatccagaaagtaggcaaaaagagttatgatcgatggagagttctagccaacaaggatgccgagggaagtatcatcgcgtgaagtgtcgtagtgtgagtgtcaccaagaaattgaaaatcagggatgttttacagatattggtctcaacaccattttaccaagtggctatatattttttttttcctgaaaatgctcttttctca

SEQ ID NO: 129051 - DNA, 707 bp, Glycine max
  Clone ID: PAT_MRT3847_87538C.1
ccacgcgtccggacccggttgaatatgttggagccgcgtaagctgtcgctatagtgagacggttcctcacggttctgcttctcctctcttactctatcctcttccgtgttgtgtttcttttaacgggtcgaacctcacaacaacaacagcatccgcggattcttctgattttgtttcggtcaaaaaaggagaaaggaaaggtttcatagattaatatatgttatgggcaacccatcgcctctccagcttcttcttcttctccgttttctgatgctttttctcaaaggtgtgtatgaggatgttgttttgctgaattgtttgtgggatggcaacagcaatacaagtcgtgatgaaggagatgagctaaaataatgggtgattcttctcttctcacttgtttgtcaatggagaatcaccacccatccacgctactgtccatggattctagtgcatcttcacatgaggaactggatttggagatgaacacacagatcataccccccgatatcaatttgcccctttcagcagagcgcagccctcctccacagccatggaattctgatccctgtgatattctggatgttggtcttggcactcaaggctatgagactgagacttttctcaaccttcccaaagctggaaggaagtgcaccaagcgcattgatagcatttggggcgcttggtttttctttcgggtttacttcaag

SEQ ID NO: 129052 - DNA, 134 bp, Glycine max
  unsure (1)..(134): unsure at all n locations
  Clone ID: PAT_MRT3847_87539C.1
ggattattgcttatatgntngctgtaacatgcccagcttccgnattattactaataaaacaagagtattggttcaaattcgaagctgggcatgttacatcaaaccantnggattattgcttatatananaaaaa

SEQ ID NO: 129053 - DNA, 146 bp, Glycine max
  Clone ID: PAT_MRT3847_8753C.1
ggctcgagtggtcactggccattaaatctatttatacgcttagaagaccttataacctttataataaatttttcttcattatgatgtttcttaattgcatttgaagtttatgctttggttcagggaaaagtaaaatttgatccctg

SEQ ID NO: 129054 - DNA, 468 bp, Glycine max
  Clone ID: PAT_MRT3847_87540C.1
tttgttttgtgtgagttttttttaccctccccgtacatcaagagagaaaaagatgacgactaatttagaatttaacaagaagataaactcaaaaactactaaaataatttaattttaactttaacgtagtaatcatgttttgtttgtgtttagaaaattggaagtggggaagggctaagaaggttgttggcattattagtgcattgtgattgtgcacgttggtgtttatgacatttatttagaggataggtttggtcggtgaatcttttgggttggtgggcatctaggctagtgaagaaatgtggtggatgtgaatggaaccgcgcatggtgtggaaaagttgcattaaacgcaacactctattgctttcaagggttgaaatgaaaaccgcaacgcatgttggacattctctagtggacaaagatgctgaaaaagaaattggattgaagaaaattgtggttctgtatt

SEQ ID NO: 129055 - DNA, 409 bp, Glycine max
  unsure (1)..(409): unsure at all n locations
  Clone ID: PAT_MRT3847_87541C.1
acgtaagctcggaattcggctcgagcatcataaacaccctcattggagcagaggngcgaccagggaacacaagggcaatttgaagacgctttgggctatgcaacacaccgtacatggccgttgaacgacacaccaaagccacacaggaagccccgcccaaaagaggaaccggaggaaccccaccagctccggcacaggcagaggacaccaggcacgcacgcaacgaccgacatgacagaggcagcggaagacaagggcagagcaaactgcgaaagcaacagcaactggcgacaaaacacctaaaacacccacccacagacacaaggggcaagggccagctcacaaaacacagacactaaacagcaatgaacggcgagatcccaacagacaaccaggaaactaaaaagga

SEQ ID NO: 129056 - DNA, 256 bp, Glycine max
  Clone ID: PAT_MRT3847_87542C.1
attgtacaaacctaattctcattgcttcatcgtacgattcttctcctcctaattatggagagcttcgataaaactaggaccgctatcaccatcacccttgaggtggagtactccgacaccatctataacgtgaaagctaacattcaagtcaaggacgggatccaacctgaccatcatagacttatctaaacaggttaacagcttgctgatggtctaacccttcaccactacaacattgagacggaatacacttttc

SEQ ID NO: 129057 - DNA, 253 bp, Glycine max
  Clone ID: PAT_MRT3847_87543C.1
tgaacgccaatggccattcccacgcccacctcatgagaatgcagagagaaagcgagaggaagatgaggatgaggagcaccagccagagagcgaagacagtgaagattctgagtcacgaacacataagaataagaccccttttctcttcggctctaacaggctcgacactctcttcaaacaccaatatgatcgcatccgtgttcttcagaggatcaaccaacgctctccacaacttcagaatctctgagactac

SEQ ID NO: 129058 - DNA, 405 bp, Glycine max
  Clone ID: PAT_MRT3847_87544C.1
gattcttctaactggtaagcaggtgatcctcctcttgctgctctctgtgttctttgctgtaatttctaatttttgaggatccacagaatggaactgttggttctcgatggtatcatcagtaccctgattcaagtcatactctgacctgagaaacacgttcaactttcaaaggcagatatcaagcagctttttgcgacttgcatagatatctttactatacagcccaatctgttactactggatccaccaattaagatatgtggagacattcatggtctatattctgaccttctgagactttatgagcatggtggattgcctactatgtccaactacttatactcaggcgattatatcgaccgtcgaaagcacatctctgacactatatgtattcttttggcatac

SEQ ID NO: 129059 - DNA, 491 bp, Glycine max
  Clone ID: PAT_MRT3847_87545C.1
cccacgcgtccgcccacgcgtccgcccacgcgtccgtacggctgcgagaagacgacagaagggagggttctgcttttgatgttgctattatagctcttatttgaatgctgaactgaaatagatgagattatttataaaattaaagagtcaggtaagtggctgcttgatagcagaatttgcataatcctctgattaagcaatgatagatgcaacaaagacatcaaattttatatatattgagattaagtagcacttgaatgaagatcaatgaattgaaaatgtgaaatcctccatactcatttgttgaaaggttgaatgttattacatgaggaagttttagggattacgagaatgacttttctaatagcttgagtgagttattcagctgatctagtatttatatacactgtgttttgtgtttataaggagattaatgatgattctagttccttagtacatgcacggtatattctgggtacaagaatagtttt

SEQ ID NO: 129060 - DNA, 487 bp, Glycine max
  Clone ID: PAT_MRT3847_87546C.1
caacgacggaggcgcaaccaagggataccaggattttggtaagaaggtggcgcgtatcgtggtgatcgccaatttaccaggagatcctgaaaccgacatcgagtacttgctgctcgacgaacttggtgcgggcatgcaagcgcagggaatcaatgtcaacgcggtagtaagttacttccgcaagctgaaaggattccagtgctcctttttcgctgtttggggcaatcgaacttcggacggatccttgtggaccatgagaaactgattggggcaaccaaacacaggcgcaaacaagaacaagatcataaccgtgttccatcccaatggcaaaataccctatgctactggtggttatattggtgtgcttggcgctttgacgggaatgagtgcagcaagcttgaccgtgcatgaaacgggggtggacaccaccaccgaaacattcgaaagcttcgcttgggtgtacagactcagggacatcatggaaaac

SEQ ID NO: 129061 - DNA, 620 bp, Glycine max
  Clone ID: PAT_MRT3847_87547C.1
gcaccaggttgaagggccttcagccatgttcaaggtactacaagagtctccgcctatacccgaaacgttatcttcagtgggaaaggatttcctgcagcagtgtttccgaagggaccctgcagatcgaccatctgcagcaacgcttgttaagcatgcctttgtgcagaatttgcatgatcaacatgttctagttcattcacaatcctatccaagaggagacctaggaccaggaggtagtgctaattatcctagagacactcccaaaagtagacgtggcataatgcaagccgatatgagcacacggattaggaacgctattcatacaattttcggggagatttttgaacaaagcaatgctaaggagtctaatcatattataccttatcttcactctcatgttccagaagtgaaacttcttcaatctacattggaatctggtaccctcaatttcatgtctgttgcaaattccaaaaacatttcctccgacatgagaatgatcacgaacttctgaagtatgccagtatgcttaaaattggagggatgcagctagaaaattggctgctcgatgaattttgcacaaattgaactgcagaattaatattgcaggtatttagaagctg

SEQ ID NO: 129062 - DNA, 312 bp, Glycine max
  unsure (1)..(312): unsure at all n locations
  Clone ID: PAT_MRT3847_87548C.1
gtcacttagntntactatgcataatgaaagcacatntctcactaacatngtaaaatacaatgaaattgnntggnattgncatnggcagnctccacccacccngtnttggtgtngnatnngtggggncgacatcagctagcggggntgaactaaacaggggggggggngcccaccacnccncnctcnnngtngnatnnccnccnaaancacatttcaagtgcaaaancaggcttgtttnttctgntngnnanctcaccnttttctatgtgattttttatgggngcncccaaancaantacagggagggctcag

SEQ ID NO: 129063 - DNA, 125 bp, Glycine max
  Clone ID: PAT_MRT3847_87549C.1
ctcggatgcgagagaacgatacaagggcgataagacgacttaagggtacgcgctgcaaaagactactgaagggaaggaatgtgagacaggaatcacttagtttatctgataaaggcctacaaaca

SEQ ID NO: 129064 - DNA, 299 bp, Glycine max
  unsure (1)..(299): unsure at all n locations
  Clone ID: PAT_MRT3847_8754C.1
atccgcagcngcttttattcgcaccgcaaacncntcnnccatggccgttcgganagaanaagcgcatctccaaggggaagaanggtggcaagaagaaggcagctgatccctttnccaagaaggattggnatgacatnaaggctccttctnttnttcaagtgaaaaatgttggcaaaaccctacgtctctcgtacncagggtaccaagattgcttctgaaggactcaagcatagagtgtntgangtctccgtggctgatcttcaaggggatgaggatcatgcatcaagaagataggttga

SEQ ID NO: 129065 - DNA, 431 bp, Glycine max
  Clone ID: PAT_MRT3847_87550C.1
gcaaaaaagggcacccacggaacataataaataaaactgatttacaaaattccaaactttttcctcaatttactccaaactacaattacaacgggaggaccttggtgacatacacataacaatcgcaagactctacgaacctaacaagacagcagcttattttccccccgccatgttttcttttattgctccaaaggaaaaacctccaaacaaaaaaaaaatcctgcccgtctggaagtttaccttactccaatcttcactacccaggaacaaagaccacttgtatacacactgaggactattatgaacttgaatgacctttattcctctaccaatcttcttctagcttgggctttaaccctctttttctatataacattttgagatcgaaaatggtatatgctacaccaaagatgctgctgcttctccta

SEQ ID NO: 129066 - DNA, 199 bp, Glycine max
  Clone ID: PAT_MRT3847_87551C.1
gaggacaacggactggaatccacaacggttggcgatccctaggcattggctggaacgacccgtatcactgtgccataccaaagatctcatgctgcaccaacctttgaaccgcaactgtgtctgtgccgactgaacctgatcgcattctggtatgacttgaactcgcgcactgattatacaaagcagatacacccatgtg

SEQ ID NO: 129067 - DNA, 511 bp, Glycine max
  Clone ID: PAT_MRT3847_87552C.1
agcaatagaacagtttgtaggaactgagttgtttttttgtttcgtcaaaaaaaatgttgctttgttgttttcctgatcatggtttttgacgattgacttttaatgtcatctaatcgtgtattggtttgtttcactaccttttagataaaatttgtgttgtttcttgtaatactaataaattaaaggagaaacattattacatattttatttatataactctggttggttttctaacgtgggagaaaattaaagttgaaggtgaagtgaagtttctccggtctccaaggtgcattgcacaaacatcacaaacataaatcagtactaaggaaatattttttatgaataatcttatttttttatttatataaaatcatttaaagatttcttttagaaatttttacatgattttttttattccattcataaatttgtgataacgttatttatggatgcaatatttacttggggtattttaagtataaatcaatgataacattaaatataatttaa

SEQ ID NO: 129068 - DNA, 432 bp, Glycine max
  Clone ID: PAT_MRT3847_87553C.1
gacaccatacctgatgccaacacctcacttacacccagtcccttataactatctctatggcctattcagggtcctcttaaatgtccctccactctctgttataacaatgatgtccatacaaacattccttcatactaaaatgatatttctccttacatgataagccttgctatacctaaactacctaactacatcaacattttttgaacatggactaaatcacctaaagccccataaaacccattattaccttgaaattgactaaaactaatacataaataacataccattacccatgcttctataccccatactactctattctcgctccataatcttcatgctcttcctcaaacgcttaagaaagctcaccttatcttgtggctctatcaccattgcattcgacaacatcacgagctattctattatctc

SEQ ID NO: 129069 - DNA, 902 bp, Glycine max
  Clone ID: PAT_MRT3847_87554C.1
ctaaataattttttatattcattcaatctgataatttaacaaattttatatagctatttagagaaatattttgcatcaaacctattataagtccaaattttgccgcacacactaaatagttaatttggaataaaacacgtgtcttgtacataatagactggaacctgatttgaggactcacgacaacgattaatgttctcacacatgttacaataacaattaaatatctcaagataaactttaaattggataatcaataacactaggtttattaatttattaactaatttctccgatgaagcctcaccccaggaataatcacgagcaagaggaatgctaatgatccaatcagtgacacaccaattgaagcagccatttgatcacaaaatttcccaaagacattgcacaccttgttccaattcacatgagagtttcctttgtagccaaggacaccaactgccgcggcggctccgttgccggaaaagagcacagtcaccatgaatgcgtcgaggacagcgatcaatgtccacaagcctttgcttttacctctattcacgagggcaagtagtagagacaggactgcatacgtgcatgctattgcattggtcaccagaaagtacctagtacgtcaaaatattgttgtacatatagtgttaatcactgttataaacttaagcgctctggattttcgtaatttcaatgcatgatccatgcacctataattggtgatttaattaatttgaagaaaaataatcttattatgatttgttttttaaaatataaacttcttaataatgataacttcgacattaatttgtttgaggtcacagtcaatcatattggccaacctgcaaccataaatgccagcattaaaatggcagatgggaagctttcaagtatcc

SEQ ID NO: 129070 - DNA, 978 bp, Glycine max
  Clone ID: PAT_MRT3847_87555C.1
gaatagttaaataaattttgtatagctattcaagtccaaattttgccgaacacactgaatagttaatttggagcagaacaactttctacacaagtgtcttatatataatgtagactggaacctgagttgaggactcatgacaacgattaatattctcacacatattacagcaacaattaaagatctcaagataaaatgttggataataaataacacttggtttattaatttatcgactaagttctccgatgaagcctcaccacaggaataaccacgagcaagaggaatgctaatgatccaatcagtgacacaccaatcgaagcagccatttgatcacaaaatttcccaaagacattgcacaccttgttccaattcacatgagagtttcctttgtagccaaggataccgactgccgcagcggcgccgttgccggaaaagagcaaagccaccatgaatgtgtcgagaacagcgatcaatgtccacaagcctttgcttttacctctgtttacgagggcaaggagtagagacatggctgcatacgtgcatgctattgcattggtcaccagaaagtacacaaaggcagacatttggtgccacttagcagtaagaggaacgttcaaaggtggaaaagaatctgaaagctggatgggaacaagctttgtctgcttatcgaccgcaatgactatagcagcgacaagagtaactgtgaaggccaacagcctcagaagcaaatcacagacacctactactgcaactggttttgccaccatcacttctctttctttgctctcaaccccctccatcctattcctaacaacacacaaaactttattacaacacaagcacggatgcgtcttaaatactactactcatgtcatgacataagggggattttcattttccaagtaacttgctccaaagaaagtggaaaatctggaaaagaatactctccccttctgtcgtcttctcgcagccgta

SEQ ID NO: 129071 - DNA, 437 bp, Glycine max
  Clone ID: PAT_MRT3847_87556C.1
attcggctcgaggagctctctcctggcgttctactctcagcaaatccaaaggtcttggtgggaaattgatatggattttatgttctatctcctggggcactactcttagcaatggaatatgctgatgaaggtggcacatcaatctcctgtgatcctggaccacgtggaacgagtctctccactgggaccccagatgcacaaagagctcttaaccaggcactgacaatgagcgatggtcttgttctaactcctgaggaggctgaggaattaacctgcatacacgatccaatattagcagggcaggagttcactcaaaagagggattcgcacaaaatgggagcatcgaaaaatgggtagtaagggatcaatccttataacagcatcgagtgtagctagagcacctgcattcaaagtgaatgcaattgacactgaaggat

SEQ ID NO: 129072 - DNA, 410 bp, Glycine max
  Clone ID: PAT_MRT3847_87557C.1
ttattctatcctacaataagccacccctacaatcaaattccgatttcatcataagtatgccaccaacgaatttcgatatatttggagtaatctgaaacatgaaaatccaatttgtcttcccaaacttatatcacagaacataaaactccggaacgatagcatcagatggcacagaggaccaaaaattgtacaattaaatggtggaaacattatcatcacacacatctcccaaacaaaacaagccttattcaacccaaattggctatggggaacgtgatccccgggtacgagatcagcgtgaggctcgcgtgggagggcgaggcgcgggacgccaacgggaaggttctgcagagagtcgaccgcgccgtcgagatcccctacatctccgacgagaacgccggagaggatcc

SEQ ID NO: 129073 - DNA, 414 bp, Glycine max
  Clone ID: PAT_MRT3847_87558C.1
ccttacggccgcccttatgcgtacgctcggagcgcctagccaatctctctccggaactttatctccggctatcgaaaatctaacaaatcttcgacaagtattactgcagaacaacaatatctcaggcaatataccaccggaacttgcaaaccttccccaagctcagacattagacctttccaataaccgtttctaggggctcattcctgcatcttttaggcaattgaaatggtttcaggtacttgaggctcaccaacaataatttgtccggatcctttcccgtgtcactggccaaaaccccacagctggctttcttggacttgtcttataacaatctcagtggaccattgcccaagttcccagccaggtcattcaatattgtggggaacccattagtttgtggaagcagcacta

SEQ ID NO: 129074 - DNA, 343 bp, Glycine max
  Clone ID: PAT_MRT3847_87559C.1
acccacgcgtgcgatagagacctaaactaagaataaatttcaatttatacgaagacaggaccaaattgagggcatggtgtacatttaagaaagaaagcgacacattccattaatgaaacacatacatacattgctacttctgtcaaatctaacatgcataagaccattgcctccgtccacgagaacgcctacagaatgacatcacatcatccgatgcacatggagttcgacactcacatcaaagacgccatcattaaccatactgagcttgacaagcatgcgtcgcgttaccttaacacctcattcatacactatcataacacttatgagcacatgttacatg

SEQ ID NO: 129075 - DNA, 330 bp, Glycine max
  Clone ID: PAT_MRT3847_8755C.1
gagagaactcgtctcgagtttttttttttttttttttaatagaaactctagtcctaagttattctctataacgacaatataagctgtacaatgaagtttggttcttatgtacacagtagtaaaatccttccaaagcttaatcgcctatacaatgtcaattgacaatcagttctgccaattcccttagcttgattgataataagaaagttaacaagccatacagacaccgattcagctctgacttgatatcccttcttgtgtcatcgctgaagaaccacgctgcagctctgataaagcttgccatcttcttctccatctagaagactccaa

SEQ ID NO: 129076 - DNA, 275 bp, Glycine max
  Clone ID: PAT_MRT3847_87560C.1
attgtgttttaaacatggtcaaacttaccaaaaataccagtaaacttcctttcctttcagagaggctattgtccctaggttttgatgtaatttcaaatatactggagactgggccgggatggcgattagtttctccacattttacgactctattggaatctgcaatctttccagcattagtcatgaatgacaaggacatgtcagagtgggaagagacccagatgagtatatacaaaagaatcttccttcagatataggtgaaatttctggatgga

SEQ ID NO: 129077 - DNA, 366 bp, Glycine max
  unsure (1)..(366): unsure at all n locations
  Clone ID: PAT_MRT3847_87561C.1
ttngtttttttttttttttttttttttttggagagaggattttgtttattggatgggagcctcaagagagggctgagacaaagaacttacatgcgcgtacaattgtgtttatgcttgcaacatgtgtctatttttttcgagggaagttatgatccaagggtattgaacgagcatattacttcaaatagggaattcgtatgttcctcaacaataaggatggatctcgagctactaattcttgccactcctatggatcaatccttacatttccttttgagtgtggttttttaaaggtcttgccgattctgacgctcatacctggattgcccaaaaccaaatttgactcattccagattgcccggatca

SEQ ID NO: 129078 - DNA, 483 bp, Glycine max
  Clone ID: PAT_MRT3847_87562C.1
gaaaaaaaaaatgaatacaaattcctttattggacaaacgcctctttcctggggaaaaaactaaacctttctcccaccgaaaatggtttgactccttttcccccagaaggaaggtaaacactttccctaaaccaaaaaatttactaggccggccccattaaaatttgctaactaagaccccacccaaccatatggttttgggtgaaaccttcttttggcccaccccaacatattaaaataatcgcccggggggaagccatccccgaaattaaaaaaaaggttttcaaacagtccccattgtactttgaccgatctgggggaagggtttaaaaaaaaaacctccccttaatgggcaacgcttttaaggaaggaaaaggattgttggttttggcccaaattggccaacacccctggccaactccgaaaaacaatttctacagcaacccgcctgggcttgccccaagcaaagaactgtgaaatggt

SEQ ID NO: 129079 - DNA, 555 bp, Glycine max
  Clone ID: PAT_MRT3847_87563C.1
aagcagtgagtggtaactttgaaagaaagtgagctgattttcctacactaaaaatgcaagcaaacatattaaaggtagtgactcttgatgctatttataaactatgttccatctttgaaaacatgcatagggtaagaatcaagaaggctaactagtgatgcatattcaacaaattaatggctgtacaagattcggctaacactatcatcgccaatgtgaacctttttaccttaaattatggaagatcatgtcattctcggatgagaaaaagccatgtgaagtttacaacccttcaagtggggggtgctgtctttttttttttcttttctgaataccgcattctaagtttaagttatcaaaggtagtaatggctaactgccaaaaaagtcaaacaaccctattccaaaatctccaaagcaaagttctcacaacaaaataaaacagaaagtgaccaatgacaacatgtgtatgtgccatgttactttagaaaacgtctgatctcatccagatttcaagacccaatacgggtggcccactggaccaagatgaaccaaa

SEQ ID NO: 129080 - DNA, 4015 bp, Glycine max
  Clone ID: PAT_MRT3847_87564C.1
tcgcttctttttcgctggagcctcaccaacagtacaccattcaattctttccagccgtgaaatgagagccggactaagcaccatccagcaaaccctaacgcccgaggcggcgagcgttctcaaccactcaatcgcggaggccggccggcgaaaccacggccaaaccactccgctccacgtggcggcgaccctcctcgcctctccctcgggcttccttcgccaagcctgcataaaatctcaccccaattcctcccacccccttcagtgcagagccttggagctatgcttcagcgtggcgctggagcgattgcctacttcgcagaacacgagctcttccatggagccgccaatctccaatgccttgatggctgccctgaagcgggcccaggcccaccagcgccgcggctaccctgagcaacagcagcagccactcctcgcggtgaaagtggagctggaacagctaatcatatccattctcgacgaccccagcgtgagcagggtcatgagagaagccagtttctcaagcccccgccgtcaaagccaccatcgaacagtccctcaacgccgtcccccccacgcgtccgtccggattgggattccggccaagcgcggtggctccggtgaattccggcccggggcggaatttgtatctgaacccgcgcctgcaacaacagcagcagcaggggagtactgcacaacacaggggcgacgaagttaaacgaattttggatattttgctgaggacgaagaagaggaacccgatcttggtgggggaatcggagcctgaggcggcgatcaaggaggtgataaagaagattgagaacaaggaattgggagaaggggctttcgcgaatgctcacgtgattcatctggaaaaggagctggagcgattgcctactgcgcagatacctgcgaggttgaaggagttgggggatttgattgagaccaggatcgggaattctgggtgtggaggggttttcgttgacttgggtgacttgaagtggctggtggagcagcctgtggggtttgggattggcggtggtttgggtaacatgcagcaactgaccctcgccgaggctggcagggcggcggtggctgagatggggaggttggtcagcaagttcggcgagggtggcgctggaaggctttggttgttaggtactgctacttgtgagacttatttgaggtgtcaggtttatcatcctaccatggaaaatgattgggatcttcaggcagtgccaattaccaccagagcatccctccctggaatctttcccaggcttgggaccaatggttttcttggtacttcgctcgagtctttgtccccgttaaagaccttgtccactacaacaatccctccactgaggcgtgcctctgagaacgtagatcctgctgcagtatcaatttgttgcccacaatgtatgcagagctgcgagcaagaagtggcagaaatgttgaaagaaactgagaaatcagatactgagctcaaatcagaggcagctaaaccgtcccttccacagtggttacagaatgctaaaactaataaagataacggcaaagtaatggatcaggctcagaaccaagaagtgaatgtgaagaagaggactcaagaaatacagaagaaatggcatgattcctgtttgagtttacatcctaaatttcatcagctaaatgtgagcacagagagacttgttccaacttctttgtcaatgactggcctatacaatatgaatttgctggggcgccaattccaacccaagataccactgaataaaaatctcggaacctctttgcaattgagctcaaatccaacgccaatccacccatcagagcatgtggtcagcccaaagcaaatgcctgtaacaaccgacctggtccttgggcaaacaaagccagctgatgccgttccagaagaaacacacaaagaaggcattaatgacttcttgagctgcctctcttccgagtcacaagacaagttcgatgaattacagagcaaaaagcttcttgatgcagactctttcaagaagtgtcatgtttatcctcactgctaattggttgccagaagacctctggtgccgctccatcggggctccgcccgtcgttgcaacgcctggggattgggccattggcggctggcacccctcaacatccccggtttcgaggaccccagcgtgaacacactcatggctacacgcggcagaccaagccccggacgcccaagtagaggtgaattcaggtctatcgtttgatcttaatgaagctgctgatgatgcagaggacggcaggggagatggttccctcaattcaagcgacttcacagtggaacatgaagacaacaatcatgatgtaggagggtcactctcagcagtaccgcgggagctgttggattctgtagacgatgccattgtcttcaagcccttgaatttcgatctcctacgccggaatttctcgtcatccatcattaagaggttctctgctgtggttgggaatggggtgtcaattgaagtgcagggagaggctcttgacaagatcaccagcggagtgtggttaggccaaaccaccattgatgaatggatggacaaagcgttggttcccagtttccaccaactgaaaaagaatttgaattcaaccacacatgaccataactcttcgatgctgtttaggctcgaagatgatggctactccgatcgctggggctcccaagagtggttacctgctactgtgagagtggtgggggaatagtatattattcaaacagtggtggtgaatggtgatatccgtttttttttgtggtagaaatgtaaatagaacactttggcatgtataagtcaaagacgcgtagtagaaccaaggaaaaaccgttacaaggctcttgtcgggggtgtcaattttttttcccttagaaaaagattaatttatttttgcgttataaactttatattgttttctttttttcccccgccaaaggagggtggcaattacgcatatcagcaggtaagagagcatcaaaacgaagacctagttggctatccgatgaagacaggtccttgaagcctcgtaaagaggtgaactcaggtgtatcgtttgatcttaacgaagctgctgctgatgcagcagaggacgacaggggagatggttccctcaattcaagtgacttcacagtggaacatgaagacaactatcatgatgtaggagggtcactctcagcagtaccacgtgagctgttggattctgtggacgatgccattgtcttcaagcccttgaatttcgatctccttcgccggaatttctcgtcatccatcgcaaagaggttctcctcggtggtcgggaatggggtgtcaattgaagtgcagggagaggctcttgacaagatcaccagtggagtgtggttaggccaaaccaccattgatgagtggatggacaaagtgttggttccttgtttccaccaactgaaaaagaatttgaattcaagcacccatgaccatgactcttccatgctgtttaggctcgaagatgatggctactccgatcgccggggctcccaagagtggctacctgctactgtgagagtggtgggagaatagtatattattcaaacagtggtggtgaatggtgatatccgtttttgttggtggtagaaatgtaaatagaacactttggcatggaaaagtcaaaggcgcgtagtagaaccaaggaaaaaccgttacaaggctcttgggggtgtcaattttttttctctttagaaaaagattaactaatttttgtgttataaactttatattgttttctttttttccccttttgtaagaataggtatatttaattaaactgagaatgatcattatattaataaaagggagcattatttcctattttttcccctttcattctttgtcacattttatattcactcttttggttaattctaataaattatatgcaatagtaatgatttatttggtagaaatgtaaatagaacactttggcatgtataagtcaaagacgcgtagtagaa

SEQ ID NO: 129081 - DNA, 511 bp, Glycine max
  Clone ID: PAT_MRT3847_87565C.1
tgtgattcccttcccacgatatcctggcagagcagatttatgattacaagtggtttttacgaatctattgccccaagtagttaagttgccaatggaaatgtagtatttaaatatagcattttttttttgtgtgatggcaacaccaatagtagccttattggggattcctctttgccaaactaatttattttggaaggatgctgggttttgatagttatttcatttctttatcctccactttgatgctggttgttttcattcgtttacaaactctgctctgcaaaggtccggcaatcaatatttctgtttactcgtcacatattgtattcagtatggattatggatgttctacgtttgacaaaattgaatcgaggtccaggcagaagcaacatatagtttcttctgcattttcccttattgaatggtcgaattgatccggcatacaagcacaggcatctggattatgcatttgacagaactttagtatacaaatatccttattcgttatctt

SEQ ID NO: 129082 - DNA, 1188 bp, Glycine max
  Clone ID: PAT_MRT3847_87566C.1
gactcagaaactgatcaagtttgatgaaataacttataaaactagagacattttgtttaacatctccagattattgtcataattcaaaaattcatatccattaatatttctgagcaaagataacaacaataaaaaaaaaaaaaaagaatcataggtatagattctcatgattcagatctatacacattaaatgattatatattttgcaagccaaataactcattaaagggaatccatggtctccatgaggctgctagcagctgtagctggtgacggctagcaaaacagtgatggcaagtgcagccgttgcctgtatactcctttgctgggggtttgatggtgcagcattcaaattcaaacttggtgatggtgctggtgttgtgtctgattctgctgtggaatcaggtggtgccggaggacttttgtgaataactgttggtgctggagctggtgcttgatgtctcttgtgcctgtgcctgtgccttctatgcttatgtgacgatggcgcaggtgctggtacctctactattggagttggtgccagtgttggcggtggaggaatgggagctggtgttggagccggctttgtaggtgcaggagcaggtgctggtgttgcctttgctggtgcaggtgcaggggatgttttggccggtgttggagctatctttggtggtggcaacggcggtggcgtagcaacaggtggtggaggtagtgggggtggcaatgtgggagctgcgacaggtgatacttttggtggttgtggtggtggagtttggggtgttggtgcttttgggcttgaagctggtgcaacttttggagcaggtggtgtcactggagcaggtttgggagctacaattgcaggtggctgggaaatagttggtggattacttgtggtgggaggggatgccaccactgtgggtggttgtgttactgccggtggcgtgccagaagacggggatgttgcagctagggttgtaggtggcaaagttgtaggtggcaactttaccggcacagatgcaggtgcttgggcattggaaggtagctggcagcagaggcttactaaagccaaagcccagaacactgcagccattgtatgttgtgatctggttttgaatgaagagtttgcttcttatatttgaactaatgtgcagcacaaggttgaaacgtatggtttggacggacgcgtgg

SEQ ID NO: 129083 - DNA, 2354 bp, Glycine max
  Clone ID: PAT_MRT3847_87567C.1
aaaaggcagtaatagcagttgacacatcagaagaatcgtccgctccattttagggttcactttgtatttgtaataccatttcctcgcgcggcactgcttcccgccgccgccgccgccgtcagcgtcagcaccaatggcagacgcatcttctctgccgacggatcaactcgccgccatcaccctcgacgaggttcccaaagctaatttctccgaccgcgtccccatccgatccatcatctcccgcaccgacggcggctcgggcctcgccggcaggaaggcgcgcgttggcggctgggtgaagacgggacgcaaagccgacaaggacgctttcgcgttcctggaaatcaacgacggaagctgcgccggcaacctccaggtcatcgtcgaagccgcgctgggcgaactcggccaactcgttcccaccggaacatgcgtcgtcgtcgacggccacctcaaacttcctcccgctggcaccagacagaagatcgaactccgcgccgataaggtcctccacgtcggtcccgtcgatcccgccaagtatcctctgcccaaaatgagactcactctcgagttcctcagagatttcgttcaccttcgttccagaaccaacacgatatctgcggtggctagaattagaaatgctcttgcgtatgctacacatacatttttcaacaaggaagggtttctatacgtgcacacccccattgttaccacaagtgattgcgagggtgcgggtgagatgtttcaggtgaccactttgctgagtgaggcggagagattggagaaggagttgttgcagaatccacctccgtcggaagcggatgtggaggcggctagggttgttgttcaggagaaaggggaggttgtgtctcagttgaaagctgccaaggcgagtaagcaggagattggtgctgctgtggatcagcttaagaaggcgaaggagagtttggctaaggtggaggagtggtctaagcttaagcctgggattcctaaaaaggatgatggaaaggtggattatgggaaagatttctttgcacgtcaagcgtttttgacggtttcaggtcagcttcaagtcgagtcttatgcttgtgctctgagtagtgtgtatacctttggccccacatttcgcgcggagaattctcacacttccaggcatttggccgagttttggatggttgaacctgagattgcttttgcagagttgaaggatgatatgaactgtgccgaggcatatgtgaaatttatgtgtcagtggttacttgacaactgccttgaggatatggagtttatggctgataagtttgataaaggttgcattgaccgtttgaaattggttgcttccactccctttattcgagttacatatacagaagcagtggaaatactagaagatgctgtgaagaatggtaagaaatttgaaaatgaagtgaaatggggaattgacttagcatctgagcatgaaagatacctaacagaggtaaagtttcagaagcccgtcattgtatataactatccaaaagatatcaaagcattctacatgcggcttaatgatgacttaaagacagtggctgctatggatgtgcttgtacccaaggttggagagctaattggtggaagccaaagggaagaacgttatgatgtcatccagacaagaataaaggagatgggtttgcctgttgagccatatgagtggtaccttgatctgaggcggtatggaacagtgaaacatgccggatttggccttggctttgaaaggatgattctctttgccactggcctggaaaatattagagatgtgattcccttcccacgatatcctggcagagcagatctatgattacaagtggtttttacgaatctattgcaccaagtagttaagttgacaatggaaatgtagtatttaaatatagcattttttttttgtgtgatggcaacaccaatagtagccttattggggattcctctttgccaaactaatttattttggaaggatgctgggttttgatagttatttcatttctttatcctccattttaaaaaaaaaaaaaataaaaaaaaaaaaaaaaaaaataaaacctaaaagtacgccaatcaagttttcattcgtttacaaactctgttctgcaaaggtccggcaatcaatatttctgtttactcgtcacatattgtattcagtatggagtatggatgtgctccgtttgacaaaattgaatcgaggtccaggcagaagcaacaagttttttgccccccccttgctttcccttattgaatggtcgaattgatccggcatacaagcacaggcatctggattatgcatttgacagaactttagtatacaaatatccttattcgtt

SEQ ID NO: 129084 - DNA, 199 bp, Glycine max
  Clone ID: PAT_MRT3847_87568C.1
ccctttttgccatagggttgctgtgacactggaggaaaaacatctaccttatgacctcaagttggtggatttgaccaactagccagactggtttcttatagttaaccctgatggtaaagctcctgtcatatagttcgatgagaagtgcgctcctgattcatatgttattagtcagacattggaagagatgtatcccagc

SEQ ID NO: 129085 - DNA, 275 bp, Glycine max
  unsure (1)..(275): unsure at all n locations
  Clone ID: PAT_MRT3847_87569C.1
canacacgaagctttttactttatttccactgtgactacgcgattgtcccttgccacaatgctcgggatagaacatttcacggcaaaggcggacaagtgaatgccccggaggaaactgcggagagccctctaaggcaagaacccggtctcagaaacatatggcgacagaacagactcctcaggcgttcatccacagaaacaagaggggctaagctatgttgggattcacattccacacggtagaatacagccccatgacatggatgagttggctc

SEQ ID NO: 129086 - DNA, 304 bp, Glycine max
  unsure (1)..(304): unsure at all n locations
  Clone ID: PAT_MRT3847_8756C.1
tcncgcctttggtttttttttttagaacaaaatcaatattatttttgattccatttcaattacagaatatacaagtgatactattgataccccagaatcaagatcttgattgacatattgattatgacacttaccacaagtagacaactctcccacatgcttctctttaaacgagaaccagaacagcctatgtcttcatgataaaagatttcctttattagaaagagcttcttcactcaagggtctttattcccaatactgctctctagaattatgtttcatggagtcttaaacttcaaaaata

SEQ ID NO: 129087 - DNA, 278 bp, Glycine max
  unsure (1)..(278): unsure at all n locations
  Clone ID: PAT_MRT3847_87570C.1
cccacccaccaaaaaccctaaccttttttaactatttataccaccaacaaaactgccaatttttcaaattaaaaacccccccccccaacacaaaatcctcaancgctaatcctcccacctcaacatcttaatcataaaactacccaatctctctaatcaacccttttcaacacactcaccaatctaccgattacctcctataacttcccactctacaccatctaacccaacgatgctctaatcaccttccccgaggaacaccccgangggatntacca

SEQ ID NO: 129088 - DNA, 742 bp, Glycine max
  Clone ID: PAT_MRT3847_87571C.1
gcaacaagataatttttattcaatttcgtctttatttgaattaaaaaaatacatagaaggaacattttccagctcctacactcatcataatcataatatcttagatatattacaccacaaatacgatttgaaagaacatttttcaactcatacacctaccataatatcaaactgcatgagtttatcatggaaataatactgactctattttttcatggaaatacttattagttggcacgtataactctttgttgtcacaaattcccttgacaataaactacatttgacgaaaaggagtgggattcaatcgtgcaacaggaatgccaataagatcattggcccttggggcagtcaatcctggccgttcatccatactgattaagcttcttccatgatctaagatttcaccttgtgaacctaacatcttccactcaaagcattgtatgagtgctccaatgatggtgggcaattcacgcatggccaaaggcattccaggacaccctctccttccactgccaaatggcaacaactcaaaatgatgccctttggtatctatagcacttccttcaccttctagaaacctctctggcttgaattctaaagggttcttccagatattgggtcccttcccatagcccaaatgtttacacaaactattgaaccttttggaatcatgtttccattaaccacgcagtcttcgattcctttcctcataatcattggtattggcgggtgaagtctc

SEQ ID NO: 129089 - DNA, 261 bp, Glycine max
  Clone ID: PAT_MRT3847_87572C.1
ggaagatcccccgaatgtaaggcaggggcgtttatattaagcaaatcataatctttccaaactatgaattttagtggcatattacttgccttagccttatactaagataagtggttatacctcctgatcgaagtatttgaaaactactgctatattgtgttcactacattatacacccaaactctaaaagtctgccctctagctccaaccttgggtacctttaacgacggttaattgaacactgggcgtactcatggcaat

SEQ ID NO: 129090 - DNA, 488 bp, Glycine max
  Clone ID: PAT_MRT3847_87573C.1
tcgagtacggctgcgagaagacgacagaagggataataaatactttatcattttaattccttaattaatatcggaagggcactgattagcatgaccctagaatgaatatatgcaattagttcattaactttatatacattgctataaaagctacagattgtgtacttgtattataaaacttttttttttagctaattcactatgtttaagaaaattaattattttgctagaggcattaaatttgtgaatcaagtagttgtattgttcttccaaaattatcattgatatttttttaatcaaatatctctcttttcactttattgtttgtgccctaattaatgaatgttctggcctatatggatacaagtctgaaaattcttgagtttctctagtgaaaatataaagcttttttccggtagaaaagctctcaatagcatattcattgccaaacagagacttctatctttatgaaatctggggctacttat

SEQ ID NO: 129091 - DNA, 493 bp, Glycine max
  Clone ID: PAT_MRT3847_87574C.1
cccacgcgtccggcgagaagacgacagaaggggattcataagaaggggaagaaatatatggctgaaactgcagtgtcccttctattcgaccatttggtgaagttactgagtgaggaaacaacaatcttaaaaaatgtgcacaaggaggttgagggcatcaaggatcagctaagcctaataaactcttacataagggatgcagaaaagaagcagcagaaagatgctgtcaaagaatggttgaattcattgaggaatgtggcgtttcgcatggaggatgtggttgatcactatttgctcaaagtggcagagcgtggtcaaagagatggggcttttggtgtagttactgaagtcaaggagaagttcaaaactgtaacacatcgtcatgatattgcatctgagattaaacatgtaagagaaactctagatagtctctgcagtctcagaaaaggcttgggactccaactatctgctagtgctcctaatcatgcaactc

SEQ ID NO: 129092 - DNA, 255 bp, Glycine max
  Clone ID: PAT_MRT3847_87575C.1
acgacgcgtccgatacagcagtcagaacacgcactcaaaggggcacaagtgagtgtgttgatggagagagttatggcacattgttaatgaatttgaaagtccgtctggttctcatgactacggatgagagtatgcgcttaatatcctcagatctgttactcctccgtggggaaatcgtgcctgctgtccgtctacgcgcggtaagatttcaacatgcaatccatggccaccatatgcgtcaagttccaggctcag

SEQ ID NO: 129093 - DNA, 181 bp, Glycine max
  Clone ID: PAT_MRT3847_87576C.1
tcatgatcatggtggtgtcccacatctcccttcatgggggaaatttgggctttccgtactgggtatctttgattggggtgcatgcaccccacagccgcactgcatctggatccggtcttgttttctccctctgcatccacctcacatgtgttcgtctttgcttgagctctgcttcctctat

SEQ ID NO: 129094 - DNA, 646 bp, Glycine max
  Clone ID: PAT_MRT3847_87577C.1
ttttcttttttgcactaaaacactattggccaaatagggatgtgaacgaaaacaaacacctacaacgggcttctgcaaacatgaaagacaaacgaacgcaaaacagaaaatttgaggatacacaatccaattatttaaatcctacccttatctttttttagcatctaacaccattttttttttttctgttccacactaaatataccctgaaccacacgataatccaaagaggttcaaaccccatgccaaagaaaattcaaatttgccataaaacttcactttacatcattacatcccatgctactactctattcttctctaggctgaatgccactgggcactatccaatattattccaccctaaaactaaaacttagaaaggaaaacagctctacctgttaaatatatatttcacggtcccctaccttgagcgaagtacacaataaacctcagtttgagaaaacactaaataggtcataagtacaaccaaggcaccctgctaatccgaattaaaatcataccgacgagcatgctaagccctataatcagttacataccctgaaaacacatgatacaatttttcagatgctccctgtagcggcatacctcctaacataatatgtcatgcatacccgacataaactgt

SEQ ID NO: 129095 - DNA, 469 bp, Glycine max
  Clone ID: PAT_MRT3847_87578C.1
acggctgcgagaagacgacagaagggcctacttaacgcgggtgttgagtctcacgcttaacgccctcgtttagcgcctgtgtcttcagtcgcgctcagcgcgagctgcacgctgagcgaggcatctaggctggatcttgttgctggtttcttcttttcttcgttattcctccactttttgcttttagtacctccagttcttatatttgcaaccaagatttaacgaaacatcaattctttaacacttaagcgcaaataactgctaaataatgatttttaaagataattttgctttattttctatcatcaaagtataattatttagcagttatcatgtcataattttaaaacgcaactttaaagcacacatttttggaggagggacatgggatggataatatctttgggtttggatttttttcaaacaaaaatagagaaaagagtggagagcaggagagagattttttttg

SEQ ID NO: 129096 - DNA, 346 bp, Glycine max
  unsure (1)..(346): unsure at all n locations
  Clone ID: PAT_MRT3847_87579C.1
ggaaattataatcatgaatcagactgttataccaagtctgtactcgagttttcaagcggacgattgcgactgacatcgatagcacatgtcgtctgcataacagcctttagtattaaaatattcacaatatcataactgtctttacccactgtgtcaacatcttacccgccgtaacaacatcaattcactgtaagcacaccttaaaccatatctcgacaacgcttntactgctgcaggcccgctcaccaaatcaaaccaatcgtacattaatgttcatcacatgatggacctacattacgagtgacaagacatgctaatgctatgacatgatagtaatggactatat

SEQ ID NO: 129097 - DNA, 336 bp, Glycine max
  Clone ID: PAT_MRT3847_8757C.1
atctctcacagagcaaacattttacaattttgctgaggtccaacttcctgctttttctttgtgtggattgtgggtttggggtcaagtctatgaactctttgcctcaggctaggtctgggtttttttcctatgtatttttctaaaggttttgtggattgacatcttccatttaagccgatgatccactttgggttagggtctgaggttgaggctggagtttgctcgtattgcctgcggatgtctgagcctggaggtccctcggtgccgtaattccctgtttgttctgcgggtcacgtctgttaggaaggcctgccagattcaaaggaggaagcacgg

SEQ ID NO: 129098 - DNA, 588 bp, Glycine max
  unsure (1)..(588): unsure at all n locations
  Clone ID: PAT_MRT3847_87580C.1
attagccacactttaggccggtagtctgtcttaattgtggttatccctagcttgtcttagttgtggtctctttggggctgccttagttgcagcctcttagttgcctcaagggttgtcactgttctcacttctcagttgctgaaagatgagaaattgacaaaatatatgattatatcatctaggggggagagggttttgatatcgctctttgcctatttgggccctcccggccacggtttcggctcgaggttctgtgcaaaatttgtcatattggacataactacgtgcttaatgatactattaaataaatacacgagtaagcaacacaaaaaataattaaacgatgatnagttagacttcatgtacanttgtgcttatnagcgggtatttatgggctgataaaagataagggacaattctgaagagtggttaacaggaagataccttgacttcggattctggattcatctgatggtgatgttcttccttgcatgtgttatatctctcgatcagtgatttcatgctgggaacataaaaaagtcttttcatttttttttgtttgggattatggaaattaagaattcaatt

SEQ ID NO: 129099 - DNA, 382 bp, Glycine max
  unsure (1)..(382): unsure at all n locations
  Clone ID: PAT_MRT3847_87581C.1
gggccaaaagggggacctcnccagactcgaaccactgaaaataacggggcacccctactgtcgggggcgccggggaattcctgtaaaaggttagtggtttattggagagaaccataaacggccttaaggcagagaaaagcaaacggacctgtacatccgtaaacacaggaggaaaactagtgctgctgagagtattcattcctgaggggttaaacacgatcatacaaataatattaacttttgcgtaaatgaaaacagcatgcttcctgcattagaggctccttcttaggcccactatccttcagagcacgcatcagatcctgacccatcgcttacattactgacacaacaggggccttacccgcaccaaacccatgcttta

SEQ ID NO: 129100 - DNA, 292 bp, Glycine max
  unsure (1)..(292): unsure at all n locations
  Clone ID: PAT_MRT3847_87582C.1
tcactagtttttgggccgccctttttttgggtggtcttgccttaaaaccgatagtctaggtgagatccctttcttgatcccgttttaaggccagtatgctgaagcaatttcttatcttaaccaagttggctgccttcctgttgtgcccggctttacaaacttattttttcttaaaacactttnctgggggggggggagatttnccactttanttttgttactctctgttcccnccctaggaggggccggtgaacaatgtgcgtgcccccctgggaatgggtggggttattct

SEQ ID NO: 129101 - DNA, 631 bp, Glycine max
  Clone ID: PAT_MRT3847_87583C.1
ccccccccccccccccccccccccccccccccccccccccccccccccccccccccccccccccccccccccccccttttggaaaaaaattaggttcccccctcttttttttttttttcccaccccccccccataaaaaagtccccccccccataatttgtaataaaaagtaataaaaaaaagggctttaaaaatgttaatatttgttgaaagggttcaaaatttacccctcctttccctgttcgggggaaaacccccaaagggaaaccttttaaaggggttaaatttaacccctgattaactttttttttttatggggactgccccattttcctttttagcgttacccttttttgggggggggcccccctcttccttgggggcgttacccttttttgggggaccccccccccctttttttaggccccccatttttccccccccgggggatgacccttcaaaaatgaagggcaaaaaccccggaccttttttgtccctttgttgacccccaaaaatggtttccctgcttttgaaacagtttttgccactacccaaactgttcccccaaaccccccccagtttttttggctccatataaggcccccccttcagctttaaaggcggccctggg

SEQ ID NO: 129102 - DNA, 319 bp, Glycine max
  Clone ID: PAT_MRT3847_87584C.1
acgagacgacacgaggtagactgaacggaacgagtagtgatcacacatccagccaaagaccgtagatgaaatgagtctccccaccgaaaagagcgacgtgagcatgcccataaacgccaaatctccacctaacgacttggtgtagaggaagagtgtggccaatacgacaccgcgcgaggattcagccgcaaactcgacaaaattgatcatggcaatattaatgtaccattgtgatagacggtgatggggtaggctggactgcgtgtcacgctttagctccagcgtgccgtagctagaggcagcgactgaggactgagtc

SEQ ID NO: 129103 - DNA, 461 bp, Glycine max
  Clone ID: PAT_MRT3847_87585C.1
aaagactggaagttctcatgagtgtatttgaatttcataatgccagctggttgatctgatgcatgcaaattcacaatgtgtttgtagcccctattttggttttattaaaggagattttgggttttcaagttattaggagcttgaacacaagagtacaatatcatctatatctcatgctctcttcaaagttctgatctacaatttcatttgttcactttggtgctttctttaatagcaattgttggggacataactccattggatggagtttctaaagcagaaaagaatcaacgagaacaggcagcactagatcatatgtgtaaagtacttggaggaggatctacaggtacttttttttcactctgtacatgagtttgttaatgagatcataatgaaaactcacaactcttggtttttaattgaattgtcatattgaagcaatggacccttctgtcgtcttc

SEQ ID NO: 129104 - DNA, 275 bp, Glycine max
  Clone ID: PAT_MRT3847_87586C.1
aaataaagagatgcatatatatgactctggaggaaaacttgattttgcaaattaaatgacacagtgacaggggtacatcacacatgtaaagggcctcatacaactggaaggccgaggataacattggcccacgacgcgacacatgcaccacctaattatggtgattgtacagccttacatacaaagtgcaaagaccttggattctaaaaagtagaaaagggagggacggctcatgtttatgaaaggaagcccaaacccacaaacattggcttgat

SEQ ID NO: 129105 - DNA, 266 bp, Glycine max
  Clone ID: PAT_MRT3847_87587C.1
acttatcttttgagatttattatcaagggggttgggggggttttatcaattgtcctttttttacaaaaaaccctttacctttttttggaatttcccatttccttggttggtgctccatcatgtttttttttttaccctgcttttaccaccctggtttggtttgcctgatattaaacttccctttttttttgaaaaaaaacataccttttacctggttcaaaaaaaaagacccctttacttcccttgaggcggggggggcccattcc

SEQ ID NO: 129106 - DNA, 520 bp, Glycine max
  Clone ID: PAT_MRT3847_87588C.1
aattcggctcgaggagagagacacagcgcgcaattcgctgctgataaacccgctcactgcaaattgttgtgatccctacccatccatccttcatttccatctcgtttttttgtttcaaacaaagaaatctttatttttttcctattatattttcaatcacgcgaaagtgaaagttcttcggttgttgctattgctcattcattttctcaggggaagaaaaatcatttttgttcccccggattacgttcctagataatagcttttagccaaatatcaaatatcaaatatcaaaaccacattttttcttcggttcttcttttccttgtccgagtcttctcattagcggtcaaacacagactctgttgatttcatcaatcaccggaaggttatacagtttaagaaaagtagtaatttcaattgaagaaatacatataatataacaatacgatggccgagtttggaacgagaacgggatctatatggacggtgctgttctgttttgcgtcggtggtggcgatcg

SEQ ID NO: 129107 - DNA, 711 bp, Glycine max
  Clone ID: PAT_MRT3847_87589C.1
attaaataacctacttggaggataattacaaaatccttaagtattaattcccagtagtgaaaggcattttcctttaaaaaaagaaaaaaaagacaaaaatatccttatgatttgctgctttatacacaggaatgatttattttacagtcatctgtaacatcagcgtataaaattcaaaacatttcttaatgtctgaagtccagagtgaagttcacaatgatacgctctcctatgaagctacctatcaacagacaaacctgaactctatggtaacaactccacacagaatttacaaggcaggcactttgaatcagatactgggaatctttcacagttaatattgctttttctgaagctcctctcatcaaaggtaaccaactagtgaagccaaggcttccttgtgcagaagtacaaaaaaaggtttggtttcaaacacttgagttgtgatacatgcaagacatgccctaaataagaaggatcttctaaaagaaaatgaagaaaccaaaaagcagcccagaataaaagcatttacaagcatctggataaggcctttacgtcagtattttacaccccttcattctcaggtaaggggttaagaggccgagagaggtatcctctgcgagggtgaggatactggaggttggcagtgtcagcatcgcaagagtgctctagcagaggagcaggaggaggaaggagctgggcacaactgga

SEQ ID NO: 129108 - DNA, 208 bp, Glycine max
  Clone ID: PAT_MRT3847_8758C.1
atacaccctagagagtgtaaagctcatgacaccactaattaacgtcatcgccaagatccagtactaggagggtatcttctctgaccagcaacgttttattttctcctgaatgcagatgtcggacggcccaaccctttccaactacaacatccagactgaatcaacccttaatatcatactccgtctccgtggtgctatgcagatctac

SEQ ID NO: 129109 - DNA, 395 bp, Glycine max
  Clone ID: PAT_MRT3847_87590C.1
gggtttgtttggtccaaatagcttaatacctgatgaagcgggcctgatcgtggccgtatcttcactatgcaagaagaagcgaggtgagctgctgagagttatcggtaggtgatcaacatgttggctatccacttggggcccatgcatatatacctgttctccctgcttggcttgtataaaacaatgtaaaggtgtgggctcatatagggtgatgctctacgtccacttactgcccatttcaatgacttaatggtgacaaacagactgcacaaagaaaaccattcacgggtgaccataactgctgctgctataatccatcttcttagactgcatagtctgcttacattgcctgtatattgaatgactacattataacactagatatagtgaagtga

SEQ ID NO: 129110 - DNA, 295 bp, Glycine max
  Clone ID: PAT_MRT3847_87592C.1
cgcttattttgggggatccatacattgggatggggcgaacatgctaacggggtatgctcccagagcaggtctaaagtgccatttgcaccaagattcaagtgcttctgaacagccatattgatatgcatgcgagagcaatagtaatgttcatatggtgaattgtgatgctaaaccttttgggagggggggggctaatatatcaggagatagaagctggttgtgtgggaaatgcgatgagctgcagagaagcgcgggtgtatagcatcgtgaggacgcgcgtgaggggctggggggg

SEQ ID NO: 129111 - DNA, 885 bp, Glycine max
  unsure (1)..(885): unsure at all n locations
  Clone ID: PAT_MRT3847_87593C.1
gaaacggcgtaattggaaacaaaggaacggttagtactcctagtcctagacttctggtgcagaagaaaacggcgttggattgtcctgtttcgtcgccacgtggagttctgaatagccgtgctcttcaaggttctccgatccgttccgcggtgcgtcctgcgtctccgagtaagctagcgacgccgtcactgtggtctccttcgagaggagtgagtccgtcacgagcgcaaaacggcgtcgtcagtggcttgagtagtaggttcggtggtggtagtgaaccttctgttttgagcttcgctgttgatgtttcgagggggaaggtagcggagaaccggatctttgatgcgcatttattgagactcttccataacagactccttcagtggcgttttgttaacgccagagctgatgctgctctctctgcgcagacattgaatgcggagaaaagcctctatgatgcatggattgctatgtcgaatctacgagaatccgttagagccaaaagtgcagagtttcagttgctgaagcaacaatttaagttaatatccatcctgaaggatcaaatggtatatttggaagattgggctactttggatcggttgtactctagttcactttcaggagctactgaagccctaagggctagcactcttcgacttcctgttgttggtggggccaagacagagttgctaaatttgaaggatgcaattagctcagcaatggatgtgatgcaggcaatggcatcctccatatgcctattgtcaccaaaggttgggcaattaaattcgctggttgttgaagttgccaacttaagtgcgaaggagcgtgttttgcttgaaaagtgcanagaccttttgtcagcgattacaactatgcaggttagag

SEQ ID NO: 129112 - DNA, 2556 bp, Glycine max
  Clone ID: PAT_MRT3847_87594C.1
gattgacaaaagactttctggaaaaaggacgttcattgtacttgatgacgtgaatgagtttggccaattaaaaaacctatgtggaaatcgtaaatggttcggtcaaggaagtgtaataatcattacaactagagatcgacgtctgcttgaccaacttaaagttgattatgtttatgatgtggataaaatggacgaaaacgagtcccttgagctttttagttggcatgcattcaatgaagcaaaaccaaaagaagacttcaatgagcttgcaagaaatgtagttgcttattgtggaggactaccactagctcttgaagtccttggttcttatttaaatgagaggagaaagaaagattgggagagtgtattatcaaaactagaaagaatacccaatgatcaagttcaagagaaattaagaataagctttgacggtttaagcgatcacatggaaaaggatatatttcttgatatatgttgtttctttattggtaaagacagagcctatattactgagatactaaaaggttgtgggctacatgctgatattggaataacagttctgatagatcgtagcctcttaaaagttgaaaagaacaacaaacttggaatgcatcaattgctacgggacatgggaagagagataatttgtgaaagttcaagaaaggaaccagggaagcggagtcgattgtggtttcatgaggatgtacttgatgtattgacaaataatactgggacagtggctattgagggattggctctgaaattgcattccaacaaaagatattgcttcaacgcttatgcttttgaggaaatgaagagattgagactgttgcaacttgataatgtacaactaacaggagattatgggtatctttctaagcaactgagatggatcagttggcaagggtttccttcaaaatacatacctaacagcttttatctggaaggtgtgattgcgatggatttaaaacacagtaatctgcggctattctggaaagaaccccaggttttgaagtggctaaaaatcctcaatcttagtcactccaagtacttgaccgaaacccctaacttttcaaaactaccaaatcttgaaaagctcattctcaaagattgcccacgtttgtgcaaggtacacaagtccattggagatctctgcaatcttcatttgataaatttgaaggactgtaaaactctaggcaatctgccaaggggagtttataagttgaaatctgtaaaaactctcattctttcgggttgttcgaagattgacaaattagaagaagacatagtgcagatggaatccttgacaactctaattgctgaaaatactgctctgaaacaagtgcccttttcaatagtcaactcaaaaagcattggctatatatccctatgtggatatgaaggatttgcacgaaatgtttttccttctatcattcggtcttggatgtcaccaacattgaatcccctatcttatattagtccgttttgtagcacatcgtcatatctagtttccctggatatgcaaagttataattcgggtgaccttgggccaatgcttagaagcctttcaaatcttcgaagtattttggtgcgatgtgacacagactctcaaatatctaaacaagtaagaacaattctggacaacgtatatggtgtaagttgtacagaattggaaataacatcacaaagttcagagcattacttgaagtcttatttaattggaattggaagttatcaagatgtcttcaatactctcagtgatagcatatccgagggattgacaaccagtgagtcttctgatgtttctctccctggtgacaatgatccttattggtttgcccatatgggtgagggacattcagtgttttttactgtgcctgaggattgtcgtatgaagggaatgactttgtgtgtagtttatttatccactcctgaaagcaaagcaattgaatatcttattagtgttttaatggttaattacacaaggtgtaccatccagatattcaagcgagacacagttatttcctttaatgatgtagattggcatgacataatatcacattcaggacccggagacaaggtggagatttatgtgatttttgggcatgggttggtggtcaagaagacagctgtctatctaatgtgtgatgaatcaattgacaagggaatggacccttctcctgagccaaagatagagccaaagaaaaatgcctttgtaaaattcataaagaaaattgtatcaagtaaaaatgaagagcagtagaggtttcaaccaattattactgggcatgccaaagtcatagtatagtattcctattcattttcctggagagaggacgcaatatcctatgttacatcgatgtataggagaaattcattaataacattcctcaaatcttgttaagagtttattttccattgtgctaggcctcatgctttctggacaaggtatgatgcaataaaattgttgcaaatatttggtggataacatgtattctaattactgttttaattgaccaactttgggtatatatattcatagggctggaatttctg

SEQ ID NO: 129113 - DNA, 416 bp, Glycine max
  Clone ID: PAT_MRT3847_87595C.1
ggctcgagcgacgactgagtctgctgtgcttcagatgctgctagtgctgcacacgcacatgcctagactcattaatgacgcctcgcgttacttaaacacagacccggctgaccaggacgacacactctttgatgagagccactcacagtgctctgtggaaggggctaccttaggaacagcacatccaagatctggagatgctgtaggtgggattggcgatgacaatgaaagaaacgttgctgctgatgaagaaacagatcatgatgcctatgactacggtgcatctcctgatcttccgggatccaagagtgctaaaagttaggggtctgggtcccgagtatcagccttctactcagatgatcaaggattccttgcttctgaatgagcggagaacatcgaccctatgattaggaatg

SEQ ID NO: 129114 - DNA, 259 bp, Glycine max
  Clone ID: PAT_MRT3847_87596C.1
atgccaagtacgcgcccgtctacttcgagacgtactaggtcgacggcaacatgaatgctgagccgccggacgtcgtcgattcgattcggactatcaaggtctgtctcaatggatgactcgttagccccataggcggtggcgtcagctgccacaatgttcagactctggaaagagcttgatctctatgcttctctggttagttgtctcaatctccctggcttacccacgcgacatgataatgaggatatcgttgtcatca

SEQ ID NO: 129115 - DNA, 421 bp, Glycine max
  Clone ID: PAT_MRT3847_87597C.1
cactaatactatatcagtttaatttaggtgttttacaattctcaaatttattaagggtatggtattaaatgttaggataaataacatgtgttctgtctgtgtaaacatcttctaagattgtatctaattataaattgttatatttagctagttgtattttcttaattttttaataataataattttaaatttttattaagaatgatgtctaattgattgacaatacatgtatattaaaatttaaatattatgagtcattaattatttatttgatttatattataaattttaaatgtcaatttatagtctgtaattcaagactttaagtttacgattctttacctgtgaaattggtggcaatggataaattaaatattctaactagaacattttgattatccatatcataataatatatttt

SEQ ID NO: 129116 - DNA, 170 bp, Glycine max
  unsure (1)..(170): unsure at all n locations
  Clone ID: PAT_MRT3847_87598C.1
atancncangcacgcgtacgtaagctcggaattcggctcgagaccactctgaagccgntcacgttatcnanaananncctcaaccntncttanacnnctaacnaatnnaaccatggctgnttctatgatctctcactgcaatgncncggcttgcaagctntcanannnan

SEQ ID NO: 129117 - DNA, 196 bp, Glycine max
  Clone ID: PAT_MRT3847_87599C.1
ggtttttgttttttttttttttttttttttttctttggccggtttttaacccaaaattcatactataatcctaccgatgttgggggaaaccatgcctaaagcaaactcgaggaattttccccctgcgattacacaaaaaaaaacgcttttttttggcccccgaaaattttaaagcggggttgccctttggacaaaa

SEQ ID NO: 129118 - DNA, 471 bp, Glycine max
  Clone ID: PAT_MRT3847_8759C.1
cgccgaggacccgaacaacagtggaaatttcagcaccagcagaatcccactcagctgtgcagcgtgactcgactatacagcgtgacaccgaccctggaaaccttctcgcgctaggctatgtccactcatatgccgaagacaacaacaaagacacttacatacttgcatgcacacgatcgtatatcgagttgctaagtgcaagtcgctgcagtgtatgcattgctctcacgaaaagtaaactactactacagaccaagcaccctctcctttaccttctaaagctacacgttggagtgtcccttctggagatttgggtttgcagtgttcaatcaaggtgctgcttttgttgggttctatgcagagtgatatgatcttagtacattatgtagaagagatcgtaggaggagaatgcttaccacaacgtttaggtttgatacatgctggtcatcgtatgctagataaataaaagat

SEQ ID NO: 129119 - DNA, 276 bp, Glycine max
  Clone ID: PAT_MRT3847_875C.1
ttcaaaacaatccatgcaatcaattctcatttatagactcgaagattacatcacggataagtgtcctttacctaatgacactactttactaatatgatttgacatgcacaaatacaatagattctatatcagccttggacaatgccaataactccggatataactttggagcaagttcacccaactcaaatgatagcaggaattctcgccattgaaatatctggatatacaaatcactgaatttgaaagagcgtattaagaacactaagaacaatc

SEQ ID NO: 129120 - DNA, 870 bp, Glycine max
  Clone ID: PAT_MRT3847_87600C.1
gaaaaccaagaccatatgcattcttcatatgcagttaccagagcccaaacaatcaatcagtggttcgagtcaccacagtaactagaagatgggtagatgttgctgttagctctttagaattggtccaaggatttgaccaagagactgctgcagtagtaatggccagacttgcatctcttaaaatggagacagaggaagcatttgatgccacacgatggttggaccgtttactcattcacctttgctctaaatttggtgactaccgcaaggatgatcagtcttcttttactttaaccccatcattttctttattcccccaatttatgttcaatatgggaagatcacagtttgtacaggtttttaataacagtccagatgagactgcatacttccgcatgttgttaaacagggaaaatataagtaaagctgctgtcatgattcagccattctctaatagcatattcattagatgcactgccttcaccagcgctattagatgtggcctcaatttctgcgggctggattttgttgcttgattcatattttagtgtggttatttttcatggaatgtcaatagctcaatggtgcaacatgggataccataaccagccagaacaccaggcatttgcacaactattacaagcacttcaggatgatgcccaaatcataattagagaccatttcccagttcctagattggtagtatgtgattaacatggttctcaaggtagatttttattggcaaagctgaatccctcagcaacatacaataacgcacttgagatggctgctggttcagatgtaatcttcactgacgacgtgagccttcaagttttctttgagcatctgcagatagtagtggctgacagt

SEQ ID NO: 129121 - DNA, 507 bp, Glycine max
  Clone ID: PAT_MRT3847_87601C.1
ttggttaactcttcggttagcaatttttaatagaaacagttcaatttgaaaaaactgaatcatacaacagttcagtttagtttttattgcaaacagttcaatatcagttcttcccttaaaactctaggagtgggaaactgcaaatcacttcaaactctaccaaagcttccccatttccttaagactgtattgtttccttcagcggctgttgaacaactagcggaaaacaggaaaaaggttctgttcttgaattgcttgaagttggatcaacaatctcttgagtccattgcgttgaatgcacaaatcaatgtgatgaaatttgcaaaccagcacctctctacagcgaatcacgatgatattgaaaattacaaagattatgataaaaaacttcattcttatcaagttctttacgtgtatccaggaagtagtgttccagagtagttggagtatatgacaacaaagaattatataattattgatatctcttctgctccaccttctcctctg

SEQ ID NO: 129122 - DNA, 507 bp, Glycine max
  Clone ID: PAT_MRT3847_87602C.1
aaagggggggggttttttaaccataaaaccatgttttcccttggggatgaacaaaaacaataggcttttaaaaggggccctactcaatggtcccgagtgggggaacaaacattttctcgttccaatccgggggggaacttaacaattggaacccgggaaatacccccccggggaaaatcactttccaacatgctaccaatatgcctaccaagggggtactccaaataaacccccaggggggcttttaagatttttttttccccttttaagtggggggcttggctttattttttggggggggctcaaactggttttggctgggagcccacaaatttttggcagggggggcttttggggcaccccccggaaggggggcaggggttaaaaataccaagggctggtctgccaacagtttactcacgagaaactgggtatgcaggacctttgggggtgggtggtcctggcaattggggagcttgagcgcgtgtggggcatggcgggggggcg

SEQ ID NO: 129123 - DNA, 816 bp, Glycine max
  Clone ID: PAT_MRT3847_87603C.1
cccacgcgtccgacggctgctcaaagccgacccgcacaggacagacacgaacacgatggttgaaatttgaagcaaagcacgtgtttgtgtgtgaccttctctctctctaaactccgatggctttctctgcaatcactaccttgccctctcctcaatttctccgccttcctcaatcttcaccctctcttcgattttcaccgccaattctcaaacgccccaaacccctctccattcgatcagtttcaatccccgctgcaccagcatctggttctctggcccctgcagtttcacttacggataatgcgctgaagcacttgaataagatgaggtctgaacgaaatcaagatttatgtttaagaataggtgtcaaacagggagggtgctctggtatgtcatacacaatggattttgaagacagggctaataaaaggccagatgattcaattattgagtatgaaggttttgaaattgtttgtgatcctaagagcctactcttcatatttggcatgcaattagattacagtgatgctctgattgggggaggcttctctttcaagaatcctaacgcgacacagacttgtggatgtggtaaatcctttgccgctgaaatgtagaatcatgtttatagacaatagtttgtttctactttctagcaacactctggactaaatatagatatgcttttaatactaacataaatatattcatgtgcattgtaaaaaaaaatatgtactgaatgcttgttatttgtatttctgtttatatttgtttcgctgcatcattagtcattcatcttttcaatttgtttacggaaaa

SEQ ID NO: 129124 - DNA, 267 bp, Glycine max
  Clone ID: PAT_MRT3847_87604C.1
gaaaagattacttgttttcttaaaattaaacaaactttggggacgattagatcaaatatacgaccatgataaaagccacacaactaataagcatgcggctattgggagacaagtatcatactatatagcaccactttgcaggtacccaaagcatagcgcgcattcaattcggggatacaccccaaaattcagcaactattagaacaacacggaccacaagtcttcaaataatctagggtcacttgccatgatccacatgatgtacct

SEQ ID NO: 129125 - DNA, 783 bp, Glycine max
  unsure (1)..(783): unsure at all n locations
  Clone ID: PAT_MRT3847_87605C.1
acggctgcgagaagacgacagaaggggacacacacgatggttgaaattgaagcaaagcacgtgtttgtgtgtgtagttctctctctctctctctctctctctctctctccaggctccaatggctttctctgcaatgactagcatgcactctcctcaatttctccgccttcccatctcccttccccgttcttcaccctctggtcgattttcaccgccaattctcaaacgccctaaaccactctccattcgatcagtttcaattcctgctgcaccagcatcagggtctctggcccctgcaatttctgttacggataatgtgctgaagcacttgaataagatgaggtctgaacgaaatcaagatttatgtttaagaataggtgtcaaacagggtgggtgctctggtatgtcatacacaatggattttgaagacagggttaataaaaggccagatgattcaatcattgagtatgaaggttttgaaattgtttgtgatcctaagagcctactcttcatatttggcatgcaattagattacagtgatgctctgattgggggaggcttctctttcaagaatcctaacgcgacacagacttgtggatgtggtaaatcctttgctgccgaaatttagaaccatgtttatagtcaatagtttgtttctacaacactctggactaaatatagacttttattactaacataaatatatttatatgcattgtcaaaaaaaaaatgnactgaatgctngntatttgnatttctgtttggatttgtttcgctgcatca

SEQ ID NO: 129126 - DNA, 504 bp, Glycine max
  Clone ID: PAT_MRT3847_87606C.1
aaaatttccctttccatgattagataaaaagacatgattttgggatcattacattatactattctacaccacactttaagatatattcaatctactctatgaatgaaactctcataactcctaccatttttcttggtgagaatacgtgaagaacttgatggcccacttggggtggcctctagtagtgtttttttcatggaattttgagcgtatgtacccatccggttcttgacgtgcctatttatgaacctctgaatatctcccttggcagactcaagaggcttcacctttatatacagggggaatggggaccgtatcacgcgggccgatcgtcttccgattctcttttgtgccacctgcaacggtttcggcttcagtctttgttcctatattaaggctcgcagggatacacgggacttgtctagggaaaccgagtgggacaaacacaccctatgtcttgagcagcgacgtgtgcggatcaaacgagtgatcaccctatgctgt

SEQ ID NO: 129127 - DNA, 279 bp, Glycine max
  unsure (1)..(279): unsure at all n locations
  Clone ID: PAT_MRT3847_87607C.1
atttcacaaacctatcaaaatancacaaagcnctaatgaaattcttnagtattctcctctncattttttgcnatttctctgtgtgtatngatgctactcctagccaaaacaaagttagtagtagacatgagttcttcaatacaatcantannacgcgtgtctgagtctgatnctactannactgttgaccatcttgtgtttggaattgcctcaactgggactgcatggaataggaggaaggtatacacaaaantctggtggaanagaaaacccnataat

SEQ ID NO: 129128 - DNA, 1675 bp, Glycine max
  Clone ID: PAT_MRT3847_87608C.1
attttcttcgatattgtcaacaaaatgctatggagggaacctgggccattgttgattttcctgttgatagctttcaccaaaattttcacccttcttacccccacgcgtccaggaggtcctctggctgcgttattcaagatatgccaaatgggtattcaagggtaacatgggtggagcatgcaaaagtagaagagaaacctgtgcatcagatattctgcaattatgtgtacagtggaatggcatttggagcacagcgttggttaggagttttgcagagacaatgtgaaagggtcgcaagcctcatggccagaaacatatcagatcttggaggagaacattcccgaggggggcgaaagaacttgatgaaactagcccaaagaatgataaaaacgtttagccttaatatgagtacctctggtggtcaatcatggacagccatatcagattcccctgaagacactgttagaatcacaactaggaaaatcacagagcctggccaacctaatggcgtgattctaagtgcagtttcaaccacttggttgccctattctcacaccaaggtctttgatctcctcagggatgaacgccacagatctcagatggatactctttcaaacgggaactcattgaatgaagtggctcatattgcaaatggctcacatccaggaaactgcatttctcttcttcgcataaatgtagcaagcaactcatcccagaacgtagagctaatgctgcaagagagttgcaccgaccaatctggaagcctagtagtgtacacaaccatcgacgtggatgcgatccagctagccatgagtggcgaggacccttcttgcattgcacttcttccccaaggcttcaagatagtgccaatgctatcatcacccatcaccgatacaacaaactcatcagagcctccaatatctctcaacaacaactcaggtggttgcctcttaacaatgggggtgcaggttctcgcgagcacaatcccttctgcaaagctcaacctctcgagcgtcaccgccatcaacaaccacctttgcaacaccttgcaccagattgaagctgctctttcttctactaactcccatgagaacggcttcttcctttgcactgaacccaccaagcagtgaaagaaaaaagtagtcactcggatgattaattcctccctacccgcgttttgtttccttctgtgtgtacccttttggattttatgggactttgtagtgttagctttttgtgtggatcggtcaaggagtgccaggaagaagaactattattatgctttgtgctaaaagagaagaatgaggtactagactagatgggggagcaatatgagggtaagaatggttagaataaattaagatgtgatttgagtagggattattaattaggtagggaagtttgttagaaaaattaagttgtgattagtggatgtgtgtgagggtttgagaaacaatgtgggtgaggttttagagggactgagggagtcaagagcgaaccagatagtaccctgggctttctagtgagagatggcctcaccagtgagtaagggtgctgtggttcgggaattgactcttgtttctatgtcagcctctagtactgtcttcatttcaatgcttatcatgatgattcaacttggattgacttaattcacttgtttacattctgtctcccc

SEQ ID NO: 129129 - DNA, 244 bp, Glycine max
  Clone ID: PAT_MRT3847_87609C.1
atgcggctctagcaccagttgtagcaatagtgcagaatccgatcgtaatgcttgaagctgcattcggtagagagagagcatgtgaattgggatttcaggttaagccatggattaaaataagccttgccccagggtctggtgtcttgagcaagtatgtggcgaggagtgggttgcagaagtatttgaatgagctaggggtcaatatagttgtgtatggattcacaaatccattggaaattcaggg

SEQ ID NO: 129130 - DNA, 359 bp, Glycine max
  Clone ID: PAT_MRT3847_8760C.1
gggaccgggcccgaaaacccggggcgacccacgcccccgaataaaccaaacgcacgggacagggaacaccgggcggacagaacaggcagggcccccccggacccaccggaagccggacggcggcaacaagaaggagaagaagccagagcccgcggcgccaccggccccggcgggccgaaagcagcgaaagcagaagggcccggaggcgggagagcggacgccgacggggacccccgcgacgaagcgcaagcaaaggctgcggaagccggagcgcaaaaaggaccacccacggaaggaggagggagcacgcggcgaaccaagagaggccgaagccgcaggaggagaaggccgaggaagac

SEQ ID NO: 129131 - DNA, 188 bp, Glycine max
  Clone ID: PAT_MRT3847_87610C.1
atatattaaacacacttgtaaatccattatttaggacatatagtttatgcaaatacagtgaactttttaagaccgacatacattgtttctctcagcatgcatgcatgagaataacagtgtgttctggtcatgcatgcatgctgagagaaacagtgtgttctggtcatgcatacattgtttctcgagcc

SEQ ID NO: 129132 - DNA, 294 bp, Glycine max
  unsure (1)..(294): unsure at all n locations
  Clone ID: PAT_MRT3847_87611C.1
tggcagcgtcactacaagcagcagctactttcatgcaacccaccaagttgagcaggagcaacatttgcagcaaaagtctacttcagtccatttccaaggctttggttttggacctgttggagctaaaaaggncacatgctccctncaagctgatcttaaggacnttgntnanaaaggnggttgatgtacccaaantgnnnggattcngccctnggcaacnntgnccncngttgtncnngggggcaaatgcnnaaggngtncccaaaaggntaaccctttcgacgaantccaaac

SEQ ID NO: 129133 - DNA, 991 bp, Glycine max
  Clone ID: PAT_MRT3847_87612C.1
acgaaacacgattcgctcgaggagggctccgaggatgcgttggacttctaccctccatgctcgctttgttcatgctgttgaactcttgggtggccacgaaagggctacacccaaatccgttcttgaactaatggatgtcaaggatctcactttaacttatgttaagtcttatttacagatgtaccggacggtgaaaactacatatagggcggcggcttcatcagggcaatcagatgtgtatgataatggatcgtctggagatacttctgatgacttaatgtttgacataaaatcctcaagaaggtctgatctatccgttaagcagggaagatcaagtgttaatcaagataaggagtatcatggtctttggggcaattcttccagggaagcttggttgcatgggaagacaaagactgattctgttggaaacgtgcctttttctcttgagaaggaaatggatccaaagtgcctaagctatgagagaatatcagatggaagttcatcctcaaatctttcaggatcaagcccgaagaagcctaatttggatttggaattcagcttgggccagccactttaatttgagatctgaatatatatattattcattaactactatgaaactgaaagagggtagagctctggaatgagaatcaggaacccgctgagaaaatcagagaaagagaaagctaaaaagaaaacaaaagagaaaaaagaaaagtaaaaggagctaaagaacacaaggagacaagaaagacagaatgcaacaaaaaggaaggggcgagggaaaaaagcatggccttcctatcagagctcttgtgatgagatccaaatcaacatattatattttcttggtaaatatatgaaatctaattgatttgtatgtttttgcaatctgagagaaagagagagttatgttaaaagtatgaagtgatccttggtaattgtaatggagcactttacacttatgaaatatttagatatttccaccaaa

SEQ ID NO: 129134 - DNA, 427 bp, Glycine max
  Clone ID: PAT_MRT3847_87613C.1
ttgatttgattgtgggtcattggttgttgccaagggtgtaaatcacaatcaaatcgtggggttgcatgttgctggaagcaaaggaagactgggatatgcttcattgataccatatgttgagccagcggtgcaagctcaaagtgctgagagatactctgactactaccctgtggaggttgatagtccagaagtagttgctcacattagagaattgaaatctgatgtctatgttccacttgcctacacaaactaattcggtggaaactcccagggaatggctgccgcatctaccttgtgacaaaatttataatgccttgtctacaactgttgagacattggaaggcaccagactctgaaggatatcatcctttttttggtggatgtaaaaaattcccctcccataatgccgcctaataaaaaatttttt

SEQ ID NO: 129135 - DNA, 228 bp, Glycine max
  unsure (1)..(228): unsure at all n locations
  Clone ID: PAT_MRT3847_87614C.1
caaaaggggcaggggaggatctaatnnnnnnttttgatggattttattttgcaaattaagtgtatattatttgaattaattaccatttagcattgctaactttataaaaaaaaatacattttgaattaaagatatcaataacactatttctttagaaatatgttcaacactctcctaggaaaaaacaattaatggtggccgctcgcgatctnnnaccggacgcgtggg

SEQ ID NO: 129136 - DNA, 182 bp, Glycine max
  Clone ID: PAT_MRT3847_87615C.1
gcggactacttgttttgagaaatttgccaatggggtcaagccgcaggcaaatatcaagggagtggacaggctatctgctaaagtgggagtggtggagataggaaagggtgtccctggaactagtgcaacccggaagagaatattcttgggaaagcccgtcagtaaatttggttcagggaatt

SEQ ID NO: 129137 - DNA, 136 bp, Glycine max
  Clone ID: PAT_MRT3847_87616C.1
ctcacgcgtccgcatattacatgacacacacttctcttcatccttgtcactaaggccagagggacaagacaattgcgttcacacaaactacgcgtacttattgacaaagatgcactacgttacatgccacacggtc

SEQ ID NO: 129138 - DNA, 468 bp, Glycine max
  Clone ID: PAT_MRT3847_87617C.1
ttccaatgaaggtttcccgtcatcactgtatgacgtcctccgtctttgggggggggggggggcgaagggagggaaggagaggcaggacggggataattttgctaactctactacggcaaaatgatacaactagctggcgacggcgatagcagtagctacacacactctacaacgtgggataatgcggaaaagatattcaaaggtggaaataacacaaaaaacatacgaaattaagttgagtagacaaaagaagaagggaataggagtgggagcaaccataaaatcatccaaatgggctggttagggtggtgtgggtcgcgtagactcgaaatctgggttagtctgggcggggaggtcggctatagaggtggcagagtcagaacaccgagctgaagaaccgaaccacccccaccggcagctagaaagaaaccagaggcgaaccgccgacggccacacacgccggaatta

SEQ ID NO: 129139 - DNA, 3544 bp, Glycine max
  Clone ID: PAT_MRT3847_87618C.1
gcaaagagagatgggaaccgttagtaacattggcttcctttcagtattcagagttcctctagattcacaacaagcactatcaaagcagatgaagaataaatcatcgtgttgtttcatggttcctcctaatcataactattctattaggcctagtccaatacgttgtaattaactatcagtaagtgggattcagcagaaccccacgaccacaagcacgagcaacacgtcctgaaagaacaaggataagatggatggcaataaaatatactcactgtttttctcagtctacattcatttctctccgctttaacgttgccccagttaagttttcttatgtaaaggcacaccctttgcctctttactagtaccaacaccaaagacaaccttgcctttttatattctctccttcttgtgttacctttgtttagtagtgagtgagtgaaagcatggctatggttgtggctcaacacagagaaagtagcagcagtggaagcattgacaagcacttagattctggtaagtatgtgaggtatactgctgagcaagttgaggctcttgaaagggtctatgccgagtgccctaagcctagttctctgcggaggcaacaattgatcagagagtgccccattctctccaacatcgagcctaagcaaatcaaggtttggttccagaaccgtaggtgtagggagaagcaaagaaaagaggcatctaggcttcagaccgtgaaccgcaaactcactgcaatgaacaagttgttgatggaggagaatgatcggttgcagaagcaggtgtcacagcttgtttgtgagaatggttttatgaggcagcaattgcatactccatcggcaacaactactgatgctagttgtgattcggtggttaccactcctcagcataccctgagagatgctagtaaccctgctggactcctatcaattgcagaggaaactttgacagagttcctttcaaaggctacaggaactgctgtagattgggtccagatgcctgggatgaagcctggtccggattcggttgggatctttgccatttcacaaagttgcagtggagtggcagctcgagcctgtggtcttgttagtttagaacctacaaagattgcagagatccttaaagatcgtccatcttggttccgtgactgtcggagcctagaagtttttactatgtttcctgctggaaatggaggaaccattgaacttgtttacacacagacatatgctccaacaacactggctcctgctcgggatttctggactctgagatataccacaagtttggaaaatggcagtcttgtggtttgtgagaggtccctgtctggttctggaactggccctaatccagctgctgctgctcagtttgtaagggctgaaacactccctagtggctacttgatccgaccatgtgaaggtggagggtcaatcattcacatagtagaccacctaaatctcgaggcatggagtgtgccagaagtgttgcggccactttatgaatcatccaaggtggttgctcagaaaatgacaattgcagcgcttcgctatatcaggcaaatagctcaggaaacaagtggtgaggttgtttatggattgggtaggcagcctgctgttctgcggactttcagccagagattgagcagaggcttcaatgacgctgtaaatggattcaatgatgatgggtggactgtattgaactgtgatggtgctgaggatgtaattattgctgttaattcaaccaagaatttgagtggcacttctaacccagcaagttcccttacattccttggaggaattctctgtgcaaaagcttctatgttgcttcaaaatgtccctcctgcagttttggttcgttttctgagggagcaccgctcagagtgggctgatttcaatgttgatgcttattctgctgcatcactgaaagctggcacctatgcctatccagggatgaggcctacaagattcactggcagtcaaataattatgcctcttggtcatacaattgaacatgaagagatgcttgaagttattaggctggaaggtcactctcttgctcaagaagacgcttttgtttctagggacattcatctcttacagatatgtagtgggattgatgagaatgctgtgggggcttgttcagagctcgtatttgctccaattgatgaaatgttccctgatgatgctccattggttccttctggtttccgcattatcccattagattcaaaaccaggtgacaaaaaggatgctgttgctacaaatcggaccctggatttgacatctggttttgaagttggtcctgcaacaactgctggtgcagatgcatcatcaagtcaaaacactcgatcggtgttgactattgccttccagttcccttttgacagcagtctgcaagacaacgtcgcggtcatggcacgccaatatgtccgcagtgtgatttcctccgtgcagagggttgccatggctatatctccatctggtataaacccatcaattggagctaaactttctcctggttctccagaggctgttacactagctcactggatctgccaaagttatagttactatttagggtccgacttactgagatcagattctcttgttggtgacatgatgctgaaacaactgtggcatcaccaggatgccattctatgctgttcactgaagtcattgccagtgttcatatttgcaaatcaagctggccttgacatgttggaaacaaccctagttgccttacaagatatcacattggataaaatatttgatgaggctggacgcaaggcattgtgtacagactttgccaagttaatggagcagggttttgcttatctgccagctggaatctgcatgtcgacgatggggcgccatgtgtcatatgaccaagccattgcatggaaagttcttactggggaagacaacactgttcactgcttggctttctctttcataaattggtcatttgtatgaaaaatccaattcgtgtgccctgctttttcccacttgaacataaaaatgaaagggttaaaagggagacaagacaagtttggggggaaaaagaagtcgtaaatttttgtataacacatcaggatcaggtttgcatttaattcgatttaatttatttcttatttagtgcagagaccaaattgaattaatcttgtaaattatttagtgctagagtgaagttgagacttttgaatgacacatgttgagtactttgtttttgtcaaaaaaaaaaaaaaaaaaaagtcaccccaaaaacacaagaacttttatgttcaagtgggaacttgcggggcgcgcccggcccccttttcccccttttggcctttttttgcccccccctcccgggccgtgttctgtgtcctcggccccgggaagacccttgggtttccccattttattccctttgcaccaattccccttttccccacttgggttattacaaaaaaggccccccccattcccctttccaaaaatttgcccaccttaatgggaaaagggaaccccccttgtaccggccctttaaccccgggggg

SEQ ID NO: 129140 - DNA, 656 bp, Glycine max
  Clone ID: PAT_MRT3847_87619C.1
tgatcattcactgtacgtaggattcagaaaggatgtagaaaactctgttgattgttgactccgtcagcagcaatctttgctgttttctgcaaccataccaaagtaggtccgttgtgtatctcagcttgttttgaaaagggaactcaatatatgttgatacagttggaatgggttgtgtagacactcctgttaaggttaaccaatcttatcttattgctcctcatgagtcacattttcagttagtgcaccatattctgaaggagcatatcttgcaaacacctgattataaggttattgtattctgtataactgggagtggtgaaatgaaattgcatgtctgctggtacaaatgattttatttgattagcttgccttcactttaaaagttaatggcacctaaactctttaaaataattgaaagagtgtcaaataactataggctagacctagtctagtagtcttaacaaaattaaggatttctttgaatcggattccgtttggtaaagtgcattgggtcaagcacgcaaatcacagagcatattatctttagcctttggtgcactccacaattgtggactataaagatttgtcttgtacattaaaattgcttgtgacatttaatggcattcaataaattttgggggaacctcttgctt

SEQ ID NO: 129141 - DNA, 1081 bp, Glycine max
  Clone ID: PAT_MRT3847_8761C.1
gcgacgtaacagaaagacacatccaaaggaagtctctggttatttcaattaattaagagaaaggactcgaatagttggttattcatggaagacaccgcacaacaaatcaagcgtccttttggtgttcctgaaggaccagaattcactgttgggttggatgtacctttgagcgagttgaaggtggagcttcttaaagaaggtgtgtccatcattatgctgactggtttaggtggatcaggaaaaaccactttggctacaaagctttgttgggatgaacaagtcataggtaaattcaaggaaaatattttatttgtcaccttctcaaaaaagcctaagttgaagattattgtagaaagactatttgaacattgtggatatcaagtgcctgagtttcaaagcgatgaagatgcagtcaatcaattgggacttttgctgaggaaaattgatgcaagtcctatgttgctggtcctggatgatgtctggcctggatcagaagccttcgttgagaaatttaaattccagatatctgattataaaattttggtgacttcaagggttgcatttcctaaatttggaactccatatattttaaaaccacttgctcacaatgatgcaataaccctattccgacaccatgctctcttggaaaaaagcagttcaagtattcctgacgaagaacttgtccaaaaggttgtgagacattgcaagggtttaccgcttgccattaaagtgattggtagatcactaagtaatcgatcttatgagatgtggcaaaagatggtggaggaattttcacatggtcatactatacttgattctaacattgaattaattacttccctccaaaagatcttagatgtcttggaagataatcacatcatcaaagagtgcttcatggacttagctttatttcctgaaggccaaagaattcctgttgctgctcttgttgatatgtgggtagagttgtatggactagataatgatggcatagcaacggccattgtcaaaaaattagcttccatgaatctggctaatgtcttagtgacaaggtacattcaatgactacttatatttcttctca

SEQ ID NO: 129142 - DNA, 115 bp, Glycine max
  Clone ID: PAT_MRT3847_87620C.1
ggattacgtcgcctcatgcgcaaagcatggcaacccaggtcagggacaacggcaccgccatcgtgcaggaacctgccacgtgtgcaaggcaccttttacacgaaccataggacaa

SEQ ID NO: 129143 - DNA, 405 bp, Glycine max
  unsure (1)..(405): unsure at all n locations
  Clone ID: PAT_MRT3847_87621C.1
tttttgtattgtttctatttttatctttattttgttttggactaaaatttggtaaaacttagtttacattgcacactgtattgtgaaaacactcataccgctagatcttaaattttgggattctgctaggtgtggacattgcaaaagtcttgctcctgtaagtatatctttgaggttccttgttatcaatttaaggttgggacctttaattttcataaaaccaatattgtggaacctgactatgctcttttttccctccagacttacgagaaagttgccacagcatttaaattggaggaagatgtagtaattgcaaatctggatgctgataaatatanggatctggctgaaaagtacgacgtgagtggatttcctaccttgaagttcttcccaaagggcaacaaa

SEQ ID NO: 129144 - DNA, 1798 bp, Glycine max
  Clone ID: PAT_MRT3847_87622C.1
cttgcttgtgtgttctgttctgcaccaccaaataaataagctttcaacaacaatcccaattttcacttcacaaaggaaaggaaaatcttctctcttccctaggaaggttgaatgatttggaaaaatgagttctggcaatgtgaagccagaagaagaagccctagaaaaggagaatgtaggtgttcctgtccctgaaatttcagaaccaaaagagcagaaggctggaagtaactgcaagggaattgagcagattcctttgtctggggaaaatgaagaggatgtgctagttaatataactgggagtgggtccataatttctggtggcaaggcagtggaagatgcttctgaggatgtcactgatgccacgccttgcagttccagttcttttggtgatacagattctggcttagaggatgcctcagcctcggcgttcaccaatacggaagtggaatcgcctatgtgtgatggtgatcaaagtaagacttctctatgtaggaagaacaagacgacaacatcacattggaggaggttcattcaccctgttaggtggcgctgtaagtggctagaattgcaagtgaagaaacttaactctgtagcactgaaatatgataaagagctcgcggcatacgatcatagaaagcagcttgagttttcaaagttctcaatagatgatcttaatgtcaagtcagtacctatatatgatggcattcacacaaataaagttatgaagagaaagaaacggaaaaaagctgaagaaagtgatttatcatcatatgtgtctaatcatagtatattctcttactacgagaacaaaaaccgtggcgcttgtattgaagattttcgtggtgatgccttgagaggtaatgcagagattaatattgaggagttaaagtttaatgataagctgccttctgttgatcttgaagataatgataaagccatcaaagacatcattcagaggattggggaactacagtcacaagttgggaaattgaaaactcggattgataatgtggttagtgaaaatccaggaaagttctgttctgtaactcaattgagcatgattggatcatctgatggatttaatcattctcgccataattctgcttcttttgttggaaatgacaacacatttccggacaggataacttcctttatcgaaacgactattaagccccagcttgagtttctccaggaaaataccaaggatgaaattcttatacaaaatcaggcagccaatgaagagttgcatgattttgagagtgttagaaatcagtttgtggagaaaaccaagaaatcagttgaagagcagaaacccatttccgctgctcaagtctcagaatctgtcatggacactgagaatgctgttcctactttgaaagccggttctacatcgaactcaaattttcgtaggataacaaataggagaaggaagaagcctggttcaaagagatggaaacgcagataatctggttaaagctgaatctggatgcaatgattgttgtttcttttgacaactgcaggagctgataatatgtcaatcgtaatgtgtaaattgtagttatgttgtgcatacttttcttacatcgagaaatgagttcaattgtatatgacgtgaataaggatagcatgctcacctctatctttagaggaagcttttgttttttgttactggagaattcttgtttaaagcaatgctgtttcttgatttgcttggggattattgtgtcaggaattaatgagtctcttctctcgttgcctaatatattaactacatatcctttgatgctgtttcccg

SEQ ID NO: 129145 - DNA, 474 bp, Glycine max
  Clone ID: PAT_MRT3847_87623C.1
gatcatctgatggatttaatcattctcgccataattctgcttcttttgttggaaatgacaacacatttccggttagttttgttcatgcttcatcacagcttaaatctgagttaaacacagaagatctacttttgactgaaaatccattaccatcccaggacaggataacttcctttatcgaaacgactattaagccccagcttgagtttctccaggaaaataccaaggatgaaattcttatacaaaatcaggcagccaaggaagagttgcatgattttgagagtgttagaaatcagtttgtggagaaaaccaagaaatcagttgaagagcagaaacccatttccgctgctcaagtctcagaatctgtcatggacactgagaatgctgttcctactttgaaagccggttctacatcgaactcaaattttcgtaggataacaaataggagaaggaagaagcctggttcaaagagat

SEQ ID NO: 129146 - DNA, 325 bp, Glycine max
  Clone ID: PAT_MRT3847_87624C.1
tttatcaaataatcagatctgttaatatacaataaaaaagttcgcatgttcacagttgatactaaagtactaacattagtaacatggcctgttctgcaagttacaatgctatattgctacatgttttacaaatgaatacgggaaacttggatgttatggagcatatcggtatccgagttgctaaattttataattatatctatctaaataatttatacatatgctaccacataaggcacaataattgggttatactaatatggaagggagttgtcatctaatttacactttaatccgagtgcagacaaaaaattttatatacctt

SEQ ID NO: 129147 - DNA, 478 bp, Glycine max
  unsure (1)..(478): unsure at all n locations
  Clone ID: PAT_MRT3847_87625C.1
aaccgttgggctgatttatgtgcttgcatggtgagaagatgatagaagggggccgtactgaagagagagagagtgagagagagagagagaacggtagtatccggcggtaactgcgacgcggtaggaagttagaatagttccgagactgacggcccagtctgtcccgtcgccgaagaatataataaaaaatagaacgtttccccggagcccgaaaaggcagcaagcgtaaaatagtaagcggccctcggcattccgcatattactatcccggaggtaaaagacggcgggtaaaagaaggcccacgaagttaaagcccgggagaaggtacggccgaatcctaaggaggcgtaagagcctaagtccgccggagacgtattcgtacagctcagcgtccaaccaggccgtagaagagcgaacagcgagatagttcgntctgaaggggaaagttcaaggacacactaaagtacgtcacacgcac

SEQ ID NO: 129148 - DNA, 706 bp, Glycine max
  Clone ID: PAT_MRT3847_87626C.1
ggagaggatggatggtgtcaccatttacattgctttcttaaacaaaaaattgtcctatccttgggacttcggagtaatgctagaaataaaaagtttacatgcacaaattcatcggttctattagatgaatctaaagttgcaaggtgaaatttgcattcatgtaccagttaacacataatcaacaattctgcctattagttgagtctttgtccacctaaactcaagcttagcgttgccttccttgacctgtcacccacaagagaacacctccatctctttggtatgtgctgtagaagttcgttgtcatgtttcaatctcaaggaaaaatcactgcacagtctcatcctttgtctacagagaggtgagcttgaatttaattggatcacaaaattaaccttgataaaaaatgtcttcaggatgaaaaaagaatgaagcccaatattgttgcccaacgaaatagcaaactatgtacagtttgattaatatcaatcatcaagaaaaaatgtggcagtgttaggcacataaccaaaccctttgatctgtagaatcaaattgtctaaaactagagatataagtatagagtcacgatgggctgtgcctctggcaataaatctgtgaacttcattattcacttcaatccagctccaacctggttccttcactaccctgctcatgtccattttctccctcacccttctgacatttg

SEQ ID NO: 129149 - DNA, 106 bp, Glycine max
  Clone ID: PAT_MRT3847_87627C.1
agtgcaatcatgaggaccataccattgccggaccctcagaccgtacgagtgctcataggcagtctattgccggcctataaactatatcgtgccaactcttcgttta

SEQ ID NO: 129150 - DNA, 1192 bp, Glycine max
  Clone ID: PAT_MRT3847_87628C.1
atggtcacgctgtggctccttcccccttcccaagttgccgtttattagtttattccaaacctgccctgttctgcaccctggcacaaaaaagcatcaacgcttgcattctctggcagctcatcgagaatgtcgaaggaagtgagccagcagaggaaggactacgtagaccctccgccagcccccctcatcgacttggccgagattaagctctggtccttctacagagccctcatcgccgagtttatcgccacactcctcttcctctacgtcaccgtcgccaccgtcattggccacaaaaaacagaccggaccatgtgacggcgttggccttctcggcatcgcatgggccttcggtggcatgatctttgtcctcgtctactgcaccgccggcatttctggtggacacatcaaccctgcggtgacttttggcctgttcctggcccgcaaggtgtctctcattcgtgccctgttctacatggtagcgcagtgtttgggtgctatctgcggtgtcgggttggtgaaggccttcatgaagcactcctacaactccctcggcggcggtgctaactccgtcagcgctggctacaacaaaggcagtgctctgggtgcggagatcatcggcactttcgtccttgtctacaccgttttctcggctaccgaccccaagagaagcgctcgtgactctcatatccccgtgttggccccattgcccattgggtttgccgttttcatggttcacttggccaccattcccatcactggtaccgggattaacccagcaaggagcttcggtgctgctgttatctacaacaatggcaaagtttgggatgaccattggatattctgggttggaccattcgtgggagcgttggcggcggcggcgtaccatcagtacatcctgagagcagcggctattaaggccttagggtcgttcaggagcaaccctaccaactagtttacttcatccatagacagaccctttattttgtgtttgcattctgtatgtgtgtatgcgtttgatgtaggagaaccatgatgatgaccaattcgtccttttctttcttttgtaatttactatttatttttttatttcttaatttgcttttgtttgtatcagagatcatcatgatcattcatgaccgttatttacattattgtttttattatattctacttgccctgtgtgtgtggat

SEQ ID NO: 129151 - DNA, 437 bp, Glycine max
  Clone ID: PAT_MRT3847_87629C.1
atcgcctctgacaccgctgtcataatcatcatgcaaagtctctacaacatttcaggttgacacgactctgccgaaaaactttcccaactatccatccaattctgcatagaccctagagtcacgcatgctacacttccttttatctttgcattcggatttggagcaccgccatatcctgacgcgtgtttcctggttcggcgacactgatgactctgctcgttacgccactgtctgttagcgtcgtgtgccgcttctggtatcaccgaccagtgcctaaaggaacaagcttttggcgctaaagcgcggaggggaccctctattgtatgctttctacctccaataagtatagatcggccgccagcatggcttgaaacgtgtttaggttctgcactgccctgagaggacagagctcgaccatgacactaatgggtctagag

SEQ ID NO: 129152 - DNA, 474 bp, Glycine max
  Clone ID: PAT_MRT3847_8762C.1
cgggtgaggactcgagccggttcgaatatgcgcatcgtggtggtgcagcggttgtgtatctctatcgggcagcggatgctcttgccacgagtcaagaaaactcctgcagagcgggtgatgcaacactttacaaagcactaacaaaacaagctgacactctcatccaaccagattatgaggggtcactacaaactactagaaagcctaggaggaaatggaggacccgaaaccggaaataaaataacaagtagtgaaggtgactcaaaccatcttccaagctgaacaaagtgcgacgcactatgacgaggcttaactccggtatacgactacagcatagcgtgagggaccgggtagcatgaaagtttggagaagggtacattccaaacaaagggggatgctgacactgatggtaatggatatatcgacaaggacactctaacattccacaccaaaaactaagcaccactctgctat

SEQ ID NO: 129153 - DNA, 970 bp, Glycine max
  unsure (1)..(970): unsure at all n locations
  Clone ID: PAT_MRT3847_87630C.1
gagtttatgtttaggggaagcttatatgactttctgcacaaacaaaaaggtgtatttaagcttccatttttgctaaaagtagcaattgatgtttccaagggaatgaactatttgcaccaaaataatataattcccagggacctcaagactgccaatcttttgatggataaaaatgaagtggtcaaggttgctgattttggggttgccagggtgcaaactcagtctggagtgatgacagctgaaattggaacataccgttggatggctcctgaggtcattgaacacaaaccatatgaccagaaggcagatgttttcagttttggaatagctctttgggagcttttaactggagaaggcctacggcctacaattcccaaaaatacacacccaagactttctgaacttcttcagcggtgctggcaacaagatccaacgcagagaccaaatttctctgaagtaatagaaattcttcagcagatagcaaaagaggtcaatgatcacaaagataaagcatcccatggctttctctcagctcttagacgggcccatcattgatattgatataagagtattacacgaaagtatagcctttttgctcctgtatagtagtcagactctgaccaaatatctattgagttggttgtttataatactcttgaaagattccattgtattgtgcttgccttaaatttctgttacaatctgcgtctttctcccatttgtctatcaacttattcgcctgtgaataggatggatgcaagtttagtgaaagtccaaaattcaaggtatcgttcacccattaattctttgctaatttacaattgtattccatgctttttcgatgttgtcttctgtacccaaacccttgaagtagactagtagaggcgttatatgttgagacctgagatgtacaaggcttagctgtaataaaattggcatgtcattatgcaatttgattccaanaagtatt

SEQ ID NO: 129154 - DNA, 416 bp, Glycine max
  unsure (1)..(416): unsure at all n locations
  Clone ID: PAT_MRT3847_87631C.1
accaacaatcaagcattgacccccgcacttttaaagtacatttaccaaattatttaaaagccaacaaaaaaggatttgcgtgaaaccatgcttggtttgtaggcattttgntttgattcttttttatccccacagaaaattgaccatatatcttcgtttgtggaacttcctttgatgagcttcttaatgaaactttcacccatactaatagtgaatgttcaaatttctatttacccttccacactttttctatgtgaaacccattggtaaggagtgaggtttttgttatactttaaacatttcttattagtacttccaggatctttcactgaatttttaagaaaacatttttaaaggtttttggtactatttaatttaaaaagttaaagattttttttggagatacacattttttc

SEQ ID NO: 129155 - DNA, 1061 bp, Glycine max
  Clone ID: PAT_MRT3847_87632C.1
ttcgtccgctctcgcgtccggaacatttctgctcaatccttattgagaatccgttaatttgattcagaaatttcatttatttgtatgtaaattaatgtttgaaattcatcaacctaattaggaagagtttctttatgctcatgcattttcccccactgatggatttcctctggatgtctttgctgtagagggattgcctaatgaggaaactgaggagctgaaaggtgtgttttcaaaggaatatttcatggttaacaaaatttgtcatatcgtatacattttgctaccatctcttaaattatagggattcccaaaaatacgccaatttttgaacaggtggcaacaagatccaacgcaaagaccaaatttctttgaaataatagaaattcttcagcagatagcaaaagaggtaaactattactgaaatttaaaaaccaactaaaagttggacctgttaagcaattttcagtttcattttttcttttcctaccaggtcaatgatcacaaagataaatcatcccatggctttctctcagctcttagacgggcccatcattgatattgatataagagtattacacgaaagtatagcctttttgctcctgtatagtagtcagactctgaccaaatatctattgagttggttgtttataatactcttgaaagattccattgtattgtgcttgccttaaatttctgttacaatctgcgtctttctcccatttgtctatcaacttattcgcctgtgaataggatggatgcaagtttagtgaaagtccaaaattcaaggtatcgttcacccattaattctttgctaatttacaattgtattccatgctttttcgatgttgtcttctgtacccaaacccttgaagtagactagtagaggcgttatatgttgagacctgagatgtacaaggcttagctgtaataaaattggcatgtcattatgcaatttgattccaaaagtattaagacaacaataccaggcaaggatggaaccctcccctcattgcattcaaccaccatccgttggacctgactactgggagattgattcc

SEQ ID NO: 129156 - DNA, 3238 bp, Glycine max
  Clone ID: PAT_MRT3847_87633C.1
gattcttacttttttaaaagtggtgaaaatgattggtcagggaatttgagactagtgtttttgtatattcctgattgtctgtgttttttttttttgccttttttttttttttttactttacctttgtaagtggatttgccagagtggtttttgttcgagtctcgtggttggtcactctgattgctactacataggtacgctttttttttgaatgtggagagggcagaagatgttttagctcataagagattgcttaagttggcggaggaccctgcttctcgacctgcatttcaagttcgcttagtacaggtatatccttttggtggtgcaaattatgctgattccatacatttagatccttctgagaacgaagatgcacagagttctcttaactattctttaaagcagggaattcatccaccacctacatttggttcatcctctaaccttgaagctcttgcacttcaaacaaccaaaaataacattgaagacgggggaagtgctatgagcgtaacaccttatttccggcccatgcacgagattaccttttcaacagttgacaagcctatgcaaactccaaccaaccaacttcttaattaataactgtcgtcgtttcaatctcgttacacatctcaaaacgcagcagcagcacactcgacttaaaatgcaagccgtttcactctcacctttgtcgtctagggattcttccgacgagttcgctggaaagttcgaacacgatttcgtggctaagctcaaaatcaacgaaaacgaaaacgaagagaagcataacgaagatgaggtagaagaagaggaagagtttagcttcgttctcacgaattccgatggatcgccgatctccgccgaagacgcgttcgacaacggccatattcgtccgatttttccgattttcaaccaggatcttctgttctccgacgattacaacggcggcgacggtctccggctgccgataaaggtcttcgtcgaacacgcggatgtttctccgtcgccgtcggaggcgacgacgccggcggaaggaacatactgcgagtggaatccgaaagcggcggtgaagagcaactcgacgggattctcgaagctgtggagtttccgagacgtgaagctgcggagcaacagcgacggaaaagacgcgttcgtgttcttgaaccacgcggcggttgagaaacctgcggaaaaagcgagcagcgtcgtcgtgaagaagattggcgttaaaaatggggaaacgaccacggacgaggtctctgcgcatgcgcatgagaacatgatgagatgaagttgagtaactgcaatacttggtgagatgggactgaatattcaagaagctcatgcattttccaccactgatggattttctctggatgtctttgttgttgagggatggcctaatgaagaacactgaggagcatgaaaggtgtgttggaaaaggaaattgttcaaggttaaggagcaaaatttgtcaaatcagggtatgacattatgctaccaacgaacaataccaggcaaggatggaaccctcccctcattgcattcaaataccatctgatggagctgatgtctgggagattgataccaaccagctgaaatatgaaaacaaagttggctctgggtcatttggtgacttgtacagaggtacatattgtagtcaagatgtggctatcaaagttcttaagcctgagcgcataagtacagatatgctgagggagtttgcacaggaagtttatatcatgaggaagattcgacacaagaatgttgttcagttcattggcgcatgtactaggcccccaaatctttgtattgttactgagtttatgtctaggggaagcttatatgactttctgcacaaacaaagaggtgtatttaagcttccatctttgctaaaagtagcaattgatgtttccaagggaatgaactatttgcaccaaaataatataattcacagggacctcaagactgccaatcttctgatggatgaaaatgaagtggtcaaggttgctgattttggggttgccagggtgcaaactcagtctggagtgatgacagctgaaactggaacataccgttggatggctcctgaggtcattgaacacaaaccatatgaccagaaggcagatgttttcagttttggaatagctctttgggagcttttaactggagaactgccttactcttgcctgaccccattacaagcagcagttggcgtggtgcagaagggcctgcggcctacaattcccaaaaatacgcacccaagactttctgaacttcttcagcggtgctggcaacaagatccaacgcaaagaccaaatttctctgaaataatagaaattcttcagcagatagcaaaagaggtcaatgatcacaaagataaatcatcccatggctttctctcagctcttagacgggcccatcattgatattgatataagagtattacgcgaaagtatagcctttttgtcctgtatagtagtcagactctgactaaatatctattgagttcgttgtttataatactcttgaaagattccgttgtattgtgtttgccttaaatttctgttacaatctgcgtctttctcccatttgtctatcaacttattcgcctgtgaataggatggatgcaagtttagtgaaagtcgaaaattgaaggtatcattcacccattaattctttggtaattgactattgtattccatgctttttgaatgggatctttttcggtgtactcccctgcacccaaacccctgaagttgactagtagaggcgttatatgatgagacctgagatgtacaaggtttatttgtaataaaattggtatgttattatgccatttgattcccaaagtattaaggcacaagtgtcatcgtgaagaaggggaaaacaagggaaacgacgacggcggcggcgtctgcgcacgagaagcattacattatgagcagagcgaggaaagagagcgataaacgcaagtcgtatttgccgtataagcaagatatgttcgggttcttcgccaacgccagtggattgagcagaaatgttcatccttattgagaatccgttaatttgattcagaaatttcatttatttgtatgtaaattaatgtttgaaattcatcaacctaactagggaattacctcttcctaatttgctatcatgtaattagattcgaggatgatgtcctagagttgaaatatttggatatatatttttttgtagatgaagatatccagac

SEQ ID NO: 129157 - DNA, 346 bp, Glycine max
  Clone ID: PAT_MRT3847_87634C.1
tacggctgcgagaagacgacagaagggggagaagtagagccaccacaaggttgggagtagttatctgagggaagagagcactgccatatttgattgcagccccacccgcaaaagaacccgccactagttttcccacgtacactaaatcctcctattttgcaccattcaaaaaagagtattaatttatatgatagctttggaaggaaattaatgtaataaataaaaaaagaaattgggtcgattgattgattttacttgagaagaagaggtgtaggtttgatgtgcggatgatttgtaggaacatgggcgtggttgggattgctggctaactctgggggacaatacc

SEQ ID NO: 129158 - DNA, 332 bp, Glycine max
  Clone ID: PAT_MRT3847_87635C.1
atgaataacagaggcaaagataacgttcaactaaataagcaagcgaggcaataaaatgtaggaaactgaactctaaccatgcaagtcaaacgtacgataaatgaacagacgttgaaaaggtcctaggcaaagccaaagactaactcatgggcatctaaaattacgacgaacaccaaggggtcatgcatatgccacattagtaactgcttgcaagcaatccagaactagcttgaacggcttgaccataggctcatggccccgatggagagcctgcagattgctggcactaacaaggacctgcacatgcgcatcctgaaccatgacattgatcc

SEQ ID NO: 129159 - DNA, 264 bp, Glycine max
  Clone ID: PAT_MRT3847_87636C.1
agggcttgggtcctttttgcacagaaaagaaaaccttttgccttaaatatactaatcaggatccccgtttttacaatgtaccacctctctcgcaaacaaataaccaccacacggtatcaaaattcaattaggacccccttgaaaattaaatcaggccacctttccagcatggaaacccacccccgcttcgaaaaagacatactccccaaaaaccattttcacagcaagcatcccccccatccaaaaaaaattttgtatccataa

SEQ ID NO: 129160 - DNA, 230 bp, Glycine max
  Clone ID: PAT_MRT3847_87637C.1
gcagaagccctaggagactggccagagcgagcacctcaacatcaaggtgaccgacaacaacaacgaggtcttcttcaagatcaagcgaaccaccacgctcggcaagctcatgaacgctttttgcgatcgtcagggcaagaatattaacagcgttcgcttgctgttcaatggccagcgtgtgaccgcacaagacaacccagatacgcttgacatgcaagatggcgatacac

SEQ ID NO: 129161 - DNA, 410 bp, Glycine max
  Clone ID: PAT_MRT3847_87638C.1
cttcagataaacacctatattgagacaaccttttacaagaactgtgacttgtaaccccataagagatccattaacgagggagctctatcaagaacatcccctatcccatcataacactcgttacgacttctaagaactacttgctttacctaacacacttcaaagataatacccacacgctgtacgactcctatggaatcacacaacattcgaccctctaaaaccattcctgaatacagcctataacctacaaaagactacattaatggccaacaatttacatcatactctaaaacagataaccaacaagctctcctttatgctagtgaactcaaagtccatcacatcgacatatctatactcagcatactatacacctcactctctaatatcccattctattaaaaaca

SEQ ID NO: 129162 - DNA, 359 bp, Glycine max
  Clone ID: PAT_MRT3847_87639C.1
gatacagggacctatacagcctaaatattgctcaagacggaatggtaacgtggctgaatggcaaactctctacaaacctgctacagattcaagtcgactatcgccgaacgaagtaaaccgaggtgtttacgagggacgtgagttgaccaactcgacagacaccacgcgtcacgcattcagaactagtagtatttttcagacacgtacgtgaaaagaagaagttacttgtcgatctcatcaaacttgagaacttttatgaatctacatgcgagaaagtcatgcacgatatgcaaaatgtccgtcaagttcaatgtccaacacaaaggtacatgtcaagtctgacataggtgtcatctatc

SEQ ID NO: 129163 - DNA, 720 bp, Glycine max
  Clone ID: PAT_MRT3847_8763C.1
ggcacaaatatattatactccaaataaaccgtctataatggaggagtcaggggaaaattggccttccgataattcttatctggtaattgaatccaacactacattatattatatgatcatagtatatatagcatatatatatatatatctaattaactctctcttgttcttgtacataggatgaggtcaacgatgaatttggtagtgaagatgaagagggaggttcattttctggaatgggcgagaccgacagaaagaagagaaagcgagaactcgcagagaggttccttgcactttcagccaccatacctggcttcaccaaggtcggtaccaaatttttttaaccaattacgtttattatatcttcctagctaatactttataaatcttttgaatattttgggatgaaaatatttaattaaaataaatatagttaatgtcataaaaacagaaaaataattttgtttattttataataactatattaaacatattttttaattaactaatattacaagacttctatattcacataattattcaccttaaaaaagtttaatacttggtctgtaaaaaagtaaaaaaatattcatacttaattatctattaatacaacattatatggagattaataattatagttaaaatacgtttttatttttttagtcttttaaaagtatgtctcttagaataaggtaaagtcttttctacattaactta

SEQ ID NO: 129164 - DNA, 465 bp, Glycine max
  unsure (1)..(465): unsure at all n locations
  Clone ID: PAT_MRT3847_87640C.1
cgtgaacagagaaagattgaagaagaaacagaagaagagaaggttttattttgcatggcaagtccaggtttataccgcagagtgctcccatctccttcaatcgagttcgcttcgccggaagggaagaagctgttcggtgaagcgcttgagcgaggaaccatgcaaggcttcttcaagctaatttcatactaccagacacagtcagagcctgcatactgtggcctcgccactctntccgttgtcctcaatgcccttgccattgaccctgaagggaatgggaagggtcttggaaaatggttgaccaagtcatggtggaatggctggaacccttggcccaaggttaaatgggaaggcttaaccgtcggtaaagtggcatgctgggctcgatgtaatggacctaaggtggaagccttcgatcgaatcaaagcttgttgatgattttcgcaaccgtgtgatttcgtgctc

SEQ ID NO: 129165 - DNA, 346 bp, Glycine max
  Clone ID: PAT_MRT3847_87641C.1
ctttgacagcgcgattatcacgaataaaaaaaggcattgttagcaagaaaagaagcaaacattattgtcgtgagtgcatgcctgagtaactgattgagtgagtgagcgagtgagtgtaacatatgtttctcgtttgagatttttccttaaaaatggaaaacctcatttacaccgtcttttacagacctttcaccaactacagatcctttcgtgaccacctccgccgacaccatgttcctcttccaccatctccaccaccatcgcaccgacgcctccttcgtcgtctgccttcgttttccctccttggtcctttctgccagttaatccgtcgatattgccccgcctg

SEQ ID NO: 129166 - DNA, 376 bp, Glycine max
  Clone ID: PAT_MRT3847_87642C.1
cccacgcgtccgcaacaaactgccattttttctcacagccaaaatcaattattactggaatcagagtaatatttaaatttgtgccttatatgaccacggcatatacaaattcttgaattaacacttaaaaaattgtggtctcgccgaacaagaacagatggaatgtatatgaagatgaggcttacatgctgatgttattgaaaagcgagctcatgaatctataatacatgccgctcatgaaagccttaagggtcaaactcctgttggcgtcattctgtattgaactaaaggcattaccggcgacagaatttatcatccttctacccagtgtagtaggcgatcttaaactccttactgatgggcagttgcttgaggg

SEQ ID NO: 129167 - DNA, 217 bp, Glycine max
  unsure (1)..(217): unsure at all n locations
  Clone ID: PAT_MRT3847_87643C.1
gttcctttaagccctttcttttgggggtgtgggngacaagcttggccatttgtgattcacccttcaatgggtcagaagacatctttttcccatgatcaaagacacattgggggaaagcctggcccttttttgcaccccctaatgtgccttgggaacaccaggactcattgacagggaaggttgtctttgattgttaaaaggggggtcccagccttct

SEQ ID NO: 129168 - DNA, 465 bp, Glycine max
  Clone ID: PAT_MRT3847_87644C.1
cacaccgcatatagcacgctcatcctagagtgctaaaatggcagcagcctcctccatggctctctcttgcgcaccttggctggcaaggccgggaagctgggcccatcagccaacgaaggcgcgagggtcagcatgaggaagaccgtcaccaagcaggcctgctccggaagcccatgttacggtctagaccgtgtcaagtacttgggcccattctatggcgagcccccgtcctacctaactgtcaagttcccaggtgactaccgctgctacactgctggagcttcggccgacccagaaacctgcaccagagaccgcgagctcgaactgatccactccaggtgggccatgctcggggccttgacctgcgtcttccctaaactgatgtcccacaaccgggtcaagtttggagacactgctaggatcagggccggatcccagatcttcaaccagggagggctggactac

SEQ ID NO: 129169 - DNA, 837 bp, Glycine max
  Clone ID: PAT_MRT3847_87645C.1
ggctcgagcccaccccccctccaccttctttcttctctctcatatatctgtctctctttaagcgcatcccatcatcaccctctcaatttctctctgcacgccttcatgccaaaccaaacattaaattaattttctactaccataccatcatattaattcataacactgaattttgttgctatagctagctagctccacatatgggtctcgaaatcctagacgaatttcggccaattatgcccatccgaacagttcctgttcctaaggttagaaccttcagccaaggctcggagctggtagaggcatcagcgaaggaggagatgctggtgcaagagtgccacacacccacgtcatcatcaaaagtggctcaaacgttgttggtttgtccaccacctccgaagaaaccacgagtgtccagaaggacttctcattctcattctcaagctggcttctttcaagtgccccacgatgatctcgcttctgtctttctgcttcggaccaaaccttccgttccgaggaagctctttgctagctagccacaaaatacttctcttcttcaccacacccaatggtatattaattattacatattatatataaataattaagccctagctacaatatttaggtttttcttttcgtatatgattccggtcattccctatgattattattataatctcttcttggagatatgttagcattcataggtactatcaatctccgaattttagctacatgtttaattagggggccgcttgagcattcgaaccaaccactggttggttttgttttatcttgtttttaagatatcattaataattttgttgctatttt

SEQ ID NO: 129170 - DNA, 324 bp, Glycine max
  Clone ID: PAT_MRT3847_87646C.1
ccacgcgtgcgcagatatttgctcctagaacatattaacggtgatcaggggactactgtgactagagcaccttcgagtacccatgtgcccctaacaaagcgtactatgggcgtggaccaatccaactatcatgtgagcttaactacggaccagcatggcagagcattgggatttgatggattgaacgctccagagactggggccattgaccctgttgtgttcttcaagacacccttgaggtactggatggaacatgtggtcgtgctgtcatccaaccagggcttttgggtgcatccattagagctatcaatgggcgacttgaat

SEQ ID NO: 129171 - DNA, 1197 bp, Glycine max
  unsure (1)..(1197): unsure at all n locations
  Clone ID: PAT_MRT3847_87647C.1
tttcgtctttgtttccgtctctattttccttctaaatctctggttgctgtggttcccaaaacccacttattggttcctctgcaggaatcaaagcatagtatattattgttttgaaacttgatgtttggcattgatgactgaaatccctctttccgagtttattaggtttatgataaactcctccttcaaacccaggacccactgggttcaatctttctccgtggcctccctctacgggtcctatgtttcctaatggacctccactttcccgtcacatgtcctgatggtttaaataaggggtaacctataagggctttgggctccggcatcagctaattgcaattgttaatggttagatttttgtgcacgactttttcttttctcatttctccttttatcaccgagccaatcttatgagtgtgtgatttgcaggttgtggtagacgagagaaagaagaagagaaaacaatcgaatcgcgaatcggcgagaagatctcggatgcgaaagcgtaagcacttggacgaactgacgaagcaggtttcacagctcgcaaagggcaacggcgaaatcctcggcaccatagacataaccacacagcattatctgaacgttgaggcagagaattcgattctgagggcccaaatggaggagcttagccaacggctccaatcgttaaacgacatcgtcgacggtatcatcaacctcaccaacgcaaccaccgcctacgaaagggactgttatctaacaagcgcacaaaatatcaccaccaagaacaacacgctctgtcttaaccaacaagccgtttttcagtggtgaattgtcaccctcgctctgcctttgtggatctgacaataaaaataataatttgttctcttggagttgcttcggggaggaatcaatcagtgaacaaaaaatgaaaagttaatgtgaattagtacagtacttagggtggggctatatatatgttaagtgggagattgatagataaacagaatttgtgcaaagtgcttaatgaaaatgacctggtggcctgcaactatatgtcaggcaggtcattagtactaatggatcactcttgtccaatatcatggaaaaagagatttcggtgcatgctactgtagtttactattctatcgtgtgcttgctttaatgctacagcacttagctcttcatttttgattttataatgnaaaaaaa

SEQ ID NO: 129172 - DNA, 878 bp, Glycine max
  unsure (1)..(878): unsure at all n locations
  Clone ID: PAT_MRT3847_87648C.1
tttctacgcgtccgcttccttaatctctttgttggcggtctctattttccttctaagtctctggttgctgtggttcccaaaacccacttattggttcctctgcaggaatcaaagcatagtatattattgttttgaaacttgatgtttggcattgatgactgaaatccctctttccgagtttattaggtttatgataaactcctccttcagacgcaggacccacttggttcaatctttctccgttgtcttcctctactggttctatgttttctcattgatctccactttcccgtcacatgttctgataggctcgagaaggtgtaaactattagtgtctctgggtcctgcggattatttgttcttcattttttttatatgtccatggcctcatcaagtggaaactcctccattagcacaaaatctcagagctctggctccgagggtgatttgcaggttgtggtagacgagagaaagaagaagagaaaacaatcgaatcgcgaatcggcgagaagatctcggatgcgaaagcgtaagcacttggacgaactgacgaagcaggtttcacagctcgcaaagggcaacggcgaaatcctcggcaccatagacataaccacacagcattatctgaacgttgaggcagagaattcgattctgagggcccaaatggaggagcttagccaacggctccaatcgttaaacgacatcgtcgacggtatcatcaacctcaccaacgcaaccaccgcctacgaaagggactgttatctaacatgcgcacaaaatatcaccaccaagaacaacacgctctgtcttaaccaacaangccgttttcagtggtgaattgtcaccctcgctctgcctttgtggatctgacaataaaa

SEQ ID NO: 129173 - DNA, 297 bp, Glycine max
  Clone ID: PAT_MRT3847_87649C.1
ccggaatgaccgaatcgatccatacgttcgtataacactacttaatgggccatgtaccaatttctttttcaaaaaatccctgggttaagggtatatggggtggcttttcacaatgatgtatcatttgcttcattttggggactaaactccctggctcgtgttttggaccctctaacttttataaattttccttttatttaaagttatttttaaacctttttttgtttaatatttttaccccaatgattatttttaaaccctgtttgttaatactacatttttttgatttttgatttt

SEQ ID NO: 129174 - DNA, 579 bp, Glycine max
  Clone ID: PAT_MRT3847_8764C.1
ttgccgtgctacatgtgaggacgtcctcctgcttgggggggggggggggggggggggggggggaagaaaacaggggaaaaaaaaaataataatagagacgctatttaagctaactttccttagtttttaggagaaaagcccagccaacatgatacaaaccttgaaaagactatgaatggaacaggaaggcttcggcaccttattgtggtacgtgtgaagagcagagtcgttagcgtctgcaaccaggcactaatgggttgaaggatgatacgaaagtcgtgatgtgcagggggctgggcaggggtggctatggcagctgtcacaatggcgatattgttttataaagggtacaagtgtcgtaaggacaagcattccaacgctaataattaaaattaaaacttatgtcggcaactgtacccctataagattaaagatggcgctgaacaagcctatcgataacagtaaaaacgctacattaaagcatatgcataggcttaaaacaacttaacccggcatttaaccccctaggcgtaaaacctggttagttgtacataccctaggcacacacggcaatagggt

SEQ ID NO: 129175 - DNA, 370 bp, Glycine max
  unsure (1)..(370): unsure at all n locations
  Clone ID: PAT_MRT3847_87650C.1
aatatctcctaataaagtcacattcattgccttattgaatgcttgtagtcatggctatatggttgaggaggggaaattatatttcagattgatggttagtgattatgcaattaccccagaaatagagcattatggatgcatggtagatctacttagtcgttctggtctcttgaaagaggctgaagacatgatttcaagtatgcctatggctccagatgttgcaatctggggagcactgttgaatgcgtgtagaatctataaagatatggagcggngatatagaataagcagggatcattaaagagcatggatcctaaccatataggctgtcatgttctattgggtaatatatattctacatctgggagat

SEQ ID NO: 129176 - DNA, 340 bp, Glycine max
  unsure (1)..(340): unsure at all n locations
  Clone ID: PAT_MRT3847_87651C.1
nnnnnnnnnnnaaggaaannnntnttttatcatattccatcaatnnttnntgggcgcagtgctattgctttatagatcagcacattgcattcgtatctgacgatgaatgaaaaaatgaccgcgtagcatctttactgatttctggccacaatacatggactcgatgatgggatacgcctctgtaaaaatacgtacttggccttgttccctagggtctacagtgactgccttttggcatcccatcccggtggttttaaaagcttagaacggcatctcttcccttcaaataatgttttcccacaagcccattggcatgtaaggctactttagccgatgccag

SEQ ID NO: 129177 - DNA, 385 bp, Glycine max
  Clone ID: PAT_MRT3847_87652C.1
gctcacgcttccatcatggagataggctggtaggagtgtgtctaggcgggaaactaaaactgaggcagctggtgtccgaacatcaattgtcaccaaactgcctatgtgactcaactgacgaggagcgagtgtcaactatttatgggcgactaaagctatcgaggcaccttgccctgccatgactattgaatgctccacacacgcttacctcccacggtactaacccggagaggattcttatgccctgtaagactgctgctgaggttcaccacgggaccggagatacccctacagatcgtggacataccgaacacttacatcccattgctgcaaaggcaccgggaggaacaagcccattaggtcaggccaacgcatttggagtcac

SEQ ID NO: 129178 - DNA, 199 bp, Glycine max
  Clone ID: PAT_MRT3847_87653C.1
caaccactggagagagagacataccctccgacatatgctctatgctccaagcacactctgcgagtcagatctctctacatctctctctaggggtaccggttctctccatgctatttatgagcactataagacgcgctgctgtcaccaaaacaagagctaacgactgtatcactaatattcctgttggagggctttgggc

SEQ ID NO: 129179 - DNA, 591 bp, Glycine max
  Clone ID: PAT_MRT3847_87654C.1
atgtcttactggtgtctccattgttaatgacacagagtgcaccatccacatatacaagcgagacgcaataatttcctttaatgatgaagattggcagggcgtaatatcaaatctaagacccagtgacaatgtggagatttttgtagttcttggtcatggattgacggttgtgaagacagctctctatctaatatatgatgatgagtcaatcactgtgaaaatggagccatcacctaatgtgataatggagtcatcgtctaacatgaaaacagatccatcacctaatgttaaaatggagccattatctaacatgaaatcagagccatccatgaagccaaagaaaaatatttttgctagacttatacagagaatgggagaatgtacatgcatgaggtgaaatagaggcttcaacaattttttactaggtctgccaatgccattgtcattgtgtatcattcccttgttttccatgcaagcactaataaggttgcaaaactgatgtttatttcaattaataagtttctgaaaatctatttaagacttcgtttccagaccttttctcattgcttgaaaagacatggtgttgtgatg

SEQ ID NO: 129180 - DNA, 134 bp, Glycine max
  Clone ID: PAT_MRT3847_87655C.1
ctatatgttgaggtctactcaccatacaactgtgcgcaatttgccagccacggtctcgtactcactctgaactctctctcatccatcaattcctaactgccttacgttgataccacatcatatcatactcatat

SEQ ID NO: 129181 - DNA, 1340 bp, Glycine max
  Clone ID: PAT_MRT3847_87656C.1
aaaaatgaaccaaaaacaaaaatgtagtagcattttacttagttggacaagaaaattgaaatggattgagaatacaacagaaaaggcctacttagcctgaattacagaaaatatacaacaatcattataaaaaaccctaaggcaatccctcaaccccgaagaaggtagtaacttccctcctcctttttctattctttaagactacatccatctgcaataataaagcttgccccacaatattatgttagaaacctaaacatctctagtagaggcaatggagatgagaagataaatgattcaaagagaaaaaaaaagtagttcaggttttatcagtaaattagcaagcaaagagaccattacaatgacaatgaaggtgacattatctgcataaaaattatccttcccaaattcagaattccttgtccctaataagattatcaagtaacaaccataaaactgtttcccttcagcccttatcaaagtctggctcatatattctgcaactgggaaaaggagatgcgaacaaccgatccagaaagtgggcttgcatgcttgcacacaagggcttcagtagcctgctcctcagtctcaaactgaacaagtgcctgcttttttccattcatctcaaagaccttgctgttgacaatggttccatgctcctccaaaaggctcacaatctcctcttcggttatgtcttgcgggagggtggacaagtggatcatctttgttggagagcagcaataccggtagttcttagcagcattacgattgaatcgattgagatttgaattggcgtactcgtgtgtatcagcaccttgggttatgtttgcatgctttgaatagttgacctccaatcgctttccaaacaacatggctcccttcagaaaatgtactgccaattcagcttgaaaaccatctcccatctggataagtgcatgatctggcttatttcggagaagtttaattctgacaatgttcccataaatggagaacaagttgaacattttatcctcatctattctatcaggattgagatttgcaacaagaactgtacacctttcatttgttccagttatgccagaaggcaaacctcccccaaaggcagctgcaattgccgcagcattggccatctgagagaacccacctgccctggctccagaatacatgcctgttgcatcaccatatccaggttgtgaagatcgacctttctgctctgtaggcagattagggtttgtgaagtcccttgaacgatcattattgtagttcacttgtagttcatcaaggtttgagaactgaatgtccagctgacaacaaccatcataaatattcggacggcgtgg

SEQ ID NO: 129182 - DNA, 647 bp, Glycine max
  Clone ID: PAT_MRT3847_87657C.1
cggtccggacctcccgggtcgacccacgcgtccggcgaactctgggagtgctttcgcagttttcactcactgttcagtagtagggtttttctttatccctttttcttctctcttctctctttcaccacttcaacacaacgctcatatttcattcattttcgtgaaggcgcaaacgatttcagttaaagagagaaactcggggaagagagatagagagagtcagcgattgatcatacatggatacgcacgcggtgcatttggccctggcggcgctcgtcggagcctccgtcgtggccgtgtcggcgtactacatgcaccgcaagacgctggcgcagctgctggagttcgcgcgtacggtcgagagggaggctgacgccggcggctccgacgctgaatcgccgccggcccacgcgaagaagcgccggggcagctccaggaagcgccgcaacggcggataccgccggggctccgcgtcgctgccggacgtcacggcgatctctggcgggttcgacggggacgagaagcggaacgggccggtgcacgtcgaggggattccggcggggctgccaaggttgcacacgctccgggaaggaaaatcatcccaatctgggtcctttaagagaagtcttttaagaccaacttctccc

SEQ ID NO: 129183 - DNA, 257 bp, Glycine max
  Clone ID: PAT_MRT3847_87658C.1
tatcagtggtggttgcatcatcgagtccggtttcacactgttcaaacataccggtggtggtggccatataggaggacattccttacatcaagtgtcaagcgtagtataagctctctaaagagttgcatcagcaggttcaattcaatctatctgatatcgctcccaaaaatatctcggtataccaaatcattgatatatctcataatgttttttatcatacaaaggtctattctgtttgtatattcggcatatgatat

SEQ ID NO: 129184 - DNA, 569 bp, Glycine max
  Clone ID: PAT_MRT3847_87659C.1
aaaaaaaaaaagggttggaatttcatttaaaaaaaaatcccctttgggaaaatttagttaaaaatcccgattaaaaaatttgggggaaaaaaaacgttttgtctttgaacaataaaaatttttcgcaggccccgggaaattgagggggggggaaaacccccctaatttagggccccccaaacgaccgggtataaaaaaagggaaaggcccttttccgggggggaaagcaaggggggggccaaccctggggggtaaaaggggagaggcccgggcccaagttattataaaatcttttcccgctttgggggaaagttaatttatttttcttaaaaaaggatcccccccaaaagggtttttttttagggaacggggcacagtaaattacccctttttttgggaaagacaaaaaaacaatttctattttctctcctttttgggccgccgccgaaaaatcaaattacccctatttttcttcctttttcaacctcttctcccaggggcgggaaaaccccaggggggggggggtttttttctaccaatgggggccctcccttcaccacccccggggg

SEQ ID NO: 129185 - DNA, 339 bp, Glycine max
  Clone ID: PAT_MRT3847_8765C.1
gtacattaaggcaactaatgtccctatgaacaatcttcaatatcgaaaagtcgccggagtccgccggacacgctccgatgaagagggcaaccaaggaagtagctcccgcaacggtggccgatgccgggatcacggtccacactagtctaagaggggccggaagaatgaaaaatcaggcgattataaaggtgacaagggtgattccgaagtaggagccgaaaggagcgatagtgtctaccgacgaactatacggaggagttcctgatgaggaacgggcacgccagccgagcgagaacggatgccggacggatgagagaggtctatgatcccttgggagct

SEQ ID NO: 129186 - DNA, 214 bp, Glycine max
  Clone ID: PAT_MRT3847_87660C.1
gctcgagatagtttacaaatcaacacagaaatttttctcattaaaatatcctaaatcaacagagattagaccactcgacagacacacacacattttataaatctttacaactcactcatttttaaaatagaataaatatattatcaaatatcttattatctattcaaataataaaaaatcaaattcaatctctatttatcctattacaaattaa

SEQ ID NO: 129187 - DNA, 370 bp, Glycine max
  Clone ID: PAT_MRT3847_87661C.1
acgcgaggatggtggcagatgctgacgtgacggagactgaggctgctgagacggccgaggtggctcgagacgagccgatgtgacggtgggcgtcagagagaagagcatacttctccggtgtccagacgagtatacttgtacacgtccggactatatctatgcttgcggaccttcacctatctacaagtcagctcacattgtgaaagcaccattcatgatgaatcatgacctaatatgcatcaaaggataaaggcaatctctatgttgagccagatgaaacatctatcttcctgactaagctctttgaacaaaagtctgaacgtgtcatgtttatgctacaacgcttatgactcacatcaaggtgaatgta

SEQ ID NO: 129188 - DNA, 256 bp, Glycine max
  unsure (1)..(256): unsure at all n locations
  Clone ID: PAT_MRT3847_87662C.1
gatcatctagctgaattggttaaacananaatatctganttattataaaaaatttatattattttcgatttctactncattagaaaaacnttntgacaagtagcgggacaacattgaaaatgggcaatgatggtcgtntnttgaagcggggaggccaagtaaaacatcctcttatggttgcgtctcgttnctctcctcnnccactgtcttttcccctgccttcctctgttccatctttgnnttgaaaccatgtcag

SEQ ID NO: 129189 - DNA, 490 bp, Glycine max
  Clone ID: PAT_MRT3847_87663C.1
tttacaatccaaatgaagaaataattaattaaatgcatttaaatatttaaattattatatacaataaagcagatgaaattttgaagaagctccactgctaagcgaaggctttgatattctgtcaggaatgagatggatcctacaacaattttacctttagctgcaacaattacccacaaaacactgcctagcagtcttgttgaacctctcctttcgaattccattactcatctttaaattcaacaaatatgatggttacgagaaattctgagataaatcagctattactttcataccacttgttgaataagtaaactaaacttttaaagactatacctatagtatgcatgcaataatttcggattgcaacaacttggggatcaggttaatcttgatgccggcagcaagaaccttcatctataagcattgaagtttggactaggtgctgcatgtgtagcctttcatagtagcaagtccagtgtcaacacta

SEQ ID NO: 129190 - DNA, 414 bp, Glycine max
  Clone ID: PAT_MRT3847_87664C.1
aataggtataagccgagattcataattcaaattagccgaactttatacagaagcgaccaatttccaaacattaaaaaaaaaaaaaggggagccaccatgagcttaacacacccattacaaggccaaaacacttgaacttgctggaagggaagacatgacccctttattttaagggggtttggttaacacaaaacaccagagtgcccgaaaaccatgccaggcataatgcataagtttttagctccacattaatgggttatcattattcctaaataagggctatctttgtttgaagttggtcttcccaaacctcacttgccagggccggggttgcaggaacaatttggtccacatttgcaggcagtgtttttagcgggcacacccatttcagccccctcaaattgagccttaaca

SEQ ID NO: 129191 - DNA, 273 bp, Glycine max
  unsure (1)..(273): unsure at all n locations
  Clone ID: PAT_MRT3847_87665C.1
ttttaatcactcattcaaacttatatctattgtatacacggtatatattgagctaggcttatgcaatgtgctgatcaaagtgtgtggcgtgaaatcagcgggagaatgtgaagacgtttgttaacaggatgtnnnnnncagctctgcgttagttacatgaaatataggagggtgagacaatgtgaatctctgcaatgagagangtgcgnnacataaaataaaccagccatctattaagtaaacattactttataaatatatatatatatatat

SEQ ID NO: 129192 - DNA, 550 bp, Glycine max
  Clone ID: PAT_MRT3847_87666C.1
acggggcacattttaaaacatttttcacatttttacggggtcataaaccaattttctaagcataaacaaatccaattccaaaatttggaaaactgggaaaacaacaacataacataaaccttttaaccccccccccaacttttgattaccggtacattaatgggaactcaacccataaaaatgaagcaatttcccctccattttctaatttggggcccccataaccataataatagggggaaagggctccctcaatttcacaccatttttgcaaaaggggagggaaatttcaggggaccaaaattaccgggcaaaaggggcaggggctgatgcaataatggcctttgacacctaaaaaacagggccaggggcagctcctgagctcacaagttcaaccatggccccacaagggttggtcttgtgcttttcacacagttctggcaaaaataccccctctccaacagccaagttgaaaaaaaggtcaacaatggtggggcccttttgggaacatgcaggaaaacaaagcttgcccgggaattggggctcaaaa

SEQ ID NO: 129193 - DNA, 548 bp, Glycine max
  unsure (1)..(548): unsure at all n locations
  Clone ID: PAT_MRT3847_87667C.1
gctgatatagctcagtgangaaatccagagcgangacttcgcatgcacgcctatcttagtctcggattctgctcacgatgcgagtgaaaacaaagtcttgcccttctgtattcaactccgaacactaggacagtgatcatgcatggctgcctccgcctcaactggcggtgctgtgaacagagctcttttgaacctgattgcgcttgggccgggggtttcagcttccagttcatccttctttgggagcagattgaagaaggttattggctcgagggtccccaacacaaagatttcctctggaagcctcaagattgttgctgtcccagagacgagagagattgtagagaccccgcggaccgacaaggacagatggaagggtcttgcctatgatatctcagacgacccgcaggacatcacaagaggaaaggggttgggttgactccctttttccaaggtccacaggacgctggaactccctatctgtcatgagcttcttcgagtacctttcaatggacttcttccgtacttggacaacaacaggggtggat

SEQ ID NO: 129194 - DNA, 427 bp, Glycine max
  unsure (1)..(427): unsure at all n locations
  Clone ID: PAT_MRT3847_87668C.1
tttttttttttttttttttttatganataaacgtgtgtccaaacacacaccaagtaaaatatgtttaacggtaggagtnaaccaaattacaaaacagtaaaacaanatttcgtgcnccttgtccacaattgcatgtccaaatacacactataagtnaaatatgtttaacagtaggagtnaaacaaattacaaaacacagaaacaanttttccttgttctccttgcccacatggctaaanantctgaactagtaanaaatgtnacaaattatgcaggaaaaaatagcaaaatgattcnatggcctgtttatattattgangacatttatcccaatcccaacacanaaattggtgaatttcccattaagttccactccncagcatgcagcatantcggcaaaantancactttcccattcctggcctta

SEQ ID NO: 129195 - DNA, 126 bp, Glycine max
  Clone ID: PAT_MRT3847_87669C.1
gggtaaagtctttttagaactatttgctccccacagaagataaatacacaccttagtttctatagtcaacacataaggtgcccacaggaactttaaacataaagctgggaaattaccaagcaagcg

SEQ ID NO: 129196 - DNA, 619 bp, Glycine max
  unsure (1)..(619): unsure at all n locations
  Clone ID: PAT_MRT3847_8766C.1
gctcctaccagctaatcctgatattttagagggtgttgaagatcttatacagctcagttatttaaatgagccctcagttcttcacaatcttcagtctagatactctcaaggatatgatttacagtaaatcagggccaattttaattgcactcaatccgttcaaagatgttcagatttatggagacgattatatttcagcttataggcagaaacttatggataagcctcatgtttatgctatggcagatgccgcttataatgagatgatgaagagatgaagtgaatcagtcctttattcttaagtggtgaagaagtggaatctgggaaaaacagaaacagcaaaaattgctatgcaataacttaactgctcttggtggtggctgttctggaataaaaaaatgaaattcttcagacaaattttaatactaaaagcttttgggaatgcaaaaacatctaggaatgacaactctagcagatttgggaagttgattgaaattcatttcagcgcgatggggaaaatttgtggngcaatagttcaaacttttctgttagaaaagtctagagntgttcaacttgcattgngtgagaagtcatatcacatattttatcaactttgtgc

SEQ ID NO: 129197 - DNA, 464 bp, Glycine max
  Clone ID: PAT_MRT3847_87670C.1
atgctctctgtagttatgactattctggatatgggcagtcgtctggaaaggtaagcatattggttttttttttatttctgttgagtgatggtgctgattatgattatatttagcattttagtttgtgtattctacaagatgaatgtttatttttatataattaaataaaacttataataaataaatattgttaatatagaaatatcatagttaaaattcatattaattatcggtaaatataatgttattgataatttcacttgaaaaattattgaaaatttaatttagaaatagaaataaatgatgatagattaaaaaggatatgcagtaaagaaaatcaagtatataaatagagatataaggatagcagtttgagatggtcggaataattttcttggctagttgtagaagtagtgctcatccaatgggaataaataagatagagaatatttgaaatgtctaat

SEQ ID NO: 129198 - DNA, 654 bp, Glycine max
  Clone ID: PAT_MRT3847_87671C.1
aaaagtgacaaggttttaggtttctgcttatgtttatttatttccattattttgtattttaccaatcatgtattttttattattaatgtggtggctacttgtaggcccaaagagagtgctaatttgtcaataaaaaaaaaaaaaaaaaaaaaaaaaaaaaaaaaaaaaaaaaaaaaaaaaaaaaaaaaaaaaaaaaaaaaaaaaaaaaaaaaaaaaaaaaaaaaaaaaaaaaaaaaaaaaaaaaaaaaaaaaaaaaaaaaaaaaaaaaaaaaaaaaaaaaaaaaataaaaaaaaggggggggggttttaaagaaaccaattttttatgcccgggttgcggaaaaaaattttttttttagggggccccaaaaataaaacccggggccggttttttaaacccgtgggaggggaaaaacccgggggatacccaatttaaatcctttggaaaaaaccccttttttcccaggggggaaaaaaaaaaaaaggccccccccataccctttttcaaaaatgtggccccccttaaaggggaatggggcccccccttttgaagggccaataatgggggggggggggtgggttttccccaaagggtcccttttattttttcgggctctttaccccccttctttatggttttttcccccttctttt

SEQ ID NO: 129199 - DNA, 206 bp, Glycine max
  Clone ID: PAT_MRT3847_87672C.1
cccacacatccgttgcattatatctacctggggcaaggatagttaaacatgacttcgccacattatcaatgttattgtgactcctatttatcctctaatgcactgctgtgactataattaggatctctagacccacattaatcatataaagaacaagttgcaaatcatgccctttatttcagattaatgaatatccatgcgtcgcc

SEQ ID NO: 129200 - DNA, 500 bp, Glycine max
  Clone ID: PAT_MRT3847_87673C.1
ctccagccgaatcggatcgatgcaagctcatactacagttttaaaaatggcacaagcctcctccatggctctctctctcacatgcttggctggcatggccgcgaatctgggcccatcagccccgaaagtcggtagggtcatcatgaggaagaccgtgaccaagcaggccttctccggaagcccatggaacaaggccataccgcgtcaagtacttgggcccattctctggagagcccacgtcctacctcactggcgagttcccaggtgactacaagatgctacactgctgggcttttggccgacccacaaaccttattcagaaaccgcgagctcaaagtgatccactcgaagtgggccatgctaagcgccttgagatgagcattacccaaactatcgtcccgcaccgggggcaagtttggagaagctgagtggatcaaggccgggtctcatatcttaagatagggtgggctggactacttgggcaaaccaagccttgtcca

SEQ ID NO: 129201 - DNA, 495 bp, Glycine max
  Clone ID: PAT_MRT3847_87674C.1
gtgggtgtttttttttttttttttttttttacttttttatttattttttgtttctttttttttgttcaaacccaggaacaagggtgttttcctttagttttaatgcaataagattgaaattaaaattagctcctaagttccaaaaaacccctttgctcttaaaacttgggggaatcttaaatccccttttattttttttttttttggttaaaaccgagttaaccaaccgccaaattgttgcctttgccccttttcctggtgaggcaataaaaaccttcaatccttactggtggtgggggggaaacaaactttattcttacacattcttttttttaagaaatatgggaagggggtgcccaggaaaaagaaccaaaactttcttttcccttatttccaaattggttattttggaacacaaggtttcaaaccccccttggtggaaacccccaaaaaaatgggggggtataagcccctttcccccccaattttttgggg

SEQ ID NO: 129202 - DNA, 285 bp, Glycine max
  unsure (1)..(285): unsure at all n locations
  Clone ID: PAT_MRT3847_87675C.1
gaggccaggcaagccncantcaaccaccacacttctcnttcgttnacgctacccctttctgntcttnttctacctttcaagttttaaaagtataaagatggcagaganattcctatttactcagagtnggtgaacgagggncaccctgacaaggtctgcgaccaaatctncggtgctgnccnncangcttgcctcgagnaggacccagncaggaaagtgnctgcggaacatgnacgaaaanccaanttggncatggtcttcggagaaatnacgaccaangncaac

SEQ ID NO: 129203 - DNA, 688 bp, Glycine max
  Clone ID: PAT_MRT3847_87676C.1
gtgagatcgtagggccatggtgttgcttctgcttctgcctcaaagaaagacaagtctcaggtgaaaataatgccccagccctcactgcttaatttctgtgtcaccactccaacaacaacagctccttttactacaaccactgttgttgtacctcccatcactactacctcctctactactgttccatcccccctcatgcatcaacttcaaggtattggagatccaggtggtgcggcgagatcaatggtgttcattaacgatgtggcattcgaggtggctttggggcccttcaatgtgcgtgaagcctttggagatgatgctgtgctcatccatgccagcactggtcaacctgtgctaacaaaccaatggggtctcactcttcattcactccagcatggcgcttgttattatttgatataggaagtataaagctgaagaatgatgatgaatgcgaggttctctgtcttttttttctccttatctatatctacgtatgtttactattagggttattagataggggtttgtagacaccgctaattatgagaatgacttaagatatgctctgtgttgttcaagtaatagtatgggatattatgactttgttgaccagatcatatgcaacttttctccttaaattagtttaaagcaaattaatgatcgtattatgccatacctatatgatatg

SEQ ID NO: 129204 - DNA, 2164 bp, Glycine max
  Clone ID: PAT_MRT3847_87677C.1
ccacgcgtccggagacccccattattaaaacactgctagcactcccaagtgaggaagaaaaaaaaaaaaaaaaagcccttgctttctcacaaagaaattgtgctaaaagaaagagacaaagtgatcagagccccaccccttccccttttccctagcattaagagcctttttttcttctcttccctgtgccatctctgagacaacaagattcctaattaagtccccagcatgtattcctttccatgttccatttgcttctcgtccggggggaatttccttgtactttaaagaacctctctctccacacacacacacacacataacacaacctaaccctttttttttcttcacactattaatgcaaaagttgtgtgtatatatgcaaaagctatagctacaaacatagcaggggatgggagacatatgatgtcaagatgttactagtatttacattatgatcgataagatgggtgagatgcacagttacttacacggagagggtagtagggtacgtgaagctgaagaggctatataagaaggcacacgttatgctggttcagttcagaccgaaaagcaacagcaacaaaaagttctgatactagcttctagatcattgttgttttttgatatctatcaaactttcagttcagtaatttcccatcatcaccatcatggcttcttctaatagacactggccaagcatgttcaagtccaagccctgcagccctcaccaccaatggcagcatgacatcaacgcctccctcatctccactagctgccacagaagcccttactcttcaggaggtggtggttgtgaagagagaagtccagagccaaagccaaggtggaaccctaaacctgagcaaatcagaatactggaggctatattcaactctggaatggtgaatcctccgagggatgagataaggaagataagggcacagttgcaagagtatggcgtccggggtgatgccaatgtcttctattggttccagaatcgcaagtcaaggagcaaacacaaacttcgccatctccaaaactcatcatcaaagaacatgaaccaccatcaccacatgaatgttgatcaacaaaatcatacaattcccactaattcttctctccctcaaaccactactactgcaccctcttcctcgtcatcttcatcgtctgagaaatcttccccaaaagaacttataatacctaccaccaaggtgttctccattggattctccgatgcggtgcctaattctccaacagcttctgtaaaccagacccggattaatgacatcatgcttccaccaccaccaccagttgaggctttcttcttcccagtgcaacaacaacatgatgtgcatcatggagtaacatcatcatcacaagggttttgcttctctgagctgtccaatgttgttcatgctcaacagaacaacgttggcccttgcactagcctcttgcttagtgagatcgtaggtcatggtgctgcttctgctggtgcctcaaagaaagacaagtctcagatgaaaataatgcaccagccctcactgcttaatttctgtgtcactactccaacaacagcaacaacatcaactcctactactaccaccactgttgttgtacctcccatcactactacctctactactgtttcatcccccctcatgcctcagcttcaaggtattggagatccaggtggtgcggcgagatcaacggtgttcattaacgatgtggcattcgaggtagctgtgggacccttcaacgtgcgtgaagcttttggagatgatgttgtgctcatccatgccagcagtggtcaacctgtgctaacaaaccaatggggtctcactcttcattcactccagcatggcgcatgttattatttgatataggaagtggaaagctaaagaatgatgatgatgatgatgaatgcgaggttctctgtcttgttttttttttccttctttttctcatctatatctacgtgtgtttactattagggtaccggttattagataggggtttgtagaccccgctaattatgagaatgactaaagatatgctctatgttgtttaagtaatagtatgggaaattatgactttcttgcccccaaaaaaaaaaaaaaaaaaaaaaaaaaaaaaaaaaaaaaaaaaaaaaaaaaaaaaaaaaaag

SEQ ID NO: 129205 - DNA, 1234 bp, Glycine max
  Clone ID: PAT_MRT3847_87678C.1
aggtccggaattccgacgacaacccacgcgtccggcaggcccagccccctgtacaccaaattcaatttcttttttcccctttctctaacacacacactagccctcttgttttctttcttcttcaacataacatgcactgcacaattgcctcatgaatcatcattagtcagggtttatcctctaagaaaataaacatactatagcaatgagtgcgtccaggttcatcaagtgtgtcactgtgggtgacggtgccgttggcaagacttgcatgctcatctcctacaccagcaacacttttcctacggactacgtgccaactgtctttgacaatttcagtgcaaatgtcgttgtggatggaagcactgtgaatcttgggttgtgggatactgctggccaagaagattacaatagattgagacccttaagctatcgtggagcagatgtattcctgcttgctttctctctcataagcagggccagctatgaaaatgttgccaagaaatggattcctgagttgaggcattatgctcctggtgttccaattattcttgttggaacaaaacttgatcttcgggatgataagcagttctttcaagaccatcctggtgcagtgcctatcaccacagcacagggtgaggaactgagaaagcttatcggtgctccaatttacattgaatgtagttcaaaaacacaacagaatgtgaaggctgtttttgatgcagccatcaaggtagttctccagcccccaaagcagaagaaaaagaagagaaaggggcaaaaggcctgttccattttgtgatcttcagttcttaatatagtagttcgtggaggatgacatgactgtagtcttcatcattctatatcttatactatttccaacctagatgaaggaatcaccatgtccaactgaccgcatcaaggttcgctcataagcatcgagctatctgtctaattgtctctggctgtaggatctgtacagtcgtaatttcaatatgtttggtgtgcacacaacacttgcgttactgttggctgtttacctgttgtattgattattaaatgaccatttccagcagtggacgcgggttgtattcatgttgtaatctaatctaggaagtgcttgcatatgtggctttggatgtgaactaagtatatgtaattaattatgttagctgcttttaacagcttggatatatagttggcttgattaagaaaaaaaagaaaaaaaaaaaagaaa

SEQ ID NO: 129206 - DNA, 248 bp, Glycine max
  Clone ID: PAT_MRT3847_87679C.1
gcttcaacatgggtggagtcattggtggtttgattcctttcatctagaactaccatcgtagtgaggctgcttcagtcaacgatggaacctacataggcttcatgtgcttcatgtcactggggacccttttgtcattagccatcttgcctgcatgcaaggttgttcgtgatgattgtagcaggtgcaccaacatgttttacaccgatgtttccaccgagtgtgtggaggttctcaagttgttttccaat

SEQ ID NO: 129207 - DNA, 286 bp, Glycine max
  Clone ID: PAT_MRT3847_8767C.1
tccaacgacaaaccctgcaacaggcgtaagagtactcagcataaattgggcctttggaggcatgatttttgtcctcatctattgcaccgccggcatatcagggggacacataaacccggcggtgacgttcgggttgtctttggcgaggaaggtgtcgctgacaagagctgttgtgtacatggtgtctcaagtgttgggggccataaatgcggtggtgctcctgatagctttcctgagaacctactactttcgctcggaggggaatgagatggtggctgacagtacg

SEQ ID NO: 129208 - DNA, 391 bp, Glycine max
  Clone ID: PAT_MRT3847_87680C.1
ctttttttttttttttggatgcagcaagttcaaccgttcatatttggaaatcaaatggactacagaaatgtattcaaaaggatgtccttcaaatttgaaattgtcattatctctgcctttccagtaaaattttaatcttaaatggcaaggaaatgacctaaaggactctttcccccgggaacatttttttgggatccccgtttataaaagagaaaaaccccccctttttataaaaaaaggcggggggggaaaaaagaatatttttttattttttggggggggggttttttttttaaaaaaaaaaccaccccctcccttttttttttttttctaaaaaaaaaagcctctcccctctttaaaaaaaaaaaaagaggggggccccccctccacc

SEQ ID NO: 129209 - DNA, 1928 bp, Glycine max
  Clone ID: PAT_MRT3847_87681C.1
attctttccctttgacaactgcaatctaaggtagatcatatgatattatataactaattagattattcttagattcatatataaggatcgttcacttagagcggaatttatgaaagttttcttagttaattgattttttgacatgcaacgggatattctcggacgaaaaatggagggcaaaaatgtccgcacccatttgacaacaagacaattagaactctagttaatccattaactccttgcacacccttgagaaagaaaaaggaaatgggttctctggaagcaatcaacaagccccatgccgtgtgcgttccattccctgcacaaggccatataaacccaatgctgaaactagcaaaactccttcacttcaaaggctttcacataacctttgtcaacactgagtacaaccacaaacgccttctcaaagcgagaggccctgattcccttaatggtctctcttcatttcgttttgagaccctcgccgacgggcttccccagcctgacattgaaggcacacagcacgtgccttcgctctgtgactacaccaaaagaacttgcttgccgcacttcaggaacctcctttccaagctcaatgattccccggatgtcccttctgtgagttgtgttgtttctgatggcatcatgagcttcactttggatgctgcccaagaacttggcgtaccaaacgtcttgttttggaccaccagtgcttgtggattcatgtgctacgtacaataccagcaacttgttgaaagggaccttacaccgctcaaagatgctagttatctcacaaatgggtatttggagactagcattgattggatacccggcatcaaggaaattcgactgaaggatatccctaccttcattagaaccacagatccagatgatatcatgcttaatttcgcacgtggcgagtgcataagagcacagaaagcttctgcaataattttgaacacatttgatgccttagagcacgatatcttggaagctttctcaaccattttgccacctgtgtattccatcggccctttaaattttctcttgaatgaggtcaaggataaggacttgaatgcaatcgggtccaacttatggaaggaggagccagggtgtttggaatggctcgacacaaaagaagtcaacacagtggtttatgtgaactttggaagcgtcacggttatgacaaatgaccaattgattgagtttgcatggggacttgccgccagcaacaaaaccttcgtgtgggttataagaccagatcttgtgattggtgaaaacgctattttacctaaagagtttgtggcacaaacgaaaaatagaggcctattgtctagttggtgtccccaagagcaagtgttggctcatccagcaattggggggtttttgacacacaacggctggaattcaacgttggaaagtgtgtgtggaggtgttccaatgatatgttggcctttttttgcagagcaacataccaattgtcggttctgttgcaaggagtgggggattgggttggagattgaggatattgagaggggcaaaatagagagccttgtgagggagttgatggatggtgaaaagggtaaagagatgaaaaagaaagctttggagtggaaaagattggcaaaagtggcagcttctagtccaagtgggtactcgttggttcaatttgagaaaatgattcgtgaagttcttatagcattttgaacgggtttttccaaggatttcttaagaaaaaaaatgtttctttttaggttttttttcccattgaaacatatctatgtgataaagaaaaatttcttaaaaataaaatttatatctttggtaagaaaatgctcaatggcatgaattcgttcatgtagtagtgtaatgattttaaaactattctaaatctattgaaataaaggtataatatctttttagttttt

SEQ ID NO: 129210 - DNA, 361 bp, Glycine max
  Clone ID: PAT_MRT3847_87682C.1
ggtaggaacacattctataacagattattatttcttaaaatttatctgaaactacaaaatcataaccgagactcattcaatatagagtgaaacctacaaaattcttaataagttttaggcattaataatgtgttttgctagcatttttctgatttcaaataatttaatcttagaagttagaacatcctaggaatctaacttggtttgtgtagaattagaacattatgctgttgattaagggctaacaatggaatgattttctctgtctttggattctgcagcaactatctctaaaagggtttgctggagacacagccaaggctcatgcaaagacaagtatgatagcaggagagggagtgag

SEQ ID NO: 129211 - DNA, 450 bp, Glycine max
  unsure (1)..(450): unsure at all n locations
  Clone ID: PAT_MRT3847_87683C.1
agcaagcataattgagtacgcaggagaacaccctggaccaattgtgggttatgggttgtgcacatcgatatggaattgaaaaccagttaccccaattcgtgcttggcatgagttttcttttgtgtctatgaagtatagggaatgataaaggcaattataattgtcacagcttccacttcttaattattgactgaggatatccttaattagtccacacactggtagtggtagccttatgaagtcaaaggctatgtttggaagttaggttttagagggaaatggaacggagggcaaatattttatttttaaattaagatagttttataatacttataaaaataaataaaagattatgttaatctatcactttattttgtttattttaaaaaattattaaattagagtatattagggaagaagaatttgtnctctncagaaaacttaacccct

SEQ ID NO: 129212 - DNA, 486 bp, Glycine max
  Clone ID: PAT_MRT3847_87684C.1
aattcggctcggctcgagcggctcgagacggctgagaagacgacagaagggtatgacaacaatgtagcaattcccgattcttacatcattgatatttgataccactccaataacaaaacaaatcagcttgaaaatgtctacatacacagttaaacaaggatttaatgctttgtaacatgtattatcttctatatcaatatttctaaaggaagaagttccaccataaataactaaaggtcattagcagatcaggcacaaccacacatttagtatctttctatacaattcacactacaaaataatgtaaatttaagccctcagttcaggcttctagaacagatgaaataagagaaactcgcctgaaacaataatcaaacaaggaactatattcataaggctgttattgcaaacataaataacagcacaccagaggcattatatgcaacatacacaaccaaaaaaaaatgaaatcccaatacaagacac

SEQ ID NO: 129213 - DNA, 252 bp, Glycine max
  Clone ID: PAT_MRT3847_87685C.1
tgccaatcgccgtctccggtcgggtcattttcaacatcatctgcttcgccgagcattcttgcagttagttctatcaacggaaacgtcgttgctcccacctccaacttcaaccaggctcgagtaaccgtctatggacagatcatcgcaggcaacttcgctaatgtcatccagatctaccggccctcatgcggatctactactggatctaactctggcactgtccctccaggaacgcagacgtcgaactctggt

SEQ ID NO: 129214 - DNA, 406 bp, Glycine max
  Clone ID: PAT_MRT3847_87686C.1
tcggatcgtgtaactgctagtggaggtgaagttgggagacttagcattgttggtggggctgaggtgagcatatttatgttgtagttatacttttttcatcctaaaatggaagaaaaggaaagatcttccatttgtcccctacccccttacagcatctaacatgggaacattccatttagcttatccttgttttaaagtttagttctaaaccattgcagattggtccccttcgttgctggccaggaggtctatgcctttctaggtcaataggtgacatggatgttggggagttcatagttccaataccatatgtcaaacaagtaaagctgtcaaaagctggtgggaggcttgtaattgcctctgatggcatatgggatgctctatcatcagaaatggctgcaaaatc

SEQ ID NO: 129215 - DNA, 1978 bp, Glycine max
  Clone ID: PAT_MRT3847_87687C.1
ccacgcgtccacttaccgtcttcttcttcttcttcttcttcttcttcttcttcttcttcttcttcttcttcttcttctatatatatatatatatataccatgtatagccccattagcagaaaaaaaccaccaatggagtctcacgtagacaccattctctctgcaatttttgttctactcctttcttcgttaacccatttcagcatcaccgcaaatgcaacaagaacaccccaagaaaacagcctccatttccaagtagcaaactccacatgcgagggaacactctactccgacctctgtgtctcaacccttgcctcattcccagatctcacctcaaaaaccctcccacaaatgatacgctctgtcgtgaaccacacaatatacgaggtcacattgtcggcctccaactgcagcggcctccgaaggaacctcccgaaactcgacaaactcgaacagagagccctcgacgactgtctcaatctcttcgacgacaccgtttcggagctcgaaaccaccatcgcggatctctcacagagcacaataggaccgaagcgttaccacgacgcacagactttgttgagtggcgcaatgaccaacttgtacacgtgtcttgatggctttgcgtacagtaaagggcacgtgagggacaggtttgaggaggggctgttggagatttcgcatcacgttagtaactcgctcgccatgctgaagaaattgccagcaggagtgaagaaattggcgtccaagaatgaggttttccctggatatggtaagatcaaagacggctttccaacgtggctatcaaccaaggatagaaaattgcttcaggctgctgtgaatgaaacaaacttcaatcttcttgtggccaaagatggcactggcaacttcaccaccattgccgaagcagtggctgtggctcccaactccagcgcaactagatttgtgatacacataaaagccggggcatacttcgagaatgtggaggtaatcaggaagaagaccaatctgatgttcgtcggagatgggattggaaagactgttgtgaaggccagtaggaatgttgtggatggctggaccactttccaatcagccactgttgctgtggttggagacggattcatagcaaagggtataacctttgaaaattctgctgggccaagcaaacaccaagccgtggccctaaggagtggttctgatttctcagccttctataaatgcagcttcgttgcctaccaagatactctctatgtccactccctgcgccaattctaccgcgattgtgacgtttatggcacagtcgacttcatcttcggcaatgcagcaacagtgctccagaactgcaacttgtacgcacgcaagcccaatgaaaaccaaaggaacttgttcactgcacaaggaagagaagaccctaaccaaaacaccggcatttccatcttgaactgcaaggttgcagcagctgctgatttaatcccggtcaaatctcagttcaagaactacttgggtcgtccttggaagaagtattcgagaactgtttatcttaattcttacatggaggatctgatagaccccaaagggtggttggagtggaatggcacgtttgcattggatacgttgtattatggagagtacaacaataggggtcccggttcaaacacaagtgcaagagttacgtggcctggttatagggttatcaagaacgccactgaggcaaaccagttcacagttcgcaatttcattcaagggaatgaatggttgagttccaccgacattccattcttctctgatttcagttgaatacgttatggttattagtggcttcatgctcttttggtatccccatttaataaagtattagatgtttgttgtggaaatagaattcaaggaatgttattgttccttgcgacaaaagcactaactaaaataaaaaagtattttatattaattttttatcgataaatattaatttattaattttatt

SEQ ID NO: 129216 - DNA, 381 bp, Glycine max
  Clone ID: PAT_MRT3847_87688C.1
cctactcgtccgcccacgcgttcggagcgcttgtgagcaatttcatcaatttagactggagagcatatcttagctttttgaattggatgccagaagcacttagaatgccagaacctgagcttattgaccatgctggattggattctgttgactacctgcggatttacttgatagggcttaaaatctttattcctattgcattcctggcttggattgttctggttcctgtcaattggacaagtactggtctagaaggatcccagataaaaaacataactttcagcaacattgataaactctcggttacaaatgaccatacaggatctgaaagggtttggtgacacatagcaatgggttatgcgtttaccttttggacttgct

SEQ ID NO: 129217 - DNA, 2130 bp, Glycine max
  Clone ID: PAT_MRT3847_87689C.1
cccacgcgtccggctattccttcctcgttatggagtcgcgagtgctgtcacgcgccggaaccttgtcctccctccctcacctccgcaagccgccgcgggaggccgtctccagcgcctccctcgtcgccgtgaaggccggaattcccgggtcgacccacgcgtccaaacaaaccaggacgcatgacaaacaaaccaagcagcattatgatagaaaagggacacaaagtgaaagagaagggagctatagaaataaggagaaaaactttcaaagaggtgaaagcaaaagagttcttcttttccttttttatatatacttgggtgctaagctgtgtgagttcattgacaagcctgaaatggcaactatgctgacaaaggagcatggtctgaacctcaaggagaccgagctttgcctcggtttgcctggtgggggaggcggcggcggcggcggtggtgaggtggaaactccaagggccactgggaagagagggttctctgagactgttgatctgaaacttaatcttcattccaaggaagatctgaatgagaatctgaagaatgtctcaaaggagaagaccctccttaaggatcctgccaagccaccggctaaagctcaagtggttggttggacaccagtgaaagtcatacaggaagaacatgatggcagtacaaaaggttagcactgaggatgtggcagagaagacaacaagcagcactgctaattctggggcatttgtcaaaggtttccatggatggagcaccttacctgcgcaaggtggacctcacaaatgtacaaaagctacaaaagagttatctgatgccttggcgcaaaatgttcagctccttcaccatgggtaactatggggcccaaggaatgatagacttcatgaatgagagcaagttgatggatcttcttaacagctctgagtatgtgccaagctatgaagataaggatggtgactggatgctcgtgggtgatgtcccatgggagatgtttgttgagtcatgcaagcgtctgcgaataatgaagggatcagaagcgattgggcttgcgccaagagcaatggaaaaatgcaaaagcagaagctgaagcgggcctaatacaatgttcaatgaaatcccgtaccaaagtggacctatatatatatatatatatatgaagcacttcagcgagactatggagcggagtgttgttagcttgaatgtgtctggtgttttttgttttgttcgtatatagattcaacttttaattttaaggagccgatcgatggggcatttgtaatggacaagaagcaataaacttaacctatatagtctggcttgtttattatgtgatccttccatgctgtcatgattgttgtgtgctaaaataccttgaattttaattcatactttagttcagctgtaggacatgcagaagttgaaggactttctcgacttacgactgtggttcctgggacagatgagtcaattagcaagttggtgcagcaactctataagctagtagagctacatgaggttcgtgatatcacccacttgccatttgctgagcgagaattgatgctaataaagattgctgtaaatgctgctgcacggcgtgatgtccttgatattgctagcattttccgggctaaagccgttgatgtatctggtcacacaataactctggagcttactggagatttggacaagatggttgcattgcagagattgttagaaccatatggcatttgtgaggtggcacgaactgggcgaattgctctagtccgtgagtcaggtgtggactccaagtacttgcgtggatactcttatcctttgtaatcacttcacctgggtcgaagaaccatcaaaatcttaggattttagagcttgtactttctcttaaactttgcctacggattcttgccttctgaactataatgttaataagtccttctgtgattaatataggcttgggatgacatctgagattaaaaaaaaaggttttcctctcctcaactttgcttcattttttggtggaattacagtttactattttgtgtagggacaaattttttgcttgtcaaaatatttatgtttcttacttggatgttgtctgttcctcaaaaaaagggggggggggggggggagggt

SEQ ID NO: 129218 - DNA, 132 bp, Glycine max
  Clone ID: PAT_MRT3847_8768C.1
cagttttgagcgattatacacatgcacgtttgttatagatggagattcaactatggaggaagattatttattgaacctcctatactacgaaaagggggacaatgccaactggctcctgcctgcgactactgc

SEQ ID NO: 129219 - DNA, 334 bp, Glycine max
  Clone ID: PAT_MRT3847_87690C.1
ctcgaacacccactatctcacgagagtcagggtctcactgagaacttaatcccgttataagggtgcagaaaccgatggatgatattatactctcgtactgatttgtatgccagttaaagaagttaacatgaaacttgaaggcatcatgaactgtgagagtctccctatatgcacatgcgcttaagctggatacttctgagtgccaacgctttaccttctatatgaacctggagagataggatcgtgaccttgatttcacatagtcctatcagaggaagtagccactttcatgtatctgtacatcacagtgattgctgagatgggtgagatcata

SEQ ID NO: 129220 - DNA, 342 bp, Glycine max
  Clone ID: PAT_MRT3847_87691C.1
cccacgcgtcctaaaaaaaaaacaaaaataatataataaaactaaaaaacaaaaaacaataaagataagaaataaaaaaaaaggttgtaaatataataaaacaaatacatttaaaataaaaaatcaaagattgcacttactaaaaaaagatatcgaatataaatacacataacattacttgatgaacaagattcctcttctgttacaaatgaaccctgttcacaagaagattccccttctcatccacaatttcaaacccatttccaaatccctcattgctgatcactacattgtaccacgtttggaatgacagaaatcccttgctgccttcaaacccttacc

SEQ ID NO: 129221 - DNA, 131 bp, Glycine max
  Clone ID: PAT_MRT3847_87692C.1
tttaaatggaaaagctccatacttccgtcctcgcccttgtaatccttcgtgccatactatctcaagaatgattactcacaagtatgaacactaatcacggatcacataaatgttgaaatttcctagttaca

SEQ ID NO: 129222 - DNA, 479 bp, Glycine max
  Clone ID: PAT_MRT3847_87693C.1
ggctaaacatggcaatttcccttcgtatggttgtggctgttctagggaatgttgcctcaatgtctctttatgctgcaccatcggttaccttcaaaagggtcataaggaaaaaaagcacggaggagttttcatcaattccatacatcatagcactgctgaatagcctcctctacacttggtatggattgccaatcataagcaacaagtgggaaaatttccctcttgtcacagtcaatggagctggaattccttttgagctatcatatgttctaatctatttctggttttcttcaccgaaaggaaaggcaagttgtatacatgctctaccatccctcttttaagactacgttcttctctttgtgcacaaaaaatcttactaaaccttaaggcttgttttaaattacaaaggattcaaaagccaataaacatcaatgatacatgcttggaagttggaagttttcattgaattatttttcttc

SEQ ID NO: 129223 - DNA, 485 bp, Glycine max
  Clone ID: PAT_MRT3847_87694C.1
aaatgacttgcatatgcagaaagagattgcatcagaagagactatcagaaaattgaaagaaaaacatgatgtgcatgttcagaaagaggctatatgagaagatacaattagaaatttgaaagaaaaaaatgatatgcacatgcagaaagaggagacaataagaaaattgaaagaagaaaatgaagggcacattcagaaagaggccatatcaaaggagacaattaaaaaattcgaagaagaaaatgataaactagttcagaaagagactagtctggaaatgagaattgcacaattgcaaagtgagaataattccttacttcaaaaagaggctggattggtggaaagaagtaatcagttgctgaatgaaaaggttggactggaaacaagattcgcacaattgcacagtgagaataattccttacttcaaaaagaggctacattggtggaaagaaccaatcagttgctgaatgaaaaggaagttttga

SEQ ID NO: 129224 - DNA, 293 bp, Glycine max
  Clone ID: PAT_MRT3847_87695C.1
aatcttgcttgacaaaaacccgggagggtttttacatgaaaaaactgggagccttttgcttgccatttttttaaaattactcccggttgccggaaatttttctggtttacccggcccacctaatccccgtttcttaaaaaatttagtcgggggatgggaaggttcaattggcccgctttttttccccccctaaggcaaaagaccggttggggttcctataaaattccaaaaaaaggtttttcccgctcccccaaaattttcatcttttctttggtggaacaaagggcccccca

SEQ ID NO: 129225 - DNA, 660 bp, Glycine max
  unsure (1)..(660): unsure at all n locations
  Clone ID: PAT_MRT3847_87696C.1
atgcgccaccgctttgcttctcctcctagccatggccactaccgcctactgtagctccaaagaaatgaaggctttaaagatggtccaaatccaggtctcacaagctaggagttgggttgatggctacgtgagattgcatggccttttggataaaaaatatgtggccctagaagactgtgtcaagctctatggggagagtgagtctaggctttctcacatgttgactgacatgaacgtttataccacacatgatgcacttacatggattagttctgtgatgacaagccacaaaacttgtttagatgagttgaaggcaaaagggtttccagaaccacctcaggaattggataaaaacatgaccatgatgcttagggaagcacttgtttcgtatgcaaagaacagaggcaaacccaaagaaccacttcaggaaacattgttagaatctaatggtggtcttttagcatcatggagtagtggaacttctaatgcagacttcacagtggcacaagatggttcaggcacccacaaaacaatcattgaagcaatagatgcactactgcaatggatagtagtcgtccttcaagancagntattatacgtaaaatcangggtctacaatgagaaaagtggatattggaatcaattttgaagaatgtgatg

SEQ ID NO: 129226 - DNA, 606 bp, Glycine max
  Clone ID: PAT_MRT3847_87697C.1
ccaaacacaaaaagcaacccgtgccgagaattgaacagtaccaagagcaagatgacattaaacggaccaaagacaccacaaggcaccaaagacgagaaactcactgcgcccaacagcattgttatgaggggttcaaactatcacaccacatctaaacacagattaatagaatgcaattatggcaccgcagatcaacaacccatttgggggaacaacccatgccacaggatggaggaaactctaaactttgaccgaatgaccagccacctgcaacagaagacacaccacgtcagaggagaaaccaacattcattgtaaccaacatcgcctgatgaaccaacccgcacgacacactccttgtgttgggcccccttggagaccttggctgcgggaggatccatcttgtcaacgatctggaagactcccaccgggaccgtgtgacacatgtccctgacagccaacctaccaagcggaagataccctgtgaaagttgcatcaaccacgggtgaggggggcatcctcttatcaaaaccagcatcaccggaggagatcaacttgggctacttgtgaagctgtttgccggatcgcctgacaatcttggacatga

SEQ ID NO: 129227 - DNA, 471 bp, Glycine max
  Clone ID: PAT_MRT3847_87698C.1
ccgggagattgtgatgaagcaaagtatataatccaacacttgatctgagatattcgagtgatgtaaaccttcttttttgcttctgaatctacctggttccgaactttgtatcttttttaattgcaggttgtgtcttgtaaatctacctggttctgtaccttttcatcttctcttagtttttccaccttaagtagaacagatattttgtgtggcttcggctttttgagatttgattttagattatattacttctctttatattttatggtagctggatttatgtatgtggacttgcttttctgtttcttggctttttctatactgctcaatcaaagtgaacaaattggaaaaatcataggacaccttcctcgacaacagatattgttatggaatggaatgaattttccatgctgatgatgtgctaggcattggggatatgcttgcttggcccttctatacgatgggatacac

SEQ ID NO: 129228 - DNA, 384 bp, Glycine max
  Clone ID: PAT_MRT3847_87699C.1
ggttccgttggacctggtacccttcatttcccacttagggattattattttaaaaaaaggcttccccccaccaagggattaggtaaaagaattggaccttttttccccttatttttaaaaattttggcccaaagaacctttttaaccctggtggcccaatttaccaatggagaatccaccaaaccgaaaggcagccttttttgccatttctttccttggcaaagtttttttcttattcttttaacccttttccccatccttcacctccttaacagggttttttattttttccttttcacctttttcattctccaacccattcccccattccttgcaacaaaaccgacattgggtctgtggctctgcaaagaagggccaccaaat

SEQ ID NO: 129229 - DNA, 1331 bp, Glycine max
  Clone ID: PAT_MRT3847_8769C.1
ggctgtttatcaaatttatttactgaagtattcgcctccagaaaagttcttggatgcggtgttttggacggttgacatggccaaggatatcagagctaataatatctagctttctttcaaaacttcctgactttcagaagatcattgtatgttcatctgaatttgaaaaatgcaatgggccatttggatggttgcagtgcttttccttgacttacagtcgggaaagtgattttgaggaaggaaaccacttctatagattctttgaccacgaaccgcttatctccaaatgctttaacttccgtggtaccactaatgatagtgaaccgagcgctgcggctccagcgtgtggataggcttaccaagattatgtgtgccattcttgagtcttttgcttctgaagacaggcgacatgttgattatgtggccattagcaaatgcgaagaacttcggaggtatgtcaccttcaccccacttcgtcgccgggggatgctcttcgttccgtcggtttacgcgacgcgcgcgttcttcataaatttgtacaatgccatgatcgtccatgctatcattagagtagggtgtcaagaaggtgtaattaataggaaatccttctttgattttcactatttgattggagggcatccttattctcttggtgcaattaaaaatggtatcctcagaagcaatcgtaggtcaccatattccttaatcaagccctttggcacaggagataggcgcttagagcatgctcttgtcaaaatgaatccgttagttcactttggactttgtaatggcacaaaatcgagcccaaaggtgaggtttttctcaccctatagagttgctgaagaagcgagaagtgctgctagagagttttttgagaatgatggaattgaggtggacctggagaagaggaccattcatctcactccgattttcaagtggcactcttcggatttcggacaagagagaaacatactaaattggataataaatttcttggatgcaaataaagcaggtcttttgacacatctcttaggtgatggtggtcatgttaatatctcttacatgagttatgactggtcaataaattcctgaattgttgtgaaccgaatgattcaacccatctagccgttgaatttaccagatatttgttgtatataacccaggttttgatttagtaacgagtcaaaaaggagagactttgatagctttgattgatagtgatgccaaaacataaaatatagatgacatattactttttgtatcgtatattttgtaagccaaaatctgaggcacatcaatgatatgcagaaattgtagatcatactgttttg

SEQ ID NO: 129230 - DNA, 474 bp, Glycine max
  Clone ID: PAT_MRT3847_876C.1
gtttgggcactcgccagtaccccaatatttaacactgttacatagcggagggagagacttttcattatacttgcacagacttgcaaactagagagagtagtttgctttgctcaggcgagcactctatatcttcaattggacttatgcatgatgatagcatatggggtgcttccacagacctcttgcatttcataaatggccacactcgcatgatgcgaccctcaaatgattttccacagaggcatttcttctttagcaggaaacttgtctttttcaacagcagaagttacaccagaaggatactacccctgttcctgtatatataagaacctaccgttaactatctggagttcacctgcaatactacaacatgaatttctgagttataagacgcatgtgctacacaacagatgcatctggatcactgaagctgtggtatattaccaaaggcatctgtcttgaagattacggaaa

SEQ ID NO: 129231 - DNA, 536 bp, Glycine max
  Clone ID: PAT_MRT3847_87700C.1
tataaaggtaaagttttatattaccaaagatattttgacatatttgtctaagaaaatgttgtgatttttgagtttttgtttctttggttgccaatgtgtgtgacacatagccaaaatgttgctagcctgtattgttccatctcactacatctttatcatggtgtccttgtttttatcaactgttttcattggtagatgatgagttaatctttgttttggaaatgatatcatctgacttcttacaatatacagggggcctaagggccttattgactgatagggacaaattgcttatgactgttggaggagctactgcactagctgcaggaatatatatgactagagaaggtagtaaagtcacttggggctatattaatcggattttggggcagccatctctgatccgggaatcatctatgggaaagtttcctgggtcaaaaatcatttctcaagccaaaaataaagttctacatgataagactttggctggggcagaaaaagctattgggagtaaaaatggtcttggaaatgtaatc

SEQ ID NO: 129232 - DNA, 500 bp, Glycine max
  Clone ID: PAT_MRT3847_87701C.1
ggctcgagctctttttgctcagctcttgttgatttttctctattacgacacattattctgcatattgtgagcgggttttgggattctgacacatgggaggttgcatggacacacatcatgatgaatgtgacatatgactgttctcaccacttgctcatgaggttgccgttgcatcacatggaggacatgagtacccacctggggcttaccaaccaccacctgggggctactctccacaagatggatatgctccggctggttatcctccacaacaggggtatcctgcagctggataccctgcacatggagggtatcctgctgattgttaccgcccagatggttatcctggctcatcacaagcaccaagatctcatggtcacagcggtataggagcactgctcgctggaggtgctcctgcagctggtgctgattatggagctcaccatgtatatcatggatgccatggatgctatggacgtatgcacatggtgctcacatac

SEQ ID NO: 129233 - DNA, 506 bp, Glycine max
  Clone ID: PAT_MRT3847_87702C.1
ggaattcggcacgaggcgcggctctctcgacgctctcgtgaacgaagacgcgagccctcgctcatacactcttgtgaacccagacgcaaatcctcgcgcagtagttcacgctctcaccctctctcacgggggttcatgctttctctcgcggtagttcataccaggttcatctctcatctctgattttcgtttctaatttcattatttggttttgttgatttcgtttcgtctttttatctcgggtttagtttttcttttcgtatttgattttgtcactaatttcgagttgggcaaattgattccttaattaatgtatctcaatttctttcgtcttacatgcacagttgtttatggcaaattttcctcactaattttgttttgttgattgcttttgaatttgttttgaggattgttttgaattatgattacactctgtgcttgcacgagagggtttttcctggatggaattttgtgagctatgatgttttgtgctgtcttgaggcaga

SEQ ID NO: 129234 - DNA, 415 bp, Glycine max
  unsure (1)..(415): unsure at all n locations
  Clone ID: PAT_MRT3847_87703C.1
gaaatgagataccctaattacatttattttcttttatacatcttttcttggctttctgtgttttagaatgtggcaagcatctctcataaaaaaaagattgtggcaagcatcttgttacgtttaaaagtagagaaaaaatgggtttaagttaaattaagtcataccttaaatgtgtttggtttaattacttattaaagttgaagcttaaacatactttattttcttcatatggttattttttaaggtttactattacctttgtatctgtttaaaagtttaagttctaatttgacctaacaatgtattcaaatgtctgttttatagtacgatttataaatacatcaattaatttttgccaacagcttgngcagttattcaggtatgtgttgaatggttgttgcctattgccttggtg

SEQ ID NO: 129235 - DNA, 368 bp, Glycine max
  Clone ID: PAT_MRT3847_87704C.1
ttaaactcacagagctcgatgcagaaactatgagacgaactcgaatctccaagctctgtcctatacactatcgtgaccatgtggcacacgcagagaagctaactcaataataataagtcaggggatcttcaaactagggcttaagctctcagtgacacactgtggacagtgtagagtcaccatcttcctgactgactaaaggacttttaacgatagtgatctgctatgcaactgggctcgagactgaaatggatgtaagaatgatgtctgatgtacaccttcagttaagcccacagactaccaatgcacttggctatacagatatggaaacaaaggtgactgagacgctagttgcggaatctatgaat

SEQ ID NO: 129236 - DNA, 313 bp, Glycine max
  Clone ID: PAT_MRT3847_87705C.1
ggtccggaatcccgggtcgacccacgcgtccgtgaccatcttgtctgaagatgtactagtggtttctctagttggtggaagatctgtcattttgatgtatatttacgtgtgacaaaataggctgtatatggtgtcacattttgatgtatgtatagttaaattgcccaagttagggtaagtaaatattttgtcctactcatgactgcatgagaatggaactacatctaacactatgttgtttaagtcttagttgactagtactactcagcgactagtactactcagtctgtatgaatgatatgatgagtagaag

SEQ ID NO: 129237 - DNA, 607 bp, Glycine max
  unsure (1)..(607): unsure at all n locations
  Clone ID: PAT_MRT3847_87706C.1
ccacgcgtccggggcaatgaatgaaactctgaagcaaaatcgtcttttgagagaacgaggggatgataactcattccccaattctccaaacaatagtagtagtgatgcaaatcttcagaaaaatgtatgtctgctttatttttaacagtggaatttgctattatttaaaccttctattctgtctttgcctgtgcgtctttcagcatctcgtcaaacaactctttatatcttgcttctaaacctatgttttctcaattgctttgatagtcatgatgaaatgtctatcattttgttggctgatttccatatctcttatttgtttctcataaatgatgttgtgtttggcaaattacttcagagttgtcttggctggaaaaatctcatcttaagaaattatcttctctttgctaatatttaccagacattgatgctagaataaaatcaacaaggtcttgatgttggaagaatagggtcaaggngtgatctttaaggtgaggcttaaagggtcaaaacagtacctgccagatatatttggggtgtgaactctgacaggttntaggacaaattgaatgtagtgttttgatctggtgattattgatgtctacca

SEQ ID NO: 129238 - DNA, 347 bp, Glycine max
  unsure (1)..(347): unsure at all n locations
  Clone ID: PAT_MRT3847_87707C.1
cgcgnnncnaaacannannagactcgagcgtaacgangaaggcaacacngcnngggccnggggcnncngcgccggggagncgggacacgcanagcaaccgaaccncggcaacgagacacgcnnccaccgnngnnngnggnncgncgaggaancaacccnacancccgaagcncgagccnnnaagccgaaccaaannngaaagggcgcggaaggacccnccnnngancgaaaaanccgagagagagancnnagannannnggcaacgcnngaaggagaccaanccganagcngcnggcaggcnaaaanngagccgaaagaacnngaaaaagagnccccaaaagcagac

SEQ ID NO: 129239 - DNA, 1577 bp, Glycine max
  Clone ID: PAT_MRT3847_87708C.1
ctcaaaaatgaatatttacaatgttccaataaactgtatactcattagtcaagataatattctgtttctattcaactctagcttccttttagttacggcatttgctgtcgacggtccttgttccattcttactttagaataataatgataataattgaagcaatttttatggcgtcaattttatcccggatgattcaacttcagccgccgaagttcacatctgtttggaataagcttcttttccatacaattgaatttttagaattatggctcagttattgtcaccagtatgcatggaggctctgaaaatccacaatccatcattgaatctttgttcaagaagctcatggcggatgctggtgaagggtgcaagtccttgcacctttctgacacacagtggtagtaagcgaagagggtttggcaaagtaagagttactgctgaagactcagtttctccctctgagaccattgcagatgactattatgaagttcttggactgcttccagatgcgacaccagagcagatcaagaaggcatactacaattgcatgaaatcttgccacccggatttgagtggaaatgatcctgagaccacaaatttctgcatgttcatcaatgaagtctacacggtgctcagcgatcccgtccaacgcatgatttatgatgaaattcatggctactctttaacttcaatcaatcctttcttggatgattcaagcccaagggatcatgcctttgttgatgaattcagctgcataggctgcaaaaattgtgccaatgtagcccctggtgtgtttgcaattgaggaagactttggaagagccagagcatacaaccaatgtggggaccctgaattagttcaacaggcgattgacagttgccctgttagctgcattcattggacatcttctgcacagctatcattactggaagatgagatgcgccgtgtagaaagagtcaatgttgccctaatggtatcaggaatgggaacagcatcaattgatgttttcagaatggcaagttccagatgggaaaagaggcagtcaaaagtcttggcaaaagcaaaattgagaatgatgagggaagaaggttctgataagaaaaattcgtactgggacaatctttggggcaaacagaaagactatcaaagttcagatgaggaagttgaagaaagagcaaaaagagctgcttcagcggcacgaagatggagggaatactcaagtagaggtgttgataagcctcccacatttaaacttccagaggcaagccttggcaaggacaagtgaacagtacttcatttaccttctactatatcatttagtcccgtgtaattagttcatttatagcctcctaagttaaaccaatgagatcttctttctcattctactacccatgattgtatatgcagcaactcctattaaggtaaatttttagaaatagatgaaccatagtaatactttggaaaatataagaaagcttgtttataaaatcataattatggttgcagtgtgctcggtctatatcgatgcttaattcttggggaaatttcaaagaacgaatactttactttgttgctt

SEQ ID NO: 129240 - DNA, 296 bp, Glycine max
  Clone ID: PAT_MRT3847_87709C.1
aaaaaaaaaaatcaagagctaaatttttttcattatctttaaccacaaaacccaaaaaagatgctaagagatcccctggttttagctcaagttttatcacatgacagtcatcaattgggtgccttcaaggcagtcttcacatgattattttttttcaacatagggctcatacaaagaatgattttttgcggggatgtaatccttgaaccttttaaaaaggggtagcctgtcaggtccagggaacaatttaaaaataccctggaaaacttcactaattttcatcggttggggtttca

SEQ ID NO: 129241 - DNA, 469 bp, Glycine max
  unsure (1)..(469): unsure at all n locations
  Clone ID: PAT_MRT3847_8770C.1
tacggctgcgagaagacgacagaagggcagacttgtaaaatcgcaaaacaagaataaaaataaatttaaaattagcatcttctcgtaagttttcgaaatgttcagcgaatttgtcttccaatttttcttttgccatccttctagacacaaatataatagcctaataatagccttgtccttatgctttgggtggttccattaattgatagtatttgcttttttatttcttattgtcaactaatttgtcagccatctatttttcatggtagtcatatgatcataacttttatcacgtgtccttattccttcaaggttttcaacctatgtgagtattaatcatactgccaaatgcaatatagttgcactcttccctgtaaacgaccttgtgtttagccttgtttttcttttgaatttctaatgaagtaagaccattcccttngatccttgaatcatgcaatataactaaatt

SEQ ID NO: 129242 - DNA, 2107 bp, Glycine max
  Clone ID: PAT_MRT3847_87710C.1
ctctgccaggggaacaaactggagcatctcatcacgttcgcgaatcgcttctctggaacgctccctgaccaatacggcgagtgtgtttcacttcaatatgttagaatccagaacaaccagttctcgggcccggtgccgccatcgttttgggcccttgctgggcttcagtttctggaaatgtccaacaacaggttccaaggttctgtctctgcttccatctctaggggactcaccaaactcattttgtccggtaacagcttttctggccaattcccaatggaaatatgtgaacttcataatctcatggagattgacttcagcaagaaccgcttcaccggtgaagttcccacgtgcgtaactaagttgacaaaattacagaaacttagactgcaagagaacatgttcaccggcgaaattcccagtaacgtgacccactggactgacatgacagagttggatttgtcgtttaaccggttcaccggttcaatcccatcagaacttggaaatttaccggatttgacataccttgatctcgccgttaattctttaacgggggagattccggtggagttgacgaacctaagactcaaccagttcaacgtctctggtaacaagttgcacggagtggttcctttaggtttcaaccgccaggtgtacttaacgggtctaatgggaaaccctggtctctgtagccccgttatgaaaaccctgcctccttgttccaaacgcaggccgttttctctgcttgctattgtcgttttagtttgctgcgtttcgctccttgtggggtcgacgttgtggttcctgaagagcaagacgcggggttgtggtggcaaatccaagagctcctatatgtcaaccgcgtttcagagagtggggttcaatgaagaagacatagttccgaacttaatcagtaacaacgtgattgccacagggagttcgggtcgggtttacaaggtgaggctcaagacggggcagacggtggccgtgaagaaactgtttggtggcgcgcaaaagcctgacgtggaaatggtgttcagggcggagattgagactctgggaaggattcggcatgcgaatattgtgaaactgttgtttagttgcagtggtgatgagtttaggatattggtgtatgagtacatggagaatgggagcttaggggatgtgttgcatggtgaggacaagtgtggggagttaatggattggcctaggaggttcgcaattgctgtgggtgcggctcaggggttggcttatttgcaccatgattctgtgcctgctattgttcacagggacgtcaagagtaataacattttgttggaccatgagtttgtgccaagagtagcagattttggtcttgctaagacattgcaacgtgaggccacccagggtgctatgtccagggttgctggatcatatggttacattgctcctgagtatgcttatacaatgaaagtgactgagaagagcgatgtgtatagttttggggtggtgctgatggaattgatcacaggcaagaggcctaatgactcttcatttggtgagaacaaggatatagtgaagtggatcactgagactgttttatcaccatctcctgaaagaggaagtggcgatattggaggaggaaaagattatattatgagccagattgtggacccgagattgaacccagccacttgtgattatgaagagatagagaaggtcttaaatgtggccctactctgcacctcagcgtttcccattaatagaccctcaatgagaagggtggttgaattgctcaaggaccataaactgtcatgatgctgtattgagcttcccaagctctgtccacaaaaggacccaaattttgcattgccgtggcggtaggcaccaaatgaaagcgattgatggctgtgtatgcaagaaaacaaactttcgagcaaatttattattaaggaatgaacagctatatgagtgattatttagttactcattgtacgtaaatcttgttgtatatatgatggctcgtgaatcctgtctttgatcaaagtaaaagtaagtagtgaattggaaagtcatgtcacatccataccatactgaaaaagaaaaaccttcctgcaggctttagctt

SEQ ID NO: 129243 - DNA, 747 bp, Glycine max
  Clone ID: PAT_MRT3847_87711C.1
tgccccagagtatgcttatacagtaaaagtgactgagaagagcgatgtctatagttttgggatggtgctgatggaattgatcacgggcaagaggcctaatgatccacgcgtccgtgagaacaaggatatagtgaagtggatcactgagactgttttatcaccatctcctgaaagaggaagtggcaatattgggataggaaaagattatattatgagccagattgttgatccgagattgaacccagtcacttgtgattatgaagagatagagagggttttgtatgtggccctactctgcacctcagcgtttcccattaatagaccctcaatgcgaagggtggttgaattgctcaaggaccataaactgtcatgatgctgtgttgagcttcccaagctctgtccacaaaaggatcccaaattttgcattgcagtggcgataagcaccacatgaaagctattgatggctgtgtatgcaagaaaacttagttaggagcaaattttgagcatatttattattaaggattgaatagctatatgagtggttatttagttgttcattgtatgtaaatcttgttgtatatatgatggcacgtgaatcctgtctttgatcaaagtaaaagtaagtagtgaattcgaaagctatgtcacagccatactatactgaaaaagaaataccttcctgcaggctttagcatatctttgttttttctccctctttttctttatccatttttggagcataactgt

SEQ ID NO: 129244 - DNA, 465 bp, Glycine max
  Clone ID: PAT_MRT3847_87712C.1
cttgtgtccccctgacagggggggggggaaaaacccttttgaaaaatctccactctttccccaagaggtggcaccaaactgtatttggaaaaagaaaaacatcttttggtccttttttttacccttgaccccaagggaaaggtaatcccgcccctcctcttttggccccctttgaagacaaaaccccttcaaaatacaaaacaaagcccctatttagaaagtctccataaaatttcaaacccccacaggccgccgtagtgctgtgagcttttgtaactcttgatgttcctccaaagcctggagggggccaaactcagccaattaatgggcccatgcaaccataaaacttactctagggactgctggctctctgcgcttcaaagaagggctacttgcttgcagatccccccccaccctgggcttgacatggcctttgcaccgaaaaatgcatccttgcctccccca

SEQ ID NO: 129245 - DNA, 479 bp, Glycine max
  Clone ID: PAT_MRT3847_87713C.1
ggcaaacaaaaagtttaaaaggggaaaaatggaaataaaaaacccccctcattaaaggcaaacagggcctaggggggatcccccaaaatacaaaaaaacatattttggaaagggcccccaaaaggggagcattgggttaggacgggaaaaaaaggagggaaaggaagctagggcattaaatgggcccaggggagaggaaaaaaatatggggaaaagcaacaattggaggaagtggaagttcaagggccctggggccccccttcctgggccttccaggggggggagcaggggcacacagttttattaccaaaaaaccccgggggcacacacaggcatttccgggagcactttggaaaaaaaaacaagcagggcttggggaatggggtctggctacatccccccgagcattgggaggggcatgggtatctcttgacacccccacttccaaattggctctggtgggcaaacaaggggcctcc

SEQ ID NO: 129246 - DNA, 311 bp, Glycine max
  Clone ID: PAT_MRT3847_87714C.1
gctgagcgcactacgcactaaagactagcgatcattgtttgatactagcaccttttaacaggaacatgtaacataaaaagggtgacggaaagaaaaccatatcaaacccaacccaccttgtcctatctgccaccatgtgttgatgttgtgactcgaatggatgcacatacatgttacagtggcagtgctttatcatctgcaccaatgaaacaatatttacaccatttctcgaaactgattcagtactatctggataaatccactccacattccacgttcagatagattgagacttacgcgatagcattcat

SEQ ID NO: 129247 - DNA, 310 bp, Glycine max
  Clone ID: PAT_MRT3847_87715C.1
ttcgtcatcacgcccgtatgattctctgtataaacacaattccgtttccatagggccaaaggtgaaaaagaaggcgctacccatggcgaggtgcacttgaaagggtgggcatggagaatctgaaggctaaggactagagcttgtgccttacgaaccatagcatgtgggccgatgggggaaaccagtagcctggggagacctcgaaggatgctgtgctcacccagtggcaggatactgctgcgatgcctctgacgctacctctggaccccgaggatgaacaaactgggagactctcctactgcagggagag

SEQ ID NO: 129248 - DNA, 535 bp, Glycine max
  Clone ID: PAT_MRT3847_87716C.1
gccttcatcacctgcgtccctcatcatcattactttatgtatatgacatttcgggttaaaatgtaagctcaagtatcagatataaaggattatcatctcaatgtgacaaatagctatgattgtccatataaatgggcatgttagcatagatatgtataatatatgttttctatcaattgctatctgattatctattaactatttataaaaagtaagtcttccttggctaggtgtcagcaagttattagccacgtgttaacattctatttttcacttttttttagattcctctacctgaaaccctactctctctgtttccaccttttttccatctttctccttctcccttcacgatcgaggcacagcttcgttccccctttcttttctcactgccaacctaaagcctccactatgcatagctgctctgccatgactccattcactccggcctgttctctctctaatctgtggttgacagtatcaagctctctgttgcagacttgctgctgctgccgacggcatcaagctttatgtg

SEQ ID NO: 129249 - DNA, 761 bp, Glycine max
  Clone ID: PAT_MRT3847_87717C.1
aaactctcaaccgtcactctctctctctcgaaatcttctctctttctctctcatcaaacaacctcttctccggcggccatacttccgcgcgctgcctcgcggttctcccccgaatattctgttgaggtcttgaattcactaataaaggaaagttgatattttcagtaaatctttgctgtactaaaagttttggaagtttttgcaatgggtgcaactgaagatcttgtgaacagcacacagggtgcagcagaatgtcaggaaaaccgcaccacaggtccttcagaaaatccaataaaggacaacaccagtagtacttcagaaaatcttgtacagtacaaagcactagatgcagaaaatcctgtaagtgatcaacaaggtggtgcagaaattcctgaaactggaggtgctgaaaatcctgcaagtgaccaaaaaaatgtggaacaaattcctgcaagtgagcaagtgggtattgcagaaaatatggtaaatgaccaagcaggtggtgcagaagatcccacaaaggaccgaacagcaggtggtgcagaaaatcctttaaatgacctaatatttcttgcacaaaatcctgaaagtgaacaagcaggtagtgtggaaaatctgttaagcgaccaagcaggtgttgcagaagatcacacaaagaaccgtgcagcaggtagtgcagaaaatccttcaatgacctaatagatcttgcacaaaatcctgaaagtgaacaagcaggtagtgaggaaaatctgttaaactac

SEQ ID NO: 129250 - DNA, 469 bp, Glycine max
  Clone ID: PAT_MRT3847_87718C.1
gtccacattccacgcctctcagatctggcaatcaaacactgtaaactccctccttcctcactacacgccgtttctcttttattgccgttttttttatgtcgtcatgttctgagtttcgagtagacctgttctgagttgttgtgttgtgttcagttctttccttacgcacatgcacagacgactatgaagactccataacgccaatgcgtacccggcaaacgctgctcgaccagtggagtctgattccgtgcaagaatcgacacgaggttcaacaacggtggacggagaacgatcaaaatcaagcgtaagaagtacactcgccagacgaatatacgcgtcaggaatgactccggcactggcggcgtgtctaaaccgatcccggcggattctgaaggacagaagagagagattgaccagcacttcgagatatcgaaggcgctggcttcctcttggtcggaagaggaagagc

SEQ ID NO: 129251 - DNA, 174 bp, Glycine max
  Clone ID: PAT_MRT3847_87719C.1
cgtccattcgttcggatttaaactacaaatgaccccagcggggagggcacattgtttaccttattacaagattaatgaagtttactagtataacttctttcttgttttttgagggaaaacattgagcactccgcctggggtcatttttagtttaaatccggacgcgtgggcgga

SEQ ID NO: 129252 - DNA, 931 bp, Glycine max
  Clone ID: PAT_MRT3847_8771C.1
cagcgcgtccgcgcacttctagacacttgcttggttcgctgctattcttcgtcagctgttgtctttccttttaggtaaactaatgggggatgattcttttcctagtttggacaaattgagggctaactggactccatctcaagatcgatattttcttcagcttttgctgtcccatgttcacaaagggaataaaactgggaaagtgtttagcagacaagcctgggtaaatatgattgaacaatttaacaccaagtttggtttcaagtatgatgtagaagtgttgaagaaccgtcacaaaagattcaggaagcaatacaatgatatgaaaatgatagttggtcaaaagggatttcagtgggatgggacacaaaacatgatagtagctgatgataaagcatgggatgaatgtataaaggcccatcctgatgctcaacctttcaaaaaaagagtcattccgtattatgatgatttgtgcataatttatggccatgcagttgctgatgggagatacagcctttcgtgttttgatgtagattttgaatacgaagaaaaagatttggatgacaagactatcactagtaaaggagtggatgatcaaactcccccagcagttgttaatcaaggtagaattgactggtctccaatgatggaccaattttttgttgaacttatggtggaccaggtgtgtaaagggaacaagattgacactacattcaggaggaaagcatgggtagacatgacagaatcatttaacaaacgatttttatgtcattataatagacgatttttgtgtcattatggtagagttgtgttgagaaaccgttttaatgtcctgagaaggcattaccgttctataaatatcctccttggcaaagaagggtttagttgggataagacacaacacaaggttgttgctgatgaacaagtatgg

SEQ ID NO: 129253 - DNA, 275 bp, Glycine max
  unsure (1)..(275): unsure at all n locations
  Clone ID: PAT_MRT3847_87720C.1
gnagcttcttctntcctnttctctctctcacctcttcttcttctcnatctctgtccttagccacnacagccanactttgttctccaaaaccananccgnccanagttaacgcctttccctcngtctcgaaccanaaaccntttcgtgacccttgcatgngtngcgatgctcatcccagnaataaataatcatgnnagcnagactcaataaagttgattntnggcgtatntatgtgattggggttatacgcctggctaataaggnatgcgcncctc

SEQ ID NO: 129254 - DNA, 353 bp, Glycine max
  Clone ID: PAT_MRT3847_87721C.1
gggggggggtgtctctttttcctggcgggtctggcggtttcttccggggggaggtggtgctctcataccggctcctgcttgaagctctggtttctgcggatctacgcgcaacagagtgctgtcaaaactctgtagaactgggacctttctctctctagaatctctaggcgtgtataggtccgaatcccggtcctagctcccgctctaaaatctgatgtcgggcttaaataggtgggcttgttcgtgctcgggcgctttgcgcatttattggacccacttagcgtgtgtttgtgaatgttggcttagctcatgcctttctcgctggccgggtggagctgaggcggggcgcttgg

SEQ ID NO: 129255 - DNA, 773 bp, Glycine max
  unsure (1)..(773): unsure at all n locations
  Clone ID: PAT_MRT3847_87722C.1
aattcggctcgaggttagaagaactggctaaaagcagagagaatgaagaaagtatataatagcaatattatacacatgctattcatataagcggagcaaaagaattaacaaagatgctctcacatgcttcatggtagaagctttctttaattaagcaaactctcacacctaccctataaatggatgattgcatgaacagctctcttcattaacaacaattttttctcattctcttcaatggagggtcttcagaaattccttcatttcttctttgtagcttctcttctcatcagcactacagcaatttcagatcacactcccaagccttatgttgtttatatgggaaattcatcaccaaacaaaattggagtagaaagccaaatagcagaatcatcgcacctacagctattgtcattaattattccaagtgaagaaagtgagatgattgctctaacccaccatttcagtcatgcctttagtggcttctctgcaatgcttacagagagtgaagcttctgcactgtctggtcacgatggtgtggtgtctgtgttccctgatccagtgcttgagttacacacaacgcgatcttgggatttctggnaatcagatttgggaatgaagccttattatagttatggcactcccacattacacaaacacccatcaactgatatcattattggtcttatagacacaaggatatggccagattctcctaatttcaaaaatgaaggtataggggagattccttcaaatggaaaggtgtttgcatg

SEQ ID NO: 129256 - DNA, 938 bp, Glycine max
  Clone ID: PAT_MRT3847_87723C.1
ttttggtttttcataaaaaactagcagccctttctaagaaacaaagcagtgctaaagatggcaatgagcaacaatgtgatcggatgcataaacttcgtggcggtgatcctctcaatcccaatcatcggcgccggaatctggcttttaaacggggaagccgattcctgcgtccagttcctgcaatggcccgtcatcatcctcggagtcctcatcctcgtcgtggccctcgcaggtttcatcggagccttcttcagagtctcgtggctcctcatcgtctacctcgttgccatgctcgtcctcgtcatactcttagtgtctttggtcgcttttgtttacatggttactcttcggggacacggcaacattgagcccaaccgcgcttacttggagtaccgcatggatgacttttctggctaccttcgtcgtagggttagaagctcgttcaagtgggaccgcatcagaagctgtcttagccaaaccaacatgtgtgctgagcttaaccagggttatcgaatggctcaggacttcttcaacgcgcgtctaacgcccatgcagtcagggtgctgcaagccaccaacgcaatgtgcgtacacgtttgtgaatccaacctattggattagtcccatcaacacagcagcggatatggattgcctgcaatggagcaacgaccaaacacaactttgctacaactgcgactcgtgcaaggccggtttattggcaaatcttaggaaggagtggagaagggccaatgtgatattaatcatcacagtcattgttttaataattgtgtatttggtagggtgctgtgcctttaggaatgtcaaaactgaggacctcttccgcaaatacaaacaaggctacacttgaaaagctttaggttcaatgtgtgtgtgtgtgtgtttttttttttatataaatgttagtttttttttattagt

SEQ ID NO: 129257 - DNA, 330 bp, Glycine max
  unsure (1)..(330): unsure at all n locations
  Clone ID: PAT_MRT3847_87724C.1
tcgaccggtggtagaagaccaccgaagggggacacaccgacgcacacttcaatttaacttgagatacacctttttgtgatccacgtttgtgcctacgaccatcaaatacctgatgagggttcatgctacactgaacttggtttcagagctccaagttagttagaggcagtcgttgcttacantagatcttttgatctgaaaatcgagtgcctcacaggttattaagtgcgtcaccgttggtgaccgagctgacggcaaaacctggtggttgatttcctacaccagcaacacgtttaccacggtctttgtgcccaccaggttggacaattt

SEQ ID NO: 129258 - DNA, 285 bp, Glycine max
  Clone ID: PAT_MRT3847_87725C.1
gttactcgggaatttctattatggaaattggatgataaaatttagtttcagggctgagttttaaaaaaaaacaaaaaaatccccccccaaaacggggcggcccccaaatgggcggccaccttacataccccaacctgccacccctaacattccttttaataacccctaaataaagccacctaaacgccatttactagcccccgttttacaaaaaccccgaccgggaaaaccccttactttccccaacttaaatcgcccttgcaaccacatccccccttttttccc

SEQ ID NO: 129259 - DNA, 425 bp, Glycine max
  Clone ID: PAT_MRT3847_87726C.1
accaggttagaatcgaaactccacagtccagtgagaggaagagaaagcatgaagttcacagactcgccggtgatcgagcttgcggtgaacgacgccgttctgtcgcttcagcaagacaacgggtccatgcacgtgggaaccaccgtgtggccatgctccctcgtcctcgtcaaattcgcggagcgctggggcccaccctctgacaacaacccctacgctcgcgtgctcgacttccaaggcaagcgggccgtggagctcggcacgggctgcggcgtggcgggaatgggcctctacctgttgggcctgacggacctgcttctcaccgacatcgcacccgtcatgccggccctggagcgcaacctgaaagtcaacaagcccatcctgcgcgaggccctcgaacactccgtgctctactgggacaaccc

SEQ ID NO: 129260 - DNA, 486 bp, Glycine max
  Clone ID: PAT_MRT3847_87727C.1
ctaataacgcgaccttccgaacagcagcagaaatctagcgtgaggcttcgatagcccagaggtgcaggcccacgacgctgaacgtgcgaccttttccattacttgaggaacactccggctccggcacgaagacatgaccatgtccttcttcgagcaggtggtcgtcatcgacgacgagggccatctacttggccgtatggcctgcatcgtggccaagcagatgcttaacggtcagaacagcagcgttgttcgtgccagggctctgaacatatactgagagttcttccgcgccaagctcaggtaccacgcctacctgcgcacgatgacccgtaacaaccccacccgcggtgggcccttccacttacgcgcgcactggaagagcttatacaacgcctttcacggcatgaatccccacaagaccgcccgctgcgccgacgtccttgagcgcatcaaggtcttagagggcgtctccgctccctacgacac

SEQ ID NO: 129261 - DNA, 456 bp, Glycine max
  Clone ID: PAT_MRT3847_87728C.1
caaaaagaacgagcattttttgtttatacaatgaaaaagcgaataacctaaattattcaatgttattaagttgtctccgggagatggggcaaaacatatgaattactatagcatagttgccacaatcacactcatatatactatatagggactaattaaagcacaatccataatacaaagggaacttataacacctttatatctcaatgggatacgatttttaaaccaaatgatttattcaaccatgccttccatccatggccaccactgctcttgtgagacgccaactcaaattgtggcgctgcctttgaagatgagtacacctgttttttgcatagcacaaaattcctcactccaaaagatcctatcggttccaatggactcaaagcatcaaagccagctttagcacagtaaagaaggaaattggtggcatcaaaaccaagaacaggaagcctc

SEQ ID NO: 129262 - DNA, 387 bp, Glycine max
  unsure (1)..(387): unsure at all n locations
  Clone ID: PAT_MRT3847_87729C.1
catgtcctaggttccctttgtcttcacggtttgcagtcccgacacactgacatcctccttgtttgagtgtgttgttaggaaggtaggtgaccgttgccttatgccttanctgcctcgactgatcatctgacgtgacctgtggaggcttgcgtaggatccatggtttagtagcattacccagtgggtgatttcgctcccattgtccaccggataataagctccctccgaggtcaacgatggcggtggtgcgcgagtcgctgatcccgcgtggttcagctgcctttttcggtgccgttgggtcttgcatgtcacctaccatgcccagagaggttgacgatctcggagtgaagtttacaagggggctgagatcgaaatctatctcctaca

SEQ ID NO: 129263 - DNA, 331 bp, Glycine max
  Clone ID: PAT_MRT3847_8772C.1
cagcgaatgggacggcttcatccagaggaaggaatccctgaagatctttgacttccaaaaactcccaaccggcaccaacacccataaatatggggctcatgacactaacaagtcctactttctccacaactgcaacataatctccccctccaataaatgggggcaccccctttacagtgagggcagccagccttttggcgaaaacctccgtacctaacagaaaatttggtaaatcaaacaatcccattgggccaatccatacgaagggttgggtaaaatccaaaggttggctggaagaattaacaaaacttgggagaatatccaatcccag

SEQ ID NO: 129264 - DNA, 1662 bp, Glycine max
  Clone ID: PAT_MRT3847_87730C.1
gttttaatgaatatattatccactcgtacggctgcgagaagacgacagaaggggagcgagcaaacagtttctgagtttctttctgttcccaatttgtttcggatctgtgttgacgaaccctaaacctgacgttcgttcccatctgaccactgcatcgtttctcaattgtcgaaagatgagtacaagtggttaatgagattgaggaacttgcgtgttgacgaaaagcaaagcaccatcggagatgtacctgaaggagccgctatggagtgaaacagggaaagacgatggtgaaagtgcaaagacagaagaagaggttgatggttatggtgcagtgagtgaggtcgtgaagtcactgcagcaacagagagtgtatagagaagtcactctcgcactcagaactggactcagagacgcgcgtgccgagttctcctttctccgtgttcgtgctctccgttccattctcaagttcctgcgttccgttgcggagtctgattcaaccattgacctctttaaccaaatccaatccattccccaactccaagtggttccggttttgtttcagcactcgctcaaagagagtggggatgatgattacaatgagaagaagatcaaggtaggggatttgagtcatatattatttggtgttgaaccgatgaagttgacgagtccatccactgatgctgaagttgcgctcgctcttagagtcttggaagggtgttgtttgcttcaccctcagagtacggctctcgcccatcaacacaacgctattcaggttttaatgaatatattatccactcgtggagtgcttgagcaaggtgcatgcttagatgctctaatctcattgatggtggattcatcatccaatcaaatggatttcgagaaatgtagtggtattatggaagttgctgaccttctaagagacaaacaactggatgaaaatctcaggttaaaatgtggagagtttttgctgctgctcattggacatgtcaatggaagagatccgcctcctttggcaactatacatgaagatacaaggcgccttctaggggagaaatcagcctccttgatatgggcagccagtcagttcggttcaacactagatcctgagcagagactaacagctcttcagatccaggctcgcagggtccttgaatcattggacttgtactaaattttatggtccgtttggaaggaaaatagtagatggaaaaaaaacatggatgatgtctgatgtcgtttcttttatttgatttgatagaaaaactgaaagaaatactaaaggaatagttgacttcatgagacaaaaattttaatttttctttcttacttaaaataataattgctgttgcaatctggttaagcttttactatttttattttgaagttgtatgcttttcttctaaagcaactattgatgaaggaaagaaagtgtgtattcgactaagttcttaacagtaatttatactaatgtttgccccctggggttctctcatgccatttcctctacaagataagataaaaaaaaaaatcgaaattaaattcttgtcgatctggccagacagagggattaggattttcgcctcctgttgtcggctattcctcttctttgtcttgcagtttctcgcagagcatgtgatcctttttgttttcaaaaaaaaaaaa

SEQ ID NO: 129265 - DNA, 635 bp, Glycine max
  unsure (1)..(635): unsure at all n locations
  Clone ID: PAT_MRT3847_87731C.1
ccatattggtatcgatcccattttcgttgctttcactactgaacaccactaagtaagtcgaggctttttctttcctcccatacgcactgaaatcttgcgccgtttgctttactcccgcttgcttgctcccatagatcaatcaaatcgaaaaaaagaaagatttggagaaatggaaacattcttgtcaaaaatcgtttcatgtgtcgtttgtcattagttgctccgtcgttctactagatggctgatatcgctctggcggatgtgcagtggcgctacagccgccttggtccgccgttatcgcgaagccaatgcaatcagcatcggcgcgggtattatcgtgggcgagtgaagccgtcgtccagaagatattgctgaatccgccggatcatcgccaacatgcagttcgtatatgtagcatgggttgggtgtcccggcattggcgnnncatactggtgaaatcatcacnncatganngaccagccattgccnntcccattatggccattccgacccagtccaggatcgccgaacctttgcgatgccccccgtcgttcgtctcccggccanngcccgttgtcannnnnaatctcnntgctgctattatgttgcgaagcatctnnggcccccacagnnna

SEQ ID NO: 129266 - DNA, 1415 bp, Glycine max
  Clone ID: PAT_MRT3847_87732C.1
gtccggcgcgtcggcccacgctatcgtagagatggtaaaaaagggggtaagcaatgagccatggaaattttgctgttcccaatttgtttcggatctgtgttgacaaaccctaaccctgaggagtatgagtggttattgagattgaggaattgacgaaaaggaaaggaaagggggagatgtacctgaagaaaccgctatggagtgaaacagggaaagacgatggtggaagtgcaaagacagaagaagaggatcatggtgatggtgcagtgagtgaggtcgtgaagtcactgcagcaacagagagtgtatagagaagtcactcttgcactcagaactggcctcagagacgcgcgtgccgagttctcctttctccgtgttcgcgctctccgttccattctcaagttcctgcgttccgttgcggagtccggttcaaccatcgacctctttaaccaaacccaatccattccccaactccaagtggttccggttttgtttcatcactcgctcaaagaaagtggggatgatgattacaatgagaagaagatcaaggtaggggatttgagtcatatattatttggtgttgaaccgatgaagttgacgagtccatccactgatgctgaagttgcgctcgctcttagagtcttggaagggtgttgtttgcttcaccctcagagtacggctctcgcccatcaacacaacgctattcaggttttaatgaatatattatccactcgtggagtgcttgagcaaggtgcatgcttagatgctctaatctcattgatggtggattcatcatccaatcaaatggatttcgagaaatgtagtggtattatggaagttgctgaccttctaagagacaaacaactggatgaaaatctcaggttaaaatgtggagagtttttgctgctgctcattggacatgtcaatggaagagatgcacctcctttggcaactatacatgaagatacaaggcgtcttctaggggagaaatcagcctctttgatatgggctgccagtcagttcggctcaacactagatccagagcagagactaacagctcttcagatccaggctcgcagggtccttgaatcattggacttgtactaaattttaaggatagcatctgcaactttaggcaattgtcatcattgatttgaaaaaatttgcagagaatgtgctccttttggttttcgatttttgtatgtgtattcgcctttcttagctacaataataattgctgttgcaatctggttatgcttttactatttttattttgaagttgtatgcttttcttctaaagcaactattgatgaaggaaagaaagtgtgtattcgactaagttcttaacataatttatactaatgtttgccccctggggttaccggaaggggggggggggggggggggggggggggg

SEQ ID NO: 129267 - DNA, 561 bp, Glycine max
  Clone ID: PAT_MRT3847_87733C.1
ggctcgagcttagttttttcttcgtgtccgcgcccctgacacaagaacaataacaacaaggggcattgtaatggcaacttgtgttcctgctgtaagtggtgcactgcattatggagtgacaaactgcaagggacacagctacagaaggagtgcttccttttctgatgtgcctaacacgggattcttacaaaaagatctttcatggtctaaagtggtatccaaggtcctgcagatacacagatgtgggttttctgcaccttcacttcataaggatcagaaactcttcaaagtcatttcctcatggaagaaagatagtcccacaaaatactttgactttatcgtcaattgggagtggaattgctggcctccgatatgtgcttgaagttgcaaaatatggatctgttgcagtgataaccaaggctgagtctcatgaatgcaatactaattatgctcaaggtggtgttagtgctgtgctatgcccttcagattctgtggagagttacattaaagacaccattgtggctggggcatcatcttgtgatgaggaaagcgtccggttgt

SEQ ID NO: 129268 - DNA, 1421 bp, Glycine max
  Clone ID: PAT_MRT3847_87734C.1
ttttttacatcaaataatattgcacacttcaccaattatattaaaattctgataagagcgctataataatttataaaagcatgatcccattccaaaggatctttataagagtgtcttgtatcaagtgctcagtaaataaaacagcacaagcattattaacgtgtccgttttacatggctacagccataatgcacaagaaatgacttaaaatgaagcaaggtcttgtggtgagtctcgcatccttcttctgtttacagccacatacaagtttaagctctttaaataaatgaaaggatggagcattttaaatccttgtcagactggtgtgttgcttaaaatttcatccatgtagtctccacttcggattggagtgaatcttggaggacatgattcgctacaacaacttttgaggcattccaccacacagtctggatgagggtctaagaagaatgccatcgaatagcgttcttttccagttcgtttaacccggtgcattgttgaccggtataaacaattagtccacctctccatcaagtctccgatgttcacaataaaggccccctccatgtaaggcacatcctcccagacccgtggttcctttaacttgtcccgacagatctgtagtcctgggactccatcagtcattaggagggtgagcgcgccagtatctgaatgagcagagcatatctcttggtgaggtcccatttcacctggatagcgcaaaaggcgaagaaaagctgatggtttgtccacggcacctatcttatcaaagaaatcttcatccatattcaaggaaagtgcaattagagaatacaacttttttccagcttcaaagagtttccagtagatggcttctattgatggtctccaattttcaagtaattcttccgaaggccattgattcagcttaacacttgctgaatccgccataggaccaatataatagctctcttttgaatcaccatggaggcctaaagtaggatcctgaggagtataacctctaaattccttgcgggccaacttcattttctctcctggtggaagtgagaagaacctcttactctcatcaaaggctttgaccaagtcattctccacgccatggttcacaaggtaaaagaaaccatactcaatgcacgcctgacggatggaaatggcagtggaaagaggatcaggtgaggacagatctatgatagggagattcatctccttccttcctttcccaattcttacttacaataatggcaggttcaattcttcaaatgttgggttgcctccaatttattgttaataaatatactaatgtcaatatgcttgatatatactattctatggggtgtgattcaattccttacgaaataggatcatgatcgatgtgggatcgccctcgagccgaatcggctcgagcggctcgagctcgagcc

SEQ ID NO: 129269 - DNA, 276 bp, Glycine max
  Clone ID: PAT_MRT3847_87735C.1
aacataaactggcccaacaaagaggaatgatgtaggcataaatgtataaatgcaactacgccatgcaatttcatagatcaaccgcaaaaatgccctctgatcctgaagctacacgtacatttaggacaaagctaaagctaaggtaattatctataaaaactgccgaacaaaatggtttctcaacttagtatagactccaaaaatcagaaggattataaggcgctatatacaaaaattgtattggatataagactgggctacacaactttgaaaata

SEQ ID NO: 129270 - DNA, 650 bp, Glycine max
  Clone ID: PAT_MRT3847_87736C.1
ggggaacaaccgttggaaacccttgcattagtttttattttttatttttttactttgaaagtctttttaaaatgctccgtgacattaaaacgtaaggtattatcagcaaaaaaaaaaaaaatgtaagatatgcttaatttgtgttaagttagaatgtatcaatttctaaggcaccagtgctttgttaagggcctaaaacattattttagaattgtaattagacagttgaagaaactaacgagaaaacacaaaataaaaaagaagaataacgtcaaaataaatatgtgaaggagactacatcattcgtgtttagagtaagaaatttcattcgaactattaaacttttttttgcatgctttttaattttataattatataaattaagacaactatatttaatatattctattttaaattaattaaataactatgaccaatatattttttttagtctagactgtattctttttttattataaacatccatacttaactcaataagattattatttgaccacaaagttatttcttgaaatattaaacgcaataacacaaaattattagttgggttaaaactatctgatatcagttgatgcacgcgttatgatcaatatatattaattaattaatgtaattatgattatttaaaa

SEQ ID NO: 129271 - DNA, 306 bp, Glycine max
  unsure (1)..(306): unsure at all n locations
  Clone ID: PAT_MRT3847_87737C.1
gggttcgggggggtgttcctccctttggggtcttggggggccggttcacacctctattcggggtcttttctttcttcccgctcgtcctgggggggcttttttgctgtttnnnggggcggggtttcccggtcttttctttgggtcgtcccggggtttttgggggttgttttccggccgttaaactcttttacnnttggggttggctagtgctttcttctcgggtgccggggtgggccttgtttcctttcttcgtttgagggctgccggtgtttgggggtttttccccgggctttgggtcttccgggg

SEQ ID NO: 129272 - DNA, 269 bp, Glycine max
  Clone ID: PAT_MRT3847_87738C.1
ttgatatcgtgaatcaatattacaattaaaaggtttgtgagaaagtgatccataaggtgcgcttgctggttttgctcaagtagtgcaaatggaatcaagataaagcataatggggatttaaagctttaaaacagactgtcaagctattttattgacttgggaaggtttaaagagatgatgtgaagcctatagggagatgttgacatatataaagtcacattgactcttacctatagggaaaattgcttaaacagctttatggactatgt

SEQ ID NO: 129273 - DNA, 477 bp, Glycine max
  Clone ID: PAT_MRT3847_87739C.1
ggatatgacaacggggatatcacatttcatttggcacatcatcacttaacagcctcagactatcaatagggatcaaaggcaaaaatctgaaaggggcaaatagcaacaacaacaacaacaacaacaacgccttatcccactaggggggggcggctacatggatcaacttccgccataagggtctatcaagtaccatacttttatccaaaccattaatttcgagatccttttttataacctctcttataggctttttgggccttcctctgcctcaaattggttggcttctctccatctgggctactctcctcatccaagatgagcgcatacatccacaaaaattgaagttctcaagattcttcttcccttaggctgggaatccttgccctctgctgaaggaactgctcttcttgagcacgttttgcagcaagagcttcctcgtcgagtacttggattgggaaccattccggcaatttt

SEQ ID NO: 129274 - DNA, 353 bp, Glycine max
  unsure (1)..(353): unsure at all n locations
  Clone ID: PAT_MRT3847_8773C.1
acaaaactatttatgcatacatgatataatgctttattgggtaaacatcgatcctaatagtagatccgcaaatctgatacattatacaaagctctctagtgagaaaacatcctaatcgtaattataaaagaaaaatacaagaaggtattgtataaaatgaaattggcnattggtncgatttgtcgtatgcaccaactcaaactcaaatatatagaattatattgtattcctaaaacaataagcagggaagtaactgtgcgagtgcaacgagaataataacaaaagaccaagaatttatttaagccccaaatagaaacccttggagctagccggtttattttatttaattgggg

SEQ ID NO: 129275 - DNA, 235 bp, Glycine max
  Clone ID: PAT_MRT3847_87740C.1
ctctctcacaaatatacaactggtgttagatactgttgatttatcatatagtgatttgataggatgtgatttagaggaaactgtatctcctctaattatgtgtaattaatatgattagtctatataaaccagtaccataatgttatttagacatacggtttcagtctaatatgcttctggttattactgtttaatatggtatcagagcctgacagaagcacctcggaaactttac

SEQ ID NO: 129276 - DNA, 556 bp, Glycine max
  Clone ID: PAT_MRT3847_87741C.1
tcgcatgcaccgtagtaactcgaatcgctcgactcgagccgaatcggctcgaggacttgcctcctcacatgcctaccatagtcaaaccatcatcagaaaccgaggcttcggatatgcgattggctaaagtcaaggttgatgctgatttcaatgctccttgtgacccctccatcctttatcctgctgagggcaacatgcattggttcacggcagtgacagcttgcgcagttttagatgtgcagtgccttccatcaggatcagagtatggagggcactgcacatactaccagaatttccctttctccagctattcagatggactatccataccagaggaggaaagaacagcatatgaatggcttcaagagaaggagaaacctgagaatttaaaagtagttgtaaagatgtacagcggcccaaaaattgtggagaactaatgttgtcatgtcacccaacatctacttgttcctatgatctgttgctgcagtcaaatgatattcctgttgatcatttgtcttattctatcccatttgatgccacccttttgtcctcttgt

SEQ ID NO: 129277 - DNA, 549 bp, Glycine max
  Clone ID: PAT_MRT3847_87742C.1
gggttttggtgtcactttattggcttgttcctgacattttgaacaggaatttagcgatcctcgggatgctgatgatgctagatatagcttggatggtcgtgatgttgaaggaagtcgtatcattgtggaatttgccaaggggggtcctcgtggttcccgggaaaacttgggtcggggtctacctcctggatctggacgatgctttaactgtggcattgatggtcattgggcccgagattgcaaagctggggattggaagaacaagtgttaccgttgtggggaaagaggtcatatagaaaagaactgtaagaacagtcccaaaaagtcgagccgacatggacggagtctttcacgttcaccggtccggtcacattctcctcgtcgtggcagaagccgggatcgaagctacagccgagaccgcaactacagccgatcgagatctccagtcagaagagaacgaagcccagtttctgaagatagatcacagagtcctgagccctccaagataaggaagcatagcacatcacctgatcaaagcagccccacgga

SEQ ID NO: 129278 - DNA, 565 bp, Glycine max
  Clone ID: PAT_MRT3847_87743C.1
gcacgagggaaacattttgggttcaaagcatatagaacaaagaaacatgtaataataaagaaggaaattgacatctcatgcaaccgtataataaaaataaaaagagtaggttttgttgggtggtcatacttgcggccaccccaatttgatagtgcccatttacctcatgggtccatgggctatagggttccctttatgggctgcagctggggcacctacattcaccccattttgcttgtcttctaaagtgtttaataggtagttgtttcttgtaccttaaaatttgcttcctacacgtttaacctttttagaatgtaactttttacatttcggaaatgttaatctgaaatttaattttacatttcaaattaataatagagtaaattatgttgatatctctttaattttttgaaattgtatatccctatataaatctctcctaattatgtaaaaatattacagtgacgttctttttagttgcactccctccctcaaggtttaaaaaacattacatcatctacccttgtaagggaggttaatgtaagggtaaaaaacccaattaata

SEQ ID NO: 129279 - DNA, 111 bp, Glycine max
  Clone ID: PAT_MRT3847_87744C.1
ggcgcggttgatcacagtgatgtggtgcgcgatgtcggtgctattatgcgccactgtcggtgcggtctgtgtggaggaggcgagcgaacccgatacgaatggcgtctggca

SEQ ID NO: 129280 - DNA, 1290 bp, Glycine max
  Clone ID: PAT_MRT3847_87745C.1
gttaaaaaaaacattaatattttatatttttttttcatatttggtgagctcatagcactcccatcaacccttcaacaataaatgatgttttacattcttgggaatgtaaaatactcacgactgtgcattttaagaaaaccaaaccatttcttctttcttcaaaaaaaaaaaaaaagaactaaaccaataaatgatgttttatggcataatgacaacaccagttaccattcacttggacatgtgtacatagatgccacccaaaaccagtaatataaactttcagaggttctccatcttttactcctccattattccatcccaaaggaacagttgaaatttcagtttgaataacaggagactcaactatatgactgaactccacggatgccagcagctgcaatgcatgaccaagcaattgcttcagatgaggaaacttttctgtagctcaatccctaagaaatatgtggaatccattacttatatgcaagtcagattctctagcttttcatgaagacgtctccgaactttctagctgcaactgaagtgcatctcaaatttgcaagccatgtgttgtcaattccaggcggctttcctggattgatttatcaccttcaaaggcccatatatgtataaaatctagttctttctccccaaatgagagtcatccttgatacatcctatgagcagaatcagtgaaagccatctaaccagccacaagtgccaaaccaaattacaagagggttgaaaagatttcttctgttttccataaatcaagatcacaccttcatatgttgctgcaaaatagatggtgaacattttagttctaaaaatagtactcaatcatagagaatttttttttatagtgagctatagcttaaaaatcagtctcaaagtcggaagagcccaagttcacagtatccatatattgggtagcatctatgtcactacagcagctaaaaagatatgtaatatatcatcagcaacatgatcaaattgtatccataaattgaagcagaaaaattgaagaaaaaaacaatggactaaccttgaggatcagttggccagcaagtgagcatacttgatgtgcataatatttattttaatggataaactttatgaaattcttaccagattagccaaccctgggttttgtaacaaaaaatacaggacctgagttcaaaggaaggaggctccaataggaatcttgactatcgaccaaacagctatgccatttgattctataagaacctacgggaaagttagacacatcaagtgagcaatgtgaaaacc

SEQ ID NO: 129281 - DNA, 474 bp, Glycine max
  Clone ID: PAT_MRT3847_87746C.1
gactgatcatatatatgtaatcctgcggcctccgacccacccacaggaagccttagtctccattagccttaacgagacagaaagtgaggttggtatgaggtaagaatagattgagttgctacatcacgtatcattccttgttcaaccttatgagcttcctctgctatgtaggctctgttagacactcatggattaggtgtgcttcaaatcacgcgccctcaagttgctgtatgacactgccctattctttctctcatctgggcttgctatcaggacttgtgctccatattctctatgtgttcttgggaacatggctcagccgtgtttaagtcgggtcctctacatggagttccttacccgagaaggtgcaggatgtgtcagatgcaccaaccatgtcattcaggggtttgaagtgctcgatggactactcgccccgtgttgcaaagggggagggggagcctctcaactgaactg

SEQ ID NO: 129282 - DNA, 293 bp, Glycine max
  Clone ID: PAT_MRT3847_87747C.1
accacgcgtccgcccacgcgtccgcccacgcgtccgctcttttcttctcctcctcctccctcaccaagttaaccaaagcaatgaagagactaaaacacgaggattcacaccaccaggacaactcctccgaacaacagcagggaaagtgtaggttcccattaatagccattatctctcttttctctctcttcgtcggcctcctctttgctctcacgcggagcgcctctctccgccacacgcgtcgtcgacgtgccgatctcgaccggcactcctcctcccacctccagcttcgg

SEQ ID NO: 129283 - DNA, 279 bp, Glycine max
  Clone ID: PAT_MRT3847_87748C.1
tcgccagcgttcggatgtaaggctgaggccgaggattgagaaaactactctagccaacgagaatgtcaggtctatgcgaaaacccgacatggactcgaaaaaaggaaattattgtccaactaaaagacagggaaaaccctgaagaaacccaaaaaaaaacgccgtgaaaaacaatacaaatatcaacagctagcaaaaaaagggggcgggcgatcaaaaggaaccaaggtaacacacccgggcaggcaaggaaggaaaatttggaagcgcgccgcctaa

SEQ ID NO: 129284 - DNA, 297 bp, Glycine max
  Clone ID: PAT_MRT3847_87749C.1
gttttgtttttttatgtgctttctttgggttcctgaaaaaaataattggaagaatgaatttcacttaaagagtaatttaactagaatacttatcggtggggcttaaacaaattttattcaagaactcttaccctttgggctattccaactactaggggagccccaacaaattaaaccaccccactccaaatcaacataagaaccatttttttatccctctgaaggggggttatcatgcactccaaatttccccacgtgcccatccacgttcccaatgggtgcccatctattttccct

SEQ ID NO: 129285 - DNA, 578 bp, Glycine max
  Clone ID: PAT_MRT3847_8774C.1
cagagcgccacattcttttgcgtgttttgcctgttcttgttgtcctagtgacatcatcagagaaagacagcgagtctctgtataagagggtgaaaatcaacagactgatcaatatatttaagaatgaagcagtcattcctgcatttccagatctgcatttgtctcctgctgcaatattgaaggaattatcaacatactttccaaaattttcttcccaaactcgtcttctcacccttccagcacctcatgagcttccacctcgtgaagcacaagaatatcagagacattatctgatcatcaatcatattggagccatccgtgctgagcatgatgattttgttattcgttttgcttctgcaatgaatcagctgttactgttgaagtcaactgatggttctgatgttgaatggagcaaagaagtcaaggggaacatgtatgatatgattgttgaaggttttcagctattaagcagatggactgcacgcatatgggaacaatgtgcttggaaattttctcgaccatgcaaagatgcatccccatcattctctgactatgaaaaggtagtacgatataattac

SEQ ID NO: 129286 - DNA, 505 bp, Glycine max
  Clone ID: PAT_MRT3847_87750C.1
gccgaggaacgaacctcgttaaccagagaggaagccctctcttgttacgaactatgcttaatatatatcaaaaatgtatatatgtgagagagagggtaaaaactttactaaagtgtgacccggagatgttgtatggagagctgaataggatggagcagctcaccatcttccacattagttggtctcaacctaacgcattgacacactaaaactgagagaaactggattccctagaacaaatggagatggcagttcaactgacatgcaaattgctggcttatggaggcttttgctaaactacgattaagaagataggacaaattgctcaagctcaaaccccggtatcacaatgacaatcatctatcatgagaggagcgaatgtttaattgatatacacgcgcttactgacagaaacacgaaggtgaactaagttgccctagccagcagggatgctgctataacttagagaggagtctacaatggctcccaccatccaaagcatgct

SEQ ID NO: 129287 - DNA, 538 bp, Glycine max
  Clone ID: PAT_MRT3847_87751C.1
agaatttgctgttgacctctcttattgtaatatttcaattttcatagcttattatctaaagtaacatgaaaagatgtctattgatatacaagttatctccaacgtggcccagcggagcaacgtgaaggcactccattctcagctaatatgaagcgatccctctaaggtatttgatagtagacactctttttgaatgtgctgaaaattctggatctgtgaacacacctacggacttgggcgtgagacccacgaggcacacttgctcaccgtctgatattccatgcgctctagaatgaggaagtgaacgctcacattgacagtatgatagggggcttcagatgacactcaagaggaacgttgataaggaaaactacaacgacacgtaccatctggttgagcgtagcagcggaaaggtcatgagaaggaccagattgtcacttaattcataagagaaacaagtaaaggcttgcatcgaaaaaggggttctcactgttactactctaaaggaagaggccatgaaatataatgttaagcctat

SEQ ID NO: 129288 - DNA, 425 bp, Glycine max
  Clone ID: PAT_MRT3847_87752C.1
gggggggcaaggtatttattataaaaaattaacttccccccaaatttgcggaaaaggggaaaaaagggttagcatcggggccctgaaaattaggacagttttatgcatacaaaaaaattttttaaaccaaagcctaacataacaaaggggttaaaaccaacattttttgggggcaatttcttccggggggtttaggggggaaattagggaaaatttgtttttggaaaaaactaacccggacaaaaaaaatttccagagctttcaagcaaagggggccaaaggcacaaatctggaacatgctttttttggagaaaaaacaatattttaaacctgggggacagccattttttccaaatttggtgcatatgggaggggaacagccccggcaattttttcaaccggggcattaagaaaaccaaaacttt

SEQ ID NO: 129289 - DNA, 342 bp, Glycine max
  Clone ID: PAT_MRT3847_87753C.1
aagcttgaagagactattccttttacaaacataaacaaaatggttcattccaacaaaacactattactttatcctaaaatgctccggggcattatgacctaaatatgaagcgctggcactacaaaatacaaaagccaaaatggcggcataagggtggcgtttgaaacaaaatcactccttcaagaaaaccatggggatcttacaaccaggggaacatgccaagaatggggtgacaccatccatcccattttctaaaaaacaaaacagggagggggggagtttggtcaccatacagggcttgcagttggaatggaaaacctttcgaaaaaaactgtaccgaaa

SEQ ID NO: 129290 - DNA, 1796 bp, Glycine max
  Clone ID: PAT_MRT3847_87754C.1
cgtccgggtccgcttgtatcatttacacggagagaggaagtgaaattttcgtgagcgacgacaaaacaaaaaccattcaattcaaagatagtaggctgccaggcaccgcacaccgccaccgcactttctccgatcctcacaattttgcctccggcatgtctccggccgccggagtcagcgtccccctcctgggggattccaaaggaacgccgccgccggcttccgtccccggcgcggtgttcaacgtggccaccagcatagtcggcgccggaatcatgtcgattccggcgatcatgaaggttctcggcgtagttcccgctttcgcgatgattctcgtggtggccgtgctggcggaactgtccgtggacttcctgatgcggttcacgcactccggcgaaacgacgacgtacgctggcgtcatgagggaggcgttcggatcgggtggagcattggccgcgcaagtttgcgtcatcatcaccaacgttgggggtttaattctctaccttatcatcatcggagatgtgctatctggaaagcaaaatggaggggaagtgcatttgggcattttgcaacagtggtttggaattcactggtggaattcccgggaatttgctttgcttttcaccttggtctttgttatgcttccattggtattgtacaaacgtgtagagtccttgaagtacagctctgcagtgtcaactcttcttgcagtggcatttgttggcatatgttgtgggttggctatcacagctctggtgcaaggaaaaacacaaactcctagattgtttcctcggctagactaccaaacctcattctttgatctgttcactgcagttcctgttgttgtcacagccttcacatttcactttaatgtgcaccccattgggtttgagcttgccaaggcatcccaaatgacaacagcagttcgattagcattattgctttgtgctgtgatctaccttgcaataggcttatttgggtacatgttatttggggattcaacccagtcagacattctcatcaattttgaccagaatgctggttcagcagttggttccttgctcaatagtttggtccgtgtaagctatgccctccacatcatgctggtgtttcctctcttgaacttctctttgagaaccaacatagatgaagttctcttccctaagaagcctatgctagccacagacaacaaaagatttatgatcctcactctggtgctgcttgtattctcctaccttgcagctatagcaatcccagatatttggtacttctttcagttcctgggatcctcatccgcagtgtgccttgccttcattttccccggctctattgttttaagggatgttaaaggtatatcaacgagaagagacaaaattattgcactgataatgattatactagctgtggttacaagtgtgcttgccatttccaccaacatatataatgcttttagtagcaagtcataaatacaagctggttctctcatttctccccttctattgttttttttatatgtatagaaaattttatttggggagagagggtatggctggggagattctagaggcatttggttgctgtggcgattgtgttacttttgtattttggatcccttgttgtttattgtagaattcatgtcttgtggcagcatttctatgtaaaataccaaatattaaagaaatgaaatcaacttgatggggtgacgtagttggggccatatcaagtttgtgccgtgcaaggatacaaaaattgatcaaaaaaaaaaaaaaaaaaaaaccgagactagttctctccta

SEQ ID NO: 129291 - DNA, 506 bp, Glycine max
  Clone ID: PAT_MRT3847_87755C.1
gaaaaaaaaactcccgtgtttacctttccaatgccaaggcccaaaggcacattgagtttgacagtggggaattgatttggttcccctaccaaggggggcatagttgtggactctagaaggaaattccgaatgccccacttgggggatttaacaacttggatttgacatggtttttacatttttttgggggccaaaatgttcctttggttttgggatttacaaaggcaacgttcctagattttaattttctggagggtcaagggacgggtaggcctttaaataattctcccatcaaaggggagaatgtcagtggcttgtttatataaaattgtgcgggggataccaatgctgaataaaattgattgctgaaccttacgccttttaatgaccctgaacccagtcggaaagagactacgactttgggaatgccaaaccttctttgttgggcttgaaagctttcactgccggcagttttatattccaacttctgacaaggtgattttaag

SEQ ID NO: 129292 - DNA, 697 bp, Glycine max
  Clone ID: PAT_MRT3847_87756C.1
cccacgcgtccggaacttctctttgagagccaacatagatgaagttctcttccctaagaagcctatgctagccacagacaacaaaagatttatgatcctcactctggtgctgcttgtattctcctaccttgcagctatagcaatcccagatatttggtcttctttcagttcccgggatcatcatccgcagtgggccttgccttcattttccccggctctattttttaagagatgtccacggtatatcaacaagaagagacaaaattattgcactggtaatgattatactagccgtggttacaagtgtgcttgccatttcccccaacatatttaatgcttttagtagcaagtcataaatacaagctggttctctcttttctccccttctctctctctctctctctctctctctctctctctctctctctatatatatatatatatatatatatatatatatatatatatatatattatagaaaaatttttttggggagagagggtgtgactggggagattttaggggcaatttggttgctgtggcgattgtgttacttttgtaatttggatgccttgtttattgtagaattcatatgtcttgtggcagcctttttatgtaaaaaagcaaatactattaaagaaatgaaatcgccttgatgggtggctaagttgtgccctatcaagtttgtgccgggcc

SEQ ID NO: 129293 - DNA, 1763 bp, Glycine max
  Clone ID: PAT_MRT3847_87757C.1
ctagcgccaggattatgtggtgcatatccaccaatcccctgtctttgtccctcacctcataatccttactatcaccactttaccacttccacgcttatttctaattgatccttttcctgtcttgttttcatgacataaactatcatcaactgttgctttccattttggctataattccacaaaatgtgccattcattgcaagtgtaatattactagcatttccatatatcagtccatggcctccttaatgctcaatggagctcatcaaaatccaaacctcattagtggcatagctccaaatggccttaactttcacaacaagtgtttattccaaaagggtgtgctgtctcatggtaacaagttaagggtggtcagaaaaaacttcactcccaaaggcagcatgtcagcatcatcatcatcatcatctaggcctggttctcagccaaggttcatccagcacaagaaggaggcattttggttctacaggtttctctctattgtgtatgaccacatcataaacccggggcactggaccgaagacatgagagacgaggcactggagcctgctgatctctacaaccgcaacctgagagtggtggatgttggaggtggaactggcttcaccactcttggtatagtgaagcatgtggacgccaaaaacgttacaattctcgaccagtcgccacaccagctcgccaaggctaagcagaaggagcccttgaaagaatgcaagattgttgaaggggatgctgaagatcttccatttccaactgattatgctgatagatatgtttctgctggaagtattgaatactggccagatccgcagcgtggcattacggaagcatacagagtgctaaggataggaggcatagcttgtgtgattggtcctgtacacccaacattttggctgtctaggttctttgcagatgtgtggatgctcttccccaaggaggaagagtacattgaatggtttaagaaggctggtttcaaagatgttaagctcaaaaggattggtccaaaatggtatcgtggggtgcgcaggcacggccttatcatgggttgctcagtcacaggtgtgaagcctttgtctggagactctcccctccagcttggtcccaaggtagaggatgtaaagaagcctgtaaatccatttgtgtttctttatcggttcattcttggtacaattgcatccacttacttcgtactagtgccaatttacatgtggatcaaagacaaaattgttccaaggggcatgcccatctaagtttggagaaagtaactcgggtaggaaggtcaagttttccctccacacatctctaaacgactgtttgtgaaggataataattcaatcttgaatctttccatcttgccaacatagtaggaaagagttacttaaggatgaaatgcttcaaaaccattagcttagttttgtgccattactagcttcactatgttttgtatttgtcattgttgctttggcagagaaatatagaatgtgtgttggcagccaattgttcaatgaaccatggcaggatcatcaaaatgttgtgcttcttttgctttgctttgtaccaaatggacaagacaaggtaaccatgacaacattcaaatatgtttgttttagcttttataaaaaaatgtgcgttggtggcgagttttaactgaatttgaatatgcttttttaatccccaaatacatttttaatttatttacccttgacaagtattgttcaatgtttaagcacgaattatcgttttccc

SEQ ID NO: 129294 - DNA, 417 bp, Glycine max
  Clone ID: PAT_MRT3847_87758C.1
cacccagtctcgattgtgccctcgaactcttcactatccctctctcgaagtctccctctagagcacacccactctcaattgcgtacattattaactcttgcactgtccttcacccactgtccttcgagacgtccctctctctggttgtgtactcagcggcaatagaaagtttgtctccgtggtgtggcccgcccgtacgttgtgcgcccatcctcacacaggtaaaaaccttatcttctttgtcactattttatttattgaaagtgaaatggacttccccttattcttgaaagaacaatctgggagggaggggggagtagacatctcacaaaaaatggaggttaattttatggaatacttctgttgagattttttttattaagttgtaataagaaatttatatgtttttggttttga

SEQ ID NO: 129295 - DNA, 354 bp, Glycine max
  Clone ID: PAT_MRT3847_87759C.1
tttttgttttatattttttttggggttttttggggaactggggttctgtgccaaacccaccatttgagtatattcagtcacccttggaagtagaaccaagggcaaacccggggcccaccagagcacaaacgggaaacagagattagggggtcaataaactagagcaacaaattgggaaaggccttatgccatgacaaaccttaaaaactagtggggacaaataattaaacaggggaaaccctactggggctagggggcttcataaaaaaaaaatgggaatttcagtatccacaagaccctaaacagatcggccgcaattggcatttatagaaacttatttttttttaacaaaag

SEQ ID NO: 129296 - DNA, 363 bp, Glycine max
  Clone ID: PAT_MRT3847_8775C.1
gtgtcatttgttgccgcaccttaaaaccggaaacaaaagcaatcgttacttgatttcaagaatcttcccattttcttctacctcttgggggtcgatttcttaggggaagaaaagaactctctgtgcgggccacaaactcgctgaagaatggaaaatgccacctttactaaagcacatgaagactgtgctaaatcctataaggattttgggacagatgaaacctctcatggttcataagtaagtcctgtgctaaattacaagttcaagctggtgaaatttgggattagtgctcccactctcctatctggtataggacttcgtgggtagacttttctatttctgtcctttctttcactctctttt

SEQ ID NO: 129297 - DNA, 262 bp, Glycine max
  unsure (1)..(262): unsure at all n locations
  Clone ID: PAT_MRT3847_87760C.1
accgtcgtcgctggagaagacgacagaagngaaaatctaataanaaaaaaccaaatattatattttcttaaagccaaaatgttgttatgctgaaatctttaattggtctgtttgtatncactccgcctttattcaatagtttttctcggcgaaattgccgaagcctacctttttaatcaattgggattatgccatatccctacttttttttacttgttgcagcgtgagttcatatttgattgatagtaaaaataaatataaa

SEQ ID NO: 129298 - DNA, 202 bp, Glycine max
  Clone ID: PAT_MRT3847_87761C.1
ccaaacctccggcaccacaaaaatcatggaggagagccttccagaaacatcggagattgcagccagcgacgaatgacatggaaccacaccggacagatgaacgtcaccggcaccaaccgccaacgaatccaaataccggcctgccacatggatccaaagccgcgggcgacgcctgcgccaaccatagagcgctcagaccaag

SEQ ID NO: 129299 - DNA, 193 bp, Glycine max
  Clone ID: PAT_MRT3847_87762C.1
tcgtgatctagaattagtttacgtttgggtcgaccctttaattttgatcggggcgtggggggtgaccaagttttccgaaaggagagccaattagagctggcggcaacatggccatagctgttaccggggagaattgacaaccgctgaaaaatacacaacaacaccacccgggaagcacacccaaacagccggg

SEQ ID NO: 129300 - DNA, 133 bp, Glycine max
  unsure (1)..(133): unsure at all n locations
  Clone ID: PAT_MRT3847_87763C.1
gcagcgaaaacggacgatccgaagaatacctttcacntctctaataacacactccctctctcagaatatgactgcgtctccgtgtctaanatggatttngngacngtaaggaangtgaagaaaagcacttact

SEQ ID NO: 129301 - DNA, 405 bp, Glycine max
  Clone ID: PAT_MRT3847_87764C.1
aaagggtgcatgacccaaattgggtcacttgaaaaaaattgatattcccctcactttttttgccaaccccacaaaatggggggggggggggaaagaaaattccctttttttttggggggggcagcaaattcaaaattaccattgaaatggaaccctgacagataggaacttccccaacttgggaaccccccccacattttttttactcccgattccgggggaagaccaagaaagaaagaaaacgcccatattttcggctatctttcttgggaacaacaaaatgaaggggccgactctttttccataaaagggaagcctttgcctttccaaggacaattggaggaagaactctatggccctcttcatattccttgaggaggaaaataaaaccttgattcatcacat

SEQ ID NO: 129302 - DNA, 322 bp, Glycine max
  Clone ID: PAT_MRT3847_87765C.1
ggctcgagaaaagacctatgctacatgcacatggattggctagcctatacatgcgcacgcaacatgtagcggtatacaccaccggggccttgcgatttaccccacagatgaaactagacgtatatcactccaatgatgcccaagaagcatgctgagcagcaccgcagcctgacggaccttcttccatttcgcaccatctgttcactatagggattgccgttaccgatatctcgcatatccatccatcttgctctggcatgcacaacgaccgtgcctctcccagggcggaagacgctctacataataactactccagcactga

SEQ ID NO: 129303 - DNA, 142 bp, Glycine max
  Clone ID: PAT_MRT3847_87766C.1
ataacatttgtatcatattctgtctatttagtctcgccgcccacagaaaactcatctaatgctctctaagagcgacaagagctcacaatccctcatgccatgccccctgtactgtgaaatcggccatcatcaacaagtatct

SEQ ID NO: 129304 - DNA, 502 bp, Glycine max
  Clone ID: PAT_MRT3847_87767C.1
ggtaggtgtattgcatccttattctacttaagaagttatttgttttgaatgatgaggtgcaattttgattaccaagtgttagaatatataacaaatgtcttataatatattggttattataacttacgaaagattgtcttattgataagaaaaaaatgtaaaaacaaatgctcacgcccaaggtcccaagctataagatggaaaagagcaaatagaagttacatgtgattttttttttacccattcgacctctatgtatacatagaccttactagagagtgcaacaaactttatgttctaggattaaatatatttatagttgttttaaaattttaaatttatgcttttagtctctatattttcttttttactatttgtagttctttatttattttcaatcatcaatattagtatctcttatggactaatttttgcctattttttgcccctctcaaggtctaatattgatggataaaaacaattcctgagaggtactaatatt

SEQ ID NO: 129305 - DNA, 316 bp, Glycine max
  Clone ID: PAT_MRT3847_87768C.1
cggccgcgtgggccgacccggggttcccgcccgggttccgggaggggtcccggctggccttatagttttcccttttggggctgggcttaagggggggcgtacctgtgccctgggggaattcgtgggcggctcgcttttccgccccccttcccccccggaatcttagcgggtaacccctggggtgcctcctggggggcctatcgggggttttttgcgttgggctttggggcggctttccggccggttatccgggcgggcaacctgtcttgccggttgggtcaacgcccggggaaaggcgggttgggaattggccccc

SEQ ID NO: 129306 - DNA, 140 bp, Glycine max
  Clone ID: PAT_MRT3847_87769C.1
tttttgtttgttcaaggtaactaaccagagtgtattgcaacatgaattaaaggttgctacccatccattattcaaggccatccttacctttgaaaaggccccacttcccaccgactaataacaggaaagagctcgagcca

SEQ ID NO: 129307 - DNA, 860 bp, Glycine max
  Clone ID: PAT_MRT3847_8776C.1
gaacagttacatgtcttctgtgaggaaaatggcatgtgagattcttgagctgatggcagaaggattgaagattcaacaaaaaaatgtgtttagcaagcttcttatggataaagagagtgactctgtttttagggtgaatcactaccctgcttgccctgaacttgtgaatggtcaaaacatgatagggtttggagaacacacggacccacaaatcatttctctacttaggtccaacaatacttcaggccttcagatttttcttagagatggaaactggatttcagtcccacctgatcacaaatctttcttcataaatgttggtgattctcttcaggttatgaccaatggaaggtttcgaagtgtgaaacacagagttttgacaaatggatttaagtctagactctcaatgatttactttggaggtccaccattgagtgagaaaatagtaccattatcttcacttatgaaaggaaaagaaagcttatacaaagagtttacgtggttcgagtataaaaatttaacctatgcttcaagattggctgataataggcttggacattttgagagaattgttgcttcataatatgctaaaggattacgggggcatttgtcaatacaaaatggggggttacaatatatagtctatatactatatatgtttttttttcaactttaaggttatttatcaattagaatgcttcatagacgatagaatatataccccttttgcttttgcttcaacactagtggatgacgtctgatgtagtcaacaatggagatttgttaatgattaaaagcttgattcaaattgcaataaaacattataagaataaagtatatattccatgcacaattctccc

SEQ ID NO: 129308 - DNA, 691 bp, Glycine max
  unsure (1)..(691): unsure at all n locations
  Clone ID: PAT_MRT3847_87770C.1
ccacgcgtccgctcaagtaatctaggattctgatcaagttttaatatatatatatatatatagtagctgcggtagtttccgaaagtattacttaccggctgttaagatatcgatgctatgcaacattaattcttgcattgggtgcagagggagataaagaacagattggcaggaaacagcaattcagtggatttgctcaagtgaaggaatacttttctgggatcttttaataggaaccaagcagtgacaattccagggaccggttcaaaaacatggaccatacccctgcttcagctatcacacaagcaaaaaaagatcttgtaacatcaattaaagagaagcttgaagccgtttcatctttgaaatccatcttcagagtccccgagaaactcctggaagcaaatgagaagatgtacatccctagcacagtgtcaattggtcctctccatcatggcaaggagggtctaaaatacatggaagatcgcaagtggcattacctcttcacacttctgagtcgacaaccaaatcagcttgaatcaagcttgcacgaatttgtgaatgcactaagcgatttagagaagccagcacgaaatttctatgcagaagaactcaatctcacatgcaatcaattcatggagatgatgntagttgatggggtgtttcatcattgagcttttcttgaatattctct

SEQ ID NO: 129309 - DNA, 357 bp, Glycine max
  Clone ID: PAT_MRT3847_87771C.1
cgtggtttgtaattttttgccacaagcacacaaccagtatagcagatattattgaaaataaaaaaaaaaattatactttaattatgttcatactatatttttaatatttatacaacacagtaaattgactaggcccatcccaaaaatctccatgttggattgggtcaaaaagcaaatgtagttcgaccccaacctgaaaaaaaaaagggcccctttgtaggccaaaagccgggagtgggccccacaatagggaaaaaagaataaatttgcctgtgaattctcaccccagaacgatacagaataaagggggggccctcttttacaaagggaaaaaaaccaaaaaaccccccccctttg

SEQ ID NO: 129310 - DNA, 322 bp, Glycine max
  Clone ID: PAT_MRT3847_87772C.1
tacggctgccaagaagacaacagaaggggggctagagagcaacaagtcttgtgttaggagttaaagcagaaaggatggctcccaataaacctagaaccacgacacggtaccctgattttgttaggtatgattggctagttttctatgtcacatatgtaccacacgaagatccttacaggcattaaagccaaaatctgtcttattgtgacatttacccttctgatgtccaagaaacaggaatatggataaacggccaattgctatacccagatatccattcttataccaacgtcatcctcattatcaatgtctaaaacaggtt

SEQ ID NO: 129311 - DNA, 179 bp, Glycine max
  unsure (1)..(179): unsure at all n locations
  Clone ID: PAT_MRT3847_87773C.1
attntanttgcaagatggnagcgtcatcagaatgccttgnagggaatggnttatctnaanggggtaanaganngaactgntcaaganggactncaatggaagntatgtctaacncacntnggagactttcatcattgaacnataaggcatcagngagcatnttccataaagtcttcctt

SEQ ID NO: 129312 - DNA, 289 bp, Glycine max
  unsure (1)..(289): unsure at all n locations
  Clone ID: PAT_MRT3847_87774C.1
ccgagaaanggaactgaaggctcaaattacggccattattgacaanagcaaggaaatnnttaaagcagagactgaatctggtgatgtcggtcctcttgttactgaggcagatattcaacatattgtctcctcttggactggaattcctgtgnnagaaagngtcgtctgatgagtctgaccgtctcctaaagatggaagagacactgcatacacgtatcattggccaggacgaggctgtcaaagctattagccgtgctatccgccgtgctcgtgttggcctgaagaatcc

SEQ ID NO: 129313 - DNA, 592 bp, Glycine max
  Clone ID: PAT_MRT3847_87775C.1
cgatctatcgctagaaatgtgccaggtgcctgtcactaagcagtgtggttgagtctcgggtttaaataacagctgggcagcgccccagactacaatactagctgcggatagggctgctaccgtgcctggcgcaaccgtggaaattgggtgcgctaagggatgtagtaggtagctagaccctggagcattaccgccgctagcagcgccagggctacaactgcttgcgaacagggctaagccataccctgccaggacggccactacagccgtttatataggcgccggtgggacagcgtatagggagcctagcttgcttgaatagccgccgcagcctgttggtgcagcaacttcaatggggttatagccggcttatgctactacttaggaagcagtcattgacggcgggttcagagttaaccccaaagcctaggccgcggtaatgattaatgccaaagaaaccaatgttgtggcacaggcccaaaccgaccagaggcaggcaaacccaaacacgcctgtgtggccctgagccagtactgcggtacaatgcggaccagctactggttggacgccaatagtagccgggctcgcgaat

SEQ ID NO: 129314 - DNA, 358 bp, Glycine max
  Clone ID: PAT_MRT3847_87776C.1
tgtaaaacatatttttgggagagagggtaacgggagggaaaatgtacgaccagtttcaggagaacaggaggttcataagggcccgtcggtgcgggaaccggcgcatcaggaaagacccgccgagaaagagagaaagacccagggctacttggccaagctcgccgagcaggccgagagatacgaagaaatggttgagtgcaggaagaaagcaggaacacttgttcccgatctaactgccgaagacaggaacctcctctcaacgggatacaaaaatgtgaccggcgcaccaagggcctcttggagcatgacgccctccattgagcacaccgacgagtctaagggcaatgagcgcactgtt

SEQ ID NO: 129315 - DNA, 194 bp, Glycine max
  Clone ID: PAT_MRT3847_87777C.1
cgacctacgtagttcgggggagcctgacttaattaatgcggcacgcaagccttattcgcctttagttgagggttaatgtctagacttggcacctgggccgtctgttttacaatcgtcagtgacctgggaaaatccctggtcgttaccccaacattagatcgcacttgctagcacatcgcccctgttcgtccaga

SEQ ID NO: 129316 - DNA, 355 bp, Glycine max
  Clone ID: PAT_MRT3847_87778C.1
tgcggctgcagaagaccacagaaggggggtggttgaagatacatttttttagtattacacaggttcctaatctttcgctgtgattaatagaagcggtacgggggtagagtggaattctaccaacctacgctcagtttcacgcgaatgaaattatatacccatgtccgaaccggacgagactctcttgtactttcgttcaaatgtactacttctgcatacaacatctgtataatcctggaagggactatgcagtgggacttctaaacccataaacagttttcattcggccttaaaatacaccacaattgcaatgatccttttaattatagcattcattgaataataacaacctttt

SEQ ID NO: 129317 - DNA, 368 bp, Glycine max
  Clone ID: PAT_MRT3847_87779C.1
ctgtcaagaaagttgcacttgttttggtcaccggcgaccgctgcctctgcggcggttggaccaccgcactcataaagaaagctgacgctcccatcacggaattgaacgatcttggctcggaatccactgccataagtggaggccagacgggtaactcttatttcatcagagagcgctatcttccggtcgccccgtttatatacggcgccccacttgcaactgctaaggaagctcatgccagagctgacgatgccccctcactcttagggagaccaaaggtctacagaggggagcttctatcacaccgcgttaaactctttggtgaaagaggatcccacgagctatacctagctttctctttctgccaa

SEQ ID NO: 129318 - DNA, 540 bp, Glycine max
  Clone ID: PAT_MRT3847_8777C.1
gattccaaaggagattattaatattccaacactctttactttccggttaacactttcctggacattcttttctgtatgcaattatataagaatatctcctaaagaagattggtcactctttgaaccacctggggaaaaataattatccaccaaagaatcggcgccatcaagtgttgacacttttttttgccagttgtcattatcactttgatgactcggggatatcggtgtctcaagggaggcaagattgtaaaacccaactcaacatgtcgtatccttttccattcttgttttgtgcaatgcaaccctttttttagtctttacctttgtctcagccgcatagcccagtaaaaaaaacacatatgcagatcacaacacgtgtcaactaaacaatgcttgaatcctatcaataacaaaagaattttcaaaaggcttgtaacagttttatttcaaacgtcagacaaataaataacctcccattactttcaatgtagctcctcattgtatccttgaaatttatatcaatggaaaggatctgat

SEQ ID NO: 129319 - DNA, 185 bp, Glycine max
  Clone ID: PAT_MRT3847_87780C.1
gccggcctcttccctttttaaaatttataatttttaattttttcaaccgaaaaagaaaatccaaggggcgagggccagtataaattagaaccaccaacaatgactacaattgaaaaacacataaaatcccctgtggtgcagattcttatgaacaaacccctgatcagcccctacatgtgcacgtt

SEQ ID NO: 129320 - DNA, 734 bp, Glycine max
  Clone ID: PAT_MRT3847_87781C.1
cccgaatttgggacgcgtaataaagaagagagagagaaagagaagaaaatgaattactagtacaaatatacaagttttgcagaaaaaagcttcactgtaactctaatggcgatattctcggaatcaaatcaccatcacaacacttccgatggggtctcccagcgagtcaacagcccgcgtttctcgggtccaatgactcgccgcgcccactccttcaaacgtaacaacaacaacatcgccgccaacaccgccgccaccacctcccacggcggcgccggcggaagtggcgccggcgaagttgagcttcaaatcaactcgcccagatcggaggaagcgtcggagggagttccggtggggaagcacagccaccatcacgtgactcagagagtgcacgtgagggggttgctgaagaagcccctagcatccatcgttgaggatttggggttgagggaaaggaagaaaattgggcactggatgttcttagtgttctgtggggtgtgcttgttcatgggtgttctcaagatatgtgccaccggttggcttggatctgctattgaaagaactcaatccaacaaggaactatctgactccattgctagtctaaatctaatggacaaaagctcccttggttatgcatatagggggggagcaagtgatgttgaacgaacattaaaaacagtagcaacaggagatgggagccatactgccatgactgaagattcagggatctggtc

SEQ ID NO: 129321 - DNA, 414 bp, Glycine max
  Clone ID: PAT_MRT3847_87782C.1
ggaaaggaaaaaggccttttattatttattcataggccaagccttattttcacgcaactacttcggtaaagggcccccatagaaaaaaggccggggattgacttggccatagcattggacaaaaaaggggttgaagggcaaagcttgccaaaaagggctcatccctacaaagggggaaattccgatttaggaattaaaaggggcaacgtccgtagtagggtaacggaacccctttattttaggagaaaggtaacattaacaggccttggggcatgggttaaaagggaccggtggcttgaacggggggggacttaccaaaaggggggttcttggaaacggggggcttgggcttgaaaacggggggcttgggcttgagaaaggggggcttgggcttgggcttggacaccggggggt

SEQ ID NO: 129322 - DNA, 387 bp, Glycine max
  Clone ID: PAT_MRT3847_87783C.1
gaagggaataaaaatgggcgtgtctaagaaaattccagatacatagggttgtgatcactctaaagcgtgaaaacaggctgggtccaaccaagttaccatgtgtctaggggtgcaggcgtagaactaacaatttctaaggcaagtacaaggggctggtctttccagcaatcattcaaaaaggaaatgaagcgtataaaggtaggtacattcattggccatgtgacttgggaggctcttcatcttttggcggcttaggagggattcccttcaacttaaggaattgttacaaaggacaggaaccaaattaaaggaaaatcacggtccaattaggtcaggtgggtcaggctcaatgggcaggaatgcggggtgaacttttccagggcaact

SEQ ID NO: 129323 - DNA, 255 bp, Glycine max
  Clone ID: PAT_MRT3847_87784C.1
tctcgagccgctcgagccgattcggctcaggtgatagaccaaaatgatgtatataagacgggggcaactctcacctcttgaacttattttttacatcgagttaggcccaaatccaaattttgagactacgaataccatatgacatgggattaccacagtttgaatcccacactgatttccaaaaattgtgaaagaactatgcagagttgtaatcagattgcttcctaactacatgttggaattggaagaactgag

SEQ ID NO: 129324 - DNA, 504 bp, Glycine max
  Clone ID: PAT_MRT3847_87785C.1
cacgcgtccgcgattacgataccctcagaatactagcacgagcattgcaaatgcatactatacccctccgctctagaccgagtagcacccccaatatccattgacatatccaagcgactacactttctctacgatgctcaccatcgccgcgaagggtcacatttcatcttgattcccttgtcacgcacgtacctatggcacactactgaactgtatgctcacaactaagagaccttgttgacgactggatgcagaggaagagatttacgacaacgacgaccactacaggatcgagcctgacagctgattcccagacccgaggctgcacagcttgagctccagaaagctcagctcttgaagccaacattcccatcaagaagagagaggacgccggtaacacaagcgatgtttttacagcgaggagagtaccatagcaccgtcgagagggttagctcctacaaccttaatgcccgaaaccctagagagggagcgcctgacatggat

SEQ ID NO: 129325 - DNA, 490 bp, Glycine max
  Clone ID: PAT_MRT3847_87786C.1
tgtaaaacacccatatatttgaataaccaacccaatacaaaagagagaaaatttaaaagtctagctagttcctacgatatgaagccattacatacctaatattatcggaaagacataattggcattgacccgtgtttctgtcgagaagagggtggcgtcggagattctgcctttaattagattttgggaacatctccacaggcttaatacattattaacatgttttcggcactttttcaaactacatactgtaattcatctattattaacatatatatcacgtgtcatgacaattgtgatttgtgaatcactccactctaacccgatgatgcctcctccaagtctaacgaggcttttggcatttgctctctgctctttccccacagcacgcagtacagtccaatgaccaaagtgatgccgcctaaaaggctactataaatacaggtgctcttaagtgaacagctgtacaaattactttagaagccagtag

SEQ ID NO: 129326 - DNA, 202 bp, Glycine max
  Clone ID: PAT_MRT3847_87787C.1
ggcctaaatccaagactatgtaaaatccaaaaactaattttgtcaccagacttaaatgaaatgggaaataaattcatcgtgctctaaagaaccttgaatgacaaaaacaatccataaacctgtaaatgattacccacagtaaaacttatgaagtgaaaattttaagacgccaaattgggttgctatctttaatcttaatacc

SEQ ID NO: 129327 - DNA, 522 bp, Glycine max
  Clone ID: PAT_MRT3847_87788C.1
tccacgcgtgcgcaaaagcaaccggtacttgatttcaagaatcttccacttactccctacttcttggtgtacgataacttaagggaaagaaaatcactctctgtgctggccacagactgggcgaatcacttacttttcgactcttagtctatttgctgaacactctcctatttgatatatgacttcgtgtcagatacaaacttttcctgactctttgtcagttgtctgcttaattacaagttcaagctggtgaaattttggattagtgctcccactctcctatctggtataggacttcgtgggtagactattctattactgacctttctttcactctcttagactcactgatccgcattgccgttcaaagtggccttatttgacaaacacttgggcgctggtgcaaatgtctgcttcgataattttctctggagacaaccggctcactgagaaaacaatttttacttgaagagatttggtcatttagattgcttattatacatagcaacttaattaaaaatt

SEQ ID NO: 129328 - DNA, 1688 bp, Glycine max
  Clone ID: PAT_MRT3847_87789C.1
gaatatttctccctctccttgaattcttccttctcttaattttttggttgctttttaataatatttattcagtgaattgtatgagggtgtgaactctatgatctttggaataatgggtgtttgtttaactgagactccatttgaaagttacgtgctttgatgacaaacatgaagcaaagtgaacttgtggtgtatctttccaattgaagtgaaagagtaaggatgtcaagtgggacaacatactggtgttacacatgcaggcagccaatctggcttgaagggagggaagccatttgcccctactgtgacggaggctttgtgcaagaacttaatgagctgcgaggagttgcgcgccaacactgcttctcatcgcggatggaagatgctcatcaaatgcctgacattatggatgctgtaagagctgttatggagcaaagaggttctgaaccgagaattcgggttagagatgctgttgataactttatgaggcagagaatggctggaagatacacaaactttgatgttagaaggaggtctggttctggttctggttctggttctatccttattcctgatgagacttggggtgtctttagttctggtccttatttgatatttcatggtcaagcaccaggattcaccaattctaatggtagctcaagaggtggtcctaggcgtgttgattttggtgactactttctgggtcctagactagaaggactaattgaacaacacatttcaaatgaccggcttggtccaccccctgcatcgcactcttcgattgatgcaatgccaactattaagatcacacatgaacacctacagtctgattcacactgtccagtttgtaaggaacgatttgaactgggatccgaggccaggaagatgccatgtaaccacgtttaccactcagattgtattgttccatggttagttctgcataactcgtgtcctgtgtgccgtgttgagctgccaccgaaagaacatactagttctcgtggtagacgaatttggggtaatggcagtggtagtggtagtagcaatgatatctctaggggaagagagaatagacagatgaacaatggaaggagaaatctgctatcttatttgtggccattccggacctctagttcaagtacttagagtgtgtttgttttatcagaatcacactttccaaagcatgttgaacgtgatttctatgagattgattttgaaggtgattcaaagccaaaccaaaggcaaccttaatcattgtgctgagaccggggaatctactgttttatatctctttggccagaacaatgacagaagttaaaaagtttcctttcttcttcgagacaagtgtaattagctgtcaaaaaatgcttgtaatttaaatgacatgaagaaagtttctgtagattgtgctttgagcttgatctcatagatcatagaagtatgcgaatatctttgtaaatacaatattcttaaaaccaacttttgttttacattttcagtagtttagaagctttcactttggtgcataaggaatccaaggggaaggaaaggtgaatgatgaaagaaaactatggataaatcctttcccatatttagatattaccaatttataaggaaaggaagagttaaacgtttgataataatgtaatttaggaaaaaaattatttggtaatctagaactaacacaaaaa

SEQ ID NO: 129329 - DNA, 591 bp, Glycine max
  Clone ID: PAT_MRT3847_8778C.1
cgccaacccgtccgaggaaaccattaatttttctggatgggcctccaatactttgaactcaaaactatgggggcccataagtaacttttgctgagggaatatgggacgtccccttaaacggtttatttagtgtaaggaaagatcgttgcgagagcagccaaaatccatctacacctatggtatctatagacctggccataatggatgctaaggaaccacaagacctactggcgggaagtgattacatggctttcctgcgactggacccaaaaggggaaaaattggctggaatccagtggagtattcccaacttgccaggggataaatcagaactatgggtgggctatatttctgaaaacggatagatctacaggcggaaatgtgatgccgggaataatccttcacttgtggagcctccagctgaccctaggtggactcctgatggagagctgtatttattcacggataggaaaaatggtttctggaatctccttaactggattgagactgagaataaggcctagcctgtttattctttggaagctgagttagcagggccactgtggatgtttggtgtgaatgcttatgaat

SEQ ID NO: 129330 - DNA, 303 bp, Glycine max
  Clone ID: PAT_MRT3847_87790C.1
gacccataaccaacctactctatgggagaccatgaatcataaccagagatggacaccaaacccatcgagatcagctgcggcatgaagatcggaggttacaacaagagactcaagcattatagcctgaccctgggatgctacatgatcttccacatctacttgcattcatctgcttctacctaccacaaatgccctgtgcttgacttactctctggcctcacttgctccgactagaactatatattcaagtcatgtgctcagcgtaccgatttcgtcgagggagttgccttggttgcccccgac

SEQ ID NO: 129331 - DNA, 191 bp, Glycine max
  unsure (1)..(191): unsure at all n locations
  Clone ID: PAT_MRT3847_87791C.1
actggcagacggngaaccaccgaatgcggggacgttttcggtgtctcaccgtcgcgaccctcacgctgngccgggggtcgttttcttgagcagttgaatagatggcaccccataacctaagagaagaggtgaagcggaggataacgatcgggataaccagcggcaacaaaggacccctatgcgattggtat

SEQ ID NO: 129332 - DNA, 204 bp, Glycine max
  Clone ID: PAT_MRT3847_87792C.1
cggacgcgtgggcgtacgcgtgggtgcttatgcaatacatattgccattgtaatcactgctgacagacgattatcggccctctatgcagtttcacaatttgaatagcgaaaaacaaactattcgattacaggttattataggtggaagaacatttaaaatttcaatattaaatattgttgctaaaccactttttactcttacta

SEQ ID NO: 129333 - DNA, 406 bp, Glycine max
  Clone ID: PAT_MRT3847_87793C.1
aaataacaacactccagcatccatcggggggaatcatgttgcatgcatcgcacgatgccattgcccattatgactgacctgtttttagttcccacaaattttacattgatcagatctaaacacaacctttgtaagttgcaccaccattgaaagttaaaacccttgtcacaatctggttgtggatataagactatccggacactaaccgaaagaaaaagtttgtggatattccaaaattgctttaattcgtaagcaagccatgtcatttacgcgttataacttataaaacacgaagcctcaaagttatccaaacttttcctgtttcatcacgcttgaggagaccggctacacacttgcgcttcttacaggaggtctgtagttggattccttatagagggtctgcgac

SEQ ID NO: 129334 - DNA, 614 bp, Glycine max
  Clone ID: PAT_MRT3847_87794C.1
tataaatgggtagattgtttttgataatcagtatatgcttatacagagagagcatagatgattaattaaatgacttataatagcagagcaaataccaagaattactattattatcattattattttgtctattcttagacaatttttacaaagaattgatcagtaaagtgtgattatgacacttgaatgcaatcaatggctttttctcagcatttcaggtgtacgtttgaagccactgctctagcccaaaacttgatttgcactttcatgtcacctgaagacttgtgagaagtccaatttggaattgcaggagcacaactttgtaccaaccatgcctctgataagtatggtctccttgctgccttatcttcctctgtctcatctctttttttctcttgcaaaccaggcagtatgctagctaaacttggacttaaggtttctttctcaaatgagaaccccaaatccttgaacccctgaacttcttcaaattcaagatcacttaggcttcttctcattgttttctgattcaagtacctgcgcctcatctccataataccctctttgttgaagctttcaacctcagtctttctggctggtctacatcttggaatgct

SEQ ID NO: 129335 - DNA, 154 bp, Glycine max
  Clone ID: PAT_MRT3847_87795C.1
attttatacctatcctcttgtatagaatgtggaatgaacagccagatgggacaatactggtacagggcatctatgttataacatgtatgttagaacaactctttgtgtgatgaaaaatacaagacaaatcaaaatgggcagagaaaaataatgg

SEQ ID NO: 129336 - DNA, 534 bp, Glycine max
  Clone ID: PAT_MRT3847_87796C.1
aggaggcgtacttagggctgggctagagctattgaatgaggcatactggaaggtgataatcccgtcctgcagatcatttgcgttctacgatacgctttctaagagtcaagccgcgagggattgcagctcaaaatgggaggtgaatcatctcctaatgctcactaacggagagagaccgatcgcgaacaagctccgcgagggatagatgaaaagaactacgataagagagttaaacaggctttgtggtggtgatgaaaaattgctgcgtgaaaggacacacctgctgtaggactagttgctcaaagatggcaatttgtaagaaagatgttaggagagctgaatgtggaatcccttctagattcccgctcacagccattggcaatagcatttgtaatgagatgctcattagatatatctatgaaaaattactgcgccaggctaaagctccaagtatgttatcacagtccttcaaaaagcctgctctttgggtgtgtacagcgatgatactaatgagtgtcatgaatatgcaagcct

SEQ ID NO: 129337 - DNA, 730 bp, Glycine max
  Clone ID: PAT_MRT3847_87797C.1
gttcatctatagaacgtcaagaccactctgaatcactcgtttaatacaaagcaactttccccctaccctctctgttggggtgtccccaaccctttcggttgtttcggcggcattgatcccgtattatttccaccccctcgtccatttctaccctttttattctcattcttatttccttgacctttctcaatatcttttgttggttttctagatatacatatacatccttggaatccttcccaacacagatatatttcatatatatatgaacagtctttgtgatccgctttctttacttactttaagcaatgaagaaagacttgtttgttgtaaatcgctggttgggtttaccaatcaagaaagacatgggactcttttttgtcgttgcttggctgtaaaccaagtgcttttcgatcttaggcgatctcaggttaccggctctccggcctcatttcgaggcacgattggagagctctttgggcctgtcagtttctcaatcgccagatagaaacagtctgagatgtgatgttctgattactgttgtttatgtaattttcaatgcttgttctcattcctacttgcttctttcttggtcactgaactgatctttcagagagggaagatgatgttcttagctcgagagatagccctatttttttgccaactttcagccctctccctatggtcgagatactagtaacctccgcggaggtcacattcacgagaatca

SEQ ID NO: 129338 - DNA, 542 bp, Glycine max
  unsure (1)..(542): unsure at all n locations
  Clone ID: PAT_MRT3847_87798C.1
taatccatctaaacgaccaaagacttatggaaatatcttataattcaccatggaaccaaatataccaaagaaaaaaaaaagaacaatttacaattagatctaaaaaaaatatcttgcagttgaaattgcaaatttccttgatgcgcnaatacaaagtgttactaccacacaacatggtagttgcacgagtacaaagaatgaattaaatatcaattgaatggggaagacaaaaaaaaaaatagcatgaactgagtacaaaaatgagagagagggccgtggccaaaatttcaacagggaggttgtatgtactgttggctcttgcagtattgacttgtcaacaaaagattnnngggatgttaaaagggaaaaaggcaaaacgtggtgtatgtacatacccaccagtttacctacaataatcttcatggatgaaactttcatatggtgttcctgttagcgccttgcttatatcattccaattctcaacttggctagannannaccctttgtgtatcttcacttgannactctttaacttcatttga

SEQ ID NO: 129339 - DNA, 162 bp, Glycine max
  unsure (1)..(162): unsure at all n locations
  Clone ID: PAT_MRT3847_87799C.1
agncttaaaaacactagtaggttggactcagtccgcaaaaacacaaactggggcgttaaaaaggaaaggcccaactccggccccagaaaaaaagcaagaatactgtctatttggcgaggttttcaagaccttgtaaaacacctaaaacctctaaccgtttat

SEQ ID NO: 129340 - DNA, 145 bp, Glycine max
  Clone ID: PAT_MRT3847_8779C.1
ccaggttgtacttgagaaaagtgttcctactttggttggcatataatgttccaaggatgagatactccctcgactcctaattttagacaaacctatgacgcgctgcttcactattctccctatggagtctaatcttgtggttcag

SEQ ID NO: 129341 - DNA, 127 bp, Glycine max
  Clone ID: PAT_MRT3847_877C.1
ctcgagccgagcagtctccccaatccttttgtgtatgcaaaatgagagcatgcaaatccagatgcaatgttctgtctgctctcattcttcttgtcagattcctttgtgcttccgtccactgtgaaga

SEQ ID NO: 129342 - DNA, 274 bp, Glycine max
  unsure (1)..(274): unsure at all n locations
  Clone ID: PAT_MRT3847_87800C.1
gataacatttggcctcaataaaagtagctggtgccgggtatcacggacatgtgtatgatgaagccacatttttggattcttgtgtcttgtttttggtacattgtgaatacagtgtttgaaagattggttctgtgtctgaacaatgcataaactaattgattaatgtatgatcaatttattaattggcattagcagcaggtatatagtccaattatgaaaacaggagctcatactcttttgcattttgggtaggtaaggcgcagctgtanactgt

SEQ ID NO: 129343 - DNA, 345 bp, Glycine max
  Clone ID: PAT_MRT3847_87801C.1
gttatcatatcattccagcgtcactctgattgagagtgaagaaggtgggagatggagaagccacaaaacggagaagaaaaggaagaaaccacggcctctttctgcggttacgattctcttcaccgtcttctcaaggataatcttaacccccatcacttccaggtgcccactttcatcacctcactgatgccatattcatcatgccaatagttaactttgcatttcacttttttatttatttattgattcatgtcatggatttgtgtgttttactctccacatgcaactttcaagggatctggtttccgtactctgacttttctgattagattggattccagcaac

SEQ ID NO: 129344 - DNA, 515 bp, Glycine max
  Clone ID: PAT_MRT3847_87802C.1
tttaatcaaataagcgatagaaaaatattgtatttaaaaagtaagttatagcattatcatcataatccacaacttgtatggttcagtaaacgtgagaatagtaatgtccatttcctaactcatttagggaaagaaaaaaaaagcattaacatttgatcctctaaattcgcgtcactactgaagtaccctcgtctaggacataaaatgattcttgtgggcgacgagtaagtagaactaagctcaacagcagcgctagcaacaggaagggaaaaacccaggtggttaatggttgattatttggcaccataaagaagtttagattttggttcatagttgcttggtttgccacagtcatgatggcctcgtcatccaagtcggagccatccatatcagaatcgcagcaaacatggctatctcccttcaatttttgctttgcatgttctatcagctccacaggccaaattggctccggggaggtagtccctgttgctgctaattttgagccatcttcttcg

SEQ ID NO: 129345 - DNA, 341 bp, Glycine max
  Clone ID: PAT_MRT3847_87803C.1
cccgggaatggggccaaattaatttagccccaaaatcttttaaaatttttggaccacaaaagcggggggactccttgggcccaaaattaaataaatccacccaagaggattggggaggatctttcactagcccttttacctatttatgggggggagaatttgactaaaaaataaaagggccccccccgcccgggaaaaaagctccaaaatcaattttccccaggggggtttggctgaaattttgaacttccaaggaaagggaaaaaaggggggcatccattagagggggcatgctgttattttaaaagggggatgctttcacttgtcagccacattttttt

SEQ ID NO: 129346 - DNA, 433 bp, Glycine max
  Clone ID: PAT_MRT3847_87804C.1
gggatgtcctagcaaaattgggtggcttgcaatagtgggacttgcactgtacatcatattcttctcaccagggatgggaactgttccatgggtcgccaattctgaaatctatcctctgaggtaccgaggggcatgtggcggaatcgcttctacaacttgttgggttacaaaccttattgatccccagaccttcttgactttgaccgaggctatggggacagcatggacattcatgttgactggatcagttgctctcattggcatcttcttgggtctgactctcctgccacaaaccatgggagtcccaatggaagaagtcgagcttatgctggatgaaagagctgtgccctcgtagttttgtgagacggcgaggactacccagaaggggcgattgagagcgacttgtacctgcgtcttgagagtacatgctgac

SEQ ID NO: 129347 - DNA, 262 bp, Glycine max
  Clone ID: PAT_MRT3847_87805C.1
gaagaaagagaggtaaatgagactggtatgccggtttccatctggtttttgccgggggttttgccaaaattgggttcaactccaatagtcccgcggatttccccttgacctcagattaaattgaaaaaccggccattaaccagttggatggttaagggtcccataattcatttagtaagggaattttaatggaaccggccttgaattcctttattccccaatttgccaattcaacctgttttaccaccaccagatattccaa

SEQ ID NO: 129348 - DNA, 303 bp, Glycine max
  Clone ID: PAT_MRT3847_87806C.1
gattacctatgatataccccaggaaatccctctccccgcatattcctgatgatgagaatactatctgtactaggccgtaatggttatccctgaattttatgttgctgcgttaacagaatcaacatttttgggtaaagctcgtgatgcctgatcttaccctgagagatgcatgattgcctctatattgtgccttgcattatgtacttctattagatgtcgagcgacgaaaaattctggttgagctatagacaattctgatggtgtacaactcgctctccggcgccgtacctgcctcaatggggg

SEQ ID NO: 129349 - DNA, 485 bp, Glycine max
  Clone ID: PAT_MRT3847_87807C.1
cttacgcgtggggaaaaaggaaaaaactccaaattgagaaaaggagggttttgttccgtttcgtcctctttccgtttcgggtgcaaatcaacgacacaagggagatagagagagagaaccaccgcggaaagatattttaaacggggcggaaccctagcgaggcgagcggcggtgggggcggcggaggcagatcggagcgcgagcgaggaggatgagcggcaaaggcggtggaagccagaaggcagggattcctccggcgagtcggaagatggttcagagcctgagggagatagtgagcaacatccccgaacacgagatctacgccactcttaaagactgtaacatggaccctaacgaagccgttagtcgcctcctctcccaagatccttttcacgaggtgaaaagcaaacgtgagaagaaaaaagagggttaggacacaacggataccaggtctcgtggaataagcaagcatctagtcctggtgg

SEQ ID NO: 129350 - DNA, 804 bp, Glycine max
  unsure (1)..(804): unsure at all n locations
  Clone ID: PAT_MRT3847_87808C.1
atttgattgatgttattatttccagaaaaaaaggaggaaaaaaaagaaaaggaaaaaactccgaagagagaaaaaggagggttttgtttcgtttcgtcctctttccgtttcgggtgcaaatcattgacaggagagagaacctgcgcgcggagagatattttaaacgcggcggaaccctaacgagtcgaacggcagcgggggcggcgaaggcagatcggagcgcgagcgaggaggatgagcggcaaaggcggtggcggccagaaggcagggattcctccggccagtcggaagatggttcagagcttgaaggagatagtgagcaacatccccgaacacgagatctacgccactctcaaagactgtaacatggaccctaacgaagccgttagtcgcctactctcccaagatacttttcacgaggtgaagagcaaacgtgagaagaaaaaagagggtaaggacacaacggattccaggtctcgtgtggtaagcaatacatctagccgtggcggtggtgctagggttagcgctgaccgatatgttgggcgtggaggcgctactcaatttagtagtggtggtgattctggtctcctgcagggaaaacctgtactcaaaaaggaaaacggaacacctgcttatggaggtcttactgctcctgcttctagcgcattggacaataatgtaaacaggcaactaccatcctacagtgattctgtccgtgtctgtgatggtctatcttcatcacaatatggtngggatgcantctccatgggtgggcgaacccaggtcaagtatcaatggctgaca

SEQ ID NO: 129351 - DNA, 544 bp, Glycine max
  Clone ID: PAT_MRT3847_87809C.1
gttattttgagtttttgaatgatgttcagtaacattttgtacacaattctaaccaaatacatttattctcattctcacacaaaaatattaaaaacagaagaaatatatgtagaattaagctacaaggtagtcaatccaacacgagaaacaaatatcacttgttattctagatatgctagtccattggcagtagagaaaccatcactttttaaagatcccttatggccgtggacacattcctggcttcattagccaacataatttaagagttggggatatcattatcaaagatcaagtcagcattatgtctctaattagtattgtcattggtgaacttcagtcgttgtccaagattaatttgagttccaatgctttatctggttcaatccctgacttcattggtgattttcctagcatttgcttggtagatttgtccaagaatggcttcactgtggagataccttcggctttgtttacctactgctacaaaaccaagtgagtttctctttctcataacaaccttgctggttcaattcctgcctcc

SEQ ID NO: 129352 - DNA, 121 bp, Glycine max
  Clone ID: PAT_MRT3847_8780C.1
atttcaggtgcttgacatattgccgcatcattcagcatgcgatatcaaggaggtttgcacacctaaaccgcttggcatgtttaccgcacaggtactgttggaattaaagggtattacaact

SEQ ID NO: 129353 - DNA, 510 bp, Glycine max
  unsure (1)..(510): unsure at all n locations
  Clone ID: PAT_MRT3847_87810C.1
ccatccggnnggtcnntcctttttccccccgggccccccctnggttcagtcctttggccccnttntnccagtngagacgcctgattcagtttcttccangaggaagagactattcttttntgtttctttgaagtcagacttcctcgcggatgtgcttttggnngcntccccatccttagtagcnttcgccggggccccttcatcagccttgccccgcttggctgcngctgctccccccccacctcctttacctttcngtgcttctttaccatccttcccntttcgttccnccttagccgaagccttctccccgcccttagcntctnccccttgcttagtgccnctcggcctagtcccttccgggctcccnccgtcgccgttcttatgcttaaccttcttactcttcttctcccttttcttaggcttctcctcctccctcctctgcccggnggttcccgcctcctcctcccttcccttgcgccccgtcttgtccccgtccgcctcctcctt

SEQ ID NO: 129354 - DNA, 382 bp, Glycine max
  Clone ID: PAT_MRT3847_87811C.1
gggcggcagtttggccgaccatgccgtccgagagggcgcgtggctccagggaggagtcaaggccaaggccgcgaatatgggagtgcgcgcccacgcgctcaatgcgggtcaggtcgcggctctcagagagtttcagctccgccatgatagaaacggcgaagatggtgcgagggagaaagaggctttcggggtttgtttagggttttgatgaaggcttggacttcggagtgcgcttgtgcgacacttaagttactgcttcagcatgtaactatatcaatgccgggatcgctagactgcaaaattagatgtatagtaattatgtatgtttaattataatcttacaaaacttagtctaagaaaactaaaattaatataacatata

SEQ ID NO: 129355 - DNA, 138 bp, Glycine max
  Clone ID: PAT_MRT3847_87812C.1
cacacatatattgctttgtttgctagcttgtagtagtacgaattgcaggaggccaaatacaactctagagtaatatacttgtaggtagatgtagtgccccgtaaccggtcgtaaggccgagaatagtcaacgtttcca

SEQ ID NO: 129356 - DNA, 247 bp, Glycine max
  Clone ID: PAT_MRT3847_87813C.1
gtggtcgcccttttttatggttaaagagaattttatttcttttgcgggaaaagatagaccaaactttcttgcgttcgcacgaattatttgggtctacacaagtgaaaacaaaatccttttttacgctgttacatcaaacaacacgttctaaaacagttgatttgtctgaaagcagttataaatattccaaacagaatgccccaagataatgacgcctaaagggaatcaacattaacccctatcccct

SEQ ID NO: 129357 - DNA, 518 bp, Glycine max
  Clone ID: PAT_MRT3847_87814C.1
cccacgcgtccgaacagagtaacatacactccaaaaagctggattaaaaatgatctacaaataaagaaaagaagggcatccaatcaaatatataataagaccagtcatggctaatgagaaaaacaatatgataaattgataccctttgcactgttggttatatcagatagagatccccagagcttggaatctatcctttgcaaaaacaaatcaaagcttgccacaagctctgtctgtctccctctgttgtgctctgcttcaggagccaacaaaatccaatatcaaaccttgatattgcaatattacaaatatcctaatccaatccaaacttggcaaagcttagtgaagaagagtagccaatggaggctgaaaggcccccacttccacaacacaactctcacacaaacaagaagcccttctctcgactaaaccaatacgtagccacaaccagagttgggaaatggttcaagctctcccaacgcaactccaccttcaccaccgagctccgtgccggcacc

SEQ ID NO: 129358 - DNA, 495 bp, Glycine max
  unsure (1)..(495): unsure at all n locations
  Clone ID: PAT_MRT3847_87815C.1
gggtagacataaggttatgtaggttggtccttgtttgctttcaaaagtgtgtttatttctgttcatggttggagtttagaagcgatgctgaaacctaggtttttgttgttgttggctgcatacgattgattttctagtttttgaattagatttagaggttttctgcttatctatattttccaggggaaatttgtcagctgaatggtatatgaatatgtagtttagtttagttggtgtggtttgtgtagatgagtcagtattacttatgtactgtggtgacagacatttttgttccattatgccctgaactctgttcattaattgtaccacataagctgcagtggatgagtttctacgttgttgttttgagaagtcttttcttgcattaatggttactggaggagaaaacagttaacccactagggttggcctaatggtggggggtttgggtagtatgtatgaggttntcggtttgatccttattattgtcttttt

SEQ ID NO: 129359 - DNA, 250 bp, Glycine max
  Clone ID: PAT_MRT3847_87816C.1
aagaaagatgctatgtacaagctatagtacaatactacaactggtatagctacataaaaataaagaataataaataataactaagatggctattatgtcaacaagagaatccaacattccaatttcaaatattgtttactctttcataattaggaaaatgccaatacattattgcaggccttgattcttgatagatatagcagtcacagtggggcgtttctcctcttttactttccttctcatttttccc

SEQ ID NO: 129360 - DNA, 447 bp, Glycine max
  unsure (1)..(447): unsure at all n locations
  Clone ID: PAT_MRT3847_87817C.1
cggctgcgagaagaccacagaaggggggagcaagagagagcaagagagagagagaaggcgnggaagaaacgcgacggacggcgaggaaagaggaggcacaaagccgagcaagcgaancgcaaacggagagggggtctctcttacgaaagcgggcaccgccnggagccacccctaacncaaccaaaagccacggcacccgggggcngaccccaaccaacaccgcaagnggagcgccgaacagacccacgccaancgccaacgccgcaccgaagaggggncccgcgaggccgcccaagagcaagagaacnnncgccaaaccgcgcccanncccaaaaaagagaaggaaaagggggagcccacgcaagcccggagnnncaagnacgnncggcccccgggccacaacgccgagagggccaaagccgccgaaaggaacgacgagaagaaaaa

SEQ ID NO: 129361 - DNA, 847 bp, Glycine max
  unsure (1)..(847): unsure at all n locations
  Clone ID: PAT_MRT3847_87818C.1
ccatccaatccagatacatgcagtccaatgtttcanctgcaatgttgttcaacaattaaatcaggagtctgcaaaagcatttgtgtacacaagattcatgatggtacaatacatgcaacacccaaaaaaaaagtgacaaagccacaagaaattattagtctctgaccaattttttggtactacaaatcacacataaaatctttttcagcccacgaaatatcgacattggacaatcatgttaaaaaaaatcagcacaaatctacttagtaatagagtttcaaatcacacatctgatagaagttttcttaatgaagattgaacagccgacagacagcgtgcattttattcactgccattgcacaacaacacacctgacttgacttggcgcttgtttggatttccggtacagaggcttcaacatacgttcagagaaataacccctttgttacttttgccctgaatgtacatttagaggggctggaatggattttcaaacatagttttagaaattccagcagtcatatgcttgaggtcagtggctaaatcatctccaagaaaggccgttgcagcatcagttgtgatggtttggttcttgcaatgtccagaacctaggtcataccaatctgaagcaagcaagaagtctggacgagtaatattcaacagggacaaggttagattttcattgttaggagtccaaacctggtcaacagattctaatttcggaaggttgcccgcgtaggtctgaactggcagctgtccgttcaatgaatttgcattggctctaagagctgggcactcattcaatattgaagtggcaccaaagggagatacagggtcagcataatct

SEQ ID NO: 129362 - DNA, 343 bp, Glycine max
  unsure (1)..(343): unsure at all n locations
  Clone ID: PAT_MRT3847_87819C.1
ggtatacaacctctcattattagcattgataacaccttgtgaatgagaatgcgagaataggggactaacatgtgcacttnctatttaatgttccggggcggggaaaaccttacaaaaaacagttttttaaaaaacttgggggaaaaaacggggggggggggggcatttcgccctgaacctttgtttttaggggcccccccaatgttatttctttaaaaaaagtgctttttaaatattaaggggccaaaaccccctcccccccattatttttttgtttagaccataagattccccttgggttttatttncaatacccccccgctttatctgttgtttttttttt

SEQ ID NO: 129363 - DNA, 417 bp, Glycine max
  Clone ID: PAT_MRT3847_8781C.1
aaaaaaggaaaaacccactataaaaaccaccaaccaccattatcttttccccacccaaacgtgaaaaaaaaacccggcccaacggaaaggaaaaaacccctccaattccccctaagccctaaaacaaaacacaatcacacttttaaaacccgaataaaccctccccgcgttccccaaaactataaacccccaagcccaaaatcccccccctgtttataaaacaactcaatttttaccaacccccaccaaattaaccaattccaggcttaaaaaaaccccccaagggcacgccaacccaagcccccaacttgcaaaccgccctcaaaacggatcccccccttccggctttggaacccgggacccggaaaaggccctgccccttgccggcggcaaaaaaaaaagccccccccggaaaaa

SEQ ID NO: 129364 - DNA, 731 bp, Glycine max
  unsure (1)..(731): unsure at all n locations
  Clone ID: PAT_MRT3847_87820C.1
cccacgcgtccgtacggctgcgagaagacgacagaagggggcgctctttcaattttctctctcttcccccaattttcccagaaaattcatccaacattttctaggcagccaaacacttcccaccatgaacagatccgctctcctcgctgcctccgtcgccgccgcgtcggccaccgctgcttccctttcctcctccgcaaaactctctctccaggacggtggggctcagagagaccacggcggatcctcgccggcggcgagttcggcgtcaacggagaagttcgcgccgcggttcgacgggttgcggttcattgaaacgctgattactgcgcacagatgaacgcgcggtgttcaaacgcgcttttggggtttttttttaccctaatcttttttgatcttgcactgtctagaaaattgaggaaaattaaaaacgtgggagatgttttaattttttttctaatgatgttttgccatttgggtttttgggttgaggaatggagagaaaattgtaacattacgggattgttactgttgttgtaatttgttttcaaggtagtttttttttactcgtgttgtgagtcgtgactatttctttgtgaaatctatgagagacatgaaaaaaaatgctttaattgatttattcattcttccccccccccccccagagaggangcgagcgggaagagacggcgcgcgcgcaaaaaaaaaaaaaaaaaaaaaggggggggggg

SEQ ID NO: 129365 - DNA, 454 bp, Glycine max
  Clone ID: PAT_MRT3847_87821C.1
ccggtcctgatttcccggtccaaccccccgtccgtccggttggaacaaaacaacagaaggggagattcgggtaccaccaaaaagaaagactaaccaaccggccctgcttctattctttctcttcctctcgcgcagagcctcagcagcttatcattagcgatgacgagaatcacagcctccgagctgatgatcaagacaagctcatagctcctgtaccaactgaaggatctcaaagcacaactctctctcctgcagaatgttccaaggtcatcggctgaacacctaacgagctttacaaaatgttaggcgtttaggctttcaatagctcaagtgctgaccgcaattcaccaaaagcaaaaagccgcactcggataggcttacaagaagactacttaccttccttcggctctggcgaccaggcgacctgagccatccgaaagcgctcaactattca

SEQ ID NO: 129366 - DNA, 135 bp, Glycine max
  Clone ID: PAT_MRT3847_87822C.1
atttatttaagtttttcaacgtccaattctcatttataatcatgtgaagggttctactaatcaaaacttaactgtaaacaagtattttatcctaccactcctagccacaatggtattatcaaagccacttttggc

SEQ ID NO: 129367 - DNA, 404 bp, Glycine max
  Clone ID: PAT_MRT3847_87823C.1
gggagattgctcttattcttatatactatggtatatgacataagtttggaagtcaaaatggggtaaacagagtccaacgttttaggtttggtgtttgtcatttcataagacgaagaaaggcatgggtgatagggtggagacgcttgccatattaccccaatggaaaatcgacaactttggaccttggtcctacaaaaaatctgaccccttcaagctcggaatctggaactggtgcgtactaaatgtttgtgtttgtgtatttgaaatgaatgatcttcacttttaacctgatcaggtacttttcaacagtgaggaataagtacctctacatacatctttttcctgaaccttctcaagttttgaaggataatccacccttttctcgattcgttcttcgagtcttc

SEQ ID NO: 129368 - DNA, 372 bp, Glycine max
  Clone ID: PAT_MRT3847_87824C.1
atttgcttgtgttggctgacacacaagaattctctgttggaaattttccagcggattcttggttaccaatttgtgtgaattgtctttattctgtaagtcaattaccttcagaagctggtgtatgtatatgttacatgtggtattggacgtggtggtttacccaccactggttggattagtattgtagctaccaatctctccttagatatcattaaaaggatccgtacagcacttgtgaaaggttagaaaattgtttttcttactagaattgatcctttttcagaatttttactggtttgtctttttggcttaattaatgaaatttttgagtttcaacacctataatcctattctattgcgactttttgtgaa

SEQ ID NO: 129369 - DNA, 394 bp, Glycine max
  Clone ID: PAT_MRT3847_87825C.1
ccacgcgtccgagctttcgtacctccagaaacaaggtaagttgaaagataaaagaaaaaatagaaaaggaagagaaagatagagatgttgaagaaggttggagaggatctcaatatttactcaagctaagcttgtagtatctaatagcattattgtttgtattttaaaaaactcagaatatttttttttcataaattaacaactaatcctttgaattattgaaatatatttaaaagaccaaccttttcttatatatatatatatatatatatatatattactcctaatagatatcaagaatgataaggcttaatcaaatttgtttaataaataaaaatgagagacacaagaacaactttaaataatttgaaactaacaaattataactgcatta

SEQ ID NO: 129370 - DNA, 157 bp, Glycine max
  Clone ID: PAT_MRT3847_87826C.1
aaaaaacaacataagggataaacattgattatcaatgggttgctccaaaattaagcatggtcaaaacccaattattttccttccttggaacttaattattattagcttacatatattaaggaatgcactaaataacacattattatattacattatc

SEQ ID NO: 129371 - DNA, 333 bp, Glycine max
  Clone ID: PAT_MRT3847_87827C.1
actcggaattcaactcgagagtatttattctttggttcaacaatttcagattgtgtctatggtaaaatgtacatatacataacaatcccagattattaactacaccaccttataatatcaccaaatactcaatataaccaccaactacatcctcacaccttctcgtattatctacaacaatattcacatcctcaaaaaacagttgcagaaaaccaatttcaatttccaatcctacaaagacaaaatcaatgataatcattataatattaacttcaataagcatataccctaccttattataaacatcacttacatatttcaaatgaacccata

SEQ ID NO: 129372 - DNA, 285 bp, Glycine max
  Clone ID: PAT_MRT3847_87828C.1
acccatcaatcaatcttccatactacatcttccaagcaatcatattatataaccaccttcgggcaactgataaactctctgataataaaagccattcttaacacctaccattcctacaaaatctcatcaaaccaatactacattaaccttattcaaactatttattcaccattacactttattatttcccacttatttagaccttttaatattccacatggttccaaccttttttaaaaaaactccaactttttcaatatacattcctcatttaaaaccatcctt

SEQ ID NO: 129373 - DNA, 343 bp, Glycine max
  unsure (1)..(343): unsure at all n locations
  Clone ID: PAT_MRT3847_87829C.1
ttgtngcgagacggttaaaacggacaagggctgaatctcagtggatcgaggcactcgttccggcaaaagcacatgaagactaataacaacgtttctggggagatgaaatcgcggaagagacgcaacggtggaagtgattatgtggaagatatcacttgccctcagaaaagagtttttcaggcaccaacaacttggttctagagaaaatggcccccaaatgattgacaaagctcccccaaaatttgttagaaaagggggcgtgagaggaaagggagggcctcataactccgattgcaaggtcaaaagtgtgaggcagaggatttggggtaaatggggtgctgag

SEQ ID NO: 129374 - DNA, 349 bp, Glycine max
  Clone ID: PAT_MRT3847_8782C.1
actagatcgcgagcggtcgcactttttttttgttatttcttgaacgaggtaaatttatttttctttaaatgtaaagcctagaaaataagacttcatttttttcgcacgcgtccgcttctctcgcgttcgcatcaaacacagggaaacactcccaatcgctctcgctctctcgctctccgagctagcgagaccgagcgatttgaccctaagctcgcgatgctccgccgcacaaactcctcccgcctcaccggcacctcccgcagccacgtcgcctccgaagtgccggcgacacccgccgcggagaccgccttcgcggaggcttggaagaaagtgagccccagcatcgacc

SEQ ID NO: 129375 - DNA, 450 bp, Glycine max
  Clone ID: PAT_MRT3847_87830C.1
ctgggggggaaatttattttgggattagatttgaaaaccagggggacccccggaagcaggggggtgtcaaattagtggaaagggtttttgggccggggcaatgaaggtttgtgggtgggaaattatgaacaattttttctttttacctagctagaaaacattggctggttttgttattttggtgggacgccttgagaattttaaaataaatttttttgggcaattttttttttttttaattaaaaaccaaaattttctttccaatcaatttttttttcctggggggttctcgaaacacaatttggtccccagaatttgggtacattttgggagcccctaattttttttatttggctgggggggcaagaaccttaaacccccccaaattggaaagttttttaaaggtttttaacagggggggggttttttttttctttctgaaagttttgg

SEQ ID NO: 129376 - DNA, 887 bp, Glycine max
  Clone ID: PAT_MRT3847_87831C.1
gaaaaatctaagactatttgaagaaagacgtccttctctctcgagcgtgatcgtgatccgttcccttccaattttaccaaaatattaaagaaaaaacaaaatatactatttcatttccgtcccctttcattctaatacattccaatgtttcccagtgccggcgttcccaagaagcggcaacgcaccaccgccgccaaccgttcctcctccacagttggcaccatctcctccctctccgacgtaaccctaatcgaaatctcccaaaaccctcgaccttcctctcccatgaccgacgaccgcccctctcccgcggcggaagacgctctccattataacgacgcttccaccgccgacgtcgtcctccgcctcttcatcgacgctccctctccgctcgattccgtttccaactccgaccaccacgtctacctccactccgacgtcctccgccgctccaaatacttctccgcgctcctctccgaccggtggatcggccgcgtcgcgccggagctctcgtcctcctcctcctgcaaccgcgaccgcgacctcgacctcttccgcctcaacctcggtgtggctcccaccggcggctcgatccaatcgcatctcaccgtcctggagcttctctacacgaacgacttcgccgcggcggtggactgcgcgtcgacggcgctggatctgttaccggtggcgctggagctccttttcgaagattgcgtgcgctggtgcgtggatttcctcgaggcggtgccgtggacggaggaccaagagaagcgagtggtgagaataatccctttccttagagaggaagagtcgaaggaactcgtggctagggtttggcctttgggaagagactcatgcgaaacgaagctgcaaggattgatttcctc

SEQ ID NO: 129377 - DNA, 132 bp, Glycine max
  Clone ID: PAT_MRT3847_87832C.1
atggttatgattttcgcgctcttggtttcgtttttggctgtcaagcaggttgtttacttggataatttagaagacagggtatggggactacattttggttgaacatgttatgattattagtggtggttgcat

SEQ ID NO: 129378 - DNA, 178 bp, Glycine max
  Clone ID: PAT_MRT3847_87833C.1
gtgccgggccggaatattttggttttcccacacgcccgtatttacacaggcagaaagaacaacacagggggagtttttaaaaaatttggggtgattaccccacagctcatgctgaaaaacatgggacaaacataaagatgctcaaagatgcatacaaaatacatggaaacacaccctc

SEQ ID NO: 129379 - DNA, 225 bp, Glycine max
  Clone ID: PAT_MRT3847_87834C.1
tacggctgcgagaagacgacagaagggactgagtgagacaaaaaaaaaaaaaaaaaaaaaaaaaaaaaaggggccgcggaatattaaccccgcggccccgggaataattccgggacgggaccctgagggggaccaactttccccaaaaggggtcgttataaacgcttggggaaacaagggacaaagtggttccccgggcgaaattttaccccccaaagattccaa

SEQ ID NO: 129380 - DNA, 745 bp, Glycine max
  unsure (1)..(745): unsure at all n locations
  Clone ID: PAT_MRT3847_87835C.1
gttctgttcatgatcatgttgttggggttagtgttgttgttcctgcttctaaatctgaaggctatgccaagattttgaggctggaggggcaggatccgatgcttaatgctgccaaagtttcactcggagtgctgggtgccatctccaaggtaaaattatcacttgagcgtaggttcaaaagaagcataacctacaatttcacagcagaagatgatcacatcgaagatgtgtacgtagaccatgcaaaaatgtatgaatttgctgatttaacttggtatccatcaagacacacagttgtgtacagatatgactccagggttcccttaaatgcctccggtgatgcagtttatgacttcattggatttcaagccaattccatcttggtctctgaatcagttagagcagcagaaaaattgctagaaagtaccagaaatgcaaatggggaaatgcttaacggcatctactactttgggcctcaagaaattagtaggcaatggattgaagaacaatggccaaatcttcactggctatccagtagtgggttaccaaggcaaaatgcaaacttcaggttcatgcttatattcatcaagatttgacaccgcatgtgcctgggatccaagaatcaaagggctattcttctacgagagcacagcaatcccttttttcccctggtgaaattcgagacttcccggcgatgtgagaaaacttagagacctcaagnccagaaaatttctgtggggtggac

SEQ ID NO: 129381 - DNA, 219 bp, Glycine max
  Clone ID: PAT_MRT3847_87836C.1
cggctcgagctcgagccgaatcggctcgagtgccaaaatttggcagctacattttggaggtgcacgaacacctactgaagctgatgatgaagccgatgatccaggtgctcttgctgctgttggttgtttgcgtgctattagcactttacttgaatcagtgagcagtcttcctcaactctttgttcatcttgagccagccttgctacccataatgcgtag

SEQ ID NO: 129382 - DNA, 1471 bp, Glycine max
  Clone ID: PAT_MRT3847_87837C.1
ggaattcccgggtcgaccccgcgtccgtttcgagatcgaatcggaaaccgttaccgtcgtcatcttcttcttcatccgttgcgacggaggcggagcagaaggagattctggaggttggtttcgaatcttccgctggagaagagttcgaaggcagcgacggcgacgaggtttcttttcggattgttgcgaacgacgaacatactgaacgcttccgaagcctgcagagacgcgctggagaagaagatagggctgcagctcgaagaagccacgcttgacgaccttctcgtgccgagctactcgtacctgaacgaaacgctttacgacgtcgattgcgtggagaggattttgagtcagttcttggaaggtttagaagcgagaaccgccgcggaaacgacggaagacgcggcggcgacgaggtcgccggcgcttatgctcgtcggaaaactcatcgacggttacctctccgagatagcttccgacgcgaatctcaagccggagaagttctacaatttcgccatctcgcttcccgacgaggccagactcttcgacgacggtctctaccgcgccgtcgatgtgtatctcaaggtattaccgaatccgttgcgaattttcgtttttctaatttgacgttgatttgcccttttgtaggcacatccgtgggtttcggaagaggagagagagaaaatttgcggattgttagactgtcagaagctgacgctggaggcgtgctcgcacgccgcgcagaatgaaagacttccactgcgagcggtggttcgggtgctcttcttcgagcagcttcaactgcgacgcgccatcgccgaaaagctgggggcagcggaggagccatcgaggcattcggcggcgatggcggaggaagaggaggtggaggatgataataatacgtggcaggtgacggtgagggagaatcaggtgcttcgcttggacatggatagcatgaggacgcgggtgcatgagctggaacgcgagtgttcttcgatgaaacgagcgattgagaagatggacaagatgggcccacgaggaggtgggccctggcgggcctcactcgctctggggaggaagttcggttgcaagttcaaaacgcaggtttgtgattcgcatgagccagcaacacgcgagggcaggccccaccggcggtagcacctctctcatggcacgtgataatatgattgggctttggagtacggtagaatgggtcccgctcgcgttttggtggaattgcacgtttggcatttgtcgtctgtgtatttatgagattattcagtggagttgttcactgtgtgtttctctctgtatccaactgaatcgaatccaatcccaccacgtaaattttatcataaaaaataataggaaacactgtaaaaagttaaagactttgatcctttgcgccaattatttggatgactgggtaaattgctgagtgacaaggaattaatgattcctgcttggaaaa

SEQ ID NO: 129383 - DNA, 178 bp, Glycine max
  Clone ID: PAT_MRT3847_87838C.1
tatagtcccactatatgaccaactgaaatacactggaactggggctgcaaggaagtttgctgtttggcgtatgaaggtgtcgaacataggcgtcattacacacacagtttttggtggtactaatgggctggtgtcgatatcatatgggcggacctactctactgattgctttatggag

SEQ ID NO: 129384 - DNA, 312 bp, Glycine max
  Clone ID: PAT_MRT3847_87839C.1
gggggggaattttaggatcattatcgggctttggatgccaatttggactgaaaaacattccaattgattacttacaaaatgcccaactgaagaaaccccccctttcactggtaatttaaaatatagaacaaggggaccgtttataaataattgtcaggagccatttatctaaagggccccaataacaaagggcccctttaacaaaggagttgaaaaggcatgcccttcaactccaaactaaacaaaaaactcgggggggttacaaggtaatccatcctttccttaaaaatctttttctttacttgggggggg

SEQ ID NO: 129385 - DNA, 1660 bp, Glycine max
  Clone ID: PAT_MRT3847_8783C.1
ggaccgctgaccgtaggccgggccgggcgaccatctccatgtcctcttcacaaaactcagtttccaattcaccaaactcacaatggttgatctagattggcaaacaaagatggttcactccaacatcatgcctccaatgtcccccaaactctctctcccggatcataacattccaatcccaactttgcaactcccccttcgccaaaacgacatcaccgcagcgtcgtctcctatctgcgctgcatacgacaactaccttcgtctccctgagctcagagccctctgggcctccaaggacttccccaattgggccaacgagcccatcttaaagcccgccttacacgccctcgaaatcaccttccgcttactcgcaaccgttttctccgacccgagaccgtacatcaacaaacgcgagtggacccgacgcgtcgagtctctcgccacggcccaaatccagatcatagccatgttatgcgaagacgaagaagaaaaccccgagacacgtggcaaggcacccgtgactgacattaacggctttaccggtcaaagcagaagctacagcgaggaaagcctgctcccgcgcctcgccacgtggcagaaatccaaggacgtggcgcagaggattctcaattcggtggactacgagatggggaggtgcacctacaccttaggtttaggagaggcgaatatcgcgggaaagaagatatttctcttcgacgcggtttgcaggccgagggagattcactcgttggagacgacgccgtttgatgattacgtggggaaccacgagaacaagacgctgcacgccacgcagcagatcgccgagtgttggacgcgctcggtgaagaagctgctggagagagtaacggagtcggtggagaaaaaagcgttggagaaggccgcgagtgagtgccatgcggtggagcggatctggaagttgttaacggaggttggggacatgaacctcatgatggatccagaggatttcttgaggctgaagaaggagttagggatgatgagaactgcgggcgaaacggtggcgttttgcttcaggtcgagggagcttgtggaggtggcgagggtgtgtaggaatctgagggagaaggtgccggagatattggaggtggaggtggaccccaagggtgggcccgggatgatggaggcggcgatgaaggtttactcggagaaagagaaagggaaggttcatgttttgcaggggatgcaggggattgaggtggcgatgaagaggttcttctacgcgtataagcaggttgtgacggttatgatggggagctccgaggccgataatgggttcaccaagatattccttgaacccacttatttccctagcttggatgctgccaagacctttcttggttattacaaccaaaattaattcttttattcacttcaattccatcttactcacacaaagaaacaaaaaggattgaattttgtaaacaaatctttgtctgtaaaaatatatttatttgacttctttttggatcaaaataaagagaaaaaaaaaaagcactaaatttttgtaataggttggtgtaaacaaatctttgtctgtaaaataatatttatttgactattcttttggatcaaaagctgtggcagttgtgaaacagatggtggttccccgcttttgaatttt

SEQ ID NO: 129386 - DNA, 400 bp, Glycine max
  unsure (1)..(400): unsure at all n locations
  Clone ID: PAT_MRT3847_87840C.1
tcgtacaaagcaaaccgctcgtaagtccacaagaggaaaggctcctaagaagcagcttgcaaccaaggctgcgcgtaagtctgcaccaactactggtggtgtgaagaagccccaccagtatcatgctggtaccattgctcttcgtaagattgaaaaataccagaaaagtaccnagcttgtgatgcagaaactccccttgcaaaagctgggttcgnagatgactgaagacttcaagactgatctgcatgtccaaagccgcncgatgcttgcattacgaaaagctgctgaagcatacgttggtaagctctgtagagacactaacctaggtacgatgcacgccaagcgtatagccattaggcgcaaggatattcggctagcaagaaagattggtggtaagcgt

SEQ ID NO: 129387 - DNA, 499 bp, Glycine max
  Clone ID: PAT_MRT3847_87841C.1
tggaaaagctacatatgcatcccgttttgtgagaacttgtcggcttaaacaagaagaatgctttggaggctccacatttatgaagatcgcagatctcaaaagtctattcccacttgtaatgggtaacatacatatgcgaataactaaatgcaaagagctcgatgcttcttatggaactataacaactaatactactctcctctgtcaccatactaaacttctatcactctcagaatcacatgaaccctatactctcaaattttgtgcaagatggggattggcggacactgtacgtactagattattacaatacattaaaccactgcttcactgctcatccaaaatttgaccgcggttacatagaacatgtttacatatatactatgctcatacaccaccgtatattgcatacataggaatggcgagaagatattgtgttcataatccttgtcccataacacgatcatcatccatgggcatgcgcgacgttggcatgaca

SEQ ID NO: 129388 - DNA, 382 bp, Glycine max
  Clone ID: PAT_MRT3847_87842C.1
atgcacgcttccctcagccttgagctcggaattagactccagatgctactattaactgagaaggagaagcatgatggctctcatcactgatctctgctgacgctgataccactggttaccgtgccggtgccggcatggctgctacagtcactgacctcaagtccatggatgccactgccatgagtaagaccgacattgacattatcaccattggtagcaacagtgctaaatggcacttcatgcaggcatggccaccagttgacactaataagactgatactgaaaactcactgcctgaccttgctgatgcgccattggcagacgaagtgcacattctgattaggacgggatcgaataccatcttgcaaattgagccggacct

SEQ ID NO: 129389 - DNA, 442 bp, Glycine max
  Clone ID: PAT_MRT3847_87843C.1
ctccacacctcccggggagggctgcatacttccttgctaggtcacctggttccggaaatgtccgcgggctcgacacctacgcgttccggaaacaccaatagggtgatgctgtgtggtcttcatctggatgggcagtgggaagactcccaactccagatgggcgcatatttctgtcctgtagacgtgttgattgcaccacttgataactaacttaacctctgattcactcaatactccatgtgtggcacgtgtccatcgaatgtgccatccagccatattcgttcccgttccctttgctctcttcccaccttcgcacaaaatctccagggtgtatcccattttcaataccagccctcctgctctctatgtccatccccaatcaagcgagtcaccgttctccttaaacaagcaagtggagcatatttatgtgatttaacggcta

SEQ ID NO: 129390 - DNA, 609 bp, Glycine max
  unsure (1)..(609): unsure at all n locations
  Clone ID: PAT_MRT3847_87844C.1
attccagctctgtacccggggatcctctagagtcgacctgcagaaactccccatgatgctcttgaatcagtcttaaaagaccaggattctgcttaccaagttcctgaagcacaggctgcaagggaaagtaaaaatcattagacatcaagaaatgaccaaaagtcaggaaggtaatggagaaaatgaatacctgtagaatttgtggattggattgcaccattgaacgcaatgcttgaaactggaaatgcagacagagaaatggtcacttaaaaactataaaagcaaagatttaagctagatacaacaacaataacaagaagccttatcccaataggtggggttggctacatgtaaaggcttgaaaccagagtagtcactagcacagtgtgttgcaggctgatcctactccaggtgaagccatcatggcgcaaattcaagtcgcagccatcatggcacgactcacacccttcgcagccgctcctagtgtgatgggcaagaaaacatttttacccccttattagtatcgttttttgctttttaagnggagtanacttggaaaatcctatccctttatattctgaacctctattcttcttcgatgccccagcc

SEQ ID NO: 129391 - DNA, 372 bp, Glycine max
  Clone ID: PAT_MRT3847_87845C.1
gcttttctttttccacatgatactaatcaggaaggtcagtgattcagtagctgagaatctgagggcatcactacctatgaatatgttgtagcaatgagagccatgagtgaagcacctgcaggagcatccgtagatgaggatttgccaaatatacttttctctccaacaggctcagccacaactggattgagtggaggaagttctcttggtttgcagtataaaggggcttggtgtacccctcctagggtattcgtggattatcaggatgaagttgtgcctcacttggagcctggaatgctaccatcaactgttgatccagatgcagctgggattgccgaaagagggcaaaagatgccaaaaagacctgttcgt

SEQ ID NO: 129392 - DNA, 253 bp, Glycine max
  Clone ID: PAT_MRT3847_87846C.1
cccacgcgtccgttcaacttgaaatatcatttcttctgattattgcaattgaattggaattatataaaaatagatttttactctaccatcttcatgttattggttgataactgacttgaacacaaaataaattttagttgcctctgcttcaaaaaaaaaaaaaaaaaaaaaaaaaaaaaaaaaaaaaaaaaaaaaaaaaaaaaaaaaaaaaaaaaaaaaaaaaaaaaaaaaaaaaaaataagcggttccctat

SEQ ID NO: 129393 - DNA, 199 bp, Glycine max
  Clone ID: PAT_MRT3847_87847C.1
ggggataccacactagaggcctgcagagtacaagaggtcaaggatacccagaaaccgtaggactgacaaccgcgcatatggaggagcaatatctggaagagccgccagggagaggattatacgagccttcatagttgaagagcaaaagaatgtgaagaaggtgttgaagatccagacggcacaggcaaagcaggcctca

SEQ ID NO: 129394 - DNA, 790 bp, Glycine max
  unsure (1)..(790): unsure at all n locations
  Clone ID: PAT_MRT3847_87848C.1
ccacgcgtccgcttactctcatatgatatgtcctctctctctctctctctctctatatatatatatatatatatatatatatatatataaagagagagagaagggatcaacttactttaagaatccttatcattcattttcttaaaatctaatagttgtaataagttattaatcttatctgttagattccaagagaatgatagtggggatgaggagtaactttaaaagagttactcttggtgtaagttgattcctccccatatatatatatttgtacaaatggaaaaagtagacagctcttaatttctagattctgaacttgtcctaattagctctgggccagaatgggttattggggtcagactcaggtcatgtcttaaaaacactgagacccaagacatattggggtaaagttaactgtaaattagttaatttttaggtgaatttggaatttttattttgggatgaaagtgttagatatataaatcatttttgagagagttgtgagcatgtgcattgtccatgcttcaagaccaaatggatcttaaataaggaggtgtgttagagatttgatcctttatggaatgattctcaaacaaaatggacaggcaaagaaaaatgacaaaagtgagaggtatttagggagtttggaatctcacataaactttntaagaatntgagcaagaggagatctcatgtcagtcgaagaaataatatttatcatcaccaaacntccaaagtaattttacaacgatgcataatgttgggagatacattttgcaaaatgata

SEQ ID NO: 129395 - DNA, 665 bp, Glycine max
  Clone ID: PAT_MRT3847_87849C.1
ttttagtcaacaacgttaacatttattagccaaaactctagaaaattataagttaaaatttatcatcattttgtgtgcagatttttaccaaaacgatgaaagttaggacctaggaatgaaggagtatcttattctttcaaactggttgccatgctgagacagtgagaagaaacctattttgccaccccaaagagataactctcccttcatccctttcagaaactctgaatcccccaccaccctcttcctcaaactgtagtggataataatgggtcctcatcttcagaagcagctttgcttggatcacacactttgagcttatttttctcccaacaaacccatgattctccattctccctttccatgtttccatcctgtcatatttggggcaataatattccacaccatcatccatgtcatagttaagcatgctcttgatctctttccccaaaagctgcttctcaatcctcaacctgtgagtgctctcaaggggcaagcaatcatccagtgaatcaaacatggctgcaaaatagtgcaaagactcatggaaccttgacaagaaggtcttgagactcctgcagctaccttcttgtttcaccaacaccacaatggaggggctaagataatgaacaaatccaatgtgtgagacaccttcatgaaactac

SEQ ID NO: 129396 - DNA, 517 bp, Glycine max
  Clone ID: PAT_MRT3847_8784C.1
cccacgcgtccgctgaatttggctaaaaaaaaaaaaaaaaaaaaaaaaaaaaaaaaaaaaaaaaaaaaaaaaaaaaaaaaaaaaaaaaaaaaaaaaaaaaaaaaaaaaaaaaaaaaaaaaaaaaaaaaaaaaaaaaaaaaaaaaaaaaaaaaaaaaaaagggggggccgtttaaaagaaccaaagttaactaccccgggcttgcaaagaaaaaattttttaaaggggcccccaaaataaaatcaacgggccggggttaaaaaacgtcggaacgggaaaaacccgggggtaaccaaattaaatcgcttggaaaaaaatccccttttcccaagtgggcgaaaaacaaaaaaggcccaaaccaatcccctttccaaaaaattgcccaccctaaagggaaaagggaacccccccttaaccggccaataaaccccggggggggggggggtaaccccaaaaggaaccgtaaaatttgcaaggccctaaacccccgctcttttggtttttttcccttctttttt

SEQ ID NO: 129397 - DNA, 638 bp, Glycine max
  Clone ID: PAT_MRT3847_87850C.1
ctcggatctcgacccacgtcccaagtatcgtttttccatatttgattacagctggaaccaaagcctatctgaagtccacttcaatggcggatagggaaccaaagcctaaagactcgccttcagaaaaagatgtgaaaagtccaaacatttttgagcgagctaaggaggagaataaggcaatttttcatcatgacaaatcgccttgccatcacaaagaaacctgttggacaagtgatgacattgacgtttgaacttcacctgatgaaataaaagcgcctggtgtgtttgaacgggtgaaggaggagattgaagctgttgctgaggccattcatcccaagaaagaatctgaatccgacactcgtgatgtgtcaccaaagtgatggctaggatgtgcctttattttgtaacaaagagtgtgaagacttgtttcaatggtgttaaccatcaaaactaccttggctttgtccactgatctttctttcttttttttattttgttgttgttgttgtttcctttaagtagtaaatttctcttcttttttcaattgattatgtgaatgcttagtccttttgtcttcaaaaaaagaaagattatccctgaactggtacattatcaatgtgaatgttttattgtaaaaa

SEQ ID NO: 129398 - DNA, 396 bp, Glycine max
  unsure (1)..(396): unsure at all n locations
  Clone ID: PAT_MRT3847_87851C.1
gcgcccacgcttccgtattgcaccaactgcggaatttgaattcattctctctctccttcaattatgttatactggggacacctgaaagcttcctcaggatttatcaactgtaactcctacaagctttcggtttattcagttctagtcttcagaaggggttcttcatgccttgcgtctccttactaatctgaatattgatcatcaagatttaaatgtcaatttnaatcaagctatgacatacatcttgagatatataataatacaaaaactgagaacttgatgaacaaaaaaaattattcttgactatgttaaaaaaacgaaggtgaactttttttttatgcaaacaatgtttcaattgctgacacaaaaccctcaaataaagaggttcttgaatca

SEQ ID NO: 129399 - DNA, 206 bp, Glycine max
  Clone ID: PAT_MRT3847_87852C.1
cccttgacttggggcgcacggtactgtgaaatattatgcatggtatcatctctaggtgaaatgctactaatttttcattttgttgaaacctatatatattcctgaaaaatccgcagataacttcctagaatactaattgacattgctaaatacttgcttagacactgtgaatgtatggttgaaagaaatttttcatgtatttaatt

SEQ ID NO: 129400 - DNA, 580 bp, Glycine max
  Clone ID: PAT_MRT3847_87853C.1
gaccacaaatatacagtcccactcttcttattccatttacttctcttgcctctcttgctccttttcatcatcatcatcaaccaatttgaaaagaaaaaaaagaaaaaagagcatggtgttcccaatggagctcctgaggcttgcagattggatcttgtaccagctgcttgctaactcatgttatagagcagcaaggaaaatgaagagttatggattccatttggggtatttgtcatctaaaccatcccttcaaccttcctctttccctagtgttaccgaatgtgattgggagggtagaggctcacaaacacttgttgcttgtggcattcatagagtccttttgaggtctcactccttctttccatatttcatgcttgttgcctttgaaggtggcagcattttaagggcactcctcttgctcttgtcttgtcctgtgttgtggattttagaccatgagttaagtcttagggtcatgaccttcatcaccttttgtgggctaagaacaagtgccatggaaaatatgtcaagggctgttttgcccaagttttatttggagaatctcaaccttcatgcttatgag

SEQ ID NO: 129401 - DNA, 370 bp, Glycine max
  Clone ID: PAT_MRT3847_87854C.1
gaggctgggtggtggtgccaacacattccctaaatgttacacctatagtgctgaccttggagcagagattggaggcacattagagcttgtttacactgtcttctctgccactgatgccgaaagaaatgctagagactcccatgttccaatcttgcaccactgcctatgggtttggctgtcgttcttaatgcatttgcctacaatacttgttagagggactggtatcaaccctgctagaattctatgtgcacccattatctacaacaaggaccaagcttgggatgaccatagcatatttagggttgggcctttcgtgggggcagtactggcaaatatgtaccatctcatattgatcatggccatacacttc

SEQ ID NO: 129402 - DNA, 340 bp, Glycine max
  Clone ID: PAT_MRT3847_87855C.1
aaacaggccatgaaacataagtgacacccccaacacgtgcgactacaaaagcatcatcactctctttaaagatcataatcactctaccagacctcacctcaaatagatttatcacaactctattgacatctcggagattgcacggttcatgacagatatatgtgaccaaatacttctcacagagacgaaaatcgagtaatatagactgaggatgctcacaacgcatatatatattataacatacaccacctgccgagacagcagctcccaggctgtgaacaggaaaagtgtattttctgccacagagatctttgcgccacaacctctctgcccagaatgg

SEQ ID NO: 129403 - DNA, 1243 bp, Glycine max
  unsure (1)..(1243): unsure at all n locations
  Clone ID: PAT_MRT3847_87856C.1
aaggttgaaatcatccatccacgataacggttaactgtaacagcgtcactgactcaggccattttccgcatcgggttcttcaaaccgcttttttccctgaaccggacgtcggtggagacggtcgagcctggttaaagccgctgctcggaaatcccaaaccggacggcgacggcagcactcgacggagttgtggaatgcgagtgatcggattccgaaatggcttcgaacccttcgcttctccctgagatcggacccgatggtctcgctaaagaagctcccgtcatcggctacaccgagaagatcatcgaagcagaacagcttcaattgcagaaataccattcaagaaaactattctaaaattcgcaatgtggagcgtgagcttgcaaatctttcactggagatgaaacttacagctgggccaaaaaaagcagctcttgaacatttgagaaagaaaatagaggaatcaacagaaagaattcgtgtggccaagctaaaggaagaacaggcacggaaggtgtgggaatcagcatcaaaagtagtaagagatgaggaagcattaaagcaaaagttatgtgaagacttgagtaatctggttcaagagagcagtaactctcagtttgctcggctggaggaattaaaaaaaaggattggaagctttgaatccaactcgtgcatcaactaatctttatcatgatggaagatcaggagcgtcttctcaggatagtacacccanacctggttcctctgttcccaatgcaaaggaaacaaatgagggatcaaccgagagtgttcccaaccaaagtaatggtcagcaagttgcagtgcaaaatgggcctaatcagcagcctaatgaaggcgaaggaagaagtaaaaggaaagtcaacttccaaccaaaaggaaagggaattggtgctgtggccaagggtagatcttcaactcctggctggactggggcaggcttcgatgtcgatggcagaacctgagaatactatagtaagatactattgcattaaattgattttagtgagaagtccatactttctgtgcaaggtatatatccttcgttcctctgttcttgtaagttgtaatttgtaacccattgacttggaagtgtaatcttctttcaccaattagtgttgtttttgtgacagtttttttcaaaaaaaaaaaaaaaaaaaaaaaaaaaaaaaaaaaaaaaaaaaaaaaaaaaaaaaaaaaaaaaaaaaaaaaaaaaaaaaaaaaa

SEQ ID NO: 129404 - DNA, 505 bp, Glycine max
  Clone ID: PAT_MRT3847_87857C.1
ccacgcgtccgcggacgcgtgggcggacgcgtgggcggacgcgtgggcggacgcgtgggcggacgcgtgggcggacgcgtgggcggacgcgtggggtcggatctgagacgagacgagtcccctcgcctcacccaaccggaacgaacaagttaccatctcatcccaaccccgcctcgaccggatctcgtcggactcggatccgcccgaccaccccgcgccgccgcagatcaaagaagatggcagctctcgacaccttcctcttcacctcggagtctgtgaacgagggacaccctgacaagctctgcgaccaggtctcagatgccgatcttgacgcttgccttgctgaggaccctgacagcaaggttgcttgtgagacctgcaccaagaccaacatggtcatggtctttggtgagatcaccaccaaggccaatgtcgactacgagaagattgtcagggagacctgccgcaacattggttatgtgtcaaacgatgtcgggcttgacgc

SEQ ID NO: 129405 - DNA, 158 bp, Glycine max
  Clone ID: PAT_MRT3847_87858C.1
gatggctctgaatagaagacaatagggtaggccgttgagatggtgtcgtgtgggctaatgctcagaactgcagttctaaagtcttctgacaatattcttactagtactaaatcatttcgtattatgtgagtagtgcttggcctcttaaacgtgtgtcg

SEQ ID NO: 129406 - DNA, 487 bp, Glycine max
  Clone ID: PAT_MRT3847_87859C.1
agatggctgaccattacacatctgttatattggttgacggttgaccaacgcgagggaatcttaaatgaagcatgctcacttgcccgtcactgcggtatatgaaagctcattgctttatatgaggacattcacatttccattgatggagacactgagatcgcattcactgagaatgctgatcagcgtatagaagcactcggatggtatgcaatgcgggtgaagaatggccatactggatatgatgagactcgtgctgccattaaagaagccttggctgccagagacacacccactttgatgaaagcaaccactaccattggatcctggtctccaaacaaggctaattcctacagggtacatgggagtgcattacgtactagctaagctgatgctacatggaagaatctagcatggccatactagcctttacatgtgccacaagacgtcgagaagcattggaggcggcatacacctgatggtgctaaac

SEQ ID NO: 129407 - DNA, 1672 bp, Glycine max
  Clone ID: PAT_MRT3847_8785C.1
tacggctgcgagagacgacagaagggggagccgcgactttcaaattccttgttcttcttcatgtgtgtctccctctcgtataaatacactaccatcttccatttcctcttcaaatccaatgcaccaaacatggttgatctagattggcaaacaaagatggttcactccaacatgcctccaaagtcccccaaactctctctcccggataataacattccaatcccccttcgccagaacgacatcaccgcagcgtcgtctccaatctgcgctgcctacgacaactacctccgcctccctgagctcagagccctctgggcctccaacgacttccctaattgggccaacgagcccatcttaaagcccaccttacacgccctcgaaatcaccttccgcttactcgcaaccgttttatccgacccgaggccgtacataaacaagcgcgagtggacccggcgggtggagtctctcgccacggcccaaattcagatcatagctatgctgtgtgaagatgaagaagaaaaccccgagacacgtggcacgacgccaccggtgagtgacattaacggcttcatcgctcaaagcagaagctacagcgaggagagcctgctcccgcgcctcgccacgtggcacaaatccaaggacgtggcgcggagaatcctcgattcggtagagtaccagatgatgaggtgcacgtacaccttaggtttaggagaggcgaatctcgcgggtaagaagatattcctttacgacgccgtttgcaggccgagcgagattcactcgttggagacgacgccgtttgattacgtggggaactgcgagaacaagaccgctgcacgcgacgcagcagatcgcggagtgttggacgcgcgcggtgaggaagctgctggagagagtggtggagtcggtggagagaaaaacgttggagaaggcggcgagggagtgtcacgcggtggagcggatctggaagttgttaacggaggttgaggacgtgcacgtgatgatggatccggaggatttcttgaggttgaagaaggagttggggatgatgagaaattgcggggaaatggtggcgttttgcttcaggtcgagggagctcgtggaggtggcgaggatgtgtagggatctgaggcagaaggtgccggagatattggaggtggaggtggaccccacgggtgggcccgggatgatggaggcggcgatgaaggtttactcggagaaagagaaaaggaacgggttcgagaaggttcatgttttgcaggggatgcaggcgattgaggtggcgatgaagaggttcttctacgcctataagcaggttgtggcggttatgatggggagctccgaggccgataatgggttcactcagatattccttgaacccacttatttccctagcttagatgctgccaagacctttctcgcttattattgggaaaataataatcaaaatggggttccctgctagttaattaaaaaattaatcaattaattcctagtcatatatacttactcacacaaacgggaaaacaaagagaaaaaaaaaaaggactaaatttttgtaataggttggtgtaaacaaatctttgtctgtaaaataatatttatttgactattcttttggatcatgttctttcggctgctttaaattatgacctgatccccgcttttgaatttt

SEQ ID NO: 129408 - DNA, 315 bp, Glycine max
  Clone ID: PAT_MRT3847_87860C.1
tgcgctcagacacaatctgttatgaatactaactggccaccagatatagatgctgaacttgcggaactgggatcctatgcatttgaaaaagcaccatcttccttagctcacttgactttgacaatgcgttgtaattgctgacttaaatcatggcggctaaatgatccacttgttatatagagggaacacactcagaagttttcatttggatggtttgtgacacattcatgcagatccacccttaattgacatgctttcgaaatctgtcttgatgccaaataccgatatgctaacgacaataacttcatgcttact

SEQ ID NO: 129409 - DNA, 281 bp, Glycine max
  Clone ID: PAT_MRT3847_87861C.1
tttattttattagagacccaaaataaaaaatgatcatttatgagggatccaaaacatattttagccaattcaaaaatttggattgcatccatgactgaactttaaatctaacaagacattcatttttgtttgtaccagatgcctagaagagggagctgatgaatactttctgaaaccagctcaacagtcagatgtaaacaagctgaggccacatttgatgaaatcaaaagctactgatttgttggtcttccccatccttgacaaaataacatatataacaa

SEQ ID NO: 129410 - DNA, 238 bp, Glycine max
  Clone ID: PAT_MRT3847_87862C.1
ggcagcctctcgtatacagaacaagtccaatccttgcacaggtgcacccacatcatctacgattgatacagagtcatccataaagatgccacgactacccatccacaatagccaacagatgcattttaccctatcactatgcaattctgttagaattactaacgtgaaagtgtcagctcctgtagacatcccacacactgatgcaattcatattagtgaatccacaaatgtcataatc

SEQ ID NO: 129411 - DNA, 465 bp, Glycine max
  Clone ID: PAT_MRT3847_87863C.1
gaaggtttcccgtcatcactgtatgacgtcctccttctttggggggggggggggggggggggggggggggggggaatccacaaatatagcccttgtcttaggggaataactcaaccaatgcgttttgagaaaataagaacaatgcccgataaaaaaggtaaccgaagtatataggaacgaatgcccgccaaagatgccaaaaggaagaacaacgcctatgaacagagagggcttatagagaaccctcaattaatagggaattagggagggtcccgtagaggggccgttggtataggggatgccaaacaccaacaaatggcggaggatcttttgcctaaaaatggcgttacgggggggtggtgcgaatgttatgtggagaatcccaatcgttggtttgatatctaaacctttgccttgccagtgtaagtgttgtagccctagacgtaccagttaaaggtcaaatag

SEQ ID NO: 129412 - DNA, 185 bp, Glycine max
  unsure (1)..(185): unsure at all n locations
  Clone ID: PAT_MRT3847_87864C.1
agtgggaacagcgtcatcaactcaatcacacatccgncngcaagtgttgcggcctctaagacagtggccatggttccaccatcancaccancngcacttgcgtcaccctttaccttcaccaccttctcacgcctccacaaaaacctctcaacgtttttcatttgcacggtcgctgcctcgtctcg

SEQ ID NO: 129413 - DNA, 1057 bp, Glycine max
  Clone ID: PAT_MRT3847_87865C.1
ttttttttttttttttttttttttttttttttttttttttttttttttttttttttttttttttttttgattacaataataataatatataacataggtaggctggttatgagcattacatcacaatgttattgtcaagtgtgtgtatggggaatggaaatttgaaataatctaaattgtggtgctatgtaaatacaagattccagcaacatgaagggagtattttgttagctatgaaaccattcgttggcattcaaccaatagcttacatcgatgcaaacatttgaaggtcttggagtgagtattcagcaatggaatactaattgcagaacaatgtatcacgcgtagcatttccagttgttgggttcactccatcagcaactttgcagaggtattcacgttgatcttctcttagtggtacatccgtgaagtcagcgcctgtaacatttgatcccttaaaagatgtatttcctgttgcaagtgcaccttccaagttagcattgcttaaatttgcctttgtcacatttgccagggaaaaatctgcatttctaagatcagcatccgaaaggtcagcacctgttaaatcagcatcaaagaagctagcacctattaactttgcacctttaaaattggcttgtctcagtatggacgttttgaagtcttgtttgatcagagtcccggttgccactaaagtccttcccagtgagatcttgtccccttgtcacttcctgcccgtagccgcctggccctccacctgcaagtgccgggatcaacaaagatgaaagaaagagaggagagacgagggtggcaccagccacacctgattctactgaacccaatgaaaatgtgagtttctgagatggttctttgctttgttttgagtcccagaatagaagaggaagagtataatattagaagaagctttgttgggatggaggttgagagaagaaagatggggtttagaaatggaacacaatgagacgttgagaacaagagccattcagtcacacgcagatgcaactcaccacggccaaatgtcaccccgtgctgtcgtctt

SEQ ID NO: 129414 - DNA, 160 bp, Glycine max
  unsure (1)..(160): unsure at all n locations
  Clone ID: PAT_MRT3847_87866C.1
cttctgagttctgagtgttcnattccaattccaagtncacaanttggcngtgtctatggatcgcgntcaagcttctgttgctgggtgtagccctcttcctcttctgcnctgacctcttntcccttttcactcatcatcnncngnngcnaccccaccacca

SEQ ID NO: 129415 - DNA, 599 bp, Glycine max
  unsure (1)..(599): unsure at all n locations
  Clone ID: PAT_MRT3847_87867C.1
gtggatgaatccgatgtttcatgtctgtccactagaaaattggacatgtgaagttccatatnaatttnnttcntttntcgttctctnnctcccgcacctcccacacctccaccatcagccagatcggaacctcctcggcgaacacccacctccgacaccaccaaaccagccagatccgcccaataaacatcatctttgtccagatgcgtacccaaaacacccaaatccgagcctccaccaaacacggcgtgccaccttcgcgtcccctcttccatgggtgattcgcttctgccgccaccaaccacggctaccacgcctacaagacccccttccccgagattttctagcacaatttcgatctcggtggtggaatcgacctcgtccaaatcttcctcttcttccatggcttcctttcctcccttccctcttctataacatctgtctccgaaaatgagttgtcacataacggaagccttagcgaacctcccaacaaggcgtcttctccgccacctcaagagtacgttcttcctctcccgatggcaagcagcacgcacaacaacaggctcgaaccaaacaccaccagcactagaccaagttat

SEQ ID NO: 129416 - DNA, 116 bp, Glycine max
  Clone ID: PAT_MRT3847_87868C.1
ggctggaggataactagaaacagcgtgatttatatgaaggccctagttttcttcgtcgctgggggggtggtagtatgacaacgccctgcataccctatgcgccctctcacattgaa

SEQ ID NO: 129417 - DNA, 370 bp, Glycine max
  Clone ID: PAT_MRT3847_87869C.1
agccatgctgtcgcaaaccctagggggttgatgcctgagtctgtacaatagttcagaggatgcgctttgatgcccaacattggttatggctaagacaagaaaatccgtcattatctaccaaatggactaaagaactttgtcgcgcacattgtaagagactcagtaacttattatgatgcataacaagacatattgtgctaacattgctcacaatgtatccgcaaggactaggaatgattagcttaaagagctgctgacgttgatgttgtcttgacaaataatactagcacactacatagccagtacgatgatcatcacccaatccaagtgtgagatatttatgttatgaagtgagcttctggagacaccc

SEQ ID NO: 129418 - DNA, 261 bp, Glycine max
  Clone ID: PAT_MRT3847_8786C.1
tgggaacctagaaggagatgtgagcagcccaaggtcaccagctcacgtggagcagtgctagggcttgagcagagctctgctgctgattccgggcttctgtgaagagtgattcatgctcagtgagcctgtaaatatgatcttacctgaacaagagagtttttctcatgacccacgaggaaacacttcttgttactcacagtagagacctggttagaaagtgccggagagggctaggtgtggtggctcacgcctgtcatccca

SEQ ID NO: 129419 - DNA, 410 bp, Glycine max
  Clone ID: PAT_MRT3847_87870C.1
gattgattactatgtttataggtatatattataacttatgttggatttataatccttagaatagctgctgtcccaatatttgctatagtgcttttgggactagcttctctgctgctatccaagattgataactgtggtaatagaaaagggaatttgcattatttcacctacaggtgcataatcagccaactgatatgacattttctgtggaatggacagaatcattattatcatggtgatgttaatcagtagatcattttccatgtggcttccagatgttaatctcttaatagaatttttcattgcctagtattgagaataaaacagagtagagatttaaggttctgtatgcaatacaatgaattgtttattagcattgtctatttcttgatgccgatggttgtcattcc

SEQ ID NO: 129420 - DNA, 185 bp, Glycine max
  Clone ID: PAT_MRT3847_87871C.1
ttaaaaaaaataaaaatcaggacaaaatatgaaaagagaacaattacgacttgaaaacaaagggaggttacataaaaagataacggtataaggatcaactcttagaacacaatgttaagaaaaaaataaccttaacaagaaatgccagatacgcaaatgtagcttattacaacaaaactaactat

SEQ ID NO: 129421 - DNA, 294 bp, Glycine max
  Clone ID: PAT_MRT3847_87872C.1
cacactcgtccgggtaagtaagatattgttcaccacacggaattgtgatgttgctatacaaggtgatgctggtagtaatacgcatcagttgaggtcattgacagaagatgagagtttcagatcgctctgaaacaaagcgtttcttggagctaagggcattctgttagagttggtccagctggagagtcttgcaaaggtgattgtggttaaaagcggaggggagccattcgctgtggtagtgactgatggaatagatggagctctaaagagtggtcaatagcgaagtaggttgct

SEQ ID NO: 129422 - DNA, 384 bp, Glycine max
  Clone ID: PAT_MRT3847_87873C.1
tatgaggggttcacacaagcaaacgtgataccagctattcgcggtccttatgaaggctagaagtgctacactacagacaacggctgctactgatgatgatatgaagctttcgggtattgtgggaagcccatttgtgtgcaagcttcacattaggcttaagttcaagggagttgaatacagatctgttgaagaagattcgagccacatgagtgacatcggtcctcaaatacgaacgctgatcacaagaacgttccactatgtgctcacattgatccatccatagcacagtctcttgtgagagttgcatacattgatgagacatggtagaacatccgcatcttacctactgatccttaccaagaagccttggatcgtttctggttc

SEQ ID NO: 129423 - DNA, 187 bp, Glycine max
  unsure (1)..(187): unsure at all n locations
  Clone ID: PAT_MRT3847_87874C.1
cgcacgcntttttttttttaccaaatggggcaaaggaggagtcacacagtgcgagatatgttaaaaagcaagtggatagatggggccggaaacctaatgctttagacgaaacgtaggaaggcctcagaacagtgcatgttttggaggtgagcacacaacacataaacagattgcactgcaattgcag

SEQ ID NO: 129424 - DNA, 494 bp, Glycine max
  Clone ID: PAT_MRT3847_87875C.1
aattcggctcgaggcgcaattcgctgctgatcaacccgctcactgcacatggatgagatccctacccattcatcctacatttccatcgcgggttatagtgactaacatagaaatgctgattaattcactattatatcatcaatcactcgaaagagagtgctctgctgttgttgctactgctcattaattgtctcaggggaagaaacgtcatgtgagttgcagcggatcacgatcctagatcatagctatcagcctaatgtcctatatcagatatcacaaccacattttatctaaggatgttcgtttccttgaccgactgtactgattagcggtcaaacgcagactgtgatgattgcatcaatcacctgaaggttatacaagataggaacagcagtaattgcaattgaagaaatacgcataatacaacagtacgatggccgactatggaacgagaacgggatctatatggacggtgctgatctggtttgcgtcgg

SEQ ID NO: 129425 - DNA, 184 bp, Glycine max
  Clone ID: PAT_MRT3847_87876C.1
gaacaacctgagtgcggccgccaataccaccgccgaccgcctcacggcgtgcaactgcctcaagtcggtcgtctgccacttctccggcttctaagccaacaacgccgcctcgctccccggcaaatgctgagtttccatcccttacaagatcagcacctccaccaactgctctaccatcaaggtt

SEQ ID NO: 129426 - DNA, 498 bp, Glycine max
  Clone ID: PAT_MRT3847_87877C.1
caattgattagaatgttgtactaataactggaaagtcacagatttgattttgcaagctaagcagttggaaaaaaaacattacaatatactaacatggacatattttacatattagacgtttcatctcacatactaaagatgactttttcctttgttatgacaaaatcacttatttgcagtgatacaatgtccttacaattcaagaagcaatgtagaaagacaataagacttcagtggaagtcatgaaaacagtggcacaactttgaagtagacttataaaatgtcaaggttcagcaactttgctaatgatcgcggaggcatatttggcaatggatgattctggagactgctgaagccttccaatcacagggaacaatggtgatgaacggatgaactgtctgcagagtggatgtgcacacatctttgctagggaaaagagagctatctttagaggagattcatttcctgaatcatttctgcttggattgagcgctgata

SEQ ID NO: 129427 - DNA, 380 bp, Glycine max
  unsure (1)..(380): unsure at all n locations
  Clone ID: PAT_MRT3847_87878C.1
acgggncgggaatacccgggccgaccacacccttccgatttaatactataccaacatttggataatattttttttagtggataacccatggttcctgggggaaagttggaggttgacgttaatttaaagtttaacccaaccaagtcctgccaaaccttaaggaactcaattgaaatattcccaaaggccttcccaaatgattccaaaaccattgaggtttttgagggggatggaaaataacctggttttatccgccacataagtaatggggaaggttaaccacttgggaagtaatcttttgagaaaatggaggttgttgataaaaaaaaaaaggaagggccgtccactataattaatggaaaactcttccagaattacaa

SEQ ID NO: 129428 - DNA, 608 bp, Glycine max
  unsure (1)..(608): unsure at all n locations
  Clone ID: PAT_MRT3847_87879C.1
ctttcgtcttgcctatggctcttctcactttccctcacttttcttcccattttcctttactttcttcccattttccctcactttctttttccttcccaaacactcgctccttctcttcaactcggcgctactgttcgatgaaggcaactggaacggccattctgtggttcaagcacgatcttcgaaccgacgatcaccctgcgctcctcgcagcctccgcatttccatcactcgttcctatttacgtcttcgatcaccgcattctttcgcgtttttccgatgagacgctggaactggttctgcttgccgtggaagatttgaggaagtcgttgaaggatcgcggttccgatttggtgatcagattcggcaatgcggaaaacgtcattcagcaacttgcaacagaggtcaaagccacttgtgtatttgcggaacaagaggtggagtatgagctacgtttcatcatagatgtggtcaagcagcgtttgaaatccgtcagtgttcccaagggagtccaaggattgaattatggcgaactccattttatgatataaaggatctgggaaaatcttcctgcatcatatgatgagnttaagaaacttcgactctct

SEQ ID NO: 129429 - DNA, 335 bp, Glycine max
  Clone ID: PAT_MRT3847_87880C.1
ccccaccctcagatattccctgtgcgactactctgttaatctgcgacctggcggtccgccctctatggtgtcgagtggcgcccatggacatgcgctgggaaggccaatgtttgttctctagcggttcctaatgcgacgggtggcgggagatgatgctcctagatgcgtgcccccgcggcgggtcgtgtcgccagagatgcacaggatgtatggagcgagtgttgtcccaggcttgtaagccttgtggcgtcagagtccaatgaagtctgtgaccaagaacagcgaaggacgaattgcaccggtgcacgtgcttaaggctctatggggccttggat

SEQ ID NO: 129430 - DNA, 321 bp, Glycine max
  Clone ID: PAT_MRT3847_87881C.1
cggctcgagcttcaattaactcctcaccatggattgtgtcagccataagggttcatgctttcgtctccgtgagtctccgcgattatagttcgagtgtcaatccatcatggatcctgtcaacagttggtttgtgtccctgatgagttgcttactggacaaagattaatccagtacctgaaacaatcacatggcacctattgaacgttaagactgaatcatgtgatgaaacttcaatgggttgatgatcgttgttgtatgttgcgactactgttggtgtggcactatcatctaatgctgttgtctggccgccatgtaagctaa

SEQ ID NO: 129431 - DNA, 280 bp, Glycine max
  Clone ID: PAT_MRT3847_87882C.1
tgcggcacgagcttctataggatgatattaatatatataatttaggctccatgttaagtcatgggttggtaaatgcgcaactgcacatatcagttgaaactgcatatcgtagagttagcccatgattaaaatttgtaatttatgattttcagcagtatgggcttttgaccatgaaacttacaggattacagaaaaaaaaaaaaaaaaaaaaaaaaaaaaaaaaaaaaaaaaaaaaaaaaaaaaaaaaaaaaaaaaaaaaaaaaaaaaaaaaaaaaaaaac

SEQ ID NO: 129432 - DNA, 1858 bp, Glycine max
  Clone ID: PAT_MRT3847_87883C.1
aatcgattcattccttctgttgttgcgcttcgcttcctccggttggcctgcccggcacggcttttcccccaacccatttctcagaccagatacagtcagtcacaaacatctcatctccaactcaccagaccatgataattgatacatacaaacaattgcacttaactcattcattctcttctcttctcttctcttctcttctcttctcttcagattatagaagggatactgcttctccataaacctgcaatgcgatagattaccaggattagaggttagagaccaaaaatggtaaaatcaacatatgagaaattttcaaaggactttgtgatggggggagtagcagcaatcatatcaaagagtgcagcggcaccaattgagagagtgaagcttttattgcaaaaccaaggtgaaatgattaaaagaggacagctcaaaaaaccatacttgggtgtgtctgatggctttaagagggtcttcatggaagagggtttgattgccttttggagaggacaccaggccaatattatccgatatttccccacacaagcagtgctgcaggagcgactacatcactacttctgtatcatttagattatgcacgtactaggttgggcaccgatgcaatagagtgccgtgttaccagtcaacgccagtttaaaggactaattgatgtataccggaagaccttatcaagtgatggaattgctggcttgtacaggggatttgggatttcaatatggggaatcaccttgtatcgagggatgtactttgggatctatgacaccatgaagcctattgttttggttgggccttttgaggggaagtttctcgctagtttcttcttaggttggagcatcacaactttttcagcggtttgtgcatacccttttgacacattgcgccggcgaatgatgcttacctctggacatccaaacaagtactgtactgcaatacatgcatttcaagagattgttcgacaggagggtttccgagctctatttcgaggatttaccgcaaatatgcttctaggcatggcaggagctggagtgcttgctggatacgatcagctgaaccgtatctcatctagacacagtcactataatgagactaaccaaagagttctgaaatgaatgcccgagtaggaaagaaatgcctaacctaaaaaaggcatattcatcatttagaatgaatattattatgcctgttcatttcaaaagtctggtctgaaggaccataacacaataaacgaacttttggacatgatagcggaagctatttgttctggttcaataaataatcacatttaacgtgtccaaaagaatggtttttttttttttttctaaagggagttttgcattttgggaccttaaaagtcatactatggctgttcatttcaaaagtttggtctcaaggactataacacaataaacaaacttttgggcatggtgaccaaaggcatttgttctataaaccaaactatagttcgatctttgaacatggtaaacttgatttttaggtccttaaattaaattctcccttttttagtggcgatttttagaattggaatactctactgcctcattgtaaatttaactccccatttagaaaaaaataaataaataaataatttgcttggggcgagggttattggaaacgtttcaagactgcaaagcactcagccaacctgtctgtttctattaatgctgtatatatgaagtttacgatgtacagtttacatccccagtttcagttatattattaacatcattgcacagatattacctatggaattttcctagaagatgcataacttatcagaatttgaagttatctacttctatccattgcgatgtcc

SEQ ID NO: 129433 - DNA, 266 bp, Glycine max
  Clone ID: PAT_MRT3847_87884C.1
aaaccaccacctttaaaaaggcaaacttttttaaccttggctgcccccaccgttgtgcggtggctctaaacaaggggggggtcccattttgccattttccttacaaattggaaggcccaacccttttaacctgtttactttctgtccaggtttgcaattggggagcctgacacttaaactggggactacaactttgggttttaagtgtttccagggaaggcttgcaaacctgtggatgggtatgcctctatgtattaatttttcct

SEQ ID NO: 129434 - DNA, 474 bp, Glycine max
  Clone ID: PAT_MRT3847_87885C.1
ttcggctcgagcctaagcaagactgataaataagagcgttagaggccacaatatggtcaaacctacattgctcaatattgtaaaaggatttcgtaatgggaggagtagcaggaatcatatcaaggagtgcagcggcaccaattgagagagtgaagcttttattgcaaaaccaaggtgaaatgattaaaagaggacaactcagaaaaccatacttgggtgtgtctgatggctttaagagggtcttcatggaagagggtttgattgccttttggagaggtcaccaagccaatcttattcgatatttccccacacaggttacttcaaaagcatttttgggtattccaaagagagagacgggtacattaagtggtttgctgggaatgtggcttcaagcagtgctgcaggagcgactactttcactactgctgtctcattcaaaatatgcacgtactagattgggcaccgatgcaatag

SEQ ID NO: 129435 - DNA, 1088 bp, Glycine max
  Clone ID: PAT_MRT3847_87886C.1
cgtaagctcggaattcggctcgaggcaattttcttccacaggttggcatacccattacggcttttcccccaacccattctcagacatctcatctccaactcaccataacactatttcccttcaactcattcattctcttcagattatacaagcgatagttcttctccattatcactttcatgtcagttagacgtgcttgaggtggcaagtcctttttagcaggctcctcctcacctatatctttcttcggtgtggactttggacccaactgtcaaagctagcatatactttattagaggttagagaccaaaaatggtcaaatcaacatatgaaagattttcaaaggattttgtaatgggaggagtagcagcaatcatatcaaggagtgcagcggcaccaattgagagagtgaagcttttattgcaaaaccaaggtgaaatgattaaaagaggacaactcaaaaaaccatacttgggtgtgtctgatggctttaagagggtcttcatggaagagggtttgattgccttttggagaggtcaccaggccaatcttattcgatatttccccacacaggctttcaattttgcattcaaaggttacttcaaaagcatttttgggtattccaaagagagagacgggtacattaagtggtttgctgggaatgtggcttcaggcagtgctgcaggagcgactacttcactacttctgtatcatttagattatgcacgtactagattgggcaccgatgcaatagagtgccgtgttaccggtcaacgccagtttaaaggactaattgatgtataccggaagaccttatcaagtgatggaattgctggcttgtacaggggatttgggatttcaatatggggaatcaccttgtatcgagggatgtactttgggatctatgacaccatgaagcctattgttttggttgggccttttgaggggaagtttctcgctagtttcttcttaggttggagcatcacaactttttcagcggtttgtgcatacccttttgacacattgcgccggcgaatgatgcttacctctggacatccaaacaagtactgtactgcaatacatgcatt

SEQ ID NO: 129436 - DNA, 393 bp, Glycine max
  Clone ID: PAT_MRT3847_87887C.1
tatatgaagaatgagacgcgacaaatggcaaatgcgaggattgaaacaagaggccagaggcaaatttgcgggtttgagccttattcataaacataagggtcatgaactgcctgagaaatagctcaatactatggtacgagactagccctgattagggctgttcgcttccgagggtgtgattttccactacgctgatgaagggagggctatacatagacgcttattcaaactaacttgtgggtcggcggggctagaatcgcaaagaaactccttttacatgacaagataggttggttcgatctcactgcaagacgaagactgcttgtagttgtagctgctctgacacccttaaaggcactcatggcctcactggctcataagctgctgaaactg

SEQ ID NO: 129437 - DNA, 353 bp, Glycine max
  Clone ID: PAT_MRT3847_87888C.1
gttttttttttttttttttaatatataatagattatatgatttattgataaggatcctgttattatttaattgttagatgacctttttttgttatctattaatttatgctttatactttatatttttcatgtttagtaccggaacaataacctgttctctactgacttcgttgaattggtgaaaaggcatattcctccgcaatatggtttactgagcctcattcccatcgcccaaacacggacggagggcaaatcatgaccaacccgtgaatcggaagcgctccaaggttttacacacacaaacacaacggtaacagtcttggttgatgacttgatgctgcttctattcaaca

SEQ ID NO: 129438 - DNA, 807 bp, Glycine max
  unsure (1)..(807): unsure at all n locations
  Clone ID: PAT_MRT3847_87889C.1
gaatgtaatacatagaatgggataaagcatagttattggaggtcggttctcagttgaagcgttaccctcgctggcgccgcatctctccgcagcaaagcgccgcacctcaccgcagcaacgcgccgcacctcactgcagcagctccgtcgccggcaacgccagtgggcctccagaaactgcagcgtttgggacgacggaaacaggctcgagctttgaaactttctgtgctttgctctgtttgaaagttctcgaacccctctgttgaacccttatcgaaactccgaatcctaattagttatgaatatttttaagcaaattagcagcagtggtaatctcaatatctctggcagataggtcaccttgtaccagcgcaagctccaaaagaactggttttgtgtagtactaaattcctagcacacaagtcacaaacatgcaatccccttcttccctttacctcaacaagaccttcttcacgacacaccaccaccaccaccaccaccttggcttccaccacaccctctcttccacccacaattcccttccccctcttggcttcttgcccaagccatcatgttccacaaggcttataacagctcaagattacaggccaaacaaccacaagaggaatgattaccccaaagagggtgtgagggtgaggggcaacaaggacaatgtgtggagcattgataatgagcttgccaaggcgtgttcttctcagaaggagaaaaggaggaagcanagagggaggagggtagtgaggaggaagggcccaaagggtgggaagggtattggctctggggctatgct

SEQ ID NO: 129439 - DNA, 644 bp, Glycine max
  Clone ID: PAT_MRT3847_8788C.1
tcggctcgatgttttccacaaaattccttttatggcaaaaactcgcaatttaattattataattttttactgcatctttagttaatttggatgctttgcatcatattttgttgtttgtattgttattttgtacccagaatttttagtaaattacagtgatctatttttggggtcgtatactatttttgtgcgggtaatgttattgtttttttggaggctaatgtggtgttttccttctgattaggacaagcctgagccaccaccagagggtcgcttgcccgatgccactaagggtcagtagtctaaatttgtattgtcaagaaatgtttgtgattgatagtgtttgttttgcttagggtttcgttcctgattgttgcaggttctgaccatttgagagatgtgtttggcaaagctatggggcttactgaccaagatatcgctgctctatctgggggtcacactattgcatgctatgattttgaatttggtgttttagccacattgcaaaattatgctgctattatattgagaaaaaatgtcacatctaaacttttgtaccactactggcggaaaatcgccaaacgtatcgttggagggagctgcacacaaggaggcgcccccggaaaccaaagggcccctgggac

SEQ ID NO: 129440 - DNA, 260 bp, Glycine max
  Clone ID: PAT_MRT3847_87890C.1
aatgctggttgatggaatattgcctagtagaggtatgggtctgttgctgcagcagatgaaggaggaaggagttcttgaaggcaaggagcgattattgagaggaattttgccggatgcgagagtcaggagttaagttattctattgataatggtgatgaggatgaggatgaaaatgagaaggagggcaaagatgagaatataagtgatgcttgtcaatgtgatcatgttgatggaattcattaaaaccgtggatggaccca

SEQ ID NO: 129441 - DNA, 165 bp, Glycine max
  Clone ID: PAT_MRT3847_87891C.1
tttttataaaaaaagcttattaaaaggtgcacagggagataaaaccacaatttattcaacactgttcaacaacatagacgttcactaataactaatacttaagggtgaaattataagtttccttaatatacatcacattataatcatacctacagataaataaaa

SEQ ID NO: 129442 - DNA, 113 bp, Glycine max
  Clone ID: PAT_MRT3847_87892C.1
agggaacgagagaaagaacatgggttcaagttcaacaaccgaaagtgtttgccttacaagaacctccgggttcaaccggtcaagggctgtcaagaaactcaaccaaccttggt

SEQ ID NO: 129443 - DNA, 262 bp, Glycine max
  unsure (1)..(262): unsure at all n locations
  Clone ID: PAT_MRT3847_87893C.1
cttntttttcttctagtcaaaactgntcatggtgccgcatccataccataagggacacctgcttctcttttattacagcactctcaaaacacattataggaaactccaaagaagaacccttccttnttcagaaacaacantnntggaccctagaatntggagcaaactacctcctgatgttgtagaacacatacttttgttacttcctctcaaaacactcttgantctcagacccacttgcaaggccttcacctgtctcctc

SEQ ID NO: 129444 - DNA, 387 bp, Glycine max
  Clone ID: PAT_MRT3847_87894C.1
aaccaccttttgggattttgcaagagattgatgtaaccggtaaactggcttattgagaggggaatatgaagttgtaacttttctttgttgctacaatatttttgctaacatggccatgccttgtctcaggctacccaaggtcccctcttcaaatgataactcacctattctgagctttctttcctggtaaactgctcacactttatgcttgcttcttagctcacaacatccgcaccttttataccattcctccagagcgcgttcaaccaacacaagactacattaatctcgaacatttaagatcagactctaaaacaattaaccaacaagctttcccatatgctagtgaacgcgacattcatttctgcgacatatttatgttccccc

SEQ ID NO: 129445 - DNA, 302 bp, Glycine max
  Clone ID: PAT_MRT3847_87895C.1
gctgaatgaactaatggcgtctaaaggtgggaaaaagaagtctagtagtagtactagtaaatcatggacctgcgaagctcccatcggatacagcattgaagacgctaggccaaactgtgggatcaagaaattcatatctgctgcttactgcaactgcgctcgccaaccttcctgatatcgatgcagaatgatagggcattgcatgcaaccatagatgtattaggtcttttcttctttggattcaattaaggttttgctgatcttcttcaaactacggctttccgaatactttctttgtgatt

SEQ ID NO: 129446 - DNA, 155 bp, Glycine max
  Clone ID: PAT_MRT3847_87896C.1
tacggctgcgacaagacgacataaagggatttggaaaggcaatcaaaaatgaaagctcctacctgcactgggcataaatctacgacattccagtttcctgggggggcttaactgatagcacattgtgggatatgctgtacatcgattcgtacaag

SEQ ID NO: 129447 - DNA, 426 bp, Glycine max
  Clone ID: PAT_MRT3847_87897C.1
gcacgagaccagatattttttgatggcctaactttgtaagacattggctttctaagtcaatcttcccattatatctcacctttgagctagccaaagtgcattcttcatcaacccatttggcagctagttgtctcttcaaatcaagttctgaattctgagttaggatatcagaatttttgtccctgccatatacttgactttctgaatttatcttcttagatttaatcactttaggacttgaatctattgaagaattgttataaatgccactatctcttattgaagtctcaaaatcaccccctatgttattggtttgagacttaaccttgtgtacagaatcaacatatagagttttctcatgtacatggctttcataacttgaatcatgttgagtgcaacctctttgatatgggtcaatgccatgct

SEQ ID NO: 129448 - DNA, 379 bp, Glycine max
  Clone ID: PAT_MRT3847_87898C.1
gggcagaaaattcttcgttggtggcaactggaaatgcaaagggaccactgatgaggtaaagaagatggttactactttgaatgatgctaaagtccctggacaaaatgtcgtataagttgttgtgagcccttcttttgtgttccttcctgttataaaaagattgctgcgccctgattaccatgtttctgcacaaaacagttgggttcgcataggtggtgcttataccgtagatagttaaactgagatgcttgttaatttggaaataccattggttattattggtcacttagaacggatcgcaggctattaatttaatcaaatgagcttctaggaaactaatgtagactatgcacttcaactaggtcttaatgtaattaca

SEQ ID NO: 129449 - DNA, 468 bp, Glycine max
  Clone ID: PAT_MRT3847_87899C.1
aacatatagctttctatgcccacaaggagcagaaaaaagaaatttgaaaattgtgatccgaagttaataaccccaaggttcctgaacgaccctaaatgccctagccttatttggtgcatttccactagggcgcaagccattgcgattttagttatgtgtgggtggatgttgacagccgcatatcaatcatagaaaggcatgagcattgataatgctctgagctcataatgtgcttaataaatagacggattcttccaattccgaactaattttttctgattgactgtatgtttgtgttaaatacatataaaaaacagcttactaatgtttcttactatgtaagtattgttagactgaatgtgtggctataccatttaatcatttattaatcctcgataacacttgaacttgctcctcacatatgaaactcaattctctgacactgcataatagaggcttgcttatatt

SEQ ID NO: 129450 - DNA, 431 bp, Glycine max
  Clone ID: PAT_MRT3847_8789C.1
cccacgcgttcgtgttattgaaatgggtgctacttctaatgccatcatacaatgcacctcttatacttcttcgatgcagaatgacgggttggtgagctcacgagctgaagacacactagggaggtcaacatgttatatctttgaagctctgaacaaacgaggcatgagggccgtgaaagatgatctatatgtccagagaggctaatacatagcaccagagataatacaagccattgaagggactcacgatgtggctgctgcatttaacaaggactatggttcctgaaccaggcgcctgagagaactagcacacacttggaaatgaaataaaacatcacccagacagctcctgactatcacttatgatgttgatccatgacaagtgcgaatacagagtggagactatgagaaagcctattaccacaccaaca

SEQ ID NO: 129451 - DNA, 129 bp, Glycine max
  Clone ID: PAT_MRT3847_878C.1
accatgtattcttcaatgcactcggacacttatacgggctattttcatgtgcactcttgggtaatccaaagaaagtactagagacatagatataaatataaaacgtatttgttttatgaaatcaagaca

SEQ ID NO: 129452 - DNA, 736 bp, Glycine max
  Clone ID: PAT_MRT3847_87900C.1
gaattcgagctcggtacccggggatcctctagagtcgacctgcagattaaaagctgaaggttgccgaagaagtttggatgtcatagtcatagaggctttgcttttgtagaatatgttactccgaaggaggcagaaaatgctctttcaacacttcaacatacccacatattgggctggcatttggtaagagaaactaaattatggatttaaaaattttgatttagtgacacctctatgttgtgtccctccttcccttttcttggataacaattgtcaaattgcaaatatttgagaactaatggtccttattattttcagaaaatagagagaacgaatgttgatccgagtttggatgaacagcgggctcaaacagctgctcaatttagtagacatatgaatttcaaaatgctactatgttatccaagaaaagaaagaacatcagtatcatagatgaaggaatatgaagtttaaaaggaaagttcattagtatgaggccaaagatttaagtgtctgtgtctgaagttcagggatcacgattatgtgtaagaaaatagacaagtgatgcaaaagtaagttggagggaacatacatgttgcactcattgcttggagtcagaaggaaattgtggataattcttagcaagtgccattcacactgttgattggttttaggaattaaattgattctataaatgagaattttgtcttaagaagtattaaaataattattgatttga

SEQ ID NO: 129453 - DNA, 428 bp, Glycine max
  Clone ID: PAT_MRT3847_87901C.1
cttcccgggaaaattgtctataacgtccctctcaagctgggttaacaaataaaaatggcaaagacagtgaggttgcattttagtatatatatgatctaaggtcaagcggaattcaaatatgatgggaaatgacaaaaatatttctaatgagaaaaataaaagaaatgctgatcttctttcgtttatatatttttacacatacaatactactattttgtttatcacttgttttgatcaagatattcctcaatgttacagctgctttatcacttgtgcaaatcaatcatcttttttgcactcccactaatcaatgcatataattataaaacattaagaaagtatataaaaaattatgttcaaagggggacatatataaattaaatatgatgtaggttttataaaatataaaagttttaagaataatctta

SEQ ID NO: 129454 - DNA, 253 bp, Glycine max
  Clone ID: PAT_MRT3847_87902C.1
tatataaaaattaaaatagatatataaatagacctttgtctgtggtttgtttgtactttgtacagttcagtaaaaaaaatactggtaaaatcgcccctctaatttctgctgttaagaaaatccaaccagaaaaggtagactccacaaaactagcgactctgattaatttcctaacaacagtattcacaaaactgaatcggccatagcagctgcaacgacttgattaactaatgcaagggtctctatgctcaaa

SEQ ID NO: 129455 - DNA, 300 bp, Glycine max
  Clone ID: PAT_MRT3847_87903C.1
tgaccaacgattctgtttaaaacgctactgctccatcgaaggggtcagatcatctccgtgcagcagaggtcattaccacactggatgctcaacaaaagaagctcaaccttccaatccttccaaccaccactatcggatccttccctcagactgcaaaactgaggagggtacgccgtcagttcaaagctaacaagatctcctaggaagagtatgttaacccaattaaagacgaaactcgcaaagttcttgaacttcaagaaaacctttaattttatactcttattccacccaaaccaaaga

SEQ ID NO: 129456 - DNA, 295 bp, Glycine max
  Clone ID: PAT_MRT3847_87904C.1
gtccttttgaaggttaaaagcgctccaatccagacattggcagctactcaggaagatgtgaagcttttgggtattgggggaagcccattaggttgggggttccaaattgccctaatttggaaggaggtcgattccaagtttttggaaaaaattttggccacaaggggtgatttgtttttaaaatccaacctttgtaaaagaaaggttccggggtttgttacaaataggcagccatataaaaaactttttgggatggtggattccattttgagacacgtggaataaccaccctttt

SEQ ID NO: 129457 - DNA, 508 bp, Glycine max
  Clone ID: PAT_MRT3847_87905C.1
attcgttcttttgcgagtagacgactgaagggggagagcttgaaaatgtctcccaaatacatgctagtgctgttgatagcattggttttggcagtctcgtccctttcccatggtccagtacacggttcagtacacccaaggcctcatcctcctccaaaaattactcgatactccgcgccacatatacataaaccaaaaccaccaaacgtggcaacaacaaacacctatgcagcaaagaagcctccaactaaaggttgaactgttaggctatgatcaaaggttttgcaacgtcaagggagtatattacaacagtaatcgcaatttgaaaccttgactagagatactttaatggcatatagtattaattaatggtcagtgctatgagtatgcatgtatgattaaataatagttagttaggagtttgtttgaactgttgtaataccttgttatgagagtctccatctgtgtgttttgatttccacttatatgcatagtttgatgtgttcac

SEQ ID NO: 129458 - DNA, 285 bp, Glycine max
  unsure (1)..(285): unsure at all n locations
  Clone ID: PAT_MRT3847_87906C.1
ccttcattactntttnccaaaaccatttttaattttttcaaccagcaaaaggaaccaggggaatgggaacattcaagacactaataccaaaatattacccagacaaatacatcgagttaaccaagggaatctttttccacaagaaaacaacggcaaaatacattcctgcaggtatttgaaagcataggaaatatgcagttcacgtgaaactgtaaacatttggttaaccaataataataactccaaaaaaatgtataaaacctatgagttcactcgagcccaaac

SEQ ID NO: 129459 - DNA, 955 bp, Glycine max
  Clone ID: PAT_MRT3847_87907C.1
aattcggctcgaggaaccaaccccgttttctgtgaccacataaatatctcattcccgttgtgcgtttccaaccgatcaccggttaaatggttccggccaccggtgaccggcaacacccccactttgattccggggagcccttaccataaccctaaccaccaacaagctcttttcatattcatggatcctccggattctcagtcccaggaacaggaagcgcccaagaagaacggcgtcgtttttgtcattctgcgatggatcctcgcgattctttttcctttcctcctctttctctcgattccctttctgcttggcttactggttctcatgttcgccgatttctccatccccaaccccatttctctcccctcacagtgcaaaatcgtctccactggtgttgatattaggtcatctaagatatgtgaacttggattgttagattataaagcaaaggatgtgtttcatcattttgaaagaagcaaatttcgctcccgatatgattactattgggcttcagtattcaaggttattataaagatcacttttctggtcacttgttgccatttttataatcttttttagtaaaagcagatattatatttgctagaagaataagaatgaaaataagcttttctccctaacaatgactatgaaaaggaaaatggtgttaacaatcaagttcattagcgcagtgaagctctccagttcctgtgcatatcaacaagggtgattgccttaaagaagcatagtcagatcacctggtaaggacagagagaaacccttagaaattcaatcgttcccctccatccgaatatactaaagagctgcgcacatgctgttactgtcttaaacatctccctcatttgctccgtgcaccctctctaaaattaatcaataaaaaatgctcccccatctgtggtcttctcgcgccgtactcgagccgaatcggctcgag

SEQ ID NO: 129460 - DNA, 305 bp, Glycine max
  Clone ID: PAT_MRT3847_87908C.1
gaaatgataaacattctttgttgtggagatgaaaaatagatgcgtgaggggacgcacctgctgttggcttgatgttcaaggatggcaatttgttagaaagatgtttggagagttccatgtggactcccttctgaatttacgctcacacagatttgcaatagcatatttaatgagatgctcattagatatagctatgaaaaattactgcgccaggctaaagctaccagtatggttttacaatcctccaaaaataactgattcggtgtgagagtattgtgatcatatcttaattagtgtccatgaat

SEQ ID NO: 129461 - DNA, 431 bp, Glycine max
  Clone ID: PAT_MRT3847_87909C.1
gtgggaaaaaccccccctttataatgggttttaaaagggccgggcccgaaaaaaaattttttccctttttttgggggctttggggggaaaaaaccggaggatattttggccccaaaaaatgggctccccagaattaggaaccccttggggggaaaaaaacttgggggaaaaggggaccggcttaaaaaacccgggcttttttttaggccggggcccatttttttttttttccccaataaaattttaaaggggttttcccttgggtttggggcctaaaaggggggaaccccttccaaagaggggggccccccccggcccagggggggggtttttaaccccaaacccggggggggaaccaaggtaaaatttttccccgggccgaatttcggggtttattccgggggggggggaagaaaaaacttttttttggg

SEQ ID NO: 129462 - DNA, 1331 bp, Glycine max
  unsure (1)..(1331): unsure at all n locations
  Clone ID: PAT_MRT3847_8790C.1
cacgcgtccgcttccctctctgaaggaaatagaccgttgaatttcaaaccttagtcagccagccatgcccgcactcagaaagcgaaaccgatcgtcagagtccgatgcaatgcccaacaacgacacacctcacgaacacaagatgtccgagtacgagctgtcgagagagcagagaatccgcgaaaaccgcgagagaatgggaaagctgggaattttcgacctttccctcactctcaagctcaacaacaacaacaaaagatcctattcctcccacaaactcagaacccctccttctcttcctaacccctccgcccccgttcgccgctcttccagattgcagaatgtgactcctgttagttactccgaagttcccctaaagaaagccgagttcaaagaaaatggaagggtggtgatagaagaaggtgccaagcccgaggtgtacactgaagaacacgagaagcttttgggaaacaccgacaagccctggacgctcttcgtcgatggcgttggcaaagatggcaaacgtatttatgactccgtccttggcaaaacttgccaccagtgcaggcaaaaaactcttggttatcggacatgttgtagccagtgcaacatggtccagggacagttntgtggagattgcttgtatatgagatatggggagcatgtactcgaagccttacagaatccaacttggctatgccctgtctgtcgtggaatttgcaactgtagcttatgtcgtcaagcaaaaggatgggccccaactggccctctatataaaaagatatcagcattgggttacaaatcagttgcacactaccttattcaaacccggcgctcagaaatagatgagaagaaaaatgcagatgcttccgacccagtttcagcaaaaaggtcgctacccttctctgatgtggacaagtctcttgaggtcaacgagaatcatctggaatcattgaagcctctagctgaaactgaaggtgatggtgctgaggttccagcaaagagattgctcttctctgatgagcaaagtcaggttgaaaaagttgagtgctcagataccccgaaacctcttcagcttgaaaaaaatgagtgttcagataccaagaagccacttgcttcttcctccaaacctagctcagacagtattgcaggaagacttaggtccaggctaaaaaaaccatgagatttttatttttgtttttcttagtctaacctgggatacatgtgcttactttccaaaaaaaaaaaactttacgtattgggataactggagttggtaatttggcatgaaagccttttttgtcatagtaacggtaatatgtgctgtctct

SEQ ID NO: 129463 - DNA, 287 bp, Glycine max
  Clone ID: PAT_MRT3847_87910C.1
ggctcgagcttgcttatttgtactactcctactacttttatggtttttattcggaaggcagatcgtgctatcacgcatggaaattccaatgccgctttcatttatgttactctaactacttgtaccttagtgcatttgctctttcacactttaagagcctgaactagaggccgctgatgtacaaattaaccttaatgcctcacagatgaacttagcatttctttcttgcggaacggggaaccccattgatgatcgtaggtgatgtgacctccaacgggaaaagaacc

SEQ ID NO: 129464 - DNA, 681 bp, Glycine max
  Clone ID: PAT_MRT3847_87911C.1
gagagagagagagaactagtctcggggctgcagctgaggcaatagaaaagggacgacaaggcaggggaagcaagcctttaattccatcttccatggattttatcccaggtggtgttatgcagtttacttctggtgaagtaaagccaaagaaagacctgctagctgaagatattttgaagaagaaaatgtaccctaagagggaagagtttcaatggcgcccttctcctcttctgtgcaaacgctttgatcttattgatccatatatggggaagccgccacctgctccacggattaggagtaagatggataccttgatttttacatcagattcagtcaaaggtaccaaagtggacgggcctgttacttcaaagaaagacatctcatctttgcaacaacctactaataaagacataaccaaaagtattactgaaaatgaaactgaagaggatgtggaagtcgaaaatattgaaaggccagttgacctatacaaggctattttctccgatgattcagatgatgaaggggaagaccctagcaataggagagtagagaatcaagaaaagaaagctgaagtagctaatacagcattgagccgtttgattgctggtgattttccttgaatacattggaaggaactaggaattgaggttgctcctgatatgccttaccctacgcaaaagt

SEQ ID NO: 129465 - DNA, 194 bp, Glycine max
  Clone ID: PAT_MRT3847_87912C.1
ggacaaaattttaaaagctacatctattcaagtaccctgtttcattaagcctgatccaagagaccaataaaccatcgatccatttgtgtgattaatggaattgcatcatctaactaattcgataatcaccttaaccttagagacatgatcacagataccttacacccaccgaactatttaattaatacactttt

SEQ ID NO: 129466 - DNA, 428 bp, Glycine max
  Clone ID: PAT_MRT3847_87913C.1
ggcaagtgttacacccaacctcaacagcgggttggcataaggccgtcacatcctatactttaacattatacagagccacgagacaaatgattaggccattgaagtataaatgctttattcttacccatcagaacgggtaacaaatggtaaagcacttgttgataaaagaatctatatctttgatgactactaatcaaacgaaaaaaaagacatccaaaatttacatcccgagcttgaaattttttacataatggaagctaacatccacatgacaagtcttccattaaactcctatagggcgcctcaatagatttaaaaacacgagaagcaaagcattttattcacagaaatgactgggacaatgtacgactggcaaacctttggtgaaaatacatagctaggtaacttgagtcatgcttagctagggg

SEQ ID NO: 129467 - DNA, 258 bp, Glycine max
  Clone ID: PAT_MRT3847_87914C.1
attttgtcgtacttacggctgtggtcctcctttgaattttctttctgcgtgtttgcacagaaaattcttcattaattggtgtgcgagttttcttttcttttcaactgtgtctggtgaaacagtcaaatgaaatgaaggcaacgcccgccgtgcgtagataaagaccaaaacttcatgtttataaaaattaaacacttgagccactaggtagcagcacaagcaactgcaccaactcgacccttccaaaggccaattttc

SEQ ID NO: 129468 - DNA, 124 bp, Glycine max
  Clone ID: PAT_MRT3847_87915C.1
tcccctacccccaaaaatattctcattactggggctggtggattcatcgcatctcatggtggggatcggcttattccggattattcccaagaccaaaatggtggttttggccaacttgattact

SEQ ID NO: 129469 - DNA, 346 bp, Glycine max
  unsure (1)..(346): unsure at all n locations
  Clone ID: PAT_MRT3847_87916C.1
cataaacccagcgatcaatcaaatagccacacagacacacanacaaacacaacttcacttttcacggtcccgccgccgaatcgcgtccgcgtttagttaaaaagttcttgttagattattgtttgttccactatgatgatgggttcgacggcgagggtgccgaagctgggttctttccgccacagcttcgcggagaggaaggagagactgctctcaatgaagggcggcatcggcggcggctactcccaaattgggatcccgctgccggagtccgacgaggaggatcactctccgacgcggaggcgctgctgctcctaccgcgccgtctcggacgggatcgtcggcg

SEQ ID NO: 129470 - DNA, 347 bp, Glycine max
  Clone ID: PAT_MRT3847_87917C.1
accggtccggaattctcggggcgagccacccgtccggtccgagaagacgacagaaggggaccaagctgtaccaatatagaccacgccctatcgggcggaccctagaccacacccattttctgcagtttgcatgcgtcacctcaaggcggcatttttggctgcagagctcttgcatggttgtggtgagtgcacccatggcacatgcagctatcacgtgcgggccggtgacgaatagcctgatcaattgcatcgggtaccctcaaaacggaggaacgccgccatcgggatgcctgcaacggagtgaagagcctcaatgccgtcggcaagaccaccgtcgaccggcagac

SEQ ID NO: 129471 - DNA, 335 bp, Glycine max
  Clone ID: PAT_MRT3847_87918C.1
attagtagttaatggaaacacacatggcattggcaacttcatacatgactcttgcacctaaatattgctgcgttcagaaacgatccttcatcgtaacttcaggactttcctccgccttcaagccgatcttaagagcgttgcctcaaattccgcggcaaattgatgcttccaaaaccttcacagacatcaaatcgaaatttcttaacgctgttgtggattcagcatttgagtttgtcgaccagcttgtgcttccatctcagaataactttgctccggtggaggaattaggggaacccgtggctatcacttatattgaaggtgacataccagatcac

SEQ ID NO: 129472 - DNA, 274 bp, Glycine max
  Clone ID: PAT_MRT3847_87919C.1
atcgcatgttcgcacattaacctaatcaattcttgtcattaactcgtgagatggacacacgctcaatcttgtaattttacttgaaatagccttaattgcttactttaccgctaaaactttattggctgcattaaaatcttaactcagactccggggaatatatcttagatgcatgctcacacccatgacgacgcagattgtttaattttggctacgtttcaatgtggaaattctgatatagcacccattaagggccatgtttatacattagttg

SEQ ID NO: 129473 - DNA, 878 bp, Glycine max
  Clone ID: PAT_MRT3847_8791C.1
cagaaaatgaattcccaattgctttgcatctttctgctggtcatttgcaccgtttccattggcacactgacacaagcaaagccaattccggaagaagctgcggcaaccgaaaccaaagcggacgaaggcaaaaaagaggagccgaaaaaggaagaagccgaagcgaaaaaggaagaagcgacgaaggaggagccgaaaaaggaagaaacaaagaaaggagagggcaaaacggaagaagctaagaaagatgaagccaaaaaggaggagccgaaaacggaagaggccaaaaaggaagaagcaaagcccagtgccccggccgtcttaactgaagctgccgataatgtgaacaaagcggtcgatgacttaagcgttaaacaggcaaaagcattgaaaaacgcggccgaagcaacggcagagaaaacgccggaagagcaggaaaaagcattgaaagaagtggcagaaaaaggaggaaacgaacagctgaagacggctgtcaacaaaattttggaggcaaaagcgaaaaacgacgcggaattggaaagcgaagtgaaaacgaaaacggcaacactttctgaggacagcaaaaaggccagcgcagagttgactttgataattgaagacaaaaagacgactttggacgagaaggtgaagcggacggaggagctgacagccaaaatgtcggacaacacgaagaaggagctgaatctgaacaacagtgccgacgtcgtcgccttcgtcaagtcgtactccgccgtcgccgtgccggcggtggccacggagggcaaagcatgatcaatcagtctgatcggaggattcggcattgttgtgtgatgaaatgtagccaataatgaaattcattgattaaattaattttcgtt

SEQ ID NO: 129474 - DNA, 717 bp, Glycine max
  Clone ID: PAT_MRT3847_87920C.1
tgcatcgttgttttgttgttctctcaaactttaacagtctcataaataaataatcagaacgaagaagaagaagaattgaattcgaaaaatcgtagcgtagcgttggttgcgattgaaacggtacgatgggaagaggaaaattcaagagcaagcccaccggtcgccgccagttctccaccccggaggatgggggtgctggaactgcggtccgtcctcgaacttttagacagaaagaagctgagcatgaataggagcctgaggaagtatctggggatgaatctggagaagaatcagaagaggaaacttctgttagtattttgtagtaattactaatatagatggattgcatttttttgcttttataaaaggctttgtttctttctatggtcttaccccatcaatatgaaatttgttgtcttgtcactatataatgtatgcagaagaaaaaaggaacacaaggagttattgagattgaaaatcctaacttggtaaagccaaagagcttgaaagctagagatgttgatgttggaaaaacaacagaactttcaaggcgtgaaagagaggagatagagaaacagagagcccatgagcgctatatgaggctgcaagagcaaggaaaaacagaacaagcaaagaaagatttagaacgtttagctcttatacgtcagcaaagggaagatgctgctaaaaagcgagaagaagagaaagctgcgaaag

SEQ ID NO: 129475 - DNA, 947 bp, Glycine max
  unsure (1)..(947): unsure at all n locations
  Clone ID: PAT_MRT3847_87921C.1
cggaattcccgggtcgacccacgcgtccgcccacgcgtccgcccacgcgtccgcccacgcgtccgcccacgcgtccgacagaaggggagggaaaagagggtgcaaggtgcatcttctttttgttgttctctcaaactttaataatctcataaattagcagaacgaagaggaacaaaaacaagaagaagaattggattcgaaaatcgtagcgtagcgttggtgcgattgaacgatacgatgggaagaggaaaattcaagagcaagcccactggtcgccgccagttctccaccccggaagatatgcttgctggaacctctaaccgtcctcgaacttttagacagaaagaagctgagcatgaagaggaagaacccgaggaagtatctggagatgaatctggagaagaatctgaagaagaaacttctaagaaaaaaggaacacaaggggttattgagattgaaaatcccaacttagtaaagccaaagaccttgaaagctagagatgttgatgttggaaaaacaacagaactttcaaggcgtgaaagggaggagatagagaaacagagagcccatgagcgctatatgaggctgcaagagcaaggaaaaacagaacaagcaaagaaggatttagaacgtttagctcttatacgtcagcaaagggaagatgctgctaaaaagcgagaagaagagaaagctgcgaaagagcagaagaaggctgaagcgcgcaagtgaatttcctggaaaatgtcatgttgccaaatttactccatattagtaggaggatatgtactcttactacacttcaacattatgtccatttagctttatattatggtattgctataccaagctggtcccatgtaatgcaattattttcatattctgtggttcgaaaaaaaaaaaaaaaaaacaaaaaaaaaagcgcccgctctagaggatccnngcttacg

SEQ ID NO: 129476 - DNA, 209 bp, Glycine max
  Clone ID: PAT_MRT3847_87922C.1
aaatggtgaaaactttatgcgggccttttggatttataaaaaccctgttttcccctcaccaattcacaaaaaattctgcctttgataaacacgggttttaatcttccaaagatttatttttgaaacgtggcaaacttaggacgcattttgttaccaggggggccgcctttcaactagactttgcatgctctcacgggtaaatttatctt

SEQ ID NO: 129477 - DNA, 447 bp, Glycine max
  Clone ID: PAT_MRT3847_87923C.1
cccacgcgtccgcccacgcgtccgtgcaaggtgcatcttctttttgttgttctcgcaaactttaataatctcataaattagcagaacgaagaggaacaaaaacaagaagaagaattggattcgaaaatcgtagcgtagcgttggtgcgattgaacgatacgatgggaagaggaaaattcaagagcaagcccactggtcgccgccagttctccaccccggaagatatgcttgctggaacctctaaccgtcctcgaacttttagacagaaagaagctgagcatgaagaggaagaacccgaggaagtatctggagatgaatctggagaagaatctgaagaagaaacttctgttagtatcttgcagtaattactaatatagatggatttcatttttttgcttttaagaaaggatttgtttctttctatggtctgaccctgtcaatatgaaa

SEQ ID NO: 129478 - DNA, 1393 bp, Glycine max
  Clone ID: PAT_MRT3847_87924C.1
ggagctcgagccgattcgtctcgagtttaactagggtttttggaatttcgaataaagggaaagagggtgcaaagtgcatcttctttttgttgttctctcaaactttaacaatctcataaataaataatcagaacgaagaagaagaagaattgaattcgaaaaatcgtagcgtagcgttggttgcgattgaaacggtacgatgggaagaggaaaattcaagagcaagcccaccggtcgccgccagttctccaccccggaagatatgcttgctggaacctctaaccgtcctcgaacttttagacagaaagaagctgagcatgaagaggagcctgaggaagtatctggggatgaatctggagaagaatcagaagaggaaacttctaagaaaaaaggaacacaaggagttattgagattgaaaatcctaacttggtaaagccaaagagcttgaaagctagagatgttgatgttggaaaaacaacagaactttcaaggcgtgaaagagaggagatagagaaacagagagcccatgagcgctatatgaggctgcaagagcaaggaaaaacagaacaagcaaagaaggatttagaacgtttagctcttatacgtcagcaaagggaagatgctgctaaaaagcgagaagaagagaaagctgcgaaagagcagaagaaggctgaggcgcgcaagtgagtttcctggaaaatgtcatgccaccaaaaatttgctccaattagtaaggtggaacggttgctcctactacacttaaaacattatgtccatttggctttatattatggtattaccacaccaagctggtaacatgtaatgcaattatattttcatattctgtggtttaaaatcgtgattatatataaacgtttttaaaaattacacattaggatatgctcttttttctgaaatgaaggttgatatttctatccaaaaaaaaaaaataaaagaggtgactgcgaattattggaaagaatcactatcgacgcggaattgcggctggctgcttgcagcgtcccccctgtggcaactgtcgattagccctgatcggagctattcggcgtgctgtgcctcgttccgtatgcaaggcctagtatccggtccctcttgtacgcgcggttctcgcgtggccgcccccctgctcctgttgctcgcaaatgttttcctccacgtgagtctatctcggactgcttctggtccagtattcgggggcttatgtgccatatgccccaaaataaaaaagaaaaaaaaaaaaaaaaaaaaaaaaaaaaaaaaaaacaataaaaaggggaaaaataaaaaaagttcgtaaataaaaaagggggctttttatagggccaaatttattttcacctgcactgaaaggggttatttttttttttgggt

SEQ ID NO: 129479 - DNA, 444 bp, Glycine max
  Clone ID: PAT_MRT3847_87925C.1
tctttttttttttttttttttttttttttttttttttttttttttttttttttcttctttttcttttttttattttgttccgggcaaaaaaacacccaaattttttcgggaaaaattatacccaccctgcccaaaaaaacttttgggccactaaaaaaaaccccgaaagctgggggtcttccctaaaaaaaccagggggaaatttcccccccatttcacaggggataaaccataatgcccacaaaaccgaatgaacggggtgcccctcacccccaaaacggggggccccctttttttttttcgcacccgacgcgggggtttcatccccctcataaatatctggggggggatcaacaaccaaaggaatttttttttaaaaaaacccccccaacaaatcccaccgaaaatgtgggtgctccaccccggccccccgagcttaacccc

SEQ ID NO: 129480 - DNA, 313 bp, Glycine max
  Clone ID: PAT_MRT3847_87926C.1
ggtcttgttcaacacccagaacaacgcttctacgcttcttgttaagtcttcctatgagcctgcagctgcggcacctgccaccgacacccccccagcttaacctgaatccaaacccaaaccaccaccaattgatcccatgacacccgctccagcgaagatccttaggaaggaaacctactgctacaaaggcacccataaactctgcgctgactaccacgaccccaacactcactaccctgaagtccgcccatgcaacaaagtcctctatgagcaagaatacactaacaactatcccttctaccagatcatggaa

SEQ ID NO: 129481 - DNA, 263 bp, Glycine max
  unsure (1)..(263): unsure at all n locations
  Clone ID: PAT_MRT3847_87927C.1
agaagaagttgtttttcctttgcctcttagtcttaacggttctcttcttatgttggacaatgtttttcttaaccagtataacatcctgcatgtttttccttatttaacggtttaattttactataagtaacgaggattcttgttctaactactggcgcctctcttntttctttgttctctgattcagctcttttctctttttgcacataatagatgtacttttttgctattcataatttggtattgatcaatcataaggagtt

SEQ ID NO: 129482 - DNA, 229 bp, Glycine max
  Clone ID: PAT_MRT3847_87928C.1
gcagcttactaggcgggggccctctctcttttttttttggattgcagtaaaataaaaagggctaagcacagcaagatttatagattctacaggacaatcacctgggaagagtgccatctatatgtcaggtcaatctggtttacggagatcaatacatccttacaagatgacgaaagataagatacgcatgcgagagggaatccttaaaaggttacaaactccaggcacc

SEQ ID NO: 129483 - DNA, 307 bp, Glycine max
  unsure (1)..(307): unsure at all n locations
  Clone ID: PAT_MRT3847_87929C.1
cccacgcgtccgtagctgcgagaagacgacagaaggggaccgtggagagagaaagaacttgagggatgaagatgacggtgcagagagaaagcgtggaagggatgaagattaccgaacaggaagaaagcagacaagggatgagaatgaacatagagaaagaaagttcagaagggatgaggatgatcgggaaggaagaaagttcagaagggatgaggatgtttatggagaaagaaagaacttaagggatgaggatgtgcatggagaacgaaagaacttgangggggagggtgatgatagggaaagaaag

SEQ ID NO: 129484 - DNA, 796 bp, Glycine max
  Clone ID: PAT_MRT3847_8792C.1
gaaacagcaatcaaagcactcctctttggtccctcttttgtttttcagttccttccttccctccactttctgtctcttgcctttattttcaattaccaacctcctccttcttcagcccccaaatttattgctttctcttatcatgccacctacatttctctgtgaccatgcttgatctttttctttggccacacacaaaccatctcattgcaccctttggtttctctgtctgccccaccaacaatttcatccccaaagccattcctgagcgtcaaagtttgcagctttaacaagctactggactcttcttcttgtctccctcaatgggtcatcttgttctggtgatgcagatttgaatgaagggcatttggtgaaggtggtgaggtagctatggtcgctgaagcttggattgtgaagatgggtaaccaggtaagcgccaatctcaagcacgctcttcttcttgaaccttccgcaaggagaaaacacaaccccaaaaggcaagataatagtaccagcagtaaagaagtaattgggattctttctttcgaagtagcaaatgtaatgtccaaaaccgttcacctccacagatccttgtcggagcccgagatcgtgaagctcaggaacgagatctcgaactcacagggtgtccaaaaccttgtttcctccgaagagggttatctcctcgagctggctcgagcagagaagctcgaggagctgaaccgcgttgcaaacgtggtttctagattggggaagaagtgttccttgcctgctttgcaaggctttgagcatgtttatg

SEQ ID NO: 129485 - DNA, 287 bp, Glycine max
  Clone ID: PAT_MRT3847_87930C.1
ctagagaattatcatacccttcaagatgaaaccgtacctacgtccaatattcgtattattccttatccttctcgaccaatccatttcggcgagtgctgctataaatattaatggtctgagaaacaaaattagagaagttctaaacaagcacccgagcatcaatctttcggcagatatactgaataaggtgaatagaccactgaatgcactggattatctgcatggctaatgtaaggacaggccgtctcaagaatttcatgaatttttgaccgaattttaatgatcga

SEQ ID NO: 129486 - DNA, 276 bp, Glycine max
  unsure (1)..(276): unsure at all n locations
  Clone ID: PAT_MRT3847_87931C.1
aagagaagggatatatcaggangnncgagtaccgganccaaacgcgngtgtgtgtgngtgtganggagagagagatgcagttccattnagaaactncaaactanacatccctggcgacaancttaggantctcgatcgctganaaaacctatgcagncccgaacacnctntctgcnttccaacttgtttnngtcatgcctttcgattcacccttctctcantaaattttaaatcagatctgggccaccgncacactcataataaagttttttnntc

SEQ ID NO: 129487 - DNA, 1326 bp, Glycine max
  Clone ID: PAT_MRT3847_87932C.1
tacaaggatagagatcaggatagagatagagaccgttatagggatgatgggatgaaagaaagggaccgtgaattccgagaaagggacaaatctactgcgattgccaacaaggatgttttaggttctaagatgtctctatatcccagcaaggagaagtatttatccaaacctataaatgagctggacctttctaactgcgaccagtgcactcctagttaccgtctcttaccgaaaaattacccaatacctgtagctagccagaaaacagaacttggtgctgaggtgttgaatgattactgggtgtctgtcacttcaggaagtgaggattattccttcaaacatatgcgcaaaaatcagtatgaagagagtttgtttagatgtgaagatgacaggtttgaacttgacatgttgttagagtctgtaaatgtgacaaccaaacgagtagaagagctgttagacaagatcaatagtaatataattaaaggagacagcccaattcgtattgaggagcacttaacagctataaaccttaggtgtattgagcgattatatggtgaccatgggcttgatgtgatggaagtgttaaggaagaatgcacctctagctttgccagtgatattaacacgcttgaagcagaaacaggaagagtgggcaaggtgccgtgctgattttagtaaagtttggggtgaaatatatgctaagaactatcacaaatctcttgatcatcgtagcttctactttaagcaacaggatactaaaagcttgagcaccaaaggtaataaataacttttcatttcaataactttgaattctcgaagcttttaatgtttggatcagagtattcttttaaggctacaaaaatttaatcatgtaagatatcatcatcattttgttgatatacctaaaccagagttgtcaattgcacgctatagcgctggtgcgttgtggctattgccgctctgttaaagcccatcttgtcactgcttgctgttgtgcttggaatggtgcaaatcgcggccatttttttggctattcggggcattagcagacgcagctttgattaatggttgaaaacccctgtttacccccacaatactgcgtcgtttaaggtttattttgggggacacacttaccttatttaggttttgaaattgaaaccctattactaagagagctggtaatactgtagctgaccagttagctagttttgcttttttgttcaaagagatgtatttgggttgggggctatctccatcagattgaatctgctattttagctgatgtacagactttgatttctaaagaatagaaacagtatttgacgtc

SEQ ID NO: 129488 - DNA, 1311 bp, Glycine max
  Clone ID: PAT_MRT3847_87933C.1
aattcggctcgaggtaggattagatgcattaatccatagaaagtaagaacaaagacaagaggccttgaatgcacagtcacagggtgttaaatggggagttgcatcagcagtttaccgtccttgaaagccatacagtgagggttgtttggtgtcttcacctccaccaccagtcaaatattatctatattttcaaactaaaagaattttctctaaacaccataaaaaaaatactaaaaagaaaaggagaaactctttcctcttattattcagaaggaaagtgtgttcgtttgttcggtggtgaattcctatccacacgtctcaccggaaacatgtcagcggtggttgctggttcctcctcttcattctctgccaccttcacccccataaggagcccctccttaaaaaactctcaactctctcattccaaggcactcacttcacctcaatgccagaaaacatctttacaagggctctcacttcatgaagccaaaaggggtgtttcagaatccttcctagttgagaacaacaatggttcctccattgctggaaggagacttgagatcacagcacgaactgctggggcttcaaagacaattgaggtggaggttgacaagccacttggcctcaccttaggccaaaagtctggtggtggtgttgtcatcactgctgttgatggtggtgggaatgcagcaagagcagggttaaaggcaggggaccaagtcctttacactagcagtttctttggggatgaattgtggcctgcggataagcttggatttactaaaaccgccatccaagcaaagccggactctgtctactttgttgtcagcaggggtgctgaagtagacgttaaaaagctcacaaagcgacctgctcctcctcgatttggaagaaaactgaccgagactcaaaaggcgagagctactcacatttgccttgattgtggatacatatacaccttacagaaaccttttgatgagcagccggacacatacgggtgtcctcaatgtcaagcaccaaagaagaggtttgctcgttatgatgttaacactggaaaagctattggtgggggcttgcctccaattggagttattattggactcctggctggtgtaggggcagttggagctttgcttgtttatggtcttcagtaacattttattaattccacgacatgttaattttgtttattttctgtcctccaaagttgtccaatattggagcttgtgtctcagaaaaactccttggatgctcatgtcaaagttgaatgaagctttctatatgagattcaaaataaatttccgattcccc

SEQ ID NO: 129489 - DNA, 523 bp, Glycine max
  Clone ID: PAT_MRT3847_87934C.1
taagcttgcatttactagagccgccatcctagcatagccagactctgtctacttgttcgtcaccagaggtgttaaagtagacgttaaaaagctcacaaaacggcctgctcctcctcgatttggaagaaaactgactgagactcaaaaggcgagagctactcgcatttgccttgattgtggatacatatacaccttacagaaatcttttgatgagcagccggacacatacgggtgtcctcaatgtcaagcaccaaagaagaggtttgctcggtatgatgttaacactggaaaagctattggtgggggcttgcctccaattggagttattattggactcctggctggagtaggggcagttggggctttgcttgtttatggtcttcagtaacattttattaatttttttcattttctgttctccaaagctgtccaacgttggagcttgtatctcagaaactccttggatactcatgtcaaagttgaatgaagctttctatatgagattcaaaataaatttcaaact

SEQ ID NO: 129490 - DNA, 339 bp, Glycine max
  Clone ID: PAT_MRT3847_87935C.1
cgagctatctgtggtggtggtcgatatgatcatttgttctcaactttttggtcgctgatgacatctgctgcatgtggttttggatttcggtgactgcaactcttagtcggaattgctcaaagagaatgggtctgttacctgatcttaccttgcaaatagatgacattgtgtgtgccttgcacgaaaatcttccagggtgcgttgctatgctcgatctcatattttattaaccagtggccgcattagtagcttagggttctcctatcagtaatcacttctttagggttgggaatcgatgcaccactgatggagatggctgagctggctttgtgttagtgg

SEQ ID NO: 129491 - DNA, 486 bp, Glycine max
  Clone ID: PAT_MRT3847_87936C.1
ggctgcgagacgacagaagggatattacactaattctttttaatgttaaaaatattacatttatatctcttctaagagatgttgtaaacattaaataaagagtattgtgagactaaaaatctcaaatgtaatttacttggttataggaccaccactaacattttttctctccaatggaagcatagaataaagtaatatactgttaactaaaattgatgaccgagcgagtacattgtgtatctttaagaaaacattagtcgaattatttgtttgtttaccctaattttactgagatgatatgataaccccggataaactcaacattcatataaatagcaaaattagaagaaaaaagatgaagaaagaaagaacatatgaaagtatcaattttgatgatcttgttcctaaatccaagttccaactagttaatcttgtaagactgagtatgattcaaattgcaattgtcaataattgatcacaaagcaa

SEQ ID NO: 129492 - DNA, 463 bp, Glycine max
  Clone ID: PAT_MRT3847_87937C.1
ggtaaatcatttaaagcgggtaatgtgtttttttagggtattttaattgttgttaattaaaatgttccctttggatgtttaataggagaatttgaagaattttccaaaaaatttatcctttgttaagattaggaattcaaaattcctccaaaataggtgggatttaaaaaattcctcactctccatctccttatcccttccatttttttagtgacttagtggctaactagtacgatagggatagcggtgttacaaagttcgcatagtggttgataatgttgaatcattcaagcttgagtttcattgttttgtctttcactcaatgaacatcccattcaccgcatagccatcaacatcgtgaagaacctttattgtatcgtcaccattgtcaatgtcattgatttccgcaaagtgctagaccatgacaacacctccattggtgactagaagtggttgtaaatga

SEQ ID NO: 129493 - DNA, 455 bp, Glycine max
  Clone ID: PAT_MRT3847_87938C.1
aaaacccatcaaaacctcgctttttattaaaattttttggggggtgataaattggataactcaaacaacttgaaagggacccttttcttgaaaaaaaaatggggggcataaacaaggtctcagccaacactgaaaaacataaagacctttttggcccccaacaaaaaagggcaaaatagggggattaaaactaaaaaaatagccccatccaagccccggaaaaataagtttacaatagcaatttttataatgggaaaaatcaaaaaagggggcggggggtttgaaaccctaccgggggaatattggaagccagaatctttttaaaaacgggcaggaccggaatctgaacctcggaagtgccccacaaatccctcttttaaaaaacgaggacccccgatgaaatgccacggggctatgggttcaacttccaactttagcaaattaccaaatttaac

SEQ ID NO: 129494 - DNA, 997 bp, Glycine max
  Clone ID: PAT_MRT3847_87939C.1
gcctaggagtgcaaaagataaagtgtggtggaatttgattgagcatttgtagtttagtatttttctattcttcttagcttatttgacctctatttcactcctattttctcaccttaactcagtttggtcttaggcagtgattgagcttaattgataattgttgcttatttttggatttttgtgcttacttgtcctatctgccttgtgtagggcctataatacactacaaaattctaaatgaagcatgtgagtagtccctagaaacctatgaaaaagagtttcaattttgtcaaaaataagcttgggctaatgctaccatttcgagggttcaattggtttgggaagtcagaaccattgcacttgaataattaggctgcgaatttgggttttgctttgtgtaattagtttaattagataggtctaatcaaggcccatcctttcattctaagtagtcagtgtatatattagtggagttagccagttagttcgttaatgcgttacttcattttgtacaaaaacaaatttagaaacttgttcgacaagctttaggatcaaactcttttctctctttttttctcaactattcttcatttttcttcctcttttcacttttgttcctttttcttgcacaaatttcattgctcttccactggtgatgatcatggaaggctaaagagtcaatcaatccaaggatacactccaagcaagactgaatttgagttttggattagtatttcaattttgtgtgcttcttcttcttcttcttcaatcctatttttaattttcatgatttaaaaagtgattaagattcaaaataaattaggttatagattcatttcctaatttcaaatttaatcatagattgtttggatgatattccaaccaaatttgcgatttcaatgaatttagggattaatttgattgaactaactctaatgacattgattgaactttcacaacatgatcattctctgaagaattgtgacccacgcgtccg

SEQ ID NO: 129495 - DNA, 248 bp, Glycine max
  Clone ID: PAT_MRT3847_8793C.1
atcttttctttattttctctctatgcatattgctccacatagttcaatggctatggagggagagctacaaccatcacaagttcaactcagggtaaactctaggcagtggaggaaagtggtaaatgtacattcaatggagatagacccatctttcacttcaaaagttgaacacagggaagtgaagcatttcaaggaatggtttccttggttgattcccttctttgtcattgccaatgttattgtgttca

SEQ ID NO: 129496 - DNA, 1672 bp, Glycine max
  unsure (1)..(1672): unsure at all n locations
  Clone ID: PAT_MRT3847_87940C.1
cgttgttccaacttgcaactccttctcttctcactgtcacttctttcttcccaacacaacacaacagacgcagtacataacaacttttgtttccttggcgccgccacaccaacatgtcagccttcactatttccaacaacgccgccgccgccaccgccacgtggccactcccccaattcaacacttgccactttccgcactctccatccattgttcttcatcattccctcctcaacatccgcgctttcaggatccactgtgtccctcaagaacctctccccccattacaacaacaacccaaacacgatcaactttctcccggaggcgacggaggccacggtgacgccggcggtggcggaggcggaggcggagatggaggtgaaggaggaggagacgaagagttcggacccttgttgaagtttgaagcggttatgagagaatctgaagctcgtggtgttaagttgcctccggatatggaggaggctgcgaggatcactggcattcgggaaatgtttcttcttcgttacatggagttgcagggttcgtcttggccagtgtcttttctgatccagcattgtgctatgctgagaaatcgaatgctagctgacccttcttttcttttcaaagttggaaccgagattgttatagactcttgttgtgcaacccttgcggaggtgcagaagagaggcaagaatttctgggctgaatttgagttgtacgctgctgatcttcttgttggagttggttgttgacattgctttggtgggtctattggcaccatatgctcgaattggcaagccttctttgtcaaaaggtttgcttggacaaattcagcatgcttgtgctgctcttcctagcagtgtttttgaagctgaaagtgttggatgtaaattctctgcgatgcagcgcgtttctacatacttctacaagggtgcattgtatggatcagttggctttggatgtggtattattggtcaaggaattgcaaatatgatcatgaatgccaaaaggagctttaagaaatctgaagatgacatacctgtgcctcctcttctgaaaagtgctgctctttggggattctttcttgctgtgtcatccaacacacgttatcaaattatcaatggtctagaaaacattgttgaagcatctcccgtggcaaagagggtcccacttgttgcaatggcattcactgtgggtgtgcgatttggaaacaacatctatggtggcatgcagttcgtagactgggccaaatggagtggcgtacaatgagtgttgtccacaccacactttacaatttctcctttttgaaagttttacccaaagttggctaggcaattagggaaaagttttctttctcaaaccaaggagtgaagctccccaccaatttttcatatgtagggcatctttcttatgattaaaatataggaccatgcccccccttcattcttgattcctcctgtgttttttcttttcttcaatctttttcacatttttattttcattgttatcctatgttatttaacctagttgtgtcagatatgttcaagggaaattaaggttcttataactaggcatggtagtattaaagttaagctgaccatgtttttgtttgggtaccgatctaagcatcggaaaatataattttgcatttactttaaaaannanaaaaaaa

SEQ ID NO: 129497 - DNA, 721 bp, Glycine max
  unsure (1)..(721): unsure at all n locations
  Clone ID: PAT_MRT3847_87941C.1
agggtgcattgtatggatcagtttggctttggatgtggtattattggtcaaggaattgcaaatatgatcatgaatgccaaaaggagctttaagaaatctgaaacatgacatacctgtgcctcctcttctgcaaagtgctgctctttggggattctttcttgctgtgtcatccaaacacaccgttatcaaataatcaacggactagaaagccttgttgaagcatctcccgtggcaaagagggtcccacttgttgcaatggcattcactgtgggtgtgagatttggcaacaacatctnatggtggcatgcagttcgtagactgggccaaatggagtggcgtacaatgagtgaagctaggcaatttcgcctttttgaaagttttattacccaaagttggctaggctattcttgtccctttctttctcaaatcaaggagtgaagctccccaccaatttttcatatgtagggcatctttcttgtgattaaaattggaccatgcccccctttactcttgattcctcctgctttttcttttcttcaatctttttcacatttttattttcattgttatcctatgttatactataacttagttgtgtcagatatgttcaagggaagttaaggtttttataactaggcatggtagtattaaagttaagctgaccatgtttttgtttgggtaccgatctaagcatcggaaaatataattttgcatttacttt

SEQ ID NO: 129498 - DNA, 342 bp, Glycine max
  Clone ID: PAT_MRT3847_87942C.1
acacttactagctgttaaggggctagctagctgcatatcaagtcaaagggctagtaaacaacacacttggcatttttgtgccagatttttgggctgcattacttgcacctctatttttatacattcctgcataaaccacatggagcgcatgggttgattgtaggcgaccggcacaattacctttatgacccttctatgtgctcgaacgtgtaccacttactgggtcttaatcaaacgcctctgtactcccttcaaacccagagtcgtgctggcagcagaatacgggtacaccatagtggcatctttggctccctcagctccatccaccaccattagacttgc

SEQ ID NO: 129499 - DNA, 248 bp, Glycine max
  Clone ID: PAT_MRT3847_87943C.1
tgggagccctcgtcagcacgttgtgcatgcccagtttgggagttccgacgctcttagcaaccagtcaagacccggtgcctctaggctcatgttcccattcaacttgggttttcgaagcccagtcatgcatcacaatgcgaacggagtaataccatcgtgcccattattgttatgtatgtcgacggtccccaatcaaacatgccggtaggaagttgggtgcaggcctcgctcaacggcaagcttggtgc

SEQ ID NO: 129500 - DNA, 1196 bp, Glycine max
  Clone ID: PAT_MRT3847_87944C.1
attctgtctgttagcattggagttctccaaagtgacctactcgccttcaatccaaccttacccagatggaaattggatgccatcgagaaatgtgatgtgatggtgtacactaaaatctttctcaagtttccgtataagttctggccgagtggacccgataaggaattcttcatctatgctcacgagcggagaggctactacacattttggcagcacatggagaacgcgtatcctgggtccaatatgttagtggtgacattgactaatgaggaatcgaaacgtgtggaagctcaagctgatgaagagaccttgagagaagctatggcagtgctcagggatatgtttggacccaacatccccaatgccattgatatacttgttcctcgctggtggaataacagatttcagcgtggcagctacagcaactaccccattatttccaatcataaactttttcataatattaaggcccctgtaggtcgcatttttttcactggagagcacactagtgaaagatttaatggctacgtacacggtggatacctggcaggtattgacaccagcaaagcgttactagaagaaatgaggaaggaaaaagagagtcaaactctgttgttagagccattgctagcatcattaacaatgtcgaaaccagaaacagtctccaatatccacaagtgcgatattcctacacaattatatctcagtggcaagcttggggtaccagaggccatattatgacgactatatgggactgtaccttctagtctagatgatgcatatataatacttatgctgaagtggggggcctgcctcatccttaactctcattcaagtccttggcgctgccattgcccattggtgatggaaattaacaagtcactgaagtaagatgtggtgaggggaagaagtgttggaacactgcgatgtctcctcactttagtccctttcactggtaattaatgaagcttaattataactactaggttttaatttttgaagagaattaattaattgggatacacttacgattactttgttctttatagtcagaagcaagattacattttatggataatggctgatatgtatgtggatcctaaattttttactggtcaacgatatccatttaaattttcttgcaatgaactcgatttcccaggctgaaaatatttgtgtatacttgaaaaaaaacc

SEQ ID NO: 129501 - DNA, 937 bp, Glycine max
  Clone ID: PAT_MRT3847_87945C.1
cgttaaatgtgatgtgatggtgtacactaaaatctttctcaagtttccgtataagttctggccgagtggacccgataaggaattcttcatctatgctcacgagcggagaggctactacacattttggcagcacatggagaacgcgtatcctgggtccaatatgttagtggtgacattgactaatgaggaatcgaaacgtgtggaagctcaagctgatgaagagaccttgagagaagctatggcagtgctcagggatatgtttggacccaacatccccaatgccattgatatacttgttcctcgctggtggaataacagatttcagcgtggcagctacagcaactaccccattatttccaatcataaactttttcataatattaaggttggtttatttacgcattttataattgtgtgacagtttcctttttaatctgttctgttcttaaatatatcaatccatgctacattttgtctcttatgctattcgtctctcttgatatgatatactgcaggcccctgtaggtcgcatttttttcactggagagcacactagtgaaagatttaatggctacgtacacggtggatacctggcaggtgaggcactaatatttcaagtttgtattgctaatggttgataatagcaataataacttgaagacctgacacgggctgctttaactaacaggtattgacaccagcaaagcgttactagaagaaatgaggaaggaaaaagagagtcaaactctgttgttagagccattgctagcatcattaacaatgtcgaaaccagaaacagtctccaatatccacaagtgcgatattcctacacaattatatctcagtggcaagcttggggtaccagaggccatattatgacgactatatgggactgtaccttctagtctagatgatgcatatataatacttatgctga

SEQ ID NO: 129502 - DNA, 307 bp, Glycine max
  Clone ID: PAT_MRT3847_87946C.1
ggctcgagcggctcgtgttaaactcgcttttttacttacgcaggacacagacgagaaacaaacaagggacaaaataagtcaattgagctacttacttggtgatgctcattttggagctgagctttaggcgctgttggccaggccgctttctaagatcaaggaggataactttgaaccaacaaagggcgatgataattggtggaaaaggttgaaagtgaagcatcaggactgatggtactgaagttgatgatgcagaagaaaggcatggccatgattgagatgagctagcttggtttgacgacgtcag

SEQ ID NO: 129503 - DNA, 746 bp, Glycine max
  Clone ID: PAT_MRT3847_87947C.1
gcaggggctccatcattcgaaaagcaggaggcggcgggtactactgcggagcgaggtgggctccgtcggcatcatcacatcagccttgtttgtttgtttgtttagtgattcttgctaaagtgggttctcaatagcacaaattcatatcaagcacttgagcatctatgggtataatcaggagtggcttctctttcatagcagggacagtatgtggagtttacttggctcagaattatcaagttcctaacgtcacaaagttagctgacactgccttgtttatggtaaaagttgtggaggaaaaataccgcaagcccaagaagagggatgatgatgattagtgcctaacaagtgctatattgaaatcaggttcttgtttagtttttcttttaaaattctggattataggatcgaaaacctcaattaactaagcttttggaaaacatgaattagtagaagatttttgtggaagcattcttagcaatgataagcttattatttagtcctttcctagggaaacgttctcattcttctgttgtcttccttgctctgaaatctgaatcttattcttagacacgagttaaaaggtcagatttcagatttcagatactcagtttcttgaatcttggatgataagttagcttaaggcaagagatctgttccatggtcatcagagttgtatttaatagtatttaattataatttatgtccccaataacaaatattttaggtgatattatccattatct

SEQ ID NO: 129504 - DNA, 261 bp, Glycine max
  Clone ID: PAT_MRT3847_87948C.1
gcttcttcttctggaagcttctctggtgggattcattgcacttgatagtgattgggaaaaggatattccatttgatccaactggtcaacttgatgagcttcgagctttcattgaagataatatagatacctgcacatgggttggcattgctgtgcttgtgattcaggcattatctctactactggcattaattttgcgagccacagtttcttctaggagagcagattttgattatgaggatggatatgatgttaggggtag

SEQ ID NO: 129505 - DNA, 306 bp, Glycine max
  Clone ID: PAT_MRT3847_87949C.1
accacactcgctcaccaaccctgaagctgttagggttgcagattcatgaactgcggggcctgcctgcactcgatctggtctagttcctcttatctatcattccttacttccttcctttcgacttccgcattcattcaatggcacttacaacactctctctgatcccaccctacactcctccctgattatgcggcaccctacatgtacgctcccacaacagcttgctatacatccattatccttcttattattctacctttcctttcttatgcgtaatttgaattcccaaccactattccacgcgcc

SEQ ID NO: 129506 - DNA, 130 bp, Glycine max
  Clone ID: PAT_MRT3847_8794C.1
aatgaaaagaacaaaaataagatttatgcctgtctgtgcgtgtgtgtgcattcatatgacaggcaagggttctacattgggacaattgagtcaaatctcaaatgacatatagaccttctgattatctata

SEQ ID NO: 129507 - DNA, 252 bp, Glycine max
  Clone ID: PAT_MRT3847_87950C.1
aggaaattgctacctttgcttctggcaaagaaatttccgagttggctaatcacgtgtcactctattcaggatgttcacaccatggaaaccaaatattattggccaagagattgataaaagatggaactaatctttggaaggtgatgtctccaaacaatcaccacattccttgggagaatgcagtgtatgagattcaagagcaattcatgaagattgcttcttgttgttcaagatctctctcacctcaggacc

SEQ ID NO: 129508 - DNA, 269 bp, Glycine max
  Clone ID: PAT_MRT3847_87951C.1
gcttacagaaagcaattcattggtacattatgaagattaactgatgctgtagctcgcaggcagtctgttttgagttgaggtgcattggattgaaaaaggttttgatttcagattcatgtttggttgtacatagtgaatccgttccactgaaatgatccaaggatatccacggagaaaaataacaattattttggaagatatcagtattttatatgcctagttacgccatgaattaaagacttcaaaaaaaaaaaaaaaaaaaaaaaaaa

SEQ ID NO: 129509 - DNA, 775 bp, Glycine max
  Clone ID: PAT_MRT3847_87952C.1
ccacgcgtccggtaaaattacaattactgtttccagattctcgtatctgtggacttttctatcattctttccctttaaacttttttttttttaatcttatgttatcatcatcgtttgatttgtatatcataatttgcggtttattttcttccccatcactttttctttgttttcctgggaaagtttctgcctttttttacctccttcctctgatccttgctgggacttgtcttctgttttttttataaaaaaaaaattgtaaataccattttccttgtctgagtcgctactttttcgatttgaagtttttttttttttttagtttgagtcttgtttagggcaggaccccctttttttgttaggttttctgtggaaactggaaagaatctcactggttagatcatggttatgtattgaaaattgaaacttcaaatttgcgaccagtgaaattttctgcaagttttttccctgttacccttttgtaattagagggtgacgattttccggtaaagttgggggaaatttgatagcctagccttagagagagagagatgaatttttttccagatgaggtaattgagcacatatttgactatgtgacttcacaaagggacaggaatgacttgtctctggtgtgcaagaactggcacaggttagagagatgcagtaggaagagtttgttcatagggaactgttactccataagtcctgagagagtgatagagaggttccctgagctaaagtcctttacttaaaaggggtagcctcattttgc

SEQ ID NO: 129510 - DNA, 142 bp, Glycine max
  unsure (1)..(142): unsure at all n locations
  Clone ID: PAT_MRT3847_87953C.1
gttattacgcaccacccaccacgtatccctgaaaagagagaaaaacacactgaagctcaagcanagccagcatgggttaaagacacacagctttaagcctatgctgctcatactggataccaacaggcagcttttgatccca

SEQ ID NO: 129511 - DNA, 154 bp, Glycine max
  unsure (1)..(154): unsure at all n locations
  Clone ID: PAT_MRT3847_87954C.1
ggtcgacgcacgcgtncactcatattttctaccccatcattacatccacaatactattggttatcctttattctggcggggctcatccttttgggggaggaccacgagcagacttcgaattacaccttctaaaagcgcgatttgttggccacca

SEQ ID NO: 129512 - DNA, 399 bp, Glycine max
  Clone ID: PAT_MRT3847_87955C.1
acggctgcgagaagacgacagaagggccccacacctgtttgcttaagtatgtaaaatcttgacttctcccactcattgttcaacagctccctgattctgcgaaccaaaccttgagagttgagaataatccataatttggaacttgggacaacacagaaatgaggtatttatgtattttgtcactcatgtgtcgttgcatgatttactatagtttgtgcacttgtctcaatttgaaactgggctttgctattttcatttaatttattcaataatgtttgtagatattattggttcatcaaacgcagttaatttatatgggggcttacgtgtcatttgctgaatatatttaagcatatcacaacttcaaagatatgaaattagacaaagagaggaaagaga

SEQ ID NO: 129513 - DNA, 481 bp, Glycine max
  Clone ID: PAT_MRT3847_87956C.1
acggctgcgagaagacgacagaagggggaggtcatcttgttggtccattcgtgcggtaacggaaggagacaataagcgtctccgtcgcttaaattgccgagaacttcattacccattatctgttacagttctacgctctcgctccaaaccccacttcagatttggtttactggaaggaaagtgcttgaaggacccaatctacacgagagatgcaatggcaataaacacacacatgttagcttcaatgtgttattattgctgccactgtgattaatgagtaagtcactgtgtcaaaggatatagagctgttttcttccagtgcatctttggtttgagatttatgtagttttctctgaaaagtgattactagtttccctcaaacaataatggaggcagcaaaggttctttcacactgcaaaactgccccttttggtttctctatcgtgagcaacaaagtatctctgagacctttcgacaacat

SEQ ID NO: 129514 - DNA, 150 bp, Glycine max
  Clone ID: PAT_MRT3847_87957C.1
cagaatgtgtaattaattatcgtgacggctggggaattagaaactatcaacgccgtgatcggaagtcccgaaatctcagcatatgtaacaacagagggccgagggaatgaactagatcagaagagacaccttttgctaaactgcctgtga

SEQ ID NO: 129515 - DNA, 198 bp, Glycine max
  Clone ID: PAT_MRT3847_87958C.1
aataaaaactaggctggagcaaactcgagggttaatagcacaataatatattggcgtaaaacaaaaagtggtaacagaactaaaccctaagcaatccgctttgggtctcaaaagacaaaaaatatcgcaacaactttagttcaacatattacaacttaaaaagcctaaccaacctgagaagaatccaccgatctgacc

SEQ ID NO: 129516 - DNA, 149 bp, Glycine max
  Clone ID: PAT_MRT3847_87959C.1
gactcttgctcaaaagaggtggaagtcttgctatggagatttatacggacgaaaattatgtagattcagtaagggatatgttggaaaaccaccttaattgccgtcagtcctatccttctttagttggggcctctttggggttgccttaa

SEQ ID NO: 129517 - DNA, 729 bp, Glycine max
  Clone ID: PAT_MRT3847_8795C.1
gctgttggagattatagctctgagcttaggccttgaggcaaagaggtttgaagagtttttcatcaaagatcaaactagctttattcgactcaaccactatcctccatgcccttcccctcatctagctcttggtgttggtcgacacaaggacattggagccttaaccattcttgcacaagatgatgttggaggacttgaagtcaaacgcaaagcagatcaagagtggataagagtgaaacctacaccaggtgcttatataatcaacgttggtgatcttattcaggtttggagcaatgacttatatgagagtgtggaacacagagcgatggttaactctgagaaagaaaggttttccataccttttttcttattccctgcacactacactgaagtcaagcctttggaggagttgacaaatgaccaaaaccctgcaaaatataggccatacaattggggcaagtttcttgtccgtagaaagggcagcaatttcaagaaactaaatgtggagaatattcagatttatcattataagatagcttaaaaggatggtaaattagcagtgccttttagcctatgcatgtaaaacaaactgattcaagaatgtttctgatatgtgggactgtgatcttatgctgctaaaattactagtgtgcaatgtgcattatgtatgccaggagcatctaataaaagaaaaataaatcaagattaatgatttttgaacaattctcc

SEQ ID NO: 129518 - DNA, 301 bp, Glycine max
  Clone ID: PAT_MRT3847_87960C.1
aaaaacaaacacccgttttttttttttcccccaggggggcttttgcaaactgttttcccctacatacttattccaaaaaaaaaaaaagggcccagggggggggggaaaaaacccttggggccatggggccccaacccaaattttaaaaccataaatgtcccgattcgggggaaatttggggaaaacccttttaaggggaacctttccccatttaaagaattctcctcccaagaacaaggggggttttctcattggcctttggaattttgggttaattaaagggcctttttgcaaaaacagg

SEQ ID NO: 129519 - DNA, 476 bp, Glycine max
  Clone ID: PAT_MRT3847_87961C.1
ctctttccgtatgagcttttttctgaacactatatgcctgtcagtggaaaaggccaagacaacactgactacctagatgtgaccaatgcaggtgcagactctcctcttgaagaaatatatggacgggatcctgagactgatgttgaacgatattcaatcacaaactaaagcggtgtgccttgggcttcagcgcaaaacactacatatgacaatgtatggtattctttaaacacaccatgttcagacataagcgttgaaaaaatagagtttgataaaaatgacgcatgcatggcagcacttcctgggctaaagatgaccattcgtagactcacaaagggagtgcggtgtggtacatagaccggacgcaggatgtacccccactaacttatatcctaaagaaacccacttggagctatggcccatgaaaaatcacccaatatactctgtgattcaaacgcttcatgaacacgatcctt

SEQ ID NO: 129520 - DNA, 481 bp, Glycine max
  Clone ID: PAT_MRT3847_87962C.1
ggttgcaatgaacatgggagttaaaaaattgcaggagaaggtgaagaaataaagtgcatctttgaagaaaattgaagaaagaaagagtcattgtgcgatttgttattggataatcatgtggaaacaaatggtgcattccaaggaaaggcaaaattgctctttgctcatgctggagacaaatgggatgctgagttttatgcaaaagtcaatgatgatgtctatgtaaatattggttagtttttctttgacttaaaccctgcattaagattgaacttacttaagaatgtttccatgaacttaaaccctacattttttaagaatgtaagcttcatggttaatgagttggataggaggaaatgttaacttaaggatgtttgaagaatgtattctacttggtgcactttgaatgcaaacttaactccttgtacaaaaaggttatctttctgtaaaagttcatttgacactaattcctttgttatct

SEQ ID NO: 129521 - DNA, 207 bp, Glycine max
  Clone ID: PAT_MRT3847_87963C.1
ttctgctaatggcaaacattctattgggatcatgcatatcgtatgttcattaatgcatgagcttgacacatagctactcatgccttgcattttcctaaaaactactaaaaggacgctaaattaaagcgcgcctatacaggatccacgcttatgtgcacagtgcatgatacttcatacttgtgctatagaaacacctaaattcaatta

SEQ ID NO: 129522 - DNA, 199 bp, Glycine max
  Clone ID: PAT_MRT3847_87964C.1
tctagaccttcttacaaaaacattctaatagataagctttgggatgacttagtttcttaccctggggcttagctatgctttggaccgttcatttaatttaccaccctcaaaactatagatgatcgagacagtatcttgatttcaacacacgctatctattgccgctacaccgacaaccccgatgactcccacgactcca

SEQ ID NO: 129523 - DNA, 2179 bp, Glycine max
  Clone ID: PAT_MRT3847_87965C.1
accgatcgacacgtttggatgagcgaggctggtgtgcgggcgcgtcttgctcttcgccccgatccctacgcatgtgccggggcggctcacgccgctggcgggcccgccggccgtcccgcggcggtggtcgtccccgctcctccagcgccggtgggctttgcgcgagctggcgggggtggggcctgtcgtttcctgcttgggtgcgttgctgagcccgcttggcgtgctgcggcccgtctgcctgcacacggatccggggaggtcctttgctcgggatcgggctcctttcccccgccctcacgtgaggcggaggttgctggcgtctgcaggcccgctctccggggccctggtgccccctttgcatcagcgggccgagaattttcatttgcacaaggaggcctctcagaaggggtattatgttaaggatgccagtgggaatgactttgatggctggtgctggccgggttcgtcatcatatccggatactttgaacccggaaattaggtcctggtgggctgataagttctcttaccagagttatgagggttccacgccttctctttacatatggaatgacatgaatgaaccttctgtcttcaatgggcctgaggtgacaatgcctagagatgttacacactatggaggtgtggaacatcgggagttgcacaatgcctatggatattacttccacatggcgaccgctaatgggctactgaagcgtggtgaggggaatgacaggccatttgttttatcaagagcattatttgctggaagtcaaaggtatggagcagtttggactggggataacactgctgattgggatcacctaagagtttctatcccaatggttttgacccttggtcttactgggatgtcattctctggtgctgatattggtggattttttgggaatcctgaacctgagttattggttcggtggtatcagctaggagcttactatcctttctttagggcccacgcccatcacgacacaaaaagacgagaaccatggttgtttggagaacgaaatacagaattgattaaggatgcaatacatgttcgttatgcacttctcccgtatttctacacattattcagggaggctaacactacaggtgttcctgtggtccgtccattgtggatggaattcccatctgatgaagctacttttagcaatgacgaaactttcatggttgggagcagtattttagttcaagggatctatacagagcgagctaagcatgcatcagtctatttgcctggaaaacaatcctggtatgacctaagaactggagctgtgtacaagggaggggtgacacacaagttggaggttacagaggagagcattcctgctttccagagagctggaaccattattgcaaggaaagaccggtttcggcgaagttccactcagatggcaaatgatccctacactctggttgtagctctgaatagttcccaagcagctgagggtgaactctacatagatgatggcagcagctttaattttctgcaagggggctatatccatagacgatttattttctcgaatgggaaacttacttctatagacctggcacctgcttccagtagcaaggggcgttatccatcagatgctttcattgagaggattatcctgctgggacatgctcctagctcaaaaaatgcactcattgagccatcaaatcaaaaggttgatattgaacttggccccctttgggttctaagggctcgtgcaccagctgttacaaccatacgtagacctaatgttcgtgttgcagaagattggactataacagttatataacatttccggttcgagggaggagtttaatgttcaaagttactgctagtgcacaacgagattttgtttctgtagttgagttgatatgaagttcagctgcaacgttggggtaagaagaaagaaaatcattaattttgaagaatgcatttgcaccaactcagtttgagcggcttatttaatgtaggactcgttgactggaaagatttaacatttggaagttgtgattccattgttgtctactattttgataaggataaatttgtatcgtctggaatggtctgtcttgggaaaagcttgtgatgaatgcaataacttagtcgttagtttatataggctgcaaaatcaaattaataatttatgattttttttaatatc

SEQ ID NO: 129524 - DNA, 492 bp, Glycine max
  Clone ID: PAT_MRT3847_87966C.1
gggccataattaaatccattttttcataataaaaagtggtaaataccgggggtgcactgaacaaacctattacgggggctaattttccttggtcacgcaaaaaaaaaaccctttttaacccaaggtggagggagttcatacacagaatactagtgattaactaggactggctctgctattgccgaagactctattgaaggaccagcctgctgagaagacactcctacctcacctagaccattcctcttgaagatcaatgcccttacataacaccttaggacgctaatagaacacggcttcacagagaatcccagccgacctcataagacgggctcttcgggagattaaagttatacgaatgaccttcccactgctgttcgttggccttagcgaccgttacaaccggaagcggcggagaaccttgagatgaggatgaagcagctttgaccttaccagagctgtcgacttgacgttggcgatctctggcggaga

SEQ ID NO: 129525 - DNA, 221 bp, Glycine max
  Clone ID: PAT_MRT3847_87967C.1
cttataaccaaacactcttcttcatattcttcttcttcttcttgttcttgttctatctgtgacgagcatcatggcctcgagagcagtgctattgttggctatgtgtgtgcttccggccatggttgtggccagtcgcccagcaaagaacccgttttgcgcgaaggggcgcgtctactgagacccatgtcgtgctggtggtgagtacctcagcaaccacctac

SEQ ID NO: 129526 - DNA, 286 bp, Glycine max
  Clone ID: PAT_MRT3847_87968C.1
gaacaccgatacagagagtgatttcagtgagtgatcggtgatgacatgatcccatcacaagcatcagcgtcaactgaggcacacgcggatcagacacacccccgtccgcacgcctgaagaggcgacgcaacccgatacgtagaatgcggcattcgccgagttcatctcaacgttcatcttactcttcgcaggcgcaggctcccgcaacgccgatcacgagctcaccgatgtgcgcgctgccagtcatgccggcctgacctcatcctccaacgcccatgcactcggg

SEQ ID NO: 129527 - DNA, 302 bp, Glycine max
  Clone ID: PAT_MRT3847_87969C.1
agtgcaaaaagaatatggatgctgcagcagaatcaactgctgccacagaagaagtaattgaacttttatttaaaacaatggaaccttaaaaggttttgaaaaaaccaattgtaaaggaacttaaaattggctccagaattaagctccaaaatccgcaataactatgcgtctaaagttgcgcctccgtgaaaatggacctgaagaatactcaatccttcctttaaacaaaattctcaatgaatttgaaattttaggaagtgcgcaaccgctggctcaaagcattcaatcaaaaaatctaaact

SEQ ID NO: 129528 - DNA, 424 bp, Glycine max
  Clone ID: PAT_MRT3847_8796C.1
ttgttgaaattcaacgggttttttaggtttgactttgaagttttgggttgtccttggaagcttataaacattggtttggtttacttgaagaggaaaacgagtggtgatttctcattgtagtaaggtttgttttgcaaatggataactccaaaaacaggcataatgatagtttgggtgtgaataagttggggaaaaatataaggaagagccctttgcaccagcccaattttgctaataatgctgctaggcaacaacctcagcctcaggtttacaacattagcaagaacgatttcagggacattgttcagcagcttactggatcaccctcccaggatcctccacctagacctccacacaatccaccaaagccgcagagcatgaggctgcagaaaattaggcctcccccgttaacgcccatcaatcg

SEQ ID NO: 129529 - DNA, 178 bp, Glycine max
  Clone ID: PAT_MRT3847_87970C.1
cattgctgtttctcaaaatcacaaaccagaccaaactgatgaaaggcaaaggattgaagaaccaagaagctttgttatataaacagaaacttaaaaagttaaaagtattcttactatttctcatacatttagtaatagactcctgaagcagtatgtgtgtactgatccagaaattcag

SEQ ID NO: 129530 - DNA, 2345 bp, Glycine max
  Clone ID: PAT_MRT3847_87971C.1
gagagaagagaaggttacagaaaaacaaacacttatctctgtttctccgtcttacggcaattgaaggaagcactatctctgcaacttccgtcacattcacatggcagcaacatcagggaagattgtccaatttttttttgtgtcaaactgccaccaacagaatacacagggtcgaagggactattgttttgccccttctcggctacggaagttggcatggactgcctcttccatgcaattccgcactttattcaaaccccagaatcattttagtgtccagagaaattttcactgcaatgcttctgcatctgctactgctgtgccatatctagacaagacagattttctaaagcttcaaaatggcagtgacattcgtggtgtggctgttgatggtgttgagggagagccagttaacctcactgaacctgttgccgaagcaataggagctgcttttgctgcatggttagtggagaaaaagaaagctgatgcttctcagcatttgagagtttctattggtcatgattcccgaatatcagccaaattattacagaatgcaatatctcgaggtcttgctggtggtggcctagaagttgtccactacggattagcatcaacaccagccatgttcaatagcacactcacaaagaatgaagcatttttgtgtcctgctgatggatctattatgataacagcaagtcatcttcctttcaacaggaatggattcaaatttttcacaaatgctggtgggcttgggaaggctgacatcaaagatatcttagagcgagctgcggacatatacaatcgattggctcgaggaaagtttgacaaattcagagagaaaagcttcactatctattaagaaagttgattacatgattgtttatacatctgatctagtaaaagcagttcgcaaagcagctggaaacatagagaaaccattggagggtttccatatagttgttgatgcaggcaatggagcaggaggcttttttgcagcaaaggttctggaacctctgggggcaataacttctgggagtcaatttttggagcctgatggcttgtttccaaatcatatcccaaatcctgaggacaaaacagcaatgaaagctataacccaagcagtccttgataacaaagttgatcttggaattatttttgatactgatgtggacagatctgctgctgtggatttcactggccgtgaattcaacaggaatcgtttaattgccttaatggcagctattgttcttgaggaacatcctggaacaactattgtcacagacagtgtgacttctgatgggcttaccacgtttattgagaagaaacttggtggcagacaccatcggttcaaaagaggctacaaaaatgtgattgatgaagctattcgtttgaattctattggtgaggagtcacatttggcaattgaaactagtggacatggagctctcaaggaaaatcattggcttgatgatggcgcatacctaatggtcaagatcttaaataaacttgcttctgcaagagcttctggaaagggtggtggaagtaaggttttgactgatctaatagacggacttcaggaaccagattttgctgtagaactgagattaaagataaaccaaaaccatccagatcttaaaggaggatcttttcgggaatatggagaagctgtgctgaaacatttggagaactcaattggctctgatccaagtctgcacaaggctcctgtgaactatgaaggggtccgagtttctggctatggtggatggtttcttcttagattatcactccatgatcctgtacttccccttaacattgaggcacctagtaatgatgatgctgtgaagcttggacttgctgtgcttgcagctgtgaaggactttgcaggtttagacacatcagccttgaacaagtttgtaggagcatcataattggatgcttcatacaataattgagtctggtgctggagagtgctttcacttctatttatgcattatacaaagaggttctctatacgtgcatcagcggcaagaggatgaattaaagacagtgaactagagttacctctaaatggagtatggtctgttgtggactagaaatatcagaaatctctactatagaattttcatgagacgtcacatttttgagatcactgtgattaaatgtatggtgtaattttgttgtgctttgccattgaatactattgacccttttcttatatgcatttggactctcgtaggctcactgataagatgtgccctttccatttgcggagagaatagtcttggttatcaacttctcttgacaagaaaaaagtgaaaattcagaaaatgtaaaaattaaaaatg

SEQ ID NO: 129531 - DNA, 150 bp, Glycine max
  Clone ID: PAT_MRT3847_87972C.1
tagctcgagccagctggcggctttctttacttttcaatagtatacacccaagctcacaaaccacaccgtgacctgctgggtcttctctttggacacaaactctaaaagcgagcatctatctacttgatggaagcccgtctgcataaattt

SEQ ID NO: 129532 - DNA, 486 bp, Glycine max
  Clone ID: PAT_MRT3847_87973C.1
ctgccgtatgccagcagcaatgaggaccataatgcccctattgatgtgaagccaaaccctaaacagctattgtcccttgaatggcaagaccagggttgctctgatgcgggaaaagactcatttgggtatctcaacggcccaggatcatggactggcatgatgaacggctatggatcttccaccacaaaccctttggtctaacaaggcaatcttcaaatctcaagtcacaaatcattgatcatgatcatgatgcatggatatacatatgatcaacggctaagctctctcttagcttttggttaacttgatcaatgatctagtcaatgatcatcaatcatcactttccctacgtataatctatattatatgatattattattatattataaattaagtcttttgatcatgggagggttcctcgtattttcctgtgtagtgtttctctattctagggtggtcttattctcaggtttctattgacttaac

SEQ ID NO: 129533 - DNA, 357 bp, Glycine max
  Clone ID: PAT_MRT3847_87974C.1
ggttggggtttttttttttttttttttttttaaaaaaacgaacttgaactttttgaaaacctgcttacaagattggtagaacttaaaacttattttttttcacaactggggccccaaatttttaaactccttcaaaaaaaaaaaagggttgcaacccttttttaccggggggtccccctttttccatttgggtcaccggcagatttttacaagtttcttgataaaactttccaagggggggggggttttcactttgtttaaacacagttttgacttgtgcaaaaaaaagggttaaaaacaaaaaaaaacagggttgttaggggcgaataccaaaagggggtcccattatttaaaacc

SEQ ID NO: 129534 - DNA, 430 bp, Glycine max
  Clone ID: PAT_MRT3847_87975C.1
tggcttggaacctttgggctgatttatgtgcttggctaaatatctcgcaatctcccaccccacccctccctccctccctcttgactgtacagtctgtctgtaattattacgttcctttgaagaagaatctctccgaaggctactacctctggcgatagcggggcggggaagatactcccgacgaattaacacgcgaacaagaagcccagcaactagcataaggtaattaccggagtggaccccccaattaaagaagtgtaacctaaacacgggtcccatattccatagacccgggacataaccggttaaaaaagaccttaaagttccgggaccgtccctcaatggggggtcaaccggcggggttctcgaaccgagcaaaacctgagaaaaccccccaaaatttccaaaattgggggggggaaaccccccc

SEQ ID NO: 129535 - DNA, 512 bp, Glycine max
  Clone ID: PAT_MRT3847_87976C.1
gtttattatgttttttaaagcccgacgcccattaatgacgaaggctgagcggcctatccatcttaaagtttgtgtcttcaagcctacttgcgctctgagagaaactgcatgagacacactcctctagcagctggaccctgacaagattgcatacatcctcatcgcataccctacatgagataaacgccccttagatgtagtgcgcatgctaacggatagtgaagaacagaagagccacagagaggatgccggggccattggtgaggcacgagctaagggacagactcggggaggggacgtatgggaccgtttggagagctataagaagccaaacagcggacagaacctgtatggatatcatgaaaaataattattgctcctatcagaacggcgaaaacaccataagaatctgcccatgacgaccaaggattgacgggaagattgtgaagcgcaaagacttgctccgctaaggtgataactcgcactggttactgagccagcgaaacttccta

SEQ ID NO: 129536 - DNA, 270 bp, Glycine max
  Clone ID: PAT_MRT3847_87977C.1
gtctgatgatctatggaaagacaccaatgcacatagagccctgagtagatgcaccagtcgtgctctcaacatcataaccttgtccttggagccctttccctggtaaaagctctggcatatagctgctaagctactactgtctctcccatatattctagagacattgctggcaattctggtgttgctcctcatcttgacaagtcccatggcttaatcaatggattcgaccgagagctaggggacccctttctcgataaattgattcccgtg

SEQ ID NO: 129537 - DNA, 475 bp, Glycine max
  Clone ID: PAT_MRT3847_87978C.1
ttcttcgcgctctctaggggacgatttttttccacaacgcatccttaagcataaacctgcaattgcaacacaagaactcaactgcctgagactgctaacattcagagtgcacaatgcgtcacccaaactgacactcacttctaaaacgcagattgccacccgcaagtgctcaagctacttccaacgaacccttgggcctaattatctactcatcaagaggcgcagaagctactccatgagctcaaaacattggaaccctcttccagaacgccagcctgatagccgttaacggacacaccagctacagaggccggacggtgcataacagtctgggcaggaggcacaacatctcactgggactccatcaaactacaaagagagacactgggcatggagacatcaatgtttgggcttggactgttcatcggagccgtcgcaatgcgacacggggatgatagcagatgcaaaacatcgc

SEQ ID NO: 129538 - DNA, 507 bp, Glycine max
  Clone ID: PAT_MRT3847_87979C.1
cccaattgaggcattatttttcatatgtatgattagtacatgaccaaggtgatggagtattggagaccgtggttttgggggcacgccgacaagtactacgttgttaagttgagccaattgaggttgaagtttgggccaacgttggatgctgcaaatgacaagataatagcaattcagattaagggaacagctacaaagaaagggaaagtttcttcttcttcttcaacttccaaaagctttcttattccttttcatcgtacccagaaactaggatccactcacaccaccaccttcccccataggttcaccaattctaaggcaccaacaatcgtgtgggacgcacgtgacctctgcgactttcatctcgtcctcaaacacggcacgtgctacatgacacttcatgtcttacatgcggagggtgatataggagaatataaatctgaaatggtggtggttgagaagttttcatgagcggtactatggctgagttatgggaggggaggagat

SEQ ID NO: 129539 - DNA, 368 bp, Glycine max
  Clone ID: PAT_MRT3847_8797C.1
aaaaaaaaaaaacacccccccggggggcttaaaaaaattatccccccccggctaaaaagaggggttaccggggggggaaaattctaccccccggatgataaagggccaaattctgggggcaggcatttatgcctcggggaccctttttatgggttcagggaccgcttttatgccttcccgacaaggggggggccttcacctttaaaaaccttgggccaaaaaaaaagggccccccccccaaaagaggggggggggtccctatgggggggtcaataagattaacaaaaaagctaagggggccttggcgggccttagaaaaaaaaaaacctgtttaaaacttgcttttggaaccccgggggtggcatttg

SEQ ID NO: 129540 - DNA, 354 bp, Glycine max
  Clone ID: PAT_MRT3847_87980C.1
ggttccaaagtcttccttaggcttacggttcctattttaggggacgaattgattaacacaggctggaattaatgcaggtcttgcaatggaaacccttaagctgaccgacatttgctaatggtacctgccctggattaaggccaagtctatgtggtggatgtgaaaacagatccaggggctgcatcttggcccaaagttgcggagcctgccattatcgtacagaaaactggattagctaatccacacccatctgactgccttgcttatggtgatataatgatctcgagtcttggaaatgaagatggaaatgctgcaggaaatggatcgctgtctattgattctgagcttaatgtg

SEQ ID NO: 129541 - DNA, 232 bp, Glycine max
  Clone ID: PAT_MRT3847_87981C.1
cttgagatgatacaatcagagatgaaacacttaaggaaatgtctaccgactatggtacaatctcttcttgcaaagttatgcgagaaccgactggaatcagcagtggatcacgattagttgcagtatcaactcctgaggtagcaactcgagctattggtgcgatggatggtaaaatgcttgctggagaacctctgtatgttgcccttgcacatagaacagttgagagaagaca

SEQ ID NO: 129542 - DNA, 769 bp, Glycine max
  unsure (1)..(769): unsure at all n locations
  Clone ID: PAT_MRT3847_87982C.1
ggtccggaattcccgcgtcgacccagcgtccgatccactccttaataccccttccataatgtccccaaaccaaacacacagttaactaactcaccaaccctccctccatttccccgagaaaattcccggagatcaattcactcagtagattttcccggaaaatggaaggaggtcgtcggaggataacgctttacgatcaaatgacagctggtaacagttgcagcagcggcagccgagactcactagccagcctcatgatggacgacgtagttttcaagaagatggaaaccgaagcgagcggcgagctgagccgaagccgaactctccaagacatcattcgcgaagagaaacctaacaacagcagcaacgcgacggatcgcaattcttggaaagccttcaaggagaagctttggctcaagcgcgccatcggctcggcttggtcctccgccaccactatcactaatcacagcaatgatgatagaaatttaccaaatttacctgaaactcgccatgactcggacgagttgactcagcagaacgacgtcgttgcgggagaggccaacgattcggaaccgatcgcgcggttcgggtcaccggtggaacaggtggcagccggcggagactcctccgacggcgagaacaaccacgaggcggtggttggcgtgtcgctgatggacttgctggaggaagcagagcangaaatgngattgtatagagtgagcgatgatgatgacgtggcagaatatgagaagcgagaaggagaaggcga

SEQ ID NO: 129543 - DNA, 969 bp, Glycine max
  Clone ID: PAT_MRT3847_87983C.1
gaattcccgggtcgacccacgcgtccgggattatgcatttataaatctgattatccagtaattctaactttggaagaccacctaacaccaaaacatcatgataaatttgcaaaaatggcaactgaaatatttggagaaacgctttactttcctgagacagatcatttgacagaattcccctcaccagaatcattgaaaaaacggataattatatcaaccaaaccaccaaaggaatgtcgacaatctgctattatcagtaaacctgtgccaaatggaagagaaccatctgaagaagaatcacgaggtcttgaattgccaagttctgtggctaaactgaaaactgaggacaggaattctagtgatgaagatcaggaagatgtaaatacaagtgataacaaaccaaaccaacaagatgcgcgtcaatacaaacacttgattgcaatccatggtgggaaatcaaaaggttctatgaagaatcggctgaaagatgacgacaaagttggacgtctaagtttgagtgagaagaaactgaaaagtgcttccgagtctcatggagccgaccttattaggttcacacagagaaatatcctcagagtttttcctaaaggagaacgtgtccaatcctcaaatttcaggccatatttagggtggttgtatggagttcagatggttgcattcaatatgcaggggcatggcaaatcactccggttgatgcggggtatgttcaaagcaaatggagggtgtggttacgttaagaagcctgaatttctgatccgaacacttccacacgaagaggtgtttgatccaaaaaaaccaccttcagtgaagcagatattaaaagtaagcttagctttactcactttgctaaaaggaaattggtttgtttcataacatttgaatattttcatgttcaaaaataggtaaaagtatacaaaggagatggctggagtttagatttcagtccaacag

SEQ ID NO: 129544 - DNA, 256 bp, Glycine max
  Clone ID: PAT_MRT3847_87984C.1
gccgccctttttttttttttttgatggggggaccgaaattgtttcgacctgttccacccagtctttcttgggatttctactgaaggggtcggtcctcccatcgggtttgttttagaacgtttacctagggtttctttatcaagagttccccggggatgtcagaggccgtaccccgcttgttttggaggggcacctttttttttcagaataggccttggacgattttccctcccctgggtagtttaggtgtttacgt

SEQ ID NO: 129545 - DNA, 487 bp, Glycine max
  Clone ID: PAT_MRT3847_87985C.1
ggctcgagctggtgccgtgatggctacagtgatggctactgctgaggctcctgatgcgttgcaaggcgcagcgcgctgcggcgggtgcaacagctgcttaaacacgtttagatgacggtattgctggagatcctggggcagagcacagtgctctgatcatacgtctgatccactggctggactacactctggtgttcactcatgtgctcgaggatgtgccgactgacggaacggctcagatgatgcgcaggctgatccacatactgtttacaatggggcagacactgtgactgattcagatattaactcagatgtcgacacaaatgtcgttccaactgccgtgcctactgtagagaataagcttgaggagtgcatttgagagatgccacgttgcatgcgcctatgtattagcgaagcttctgctgctttctctgatgcgataccccatccaaatctcgatgctgcaattgctgctacatctaatact

SEQ ID NO: 129546 - DNA, 302 bp, Glycine max
  Clone ID: PAT_MRT3847_87986C.1
cgagacataactaatcctcgtgactatcaacacggtccccattttagtatcctctacgcctgcaactcaaacagcggcggcgccagaaatgcacactggccagtacaccgccatgcagccatgtttgcctaatacggcgatcaaccgtaccgactgtggtgacatcaccttgggctcataccttacccaacacatgatggatacatggatcacccacatatactacgatctcaataacttaaacccgaagcatatctaccacctcattgcggagacatctctacaccatgacattcgcttga

SEQ ID NO: 129547 - DNA, 246 bp, Glycine max
  Clone ID: PAT_MRT3847_87987C.1
ggataaggaacctggttctgattctagtttagttcctggcaccaagagaccttggggtgattcccgattgaataaccagctccaacattctccaggcaataatgcggaaaagggccttttggggatttccgggcgaaaataaaaagcaaatttttgtagggcattggttttggaaaatccaggcataattgctaatggttaccttgtaaggaaagttccttgtaaagaggggactgttgaaccaaa

SEQ ID NO: 129548 - DNA, 257 bp, Glycine max
  Clone ID: PAT_MRT3847_87988C.1
tggatgctttggcaacagagataagcaaggcaacccctgtgaataaggcactcctggtctacacacagtgggagaaacatagaaattcatctcttctgagcggacctgtgggaacccagaggatggacacccagcgtggtctgaggaatcatgggccaaaacaggaggcatcaggagagatctcttgggtaaagaagagtgagggctggaaggatattccaggcagtgggaacaacttacataaagtgagaatattg

SEQ ID NO: 129549 - DNA, 187 bp, Glycine max
  unsure (1)..(187): unsure at all n locations
  Clone ID: PAT_MRT3847_87989C.1
gaaactcatacaaagatacaaccttncttaatcataaaaacataaataagatgacaaagatcgtcccggtataacagaacagtaacccaaagtattcccattcctcacgatgtggatcacccatgaacgtgggaattagtgttggtacttcacaatctcaggggaaaattgccttacactcacaatt

SEQ ID NO: 129550 - DNA, 492 bp, Glycine max
  Clone ID: PAT_MRT3847_8798C.1
aggcaaagtttcttcctttctctgctctttgccttctctgacacatttggtgccttgtagagcgtgtttcggcacgaaggtggtatggcgaaggacgttgaggttgctgagcgtggctccttctctggcattgactaccacgacccttcaccatcaccactcatttatcctgcacactttacacctttctccttcctctttggttcttcttgccccaatcaattgttcattccctctctttcctccccctttccctccccccctccgtctatcgccccccaccccccccttccttttcccccttctcctttccctctccctctccccccccgccctgtcttcccccttccttttcctttccccttcccctttccttcctttccccctttccccccctcactctcccccatctccccccctcctcttctcattccctcttcccctctcccctcccctcccctcctttccccccccctcccccccctttctttt

SEQ ID NO: 129551 - DNA, 341 bp, Glycine max
  Clone ID: PAT_MRT3847_87990C.1
caaacttctctcccataccagaattaaaatactccggctatctaagtctttcttaatcgacataccacctacccaagacataagactacaataagcgactaatatactgggttaaattcaaatccaaatccgtcttactcgaagcttctcaaaacatattgtttagtcaatctcgtgtaccgaattttccatctgaaagttagctaacctgactatcaaagcactggcattgaccacactatcagaaaaataattagaatttctctaaaatattgataaatctaagtatttagaataataaacaaaaaatcaaattaatataatgacaaaatataaatgct

SEQ ID NO: 129552 - DNA, 285 bp, Glycine max
  Clone ID: PAT_MRT3847_87991C.1
ctccgagccgaatgggcttgagcggctcaagatcttcttttgcattgctctccgactccgtttcatgcattttcccgatgcttaaggacgatccttcaatacgcaccccagattgcttgttgactacggggttctctagaaccaatttctatggccattacaagcggggatttctagtggaacgaaggattttccttgattatgcttggcaccagtgaatttattgtgggcatcaatcggaagcggtatgattctttgaagtattcacctcctatatggattgtg

SEQ ID NO: 129553 - DNA, 522 bp, Glycine max
  Clone ID: PAT_MRT3847_87992C.1
gtactgttcgcaaccgctgtgacaaaagccggctgctaatgctactacggcttaaacggctgctgctgctgctgctgctagtaatgttggaggtggtagatagcgttatgcgcctgcggatattaagcctgtaagtgtagtctagcaaaaacctgttggtaaagtgcccccagcagttgggaaaaagcgtacggagctactcgtactaaatgaagccgctatgtacgcggctgccgccgtgggtaaagcgtaaaaggggcacgaaagtgaaccgggtgtcccaaagccatcctttgcaaacgacccggcgctacgtggtgcgataaggattgcggcctaagccgccaactaggcataaagtaacgagcactacgctttaaagtgtacctgtactaaagccaacctgacgtgtaactgggctggtgaaatactacattagcctagtgccgctgcgcgatttggtgtaaacagaccaacagccaaccctcgcggacaggagttgcgtgtattagcagctccagc

SEQ ID NO: 129554 - DNA, 288 bp, Glycine max
  Clone ID: PAT_MRT3847_87993C.1
gaggggctggcaacgcctggcgccgcgcgcacccattgatgaccgatgcatgagcttctgcatgggcctcggtcgaaaacccttacgggacgatgcccgagatcgcacgagcttccgggtcatggacctgaggcgctggcgcgaagatcgaactctcgatcaagtgctgatggctgattagctgtaccgtcaattcgtcgtaacatttggaataagttttaagatgatctgtgccgcttgcatatatatataattctgtgatacgtagcatgtatattactgtatgca

SEQ ID NO: 129555 - DNA, 223 bp, Glycine max
  unsure (1)..(223): unsure at all n locations
  Clone ID: PAT_MRT3847_87994C.1
ttctaacccaccgaagtgnatctgnacatagatagcagtgcttcaaagcntangnagaanatangcaaagtagagaggnnagagaagntggtaacaggcnttttctcacggccgttcagtggtgtgatccccacattctnccagccacancanaccaccccanaaggttttggtaggnaccccaattttatataaagagatggatttgnaactntatcaaaca

SEQ ID NO: 129556 - DNA, 1204 bp, Glycine max
  Clone ID: PAT_MRT3847_87995C.1
gcgggcttgagagaaaaaatattccatttccagaagtagtactgcactagtactctcttttgtttcgaaaaaaaaaaatggttcaacaggaagtgcgtaaaggtccttggacagaacaggaagacttcaaattggtgtcctttgttggattgtttggggaccgtaggatgggactttatagctaaggtatcagatttgaatagaacaggtaagagttgcagattaagggtgggttaattacctacatcctggcctcaaacgtggaaagatgaccccccaggaagaacgccttgtcttggaacttcactcaaaatggggaaataggtggtcaagaatgtgctcgcaagttaccagggcgcactgacaatgagatcaagaattactggaggactctgatgaggaaaaaggctcaggacaaaaagcgaggagaagctgcatcatcatcatcactcaggagttgattcctcaatatcctcaaacaaccatgcagtggatccacatgcttccaagaaagcaggagaagagagcttttatgacactggaggtcatggtgtgacagcctcaacccaagatcagggtcaaaaaggtgaacaagggttgttctctatggatgatatatggaaggatattgacaatatgtcagaagagaacaacactcttcagccagtttatgaagggaacagtgaagagggttgcaacttctcttgcccaccacaagtgccttctccatcatcatgggaatattcttctgaccctctatgggtgatggatgaggaaagtttgttttgccctttgagtgaaccatatttttcctgctatgcacagggcagcgtttttttaaccggctaatattattcttttttttccaatcaatattttgttcatagcatatcatgtgtgccaccttataattaaagtctaacctgtatagcattgcatccttaaagcttttggaagggttcaccctagctagtgtgacccagctgtaataatttcaggcataactgtagtctatgttccttgtttcagtagtgcttttactttcgaaaaacatccaataggatagcgagttggtatgttctgaatgtaaaatatcaagcactggtttgcatctaagagtttttaattttaattttaatcccatctacacttctaccccaaaaaaaaaaaaaaaaaaaaaaaaaaaaaaaaaaaaaaggacggc

SEQ ID NO: 129557 - DNA, 134 bp, Glycine max
  Clone ID: PAT_MRT3847_87996C.1
gctacgacaccctgcacacacacttcgccctcctcgcattgtgtggccgccaattcgagtaccgacggatagcggctggggaagccatcccaaccagctccggacgtccaccctccctcagcccctctcacttc

SEQ ID NO: 129558 - DNA, 1029 bp, Glycine max
  Clone ID: PAT_MRT3847_87997C.1
gcttgagagaaaaaatattccatttccagaattagtagcactagtgctctcttttgtttcgaaaaaaatggttcaacaggaagtgcgtaaaggtccttggacagaacaggaagacttcaaattggtgtcctttgttggattgtttggagaccgtagatgggactttatagctaaggtatcaggtttgaaggtggcgggagaaagtaaaataggcattagacaaaaaaaatcaaatgcttatttgggcatcatgctacaaaaaaatatagattatggaagaagaagcctttaaccacctcattttgttgtaggtttgaatagaacaggtaagagttgcagattaaggtgggttaattacctacatcctggcctcaagcgtggaaagatgaccccccaggaagaacgccttgtcttggaacttcactcaaaatggggaaataggtggtcaagaattgctcgcaagttaccagggcgcactgacaatgagatcaagaattactggaggactctgatgaggaaaaaggctcaggagaaaaagcgaggagaagctgcatcgtcatcaccaacaccctctagcgttgattcctcaatatcctcaaacaaccatgcagtggatccacatgcttccaagaaagcaggagaagagagcttttatgacactggaggtcatggtgtgacagcctcaacccaagatcagggtcaaaaaggtgaacaagggttgttctctatggatgatatatggaaggatattgacaatatgtcagaagagaacaacactcttcagccagtgtcagtgtatgaagggcacagtgaagagggttgcaacttctcttgcccaccacaagtgccttctccatcatcatgggaatattcttcgtgaccctctatgggtgatggatgaggaaagtttgttttgccctttgagtgaaaccatatttttcctgctatgcacagggcaccgttttttttaaccgctaatattattattttttttcaaatcaatatttgttcatagcatatcatgtgtgc

SEQ ID NO: 129559 - DNA, 761 bp, Glycine max
  unsure (1)..(761): unsure at all n locations
  Clone ID: PAT_MRT3847_87998C.1
cggaattcccgggtcgaccccgcgtccggacattcattgttttatattctacatatcaataatgaatgtctatgaaggctttatggagttgtgtattctacaaactactgcacttaacttggagtttgtttagcttttttagtttatttattgtatacattatatgtgatggagaaagctgcaatttctattttatttagataatatattgtacaacaccaacatttaaatttgatcattagttctgtatgtttttcagagatttatatttctagatgtaaggaaaaaaataaattaaaaagagcaacttctggttggctgttaaagcatttttttctgccaatttagttaatgaagggattgtatcacagccaaatatcttatttcaattttgtttttcatgaagtaaccggtcccctacattaaatttgatcagattttggcctactaattgcaggtttgtttatatgtcaaaacgtgccattttaatgtggtggtcaaactaattagagtccagcttgaaaataaaggcttaggaagtcttcaataatcgaacttgatcaccttctctcgtcactttgattntttccattattattcttcacttctggtttgtgatgccatcacacgtggattctttctctgtccaccttaactgcttgacatttttcgtttttatttcctattcaaaattgattttattttcacacttgttgatttgtaatttattttttaatcatcttttatatatgcatgtttgc

SEQ ID NO: 129560 - DNA, 622 bp, Glycine max
  Clone ID: PAT_MRT3847_87999C.1
ccacgcgtccggttattgactcggaagaaagatgcatgttcattttgtttaatgaagcagaagcgcatggcaaaggtatgaaacgacaagccatggacagacttggcttccctatgtaacacaatactaattacgcgttattttaaggaggatggagttgtgaaagatactatgactccacttacttgcacattcttattcttatccataagtagcaatgagcaacagacgctccactgagccaaggctgtggacaagtactctgtttgaagtaccattattttgtaaggcttttatgaatactaaccttacattaaactgtcataacaggcttgactatttattgctgatgatatctgctgaactttaaagcgagccttacttaaatgccattataaatgatactatctataattaatgacctaagaatgccctatgactttgggccggtgacacatctacagatagacaccctaactaatgagagagtgggccagtactatgtatgcattctagatgtacaatgactgccgatgtataaccatgaagatggcatcttagcaaatggggtcattggatagatgatccaaccataactatctcctggaccttgcatatgcac

SEQ ID NO: 129561 - DNA, 385 bp, Glycine max
  Clone ID: PAT_MRT3847_8799C.1
taggccggccgccgcccttttttttgtttttttttttttttcttttgttttttactttttttatttttttttttttttctttttctttttttttctttttcttccaagggaatatatatggtgctggcctttcaggggacccccaaatattttaaaagatggacaagccccctggtttctacctgaacggccttacaaagtccccccacaggatccccagggcaaacacgcccacagactgtgaattgtccaaaagtggaaggtcttcacagccccgattggggccccaaaaaatgtatttgggagatctttttaacaagggggcatccacttgcccaaacggaagtcccccggtgacgggtactccccccctgacattcacggg

SEQ ID NO: 129562 - DNA, 478 bp, Glycine max
  Clone ID: PAT_MRT3847_879C.1
cggacgcgtgggcggctgcgaaaagacgaacagaaggggatggtacactgtcactagaaaattgggttaaatcatagaagagggattggtcaatgaccatctttatcccacagacctcaaaaatcaaggtactttcttgaatttcaaggttagaataaaagacttgtaccaattcaaaatacacgggcagttttgaagacataaagggaatgagatttgagttatgaaatgcttgaatgcatttgaaactctcatcagaaaagaaatccatatctatgaacttagggtcaatgatagaacaagaggagaagaggtttgtgtaccatgtatgttgttctttcgatgagaacaatgaggaggaaatggaggaaggaattggagtatcctgagtctcggggtgtcgttggcttctactcgaagaacctttgcgcttctttgatggttccgccatttgagagacttattcgaaatttcaatc

SEQ ID NO: 129563 - DNA, 201 bp, Glycine max
  unsure (1)..(201): unsure at all n locations
  Clone ID: PAT_MRT3847_87C.1
ctngttaaaattgctgcggttcttcattttctcatgggcttatcattaccattataaatatcgacaattgttgaaagggagtttataaagatctctaactctgcctcaagtagattattttaaaagtaaaacagtgaaaaagtaagtctgcacgtgattctcccttatgttattattcattattcaatgttgctggctgct

SEQ ID NO: 129564 - DNA, 912 bp, Glycine max
  Clone ID: PAT_MRT3847_88000C.1
cccacgcgtccgcccacgcgtccgtacggctgccagaagaccacagaaggggaatgaataaaaccaacttgtctactcgtaaatcgtaatctcctaagctataacaacgtcctctctctctctccctccctctctctctctctcatggcaacttgtttcgctccgttctccgtttcaggtggatctcatgagctgtggttaacaaagcgagttggacctaagctcactgttcaaaggagatcaaaccttgtgatcaagaggaaccacacttcttcaattagtgcagaataccgtgataatagaggaggtggaggtggggattttgttgctggctttcttctgggtggtgcagtttttggaactctagcttatatctttgctccccagatcagaagatctctgctaaacgaagatgagtatgggtttcgcaaggccaaaagaccaatatattacgatgaagggttagagaggaccaggcagaccttgaatgagaagataggccaactaaactctgccattgataatgtatcttcccgtttgagaggtggcaacaacgtacctgctgcaaagatagaaagtgatcctgaggtggaagcaaccatgtgagacgcattcagtttgatactgtggtcgatgatgttttaaattggtggaaatataatgaattgaaaatgaaatctcttcttttttttgacggtttgaaggataaaatcttgctgggactaatgtagtttttctaaagactggactaaatagttaaagctgtcaaatttttaccttcccccccatcccccctttaataatggatgatttttgtttctgtgcatgaagcaatttggaatgtggggcatttgtaatcaaaaaaaaaaaacaatacaataaaaaaaaaaaataaaaccactaaattaaaaa

SEQ ID NO: 129565 - DNA, 231 bp, Glycine max
  Clone ID: PAT_MRT3847_88001C.1
ccacgcatccgaccacgcgtccgtgcgacatgacgacagaaagggacagcaagggtaaaagtgttgtcccaaaaaaagtgcatctttctcctttctttcatcaccgttggaatagactgatatgggctcagaaaccaatacttttacctttgaggaggtggctatccacagtcacaggaaggattgctggcttatagtcaacgggaatgtgtatgatgtcatcccattttt

SEQ ID NO: 129566 - DNA, 396 bp, Glycine max
  Clone ID: PAT_MRT3847_88002C.1
ggttctactgtgagatatgatagatcatgtaactcgttcttcttcttttgttgatctgtgtttgagctctgcaatgctctcacctgacaatgtatagatgctgtggtaactgcggttgcgtaatctactgcaagtgctgtaaccgctgcccacgctacttgatgtacccacacttgagctacactgagtcaaccaccaccgagaccttgtacatggaagactcacctggcaatgctcaatttgatggcactgaaatgggtacacccgctaagaactatggctgttgatgaggaccaaactgctactgctacaccttcactcgcaagtgatgaccctgcagagcaagcttcaagcacagatagcccttacttaggaataatgattaactattaatgt

SEQ ID NO: 129567 - DNA, 394 bp, Glycine max
  Clone ID: PAT_MRT3847_88003C.1
ccacgcgtacgaaaaaaaaaaaaacagcaaatttaaaagaaaataaaaaaataaaaggagaaggaaatagaaaaaacaaaataattgaaataataaaataattaattaaatgtaataaataaaaaaaaaatgaaaggtaaaatgtgtggatcttttaggtgcttaagcttttcgtactacgtttttcgacttatatatgcttgctatgctatctgtaaatgatatatcatatccataattttaattttgagtacccagtgaatcctgtgttaacttaactgacatccgttatgcatgttcctcattaactccgatattgatattcctgaatgatcctttgatctcacattgacaaatgtgaatgtttcttgatttctgtctattggtctcaata

SEQ ID NO: 129568 - DNA, 438 bp, Glycine max
  Clone ID: PAT_MRT3847_88004C.1
aagctttgatttggctcgaggccattttagcccaggacaaggataggttgatggatatgctaacatatccgaaagttgaagaggaaaacatgataagagtagaggaaaaggccaaaaaatttggcctagtagtggatttaaatgcaaagaagcctcgagctgagccactgtacataataaatccaagtgtggtttctgatctgtatggccattgggtcatgccattgacaaaggaagtgcaagttgcatatttattgaggaggctggactaaacatatagtaagagttcttggttatgttggtggtagagaaccaataattcatgtatataaataaagcttagactgagtaataatgtctttgaatggacttgaatttgatagaaattaacaaacaccgttttctttcttgaaaaaaaaaataaaaataaaaataaaa

SEQ ID NO: 129569 - DNA, 221 bp, Glycine max
  unsure (1)..(221): unsure at all n locations
  Clone ID: PAT_MRT3847_88005C.1
cgccgacttagacctgacctgggcttggagtaaacagagaagaaaatattccatacaacatgcgatattaagaagagaagagaagagagggggaatgaacngattcgagtccgatggcctctacagagggcctggtgcccataactagggcctttctggctgcttattacgactaacacccttttactcctctttctgctcatgtctccacacaatctact

SEQ ID NO: 129570 - DNA, 520 bp, Glycine max
  Clone ID: PAT_MRT3847_88006C.1
accaggattgcataagcataaaggtttccgcactttgttattgtctcctcatgtttttgttcatatggtgaatgcatttttgggattcgacacttccgtgtctctgtatatggttcttaagattccgtttatggacctgatctggcttgacaattagctagctggtgtgttggttctaagaccaatctgcagctaggattttaaacaaaaatgggtcttgtgttaattccttacatgctccatttctctgtatgttacaacttacaagtatcgaatatcctagctagattgctagtatctacattttgacgttacaaattactaagtttttggtcttcacccgaaaaaaaattacgaaattgaggagtgccacatgtgataaacatgatacatgataaagtgaggcaacagtaaaataacgattgaaagagcataaggtaactgtatataatgtaatggaacaaccacccatctgtgcatgctaccccccaagccacacacacatttctatttttgtggg

SEQ ID NO: 129571 - DNA, 176 bp, Glycine max
  Clone ID: PAT_MRT3847_88007C.1
ctcgagccgctaagattgcagtagtgctgggtgctaacacctgcagtcaacaatggcctctgcatcatcatctctgctcaagtcatcacttaatcatgactagtctgagtgggtgaatggacaaacccttcgatactcttcagcatcagttgtgaaatgcagccacaataaatcat

SEQ ID NO: 129572 - DNA, 846 bp, Glycine max
  unsure (1)..(846): unsure at all n locations
  Clone ID: PAT_MRT3847_88008C.1
aagctaaagtcctatgaatttaacgaattggtaaatcaaatttcaaatagttgtttggcatattgatatccccttccactataaaacaatcaccttagaacctcatagtcactcgtccctagcaaaatccgtacccattccacctctccaaacaacccataattaaacagaaccatggacacaatagaacaagaaaacatgcaatttctcgggttcttgggcatctacaaagaatcctacaagctcatattttcatggaggaagatcttcacccagatcaccttcaccctaatcctccctctctccttcatcttcctcatccacatccaagtatccgatctcctcttcgggaaaatcacacacgacgccaaggacttaaccgaaaccctacccggcacaccccaacaccaaaagctccttgacacattctcttccgattgggccactttctttctcttcaaactcctttacttcatttccctactcatcttctccctcctctccacctccgcaattgtttacaccgtcgcttccttctacaccggcaaagaagtaaccttcaagaaggtcctaagcgttgtccctaaggtatggaagaggctcatggtaacatttttgtgcaccgttgttgctttcttcgtttacaatgttatggcagtgttggttctaggcatatgggcactcacaattggtgtgagaaatggtggtggtgcaattttgtcggtcttagcgatattatatctagntgggtcggtgtaccttaccgtggtgtggctattagcgagtgttgtgacagtgttagaagactcttattggtatgaagccctgattaagagcaaggagttg

SEQ ID NO: 129573 - DNA, 1052 bp, Glycine max
  Clone ID: PAT_MRT3847_88009C.1
gatacttacttgtgctctcaaagatgatggatatgatattgtctaccaaaggatacctttaacaacagaaagacatgttttggcctccgacgttgatgcaacacagtattgtcaacatgattacttaggaactgtagctttttcagttgtgaatgcttttttctggttcctatcattcaagtatcatcaatgatatgttcacgggaactcaatagagaagagccttctggtttgggtggtcctcagtgtgagagttatgttcttgattcaagaggctcttttgtggagaggcaagcagtggtctctagaaataattatgagtgacaatggtgaagaagctggagaaaatcgtctagttccccgtttgaatgaaaggattctttcatcattgtcaaggagatcagtagctgcccatccttggcatgatctagaaattggacctgactcctcagattttcttgtgttgtggagatcactaaaggaagcaaggttagtatgaacttgacaaaaagactattgattaagatcgggttttgtattcatcagttgtttatcacataactatgccctcgcacactgtgtgagatcacactaagagcagtgctatatctagagattttgttaatgaaagttcgatgacattttaaatccaatgtatatcattccacaggagacaaagctattgatataaggaggaagcactaaatagtataacctaggatacaaagctattgatataaggagtaagcactacacattgtgctatgaggagcacttcatggagcaagaaagaattgcaataaaattccattcttagcatatgactaggtgaattgctttaaggaatcttgtgctgaaggatgtcgagacacaatgctctgataggatgtgacattggggtatagggtaatatattaattgtatgaagtcttagacggtcttgtttgaaccgagatgaccttattatatgatgtagaagaaaataaatgtgagccttttatccctttgaaagacttgtatttaaaaatgtaaaaaaaaatacttttaattaa

SEQ ID NO: 129574 - DNA, 732 bp, Glycine max
  Clone ID: PAT_MRT3847_8800C.1
ttcccgaattggaattaaaaaaaaaaaaactgtgaacggaaattagggctcgtaagtttcgatttcggttgcagattggggtggtagcgttgcaattgcaacaattcttgaagaggaaaaaaaaaagattcggaatactttagtcatttgcatcctccaattttgatggaatatatgtaatctatgatttcgttcttttaattcttcgaagttcatctagggtttgcttttgcaatttggtatcaatcagatcgattaacctgcatctatggcccgagcacgcaatctaattgttgctgcgggtttagttgctttcgctgcagcaggcatggcatttcccttctacatggcttcatcaaagaaacctgttattgacccaacaaagccactttcaccacaagcaacttttcgagggccttacattaacacaggctcgcgtgatgttggtcctgatgttggtccccagaagaaatgaagcaagttcagttatttgttcaagctcatatatatatatgctcattgtctgagattaaaatttttatacctcagtttggtgtatcgtgactttgaaggaaactatggatgggaattcttttctgtaagaggtgttttacaatctgtatgtatggtttatgttaattttagcagtttgaataaaaaaaaaagatgaatggtgtgttatttgtcatgtgacttgtattgcctgtgttgtcttctgaccatgctacaaca

SEQ ID NO: 129575 - DNA, 802 bp, Glycine max
  Clone ID: PAT_MRT3847_88010C.1
cccacgcgtccgcccacgcgtccggaaatcggtggtcacgcgattggccagttctccaaagggcaagaatagacgttagacggtgagggagggaaggaggcagcgccactgcacagcaacgcgaacccaagtgcccactccaattcaaattcaatcaattcagaaccctaactagggttccatccattggttatggcggaggatattccttcttcttctcctccaatagcagcatcagatactgctcctttgggttcgagtgtgatctccttagtgaatcgtcttcaggacatattcgcccgcgtcggctcccaatccaccatcgacctcccccaagtcgccgtcgtcggaagccagagcagcggcaagtccagcgtccttgaagcactcgttggccgcgactttctcccccgcggcaacgaaatctgtacgcgccgccccctcgtcctccagctcgtccagaccaaggcccctgaagacgacgagtacggcgagttcctccacttccccggccgcaaattccacgatttctccgagattcgcagggaaattcagattgaaactgatagggaagcaggagggaacaaaggtgtctctgacaagcagattcgactcaagattttttcaccaaatgttcttgatatcacacttgttgatctcccaggcattacgaaggttcccgttggtgaccagccttctgatattgaagctcgaatcagaacaatgatcatgtcgtatatcaaaactcccacctgtctcattttacctgtcacaccggcaaattcagatttggctaattctg

SEQ ID NO: 129576 - DNA, 838 bp, Glycine max
  Clone ID: PAT_MRT3847_88011C.1
ggaggaggtaagggttgtgtccattggtatttcgaactaaatgacattagacagtttgaaactggagggcaagatctatatatccggatgcctgctttggagtcagtcaaccaagaagagcaacatggacacaccacaagcgtgaagataaaaattgcaaccccaattgctgcaattagtgggatacttttattttgcatttttgttatgtacagagttcgaaggagcagtgctgataagtcaaagacaaaagataatttaaaaaaacagctagaagatctggatctacgattatttgatctgctaacaatcactactgccacaaacaatttctcgttgaataaatagaaagcatctgctcaaatgaatgcaattacgcagggaaaattagcagatggcagagatgttgcagtcaagagactttcaagcagttctggacaaggaataactgagtttatgacagaagttaaactaattgcgaagcttcaacatcgaaatctggtaaagcttcttggctgttgcattagaggacaagaaaaaatactagtatatgaatacatggttaatggcagccttgactcctttgtttttgaccaaataaaaggtaaatttctggactggcctcaacggctcgacataatatttggaatagctagggggcttttgtaccttcatcaagattcccgattaaggattattcatagagatctcaaggcaagtaacattttactcgatgaaaagttaaatccaaaaatatcagattttggaatggctagagcttttggaggagaccaaactgaaggaaacacaaatagagtcgtggtacttacggtacatg

SEQ ID NO: 129577 - DNA, 293 bp, Glycine max
  Clone ID: PAT_MRT3847_88012C.1
aattcgagcgggcgcttttttttttgtttttttttttttttttttaccatttttttcgacctgctaattgccaataattgggattaccaaccaaataatgaaattttttaaaaagaaagaagaaaatcaaaagttcctcattgctattttatttaccaggtcttaccggggaaattaaattaaaaactccgcaaagacccctaccctttgaaaaagggggtaccccgtttaactgaacaattccccaaccttgcaatttgctttgggcaccgggaaagaaaatttttttttgg

SEQ ID NO: 129578 - DNA, 106 bp, Glycine max
  Clone ID: PAT_MRT3847_88013C.1
ggagatggcttcttggcttcgccaaaggcaagatgataacctgatcaattagatactatcattcatatagattctccttttaagtaaattgattgaatggtattac

SEQ ID NO: 129579 - DNA, 196 bp, Glycine max
  Clone ID: PAT_MRT3847_88014C.1
taaactctcttaaaacaaaattcttttcaaaccactttccccacactctgtagggtgtcattttttttttggaacaacccccaaaaaagagttatttgaccccttttcagtgtagtgcgctgaccactgaaaacagggggctgggttttgaataaggcacattttggcctgtgtttatgtcaccttaattattttt

SEQ ID NO: 129580 - DNA, 410 bp, Glycine max
  Clone ID: PAT_MRT3847_88015C.1
atttccttttttgctttcttattttttttgttttatctgttcgttcctttttttactgggggaatgaagccaactaaaacttctgcaccatgttaattgtcaaaatttttaagaggatcaatgccttgtgcaattatcagttagccaaaactattacggtgagctaagccattgacatacggtgtaacctgttagacttgaacaatccatgtgattcttgatcaagcttcccccctggttgtccccccattttgtgccaacccatgtgctacagaaaccccgggggacgttgtctctttcctatattaggggctttccggaaccactcctggaacaccttttgaccatgtttatgggtccccaatgatcgtgaacccccgactcaaagtgcccattacaccttcctttct

SEQ ID NO: 129581 - DNA, 351 bp, Glycine max
  Clone ID: PAT_MRT3847_88016C.1
ctccatttcacactcctccactcacaaacccatcaccggggctgtccaccatttccctttctttccttcttcttcccatggagatccaacaacaactggtgaagttcaagtaccacatcggagtggcactcctcgtgtccctctcggtcttctccgggctccacttcgctccgaggttcctcaacatcctcgcctatttctggccactggttctctccactgcgctttttctcgccctcgttctcttcttcgccaagacgcaaacttcgctcaactccgacgctttccttcccaaacccgccgaggagctcctcgacttcgtcgccggccaccaccacgacccttctctcg

SEQ ID NO: 129582 - DNA, 1075 bp, Glycine max
  Clone ID: PAT_MRT3847_88017C.1
aataaaaagatttaaaattaattgcagtaaggtcttaaagagggaagtgttggtggttgataatacacaaacaccagtactagtatgttttatatgaccatatcaggttaaaaaagaaagaagatgctaagatattgtgcttctcaggtaagaaacctagtcgtagcgaatccattgagcagtgaagacgtgcagtaatcgatgacgtgtcgtcaaaagaaagtgataggatagcatgggaaaacaacccactggcctcaacttcaccaacgacgccgacgtggagcagagcagccaccacaatactcgtaagtgagtgcgcgtaaaaggagaaaataaaaaacacagaagcacacaaccacagtcaacctttgtatctttctttgcattacccaattgcacagtcttctctctctctctctgctctgtttttgtttgtagaactactctaaaactaaaaccctattcctctgtttttgttattcccacgatgatgcctccttctcagccacctcattgggccccatctcccacaccaatcctcagcaagtctttcctacccccgacgtcaaactcgccggcggttgacttcactccgcccttaatagcaatggtcgtcgtcgtcgccgccgcgtttcttgtcgtcacctactcccgcctcatcgcgcgccacctcagaccacccgtccaccgcctcctccgccgcttccgacgccgccgcttcctcccctcctccgtcggcgacctcgagtccctcccctacgattctcccttcgacggaccgcacgtgttctccccctacggtttggacgaaacggttattaaaacaatcccgttctcgctttatacagcgaaatacgacgcgcgttttgatgagtctcgctacgactgcgccgtttgcttgctcgaattcgaagacgaggattacgtaagaacgcttcccgtttgttcacacacgttccacgtggactgcatcgacgcgtggcttcgctcgcacgctaactgtcctctctgccgcgctggagttctctgcaccgattcacctttcactccgatgatggccgctctcgagccg

SEQ ID NO: 129583 - DNA, 299 bp, Glycine max
  Clone ID: PAT_MRT3847_88018C.1
tggggatgaggcttagatagaaacaatacatcttaactatatgtggatgctttgccaagtgattctgccatcatactggcaatacagtgagatgtagactgaatggttaccatggggttgacacccactgcactagggggaacactcccatcacacacatactagccttctgcttgcgaagactcaccattctcattgggtgcaccttcttcttcagaggcacccattctacatcttgacatctgatgtgcagtggttaacactgtacacactttattccttgaccttggacccccaac

SEQ ID NO: 129584 - DNA, 330 bp, Glycine max
  Clone ID: PAT_MRT3847_88019C.1
cctttataaataatttaatatactatgatgagagctcggggaaggacactgaaaaagggacttgtgctgtggatttatttattgtagatgaggctttgcttattggaaaaagcccaacactttccccgctcacttttacctatttccgcttaccttttagacccttcctattaccaaaaaagcccctctaattgaaaacaaaggacccttgcttaccttaaacccctacaattttttattagggtggacctccacaaagaaggaatcttttgggggattttaaagcttctcaacagattggggaaaaccaaggaaagcaagctcctgcaa

SEQ ID NO: 129585 - DNA, 364 bp, Glycine max
  Clone ID: PAT_MRT3847_8801C.1
atacaaatctgtacactataattctaggaacaagattgaactgctcctcaaatccaacccaccttacaagaaggttccagtgtatattcacaatgagaagcccataggaaagtctattgtgattgatggatacattgatgagacatggaacaacatccccatcttgccttctgatccataccaaatagcctcggctcagacatggttcaaattcatagatgataccgtgatcggtgctgtatggaaatccgcttctacaggtgatgagaactagctggctaagaatgactaggaatcgatagctgctctgcacatgcttgagaatgagatagaggacaagaaggtatctgcaggagaggacatt

SEQ ID NO: 129586 - DNA, 501 bp, Glycine max
  Clone ID: PAT_MRT3847_88020C.1
ttcctgtcatcactgtatgacgtcctccttctttgggggggggggggggtagaatgggaagacaaactaagaagtagccatgcttacaagtaaatggatagttggtgggccaagcatggttggattgggtggtaacagggggagcgtatgaggtagggttttaaggaggataaaggttgctatagaataaagtaagtaagtaaggtgtaagaggaataaaggaaggaggggagaaagaaagtaataagtggtaagaaggaaaagggactggaaggtaatggggcaggtgtgaggggcggagggtggcaagggccgtgtgatcggggagggtagcaagggaagtaggttatgagggggaaggcgcgaagggcctcgtaggagtgagtgcgaaaggtaagagggccagggcatgaatgaacgaaaaagcacaggaaagaaggatcgtgaaaaagagcggaggtggaatgagcgggccgaaaaaaagaatgatgagtggaggga

SEQ ID NO: 129587 - DNA, 167 bp, Glycine max
  Clone ID: PAT_MRT3847_88021C.1
ctgcgatagaagttgacgtctcacccttgtctctccaactccaaactcaaaacatggtgattcatggctgcctgcgtctccactgtctatgctgactacagaactcttttgaacctgcacgggtctcgtccttgcagttcaactaccatgtcattcttagttgggag

SEQ ID NO: 129588 - DNA, 374 bp, Glycine max
  Clone ID: PAT_MRT3847_88022C.1
ggaaggcagtaaaatgggctggctgtaaggcccaatttgaatagaaggaacagtcgcggagaggttgcagtcggcgacgaaggaagcggggttaactctccggaccagaaggaacaagaaagatcatctttaatgatttgttactagtgagaagacctcaaagctcttataccagacatttgcgagttatgaacaatattttgtctttgggaatatgcatggattctcccctgttgatggttttgtggagataagcaattgcttggcagaagtgattaaatatgtgggtaatgaatcgtctactggtctcttctttatccaacatcacacccaaaacgcagtccccaatgtcatcaaacttaagaacaacatta

SEQ ID NO: 129589 - DNA, 225 bp, Glycine max
  Clone ID: PAT_MRT3847_88023C.1
acaaataatatattattatttagggatggggaaaaactaagaagcatcaaccatttaacccaataactaccagttcatactaacattaacagaacaccaaaacaaaactggggagcctacactacttgaaatcttacaaaaaaaataataaatttattgagtttaagcaaaacttgccaccctacccatgattagcaaaatgggtctttttccctgggccctccg

SEQ ID NO: 129590 - DNA, 457 bp, Glycine max
  Clone ID: PAT_MRT3847_88024C.1
aattcggctcgaggtcgcggagaggttgcagtcggcgacgaaggaagcggggttaactctccggaccagaaggtgagggatgatgtgttcttcctcttctgcttcgtgatccgatcctgttttgaatgtggaacaagaaagatcatctttaatgatttgttactagtgagaagacctcaaagctcttataccagacatttgcgagttatgaacaatattttgtctttgggaatatgcatggattctcccctgttgatggttttgtggagataagcaattgcttggcagaagtgattaaatatgtgggtaatgaatcgtctactggtctcttctttatccaacatcacacccaaaacgcagtccccaatgtcatcaaacttaagaacaacattattgacaagtctcatgaaacaactttgcacaccgaagatttggaggattccgtctcaatggtgag

SEQ ID NO: 129591 - DNA, 309 bp, Glycine max
  Clone ID: PAT_MRT3847_88025C.1
acggcacatcaagtcacatggttgcaatgttcatacattcatctgttgccacatatactgcggcgatgcctcctcaagagcgagaattcaatagtgcaatcagacacacatggctttcaaaagagacccaaaatgtctttataaaaggcataccattattcaccgaatttgcaacctgttaaaacccaatccatttcaatgcccttgaacgaccaattagagatttccatgaggttttaaaaccgttaaaccatgaccatgacaaatttaaggcaaacatcaaaactgttgttcttaaaaaggggattc

SEQ ID NO: 129592 - DNA, 441 bp, Glycine max
  unsure (1)..(441): unsure at all n locations
  Clone ID: PAT_MRT3847_88026C.1
ccctaaaacggcgcccccctttttcctttttttctaagtaagcncntgccttcaaaagaaaacaaaccgcaatantncccagcaccaaaagcaaggcaacaataaaaccaaagccaaagagaccgacaacccacaaaaagtcctggaccataaaaaccacagggcccagacccaccaaccaaacccacccagaaactgaaaaaaaaacaacgccgaaaaacccacccccccgtggctaaacagaaccacaaacatggccccagaaacacggtgacatttggagagcaaacaaggcagcaaatccgcaccacgaacaaacaggggacgccccaaatggcataaagccccctcgttcccaccaactacccaggaaaaaaccgggaaaacaatcggacaggggggaaaacagcacacaacccccccccaacacacatccccacc

SEQ ID NO: 129593 - DNA, 308 bp, Glycine max
  Clone ID: PAT_MRT3847_88027C.1
tgtgtgaagactcttttatatcatttaatgagggtggggtatacatgtgggctgcagagaggcttttttttacacacaaaaaaaaagaatgtttttttttttctgaccaatttttgttaaaaagttttttttttttggggcccttttgtgtgcttggagggaaaagagggggggttttttcgcgtgggggacgaaacccgcggtttacttactacaggggttgctttttgggtggccttcttaccctggggggcgggaggggaagatccctgtttggggtgaccggggttttccaggaccggggattc

SEQ ID NO: 129594 - DNA, 842 bp, Glycine max
  unsure (1)..(842): unsure at all n locations
  Clone ID: PAT_MRT3847_88028C.1
atannngtgaaacaaagaaataaacatgcgactcctagaccatgaatgaatccatggtcacttattttcgtgccatgatagctaaacatcaaaccaagcacgtgacatttctcaatggaaaaaaggattaggccaaaagccattttgttgattaacatctccgacaataggcatagcctcattcccaccaccaccaccattattcatcaaattcatgaaccaattctgcttctgcatgagatccatgttgatatcaaacccctgatggccatgctgactcccttgtcccttgtcttcaaccttggcagcaacatcagtcaccgctggtgctgcaatctgcggttgactttgagcattcttagtcaacacctcaatccttctgttgatgtccttcaagttctggtcaatcaaccatgccaaatcattcaaatcaaccatgcttatattgtgcataatcttacctgcactaaggtactgaaacatgagctgagtcatctccttttccctattatccttcctttgtttcttcaactggtctttggccttcatgattctctgcctcagaaaactctcttggttcaccatcttcttgctttgctccaattcaggcattctcctgaacttagcaagcaccctttgaacccccatcggggatggccaaacctcgggttgaggatcatagggactgtaaacaattgcacatgcatcaatcccacaaagggtgctaagttcactaaccttcttcattagacccttcttcctcttcttgaatgttgccttcctagctgagtcgttggctatgaatgccaactttaccttctttctagtcatggtgctgatga

SEQ ID NO: 129595 - DNA, 407 bp, Glycine max
  unsure (1)..(407): unsure at all n locations
  Clone ID: PAT_MRT3847_88029C.1
ggacttattacaaataaattacattctcctctctagaagaatggaatggaaacccatagaagaattttgagtttgaaggacagttctggcaggagtgttgaacttacattgcaagagatggtgaatgctagattttttttccttttttttttgtttcccacatgtttccttctttgaaggcaagacaattacactaacagtatgtttggatagagaattttaactgaggaaagtaatttatcaaagaatttaaatttctgtaatctagaattcattgtttggatgttttttttttgaataatttaaaattttttgaattttaaaacagaattttaaacaactaanaatctagaatttcaatttctttctaaaatgtgagaaaatgaagttctcttcttacagttttt

SEQ ID NO: 129596 - DNA, 402 bp, Glycine max
  Clone ID: PAT_MRT3847_8802C.1
ctcgagccggctcgagcttcatcgaacgcgctctgaaaggactctaggatttgcgtgttgcacatcttcagctttgtgctgtcttcatcgcgcagtggttctcatccagtcgtaaagaaagccagcaaccctcgaccgcaaggtagctagctatctagcacgacctccgtacctccatagcagcgaaacatggcgggctacgatccatacgggacatctgccagtggctcatcgtacgggatggctccagatctccagttctacagcggagccacgggcgcgacttcaggaactgggatgcacccctcgacgacaacgggaattgggaagcatgcccaacctgggtgggacctcgactgcttaaggcagggggaacttctatgcagatgcgacgggaagcat

SEQ ID NO: 129597 - DNA, 142 bp, Glycine max
  unsure (1)..(142): unsure at all n locations
  Clone ID: PAT_MRT3847_88030C.1
actnctcgaggtcatntttgantttacagatcaagaaagcangntcatgttccattgtgcactgacgtacnattttgacagtnctagnacnctgntcntgntagtggttgcgaagttttgagagnncatgtcatgagtggga

SEQ ID NO: 129598 - DNA, 343 bp, Glycine max
  unsure (1)..(343): unsure at all n locations
  Clone ID: PAT_MRT3847_88031C.1
tcgttccacgcgtccggcgtcgccttcttcgctgcaactatctaccttacctctttttgcgaatctgaatcgaaatggggtcngatactgagagcggcgcttttcaggccgttatcaatcatgtcctcagtctaataatcaacaccttctacatgcaacaagtgagatctaacttcatgagctcatcagcaatgcactctgacactttggacatgaaccgatctgagagtcttacagacaacagctagcttgatgctcagtcaatagatgacattcaaattattcttgaacagaccaacatcacattgattatcatccacagaagtatcggcatctctaaagc

SEQ ID NO: 129599 - DNA, 255 bp, Glycine max
  unsure (1)..(255): unsure at all n locations
  Clone ID: PAT_MRT3847_88034C.1
anttnaaacaaattttnagtcagggtttgcactcacttcagagcaccntaagctatctanntgataccatctncccanaagccggttgtganatacaattatncaaaagaagctaagnnattttatgctcgccannatgatganggaactgtagctgcgtttganttggntgtnccaaagnttggaacaataatatctggtagcnaaaacgaggaacgtcttaacatnataagctccaggattgatnagttangt

SEQ ID NO: 129600 - DNA, 199 bp, Glycine max
  unsure (1)..(199): unsure at all n locations
  Clone ID: PAT_MRT3847_88035C.1
atcggtcatttccaacaacaccacaangggaagaagacttgcgttgagnnaccggcaganaaagaacaaaccgnacccgaaancccgnnncggccgcggcgngccggagccgaagaaccgaaacnacgacgagggaaagaagaagaaaggcgaggacgagacccccgacagcgagcacccggacacgagggagaaggag

SEQ ID NO: 129601 - DNA, 583 bp, Glycine max
  Clone ID: PAT_MRT3847_88036C.1
ataagaacagttgtagtaatttatttagcgtagcgtaggcccaatcatatagtactactattactatatcacgatcgcgataacaaacaacaaattgatacatgaaacggaccgatgagttaactaaggaaggtacacactggtctaactgcaaatatacatatatttttccaagatatttgagtttgcatgtaatggtgagctagtagcaaggtttgagtggcttcccgcagagacaatcgttgtagacaaaggatgatcaaaaggagagacagagatggttgtgactcaaatccaagtgcccaatataggaagcagaggatatggacttaggtatggccccttttaggttattatacgacaaatccagagcagtgaaataagacctcacgccgaacgcgtccggtatgtttccctccaaggcgttccggctcaggtttaagtcactgattccggaactaaacagactcaccggaatgggcccagagagtttattcatgtccaagtttagtgtcgataaaaccgccattttacccagcgactccggaatgggcccagaaatctggttacgagacagatccag

SEQ ID NO: 129602 - DNA, 463 bp, Glycine max
  Clone ID: PAT_MRT3847_88037C.1
cataggggaagtgctgtgtcacatttatcactctggtctcgtacatcgagatctctatttagatctcagaaaaacagtgttggtttcatctcattcactcttattattattacggtttggctgattcagtagtgtaaagagaaatgcggagaacgaaaaggaatcccaattgctctggggctcttgagcgatgctcctctgattcattgcttcttcctcttcctctcacctcgttggtgcttccgatgacacctacaacgcgatcttctaccactcattcgacgaggattttcacggacggcggattgcgtccgacagggaggattactaccgagtctggtaccttgctaacagcgatgagcctgatgattatggacttcttgttagcgaacatgcctcgccgtatggtattgccaaaaatcttgacgagcctgtcagtcttagggcacgaacatgtgtactt

SEQ ID NO: 129603 - DNA, 575 bp, Glycine max
  Clone ID: PAT_MRT3847_88038C.1
gtcgctgggtaaaatggcggttttatcgacactaaacttggacatgaataaactctctgggcccattccggtgagtctgtttagttccggaatcagtgacttaaacctgagccggaacgccttggagggaaacataccggacgcgttcggcgtgaggtcttatttcactgctctggatttgtcgtataataacctaaaaggggccatacctaagtccatatcctctgcttcctatattgggcacttggatttgagtcataaccatctctgtggcaagattccccttggctctccttttgatcatctcgaagcctcctcctttgtctacaacgattgtctctgcgggaagcccctcaaaccttgctactagctcaccattacatgcaaactcaaatatcttggaaaaatatatgtatatttgcagttagaccagtgtgtaccatccttagttaactcatcggtccgtttcatgtatcaatttgttgtttgttatcgcgatcgtgatatagtaaatgtagtactatatgattgggcctacgctacgctaaataaataaaaacaactgttcttataaa

SEQ ID NO: 129604 - DNA, 555 bp, Glycine max
  Clone ID: PAT_MRT3847_88039C.1
attccttctcttgttttctcttgaattgattcaacatcaattgctaaaaaacaatcggatggtgctcagaagccattcttttcattccatagcaacggcggcacaaaaaaaggcttcctagacttcattcggctctaaacgtacctttgacaatggaaagatacaagttcgtgccgctccctaacttggactaatttccaacaggaggcctccgggccaaaaagactcgcctgctatgaagaagggtggagcttcaattaattcctgccttcgtcactttttggaacttcaacctttagatgaactgctagaacttggccactctggtaacttacataggctgtcgccttggatctgtcacatgcagcccctgggcgattctgggtgttattaatatggatttggtgcccatccatctgcatgttcgagcattcctgagggtactagccactctgaagctggttttttaccctgaaggccaggatgaaccctgctttgtccaccaccttacacttactttgaaggcatgaggtgcaattgtcagctttgtgtttc

SEQ ID NO: 129605 - DNA, 2105 bp, Glycine max
  Clone ID: PAT_MRT3847_88040C.1
ccagcactaaagtcggcggctcgagaatttagtttggatctggtcctttctccaccatgtgcatgcttcaactctaatctctatctgtcacaccatttcccttctacccacaaacttatccctctccccccatgttcatgttggttccttcccttattcttcttcatatttaaaaacacaaacaagacaaaaataattgaccaacaagcacagtcctatcactatgtctccaagatcacttaaatagataggaactctgttaggggcacactcgtcactctcccacaatacttccaacaacgacattactatataaaatggcagttttataatcccatactccactatatgtatccacacacccctcccaccgattcattaacttcacacacagacacggtgtttccaccacaccatagcatatagtactagtagattaaacgccaaagaaataaattactcactttcacgtaaaccataacgtgcttccaccgcaaccaaccacaatgggtgccgttaggtccataacggtgttgctactagtgttatttatggccatgagctccggcgtgcgctcgtgtccgccgtcggacagggcggcgctgctggcattcaaggcggcgctccacgaaccctacctgggaatcttcaactcgtggaccggcgccgactgctgccacaagtggtacggcgtgagctgcgaccaggagacccgccgcgtcgccgacatcaacctccgcggcgagtcggaggagccgatcttcgagcgcgcccaccgcaccggctacatgaccggctacatctcgccggcgatctgcaagctcgcgcgcctctccagcatcaccatcgccgactggaagggaatctccggcgagatcccgcgctgcatcacgaccctcccgttcctccgcatcgtcgacctcatcggaaaccgcctctccggctccattcccgccgacatcggcagactccatcggctcacggtgctcaacgtcgccgacaatctcatctccggaacaatcccaacctcgctggcgaacctcagcagtctcatgcacttggatctccgaaacaacctcttctccgggcccattccaagaaacttcggttctctcagcatgctgagccgggccttgctcagcggaaacaggctaagtggggccatcccgagctcggtttctcagatttaccgtctggcggatctggatctgtctcgtaaccagatttctgggcccattccggagtcgctgggtaaaatggcggttttatcgacactaaacttggacatgaataaactctctgggcccattccggtgagtctgtttagttccggaatcagtgacttaaacctgagccggaacgccttggagggaaacataccggacgcgttcggcgtgaggtcttatttcactgctctggatttgtcgtataataacctaaaaggggccatacctaagtccatatcctctgcttcctatattgggcacttggatttgagtcacaaccatctctgtggcaagattccccttggctctccttttgatcatctcgaagcctcctcctttgtctacaacgattgtctctgcgggaagccactcaaaccttgctactagctctctaattcgctctacattactaccattacatgcaaactcaaatatcttgaaaaatatatgtatatttgcagttagaccagtgtgtaccttccttagttaactcatcggtccgtttcatgtatcaatttgttgtttgttatcgcgatcgtgatatagtaatagtagtactatatgattgggcctacgctacgctaaataaattactacaactgttcttatatttaacgacactaaacttggatgtgaagaaacattttgggtcaattgctgtgagcatggggagttacggggtccacggcttaatacctgatccggaacgccctgtatggaaacataacagactcgttctgcgtgaggtcttatatcactgctctggatttgtcgtataattacctaaaaggggccatacctaagtccatatcctctgcttcctatatagagacactggatgtgagtcataaccatctgtgtggcaagagtccccttggc

SEQ ID NO: 129606 - DNA, 200 bp, Glycine max
  Clone ID: PAT_MRT3847_88041C.1
ctggcttattcaacgcaatagtctgttagaaatgaaaatattccgtgtcagtaaaacagctagcatctcaacaatgtatcagtgaaatcagtactgtaaagtgtacattattttgtgtttatataatatatttacattttaataaatgaatttgattttgacttcaaaaaaaaaaaaaaaaaaaaaaaaaaaaaaaaaaa

SEQ ID NO: 129607 - DNA, 479 bp, Glycine max
  Clone ID: PAT_MRT3847_88042C.1
ttttttttttttttttttttttttttttttttttttttttttttttttttttttttttttaaaaaaacggccccttattttttggcttggaattccaaagattttcccaattcaaaccccgggggggaaaaaaaaaatttttttgggaaaaaaattccctttttaattccaaactttccttagaaaccctttggaaaaggggccctttaatcgggcccgggcccccccaagggccctttgggggacttgtccgccccccccaaaaatccccccccatatccaagggtttaatgggctttaggggggaaaaaaaaaaaaattaagattttttgtccacctgggaaaaggtaaaggggcctttttttttcggggtccctggggcccccaccccaaaaatttaaaattttggggggcaaaaaaaaattttttttggccgggaatttccccccctggatcccaggggggggggttagggcctt

SEQ ID NO: 129608 - DNA, 202 bp, Glycine max
  Clone ID: PAT_MRT3847_88043C.1
aaagaggaacatggtggatgagccagagcctaaaaaaagaatgaataaaggtgacttaacagaaatggattctccagtataacctggaaaaaagcccaagttcgttgtacatgcggcaggggatgtggggatatctggtgatggttaccgatggcgcaagtatgggcagaaagtggtgaagggaaatccacatactagggag

SEQ ID NO: 129609 - DNA, 510 bp, Glycine max
  Clone ID: PAT_MRT3847_88044C.1
cgaccgacgcgtgcgcggacgcgtccgcccacgcgtccggttgcattggccaaatccattggccagcgtttcagaggcatccaccacagcccgtgtaagcagttgtgtaataacaaccgttgcgaaggccaggtccaaagtgctgggcccgtggggtctctcctcaagtcccgttcggttattcggttccgcgggcctgacacactcaaattccttcagggcttgttgaccaacgatgtacgcaatttcggtgaagccgttggtgacagaactgaaaacttgcccacgcccaacgtgcctgctacgtcggttcctcctatctatgctgctctattgacccctcaagggagattcctctacgacctctttctctataagccttccacgtgccacaccaagctcgatcacaccggcactggccctgattccaaaccacacgaaccctttcatatgtttgctgacgtcgatgcttctgtgttggatgaattgttgcaaaccctcaacaaatac

SEQ ID NO: 129610 - DNA, 345 bp, Glycine max
  Clone ID: PAT_MRT3847_88045C.1
cccacgcgtccgcccacgcgtccgaccacgcgtccgcattcatagaaataccagcttgagaaccaccagcggtggagacaatgatgctgatggacagactcgtgagcatgctattcttgcttttaccctcgtggtgaagcagatgatctgctgctgtatcaagatggatgccactaccggcaagtactctaaagctacgtatgatgaaatcgcgaacgaagtatgttactacttgaagatggtgggatacaacctaaacaagatggcatttgtgccacactgtggttactggggtgacaacatgattgagaggttcaccaaccttgactggtacaagggaccaac

SEQ ID NO: 129611 - DNA, 493 bp, Glycine max
  Clone ID: PAT_MRT3847_88046C.1
accagaatttttacaacttgtaaaccacagtggacctttgtctcgtcaactatgaattgaatcagaatcccacaacaaacccaaacctagatcctaattgaagctccatatctagttctagaatcatttacatgaaaaaactcctcgggttgacttgtgtttcgattacgcacaatgcaattcttgtggttctatggaagcttgattccaatgttgaggcaacgtagaaaggtcacaaagatgtgggatacacagagagaagagtcaaaaccttgtctttttcacattacctagagattaaagagacctgttgtcgttctttgtgttaaccaatgttcctttctccttctcactctcccattcaaacacccctcttcatgtatacccctcccttcaaaaccgaatccaaagcggccctgggacagagatggaagagaagtagtattttcgttcctatttataagattcatttatcaaatttatcaacattaag

SEQ ID NO: 129612 - DNA, 207 bp, Glycine max
  Clone ID: PAT_MRT3847_88047C.1
atgaaacttattagttcacctcaaccagaatgacctacttatataattatgattcccaggtcactaggtgataggtacttagagtgataatttgagtggacaccactcgaatttctgactgactgactttctaaaaatgccgttcttatattaccattcatacacgatccatcccattgaatcgatttttcataacccgaatgcttt

SEQ ID NO: 129613 - DNA, 505 bp, Glycine max
  Clone ID: PAT_MRT3847_88048C.1
cctcaattaaaaaataaatatattttaagaaagagcgcgtgtatgtactcctttgtttagtaaccgaccgcgagagagagagagagagaggagtctatattcgcgcctcgctctctttatttctccgccaacgacaccaccgcatctttctctccgttctgcattttccattctcttccgatgccgctactctccaattcctcgccctgctgcaccgccgccgcagtggttaactcctcggaccggaagcccggattcgtctctccttcatggaggaactgcaaggtcacatctccaattcttcgcctctctcagaatgacaaattcaatgtgtctcggttagctcttagccactctaggcggaccatatcaatggcattggtgggagaaactgttggagttggacagaaggggcaggtggccagctcctctggcatcttggcatatgatttgattcagggggcacttgtaaggtggagttctgttatggacagatctttacctg

SEQ ID NO: 129614 - DNA, 322 bp, Glycine max
  Clone ID: PAT_MRT3847_88049C.1
gttaaaaaactttgtttcttttttaaatatttaaaaatgggggaaaaatgggattccccctaaaattcataaaacaaataaattggagctattaaaattttaacttcgggggcccaataacaaaccgaaaaatcattaacggtacttgcttcctcccagttttccctatagggaaaatgtttcccacttggggtaattaagttcacaaatgattcgggggagagatttttattatttaccaactccatttatttttttttccccaaaaaaaagtgtaaaatttgtgggccttatagggcgggctattataaaaaaatacccc

SEQ ID NO: 129615 - DNA, 411 bp, Glycine max
  Clone ID: PAT_MRT3847_8804C.1
tcgacgcgtgcggaagcgaaggagccatgatgggatattgaagccactctgtcagttatcagaacgcgtcgtgcaagtgaacgttaagtgaagaaggctgcgcataagctggctcgaaatttacattgaatggtggatatattggacggggctgtatgccatctacgatttacgggtagcctaccttgggagaaactaccaaaccaaaagttagcctttgcacgaatggacccgaggaagcttgacgcacagaggaacaggcaggacaaggcaaccgtaagaactatgctcgctacacagtgcgacaggagccgcatgaggagagctgtacaccagcagcggcttgaggccatcaagggagggtcggggcccctatagccactcggacaggtcagggacgacaagtttact

SEQ ID NO: 129616 - DNA, 268 bp, Glycine max
  Clone ID: PAT_MRT3847_88050C.1
agattttcggttttcggatgagctcagctgatgggagagtaggggaagggggatagtaattgagtgttgggtgcttagcttcctctcatttctttaagaagtgatgttttcagcttaggtaaattgtgcgaatttggtattggattttcggtattggttgcttcaattgtctactttctagttttaggtttcaacagtaattaggaaagggagtgtgaattattggcatactaatataaccttattgtagtctatggaaaatgaaggg

SEQ ID NO: 129617 - DNA, 509 bp, Glycine max
  Clone ID: PAT_MRT3847_88051C.1
gatcacaaacaatttatggagggcttggggtgaattgggggactcaagccacacaccagttgagggcagacacagtggttgagatgttgaaggacaatgggattcagaaggtgaagctgtttgatgcagatgagtctagcatgagtgctctatctggctctgggattgaagtcatggttgccattcccaataaccaacttgctgagatgaatgactatgatcgtgctttgcagtgggtcaagaagaatgtcactcggtacaacttcaggggtggagttaacatcaagtatgtagcagttgggaacgagccatttttaaaatcctacaatggttcattcttgaacatcaccctccctgcattacagaacattcaaaatgcactcaatgatgcaggcctaggggactccataaaggccacagtacccttaaatgctgatgtgtacgagtctccaccgaacagtcctgtgccctcagcaggaatatttaggcctgatataagtgaccttatg

SEQ ID NO: 129618 - DNA, 217 bp, Glycine max
  Clone ID: PAT_MRT3847_88052C.1
agatgaaagccactgagtgcgattcaataattgcgcttaacctcggggactgttatatgattcggtaccggctggaccaggtcctggatagagatgagatgctttcggcttaagaaaacttcgttaaccggggaaaccaaacgcaggatcggcggcagctattggcataggaagtacgtcgaggaggttctctactactaagaataatctcatccac

SEQ ID NO: 129619 - DNA, 696 bp, Glycine max
  unsure (1)..(696): unsure at all n locations
  Clone ID: PAT_MRT3847_88053C.1
cccnnnnctnnnnnnttttnnnttccntggctgcaggaattcggcacganngngngngngagagngngngagngagagagagagagagagagagagagagagagagagagagagagagagagagagagagagagagagagagagactcgncccgnattcgacacgatgtntgngtgagagtagcaaagatgtctcctctcggacaaaagggtcaaaagatannggggnctatggtggttatncagaagaatgtgttgtatctcaacagcatcnccagtgttggggggctcgntgcccanggtcttagtcttcatngncagnncagtcganacactttctnntggagacancaanctctccacccaggtgtattagttctcccacnnctgatngtggnanagcgaaatntnnnnangngnncatctttncgnggngntgntaacatcccccccccctgggcngctggancaacaantcataccnnttttctattntggggttgnaacanatttcttcccctcctccccccgcatccttttttttttttannttcctccaaanaanaatnnncttcncccccaaattnttnttnttcctnggngtncattcccanaccnnngcncncccncccctcctttttttnacnccctggtctnccccaccaaaacntcacancntcttccttttnttntgccc

SEQ ID NO: 129620 - DNA, 539 bp, Glycine max
  Clone ID: PAT_MRT3847_88054C.1
gatgatttaatatgccccaattagatctaacagctatgacatatgcaaagctcacaaccctccatgaccggcgagatctagcagtccaccggtactcttaataatcaatgactatggataggccgttgtcggcaatgacctttgcagttatcaacccctccacttgagaagtgatctgcagtgtttatgacgcacatcataaaaagatgtagacatacctgttgctgccgtccgtaaaaccttaaacggcccatggtgaaaggagacaccagagaacaggggaaagctgcttaacaagatcgccgatactgatctataagaatgccgatctgattgattgcgttgaggctcttgcatacggaaaagccttcacaatgggcaacaaacttggtgttcccacacgtggtggctgcctagagtactacggaagataagccgactacattgaaggcaacgtctgctacacatgggcccacattttcaaatacgtacgcaaggagcctattggagtcagcggttaaatcatcccatggaacttg

SEQ ID NO: 129621 - DNA, 1510 bp, Glycine max
  Clone ID: PAT_MRT3847_88055C.1
tcttcttcttcttcactattttttcagttatcgtgacctcctccctacccttttccgctccctcgctccctcttcatacattttacccgttactctctctctctccatcttcattctcttcttcttcttcactattttctcagttatcgtgaccttatcccaacccttttctgttgcgaaggtgcttctgggctgttgtcagatcaatccacaaccctcaattgttggtgttttggctcttcctgtatcatggatggtattcatgggggtgattctcggatacacataactgatggacagcatcctatacacgtgccatatgtgcaagaacacgagcatcatggactccaccatataagcaatgggaatgggatagatgatgatcataatgatggtggtgatactaactgtggtggaagtgagagtatggaaggtgaagtcccctccaaccatggaaatctccctgacaatcatgctgtaatgatggatcaagggggtgattctggggatcagcttacgttgtcttttcagggccaggtttatgtctttgactccgtgtcaccagaaaaggttcaagctgtactactgttactgggaggccgcgaaatacctccaactatgcctgccatgccagtatctcctaaccataataaccggggatatactggtactccgcaaaaattcagtgtccctcagagattagcttcattgattaggtttcgtgaaaagcggaaggaacgaaattatgacaaaaaaattcgctatactgttcgtaaagaagtagcattaaggatgcaaagaaataaaggtcagtttacatcttccaagtccaataatgatgaatctgcatcaaatgccacaaattgggggatggatgaaaactggacagcagacaatagtggatcccagcagcaagatattgtttgtaggcactgtggcatcagtgagaagagtacaccaatgatgcgacgcgggcctgaagggccaaggaccctctgcaatgcttgtggtcttatgtgggcaaataagggaatcctgagggacctatcaagggcggcacccttatctgggactatcaagaatgagaataaaagtttagaggccaaccagatagtccatagagttgcaggagaagctgatgattcatcatgatgacctttatattttggtgagaatggagagcgattccccgaaataatggtgatgggagagtttgcccctagataagaaattgcagaagggggggctttttctactaagtttttagtgaaaatgtttaaatgagcattctgtattttgttttgaatatatgaagaaagtcattattcccttgtgacagctagttctttttggggaattttatttattttgggtatgctgaacagcttcaagccttcgatgcacttcctgatgttgtattacgttgtatttaaaaaaaatggtctcttttataattttcgtgccctctttcccttcactttcatcctctatacatggatgttttgtgttt

SEQ ID NO: 129622 - DNA, 371 bp, Glycine max
  Clone ID: PAT_MRT3847_88056C.1
caaagggacaccggagtatgtgcggtcgtgttgtgaagcaagcttgaaacgccttgatgttgaatacattgatctctattatcagcacaggattgaccaaacagtacctatagaggaaacagtgggtgaacttaagaaacttgtggaagagggtaaagtgaagtatatagggttatctgaagcgagtccagatacaataagaagagcacatgcagttcatcccatcactgctttacaaatagagtggtccctatggactcgtgacattgaagaggagataattcctctctgcaggtcagttcaacttccccaaattcatagtaatgtacagctctcataactattttttcactaataaataaataatttga

SEQ ID NO: 129623 - DNA, 462 bp, Glycine max
  Clone ID: PAT_MRT3847_88057C.1
gtgacaccaaactcataattggtttactgctactctcctctcacgattcaattccaattagctttaatggactaacgtgactaaactaattgaaatacgtgagtaaaatttaaaaccatccagaagaacacgattggcttaaaaaactattggcttcatgaataaaataataactaagtacttaaatcaatcagattcaataacaattacgtgaagctgaaagaacaattattcgaaacgataattcaataacaattacttgaattaaattaatcaagtcttgctcacgcaattcatcaaaaatggtgttgctcaccatctattctttaattggacgaggcataagtaaattgaatcatgtaattggccagatgagatgagttgctgcacgtgagccaattttggggttttatgttacgagagtaatattacttttttttctttctaatttgtagctagaga

SEQ ID NO: 129624 - DNA, 260 bp, Glycine max
  Clone ID: PAT_MRT3847_88058C.1
aggggcagcaaaactcacgtttaattttgtgaagggatgcacttaatgaatggggctattgaactatccactctagggctgaattgttctggaccctttacaaatggtcgcaccttaaagaactgagccccctgcgcgcctgatctcagtactttgcacgagagcctgcactgcgtacctggcaaactcatgtgcaccgttgaatggacgaccaaaccaatggctcctaccaatggtgactgatccatgccaaaaggggg

SEQ ID NO: 129625 - DNA, 236 bp, Glycine max
  Clone ID: PAT_MRT3847_88059C.1
ctcaacaattcaactgcagggaactgtctggcaaatggaacttctgtaaatggtggtaaaggttattcttcaacactgaaaaggaagagatcacaagtggcaaatgctcatgaattattgaaaaggaaaaatcgacgccggcccttgactaaggttttggagagtacagccatggtgtcagttcctgtcatttgtaatcagcttcccagttcaagcagttctccactgtgtggggt

SEQ ID NO: 129626 - DNA, 327 bp, Glycine max
  Clone ID: PAT_MRT3847_8805C.1
aagaattggtgattaccatagccggtacagaagagaggcatgaagcaaatggctaatttccatctcagaacattagaaagcagcgtacttaactcgcgggtgctatcaaatccccttttgaccttcatgtgcttatgatctgctcctgttacaccgattcacttaccatgctagttacgatcctatctgcatccactcgttcaaccaagactgctggagacgctcgttcaacaggctatgatacagaagcatgcatcgacggttcctcgaatactatttgggtcttggattatgggtagaggacaataatcacgcgttggatgaata

SEQ ID NO: 129627 - DNA, 397 bp, Glycine max
  Clone ID: PAT_MRT3847_88060C.1
ggtattaattttattgttcattgatattgttttttattttgatggtttttgttttttatacaagttttataatgaaaaatgaaacaacaagagtaagaagaggaaaaagaagaaacagtaagcagacaaaacaacaaaggcatggcacaaacaaacacaggcgaataaccaaaacaaaaaaagaaggaaaaaaaaacacaaagaggcaacaacgaaaaccaaaaccacaacccttggggagaagccccacacagagaaaaaccaagcaatgacctcaaccaaggagaaaacaagaccaagggcaacaaggagagcacgaaagaggacacatcagagcacccgacgccaacagacacaaagaggctcagcacacacagagaggattgccaaggagccc

SEQ ID NO: 129628 - DNA, 958 bp, Glycine max
  Clone ID: PAT_MRT3847_88061C.1
gtggttgcgggatctatgtgatgcacatcaggaaatgcagtcatgggcagaagctgctcagtgtgctgttgctgttgctggtgttgtaatgcaggcccttgttgccagaaacgatggtgtttggagcaaagaccacgtttctgctttacggaagatttgtcctatggttagcaatgagattacgtctgaagcatctgctgcggaggttgagggatatggtgcttcaaaactgactgttgactcggctgtgaaatacttgcagcttgctaataagctccccacgcgtgctgagctttttcatttctgtgcaagcattctggaacttgtaatcccagtttacaaaagcaggagggcttatggacagttggctaaatgtcacacattacttactaatatctatgaatcaattcttgaacaggaatctagtccaattcctttcacaaatgcaacgtactacagggttggattttatggtgttagatttgggaaacttgataaaaaggagtatgtatatcgtgagcctcgtgatgtacgtctaggtgacataatggaaaaacttagtcacacatacgagtctagaatggatggtaatcacactttgcatattattccagattctagacaagtgaaggcagaggagttgcagcctggtgtctgttaccttcagattactgccgttgatccagtaatggaagatgaggatttaggaagtaggagagaaagaattttctctctctctactggaagcgtccgagcccgcgtatttgaccgattcttgtttgacaccccatttaccaaaaatggcaagactcaaggtggattggaagatcaatggaagagacgcactgttcttcggactgagggttcttttcctgcattagtaaataggttattggtaatcaaatctgagtcccttgagttctctcctgtagaaaatgcaatcggaatgattgaaaca

SEQ ID NO: 129629 - DNA, 291 bp, Glycine max
  Clone ID: PAT_MRT3847_88062C.1
ccactgctgtgtgtcttgtcaggatgctcacttgttcctactgagatgctggatattgattttgtaacagcacctggtgtttcacggctgtccgagtgagctaacgtggcggtgtggctgcctggacctcctctttcaggttaacgctgacagaatggaggctcaggctgtctgcaagaaaacagttggtttggctgtgcattttgacctcctcttccccactgccatcttcctcagagactttgtagctgcctcctagaagcacattctgagcacatttgagcactctgt

SEQ ID NO: 129630 - DNA, 543 bp, Glycine max
  unsure (1)..(543): unsure at all n locations
  Clone ID: PAT_MRT3847_88063C.1
gcttgtaatggtttccagtcattgacagcagagttatcacattacatccctgccattctctcggagctatgacaatggcacaagtgtttgcctcttattatttgcttcgnatgtgttcatattgtattcttcctctcattccctttccccctttgggtccccctatatcaatcccttgcaaagctgtagccgtgaatttgcatcatggttcgtatatttagaattatgcgaaccagttgaaaactcgaaccatcctgtttgtgtatcatgatgatgtttctagtttccccactttcccctttttggtttgtggcgcggggaatgtcatttgtgtaatattttatttgttttcaagttgttgagccatacagctattgtgaatggttactatgtagtgtacatgagaattttgagttctagggcattgtctatagtggagttgatataaaaaaaaaaaacgtacatgcatgaaaaaaaactattagtaattcattagggtaatgattgttagtataacttaatgttatttttctatgtaagaat

SEQ ID NO: 129631 - DNA, 448 bp, Glycine max
  Clone ID: PAT_MRT3847_88064C.1
ggctcgagaattagaggaattagatgataacctcaaataaatgcacaaagatataccagcccaagtggatgcctatgacacatcacatgtgaggttgaaccactatacttctaaatatcatgaagagggtgtcacaaagcagaggtcactgaacgataattagacgtcacatactggaggcattgtgagaaagcgctttgatatgattgatagtgtggctacgttgcgtgaacagaacatgactatgactcatgatgaagaagagctcggatgaatcctagatactatggatcacgtcattaccgatctgatggacgaaggcatacaactcaagggaatacgagaatactttagcttgatcacgactgaatggcatgagcttacttatgattcacaggtatgagcggccatattgggagctgcgcaatgagttgtagatgggccattg

SEQ ID NO: 129632 - DNA, 3137 bp, Glycine max
  Clone ID: PAT_MRT3847_88065C.1
cttcacataatgtggttgcttcatctttgtgatgcacatcaggaaatgcagtcatgggcagaagctgctcagtgtgctgttgctgttgctggtgttgtaatgcaggcccttgttgccagaaacgatggtgtttggagcaaagaccacgttgctgctttacggaagatttgtcctatggttagcaatgagattacgtctgaagcatctgctgcggaggttgagggatatggtgcttcaaaactgactgttgactcggctgtgaaatacttgcagctttgctaataagctcttctcgcaagctgagctttttcatttttgcgcaagcattttggaacttgtatccccagtttacaaaaacaagggggctttcgatctccttcggcttgcagttttccaaaatgaaaacatcaggcaaagggcagctgtcgggcttcaaatacttgtgaggagttcatttcattactttatgcagacagcaagattgagagtcatgttgattatcacattatcagagctaatgtctgatgtgcaagtgactcagatgagatctgatggaagcttagaagaaagtggtgaagcacggagacttaggaagtctgtagatgaaatgaaggatgaaactaaaaatgcttacttgttgaaggagtgtggtttacctgagaatgctcttgtgactgtaccagaaaaaatgacagaaaatagatggtcctggtctgaggtgaaatatctctctgacactcttcttttggcatttcttaccaatatctatgaatcaatttttgaacaggaatttagtccaattcctttcacaaatgcaacgagctacaatgttctatcttatgcagttagctttgggaatgttgttaaaaaggagtggttgcttcatctatgtgatgcacatctgtaaatgcagtcatgggcaaactctgtccagtgtactattgctgaatctatggtaataacactgtgcctagtattccagaaccatgacaattggaggaagaggcgtggttctctggtatcgaagaccttcacattgctgccgtttgtccattaatgtaagatgactgctgaggaagtaggagagaaagatgtttctctatctattctggaagcgtccgtgccctccttgtagactgctaataatctctccccccaattctaaccattttcatttctcaccacgcattctaaaacttgtaataccaatgtacaattgcaggagcgctggatgacacgcactgttcttcagactgagggttcttttccagcgttagtaaataggttattggtaatcaaatccgagtcccttgagttctctcctgtagaaaatgcaatcggaatgattgaaacacgaactgctgccttaagaaatgagcttgaagagcctcgaagttcagagggggatcaacttccaagactccagagtctgcaaagaatcctacaaggcagtgttgcagtacaagtgaatagtggagtcttgagtgtctgcacagccttcttgtccggggagcctgcgacgaggttacgatcacaggaactgcaacaacttatagctgcccttcttgagttcatggctgtttgtaaacgtgccatccgcgtacatttcagattgattggtgaggaagatcaggatttccatacccagcttgtaaatggtttccagtcattgacagcagagttatcacattacattcctgccattctctcggagctatgacaatggcacaagtgtttgcctcttattattttgcttcgatgtgttcatattgtattcttcctctcattccctttccccctttgggtccccctatttcaatcccttgcaaagatgtgtaattgaatttgcatcatggttcgtatatttagaattatgcgaaccagttgaaaactcgaaccatcctgtttgtgtatcatgatgatgtttctagtttccccactttcccctttttggtttgtggcgcggggaatgtcatttgtgtaatattttatttgttttcaagttgttgagccatacagctattgtgaatggttactatgtagtgtacattagaatttgtagtttttcaataaagtactgaaccggtcttgacaaaaactggtcaaataatcagagaaccagtcaaaacctggcaaaaccttggttcttcacgagccaatgaaaatttctttatttttttaaaaaaaaaaatgaaagatcaacctaaagtatttgtcattttgttttttggttctagatgtaaacttgttactgttaatgaatatttttgtgtatttttgaaactttatttattttttagttatgatattattattattattacttgtttggccagggttctgaacccataccatatctggttcaatgacctaaccggttttaaaaacattggttgataattctatttttggcctcccagatttgaatattttacttttggtctttcaattctgtcagcacacttctctttgtgcaggtgaatagtggagtcttgagtgtctgcactgccttcttgtccggggagcctgcgaccaggttacgatcacaggaactgcagcaacttatagctgcccttcttgagttcatggctgtttgtaaacgtgccatccgtgtacatttcagattgattggtgaggaagatcaggatttccacacacaacttgtaaatggtttccagtcactgacagcagagttatcacattacattcctgccattctctcagagctatgacaagtgtttgcctcttaatattttgcttcgatttgttcatattgtagtctcctcattccctttcaccctctttctatcgcttgcaaagatgtgtaattgaatttgcatcatggttcgtatacttagaattatgcgaaccaggtgattcaggaaaaacacgaatcgtcctgtttgtgtatcatgatgtttctagtttccccaaaatcccctttttagtttgtggtgcggggaatgtcatttgtgtaatattttaattgtttaagttgtttagccatacagctattgtgaatgattactatgtagtataccttagaattctgcattttagggcgtttgtgtagtggagtggattaagtgtaactgacagttaaataaatacatgaaaaactattagtaattcttggt

SEQ ID NO: 129633 - DNA, 279 bp, Glycine max
  Clone ID: PAT_MRT3847_88066C.1
aagctacttgcaaacttctggcacaggagcgggcaaattttcttgacagtttaaataaacctgaaaagcttgacccaatgcgtagcctgaacagaaaaagaatgttcgacacacaccaacgaggagatcatgtgcaccggttggaaatagtccacccacgaactggaccacaacggaaaagtgtgtgcgaacaggaacaccaaccatcactcgccgatatgaggccagcgagaacatggtgactgtgcaaacccaccaattgaaaaactcacccccata

SEQ ID NO: 129634 - DNA, 352 bp, Glycine max
  unsure (1)..(352): unsure at all n locations
  Clone ID: PAT_MRT3847_88067C.1
gcggagccacgcgtccgccacgcgttcgacgactactttatgactttataatgtcacgtctcctnataagaccactgacctgttctaatggcaaaaaacaacttaatttttctgttcctttaatacttcataaatattcatttgctataacactacaaaaagttacaactcctagaatactacatacaatacacctaatttcaaacaacactacactctttgtttaaacaccacaactaatccgaataatacaataaactctaccactttaaatatatccatacttacctacactctcattctactctataatttttttatacattcatataaattaaacttactttatacc

SEQ ID NO: 129635 - DNA, 1035 bp, Glycine max
  Clone ID: PAT_MRT3847_88068C.1
ggagagagagtagtacatcggaagactcagtgagtttactgtttctctgactttgatgcatgcaggttgaagagtggaagacggtgaaaactaaaaataataaaattaaataaaattcagagtaaatgaaaaaaagaagaatgtgaagagagtgatgtagtgagtagtgagtgtaaacaaggtttggtctttgctgctgatgttcatcactgcaaggtttccgcatttgggtttctctccgattgaaaaaacaaggaaatgatgatttcatccttttaagaggaatgtgacactaggataatgctgaagaagggaaaaatgtcatgagagtgatgtagtgagtagtgagtgtaaacaaggtttggtctttgctgctgatgttcatcactgcaaggtttccgcatttgggtttctctccgattgaaaaaactttttgaatttgatgcagcaaggaaatgatgatttcatccttttaagaggaatgtgacactaggataatgctgaagaagggaaaaggatcatatttggaagatttgtaatcctatggctgattcttcttccaatttctctttaccttgtgatgcattaagcctaagacaaaagagtttctcaattttccataccggtggttctaggttgggggttggtgctaaaggtttgccagattctgaatctgtttggagccctacatctcctctggattgcagactcttctcaaatcttagcaacccgtttagtgccaagtcttctaggccatcatttcaaactgggcataagaagcagtttgatggcagtaaagtaggccttggcatcataagttcccttgctaatgaaaccaaacttaacaatgacatccttgctaaatttaagaggaaaggcataatttttggaccacaggtgaaaactggcatccttaaattctcaaacaacaaccaggaatcccttgtgccttatttgaaatctaattccttgccaaaaaactatgtaatttcacttccttctgagaccacaattcccaaatctgaactggaaaac

SEQ ID NO: 129636 - DNA, 576 bp, Glycine max
  Clone ID: PAT_MRT3847_88069C.1
cccatgtaaaacatggcttcaccattattcgacacttatttttatatttttaaaaattcttaaattattaattgttttcaaattatccttttgcactaagaaaaatttcctctcaaatctcaactttaattttgtttaaaattacatcttcgtactaaaatttccttttgcattttaaatctcaaatatttacactctcaaattaattatagaaaaccattttagaaagtgtaatttttaagataatttttcaggaaaccatattaacaaataaacattctaagacgattttatgaaaaatcgtatttaaatcctgatgtttttttaacattatttaaataaaaagtcaaagattctaaaacagtttctataaaaatcggtgtagaaacctagattctaagatggtttaaaaactatcatagaaagtgttaaataatcatctttgaaagatttttttgtagtagtggttgatcaaacctatgcatgaattcaagcaaaaaagtaaaaaatgattggataaactgagaatagatcaagaattgaaaaatcacatactctgaaatctactccattcaa

SEQ ID NO: 129637 - DNA, 300 bp, Glycine max
  Clone ID: PAT_MRT3847_8806C.1
acgcgtacgcgtgcgaacttggatatcgtatcgaggagctatgcctatggtctgccaggaggaaacgcttgtggaagcggcgctccgagttctgaacaccgccgacccgctcagtgaggcgcgactgggcgactctggtggcttcgcggcggctctatggcgacttaccagaacggtaccaccctttcggctcccatctcacgctatctgatcgcccctcaagactatcctatgtctgtaccgttcttcgtgctcaccatcttgcaatcttcaatgttcggcgaaatgctgcgatgagac

SEQ ID NO: 129638 - DNA, 573 bp, Glycine max
  Clone ID: PAT_MRT3847_88070C.1
cccacgcgtccgcccacgcgtggctcgagggagaagagagaaagcaagctgaatggaggtgttgcagttgctggcttccgattttaccctccgccattccctttccaagcccaccgtctcccttcctcccactcactcactctccgtcgtcgtgttccggcggcggagatcaccctgcggcgggcggtggtgggctccgcgagcatgcgcggtggaggtgtcggagtcggagggagggaagatggtgatggagctggtgggagccttcaacgagttgacggagagaatgaacgtgctgtcgacgagctcttcgcgtcttctgtttaagtgcctcaaactctccatccccatcctgcagagctctcctctcgctcccgatggccgttcccctctctccaaagccttatccgtcgccttgctcctcgctgatctccaaatggatgccgaggtaatctctgctgggatattcagagcagtattggaggcgggtgagttgagcatacatgaaattcggaatcagatgggtctagccactgctcatttgctgcacgagagtttgcgggtgaataattt

SEQ ID NO: 129639 - DNA, 492 bp, Glycine max
  Clone ID: PAT_MRT3847_88071C.1
tcgacccacgcgtccgcagtgccccaatttggaaaatgttcatgcatcaggttgtcaggatatgttaataggggccatccaaagtcaggtccatgatgcttctgctgatatggaaaaccattcaccttctaaacgtctacctgatggttccaaaaggatccgggttccacatttactcagtgaagagtcccctgaacctgaaaaaaaacgaaggaggatcgagagacagctttgtaatgtacttctggactgaaatttgtattccctcttaacactgagtctaatgtatacatgtgcgatgtcgtaccttatttaaattccagatgcatttatgcatccctagttaccaaacaggtcatagcctttctagttaggctctcaaattggcaccctagaactgtcttcttattagaggtgttcatgttaaacatatttgttgtatgatatttggatgactgtctcattttttaataaaatttaatatttttttta

SEQ ID NO: 129640 - DNA, 495 bp, Glycine max
  unsure (1)..(495): unsure at all n locations
  Clone ID: PAT_MRT3847_88072C.1
gtgggtgttgcttttttgtattctttacttttttgttcttagccttatcacattctcttactttatctcacacactcttttcttctatcagcccccaacctgagttgagattctgagagcaacagggaaagctaggaaaaaaaacccgccccgtgggaagaaggggggaacacgccgggcgaggacactcttactttgggcaaaacaccaaaggggggctgagaaccatgctcaacaacaagccaccactgttgcctgaaccaaagcaaacggaaggcgcagtgttggcaacccgactcactccttgcctatgagtaaggtggctcacaccgaccaacgtttcacctatcggggaaacaatagggaaccaacccacgcacgccctttgaggagtgggggcgcccctgttgattgggaccagaaagattgaactgggccgaccaccaagaatgaggcctccaagaattatantcttgaaacaaatgcaaagaatat

SEQ ID NO: 129641 - DNA, 545 bp, Glycine max
  Clone ID: PAT_MRT3847_88073C.1
attggcaagcatgccccagccgcagtaccacacaacccggccccgacaatctacataaagagatgctacgcccgcaacactatttggaccacacatttcattggatgccccactatgatctgcctcgcatacataccgagcacacctgctacataaacaacacgggcatagcattatggtgaccctacacggaggagcactgcacctgcaccaaatgacacgacctacaacatcttatttcctacaaactgcgggttacccaaaatcaccttacagccactatcatggatgtcttcagttccaatggctggagggcactaaatgacctcacagggagaccatggaatatacgctcgaacacattaggagctctgagaacctcgtactgtccactccctacccagatctaacccaatgaattgcgaaggtgccataaaggtctggtgcaataaccaatgggctcatttgctcccttatgagacccgactagaggaaccccatggcccaaaagcttcctacacaactatgggcatgagaccccacca

SEQ ID NO: 129642 - DNA, 331 bp, Glycine max
  unsure (1)..(331): unsure at all n locations
  Clone ID: PAT_MRT3847_88074C.1
tgacccgcaagagacgggggaaggagngacagaacggggagacaaagcagggaggaggcaggggcgagaggncagaaggggagggagggacggacagaaaggccgggaaaaaacagcggacaaggacccaaaggggggtggtgatggaaccgaaactcaggaacttgatgtttgccactcagatacttctggaatgaatcatttttttttttttgaactcatgggagttgatcctggaactaaccttgtttgccatatccttggaaggaaggcgattttatggggacccaatttatgtatggacactggctatgagactaacgttgttgtg

SEQ ID NO: 129643 - DNA, 480 bp, Glycine max
  Clone ID: PAT_MRT3847_88075C.1
accaactccaggccactaacacagtattaatagccacctctaaactataattgtaccctctgctaatacataaaccctgctctaagatcgccagaccattgattaaaatgagtggagaaatccttctccaaatttctcagccatgtccacggtaagaaagctgcatcgtccacaagatatgggaggttcctgtgaaagtgttcaatgaaatgatggatatgaacgtgaaggggatgacaaatgtgttgcatagcggaaaagaagatggaggtgataatagtgaacacgtcttctggatggggaaggtgggtgcgatgctggtagctccatattgtgcatcaaagttggcgataaaagggctgagcaagtctggcaaaagaggtgttggaaggtatgccagtggtcgcactcaattggaacataatcaacaccaacatgctctcctcttgctttggtgcatctacttctctctatcaagca

SEQ ID NO: 129644 - DNA, 127 bp, Glycine max
  Clone ID: PAT_MRT3847_88076C.1
tgatcttagactttattgttgcctgctgccattgtaattgatatgtattaatgggcctttgagtattggatgctggtgtcgctaaacgtcgccttgtggtttgatcagtcgtataatccgaatcgac

SEQ ID NO: 129645 - DNA, 590 bp, Glycine max
  Clone ID: PAT_MRT3847_88077C.1
atttatattcggatgttgttggccggggaatagaccctgatgtttttacttacacttgtctaattcatggtttttgtggtttggggcagtggagagaagttactcggttgttgtgtgatatggttgatagaaacgtcaacctgaatgtttatacctacaatatattaattgatgcattatgtaaaaaaggaatgcttggaaaagctcatgatatgcgtaatttgatgattgaaagaggtcagcgaccagatttagttacttttaacactttgatgagtggatattgcttatacaatgatgtggttgaggcgagaaaattatttgatacatttgctgaatgtggtattacgcctgacgtctggagttataacatccttattattgggtattgcaaaaataataggattgatgaagcattgagcctcttcaataaaatgaattacaaaaagttggctcctaatattgtaacttacagttctcttattgatggtttgtgcaaatctgggagaatttcttatgcgtgggaactttttagtgcaattcatgatggtggtccgtcccctaatgttatcacttacaatatcatgtta

SEQ ID NO: 129646 - DNA, 635 bp, Glycine max
  unsure (1)..(635): unsure at all n locations
  Clone ID: PAT_MRT3847_88078C.1
gacgtcctgccgcgtcgtagctcgattcgctcgggaaaaaaaaatggctgatacaggtggaggagatgcagtgagaccagtggtaatatgtgataacaagtgtggctgcacacttccatgcactggtggttccacttgcaggtctcttaagttcatgatttcaacaaagtaacttgcttaaaatagttcctttttttttttttacatcgtactgatgttctgatattcgaatttatgatctcttacattttaatatactattctaattctcttccgttaggccgacctaatgttctccttgtttgctttattgctacccgaatctctctagtttctgggttcgatagatgcacaatttctttggttcgagtttttaatttcttctaaaatcaaatacttgtgttgttgaaaaattaccatattgagacttttatcaattttctgttaatttctgtaaacattattattacagagatataattcatggattagttttgaatgaagtgtccttcagaaattttcttttttctacatgttgagatntagttatcttcctctctaaaataagaggaaaattttaagaagaaccttttcttcgatttcntanaaagaaaatanaatgaatataggaaata

SEQ ID NO: 129647 - DNA, 198 bp, Glycine max
  unsure (1)..(198): unsure at all n locations
  Clone ID: PAT_MRT3847_88079C.1
ccaaaacccaaaanacatggatacctgctctaaattctcaatctaaacaacacctatggcaccacctgctcagacaaattcccgaacacaccaatatcattttgccacaactcctgaatctgcctttacccacttccaaacattgcatccgtcttgcttgctatgctcccccaaagctcctggaacaaaagcttcaaa

SEQ ID NO: 129648 - DNA, 750 bp, Glycine max
  Clone ID: PAT_MRT3847_8807C.1
cccacgcgtccgcccacgcgtccgcccacgcgtccgcccacgcgtccgcccacgcgtccggagttctctggaagaggagtgaagcagcagagggaggagcggcattaaaaatgcagatcttcgtgaaaaccctaacggggaagaccataaccctcgaggtcgaaagcagcgacaccattgacaatgtcaaggctaagattcaagacaaggaaggcatccctccggatcagcagcgtttgattttcgccggaaagcaacttgaagatggaaggaccttggccgattacaacatccagaaggaatcaacccttcaccttgtcctcaggcttcgtggtggcatcatcgagccttccctcatggctttggctcgcaaatacaaccaggacaagatgatttgccgcaaatgctatgctcgtctgcaccctagggctgtgaactgccgtaagaagaagtgcggtcatagtaaccagttgaggcctaagaagaagatcaagtaaattctgggtgggatattgttggtctctactttcgttttgtttgtcttagaacagtgacttgtttggtatttatcgtttctggttttgattaatgttaattgttttgagacaatagttttgaactagtcaattatatttttatgatgccattttggtcttagtcaattataatgttattatgacattttgatctcgtctcacctctagccgttgtcgattaaaaagcagtaaatttatgcatccttttcctgtt

SEQ ID NO: 129649 - DNA, 515 bp, Glycine max
  unsure (1)..(515): unsure at all n locations
  Clone ID: PAT_MRT3847_88080C.1
tcagaattagttcatgtggtgcacccggctatacacaaatttttaccttttcattataattttttcttcactcgtattgggtatacacataataagtaaacttcaacttcaagttatactttctgcaatataaatttataacaattgcgttttttttaatcaaaagtgcacgtcagatagcactaacatcttttttgttcttcactttaatcataagatagtaagtttcagaatcaaattctagatttctatgcaatgctttcttttcacgctcctttatgcatttggtctacaatataccgtggtgaaatattccaaatttctaatagcctcacttctttacattattagattttttatttttacttacccaaatttgagtttttagtttggttattttaagttcaacttcatacgggtatatctttaattntaattttcaaatacttacgtgttaattcaatagagagggttaattcaaatattgttttctttttacgttgagaaatgcaact

SEQ ID NO: 129650 - DNA, 242 bp, Glycine max
  unsure (1)..(242): unsure at all n locations
  Clone ID: PAT_MRT3847_88081C.1
ttagtcanacccactttgcngtctacnacttcatctccgnacacacaggccanacctttaccaagagcctttactttgcccgccgaatcngctggtggtgctggctnnngcagcngcactactggaactctcgcgaagacagcaactaagctactnatggggctcacgctgcngcttccantcgccgtttgagcnggctgacgatctnctgcgnttacnttcacaagcgncagaaacgnnca

SEQ ID NO: 129651 - DNA, 591 bp, Glycine max
  unsure (1)..(591): unsure at all n locations
  Clone ID: PAT_MRT3847_88082C.1
ggctcgagtagacatatgaaatagttaaacttgtctattagggattgcagaatctagtctgcggaaggaaattgaatttctcattatccatctcaaatttcataaaaagtatgagtggggcacattatatgtcaggaaaatttttggcagctgagaaaaaatttccctaccagaaaacctattatcttttctctaaagattcatgatactggcatgaacagttgcaatagatgcattttaaattttacttaaacagtgatctggtcattgtgtaatttatatgatttatttaagtagttataagctatacaattatcagcagatcgctgctgttgcccttcttctaggctggtgtttaatgtagtacaaatgatttcttatgttgtggtgtgtttagtcttttagaaccacacctcaaactagttattgtagttggagaacctaaggccttatgaatcgcatacttccaatgcgggactcaagtcccatacctttgcattggatcctagcatatcaaaaaccaatangttagtagtagacaaaacccagtggcatttggcatcctactcctgcatcaaggcaatgatatca

SEQ ID NO: 129652 - DNA, 423 bp, Glycine max
  Clone ID: PAT_MRT3847_88083C.1
cagaattccgctgattacggtactaaaatttcaaataaaaaggattaatggcctacctgtgtacacgaataggggtaacacctttttttttagggttcagcggcaaaaaaactctattgttatgccgagttccgtgaacgcttaagggatgcttgttactaggcacattgctctgaacctgtgaaagcattgccacaaccgataatttaaaactggggaactggaaggggccttttttgaggaatagagaagcctgctttggttgaaaaaaaaccctggcggagggtgagggggccaggactaaaaaaatctctattgctgaaccatgaaggaactttaacatttggaaacacaaagtgctctgggggtttcagacaccataaaatccgaacgggtaaactgctcaactgaagaaaaagtcgc

SEQ ID NO: 129653 - DNA, 361 bp, Glycine max
  Clone ID: PAT_MRT3847_88084C.1
gtctcaagcaaccatggcaatggctacccaagcctctctcttaactttcacccctctccggtctcaaagccagcggccgcgccttcgtgccatggaagcaaaactccaacctcttcttctccagaccgaatcccctcaagttctccagaacaatcatagcaccagtcgtcgacgagaccacagaggcaccatcaaaagtagaagctgcaccggttcgttacaccctacctgaacttgacccaaacaccccttccccgatcttcttgggcatcatcttcggactccttcgcaatgtacagttggaggagttatatgtcatttcgtgccactcacccatagaacagatcttataatttcccac

SEQ ID NO: 129654 - DNA, 373 bp, Glycine max
  Clone ID: PAT_MRT3847_88085C.1
gaggggttcaatgtataacgctgctgccgagccccttcgcgatcactaaggtaagtgagtcatctgtggtcgacaacggtcgccaccgccatggctatgaatgacgaggtggttaccagacagtacagcattatccgccactcacgcctccatggctgcacatttatgagtaaagctcctaacgctagtactgagatcaggaagtttgcccagtacgccatggggaccaatgatgtgatggtggatgtgcaacttgatcaactttgtctggagccaatgaatcaggactgttccaatgacgactaaggtaagaattgctcgcaggacgaatgacgatgaacatgcccatgaacagctatacactcatgtcacc

SEQ ID NO: 129655 - DNA, 488 bp, Glycine max
  Clone ID: PAT_MRT3847_88086C.1
gttcttgattcaggttaaagcatgctgttgagtagcaataccttcagcctaagtagtatatctatctacatcccatcaaaaaagggaagaaagatccatgctcgctgactgatgagccagtccaaacgccatcatatgttcgtgaattcatgcagaagtaaaacgcttactgaccacctcgaagtcggagaaccaagtgaagtgtgctctccttctggatattgtagtcagacagtgtacgaccatcctccaactgctttcctgcgaagatcaatctctgctggtcgggtggaatgccctccttatcttggatcttgctcttgacgttgtcgatagtgtctgatgattccacttctagtgtgatggtctttcctgtgagagtcttgacgaaaatctgcataccacctctcagtctgagcaccaagtgtagtgtagattctttctgaatattgtaatctgagagagtacgaccgtcttcgagttgcttg

SEQ ID NO: 129656 - DNA, 466 bp, Glycine max
  unsure (1)..(466): unsure at all n locations
  Clone ID: PAT_MRT3847_88087C.1
ctcttcaccacgccaccgcgccgccgtgccacctcgccactgcgccgccacccttagtcggccattatgttagatggttgggtgtgtgctttccttttggtgctttcttggtctgtggaggtaattgacgcaagtgctggtgatgctgatccgcgctataggggttgtataacacaatgtcaagaaactggatgcattgggcaaagatgctttccaaactgtaaattttcttctgatggagaatttattgatcgcccatggtacatgcattttcatggttgggtttcctttttcattcttatacactataaattgcctctaaaagatggaaagaaggcatattatgagtatgctggtttgtggcatatgtatggacttttatcacttaactcctggttcttgagtgctgntttccacagtcgagatgttgatctaacagagaaactagactactcatctgcagtcg

SEQ ID NO: 129657 - DNA, 373 bp, Glycine max
  Clone ID: PAT_MRT3847_88088C.1
ggctcgaggtgtgttaggcgtacaccccctccgtcgttcctactcttagctcctctgtagcgacgcggcggcgcttctcttggatcctccgtccctccgccgatggaggcgtgcttgcggcgagacctacagccttggaagagggttttggggttttgggctgaatctgcgattctaccaatcaagtgagcgaagcgtgtgattaagagtttgactatcgcagcgcaacacaagaggcgcgaggcgaccggacgtcgcggcttcatgctcggcattaggcggaaatgctgattcggcacaacaagtcctgcgttagcatcacccatttggaagccagcattggtctcaagcccgcctgagcacacagggcttc

SEQ ID NO: 129658 - DNA, 1952 bp, Glycine max
  Clone ID: PAT_MRT3847_88089C.1
cccacgcgtccttcagttttcactcacggacccaacagtggctagcggtctctcttcaccacgccaccgcgccgccgtgccacctcgccactgcgccgccacccttagtcggccattatgttagatggttgggtgtgtgctttccttttggtgctttcttggtctgtggaggtaattgacgcaagtgctggtgatgctgatccgcgctataggggttgtataacacaatgtcaagaaactggatgcattgggcaaagatgctttccaaactgtaaattttcttctgatggagaatttattgatcgcccatggtacatgcaacaagaaccactctatttacaatggaaaaaatgggattgtcaaggtgactgccggtactactgcatgcttgacagagagaaagaaagggagtcacataaccttggacctgtcaaatatcatggcaaatggccattcaggcgtatatatgggatgcaggagcctgcttctgtggctttctcagctctcaatctcgcaatgcattttcatggttgggtttcctttttcattcttatacactataaattgcctctaaaagatggaaagaaggcatattatgagtatgctggtttgtggcatatgtatggacttttatcacttaactcctggttctggagtgctgttttccacagtcgagatgttgatctaacagagaaactagactactcatctgcagtcgttctccttgggtactccctcattttagccatcttacggacattcagtattagggatgaggctaccagagttatggttgctgctccattgattgcttttgtgaccacccacgtaatgtacatcaacttctatttactagattatggatggaatatgatagtttgcgtagtgatggctgtggcacaactttccatgtgggcagtttgggctggtgttagtaaccatccttcgcgttggaagctctggctcgttgttattgctggtggccttgcgatgctcctagaaatctatgatttccctccacatcaaggactttttgatgcacatgctctttggcatgccaccactattcctctgacttacatttggtggagtttcattagagacgatgcagagtttcgaacctctaatcttcttaagaaggccaagtagcttccttttaagctcactcaacgctttaatgatcatgcttatacccacagctaagcctgaatatattatcatcgatggtgcacttttgagtgttcatttcactttctatcattggtataaatttagttggagttttgcctttacatttgggtgaaagatgaagttgacattcttgacgctctcttcaaggccgaaagatcatattggggttttcccatttctctttagcttacttaaaatgtgtacaaaatcttacttcaattggtggagtgattcaatcttgaaggattcttgggtcgcgtatgcatttggactatgaacagaatggaatggaacaattatattcagttctctttgattccaagaattttagtagcaaaaatctgccctttatttaaaatatgttttttctcagaaaaaataaattcatcgaccctgtgtttggataaagcatttgaagatgggaatgtaatttgggtaaaaaaaaaaaaaaaaaaaaaaaaaaaaaaaaaaaaaaaaaaaaaaaaaaacttatgtggctattaccagcatcgtgcactgatcctaaagaatgattgattgtcaagctgactatggggatcccttagcgcagtgatactacttagttcttatatagaagttgtaatcacctggcaaactatgcgacacatattgaataacactatatgcatacaacatgctaatgcataaactatttcttatgttaatccttagaatatgattattcctaatacttccctttttaagacacaataacctttgtgaagacttttttttccttt

SEQ ID NO: 129659 - DNA, 305 bp, Glycine max
  Clone ID: PAT_MRT3847_8808C.1
gaacgcggctggaaataaaaaaataaatttattgggtgagcggccgatctataggagcgatgcttacgtaatcggttattcgacgtcataattttattattatgtgatcgaaatacaattcaatggctggatatttacaacgttgagactggtttagccttgaccttgcccaacttaatggcctcgaatcgcattattctttcgtttgctaatgtattagtcaataggaatgcaccgatcaccttttcttacaattactcagcctatatggctaatgagacccgcccaagatcgttatattaatc

SEQ ID NO: 129660 - DNA, 398 bp, Glycine max
  Clone ID: PAT_MRT3847_88090C.1
accggaaaaaccgggacgacccaagcgcccggcacttcttacacacacaaaacaacaaccagggaggggggaccaaaagaaacgacggggggagggagcgaaacccagaccaccgcgaaactaaacacgcacaacgaacaaagaccagaacataccgacaaggaacaaaaaagaggagcgcaacgaagacggaaggggaaacacgcggagaaaaacagacaggaaaaaagaagagaacctggatggggagaggaaccacaccaaaggccaggggaacggagaagcaaacgacaaagggacccaaaccagggaggataacagagactacgccaacacagcacaagaccacgaaaacagcaacaaggaaaagacacaaggccaccaaaaacacgaaaagc

SEQ ID NO: 129661 - DNA, 607 bp, Glycine max
  unsure (1)..(607): unsure at all n locations
  Clone ID: PAT_MRT3847_88091C.1
acaaattcgcgtggatctctacggaatttatttcccacgcgcattcattcttctcctatccagatcgccgcaccgttccatttcctctatcagcatcggtaattgatcctaatttcccaacagtagaagaaagatctagggttcctcctgctgaatccacagctctctcaagcgcatttcttgcattccgattcaaattcatctcgctccagcaggtttcctttcgtgaatgagaagagatacggttacgctttaaatgagcatggaggtcgttggcgatacggcgtcgttggaggtcgatttgttacagctccctgaggtctccgctctcgcactcaaatctaacctaaccttcgtcgagacgctcttcgagcagtggctttcgcttcccgaaagcaatcgattggtgacatcattgctaaatgaagcaaagtcaggtgctcccttgaatgtcccagggaatcgctctagtccaaatgctgcaagcaattctttgccttccatgtttcctgctggcactgcaccacctctntcaccaaggagtacatctagctcccctcgcatagtgaaaccagagagtggcccatctaatttgggttctcctttg

SEQ ID NO: 129662 - DNA, 846 bp, Glycine max
  Clone ID: PAT_MRT3847_88092C.1
ggccgctcgagccggccggcgccggggaccattcacaacaaactttgcgtgcttcttcttcactttggtcttcatttatcaattcattgttgtttaaactttaaaccttggaatccaaagagtgtcatggaagaccagaaagagaagatttcagtttcggaaaatttagaaatgaacattgacgtgcagccagagctgtttgtggacaaacatgagccggaaacgggtggcgacaccaccggcatcctacggcggtggaagaggaaagaaatgctaaggagaggctctttagggctaagaggaattgctctatttatgtctttgatttcactcattcttacggctagtaacaagcatggttattggaataattttgacaagttcgaagaatacagatacatgctggctgtggcagctctatctagtttgtacactgtggttcaagtgtttcgtcaagttcatgaacttttcacggggaaaagcctgatgcggccaaaaactgaagggttgattgattttgttggggatcaggttgtggcatatctcttgatatcatcaacgtcttcagcgattccagcaacagatgaaatgagggaagttaccaccaatatatttacggactctgcagctgcaggcattgccttttccttttttgcattttgctgtctagcactgtcagctgttatatcaggatacaaactctctacccaaacttatactcctatgaacatccttgatagttaaaagtatctcctatcatgtttcaacttccatttattggtagatttgtgtgaagaagtgagtataagaaattaataacccccctttcctttttagtacgtgcac

SEQ ID NO: 129663 - DNA, 427 bp, Glycine max
  unsure (1)..(427): unsure at all n locations
  Clone ID: PAT_MRT3847_88093C.1
gaatttatttcccaagcgcattcatttttcttttatccagatcgccgcacgattccattttctcaatcagcatcggtgattgatcctaatctcccaacagttgaagaaagatctagggttcctcctgctgaatccacagctgtctcaagcgcatttcttccattccgatatagaatctaattcacgcacgcggtttcgattcaaattcagctcgctccagcaggtttcgttacgtgaatgagaagagatacggttacggcttaaaatgagcatggaggtcattagcgatacggcgtcgttggaggtcgatttgttgcagctccctgaggtgtcctctctcgcactcaaatctaacctaactntcgtcgagacgctcttcgagcagtggctttcgcttcccgaaagcaaccgattggtgacatcattg

SEQ ID NO: 129664 - DNA, 417 bp, Glycine max
  Clone ID: PAT_MRT3847_88094C.1
gattgaccaatgctggctctatggctattagcaagcactctacatgacctaaaatcgatacccatatatgtagcattatcaaatccaccattaatctatcctttgagcatatttttcacactcatgtgagtcgttggaagcatgccaaggttctttaagccaacaacacctagtgtctccttagaatgcattagtttgtaccttgaagtacgttaaatgagcttcaagatagttaattatctatgaggatgatggtcatactcagatcattggatactcaaatgctgattgtgttggttctcttggtgattaggaatttaggatatacattgttggatattgtgtattccttggagataatttaatatcttggaaaattaaaaaacataatgcctttacaatggaaagttttggagt

SEQ ID NO: 129665 - DNA, 233 bp, Glycine max
  Clone ID: PAT_MRT3847_88095C.1
agtctgtgttgttttgttttgttttttttttcttcttttcaaaagctgcaataaatgatgttttcagttttctgcatatacaacaaaaaatttcatcctaaaattcaaatttttagagatagaaattagttcaaattttttaattcaaccctctatgatttctaaattcataatgtgttcttcctgcccctttcatcccgtaaacttatcaattcttgtttaagtgctgcttc

SEQ ID NO: 129666 - DNA, 285 bp, Glycine max
  Clone ID: PAT_MRT3847_88096C.1
agctcggaattcggctcgagaggagatgctggcgggcttttctacttcatgacgagcgctggcacaaccagggatggggttgctgttatagacgacgagaccgccacgcctcgagaatgaaaaccaggcccagtggataaactagacccagaagaaggcccagatctgattggaaggacagcgaccagccatgcggggtttgcattcaaaatacaaatgataagaaaatggccctaaaggggttaaaggccacggctatcaaaaggggatattgtgcatgtgctg

SEQ ID NO: 129667 - DNA, 1829 bp, Glycine max
  Clone ID: PAT_MRT3847_88097C.1
acggctgcgagaagacaacagaagggggttccgttttggtacgaattgaacttgcgttgctgaagaataacatagtgagttgtgcactctgcagaagctccacgtacttccgcacgaccttttcatttaagaatgaagcttgacgtagatgtcttgagaaagatgattttagggttctcactgccgttgaattggggatgcggaatcatgaaatcgtacccaccgaactcatcgaccgaattgcgcgtctcaagcatggaggcacgtacaaggttttgaaaaacttgctcaaacacaagttgttgcatcacgactcttctaaatatgatgggttccgccttacctaccttggttatgattttcttgccattaagactatggtgaacaaaggagtgtttgtagctgttggacgccagattggtgttggaaaggaatctgatatatttgaggttgcccgtgaagacggaacagttctggctatgaagttgcataggcttggaagagtctctttccgagccgtcaaatctaagcgtgactacttgagacatcgcagtagttataattggctctatttgtctcgcctcgctgcacttaaagaatttgctttcatgaaggctttggaaacacatggcttccctgttccaaatgcaatagaaagcaatagacattgtgtagtcatgtcactcgtccaaggttatcctcttgttcaggttaagcagttactgaatccagagacagtttttgaggcaattcttggtcaggtcgttcggttggcagagcatggtctcattcattgtgatttcaatgaatttaacatcatgattaatgatgatgaaaaaattacaatgattgattttccacaaatggtatctgtgtcacaccgtaatgcgcagatgtactttgaccgtgatgttgaatgcatctttaagtttttcaggaaaaggttcaatctttcttttcaagaaagcatagatgatattgatggttctgatggatgatgagatgaaggggagagatgaagctggaaaaccctgtttttcttcaatagaaagaagtgctggttttctagatagggaacttgcttacaatggctttactagaaagaatgaagaagatattcaaaggttcattgaaggcggggcaagaaagtgatacaaattcagatagtgaaggggttgacttagtggaagacctgaatgatgctgacactgtagatggtgcagaacagaatgaggcagtggaagatcaagggaaagaggagatttgagaagcacgtgaaagcagtggatctgaaaaggaagatgcaagtgacaatggggaaagcaatgaagatacattgcaaaatgaagctgaactcgttaagaacttgagtaagcaacgacgacatgccatagcgaaagctcataagggacgaaagactgttgcagccagaaattcctacaaagacaaaggtggtagatcatctcacaattctaaaatccagaaacagttgagcagctggtgaaaatatgaggccttgttgtggagtgaactgaaaaggactttatatatagtttcaacggtgacatctatcagataggtaggcaattgtaggtggcctttatctgttcaaaagttcaaacatgtgtaaagttgagaaataggaaagcaaataggttattgtctcgacccccttttcctgcggaggataatcatattatttccgatatttatttggaatgaaaattttgccttctctatattggaaaattttgtcattgccccctttttttatatttgacttttcaaactgctattaattgttattatttaaagcctgatttttgccc

SEQ ID NO: 129668 - DNA, 652 bp, Glycine max
  Clone ID: PAT_MRT3847_88098C.1
ggctcgagggctttggaaacacatggcttccctgttccaaatgcaatagaaagcaatagacattgtgtagtcatgtcactcgtccaaggttatcctcttgttcaggttaagcagttactgaatccagagacagtttttgaggcaattcttggtcaggtcgttcggttggcagagcatggtctcattcattgtgatttcaatgaatttaacatcatggtactttgaccgtgatgttgaatgcatctttaagtttttcaggaaaaggttcaatctttcttttcaagaaagcatagatgatattgatggttctgatgaagggagagatgaagctggaaagccaagtttttcttcaatagaaagaagtgctggttttctagatagggagcttgctgccagtggctttactagaaagaatgaagaagatattcagaggttcattgaaggtggggcagaaagtgatacaaattcagatagtgaaagggttgacttggtggaagacctgaatgaagcagacactgtagatgatgattcttcacatttgtcagaacagaatgagggatccgaaagtcaagggaaagaagagatttgtgaagcacgtgaaagcagtggatctgaaaaggaagatgcaagtgacaatgggggaaggcaatga

SEQ ID NO: 129669 - DNA, 399 bp, Glycine max
  unsure (1)..(399): unsure at all n locations
  Clone ID: PAT_MRT3847_88099C.1
ctcgagccgctcgagccgngcgaagctgcacgtgtccgaggccgacggcacacctgaggtttggcagctggtgattggctgaaaagtgcnncggatctcatgcgcggtgtgtcccgctgggaccagtagctcgtttgcctgcagccaggaacacccttttggacgacatgattgacgcgaggcgccttgatatgtcgccatatccgggacagggtccggtgatgcactccgatcagcccgaggtgcatgtccaacgtcttgaatcataggaattacgcgacagtaattctgtggcttcatggcgttgttatcagggtgttggaccccaagcctgcctgtgcgatgtggtacgggtctgggaactgcggaggaggaggggctcctctgccgcgtccagcg

SEQ ID NO: 129670 - DNA, 1153 bp, Glycine max
  unsure (1)..(1153): unsure at all n locations
  Clone ID: PAT_MRT3847_8809C.1
cccacgcgtccgcccacgcgtccgtacggctgcgagaagacgacagaagggggttgtgtgagtgaagaagcagagggagtagcggcattaaaaatgcagatcttcgtgaaaactctgacagggaagactataaccctcgaggtcgagagcagcgacaccatcgacaatgtcaaggccaagattcaagacaaggaaggcattcctccggatcagcagcgtttgattttcgccggaaagcagcttgaagatggaaggaccctggccgattacaacatccagaaggaatcaacccttcatctcgtcctcaggcttcgtggtggcatcattgagccttccctcatggctttggctcgcaaatacaaccaggacaagatgatttgccgcaagtgctatgcccgtctgcatcctagggctgtgaactgccgcaagaaaaagtgcggtcatagtaaccagttgaggcctaagaagaagatcaagtgaattctgtgtgatattgttggtctcatccttcgtgttgttggatttggaacagggacttgtttgatatttatagttctggttttgattaatgttaattgttttgagacaatagttttgaagtagtcaattatattgttatgatgacattttgatctctcgtaaattgtatttcatgtttttgcaattttttttttgccattttggtcttagaaaattataatgttaatatgacattataaaatcccataaaattaaaaattcgtcaattaaaaaccaggaaattttagaatccaattccggtaaagcaactacggttgtcctcccacttccactagttttaccctgcctcctgcgcagggaacaaaaagacaaaaaccaaccaccacacaggacacaagccaagaccaccaaagaagggagacaaacactctcttcccggggttcctctctcgctctaagcactcgctagtggatgcctcctccggtgcggatgatgctttggccaaacagctttcaattgtacatattctagccttagaccagtggatctatgtgctgaccaagcttctttcttctgcacgtattgagatacttgacgacatgctcgcactaatattnaaaaaaaaaanannnaaaaaanaaaaaaaaaaaaaaaaagggggggggggattta

SEQ ID NO: 129671 - DNA, 178 bp, Glycine max
  Clone ID: PAT_MRT3847_880C.1
gagacctcaggtcaggcggggctacccgctgagtttaagcatatcaataagcggaggaaaagaaaagggggaaaaaaaaaaaaagcagcggccccacaagatgaatcatgcttaagtactcctggatacgacatcacacctctacaatgtcgtcaactatcatcacatcagtggtcgt

SEQ ID NO: 129672 - DNA, 772 bp, Glycine max
  unsure (1)..(772): unsure at all n locations
  Clone ID: PAT_MRT3847_88100C.1
ctcactgccgttgaattggggatgcggaatcatgaaatcgtacccaccgaactcatcgaccgaattgcgcgtctcaagcatggaggcacgtacaaggttttgaaaaacttgctcaaacacaagttgttgcatcacgactcttctaaatatgatgggttccgccttacctaccttggttatgattttcttgccattaagactatggtgaacaaaggagtgtttgtagctgttggacgccagattggtgttggaaaggaatctggtattttagttgatgttcttctgattgggtgccctttgttcaatcacatttcacacgtttttctgctatttatgttggtgtttgtgctctgctagatatatttgaggttgcccgtgaagacggaacagttctggctatgaagttgcataggcttggaagagtctctttccgagccgtcaaatctaagcgtgactacttgagacatcgcagtagttataattggctctatttgtctcgcctcgctgcacttaaagaatttgctttcatgaaggctttggaaacacatggcttccctgttccaaatgcaatagaaagcaatagacattgtgtagtcatgtcactcgtccaaggttatcctcttgttcaggttaagcagttactgaatccagagacagtttttgaggcaattcttgntcangtcgnttcgttggcagagcatggtctcattcattgngatttcaatgaattacatcatgattaatgatgatgaaaaaataccatgattgattt

SEQ ID NO: 129673 - DNA, 377 bp, Glycine max
  Clone ID: PAT_MRT3847_88101C.1
cgtaaaaagcaagaaacataaaaaagcatccatatacacaagataattcacattatttgaagtacattgcattaacatattcttaaccaaacacaaatataaaaactctgaaaagggcacaaggaatactattctttcatgctcacttgccggggacaaaaaaggtggctaaggcccaggaattggtgttcactggaaccgcaaggcgatcagcacggttctacaaaggaccctaaccggtgacatgggcctgaacaaagaagccaagcctagagaacatggccatgatcccgaacttgagagcctttaccgtaagcttataaaaagcctttgggtaataattaaggcccaatgggttaaagatgtcaccagggttg

SEQ ID NO: 129674 - DNA, 338 bp, Glycine max
  unsure (1)..(338): unsure at all n locations
  Clone ID: PAT_MRT3847_88102C.1
gcatgcctaagactccgaattcagggcgcgcttagaggattgacgaccaccatgactgctgccgatttcgatccttaaactcctgcctcttctctctcgagagagtcngtctcagtatcgagctgggtccgaataagttcgagaggatccaaaaccttatggcgggccttcgtttgttcaaagctcatccaccttcgtactcggaaccattcacctgaggaatgctttataacagactaaccctaatgccgtcattaactgattttcaatgattcacgtaggtatacaccgtacgcgagaaattatacatcataagattatatacttgcttgcacttc

SEQ ID NO: 129675 - DNA, 206 bp, Glycine max
  Clone ID: PAT_MRT3847_88103C.1
aaggtataaactaagtgcttagttaggctaaaatgccataaatatatatatatagtcattaatgtgcgggaaaaaaaatcaagctagtaatttggtgtgaattagaaggaataccgggattcccttttaagatagctgcatggagtggagagtttccaaagcacaccgggagcttctgttctggataaaatggaatatccaattga

SEQ ID NO: 129676 - DNA, 533 bp, Glycine max
  Clone ID: PAT_MRT3847_88104C.1
ctgcttgggggggggggggggggaaaatatagattgaaggtagagttttaaaacaacaaacgcgtagcgatagatgcgggtgctaattaagaagacagaagacagtaggatagcatataaaggttggtgtgggtggtggcaccaaggaatcacctaagagtagggctgatgaaggccctagttagcggactgttaaacaaattttggtggcatactttaatataagataaattagggtcattgggttaagcagggcccaaatgcggggggccaaacttagttgtagggacaacagtagtattttttgcgatacaataaaggaagaggagtagcgtgggtgaaatgggtggctagcagacggcgttataacgagcaatagaccggaagggacagccaagagaagccacgaggtaggaaacccgatcgatcgacttaagaggcgtatagagactagagtaagagcagatagattggaacttatggggcacggcagtgtggcaacttgcgatacaaaataaggcacgtcaagcgcg

SEQ ID NO: 129677 - DNA, 1390 bp, Glycine max
  Clone ID: PAT_MRT3847_88105C.1
cccgcgtccgccaaagctgagaacggcgtccaagtccgaagtgtcattcccttattgtttctttcgttgcatgtgtaatttcgatgcacatttgtttttttttcactcgtgaaacgatgctgaagcaaactttttattttcaattgttctacatcagtgtagtttgtactcttgaattataggtttcatatctcattcctatagtttggtttttttgtataccgataggagcaaaaggggttggatgtgatgattataaaataattcctcgttctgaatgctaatgccatggcatgacagacacgtttacacccatagaatatgagcactgcacccaatggttacataactggttttttttagcgtatctaaagtatttgcttggtttttaaataatgggggcccccccttggggggatttgaaacccggttagtttttccatattttgacatgcgggggtaccgggctgcgatgattataaaataattcctcgttctgaatgctacgccatggcatgacagacacgtttacacccatagaatatgagctttcagggtgcctctattggacccttgatagatttggctattcaaatcgatccaagccttatctttagtgcatttgtgggaacatccttggcctttgcatgcttctcaggagcagctttggttgctaggcgtagggagtacctgtaccttggtggcttggtttcttctggattgtccatccttctctggttgcactttgcttcttccatctttggaggttcaacagctctctttaagtttgagttgtactttgggcttttggtgtttgtaggttacattgtagtagacacccaagaaatagttgagagggcacacttgggcgatctggactatgtaaagcatgccttgaccttgtttaccgatttggttgcagtttttgtccggattcttgttattatgttgaagaattcggctgagaggaatgagaagaaaaagaagaggagagattgattttcttaccaatctgctcagttaacacttcaactcccttggactgtaatacttaaaacagctgtctatacagtgttgttcacttgttaagcttgctccaactgtgcagtttagtcgtttgtttgctttatatcagtagtacactagtacatgttgacatgttttgagttctctaataagataaatttttacgttacatttgttttaaagatgaaaagggaaccgagaaagggagtagggaagaagtcaatggtgaaggtccctaataaattcttactccatgactatgtgaggatttttgttggggaggaagtggaattcagcaatacacttttttttcacacatcagggtaaaattttatacaaaactcgctaaataacgagtttcatt

SEQ ID NO: 129678 - DNA, 467 bp, Glycine max
  Clone ID: PAT_MRT3847_88106C.1
atctgaactcagggtgctcagatgaattacatgcattctgtgaaagtgggacccatcattagatttttgtgcaagaaggactaaatctattgaagaatttctcctccattgatcccttgatagcaagagccactaatttaaccgtttgatgatcttagacccatcactatggcgatggcagtgcttggttatactcaatcagaaaagtgggttgagtaactttatgaacaggtaagtcctcaaaagaccttttatcatcatgtatgttaaaatttatattttatttttgaaatgtgtatattcagactagctaaaaggtaaatgaaaaaacaaaacacattacgaaatcacattaggcgttaatatatatatattgaattttcgacaataaaaatgttgtttggaagatagaaattatgagatcacatgatgctacttgttggtaagtgtgatgcaaaaattgtgaa

SEQ ID NO: 129679 - DNA, 317 bp, Glycine max
  Clone ID: PAT_MRT3847_88107C.1
taaatccctattttgcccacatggtgaattactcatctaagccgtacatgtcaaccaagtgttgcaaggctagaacgcaccacaccttaagttacattttaagaacactagtgaaactgcctttgcaatcaggaagttgcccttggttaaagctaaaaggtacttggaagatgttcttagcgcacaactcatagccatatcccgttcatacgctttctgtcttggtgttataaggacagctcaagctaagaatatacactctaatggccaaagaatgcgacccttcaagttagcattaattcattcttgatttgctc

SEQ ID NO: 129680 - DNA, 306 bp, Glycine max
  Clone ID: PAT_MRT3847_88108C.1
gcgtgctacaactgtaaacgacaacagaatcagagcagggaactgattggtggcgatcttgtagccggttgcctatctatgcatataactgagagaccgctcctctgtgtgcacccgcgctctctctgagaacactttgaccctgtccctagccctgcatgcggatgattcatcctcccggtccgatgcattcaacatccattcgacctaaatagaaacacagtcctaaaatatgcctgcctaatgtatacacgcctgcaatcaccaccatgagtatgtcattgcaggacattcacgtacatctgc

SEQ ID NO: 129681 - DNA, 280 bp, Glycine max
  unsure (1)..(280): unsure at all n locations
  Clone ID: PAT_MRT3847_88109C.1
gatngnatngtnnnnagtcnganttcggctcgagggtagcagaanngntataatnactnnnnncganntcganggataangctnncagtntgngngntgtccanttggaaannctgtanaancgtnaagantgcannnctnncannnggnnntagagggggtcgcacngtnggggcancgactcaanggatggnnggatngtangaggagtnannagcangncgcaaagaataangtnctatagatncggggaattnagaantaagggagtcatagggtt

SEQ ID NO: 129682 - DNA, 1673 bp, Glycine max
  Clone ID: PAT_MRT3847_8810C.1
attatccaaaacgccccagtgccttacgctactgctttttttgtaacagccatatcattaaatattaattaccagagtcaaaagaaaacaatgagtatgcatgtacggtgggtggctattattaattaagaccaaaaccatccaaattctttgcttgtacacctgaaccctaatgaccactttcacacactccattttccaccatgaccttctttttcttttctatttctttctcctcacggaatttccgccgcaggccaccgcgcagcctccgaacacgctgacgccgccgccgcagcaggaccgctttacgaggctgaagttcgacaaatccatggccatcgttctgctgatcctggtggtggtgttcttcatcctagggttcctctccgtgtacacgcgccagtgcgcggagcgcaggatgggagggaggttcgacctctccatcttgatctcgcgccggcaacgcggcctcggccgcgaagtcatcgaaacgttcccaacgttcgtgtactccaccgtaaagagcctcaagttagggcgcgccacgctagaatgcgccgtgtgcctcaacgagttcgaggaggtcgaaacgctgcgtttcatcccaaattgcagccacgtgttccactccgagtgcatcgacgcgtggctcgccaatcactccacttgtcccgtgtgtcgcgccaatctttttcccaaacctgatgacccgtcttttgatcctatccaaattccggatccggaacaacccgttatatcatcaccgacccgagccgaaactgggggctctaatcctcgttctccgaatttgattgatcagaaccctacgtcgcggtcaaggtcaacgggttttcgtatcgcggggtggtttccgcggtctcactcgacgggtcactcgctggttcaacccggggagaattgtgaacggtttacgctgcatttgcctgaggaagtgcggaaccagcttatgctgagtcgcaccaagagttgcggcgtgggcgtgacgttcacgcgcgagaacagtgaaaggaggggttatagggcgaggagcgttggtagtagcctcagccctcacgtgagggggtggttttctgtgaaggatgatgtcggggaaaggtcttcggatcggttattctccacgtcgacaagggatagtgaggtttagatgcttccttttggtttggtgggtaaaagtcaaatatcattatttcacactttcacaatggcttttgccattttaccaattaaccagcctttctggcctgtgctcctgtatataatatatactctagtaatatttacatgtgtatggttttagagtttggaaattttggagtcttctgttctgtgtggaacaaactacattgatagtaggattttgtaaacgttaataaatttgaaaatctgaaacatttacttattttctagtctacttctttggtactggtcgcaccaggagttgcggcgtgagcgtgacgttcacgcgcgagaatagtggaaggaggggttacagggcaaggagccttggtagcagcctcagccctcacgtgacaagaaacagcaccagtcctcacgtgaggtggtggttttctcggccacgctcgattaaggatgatgtcggggaacggtcttcggatcggttattctccacgacaagggatattagtgag

SEQ ID NO: 129683 - DNA, 660 bp, Glycine max
  unsure (1)..(660): unsure at all n locations
  Clone ID: PAT_MRT3847_88110C.1
ggagccgcctgataaactgatacatcaaaaagcaaacatggaacactaacataacaagcgagagcatttatgccatgtacacaacaaagttacatggcatgtctatcaactgatgcataacaaaacatttattctaaactgaaaatttcattataatctaacagagtttgcacaaagggcatcttaagtgtgtgaattgtaaaagttgagctcatggatcatgcttagtaacccttccatggtgaagcaggaggcaggcttccgtagaggaatgagaagatcaaggtcaaagcccgtgctggttgccagctaggaaccagatgtcctgctcctcttactgtaacaaatgtcactcctttgtatttcaccacatatcctccaacctcatttccagaataccatggacgccaaggaacctggataggtagcttgagggtgttgattgcatatctggaagatgtaactggcaccccttgcatccgtatcaccactgtatatccacaatacaatgttactgtcggtgnnatacttgatgacnggcaggatggtnnttgggctgtcgttccagtctattaaatcactgcaatgggaccagtttgtgggttttgcatgannnnntncttggacctctggcctatttnnatnngcnntccnngnnta

SEQ ID NO: 129684 - DNA, 361 bp, Glycine max
  Clone ID: PAT_MRT3847_88111C.1
ttttgtttttttttttttgttttttttttttttctttttttttatttgtgtttgtttaaaaaaacaaaaaaagatttttttccaaacgggaaccgaggccctacttttaggggtcaaaatttttttttgcccagaggtttaaatttaacatggcattttacccgtttccacatttttttaagactccctcttataagggcgcgcctcccacaccttgggggttaagacttaacactaatttttaaaccaagggggttggtgctttttattatacattcaccaatttttgtgtttaccaagggagaaatttagcttggtgctgattgccctttccaaagggtttgccccgatttggggagat

SEQ ID NO: 129685 - DNA, 384 bp, Glycine max
  Clone ID: PAT_MRT3847_88112C.1
tttttttttttttttttttttttttttttttttttttttttttttttttttttttttttttttttttttttttttaggaaaaaccgggcccctttattacaaaaaaaaaaacgatctaaaaacgatccccccggaaactttattgaacaaagagcatgaaccacttattttccattacaggaccccaaagggggcccaaatttattttgaaaaaccaaggagcctggcctaaaaagggctttaaaaaggggacccataaccttataggtgggaaaaaaggtttaaacccttaggggggtggaaatggcttgggaaatgcaaagggggaaaaaagagggttcttgaaatggggagaaaagggaccttaagaaaaaaaggcctttt

SEQ ID NO: 129686 - DNA, 377 bp, Glycine max
  Clone ID: PAT_MRT3847_88113C.1
tgtataggtaccctgattatatattgatttattcgtttaaaactcttcatatattgcaattgtgtgcaggtgattgtggatgaaagctgaaagaagtgacattccacacatggataggaaaaagcgattgatttttttactacttctgttccttaagattagtttccaggcctgataatgttgcttagctgcctgaagttttaatgattttgcgggtggggggcactgatgtgcatataaaacaccgatcaggatttaatgattgtgccttgctaaagctatgaagcatgtttggcctgaacttattggtacgccactaataacttctttatcacctggcattcgtaaaagattaacccgtgacgacagaatgttct

SEQ ID NO: 129687 - DNA, 509 bp, Glycine max
  Clone ID: PAT_MRT3847_88114C.1
cgagaagacgacagaagggaggatgagtatggcatggttacatattagtaagtgtaagcaaaagccatagggacttagtgtatctttctgtaatcaacgtatggtactgaatcaaggcactatgtactatttttctgcataattctaagtttataaggcttagtggtgactcgtaggtaaggtcggtactatgttagtcagggaatgataaggttgcactatagaacgtaacatgtgactagtacttaattttaaattaagtcttattttgttctcacttcttagcttggtcacactaaactatgagataaattaccttttctgcataattggggactgcatacataggcaaaatggaacatgtatactagaatacgttctacatattcaaagcttgttaattaagactgcactactgaacttgctgagaatacgtgttgaaaatgaaaagataactttctgtttactctatgaaggaatggcatgctgcatgcatgatcacaaaattg

SEQ ID NO: 129688 - DNA, 302 bp, Glycine max
  unsure (1)..(302): unsure at all n locations
  Clone ID: PAT_MRT3847_88115C.1
atacaatgggctactcctacttgtgtcttgtatttctgtgtacttgtcttctttgtttcaccatctttgtcagcatcaaatgaatttcctaagaccggatatatctccctccccattaacatagatccaaccaccatcagcacttcacangaataggctaggaactccacgacacaacatgaattagccattgactttcaggagtactgtggacgatgtggtggtattacaattctcctcttacaatctgtccctgggatncccaaagcctggaccgaacctcnatcaatgcgagtggtttc

SEQ ID NO: 129689 - DNA, 220 bp, Glycine max
  Clone ID: PAT_MRT3847_88116C.1
ttacatttttaattattacattaagcatcaaaacctccctccacatctattgctctcaacactgatctctaccctttcctttgtggggtgatttacccactaatctacatcacatttgttcttagacattctcatgtttacccttatgcatacccatattctaacacataattctacaagtacctcaacacttcaaatctcacttcaactggcatctaca

SEQ ID NO: 129690 - DNA, 388 bp, Glycine max
  Clone ID: PAT_MRT3847_88117C.1
ctcactggtcggccttcgtcctttttttaattttttttgggattgaacatgttaaaacctttatagctacataccgatgctatacacttaccctgcttatgttgactgctatgaccgtaaaacagtgaccaacactgacataacatgctgcgctctccacaaaacttgacgctcccttgaaccatgtcttgactccagcttgagcctggcaaatgaacagtcatggatctgtttacaggggctctaattatgtggcgctagccaccttcgtgcacatcagcggaccttgtcaccacagtcagttgatacttaggttccgcatcggtcactggggatgccgtcccttaaatgtgcaccgtgggcaccgacttcggttcaaagctacact

SEQ ID NO: 129691 - DNA, 393 bp, Glycine max
  Clone ID: PAT_MRT3847_88118C.1
agagtggtcgtcctttttttttttttttttttttttatttttttttttttactttttttttttttttttttttttttttttttcaaaaaaacccaaaccccgtgtttttttatcctaaaaaaaagtttttttccttgaaaaaaaaggttccaagcccaggccattgcaaaaatttgcacaaaacccaaggaattttccccaaaaccaaaacaaaaggcaaaatttaagacccctgtcaaagaaaaaaatccccacgcctttacacaaccttggtcaatggaccgggaactttgggttaataaaaaacccaattaaccagggccgccccgttttttttaaaaaaaacacccataaaaccttttttccttagaaggaaagaaccaggctaacctt

SEQ ID NO: 129692 - DNA, 721 bp, Glycine max
  Clone ID: PAT_MRT3847_88119C.1
ctctccccactgccatgtctcttgtctataggttgggcgttgggctttgggatctggtggctgggccacgcgccatagacaagaaccggccatccggagagcaatgccttgttgaatgggcaaagccttacctttctaacaaacgcagagtttttcgcgtgatggatagtcgtcttgaaggccagtattcccttacacaagctcaaagggcagccacccttgcttttcaatgtcttgctgtagagcccaaatacaggccaaatatggatgaggtggtgagagcattggagcagctacgcgaatcaaataatgataaggtgaaaaatggtgatcataaaaagtgtagtagagttagtggatctggccttggtcaccccaatggactccctgcatctaccagcaaaggaagtatagatgctgctaaaaagtttaattatcctaggccctctgcttctctcctttattcttaagtgaaggagttttgtgatgaggtgagaagagttatggaactgctagcagttcttaggtttggtatgaaccatacttattaagcaatgtatagtttcatttttttttcttatattttggcctaaattttgtcattgtaatcctgattgttaacatagtgccatctaatctggatccttaaggtttttgttactcttgaatcctgtataaaagtgcaacgagggaccaacaaagttcatcgcaatggtttttt

SEQ ID NO: 129693 - DNA, 144 bp, Glycine max
  Clone ID: PAT_MRT3847_8811C.1
ctaaactgtaacataacagagcttgagccttgatccttgtatctcgagtcacgagccaccctcagacgtagtcaccaacactgatcaacgcgactatggcatctgcgttcgacaagctcgtcgactcccccatgtaccagagac

SEQ ID NO: 129694 - DNA, 275 bp, Glycine max
  Clone ID: PAT_MRT3847_88120C.1
atctaaaagaaagactaaaagttttatatattaagaaataaggagatttgattaacaaaatcttgtaagactatctattcttatttgagttttgcttttattactcatgttatttagacaaatagttgataattatgagtttggatatttatttaattaatccttgataatccatataaatctatctatgtgggcaatgacaataaaattatagtaaataagcttttaaaacttttaaactatagctatagattgattttcaaatcgttttatgt

SEQ ID NO: 129695 - DNA, 1894 bp, Glycine max
  Clone ID: PAT_MRT3847_88121C.1
cccacgcgtccgcccacgcgtccgcccacgcgtccgtcttccttctcaatttctctccctccctctcaacacattttctcgggtcgggtcgtgcattctcggagcatcgccggaatcctttccgaccgaaaaagaaaaataatgacgggatccctcgcggcaaggctcgtccttcgtcgttgccgatcgccggcaagtcaattcttcttccgcagggaagcctcctggccggcgacggagcgaacgacaaaggacgtcgttacgtcgccgccgaaggaattgccggcgttcgactactctccgccggcgtactccggtccctcccgcgacgagatcatcgcgaagcgccgggagtacctcagcccttcgatcttccacaactacaaatctccgctgaacgtggtggaggggaagaggcagtacctgttcgacgataagggaaggaggtatctcgacgcgttcggagggattgctacggtgtgctgcgggcactgccaccccgatgtggtggaggccatcgtggaacaaacgaagcggttgcagcactccacagttctgtacctgaaccatgccataacggattttgctgaggctttggctgctaagcttcccggtaatcttaaggtggcattttttacaaattctggaacggaagcaaacgaattggcaatactgatagcaaaattgtacactggctcccatgacataatatctctaaggaattcttaccatgggaatggtggtggaacgatggggaccacagctcaaagcatttggaaatataatgttgtgcagagtggtgttcatcatgcggtgaatccagacccttatcgaggccttttcggttctgatggagagaagtatgtaagagatgttcaagaaatcattaattttggaacttccggaaatgttgcagctttcatatctgaagcgatacagggagtagggggcatcgttgaactggctcctggttacttgcctgctgcctacgatattgttagaaaagctggaggtctttgcattgccgacgaggttcagacgggaattgctcgcaccggtagccatttctggggatttgaggcccatggtgttgtacctgacatagtaacaatagcaaagagcattggaaacggcattcctcttggtgctgttgtgacaactcctgagattgcgaaggcattgactcgccggagttacttcaacacctttggtgggaatcctgtttgcactgctgcaggattggctgttttgagagtgatagagaaagagaagcttcaagaaaatgcttttgtagtgggttcctatttgaaagagagactcaatgcactcaaggacaaatatgaattaattggtgatgttagaggaagaggcatgatgcttggagttgaacttgtcagtgatggcaaacttaaaacaccagcacaaagtgaaacactgcatgtgatggaccaaatgaaagaattaggagtgctgattggaaagggtggctattatggaaatgtattcagaattacaccacccctatgtttcaccaaagaagatgcagacttccttgtggatgcgatggactacacattttccagaatgtgaagcttaaaataagaactaagtgtaaataaatctctattttacataatcatgttaagtaaactgtattaggttgatgcttggtttcatgctggcgccacaaaagtcacattttttatgtagaaatctggaggctacaaagagttgtggtgagattgaatgtgaaaaaaataattgtatccctttcaccacaccgcaggaaccaaacacaccagtataccatctatttagattgtagcaagtcaagtttataaattttacatggaagcttagtcccccaaaaaaaaaaaaaaaaaaaaaaaaaaaa

SEQ ID NO: 129696 - DNA, 748 bp, Glycine max
  Clone ID: PAT_MRT3847_88122C.1
ggtggaaccccgtgaagaacgagaggtccttgagcggatgatagccaaaatgtgtttacttgcagttccatcttccctcccctgttaattcaccaaacaaataccaaattgcatcacggattagttgatccctcctttgaaaacaaaacgatgccgattttcaaaaccccgttcaacggctactccgtaaagttcagccccttctacgagaaccgcctggccgtggccaccgcccagaacttcggcatcctgggcaacggccgcctccacgtcctcgacctctccccggagccttccctccccatctctgagctggtcgcctacgacaccgccgacggcatctacgacgtggcctggtccgaatcccacgactccatcgtcatcgccgccgtcgccgacggctccgttaagctctacgacctggccctccccccaacctccaaccccatccgctccttccaggaacacacccgcgaggtccactccgccgactacaaccccgtccgccgtgactccttcctctcctcctcctgggacgacaccgtcaagctctggaccctcgaccgccccaccagcgtccgcaccttcaaggagcacgcctactgcgtctactccgccgtctggaacccccgccacgccgacgtcttcgcctccgccttcggcgactgcaccctccgcgtctgggacgtccgcgagcccggctccaccatgatcctccccgcccacgagttcgagatcctcgcctgcg

SEQ ID NO: 129697 - DNA, 1221 bp, Glycine max
  Clone ID: PAT_MRT3847_88123C.1
caaatatataaaaaaaatgttgtattggtcattttagtttggactgagaccaagagaagagggtatagcatagtttaatcgcagccccgaggggaataaaaccgacaaatcgttgaacatcggagccagagattcagagcgggtaccaccgacgatggatactggcggaggcggagcatcacctacagccgccatgtcgcggtggaagttcgcggcgtggcggcagtaccagcacctgctggacaaatcgacgccgcacgtcggacgccggtggctggggttcgcggcggtggcgcttttgtacttgctgcgcgtgtactttgtggaaggcttctacgtcgtttcgtacggcttaggcatatacatcctcaaccttctgatagggttcctctcccctcaggtggaccccgagaccgcgattctcaacgccgacgaccctatactccccatcgccgcctccgacgagtttcgccccttcgttcgccgcctccccgagttcaagttctggtactcaatcacgaaggcattttgcattgcatttgtgatgactttctttagtgtgtttgatgttcctgtgttctggcctatactcctcttctactgggtggtcctattctcacttacaatgaggagacagatatctcatatgattaaatacaaatatttaccgttttcatctggaaaacagcgctatgatgtaaagagagcaccaccagaaaccacaagcctttcagtttcagaggactgaaattttcagctggagcaatctgaggatttgatggaagctgaagaaagttgcttttgaggtcttgtgtggacaccaacgggatgtcttggatgtttttaggccctagtaaaagattcagtttagggagatataattggagtttctgagggttttcttttactcctttattttctatttctttctatataagtgggctaatggctctcgttcttgaattagtactagtaatcaaataacgagaattttagatagatagcttgtgtagaatgaaatctttttcatttcttgcagtgaagttatactgatctatctttttgttttgctaaataaagagtcattttaatttttcaacaaatgattttttgagaatataataaaataaaactgaattaaattctccatgtaagttaaaattaacttatatatttcaaaaaaaaaaaaaaaaaaaaaaaaaaaaaaaaaaaaaaaaaaaa

SEQ ID NO: 129698 - DNA, 463 bp, Glycine max
  Clone ID: PAT_MRT3847_88124C.1
gaaaaatagagaatgaagatgaaagaagaaaaaaatattatgattgatttgtaaagtgtgtgttacaaagtatttatattctcagatacaagctactactaaacaagactacaactaactagttataatctcaacaccctccctcaagcttatcatggtagatgttgatcatgctaagcttggagacaaaatcatgaaatttgggtggtgccaatgctttggtgagaaaatctgccacttgatcacttgttgaaactggtagtagctttagagtgcccttcaaaagcttctctcgcacaagatggcaatcaatttccaagtgttttgtgcgttcgtgaaaaaccggatttgaggcaatgtggactgcgctttggttgtcacagtaaagagttggagttctggtaagctgaactctcaaatctgcaaaaagatacaacagccattgcaactcacaagcagctga

SEQ ID NO: 129699 - DNA, 925 bp, Glycine max
  unsure (1)..(925): unsure at all n locations
  Clone ID: PAT_MRT3847_88125C.1
gccttgccacgccgttacgttaagcctcggnaantcggcttcgaagaaaataatttttcttttaagtttgaagtttcatctgctttgcctcgtaaccctaattcagagtcctctgttactgaaacacttccatcccaaaccaatgtctgtttctcttttcggatttcctaattcataatgagtagtagaaagagaacggggatgcgggaaggttacgagtttatgccaatacgagatgttggtagatctgttggccagaaagccaagttgattggggttattcttgacttcggctttccaaagaaatccaagggcactgatttttgttgttgcctaagaataattgatgaaacacatcaccaaatctccatggctattaacatgtttgaggaaaatgtagaaagacttccccgtcttgctgctgtcggggatgtagttgtgctttgttgtgttgaggtaaaaatcatttaaaggggaagtaaatgttactttcaacaagagatttttctcttttggtttatataaaggcaaagatggtgatgatttggatccttatcacgtttcttcttattttcaccacgtacgtgaagacgagagcttaatagttaagcttagaaaatggctgatgaattttcagcctcacgaagattcgagtaatttccccatgttaagagaaatcaaggaagaaacttctgttaatttggcatgcaagatccttcatttttgcgagactgctaaagatgagtggattatattttcttgggatggtactaacactccttcaaatgtcatatgttcaaagcttgaagaggaaattaactgtccacttcctttacaactagaacccttgcctttgtcaagagaggttctatgtactttgcctgttgctggatccatcttgaggatgatgtttgataaagtcgtt

SEQ ID NO: 129700 - DNA, 177 bp, Glycine max
  Clone ID: PAT_MRT3847_88126C.1
tcggcgcgcccggcggatcatgcctgtgccgcctcctatcgcttatttaatcaccctccacgatgggattcaacacagatgggggggtttttattattaaaacattacactatgcttgttactatgtacacagtcgtacttattcatattaacttgaccattatggaccactacgtt

SEQ ID NO: 129701 - DNA, 558 bp, Glycine max
  Clone ID: PAT_MRT3847_88127C.1
tgattccttcggtggagttcagtcctctttctctcccgagactcctacctccgctgtgccccaggagataaagggtggggcagaattaacatggaggtggtggtggtgctgttgcagctgcacctgcaggtggagctgccgcacctgatgctgccccagctgctgacaaaaaggaataaaaggtggaggaagagtccgatgatgatatgggattgggactgtttgaccagagctttttctgctttgtattgagctccgacggaaaagcgtttttagcgacaaatgctataaattgattggttattgatccgcaccaggtaatggttcattgaacttcgcccgatactagatatgttctgggacccacatggttcttctgtatcgcggtgtaggaatgataccccttttttaaaagaggactgaactccaccggaggaatcacggacccgtgggtcggccgggcaatttagaagagccacctttacgcacaccagcttgccatataataagtcttatataaggtcgccgaaatccaggtcactggccgtccctgtacaa

SEQ ID NO: 129702 - DNA, 496 bp, Glycine max
  Clone ID: PAT_MRT3847_88128C.1
cccatttgtttggcttctcttctgtcattattcttgaatctttgctaggccaagaccagaatatagaaaaaaagccataaaatggcacaagaaaaggcacttcgtgttaggtacctagtggcattccttcttgtgttcttcactatggcctcatgtggctcaggtgttggagtcaactggggaaccatggcaactcacaagcttccaccaaataaggtggtcaagatgcttcaagaaaacggttttgataaactgaagctgtttgatgctgaagagtggattatggcagcactgatggggacagatattgaagtgatgctagcaatacccaataacatgttggaggagatgagtaggaatcctcacgttgcagattcttgggtttatgaaaatgtcactagttacatgtaccctggtggactaaatatcaaggctgcaatgtcaacgcggttaagtgatgtgagtggtcaaaaaccgggtagcaatgattcttcga

SEQ ID NO: 129703 - DNA, 268 bp, Glycine max
  Clone ID: PAT_MRT3847_88129C.1
ctcgtccttcttttttctatcttcttatttacttgtgggtgtggttgatttttatctcacctgaaacatactaactgctgtgttaactgtatttgcagaaactcctgcaacttctgcaacgactgcggatgctgccatatgtacccatacttgaactacaccgaatcaaccaccaccgataccttgttcatgggagttgcaccagttaaagctcaattctaaagtgctaaaatgggtgttccctcttacaactataactgcaaatgtg

SEQ ID NO: 129704 - DNA, 218 bp, Glycine max
  Clone ID: PAT_MRT3847_8812C.1
tgctccaaccggtgtgagaccgcaaaataaattgagtcttagataactaactccaatttttcaagggacgtttttttaaaatccatattatctataaacgctttaaatagaaactttcacaaggcaatacattaaatttggtacataatcatatcagattgttttgggtgggggtggatagcagataaaaatgaaacaaatgcttaactgtttgaatt

SEQ ID NO: 129705 - DNA, 770 bp, Glycine max
  unsure (1)..(770): unsure at all n locations
  Clone ID: PAT_MRT3847_88130C.1
gcacgagcaccatacangnacccatnannctncaccaccatacaagtgacccttctcntnggccaccaccatataagtacccatctccaccaccccnagtctanaagtacaagnntacaccacccnnagtttacaagtacaaatctcctcctncaccctataagtatccatctcnttcaccaccaccatacaagtacccatcaccaccacccccagtttacaaatacnngtctcctcctgctgctgttnattnaccacctcncccagtttacatntatgcatgccctnctncttcatatgctactaggttatttctgaagaatataagncaataaaaaacgttggtgatagcagngaagatgtacttcgnaattgccaaggaanacatcggaagccaagttttcgcgcattttgcacataagaaaaacgaagggcnatccttttttttcggttgnattggttatgaattattaaatactttgggtttagaacaggntgnntgnactggttttggcttntgncggtggaggggttnacntggaaggctttttggtttggnaacctggttgcccttgcnanggggttggggaagccanttttttatggagtgaaaaccancttnnngccttggntatttaattggaaaaanttcacanttgngttgggatnttnaataataaaaaattgggtttaaagaatatttaantgttnaaaaaaaaaaaaaaaaaaactgggggggggggccgggccccaattncccttaaaggggg

SEQ ID NO: 129706 - DNA, 266 bp, Glycine max
  Clone ID: PAT_MRT3847_88131C.1
attgtttaaacctaattctcatttattcatctttcgattcttgtccaaccaaaaatgtggcggtttcataaaactggttcctataacaccatcacccttgacgtgcaaacctccgacacgatctgtaattacaactctatcattttgtgacaaacacacattcccgttttattagtatacacatatctaacacgaacaacacctccaagctaatatcaccattttacaactctatttcttttctgaattcactatccattttttac

SEQ ID NO: 129707 - DNA, 339 bp, Glycine max
  unsure (1)..(339): unsure at all n locations
  Clone ID: PAT_MRT3847_88132C.1
gacccacgcgtccggntcctgaggctctcattttttgggggagacggaggcttgnaaaaaaagagggacctgagtgaaacaagtggtggggttctctcacaaacatcgaagaggaaaatgttaagcacccattgttggagaggaagtgccaccagaactgctctggttgcatactggctcaagccaaccacttgagggagggagggggtgtaccctttacaaacctctccatcatatggatgggggcagccgaanctcgccggccgcgtccgcttcatggactacctgggcgaggagcggggccgggccgtgacggtgaacagctgctacgtgctgctg

SEQ ID NO: 129708 - DNA, 260 bp, Glycine max
  Clone ID: PAT_MRT3847_88133C.1
ggaaataccgacttgcaaaatatttacctgactcctcatctgatggtatgtctatctgttttttcgttatttaaattgtttgtgtatatgatatttaggacttatttatttgttgtttttagtccattaaacattcattttagcctgatttctcctttagatttatttggtgataacttttaaaaatgttgatagaagggaaaaaggccgacaagaaagaaacaggggatatgctttccaatcttgatggttcatcgtga

SEQ ID NO: 129709 - DNA, 361 bp, Glycine max
  unsure (1)..(361): unsure at all n locations
  Clone ID: PAT_MRT3847_88134C.1
agtttacagtggactgcttaaattntcataggctaaagaccttccttggactatggngtttataaaagaccaaatcccagacctccatgaatgcgcctagagaggatactaaacaaaatcccctgggttgctnagtgagtttatgtttaaaaagaatcctttggctcgcttgtaccggcaggaattaatgtcaagttgaccttgctttgcccgccctgagattaactcaactgttactaacacggccctgcccttgtgttctgcaacttctaataaaaaacacacccaccccctggggcccccaacttaatacttactcgggacaccgccaggggcctcatgattaatcttacctggggag

SEQ ID NO: 129710 - DNA, 211 bp, Glycine max
  Clone ID: PAT_MRT3847_88135C.1
aaacactaaaaatttttagttccacaaaaccaaaccaaaattacaactgcctctattctcatccaccattatatcaacaccaaccttatctacaagcacaattattcaaaaacaccatcattttaagccatccaacatattctatcaaggtcttatacccatcacacatttcacaaccaaagttatcatcaccacacaaaagcttatttca

SEQ ID NO: 129711 - DNA, 326 bp, Glycine max
  Clone ID: PAT_MRT3847_88137C.1
gaaaaaaaaagggggggggttatttgagaaaaaatttttttgttggtgtgggaactggggggaggaaaaaacggtgtccttaaggctttaaaggtgggaaacaggtttttctgattttgggggtggggggttttttttagcccccggggtaaaaggctaaaaaggtggtcatagcttatagggggggggtggaacttgggcaattttttttttttgtgataacccacctttttcaattttttataactggttaacatcggtgtggtctagactctcccctggttggcctgttttgttggtgttaaaaacatgtgtctccaattttt

SEQ ID NO: 129712 - DNA, 496 bp, Glycine max
  unsure (1)..(496): unsure at all n locations
  Clone ID: PAT_MRT3847_88138C.1
tagtgatgattccaagaaaactcgaaggactcggaaaaaaggtgcatctagttctgctggcctggaagaaaagaaggaagtcaaggaagagaaaaaggttagaagacgaaagaaaactgaagaggagaaattaattgtagaggataaaggtagtgaagctgaaatcagtgaccaagatgagccttcatttcttgaaaatgtggaggacgatagtgacagtggcttggaactgataaaagatgatggagaggacattagctttacttatggatggcctcctcttgtttgttgctttggagctgtgcagcatgcttttgtgccttcagggagacccgccaataggcttataaatcatgaaatccatgaaagcatgaaggatgccttatggagccctgaaaatttgttagggctccagggggctctgctggtaagggtgctatagctcttgctaccttgagtggcaggnttgctttcatgggaaaacttgcggatgatg

SEQ ID NO: 129713 - DNA, 207 bp, Glycine max
  Clone ID: PAT_MRT3847_88139C.1
tgtcgtccggtgataaaacgcggaaacaaatgacgcattcaccagggttcattaggggagatacgacctatcgaccgaacgactgaggacaataccgattcaaaatggatggaaaatccaccattaaaccctatgcttgacatcgtatcgaaggaaaggttaacatgaccaccattggcagaatccctgcgcattgctaaaacctaa

SEQ ID NO: 129714 - DNA, 317 bp, Glycine max
  unsure (1)..(317): unsure at all n locations
  Clone ID: PAT_MRT3847_8813C.1
tcgagccgaataggctcgagctngagccgctctctctctctctgtcttccaaaataagacactttcatctctctctatataatttcctgcttccactgtttctttcttcctctgcacatgattgatgagtcctccttaaactatagctcgctgctaacgaaacctaacacaacgcctatgtgaggtagttcgagctgaagcatagattaagactacgccgtagctactcctactggtataagaatcctactgtccataaccagaaacctaaccctaccgatgcttaatctagccttctctaatttagaagagaacgc

SEQ ID NO: 129715 - DNA, 177 bp, Glycine max
  Clone ID: PAT_MRT3847_88140C.1
acactgcaacagcaacagcttccaaatggcacacggacaacgtagagtttgtgtcacgggaggcactgggttcgttggttcacggaccatcaagagatccttgaacacggatatgctgttaacaccactactagatctgactcaggacgcaagagacacgttagcttcctcaccaac

SEQ ID NO: 129716 - DNA, 545 bp, Glycine max
  Clone ID: PAT_MRT3847_88141C.1
ggctcgagaaatattactataaatatttatagtaaaataaaagtgatttgtgcggttccgcttgggagtcggtggcccttaccttgttgctcatgtccagtgtctctagcagagattccgtgtgattcgcagattgatcttcttactcgcttcgccgagatagaggatagagccggactcgtaccctctctcgttctctgctccgacccatgccggttgttaagaccggggctctcatccactcagtcatctgtccataagctaatttatctcttatctctatcccactgacttgttcatgagcacataaatggttacccatcgtgttatcaaccattatagtatctgtcatgggttgagatcttcgctgtgaatctattctgtctagccgtctatcggtctgtatatcggcgagcaatccagcgtgccttcgttgtgactctcaatactcccctcgatccatgcccccctagggctggtaatcacgttatatcatcaatgatcccatgatacaaccctcctgcgtgtggcccttgcctactgtc

SEQ ID NO: 129717 - DNA, 318 bp, Glycine max
  Clone ID: PAT_MRT3847_88142C.1
cggctcgagcggctgcgagaagacgatagataggctggtctacggaaccagagattctgggtacggtccccagtggagtcgtttcatatttttgtaatttacaatccctgcacaagtttgttcaactgagatatcattatcaaggttatctgatttttattttttaaccacatatctctctttaaaaatcatatactataaaacagccatcaagaatctaagtgtagagatgctatttatttacaactttgattacaaagtcacaagtgacctgtgctatatatcgtccaggtgtcattggagacaccagaaattttt

SEQ ID NO: 129718 - DNA, 375 bp, Glycine max
  Clone ID: PAT_MRT3847_88143C.1
ttgttagaggtttaaccttcaaatatgatataattggtgctggtcctcattcttcaagaggagttggtgcaaaggaagatcaacaaaaacccaaaatgattgataccagattgagacaaataattaatcctcaatacaatgaggttcaagctcagatggaaacaaatttgtctaaattgcctcttgatgatgttcaatcttctaaaggttctatgtaggatcttaaaatttctcaatctataatagcactccccaagaacacattttgaggaaccattcatcgtagtgatttattagcaaattttttttacagaatgcaatcttatagctagtgttgtttagcatcgcactcattgtattaaaggtattattaaa

SEQ ID NO: 129719 - DNA, 1722 bp, Glycine max
  Clone ID: PAT_MRT3847_88144C.1
tcggccgctcgtcccgccagcacatgttcatcctttgattatatcacatactcaccatggaggctaagttggccaccaccataatacttattttctccgtaatttggcttatgagggtgaatggcatagacccttgtgcctctcaagcggataattccgacctgaacgtgattcccatctacagcaaatgctcaccgttcaaaccaccaaagtcagactcatcgtgggacaacagaattataaacatggcctcaaaagacccactccgattcaaatacttgtccaccttagtgggccaaaagaccgtgtccacggccccaatcgcttcgggccagaccttcaacatcggcaactacgtcgtcagggtcaaattgggaacccctggtcaacttttgttcatggtcctcgacaccagcaccgacgaggccttcgttccatgctcgggctgcacgggctgctccgacaccactttctcgcccaaagcctccaccagctatggcccattggactgctctgttccccagtgcggtcaggtccgcgggctttcgtgccccgccacaggtaccggcgcgtgctccttcaaccaatcctacgcgggctcatctttctccgccaccctagtccaagactcgttaagattagccactgatgttatccccaactactccttcggctgcgtcaacgccatcaccggcgcctctgtcccggcccaagggcttttgggcctgggccgtggcccgctgtccttgctctcccaatccgggtcaaattactcgggcatcttctcttactgtctccccagcttcaagtcctactacttctctgggtcgctcaagctcgggcccgtgggccagcccaagagcattcgcaccaccccgcttcttcgcagccctcaccgtccttctctttactacgtgaacttcaccggaatcagcgtgggacgtgtcctggtaccctttcccagcgagtatcttgggtttaacccgaatacaggatccggaaccataattgattcgggcacggttataacccggttcgtggagcccgtttacaacgcggtgagggaggagttcaggaagcaggtgggaggcactacattcacgagcattggagccttcgatacgtgttttgtgaaaacctacgaaactctggcgccgccaattacgctgcacttcgaggggttggacctgaaactgccgttggaaaacagcttgatccacagcagcgcgggttcgctggcgtgtcttgcaatggcggcggcacccgacaatgtgaactcggtgttgaacgtcatcgccaactttcagcaacagaaccttaggattttgtttgataccgtcaataataaggttggcatagcccgtgaggtttgtaactagctggttggctacatttttatttatttatttattaatatgtaccagtggctttcttgattagctaactaggtttggatctttcgttgggttcaaaaacgtgatggtgtgggtgtgtggccacggtgaataagcttgccttgtgtgcctttggaagatatgcaatgtgaaataggacctagctagtactattttatcttagatcgatcgttcgcaaagtggggccaacctatcattgtaataatgatgtttgattaaattaataatgtaagatcaattaagtagcaaggatgtatgttgtttagtttggaataataatatgggatgaattactactgccaaaaat

SEQ ID NO: 129720 - DNA, 431 bp, Glycine max
  Clone ID: PAT_MRT3847_88145C.1
gaacgcaaacaaagagggaaataaatccctacgagggacacatggcaattgaaacactgaaggtataaaagcccaaggggtcaaaaccataagctaagacggccaactgaggataagcttgacggagctggagctccagacgtaacgacacccggacagaataatactgacactcactggaacgactcttccatgcttacctcactacagcacgtaacaggcgatctaggtgaaccacagatactaagactttccgaattctcaggtggacaacggaacgcgacattgcaaggcctgaaacgatacatcctacacgacagtatactttctgatccctaaagcttgtgtgcaagaccgacgagcttgcaccatacgcatgaactgtgacactcaactgaccttggaagaaacatgcgggtaccctctgaacc

SEQ ID NO: 129721 - DNA, 438 bp, Glycine max
  Clone ID: PAT_MRT3847_88146C.1
gcgaaacagtaatattaggcaggaaattttgattgttaacactcacctgatatttccccatgattcaactctatcccttgtttacaagatacttcaatacgtagaatcttatcagaatgatttccaactcaagccaatgccaatcgtactttgcggtgactggaatggaagcaaacgtggacacgtctacaagttcttgaggtctcagggctttgtatcatcttatgatactgcacatcattacactgatgcagatgctcacaagtgggttagccaccgcaatcaccggggaaatatatgtgctgttgattttatttggcttctcaatcccgacaaatatcgaaaactactaaaagctagttggagtgaagcagtttttggtatgttcaagtatctactacggagagctatattgactgagagtgatgcctttgcctt

SEQ ID NO: 129722 - DNA, 328 bp, Glycine max
  Clone ID: PAT_MRT3847_88147C.1
tttcacttcgtccgggaatagatcctcaatacaatgcggttcaggctcagcccaaaacaaatgtgggaacattggctccagccgatgaagcacctgctcaaggtgccacgatggagattaaactgtcctgatataatattgcacttcccaaaagcgccgtgggaggaaccattatgcggagtggttaattggcgcattctatgacaccaggcagtggtacaacctgtggtgattagcggtgcactcatgatttcacaggaatgattttactagcgtgtgcagattttttttccagggaactcccgtataggattgtccagcgctgtga

SEQ ID NO: 129723 - DNA, 326 bp, Glycine max
  Clone ID: PAT_MRT3847_88148C.1
cgtaaactttctgattgtgattcaagactgcgacgacgatgcaagtgatagacactcggctgggcagaacatgtaactgaatacaatcgaactatggacccatacgtgactgaatcctatggagtcgctatcaaatactgagacgggattctaatggccgctgacatgggaggtacggatggatatacccttcggtacaagaatgatgagcgtattaagcctattggaaagcattatcttcttggtactagcggtgagataagtgactttcaggagattctgcgatacctagatgagcttatcatatatgacaacatgtgagatga

SEQ ID NO: 129724 - DNA, 351 bp, Glycine max
  unsure (1)..(351): unsure at all n locations
  Clone ID: PAT_MRT3847_88149C.1
gggggggtaaataaaaagngttactccctttcatcccccaaccaggggtaaaggtcatcatgttcacaaagagtccatccaacaaagaaggacatcaaaatggtacagaaaaatacaagtttatcttatctaccaccccctccccacctttttcttttgccaaagatacctaatatttttccatcatagcaatggtttgaacgagggtaggggacttctaaattggaacctaaatttactttttttgaagattattattattactacattattacataatcccctctgccaataataacactccatgtattaacatcgccatcctgacggtgcaacaatggccctattatg

SEQ ID NO: 129725 - DNA, 291 bp, Glycine max
  Clone ID: PAT_MRT3847_8814C.1
acagcttccaacaaattactaaggagagttatgcaagatccattgcggattacgtacacaatttccagtcgaaaggtgacgctgtaacctcaaatgtcgacactcatcaaccaggtttcagccgtagtatcagctacatcgtcatcatgggctgatcctgccttgttgtagcagttacgacttcctacactggtagccacggtcacacttgctgtcactttgtaggtcctgatattttcactgccatagcaacttgaggatcttgcgccctcttcccacaactgtgatgtc

SEQ ID NO: 129726 - DNA, 280 bp, Glycine max
  unsure (1)..(280): unsure at all n locations
  Clone ID: PAT_MRT3847_88150C.1
ggctccctttaacactttagaaacactccttccaaagagaattgtatcccttcaaggacttgcaaactttccnaatcccccatagtacaagccccccactcattaaccaccattttataatcccccactagagaagcctactgtctacaaaccttcatgtaacaacccaccaatttatattccttcatgtaaataatccaccactatacaagcccccacctagaaaacccccaagtacacacccccaattgaaaaacctccactaatcatacccccaatt

SEQ ID NO: 129727 - DNA, 245 bp, Glycine max
  Clone ID: PAT_MRT3847_88151C.1
gagatccagtagcatctgcatattgccgtctttatatggctcactgtgctcagaagctgccttcacatgatataggctatcttgttacatgtgtcaatgacatcagagttgttttgatgcaaatcttgtcagccaatgaaagaactcataaaaatgttaaactcaacaaaaaattgcaagtcagtctgatggaaccaaccattgagtatattatgaagtgtatatttactgggttgtctcagtat

SEQ ID NO: 129728 - DNA, 176 bp, Glycine max
  Clone ID: PAT_MRT3847_88152C.1
ggcggcagaaaatctttcaatatataggacaactccaaaagaagcagtcgcaatcaccacgatcaaactcactcgttacataagtatagcaaaaccatacaccaaaaccccatacctaacagcaaattattgaaaccaaaataaataaacaaaataacccacataaggggaaggac

SEQ ID NO: 129729 - DNA, 465 bp, Glycine max
  Clone ID: PAT_MRT3847_88153C.1
ggcaacggacctcgatttatttctccttttttctctccatcagcaattcagcatcagcagtatatagaagccacgcgccataacgcattaacagtaccatttctcatgatcaaatccatcgcttccctcagtttcactttccgtctcctcccgtgctcgaaccacgatctagggtttacttcagattccatacgaatgtaaattttctggcattctcttttcctgcgtcttcaaacagaaattataaaaagccgatgggagtagtcgttgagagctccgttttttgggagccaaatccatccacatacatcttcatcttcgtttgttgctgcttctcgatcttccttttccctcacgtctctaacctcaacagaacctccacaatcttcgaccatggaacctctcactggtttctccgtttccagcggaacttcctcctccattattctctcgcctcagtaatgg

SEQ ID NO: 129730 - DNA, 1042 bp, Glycine max
  Clone ID: PAT_MRT3847_88154C.1
ggctcgagttacagagcaaaaagctgattgatgttgattctttcaagaagctcttgaaaggcctgacagaaaaggtgtggtggcagcaggatgcagcatcagcagtggccagcacagtaacacaatgcaaactgggtaatggaaaaagacgctccaagggtgacacatggttactgttcgtgggtcctgatagaattggcaagaagaaaatggcagcagctctttctgagctggtatctgggtccaccaacccaataataatacctctggcgcaacgccgtgcggatggagactctgatgcccctcatctgcgtggaaaaacagcacttgatcgaatagcagaggccatcagaaggaacccactttctgtcatcgtgcttgaggacattgatgaagccaacattcttcttcgtgggagcataagaagagccatggaacaaggccggttcccggattcccatggccgtgaaatcagtcgcttggaaatgtcatgtttatcctcactgctaattggttgccggaggacttcaggtgcctctcaaacgagtctctactggatgaagaaaagcttgaaaatttagccaaaggagggtggcaattacgcatatcagcaggtaagagagcatcaaaacgaagacctagttggctatccgatgaagacaggtccttgaagcctcgtaaagaggtgaactcaggtgtatcgtttgatcttaacgaagctgctgctgatgcagcagaggacgacaggggagatggttccctcaattcaagtgacttcacagtggaacatgaagacaactatcatgatgtaggagggtcactctcagcagtaccacgtgagctgttggattctgtggacgatgccattgtcttcaagcccttgaatttcgatctccttcgcggaatttctcgtcatccatcgcaagaggttctcctcggtggtcgggaatggggtgtcaattgaagtgcagggagaggcttttgacaagatcaccagtggagtgtggttaggccaaaccaccattgatgagtggatggacca

SEQ ID NO: 129731 - DNA, 1106 bp, Glycine max
  unsure (1)..(1106): unsure at all n locations
  Clone ID: PAT_MRT3847_88155C.1
ccagcgtccgattctttttgcatattcataactagcttgttattacacaaaatttgcatacacacacacgtttttaaatacacaaatgccactcgtttaaaaattgtggtcaggttcatatatatggcgaataaactgaatataaggctaggagaaccaactctggtgccaccagcagaagaaacggaaaagggtctttactacttcctttcaaaccttgaccagaacatagcacatccagttcgaacggtttacttttataataagtctgcatgtagagggaacgaggaagcagcacaagtaataaaggatgctttgtcgaaggttcttgttcactattaccctatggctggaagattggccataagttcagaagggaaactgatcatagagtgcacaggtgagggtgttgtgtttgttgaggctgaagaagcaaactgtgtgataaaggacttgggagatttgacaaaacaacctgaccttgaaactcttggaaaactggtttatgatatccccggtgcaaccaacatgcttcagatacctcctttgctagttcaatttgttttgggcgtaaacgtgaaccattgcatgtctgatggtatatgtgctatgcaattcgtgaacgcatggggtgagacagccagaggcttggacttgagcatctcaccagttctggaccgaactatcctaagagcacgaaaccctcctaaaatagagtttccacaccacgaattcgacgagattgaagatgtatcaaatgccacaaaactctacgaggaggaagagatcctctacgagtccttctgtttcgacccagatgagcttgagctgcttaagaaagtagccccagaaagacggtgttggcaaaaaagtgctctacttttgaagcactcacagctnttgtctggagagctagaagtgaagccttanggacgcactctaatcaacaaacaaagctactttttgctgttgatggaaggtctanatttgtgcctccaatacccaagggatactttggcaatgccattgtgttntcaaatgctctatgcaaggtagaggaattagtgaataatcccctttcatttaatgtgggattggtttggagg

SEQ ID NO: 129732 - DNA, 520 bp, Glycine max
  Clone ID: PAT_MRT3847_88156C.1
attgaaatggtaattacatacataattttattgtcatattacatggacacaataaacaactaaaaaaaacaaaacaaaaactattggtttggatcataagttgtggacaatacgctaaggatgacattttagggttcaagggtgatatattttttttatcagaggatgatatctagatcataattattagccattgtaaccttttgcacattcttataggaatactttcgatcaaagaacacaaatacaaacaagtttaatgtggtcataattgcaagtagccaaaaaatttgtccacacggctactattcaaatccttaccaaaccaatttttcccacttttacccgtcacatgatcaacaattgttatcaacaaactactacgaaaacttgtcccaatctctcactatagtaaaatgcaattcccaagcttctcattgagtcaggcacttggtcatagaaatactcttgtaagcccactagagaaaacccatcaccaaatttaattattagaaattat

SEQ ID NO: 129733 - DNA, 868 bp, Glycine max
  Clone ID: PAT_MRT3847_88157C.1
gttccagacttcccagataagcaaatggttgatctgaaatctctgcaaggaaacaagtcaaaaccaaggaaggctttatccgatattgataatttgttgaaaggaatgaatatgaataagaagacacctcttaaaaaggctgtacagtgccctgggcagcaattagcttcacccacccctccaagaagtccatttgcttcgttgtcattgttgcagaggcacatttcacggtcaaaacaatcagtggatcctttttcggctcatgaaattgataacttatctagcaaaaactattctctaactcatacggtaaatccagaactcaatcttgctggatctgggaacctgtcaaatgaattgaatgcacacatgattgaagatgttcatgctgttggtaagacaagcacagttttggacacagacagaaatggcaccaatacttctgaaattcccaaggaagactattctgggaagtcatcaaataaatggaatgcaccctcaactgaagatataattgctgttggtgggaatagtttgcctgaggatacagtcagaaatggcaccagtacttctcaaaagttcatcgtggataattcaagggaacctaagtttgatgttaatattgtctcaaatgaacctcatgttgacatggatgtagatctgacatccagttgtatgggtgacaatgtggacaggtctaatattgaggcacacatgattgaagatgatattgctgttggtaagacaagtacagttttggacacagatataaatagcatccacacttctgaaatttccaaggaagataagtctgggaagtcatctaataatctgaatgtgccctgaattgacaatatgagtgcagctg

SEQ ID NO: 129734 - DNA, 395 bp, Glycine max
  Clone ID: PAT_MRT3847_88158C.1
gaaagaaagaggcccatttaaatcaacgctcaagcaatgttctgccaccattagggctgatactgataatcaagtgggtgaatgttctctaggtgagcgcaatgaaaagcatcatggagctagtaaatcactttctgaagatgcaccccacaggaattttgccgagactgtaaggatcagtaatcatcatattgacgaactttattcttggcatgatcgtggttctcgcatgactgacagcattgacagtgcaaagtttctgaaagatggtgattaattgctcacataactgcagtgcactggtgattcaagtgtagactattgacaacctcaggcacaagatccatcatcatccagtattatccatgataacaatataaaagctgatgcacgac

SEQ ID NO: 129735 - DNA, 252 bp, Glycine max
  Clone ID: PAT_MRT3847_88159C.1
taccaaacgttccctctcccaatgaaaactggctatcgtgagccttcttcggaggtaaaatgcgcaccttttaggcttgctgaggaagcacacaacatccgagcctataaaaccattcctgaagagtgcgctgaaccaacataggactacattaatggctaacaatttagatcagactctacaacatttcaccaacaagcttgctgttatgctagtgaacgcgaaacccatcacaaccacatattgatattc

SEQ ID NO: 129736 - DNA, 463 bp, Glycine max
  Clone ID: PAT_MRT3847_8815C.1
ctcatgaccataagatgttgagcttcttacctgatatcttacaaacgccactcctcattccttggtcggcagctgtcctataaaaatgaaccaccgactgcaacatccagtgactcaaacccttcagtcgattgccttgcctcacaactctcacattgtcctgcttggtatttttcttatagagtgcttttgctttttgtgtgggacctacccctatgggagatatgttcaggattcacaagaccttgcaaaatggaactgactgaatggaccgaccctttcttctttggaaaaccgatcttactcctggtttggaataattctttgattcagttcagcgcatgacctctgccatgaacaacaaaggttctgaggctaggcacccctgattgccctgatacctttgtccttatgaggatcacagccacctgtgtcaaggaaactatcatccaaataactgcct

SEQ ID NO: 129737 - DNA, 555 bp, Glycine max
  Clone ID: PAT_MRT3847_88160C.1
tacggctgctagaagcaaacacagacacagaaaaaaaaatggctttaacacttcgctcttcaatttccctcgccagccagaaagaaaccaaactccaaaaacccgatgacgaggttcccaccaaagtgtttaactttgcaaaagccaacccatctttccgtcttagagcaaagagttccatgcaacaaacacatgtcacaggagacaacaacaagaacaaaaacaacaacttcaactccgaagtaacgatgataaacgagaaaagggagaaggttcacgcgccatcggttgcacatagccacaatgattcaatgagagttcccgtgtttgtgatgcttccgttggacactgtaacaatgggagggactttgaataagccgagagcaatgaatgctagtttgatggcactgaagagtgcgggagtggaaggagtgatggtggatgcttggtggggtttggtggaaaaagagggacccttgaagtataattgggaagcctatgctgaacttgtgcagatggttcaaaggcatggcttgaagcttcaggttgtcatgt

SEQ ID NO: 129738 - DNA, 194 bp, Glycine max
  Clone ID: PAT_MRT3847_88161C.1
acgcgaccagctgactaggacaggcggcctcttgtatatcgatgtgatgacaagagatgatgatgatgatcgttgccgccggcatatgttacatgttccaattacctcggtggccatcagtgaacaacgccatatcttaaacttgctctttccgtactattttggactacctagtatctaaacacggatttttt

SEQ ID NO: 129739 - DNA, 709 bp, Glycine max
  Clone ID: PAT_MRT3847_88162C.1
aactctccgtcttctaaactcttctttttctctactacaaaaggtggccctgatatcacttatgagcaatgaaggaaggatgtaggcatgatctatggcaccagacgcagggtgtcatcatcgccactattttctacactcagcatccaaccggtcccaccaccggaactggatctcttcgctgagcgtaagcctggactccatggccttcacatggacatgctcatgaacacacactaccactgtactgcctggcgactgcaatgaatgtctatcctaataacagcgacacggagacccctgaggacaacaaacgtcatgctggtgatcttgtgaatgtcaatgtgcggcgtatcgatggtaccgatatcttcctagtacccagcagctggattcctctctctggaacacactccatcagaggaaagattgttgttgtccctggtgattctgatgaccttggagaaggcggtcatgaacttaacaaaactactggacatgctgatctgagaggatcttgtggtatcattggtctgcaaggataaactaatcacatgaggatgtaaccgtgctctagaattgtaggaataaagtaacacccactctatacccgtgctgatatcgtcggtccgtgtgaccctgactaccctgtttcgcctgcaccgaatctgagaggaatatgaagacacctgatgctcaagcgaattga

SEQ ID NO: 129740 - DNA, 208 bp, Glycine max
  Clone ID: PAT_MRT3847_88163C.1
tttttaaaaacaaaaaaccaacgcaccgaccaggtattcaatgccatacttcgaatgacaacatagacacatgggaagaacgaacacgcacctgacagacacaatcacataaaacccatgaccttgcatcctgccgcgctagagggaacactcagaccgggcgtgaccctaaaccccacatggaacttattaacaagaccagcgcccc

SEQ ID NO: 129741 - DNA, 274 bp, Glycine max
  Clone ID: PAT_MRT3847_88164C.1
ccattaactaagtaacatggtttttgtgtatgctacaaaatatgtttttggggtcgtattattgacattttttgacgttcatttgaggatttaaatttaatcattgaggtgttttgctcaaaaaaaaaaaaaaggggggccccccgcttattacccccttcccccgggatttatttccgggccgggaccttgaggggtaccaattttccccaaaaagggcccttttaaaccttgggtaaaaccagggcaaaacttttccccggggaaaattttt

SEQ ID NO: 129742 - DNA, 339 bp, Glycine max
  Clone ID: PAT_MRT3847_88165C.1
gtacaagttgctcaccatcatatttaaatatgcgggtgaccctgtctggtgactaaaaaaagggggggaatggcttccggaccgtaacctgctggcctaccacctattcatatactgagcggtacctgcgctcgtcccagctatgcccatagcgggtcgcagtggggcttggcgatatgatggcaatagcacacaactgactgaccgggagcttcgatcgcaaagcctgacggtgctacaagcgggaggcaactcacattaagcgcggggcgctcactgggcgagctcacgtacgtaaaccgcgttgggcagacggaccgatgtacaggccaaaaacct

SEQ ID NO: 129743 - DNA, 430 bp, Glycine max
  unsure (1)..(430): unsure at all n locations
  Clone ID: PAT_MRT3847_88166C.1
aaaantntatttttttttttttggggttgggttacaaaaacaaaggggcctttttttcatttaataaaaaaaagcccccttttgaaaaccttatgggatatcaacctttgggtttcctgcccttgaatctgccccagatctttaatactcactggcatggctttggtgtactcacgatatccatttgtttcaaggaacttaacccttttatccctttattcccttttatgggttcattggtgttccaccatacatttggcttttttgcattaaaattccagagaagaatgccccctttttttgtttggaataaagtgaggctttcaagttttgaagggaaacccttcccaaaaatgtcccgcaggagttcagggcctgaagttttgaccccaaaactctcttcccttatgctttcttccaacagaaacct

SEQ ID NO: 129744 - DNA, 327 bp, Glycine max
  Clone ID: PAT_MRT3847_88167C.1
tctttttcactttggtagatatcccacattcaggttgggtccttttttgctgggacagtgcgaaaactctgccaaataattcttctgcacaattgctacctcgcaaacttggcaacctgttgctgcccattgttttcctgagtgggccccaattaatagttgagaccattgacaaccaattcacattactgttggatattatgctagaaagcacgatgtcagcattgaatatgatgcatgtacaatttcaaatgattgtggttcattggctgttgtcaaggttggaatatacaaaccaactgctggtatccatggtgctggcagttt

SEQ ID NO: 129745 - DNA, 177 bp, Glycine max
  Clone ID: PAT_MRT3847_88168C.1
gtattatgactcactaaagcactgacactccattaatgcgattgataaggccagcgcccctcaaatatattcatacgctcgctgggacggcacctgctccatactttctattagtttactgagatgattcatgggccatactttcaaataacagacaaaacctatcaacatgatgct

SEQ ID NO: 129746 - DNA, 438 bp, Glycine max
  Clone ID: PAT_MRT3847_88169C.1
ctacaccccaaaggcaaatatggaacgcttgtacgcatcgggtccagattcccgaattgacgcatccatccacgcgtgcgtatgaaaaaattttttttgggagtgatggtccacaaactgtcaaaggtgagattaaattgtgggttaaaccacaaagaggtgggtatttttactatcaaagcaaggggggggcctttttagaggacccagttttacttccccttgattgcgagggattattttttttatggggccaccaaatttaaattaaatggccggggttaaaaaaccttttaattggaaaaaccttgccgttccccaatttaatcgctttgaagaacatcccttttttgccagttggcgtattagcaaaaaggcccaaaccaatcctttttccaaaaagtttgcccacccttaatggcaaataggaacccccct

SEQ ID NO: 129747 - DNA, 424 bp, Glycine max
  Clone ID: PAT_MRT3847_8816C.1
tacggctgcgagaagacgacagaaggggaacgctaccaagaaaagaaaattctctcccattaaggtgaaaacccaacactctccaattctcatatatcctatctcaaactactgtttattaacacctactgattaaaatctaatgtcaccaccttaatccctcctatattattctctaataccgaagcatttaagctcagagcaccaacttccctcatataacacctaaagaaaccactgtaatcaataatgtctttaatcagcctacatcactttctctaactgtatcggatatcggctacaccaaatacatggtcatacacggtgactccttgtactttcatactagggaagaagggttctggtgatttaactacgaaaaaaacctgtacatacatggtcattggtatatatgacgaaccaa

SEQ ID NO: 129748 - DNA, 135 bp, Glycine max
  Clone ID: PAT_MRT3847_88170C.1
ctattaaacccatacaaggtttggttgcaattatggttttggtccaatgctaatatgaatggattaaaatattgttgtaggaatggatgatgcatcctatgtctagtttactagtggtcgatactggttaatttg

SEQ ID NO: 129749 - DNA, 365 bp, Glycine max
  unsure (1)..(365): unsure at all n locations
  Clone ID: PAT_MRT3847_88171C.1
gccaggcacgccttgnnatancattacaccncgacncgnncacgcgacccgttgctgctcttcttcgacctctcaagccggaaaagcataaagatggcagggacattcctatgtacctaagagtcggggaacgagggacaccctgacaagcgatgcgaccaaatctgcgatgctggactcgacgcttgcctcgagcaggacccagacagcaaagatgcctgcgaaacatgcaccaaaaccaacttggtcatggacttcggagaaatcacgaccaagggcaacgttgactacgagaagatagtgcgtgacacctgcaggaacatcggcgtcgaatcaaatgacgcgggactggatgccgacgactg

SEQ ID NO: 129750 - DNA, 333 bp, Glycine max
  Clone ID: PAT_MRT3847_88172C.1
cataacgcttgctttcttagatcgcagcatagatcttggtcgggttactaaggtgaggctaagtacattaaccacaagggtgatattctctatgaccctagctttggagacctgtcatctattcgcttattgaatcgatatacatcatcttaacctactatttaattatagctatgaaccctacttcacaagatgactgtcaccttcttcagaactggcgcgaaaatagaatcttgataatacttatggatgatacagtatccagaagctgtgaaaagcactgatgatatgacttacttgattacggaacatattatattcatagtgtcttga

SEQ ID NO: 129751 - DNA, 276 bp, Glycine max
  Clone ID: PAT_MRT3847_88173C.1
ggaaaaagggatagttgcccactggtttatttatttatttatacatgcaaaagtggtcaaaataattgacatacttgtttacataaaaagttggcggggaaaagtaaacctgcgtagctggcttgctgtcccatgtacacttttttttaaaaattgaaacataaaaaaatcttgaaacgaagcagctaatagaatccattttttttttttaacaataaactcctttttccccatacaatgttttttagtttagtcccctaaaacacgagcaagttt

SEQ ID NO: 129752 - DNA, 277 bp, Glycine max
  unsure (1)..(277): unsure at all n locations
  Clone ID: PAT_MRT3847_88174C.1
tttntcaacaacttctgctanntcctactcnaaccgacacttctgctccgcaattatcnctgggcaaggtcaagatcggaatcaacggatttggaagaattggccgtttggtagccagagtggctctgcagagagacgatgttgaantcgttgccgttaacgacncnttcatcaccaccgattacatganatanatgtntanntacgacagtgttcatgggcantggaagcatcncgntgtcangtnaggacgagangannntctcttcgntgacag

SEQ ID NO: 129753 - DNA, 665 bp, Glycine max
  Clone ID: PAT_MRT3847_88175C.1
ccacgcgtccgcatcttcttgcataattaatcatggatgcctctccctcaagtatgaaacttcttaaattccttttactttgcttgctatgtacaatgttgttctactctgtcatgtgcagttccaagattcattgcaatgagaaggacatgaacacactcctacgcttcaaaacaggagtcacagatccttcaggtgtgctctcctcatggtttccaaaattagattgttgtcaatggactggagtcaagtgtgataacatcactggaagagttacacatcttaatctcccttgtcacacaactcaacctaaagttgttgctttggatgagaaggatgacaaatcacactgcctaactggtgaattcagcctaactttacttgaacttgaatttttgtggtacttggattttagcaacaatgacttcaagtctatccaatacaattcaatgggtagtcaaaaatgtgatcagttgtcaagaggtaaccttcctcatctttgtcggaactccaccaacctccgtttacttgatttatcattgaattatgatcttcttgtcgataatctccattggatttcccgtcttttctcattgcaatatcttagccttgaaggtgtccatcttcacaaggaaattgattggcttcatcagtcaccatgctcc

SEQ ID NO: 129754 - DNA, 225 bp, Glycine max
  Clone ID: PAT_MRT3847_88176C.1
cccacgcgtccgctagattcagccacagattcggaggataagaacatagtcctaggagagggcccgtactaagcagactgatcctaagtccacatgaggaaaggctcctatgaagcatctcgctgccaatgctgcacgtaagtctgcactcaactactgactgtgttaagtagccacattgttcccgtcctgttaccgatgctctacttgagattagtaaatacc

SEQ ID NO: 129755 - DNA, 244 bp, Glycine max
  Clone ID: PAT_MRT3847_88177C.1
ggaaaaggaatagaaaagttttgtaatttttctcttgctccaagttgttgtgaggatatgaaaaaatttatcaattctaactatggaaaaatatcgtgtaccatccttgccgccggcggtctttctcttttgatttatgtgttaaagagatggcccaaaccaaagcccaagcctgagactgagcccacgctcgggcccaagtccgagccccagtccatgcccaagcttgggcccaagtctgtat

SEQ ID NO: 129756 - DNA, 258 bp, Glycine max
  Clone ID: PAT_MRT3847_88178C.1
cgtctccctccagaactccgccggctggaacgctttgcaggaggcgctatgccgccgcgccttccgacatcgggttcgtcctcctccgccttcaccatcacaacgcctggtccaagtggcgccgtcgcctcccgcgggtcatcgccgcgctacgccgcatgcgtgacttctacatggagatctccttccacttcgagagctccctcattcccttcgtcggaaagatcgctccctccgacacctacaaaatctggaagc

SEQ ID NO: 129757 - DNA, 502 bp, Glycine max
  Clone ID: PAT_MRT3847_88179C.1
aattcggctggagcagcaacaagaccaaacattatgtttcctgcaagcttgttttctagattcatgcattcacctattcaaggtcatggccgtgctgcaaagaggttttggacgtatataagaggtacaactgattatggtttgtatttcttaaaaactgaaagtggagaacttcaaggatatgcagatagtgactgggcaggaagtgtagatgatcctaagagcacctctggttatgctttctcattttgtagtgctgttttttcatggaattcaagtaagcaagatgctgtggcccaatcctcagctgaagctaagtatatttctgctgcagctacagcaaatcaagctatttggttaaggaagattcggttagatgtgggtcaaattcaagatggagctactgtcatttgggtggacaataagtcagtcatttgtattgccaacaatcctgtccagcatggaagaactaagtatatcaaggttgaagttcatgacatta

SEQ ID NO: 129758 - DNA, 223 bp, Glycine max
  Clone ID: PAT_MRT3847_8817C.1
ggccgccctttcctatttagtttttattgaatctttttaaactttttagattgccactaaaaaattgcatggacccattgggtacagtattaattatcagcaccacttgtctcactttttatcacacacatatcgctaatctatgctgaacaacttgtcagctgacctggtattaattctgctctattccaattacaacaatctaacacatttaattaaatga

SEQ ID NO: 129759 - DNA, 514 bp, Glycine max
  Clone ID: PAT_MRT3847_88180C.1
agtccttgccggtgcagaccctgcacgtgaccttaaaatcgcagagtcaggctattccaagcttaatagttggctcgctcttcagctgctcccccacagtcagcgtgggcatccttcaacccctggaagaaatcttcctccactcctttgcctaccctttcttcctcgtcggtggaaactacaacaacctctacaacttcatcaagcaacaaggtttcctacttttatttctcttattaatttgcccacatttttttttaattaatgttgcatagttagtaattaataatggttaccaattaggttttatggttgttctttatcttcctatcatgattaatttgtgattttagctgttttttttcttctaaaattaattttttaattattataatcattttttttaattaaaatcacaaaaggagattgcttggttgacatcaaatcaagagaaaagaagatttttttaaatttttttttgagtctcacatttttatttttctcgagccgaatt

SEQ ID NO: 129760 - DNA, 664 bp, Glycine max
  Clone ID: PAT_MRT3847_88181C.1
ggatttcaaaatcacaaggataacctttcattgtcgcacctcatcgcaacctgagcacatctcacatcatcccaacctgatcacatctcacatcatcgtcacacattgttgtagcctaagcattgtctcaaatcgccgcaatgagaacaatgcgcatcgccctcattgcaacctgagctttgcttcaccgaatttggagttgcttcacttttcagttcaaacatctgataaatactctttacccccaattttcaccactccagtcttcacaaatcttctcaggagatatccaaaccagaggatatggaaatacaaataccaagaaaagacttgcattgttattggagctaattcaagaattggctatgcaattgttgttgagggtcttgcaaagtagtttttgtctttctcatatgtttgtttttggaattttgcacttttaagtttgaaattacatgttatgattaatgattttcagaaaaaaaaaactgtctatcttgtatgtcataataggttacactttctgatattcaactaaaattgacaatccaaattttaataaaatattttttttactctaacctctagtttgtaaaacctttcaactattccatggtcgtgatttgtgcccctttgaattggaaccttggattgtaaaacccta

SEQ ID NO: 129761 - DNA, 665 bp, Glycine max
  Clone ID: PAT_MRT3847_88182C.1
ctcctcttccccgatcgattgcgttctagctaagcgatttttgttaatgcttctaacaatgataatatatgtgttttctgattgagaaatcaaatcacgatggatattagatttttgtgtgccatgctcgtttgtttcatgcttacttgtttgttttcaatacttgccaccttccctgttatataggatttccttttctacaatcaattttttttttctgcttgtgttgtcagttttctacaatgggaaaggaaaaagacagaggatgctggcccatctgcgaaggtaaaggctggtagcaaagatcctcctaagaaggaaaaaatttctgtgtctgccatgctggccagtatggatgaaaagcctgataaacctaaaaaggtcccttcttcctccagtaagccgaagccgaaatctgctccaaaagcttccacatacaccgacggaattgatcttcctccatccgacgatgaagatgatgatgatctcttggaagagggggaagccaaaaggtccagtcagcagcagcaaagggttgatttgaagccacttgatgtgcctattgctgataaagagttgaaaaagcgcgaaaagaaagatcttttagccgcacatgctgctgagcaggcaaagaaggaggctcttagggatgaccacgatgcttt

SEQ ID NO: 129762 - DNA, 2874 bp, Glycine max
  Clone ID: PAT_MRT3847_88183C.1
ctcctcttccccgatcgattgcgttctagctaagcgatttttgttaatgcttctggcaatgataatatatgtgttttctgattgagaaatcaaatcacgatggatattagatttttgtgtgccatgctcgtttgtttcatgcttacttgtttgttttcaatacttgccaccttccctgttatataggatttccttttctacaatcaattttttttttctgcttgtgttgccacgcgtccgttaaaattgggtggagtgaaaccctaactcataccgactcgactgcgagtgtgcccaacttctgcgaaatcagttttctacaatgggaaggaaaaagacagaggatgctggcccatctgcgaaggtaaaggctggtagcaaagatcctcctaagaaggaaaaaatttctgtgtctgccatgctggccagtatggatgaaaagcctgataaacctaaaaaggtcccttcttcctccagtaagccgaagccgaaatctgctccaaaagcttccacatacaccgatggaattgatcttcctccatccgacgatgaagatgatgatgatctcttggaagagggggaagccaaaaggtccagtcagcagcagcaaagggttgatttgaagccacttgatgtgcctattgctgataaagagttgaaaaagcgcgaaaagaaggatcttttagccgcacatgctgctgagcaggcaaagaaggaggctcttagggatgaccacgatgctttcactgtggtcattggaagccgggcttcggtgcttgatggaggagatgatgctgatgctaatgtcaaagatataacagtagaaaatttctccgtgtctgcacggggtaaagaacttctgaaaaatgcaacagtgaagatatctcacgggaagaggtatggtttggttgggcccaatggaaaaggaaagtccacgctgttgaaacttcttgcttggaggaagataccggtacctaagaatatcgatgtccttctggttgagcaggaggtagttggtgatgataaaacagctcttgaagctgttgtttctgctaatgacgaacttgttaaaattcgacaagaagttgcctctctgcagaatgcagcttctgttgaagacaaagataatgatgaggaagacgatacaggagagaagctagcagagctatatgaaaaactacagctgatgggatctgatgctgctgaagctcaagcatcaaagatattagctggtttaggttttacaaaggatatgcaagcccgtcctacaaaatcctttagtggtggctggaggatgagaatttctttagctcgagcactttttgtgcaaccaactctattattgcttgatgaacccacaaatcatcttgacctgagggctgttctctggttggaagagtatttgtgccgttggaagaaaactctggtggttgtctcacatgatagggattttctcaatacagtgtgtactgagattattcatctccatgatttgaaacttcatttctatcgtggaaattttgatgattttgagagcgggtacgaacagcgtcgtaaagagatgaataagaagtatgatatttatgccaagcaattgcaagctgctaaaagaagtggaaaccaggctcagcaaaaaaaggttaaggatcaagctaagtttgcagcagctaaggaaaaaagcaagggaaagggcaagggcaaggttgacgaggatgaggccccaccagaggcacctcagaagtggagggattacagcgtggaatttcactttccggaacctactgagctcacacccccacttctgcagcttattgaagtcagctttagctacccaaaccgggaggatttcaggctctcaaatgttgatgttggaattgatatggggactcgtgttgcgattgttgggcctaatggagctggaaaatctacattgctgaatcttctagctggtgatttggttccttctgagggtgaagttcgaaggagtcagaagttgaggataggaagatattcccaacactttgtggaccttctaacaatggatgaaacagctgtgcagtatcttctgcgtctccatccagatcaggagggacttagcaagcaggaggctgtccgtgcaaaacttggtaagtttgggctaccaagtcataaccatcttactcctattgccaaactatcaggagggcagaaagctcgggtggtcttcacatctatctccatgtcaaatccacacattttattgttagatgaacccaccaatcatctggacatgcaaagtattgatgcattggccgatgcactggatgaattcaccggtggagttgttcttgttagtcatgattcaagattgatatcacgtgtatgtgaggatgaagaaaggagtcaaatctgggttgtcgaagagggcactgtcaaaaatttcccaggaacatttgaggattacaaggacgacttgctgagagagattaaagctgaagttgatgattgagcttccttttctgaaaaaaattcatttaaagtgaaatttgtccacatatatctacatttttgccttcctgtattttgctgataaagattacttgcctcccgccaatgccggattttgtccaccccttctccctgttcattttcttgtattctgcaactcagtgtaattttaggttgcgggaaatgctattaatactttagtgagacttgggtttttggattaccaaagtttgagttaagaatatataggaacgtgtaatttaaactgttacgactaaataaacatctgctctgttcccaaaatttgtgtcttgtggtttttggattaacaaagtttgagttaagaatgtataggaacgtgtctattgattcaaattttcaagcgcc

SEQ ID NO: 129763 - DNA, 390 bp, Glycine max
  Clone ID: PAT_MRT3847_88184C.1
attcgttcggaaggttgttaatgatgcattgaatgccatacatagtgtatgatgttcttgttgatgttcataaacttatggatgacactgttgaagctaaagcttatcacgacgaaaaaaaaaccgggggaaaaagaggggattaaaaaaacacgggaggggaacaaaacaaaaggcgcggacaaggggaaaaaccaaaaaacccccgaacccgggaaaaatttgccaaaaaaaaggaagggaacggggaaaacccagacgctactgttggcccggggaaggaaaaaaaaaacaagggggggggggcaaaaaggaaaagaacggcaagggggacccaaaagctgttgaagaacaaagccacccaaaacatgggaaaaggggggcgggggg

SEQ ID NO: 129764 - DNA, 384 bp, Glycine max
  unsure (1)..(384): unsure at all n locations
  Clone ID: PAT_MRT3847_88185C.1
acctgtgcatgctgctgctggaggtatttttcgtagtcatcttggtggcgtgttggcatgcttctcttattatgttggtattcaataagctttttttgttgagatttttggggctattattgctcttgaaatgactaaggagaagggttggaaccgcacctggcttgagtgtgattttactttggtgattcatgctttcaaaaaaccttctattgttccttggcaggttagatatagatggaaaaattgtttgtctttttgtaaacatatagttntttttttctctctcatatctttagagaagctaattcttatgcatacaaacttgtttcttttggtgtttcatctaggactacaactttttgggttgactccatacttttc

SEQ ID NO: 129765 - DNA, 339 bp, Glycine max
  Clone ID: PAT_MRT3847_88186C.1
cgtccgcccggacggactccctcacccatttacacatcatatccatggacttaaccaacgctctctgtaggtcctacatgctacgctctgccaaccgccagtctctgacccgacgagcgaaccataacgctagagttaataaccggaaaccgactaactcggctctccgcgaaagactacgccaaagagattgccatgagccagcatagccgctctgctatgcaagccggcattgacaatctcgccgacgctgctgggatcactcttgggctcagaggtaggaacgatgcgatggatgagtttggaagtactaaagtgagcaacgatggtgtcaccatt

SEQ ID NO: 129766 - DNA, 325 bp, Glycine max
  Clone ID: PAT_MRT3847_88187C.1
ttattttttaaacatgttgctcacgaaagcctcaaggatcaaatcccggctgctgacatgttgtcttctaccaaggtcaatcagttcgcgaaaactaggaaccttaaacaaagtgctgctggtgatcttaaacttcttactgggggaaagaagcatgaggtgaagcatacacctgcttctagtatcattgcaggggagaatcatgtagtataaatacccactatggcacaggaggaaatactgtcttgtagagcaagagagttcagaactgcaatggagagttaaagtagcaagcctgatgctactgcagtgcatgtgggagcta

SEQ ID NO: 129767 - DNA, 398 bp, Glycine max
  Clone ID: PAT_MRT3847_88188C.1
ggctcgaggtcctgagtcggctcagagttaactcggacactccaactcagatgcagcaggaacacgacaacagtaatgaacaacgccattgggtaataatgggtagggattggtttcttcaatcggaattaacgaagaagatggcactggttacacggcgaaatgccataagaaaaggagtggtgggaattgtgtgagtggagtttcggaaaaaaagacccaaagagcttttcttatgtactactgtagtaaagaccaaatatacgtaatgtgtatcatcacactatcacgagcttcaaagaaaaaaaaaaccactgtctctgccgctggtaccaaaaaaaaaaaaaaaaaaaaaaaaaaaaaacaagagaaaaaaaaacaagagaaaattaatattc

SEQ ID NO: 129768 - DNA, 650 bp, Glycine max
  Clone ID: PAT_MRT3847_88189C.1
ctcgtgcttgcaatgtagtgaggtaaaagctttgatctgtgtgtgtgtgtctgtgatgtctttttcatatttttgatctgtatggaattggtttatgtaaagcctttgaaacacacaaccttataaaggagcttaatgtaaaggtgagtactatttgataaaatgatatgcttctgcagaaaacaaaactcttcataatagttagtgttattctaatatcatattgccaaaccaaatcccttgatatcacaaaataatttttcttctgaattatgtgccatttgttaaccagattacgtggattgaagaattgcttatgcatgttgtgaagtttgtgcctttgagcacaaaaatatctttcatctttctatgactgtcttggcttgacatttttgactaggagttcattgtctttgtgtaaaacttgaatgttaaacaatatttatgcatatttttccatgaaattctctctaagatctttcaatccattaacacacgaaatcacactccgcaacacgcgccctgcgtttgcaaattgcagcatgttaaatgaaacgagcatcttccaacctcaaaacgaatcaacaagacaatgcataatgccacacacacacacacacacacacacacacacacacacaagggatgag

SEQ ID NO: 129769 - DNA, 156 bp, Glycine max
  Clone ID: PAT_MRT3847_8818C.1
ataaatatgtatcatttttgcttatgcaattgaagcaatgaacgacgatctattaggtgtttagtgagcgacaacaatatttccaagtcccccatgagaacattaagcacgatccgaacctgggattccattctacctcctcactaattcccactg

SEQ ID NO: 129770 - DNA, 912 bp, Glycine max
  Clone ID: PAT_MRT3847_88190C.1
cggccgctcgagccggcgggccggggatttcatttctttttttcgacatcgttgtaccaaatcaaagaccatgtctgggatgcttccgggagttgaatgtgctcgaaggagacgcttgcataacagtgctggtgatgattccaccagcaaccgctctttctgtttgtatactaccaggaacctccaatcctcttcctctttactggtacctttaccttcctctttcgtccactttaatttctctctctgtctataatggggatgcgttattattttaatgaaatcaggaaagaagcatgttaaatcgggcatacccagatgaaaatctcgtcgaagcggcacccgaagccaaacggagacttgatcgattgacatcggcgtaccaaatcaaagaccatgtctgggatgcttccgggagttgaatgtgctcgaaggagacgcttgcataacagtgctggtgatgattccaccagcaaccgctctttctgtttgtatactaccaggaacctccaatcctcttcctctttactggaaagaagcatgttaaatcgggcatacccagatgaaaatctcggaggagcggcacgcgaagccaaacggagacttgatcagaagttcatggcacacatcaaatcagaaagccacaaaagaaaaggcctttttcatggtttgtggcgccaactcagatcttagtcttagggaatctagaagaagatcaaaatgataaatcctagaacagtaactggccttttattcttttttcttgttctgtaacgaaattatttattttcattagtcaaaagaaacagagatatgtgaaaactaaacatcctttgatctttttgtcgattgaggaccaaatcaagtttgatccgtccaaatgcttggaaaaaaaatgaatcctattgtcca

SEQ ID NO: 129771 - DNA, 243 bp, Glycine max
  Clone ID: PAT_MRT3847_88191C.1
cctggatgatacacgaccactgtaggggtacgctaccaaagatgatactagccttatcggaatacctggggacgtgcaccatatatacatggagacggtgctgtttgcggtggtggtgtacatccccttgacggtgatgtcttgagataaacgttggttgcttgagctatatgaagctgtagagtactgttagaatgagccaccaaactgtgatctttgtcactgtgagctttgatcatacta

SEQ ID NO: 129772 - DNA, 307 bp, Glycine max
  unsure (1)..(307): unsure at all n locations
  Clone ID: PAT_MRT3847_88192C.1
ttttgtgtaatgtttttttttttttttttgggaacaaaataggaattaacttgattttaaaattattttatttttagatgtgcacatgttgaattccacccaaatcaatttgatttcttaattttaactatatgcattgatgactttacccctccctgnggaggtttctcacatttataagtaagggtgataaaacaaagttcttaaaatgaagtgcagaaattgatttgaaaaccaactatgttgcaaatagcatgctttagcaggggcttccaactattcaaaggctgctgcattgcagtttgaa

SEQ ID NO: 129773 - DNA, 683 bp, Glycine max
  Clone ID: PAT_MRT3847_88193C.1
gcttaccccaacactgcttcgcactgggtcgtgaggtccattccatccacgctctaactccactgctattgcctgatttcatcatccttgattggaaaagtggtcccaaagtgtgtaggctacgcacacgccctctgatcccatccttcaatccgtgcacgaagtacccaaaaaactggtcattaggcaatcgtgactcctgagcagtgagcgtctcaaactccaaaatgtacttgtccaccatgccgtcttggcggataacggccagcctttctaaatcgtcaccctcatcaatgcctccgtatcattccaacaactcgctcttgagcttctcccatgtcagacttgggtattcatcgaggagggacttgaaaaaatggatcgtagatccatccaggaacagctggcctagctcaccttcacatttgggtgcgtgccttggacttaaaagtaaacctccacacaaatgatccacccggctggatcctcgcggcaaacatcggtagctctactttcttcactgattttcggaattcgtccaaggtgtccccatgtaagatcgcagacaacttcattggggaactctctccattcgaatcactgttgtttttggacaacaacactactagcttctcatgattctcctctgctgtgagttgcattgcgtgcttcgccgtcctgag

SEQ ID NO: 129774 - DNA, 333 bp, Glycine max
  Clone ID: PAT_MRT3847_88194C.1
gggggaatggggtcaatggggccttttagggggaaaaaaagacaagatttggggattaagcccagaacccttttggggggggggggatcaaatcaacggtttgggcctgctaattaggggtaacccccggcttaaactggcaaagggtaagggccctttcaaaatacctaacacaaaattactcatgcccattgggccccccccaatcgggtgactccctttcctctgccttttttacgggctcaaacaagggttcccaggcaaaaattttggggggggttacacagattgggttctccatatgcggcatttcccccccttatttcgccaacc

SEQ ID NO: 129775 - DNA, 375 bp, Glycine max
  Clone ID: PAT_MRT3847_88195C.1
acgacccactcgaccgacgacgcctattcggagaaaccctacactctataccccattactctactactacccaaaatgggtgcaacggcatcatctacttcatcttcctctaaactgttcattgcatcaactgtagctccttaattctattcatcatatacaactgtgatcacagtaccttataaggacaatttcaacatcatattgccttactaccatgacactacctataatgataaacacacctcgtatcagcaactaatcccagacacagaaagtgtactaaatactcaacatccctacataaccagatttttcattactaaactaacattagcactacctaacatctcagtagattgtgacatcttatac

SEQ ID NO: 129776 - DNA, 274 bp, Glycine max
  Clone ID: PAT_MRT3847_88196C.1
tcctcggtggcaacaacaccccctccgccgatgacatcaaggaaatcctcggctccggtatatttaattcttctcttccatccaaatcccttttttaattcttaattttttttaatcggttcaatcgaacaaatgactcatgctaattaattaggtttaggtttaggttgaaatttgcttgccccatttgtttttttttgtcattagtacgcaaattggtgaaaacggttcgttttatttagtttttgtatttgatttagttattatggggaga

SEQ ID NO: 129777 - DNA, 287 bp, Glycine max
  unsure (1)..(287): unsure at all n locations
  Clone ID: PAT_MRT3847_88197C.1
gaaagccccgggcgacccacacgtccgtccacaactaagaatgatcgtttatttttaacccaagaccacaaagnccgcgtccgcttctttcaaagccgggctggacttccccatcngccttnacgttcgctacctcaaggccgttctctatcctcatcgcactaattccaactcccctctttacctatctgctgatctccaataccttcctcctaacgtttcggaccttgcctgcaaccctgctacggacaacaataagaccaggatcgttcctaggcacatccaac

SEQ ID NO: 129778 - DNA, 228 bp, Glycine max
  Clone ID: PAT_MRT3847_88198C.1
tttttttttattatattatcaatttttatattcaatgattgttaggtcaagcgctttttaatattactttttaaaaggattacacaagacgagacccgaaaattaaactaaaaagcaaaacaggggggcaaccaaaggagccaaccgagggactaaccaaaaataaccaggccgggataaagggaaagaggcccattgcccatgggccataccaaaaacgggagacac

SEQ ID NO: 129779 - DNA, 831 bp, Glycine max
  unsure (1)..(831): unsure at all n locations
  Clone ID: PAT_MRT3847_88199C.1
attactaattgaccacttcataaaccaccactttacatccnttgctcaaatcaatctaggatataatatcaatccttcctcaatacgaacaatggcgaacgcaaacggaaacatcccaaccgaacaatgggcacaagtcgtcgagaagaccggaggcccctgcgtctacaagaaaatcccggtcgcaaagccaggtccagatgaggtcctcatcaacatcaagtactccggcgtctgccacacagatctccacgcaatgatgggcgactggccattggccaccaagatgccgctggtcggtggtcacgagggagctggtgtcatcgtcgccgtcggcgaacttgtcaaggacctcaagccaggtgatctggcaggtatcaagtggttgaacggtagctgcatgtcctgtagttactgccgccaggctgacgagccactctgtggaacgcccgatctctctggatataccgttgacggtactttccaagaatatgctattggcaaagccgcccatgtcgctcgtatcccagaaggcacagatctccaagctgtcgcccctgttctctgtgccggtatcaccgtctacaagggtctcaaggaatccggtatcaaacccggccagtacatcgctattgtcggtgctggtggtggtctaggatccctcgctcttcaatacgcaaaggccatgggattacacgcaattgccatcgatggtggtgctgagaagaagcaactctgcaacgacgctggtgccattgcatatgtcgactttatgaccagcaaggacttgggtttcggaagtcaaggccgcaacgccagatggcctaggac

SEQ ID NO: 129780 - DNA, 617 bp, Glycine max
  Clone ID: PAT_MRT3847_8819C.1
ggaaacctaattattgaagggttttttaaataagttgttactcctttgaaaaactacaaaataaaattttttttatctcaaacacccaaaaggtgtttcattacatttacataacaacataactgagacaatattcttaccacctaagcttttattattcaaatcttacagcaattaagaaaagaaataatttttaaacttttaaaattttaacatttcacacagtaaccgttttcaaaatttttcatttcaaagcacctaaacaaaaacaatttatacaatattttattattccacattgtgtttcgttcatcaatatttttgtacaaaaagcctatatttttaacaatttttttaaaaaactttaattcaccaaacttcaattaaaaatttaaatttttaacaccttcattccacaaatattttaaaaaaaaataagaatttttaacaacctttttattttttttttacccaaatattttttaaattctttttataggactttttgatgtacatattctcttatcctaataaggtgtattaattttttataaggttttaacctttaaaactcttttattacaaatttttttttttttttagaaaaattatatttt

SEQ ID NO: 129781 - DNA, 180 bp, Glycine max
  unsure (1)..(180): unsure at all n locations
  Clone ID: PAT_MRT3847_881C.1
aaaaggangaaaaagngagcanngnaagggaagaagancnaggngcancaccagaggaggaagaggcagcngcngngcaagagcagggaaggcaaanaaaggcgcaggaggaggaannngaaacccccaancnaaaganngngcacaggaaaaacagaacnggcngngaggaggacaaga

SEQ ID NO: 129782 - DNA, 2571 bp, Glycine max
  Clone ID: PAT_MRT3847_88200C.1
ctcgagccgctcgagccgctcgagccgcgttcaccaatttcctgaggggaaagaggaggggccttttgccttcgtgagaggaagaacggggcatgttcttttctgtcctctctctctctctctctctgatcagacagacagacacgcgcatattacacatagatgcagcagagaaactctctctctctctctctctctctctctctctcattattgctccaaacccattcagagtacagatggatcttcgattatagcggttttagcagctggaatctgcacttgcaccatgtgtgtttctactgttaatatatattttttcaacataaacattcaattccaccactgaaagaagaaattggagaaagtgttgaaactttttgagcctgtctcaagccttcatcaatccattcaatgattcaaaaggatagatcattggatcccacctcggccaagttttaaaaaaagtgctaaattccacgagtattagcaacccgagacaggaacactccaacttaaccggttctctggattccaagatcttgaaccgtttggaccagctccgagtcctcagtttcaaaggaaactcgctctccgggcaaatacccaacatctccgccttggtcaacctcaaatcgattttcctcaacgaaaacaacttctccggcgattttcccgcctccgtcgccctcctccaccgcgtgaaagtcattgtactgtcgcaaaaccatatctccggcgaaattccggcgtcgctgctgaatctccggcgactgtacgttctctacttgcaagacaacgcgttgactggacgcattcccggtttcaaccagagcagcctcaggtatttaaacgtttcgaaaaaccgtctatccggcgagattccggtgacgtcggcattgatccggttcaatgagtcgtcgttttgggggaacccggggctctgcggggaacagatcgaagaagcatgcaaaaacggaagcggttcattgccgccatcgataagccctagctatccgttgaaaccgggaggaacaacgtcaacgacgatggggaaatcgaagcgcacgaaattgataaagataattggagggagcgttgggggagttgtttttgcattaggatgcgtggttttggtgtgggtgatttgcaggaagtggaaaagaacgaggaggaggaggaagaggaggaatgtttgcgctgaagtggcagaaggggaagtgggtacggcgacttgtgtagtaggaggtgctactagtatagaagaagaaggtgggggttttgcgtgggaaaatgagggtgtagggaagctggtgttctgcggaggaggggatggggacatgagttatagtttggaggatttgctcaaggcttcggcggagacactggggaggggtataatgggaagtacgtataaggcagtgatggaatcggggttcatagttactgtgaagaggttgaaagatgcaaggtaccctggcttggaagagttcagtgctcacattcaagtccttgggaggctcacccaccctaacctcgtccctctcagggcttatttccaggctaaggaggaacgcctcctcgtttatgattactttcctaatggcagcctcttctcccttattcacggatcgaaaacatctggtgggggaaagcctcttcactggacatcctgccttaaaattgctgaggatctagcaacaggcatgctctatatccaccagaaccctggcttgacacatggaaacctgaaatcttctaatgtattgttgggttctgactttgagtcatgtcttactgattatggtctcactgtgttccttaatcctgacacaatggatgagcctagtgcaacttctttgttctatagagcacctgaatgccgcaactttcaaaggtcacaaactcaaccagctgatgtatacagtttcggggtccttcttcttgagcttttaactggcaaaacacccttccaagaccttgttcagacatatggttcagacatacctaggtgggttcggtcagtgcgcgaagaagagaccgagtccggggatgatcctgcttcaggcaatgaagtatctgaagagaagcttcaggctcttttgaacattgcaatggcatgtgtttcactagtaccagagaacaggcctacaatgagagaagttttaaagatgataagagatgcaagaggggaggctcatgtctcatctaacagtagtgatcactcccctggtagatggtcagatactgttcaaagctttccaagggaagaacaccagagcatatgattggtaacttttttgacagcttattagttgaaactatgcattctgatttttcctgaattggttattgatacgattcatgcataaactaggtgatacgtgaggacctacatttttaatctctagctgtgtgagtaaatgcattttaaagggtaattaaggattcttttatagagtcatcacaggttgcaaagagtgggagatcatcagttcctgctttgtcttgtattttctttttaaaataaaacacacattccaaataaaaacatggggttcagattaaaaa

SEQ ID NO: 129783 - DNA, 196 bp, Glycine max
  Clone ID: PAT_MRT3847_88201C.1
acagcgctactttttagcactgaggaccttcactgctttgtgattcagcatttgctacgtacggggatgaatgtgttcaacaagacgtgcttggacaaagaacatagtcacatgatgttccaagagaatgggtcttgaacgaccatcttctttacggagggaacggtgattctagatcagcaggactgcacaactc

SEQ ID NO: 129784 - DNA, 471 bp, Glycine max
  Clone ID: PAT_MRT3847_88202C.1
tacggctgcgagaagacgacagaaggggatataccattatttaaatgcattgatgattgttatgtgagcctattgtattatttattttgatcttttcagttgttgcttctatatctactaatctgaattcaattccgttcgtaatggtacaaattttaaggactggaaagagaacatgcaaattgttcttggctgcatggatctaaaccttgcattaaggagtgagaaactccctactcctacgaattccagtacctttgaccagaggaaacttcatgagaagtgggatcactcatatcacatgagtcttatgatcattaagcgtggcattcctgatgtctttaggggtattgtttaagatgagataactagtgtcaaagaattccttgttgaaattgaaaagcgctttgcaaaaaacgataaggtgaaaacaaatactcttcttcaaaacttaatttccatgaagtatca

SEQ ID NO: 129785 - DNA, 273 bp, Glycine max
  Clone ID: PAT_MRT3847_88203C.1
taattccctgatcggccgactcgtacgaaaaggataaccttcttttctctctatgtggttgttattcttatttcatacctaaaaaccatgagcaccttttctgctttgtagaattacattatcgtatcaagaaaactctttaactacacgaaaatggtgtctgctaacaaagttattgtcgtgtactgcttctacacccttcttgctcactacaacatcacagattctcctttcactgccttctatcatgctcaacatttattgtttgttaca

SEQ ID NO: 129786 - DNA, 2980 bp, Glycine max
  Clone ID: PAT_MRT3847_88204C.1
attggcgtccggttttgttcttgggaaacggatgaggtgtctgagtggtggaagtgatgctgagggtggcgctgcgatggaactcgatttggaggccaatggcttctctgccactaactcccttcacatgccaaaatctccacacgctaaaccctaggcctcgatgtcgcaccttcaagcttttttgtcgaccttcttcttccgccgtcgcgcacacctcgcctcctctctccggcgacctggaccgctacctccgctgctccatgccgcagaactcgccgctccgagtcgcggttcttgtcagcggaggcgtcgatagcagcgtcgctctccggctgcacgccggccactcctgcaccttctacctcaagatatgaaatttcgagaacttttgttgctggagctcactcgccggagcctatcccgctccgtcctccgtcctaccgccggcgaactttccggcagcgtcgacgacgatgaagaatcgggcgaattggacgacctcgatctcgtcgccctcgagcaagaagccaaggatgccgtcgaagcgtattcaagctctctgtctcaaattttgagcattgaagacgaggagaaaagtgatcgcaaggaatcagctcaatcacgcaggaagagtccacgtagaacaaaaattattcctgacaatcttctcccaagggttgcaattgttggaaggccaaatgttggcaaatcagcattatttaatcgtcttgttgggggaaacagggcaattgtggtggatgaacctggggtcaccagggatcgtttgtatggtcgatcgtattggggagagcatgaattcatggtagtcgacacaggtggggttattcaccgtttcaaaatcacaagctactgttatggaagagttggctattactactaccattggtatggatggcattccacttgctgttagagaggcagctgttgccaggatgccctcaatgattgagagacaagcaactgcagctgtggaagaatcatctgtgattatttttctggttgatggtcaggccggtctaacagcagcagacgaggaaattgctgattggctacgtaaaaactactcagataaatatgtcattcttgcagttaacaagtgtgaatctccacgcaaaagaattatgcaggcatctgaattttggtcccttggatttgaaccacttccaatatcagctatctcagggactggaactggagagcttcttgaccttgtttgttctggcctacagaaaattgaggaatctaataatcttgttgaagaagattatgttccagcaatttcaattgttggtagacctaatgttggcaaaagtagcattttgaatgcactggttggtgaggacagaacaatagtcagccccatcagtggcactacccgtgatgctattgatactgaatttactggaccagatggacagaagttccaacttattgatactgctggaatcaggaaaagaacagccattgcttcagctgggagtacaacagaggctttatcagtgaatcgagcatttcgtgctattcgtcgttctgatgttgttgctcttgtcatcgaggccatggcttgtatcacagaacaggactacaagatagctgaaaggatagaaaaagaagggaaaggttgtgtgatagttgtaaacaagtgggatacaataccaaataaaaaccagcagactgcatcatactatgagcaagatgtcagggagaagcttcgctcacttgtctgggctccaattgtttattctactgctgtagctggtcatagtgttgacaagattattgttgctgctattgaagttgaaaaggagagatcaagaagacttgggacttctatattgaatcaagtagttcaggaagcagtaggttttaagcctcctcccaggacacgcggtggaaaaagagggcgtgtttactattgcactcaggctgctataaggccacctacatttgtgttcttcgtcaatgatgcaaaactttttcctgagacttaccggcgctatatggagaagcaactgcgtacagatgcaggtttttctggtacacccattcgacttctctggcgcagcagaaggaaaatgggaaaagatgaaggcaaacctgtaacaaagacccgagaaaatcttacatcaaatgatcgaaaattggtgtcaactacaccataggatcagacattttctcatggaagtactggttgttctgtttgtgttggaaaaatgaagtagctttttatctgggattacttaattacataaatgcacgtgcttcctggaaatccatcaaggttagtaaaatctctacaaggaccaaatgggggcctggagtttggatgagaatatgtcacatatttacactgatcgtaatcattctgtaattctttagtaagcactttgtatttatggggtcggaggctcgtagtacattccctgtcaacaattgcattgtacatttatccagacaaatgaataaaaatgtttcgtagtcacattacgaccacaattgtaacccgcaagtgtgtgattctgcagagttagcaagtaaaacatcctaaaggaataagaaattaaagagttgctggcactgaacaaaacaggctgatgtgtcaggggaatgcaacttccatcttccctttcaattggccacaacaaagcattggcaaatgtgggtatacacgtagattttctgatcttttgttctgtagcgtttttatatgcatgtttagggaaataagaagtattttatagagagaaggatagctgtttaaggtgggtgagaaattagtagcttccattattctgtgtttccaattaaaatgtgtatataccttgtcatggtttgctttagactttattcagtttattcactatgtaccttaagatgcaattattaaatgaagaatttcttattttggaataaaatcaatgaaaaaatatttactatggcatggagccatggacct

SEQ ID NO: 129787 - DNA, 372 bp, Glycine max
  Clone ID: PAT_MRT3847_88205C.1
ttctaacggctgcgagaagacgacagaagggaaaaagaagagggaggagggaggaaggaggaaggagagagactttatatacgaggtaacagggcactgtggaattgcgcgtgtgggtgtgttgtttgaggttgttgtcgctggttgtgttgcgttgtgtcgtgtgggtttcatgagatttagtcccacttggggaggtttaagcgtaactagctttcttacgcttgaccaaggacaccggtttttaccccgatcaagctgtccaaaatcaaagcggttatgcttttgatttcgcaggtgctgactgtcgatttttcagtatttaaatgcatttcttcaagaggctttcataaagatgaattacctttcttt

SEQ ID NO: 129788 - DNA, 275 bp, Glycine max
  Clone ID: PAT_MRT3847_88206C.1
tgaggattttgtatgtatgatgtgttctgacagtgaccaactactcaatcacaatcctgatcttcttaagaagctggaactctcggatggtctcggttcgccgtagctcagttaactaggcaagcgaactcgtgaatcactatttgaggatccagccagagatatgactagcttgctcaaaatatggtacctgaacatatgctctggagttgtctgtttatgttactgccaatgttctggttggtgcgagatatagtagaaaacccgcatccatg

SEQ ID NO: 129789 - DNA, 228 bp, Glycine max
  Clone ID: PAT_MRT3847_88207C.1
ccacaagtccgcccacacatcagtgcagctgcgacaagaccacacatggggactttcgaaacttccgtgccccccagtttccgggtcaaccgagaagttactaaatgaaaacgtgaaccgaaacgaaaacgaacggcggatatcagttgttccatcgaggctcaccgcggcaggctcccccgaatccctgttcacaccttctgcatcgctggaacctcgtcggcatac

SEQ ID NO: 129790 - DNA, 264 bp, Glycine max
  Clone ID: PAT_MRT3847_88208C.1
tgactgctgaggctgaagaggaaggtagcatgcgagagataaagagatcaatgaattagaatgagtgttgatttgctttccttcttgtattgtaatccacagagcttttactaattatagtgagactattatcaggctatggaattaatctttccttaatccttattagaatctcctactctgatgaatgagtatgagattctggccagttatctttgtatatgtttatttattttcatgctgagagaccaggtatcattctgg

SEQ ID NO: 129791 - DNA, 130 bp, Glycine max
  unsure (1)..(130): unsure at all n locations
  Clone ID: PAT_MRT3847_88209C.1
aaaaggaagatcaagaaaaacgcaatatttacactacgcagcatggtttttccaaccggggangggaaggcaatttgtatggaaatttacagaccacaggaccttagagaaaactataagagacaatcaa

SEQ ID NO: 129792 - DNA, 276 bp, Glycine max
  unsure (1)..(276): unsure at all n locations
  Clone ID: PAT_MRT3847_8820C.1
tcccgccgtgttcatctcgcgtgcatagcagtcaggaaaacactgcgagaaagagaannagaattcagagagngaaacnanatanagnaaccaaagngangaaangaaaacccntttngacaattgggcntcntttcnatttcccccattgattctgccaccaaaatctcttctgtattttttttcttcttcttgtgatcattcattcctctcatctggggcacggttctgtttttgtgatcgacctcaaatttccgatcttttcctcttcccgnt

SEQ ID NO: 129793 - DNA, 735 bp, Glycine max
  Clone ID: PAT_MRT3847_88210C.1
cccccccttttttttttttttttttttttttttttttttagtagtcaaacttgcagggtcagactcataatttgatagccatattaaaaagtgtattttgaaactcaagtccaccagggtatttgaatttcaaagattaaacaattattcgtgcttcgaatctcaagaaaaacagtagaaagattacaattttaacaaaatctaagataacattcagcatactgcttgccaaagcacacatggtattggtgcaaaggttcagaggcataccttttacatagataacttctgacggtagcacctaattaagaaattccagcctttgagactcaatctctgataaagaaaccactatagcagtttttacatgagtcaatggatctcagattgaatttcaggaaaattgagacgaaggataggtccatcatatacaagtggtttcaatgcaggtaagttttgatcagctcatgtgagtttccaaccatttaaaaatttggtcagaatgcacactagtcatctcatggtaagcaaatgcaaggtttagctcctcttggatgtgagggaccagattcttatccagcagaagagctttcttctcctcaaaagcctttttccatttgatttgacgcccatctttcctcatataaccatttttatcaataaagcccttttcctgaaagaactcaaataaatttctggaaagagcctgatcaagccctggaattctatcagcta

SEQ ID NO: 129794 - DNA, 203 bp, Glycine max
  Clone ID: PAT_MRT3847_88211C.1
gttagctataagttttggactattgagaggatgattattgatatgacggacgaggttatgttggaagtggctatcaatgcatgctccgtggaatgggctgtttcagcgcatacttatcagattgagggccatgttgttcatggatgccattatgatcagattgctggtcttgtcacgatgcatgttattaacgttaatgcgta

SEQ ID NO: 129795 - DNA, 871 bp, Glycine max
  Clone ID: PAT_MRT3847_88212C.1
gcacttgataagtcatgtcaggttgatctagtgaaggatggtggtcatatctattttattaagtttcttgacagcatggaagcatatccagagcaacgcgcaatggctgcttttgttttggctgtgattgtggatggtcatagacgaggccaagaagcttgtattgaagctggtttgattcatgtctgcttaaagcatcttcagagttcatgtcctaatgattcacaaactgaaccccttttccttcagtggctttgcctgtgtttggggaaattgtgggaagacttttcagaggcacaaacaattggtttgcaggaagatgccactactatatttgctcctctactgtctgaaccccagccagaggttagggcatctgctgtttttgcactaggcacccttcttgatgtggggtttgattcatgtagaagtgttggtggagatgaagaatgtgatgatgatgataagtttagggctgaagttagtatagttaagagtatgttaggtgttgcttcagatgggagtccattggtgagggcagaggtagcagtggctctagcacgatttgcttttggccacaacaagcacctgaaatctattgctgctgcatattggaagcctcaagctaattctttgattaattccttaccttcattggctaatataaaaggttcggttggtggatatgctaaacagaaccaacacatgccttatggaagtattgtttctcctcaaattggtcctattagggttggaaatgacaattctccagtgattccagatggccgcgtgtcttcaagcaaccctctcgctggttcaggaatcatgcatggatccccattgactgatgattcatctcatcattctgatt

SEQ ID NO: 129796 - DNA, 238 bp, Glycine max
  Clone ID: PAT_MRT3847_88213C.1
tttcggttggagcttaaaatttttcaatctaaaattgcacttgccaaaaacacagattggaggaaccattctgcgtaatgatctattggcagattttttgacagagggcaattttagagcaagtgattgatctgcagagcactcatcagtattaaagcgaatgattaaaaatggcggcacacaagatgggattatctgagaaatacatggtatagacattgaccctgtgctatcgaat

SEQ ID NO: 129797 - DNA, 685 bp, Glycine max
  Clone ID: PAT_MRT3847_88214C.1
aagctcggaattcggctcgagggctgattaaaaaaaaaacaaagagactcaaaaaagagttctccgtcaactgaatctccatcatctttcccctttcccccctttcgcttcttcgtgttttttcttctctctcacttttgcttcttcttcatttcttcacgatccactctctctcgtagttgtggtggtgctggtcgcgtgcgctcatggtgatcgagcatgacattgagagttgcgggagcagagcgatgcaatctttgcacgcgcatcaccctcgccaccaccggcagaagctggaggtgtacaatgaggtgcttcggcgaattcaggaatcggattgcgaggaggggcatgttcccggcttcgacgatcagctttggctccacttcaatcgccttcccgctaggtacgcgttggatgtgaatgtggagagggcagaagatgttttagctcataagagattgcttaagttggcggaggaccctgcttctcgacctgcatttcaagttcgcttagtacaggtatatccttttggtggtgcaaattatgctgattccatacatttagatccttctgagaaagaagatgcacaaagttctcttaactattctttaaagcagggaattcatccaccacctacatttggttcatcctctaaccttgaagctcttgcacttcccaaaaa

SEQ ID NO: 129798 - DNA, 300 bp, Glycine max
  Clone ID: PAT_MRT3847_88215C.1
cacatatgcttcttggttcgcgaagcatcttcaacgtctacctacatgtgcatcttaaatcctaaggattctctgtaacaaatgattaggtggtggaaatcaagtatgtgactgaagttcattgatttatggtatgcagcacatactctgacttctggctgacagagacaccactgcgaatgccaataagatgtcgccttcttgattgcagctctgtggctgcgattcataaggtgatacccttgctattgtttccccacttaatgcttgacatgaggggactacaagtctgttgctcat

SEQ ID NO: 129799 - DNA, 443 bp, Glycine max
  Clone ID: PAT_MRT3847_88216C.1
attaaacaccaaaataaaaggagactcaaaaaagagttctccgtcaactgaatctccatcatttttcccctttcgcttcttcgtgttttttcttctctctcacttttgcttcttcacgatccactctctctgtttcgttgtggtggtgctgatcgcctgcgttcatggtgatcgagcatgacattgagagctgcgggagcagagcggtgcaatcttcgcacgcgcaccaccctcggcaccaccggcagaagctggaggtgtacaatgaggtccttcgacgaattcaggaatcggattgcgaggaggcgcacgttccaggcttcgacgatcagctttggctccacttcaatcgccttccggctaggtacgcattggatgtgaatgtggagagggcagaagatgttttagctcataagaggttgcttaagttggcggaggaccct

SEQ ID NO: 129800 - DNA, 239 bp, Glycine max
  unsure (1)..(239): unsure at all n locations
  Clone ID: PAT_MRT3847_88217C.1
gtcctcagtgagaggccttccctctctctcaaggaactcttcttcattcatagttgtggccagtggcaagaagatcaagactgatataccttatggaattaatggtggcatggctttgagggatggaactgatgcatctggcaagatcgggaaatggtgtttactacgtttgtanacaaggacagtgcaaaagtcgatggatagaatcatatctacgacacgaaggactggtcttcata

SEQ ID NO: 129801 - DNA, 717 bp, Glycine max
  Clone ID: PAT_MRT3847_88218C.1
ataaacctctgtcttgtacaaaggagaagcaacgggtatcggataagtagcctggtttcctcgtcctgaaagaaacaccggctcgagaaacctctgtcttgtacaaaggagaaacccctggtatcggataaggagcctggtttcctcgtcctgaaagaaacaccagcaaaccactctcaacctaagagtgttgcaagtttactgaaagcaatggatttagtggcaccagccgaacaggtttgctcatttcaccactttcacataaccagagctagggtttctgataacaccatttctcgtcctttcgttctatatcctgatagtagtgttagtcatcatttttcaaaattgaaggcaactaggtctagaaagcgtttagaaaatcgcgtttctgctgttttcaagtccgaagcttctggtttgaacgatggattgcatcatattgacagcaccccaaacggggacttgaacgtcatacgcatggaatctttgcccattggggtgaacggttcccggagcttcgaggagtttgcgagtgacattcatctccggaagttggttagaaatggagagttagaagaagggcttaagtttctggagcgcatgatttaccaaggagatatccctgatgtcatagcatgcaccagtttgaatcacgggttttgcacgcatggaaagactatgaaggccacatgaatcatggagattctggagaat

SEQ ID NO: 129802 - DNA, 292 bp, Glycine max
  Clone ID: PAT_MRT3847_88219C.1
ctacgtgcctgcccggagcctgccctacaaccagcccgggacctgctacacactggtggcactgcccaaagaagaccccacagctgtggcctgcacattcagctgcatgatgcagttcactgtcaaggactgtgatcccaccactggggagactgatgacgaaggctatgaggatgagtatgtgctggaagatctggaagttactgtagctgatcacattcaaaaggtcatgaaactgaacttcgaagcagcctgggatgaggtaggggatgaatttgagaaggaggaaacg

SEQ ID NO: 129803 - DNA, 326 bp, Glycine max
  Clone ID: PAT_MRT3847_8821C.1
accacgcgtccgacacataagagaccacatctgtgactttgtctttcgaatcgtgttccatgcctcgcgcattgggacaatcatcaaaaacagaggcacatacgtgttgccattccacccaaattccgcgttcttcggctgatccaacgttttctttgttcactccaatgaacacccagaaaaggttctctataaggggtactatcggtggatagatcttttttaacgcactagttactgggatctgtgctgtgatctgtgccatcgtgatcggatgcatccttcattgggaccattttacagcaacgatttgtgccctgtgttga

SEQ ID NO: 129804 - DNA, 180 bp, Glycine max
  Clone ID: PAT_MRT3847_88220C.1
gacagatgttagatatctgatgatggtggtggctatggctatgactggtttctaatcaatgtgtgattttcttccacaaagaaaagaagaagtgactggggtgatggttgcggaaaacaggcgagcattaagggaaaccctcatccttacatcaacggggggggggctttaaaaaggacc

SEQ ID NO: 129805 - DNA, 531 bp, Glycine max
  Clone ID: PAT_MRT3847_88221C.1
atgaatggaaggattttggttcaatatcttcaagcattctaccttcctcttgccaaagtagtttgaatcttggatcttgcgatgacaaagatgttaggaatcttataacaagtaatggtggttatatgacaagatcccagctgcatggctttgacttctattattctagaatggccccactttgtgccaaaggggaactgcagaaagctaatcaatcagcaaaagaatttctttctgacctgacagagtctatgaactgaacatgtgggatagaaatgtagaattctttttattttaggaactactctcccagtagtgccagcaaatagagcacatggatgactgatgacacctgcaggtacataattgttcaatatatatagttatgcttctaaagtttatatacatgtataatggtttaccattcttatggtactcaaacttgatataatgaaacaggtcaaattgaaatcgagctttaatatattacctgaaggattaatgtcaaaaaaaaaaaaaaaaaaacccccc

SEQ ID NO: 129806 - DNA, 426 bp, Glycine max
  Clone ID: PAT_MRT3847_88222C.1
attctcattctcattccctatgccaatgtcgctgaaacatatcgcaacccccaaatccaaaacccattctttcgcacaatgaagaataatgagataggcttcttcggcgccaccttcactcttttcaacgctaccctggtaatcctctcttcactatcaccaactcatgccctcgggtctggcgccacccttgctggcaacttcttcggcgtatgccggatgggggcatcggaaccgacgcggggcattgcgtgctaccggcaccgggaaggcgtcgccgtcgcccccaacgtttcgttctcggcgatcttcggcgggcggagctacttttgcgggcttcgctccggcaactacagaacttctctgctgggacaccctctccggctttcaaagcaagaggctttacaacaatggcactgttctatt

SEQ ID NO: 129807 - DNA, 694 bp, Glycine max
  unsure (1)..(694): unsure at all n locations
  Clone ID: PAT_MRT3847_88223C.1
ggctctacgcctcgagccgccgcaacttaactccactcccatcccaatgggttgttgttgcgacgaagacgacggtgacattttcaggcacctcatgaattccaatttcccctcatcttcctccacctccgccaccaccacctcttcttgcaccgtgatttcaccgatgaattctcatttctcggcgctctcctccaccgacatcctccgcctcatcttcgacaaccttccaatccccgatctcgcacgtgccagctgcgtgtgtcgtctctggaactccgtggcctcccagcgggacatggtaacgagagccttcgtcgccccttggaaactgaacgacgtcgtcggcaacccactctctggaagcttctggagagacaactccctcgccaaattcgccgtctcccatcacattactcgcggcgacaccgttgccagtctcgccgtcaagtactccgttcaggtaatggatataaagcgcttgaacaacatgatgagtgaccatggcatatactcaagggaaaggnttattgatccctattagtaatcctgatattcttcattacagaacatgcctctattgagctggatgtctatgcaaaatgagaagtagcagtgttgtatcccaatgatttacaccggacgggaggactnccnatgttntcacacnagattcctccagnaagnnncnana

SEQ ID NO: 129808 - DNA, 605 bp, Glycine max
  Clone ID: PAT_MRT3847_88224C.1
gaatttctgaaacaaataatcttccctctatttctccccaattttcccgcaccatttttcctcaaatttctcttcttcttcatccagagaatgaatcccaatcccaacaccaacgatttccctctcctctcccaccttcttaaccaccttgatccccaaacacacccacccctccccgcagagctagaccaatctctattaacccaattccctcacttgaaccaccccagcgtgttatcctcactcgcccgtcacgcctccaccctcaacgtcacccccacactctccctcctccgcaccctcggcccccgcccagacccctccgctgtcgccgccgcccgcgccaggatcgccgacccccacgcgcgcgaggacggcggcgaggcccacgtggtccacgcgctggtgcgcgtggacgacacgcacgaggagtgcgtgaagcagctgagagcctccgagaaaaagctcctcgaggcctatgctgaatcggtgaaaggggtcgttgaagaagtgagcgatggagtggttaggggattgaagaaagcggagagtgaggaagtggaaaggggtgatctctctgggtcccacttgagggatctccccga

SEQ ID NO: 129809 - DNA, 357 bp, Glycine max
  Clone ID: PAT_MRT3847_88225C.1
actacaacacgtccattatcaaagaatatcacctttcaccttatagactaaccatcattggggcgcagaccattcactacttttaatcgtcagcaccacatcaactcacaaacacttctcaaagttaatattcagctaaatatgtggcttctttctacaatgcccattaatcttcttcttcttcttatataccataattcatgcaatttcaacgcctcgtgaatgctccctattaaaccaaattgtagtacaatcgatgtcaagtaccgtaagaatttatggaaacagactattaccaagatcttaacagcatgtactaacaccaccatacgactgtaacaggatttatcacattta

SEQ ID NO: 129810 - DNA, 594 bp, Glycine max
  unsure (1)..(594): unsure at all n locations
  Clone ID: PAT_MRT3847_88226C.1
caagatttgtgctatcgaagagctgagtttttctgaatcttcagaggaaacataacatcatattagggaccctccctctctacattgttgcagagaatacaaagcctcaagtgaaccaagcaattcatctgcggaaggacatcatattttgtacacgccttctcaactatctaggaaagggatggagggaaatatggagaaaaagtccccttgcatgaatgtaataaagctggatggtaaagaaataaaaatgcctggcttgaatatggatgatatcaataagcagtcaaatatggttgtgtctgtgtcaccaacacctcaagctgcatctgcattgaagaagtcttcgagtgaaaggaggagttgtctatgctcacccaccacacatgttggatccttcaggtgccggcaccaccgttcaggaatgagccatgctagctctgttggctccaatctctctgcaatgagctccaacgactcactccaatctcaatactagccttgcctggcttctgtgcttgaatatgttgtgaatactgcaaagtttcaatggaaagaactctcatgttaactaaattacttgannnaannnag

SEQ ID NO: 129811 - DNA, 210 bp, Glycine max
  Clone ID: PAT_MRT3847_88227C.1
accgagggagatgtagtggcatgatatgcgtatgaatcggtaagatggatagaggatagagcactgatggtgtggtggatgtagatgatcgcctgacgtagggagatgatggattggagacatatgacatgtctcgtcgtcgatctattaatcctgtcgtttacgatgacgtccttcttctaggatcttgactagattaatcgcctattg

SEQ ID NO: 129812 - DNA, 2261 bp, Glycine max
  Clone ID: PAT_MRT3847_88228C.1
cccaaggacacaaaaaccagaacgtagagtcactccaccacagcagagcacagcaaccctcaaatccctttcctttttccctcctgatttagcaaaaaaagcagaagggaattccgcacgtggacctctacccccgttgcttgcttctgttccttagtctctcgctctcggactctgctgtcaccgcacgcacccgggcccgttaagggtggtccctgcccccccttgttgccaggtgtggagccctctcagctgtcaccaccacacacacccaaatggggtttcccagaaaatcactattccttcttctgttcctgattctcttcacaaaccttgctgaatctgcttctgactacaccaccttggtctacaagggttgctccaaggaaacattcacagatccaaatggggtatactcacaagccctttcatcactctttggctcattggtctcacaatccaccaaagccaagttctttaaggccactgcagggagtggccaatcctccatgactgggctcttccaatgcagagatgacctctccaactccgactgctacaactgcgtgagcaggctcccggtcctgtccgacaagctctgcggcaagaccaccgccgccagaatccagctcctgggttgctacatgctgtacgaggttgtagggttcacgcaaatctcggggatgcagattttgtacaagacctgtgggggaaccaacgctgctgggagagggtttgaggagaggagggacactgctttctctgtgatggagaatggggtggtcactggccatggcttctatgccaccagctaccagtctttgtatgtgatggggcaatgtgagggagatgttggtgattctgattgtggggagtgtgtcaaaagtgctgtccagagggctcaggttgaatgtggaagctccatttcaggccaggtctatttgcacaagtgtttcattagttatagttattaccctaatggggttccaggaagacactcttcttcagcttcatcatcttccaattcctattcttcttcttcttcttcttctggtaataactaatacctagacaccaaaagagataagaatgaatgacattaaatttgtgtttgttgaaaagtgtttcttgcacaacttgagttctctagaacttgagagagaaaggaaaagaggatagacaagtgattggtttgattgatgatttagtgtgataggaagagagagatagagagaaaagaaagttgttgattgagtgtttgaaatttttggatgtcaaaatataatccctctttgtttgtcgttgttcattttacatggaaaaatgtttgatgaatactcttgattttattttacgtctagagagagttgaaaaagaaaaaaaaaattataggttggaaaagagaaaaaattataagtatgataaggttatgatataataggaagaaagagatatagaaaaaataagaggtgttagtggggtgtttaaaatatgagtgcatgtttatcattaatcttttacatgcacacggctcaattttgtgataattgtctatttgtgccaatgttaaaaaaatgtgcgactttgctcaatgtagaatatggtttgattatgagtgtgatgtgtggctaattgatgcaatggcagggcaaaatacagggaagacagtggctataatagtaggaggggcagctggagtggcgtttttggtcatatgcttgatgtttgctaggagtttgaagaagaaacgtgatgattattgacagtggaagatggttgattgaggaggcataattcttcatgcagtggattattatttctatatatatagcttttggatgaaagagatggaaaatttctggtaattagactttagcagatagggaaagaatctgggacggttaaaatgtgggaactactaattcttgtagttaggtaaggagattttgttgtgaagaacggtgtaattagctcatgaaagtgagaatttttttacattacaaggggaaaaaaaacaaatatacctagaggaatgaaagtttgtcatcctgaatgggtgaaaattttgtgcctatttctttatccatgtggatgattctcttttcccttctctccatactagaattgttgagtctctatttgcttctctaactttaactttttaaaaagttgcaagttgcagaaccctctctctttcccttcttcccggtttctcctcttcaacacatttgttttggtttctgtgtttaggcggacgcggg

SEQ ID NO: 129813 - DNA, 334 bp, Glycine max
  Clone ID: PAT_MRT3847_88229C.1
tttctggctttgtttgctactctggctctttcccaggatgtagcacaagccgagcacattagtggctaccccatactcccaggtggtacaaatcacattatgccatccactcgcggcgctgccagtggtggattgaaactacctcggtcaggagactggaactgctcatctactgggttggacgaatactcagatgtgttacctggcacaccaaacaaaatgagcatacctgggataaagcctggactcatctttacaggtactgcacttgaaagcgcccaccaacagaaacctgatggggctgaatcctccaaccgtgtgtggatggtggaca

SEQ ID NO: 129814 - DNA, 490 bp, Glycine max
  Clone ID: PAT_MRT3847_8822C.1
gagagagagagaactagtctcgagtttttttttttttttttttacattgaatacgtcttcattcatgctatctttccaagagtggagccaacgagggatattgcctggtgacttgtcattttgtgacaaggattttagaccacaattgagtgttactcgccaagtatgtattctattacatttcaaagaaatttatcgaagcaacatgatataatactgacccaagacatttttttacatgcaagcggtcgctctctcaaaattaaatatgaataaggatgcagacatgtcgattgtggctgctgctcacgaagggaaataaccataacattctgttattagtaaatcctttgcatacttgaagttggaaatgagcttcattcgaaagtgtaactcagccgtagaaccatattttttatttatttattgcgtaagctgctgtgctaattgttttttctccttgaatttgataaaataattattgattctt

SEQ ID NO: 129815 - DNA, 443 bp, Glycine max
  Clone ID: PAT_MRT3847_88230C.1
tgaattacaatgtttagttaaataaaatagaaatacacacaagggaaaattaaatacagtcacaagcccacgacatcaaatgtaaaggactaacaccaatcatgatacattcctattaaccctctatccattataatcgaaacactatctagcagatcaatggtactcaatgagaggtgcggcaaatctgcaaataacagacttagaggaaactagtcaattaaataagatacaagagtcataaaacttattatttttaataaattttaactaataaaaaaatatattaaaagtttcaggattctcaaccggtgcagtgctcacatgagaaaaattgttccatttaacgggctcttcttctttgtattattttataatttttttatttataaaaattaagataattatttatttcactaattattagacttaggtattttttt

SEQ ID NO: 129816 - DNA, 532 bp, Glycine max
  Clone ID: PAT_MRT3847_88231C.1
ttattttgcccttttcgctcagggattgaagtgaaacctggcaaaccgtgtccttatcacgctgacaatgtgcgagggaagcttcatgttactcaggctactctaggcattggctcatcatcggagaaaagcattcttcagtgctcttctggacacaaaagtccagttttcttgtgttcattgctaccagataaggttattttgcggatgatgatggggatgatcttagggatgactatgaatatgattcatggggagaggatattgaaggaactgagtcagaggagtcgtctgaatatgatagtgaagatggatatgctgatgactctattgctgatagtgatactgacatgtacccgtcttcgccaatcccaaatagtggagttgtaattgaggaaataatggatgatgataaacccaaaaatggagatgatccaactaagagattaacgaaaaagaagcatgtagctcagttgaaagagaaagacaacaaaagttctgagcttccaattgttgctaacggtgatactga

SEQ ID NO: 129817 - DNA, 930 bp, Glycine max
  Clone ID: PAT_MRT3847_88232C.1
ggattgagcttgctctgttcacggattgtagtgaaccctggccgaactgtctccttgggtttatagaaacgttgaaacccagacgagtgacgtggatttcatttcgcaatgggattctgggggatcgaagtgaaacctggcaggccatgtccttatcacgctgacaatgtgcgagggaagcttcatgttactcaggctactctaggcattggctcatcatcggagaaaagcattcttcagtgctcttctggacacaaaagtccagttttcttgtgttcattgctaccagataaggttgagtcatgccctttgaatcttgagtttgacgcagatgacttagtggcattctcagttgttggttcacgaagcatccacctttctggttattttgcggccgacgatggggatgatcttagggatgactatgaatatgattcatggggggaggatattgaaggaactgagtcagaggagtcatctgaatatgatagtgaagatggatatgctgatgactttattgttgatagtgataccgacatgtacccatcttcgccagtcccaaatagtggagttgtaattgaggagatagtggatgatgataaacctgaaaatggatatgatccaactaagaaattaaagaaaaagaaacaggtagctcaattgaaagagaaagacaacaaaagttctgggcttccaattgtcgctaagggtgatactgaccttgtggaaagtgaagacgaagacggctttccaattcccactgcagagaaaggggtgtctgtctctcagaaggcagaagcagaaacgaaaggagaacaagcacgtaagaaagcagagaaagccaagaaggaaaaagatgttgatcattctgctagcgtaaaacgaaaagttgatactgctgatgaagatgagccacaggatgggaatggg

SEQ ID NO: 129818 - DNA, 332 bp, Glycine max
  Clone ID: PAT_MRT3847_88233C.1
cttgagaaagctcgttatacaaatcctccttttatatattcaaacacgtacggggcttcctcccttatgagaactcagaccactcatgcctcgctaacagaaatcaatcggctgcttgggtgcaaactttccccatgatgttaggatgtacgatgttgcatccacctttatcttgaggactacataccatgtctatgtgaggctcaaacaaaacttacttgcgttcaaattatacaatgattgatgggcggtgtggtgtatgacaactctgcactcttgtgcggtggcttgttgagcgttggacaactgcataatgttcggcacggttttat

SEQ ID NO: 129819 - DNA, 431 bp, Glycine max
  Clone ID: PAT_MRT3847_88234C.1
ctcttggggggggggggggggtaggggttaaacggtagagggttggctgttgggcgggggggaattgaaaagtttaggataggataagtaatagggcagaaactaaaacttataacttttgttgtttgtgcagggccgtggtttcggtggaatcaacgttgcaaaataaacccggggccggggcgggtgtcttaatcggaaggaaggccacgggcagcaggcgtcggcagtgtgttgtaaagtaattattattatctgtataggagttcaatgagcttgtcttaatctgaatggccggaataaaagtcatctagtccactaactttccgtccaattcgttcctcgtatcgtatggtttccacagtttcctcctcatcctcctggtgctcttggcacctatagctgtattatattatagctccgggtaggtc

SEQ ID NO: 129820 - DNA, 265 bp, Glycine max
  unsure (1)..(265): unsure at all n locations
  Clone ID: PAT_MRT3847_88235C.1
cagagcggncangccacctcgccgctgngggaatcgaactncgactgcgtcctggaaacagacgacgacctccggctctcggccggactcctcggcggcggcgcgctgtcgaagccgccgttgcggacgcggctgaaccgcggatgcatcgncatngcgaccgnaatcnaggtcgcngcgttgtnattcggagacgatcnaagccntacgaatgngaacggcggcgcaacaggctanccnncgntggcggctcnatttcgagcga

SEQ ID NO: 129821 - DNA, 367 bp, Glycine max
  Clone ID: PAT_MRT3847_88236C.1
aaaacatatcaataaacggaggaatttcacaaaaaaaaaaaatttaaacaaaaaaaaaaaacaaaaaaaaaaaaaattaaaaaaaaaatcaaaacaaaaaaaaaaaaaaaaaaaatagggcgggccgctttaaagaaaccatttttacgaacccttgcttacaactaatataaattttttatagggccacctaaattaaataaattggcctacgttaaaaaacgtctgaactggaaaaaccctgccttaacccaacttaatccctttgcacaaaatccccttttacacaattaggcaaaaaataataaaggcccccaacaatcgccttaccaaacaattgcccaccctaaatggcaaatggaacccc

SEQ ID NO: 129822 - DNA, 644 bp, Glycine max
  unsure (1)..(644): unsure at all n locations
  Clone ID: PAT_MRT3847_88237C.1
ctattataaaatataggtttaatagacaaattactccttcaaagtgtctgacaatttcaaattagtcactaaatgttactaataaactagaaaagaaaaatcttactataaacaatgagtcaaattattcaaagattaattatcgatgaatattttttacagtaacaattaacaaaaacaatttttatctctcacatccggctttcatgttatcatcaaaatacaatttagtccatatatatatatatataaaagggaatgagtaaattatatttaatgataacatacaacaacttatctaaatcgaaaagtatatgctaaaaatggaagctactttcaagggctttttgatttatttaaatccataaacaaacttgaaagcatcatatactttcagaaacaaattgaccatttaagcttgtaataataataataatgttaggcgctagatattaggcagacatagggtagtccttttctgttggctntgtgccttttattatttcccatttacagcgcacgtgtggcccacgtgaatgccggtggttttgacagctggacacaccgacacacgcttngagggtaaacaagattccacaacattggcattgggacactttctnaccacaatcaccacttaccct

SEQ ID NO: 129823 - DNA, 350 bp, Glycine max
  Clone ID: PAT_MRT3847_88238C.1
gaacaatgaatttatgttttacatgttaagcttcttaatggaggctgagggttagattatttttgttgtttatggagacatactttgttgaccaatctgttgtaaaccggggacgttcaagaaaattgaccattcaacgttaacaagattctatccacattttatctgcagcaacagctctgacagcatgagctgttgttgctcccactgccgccgaaaaagtaacatacaacggtttttacctcacaaaacggttatcgttttgaatagaggatgtcataccgggctttacgataaattgtcgggatgaaaggaatgttcattttatagctgcttgtaaaaaccgggag

SEQ ID NO: 129824 - DNA, 415 bp, Glycine max
  unsure (1)..(415): unsure at all n locations
  Clone ID: PAT_MRT3847_88239C.1
tcttaaggttactataaatgatcaaattttaattgtaaatgaatttttttgtcttaataaaattaatatatatttatgatttttccattatagttttgatgaattttgattgtggaatttgtatcttgattaacacacgcacacacaaaaacactaacctggagatcaaagaggcgaagccaaggcacataatctgccaaaatgaaagccaccgaaacactcatatagcccttcaagtcaaacctacgatccttgttccttcccaacaccatcttgcatgccatnnnccgaacacttcccccactctctcactaacgtccacaatctcacgcgccattgctgcttccttcagagactccaccatcgccccaatctccctctttctcagagcaccaaaagacgctaatttcgacgc

SEQ ID NO: 129825 - DNA, 234 bp, Glycine max
  Clone ID: PAT_MRT3847_8823C.1
atggcttggaagcactctagtgatggtaactttacttgtttgactatcatctctcctgatagagatgacattgttcttcccattcctgagaatgagaatccaaagggtttatggtttactactaaagaagcttgtaattgggctcgtgctgatgaagatgttgctgccatttataagccaatcagtgtgacagacatgaaatgggcttttagttcctctagcttgtgtaattga

SEQ ID NO: 129826 - DNA, 1186 bp, Glycine max
  Clone ID: PAT_MRT3847_88240C.1
gcaccagcctctcccttcgcttactgttgcaccttcctcctaaatgattactcccgctcggcgtgcatcgccgccgattgagctcaacaacaacaacaaaaaacaccataaatgaccagcttctgaaattccaacttcgcccttcatcttcgtatacttttttatttccggtgaggtgagttccatgcctagtcccaagagcagccgcagcggccagatcgagagtcaccggaggggaaggtcgtcgtctttccacggccagggcgtcatgtccgtctctcagctccgccgtccgaagaccgtttccgaccttccgtcaatcagaagcctcgccggaacggcgacggcgactttgccggagggcttgcctagacatccgtcgaagatgctgctgaaggtgacgatgctgagaagcctcgcgcccgtgcagatgctgatgacgccggaatccaccgtccgcgacctcatagcggcggcggtgcggcagtacgtgaaggaaggtcgccgtcctatcttgccggccattgaagcctccgatttcgacctccattattcacaatttagcctagaaagtttggataggaaggagaagctgctagagcttggatctaggaacttttttctgtgtccgagaaaggctgccacgacagtggaaggtagcgtaacgacgtcgtttgcgtcttgtgcgaaagaggcaaagaaagagagacagggatgtggtggtggtggtggtggttttgcttggttcaaactaatgcaattcatgatgtgattggttggttacttggttagttattgtttgtttgtttgtttgtttcaattgaaatgtcttttttatttgtccagaaccagaatgaatggccggttacttgtaaaaaatgataggttgcctggcttggcaagtaggtacagggtttgagatttgtgtgcaagcaaagcaaaattgtaaaattgcatgtatgatttttcaacacatacattgtaatgttaaaagctttacattgcaaaattgtaaatattatatgtataatcttatattgctttcctgtgtcccaaaaaacccaatggccggcttcggtttgtctgttccagtttcttaatgtaagaaaattagtatatttgaataaattgaaaattattaataaaaaaaaaaaaaaaaaaactcgaactagttctctcctggtgc

SEQ ID NO: 129827 - DNA, 882 bp, Glycine max
  unsure (1)..(882): unsure at all n locations
  Clone ID: PAT_MRT3847_88241C.1
ggcgagctcgagccgttcaaagcctttcctatgcctctcccttcgcttactgttgcaccttcctcctaaatgattactcccgctcggcgtgcatcgccgccgattgagctcaacaacaacaacaaaaaacaccataaaactcaccgtagcgcaccacagccaaacgcgatctcaacgatgaccagcttctgaaattccaacttcgcccttcatcttcgtatacttttttatttccggtgaggtgagttccatgcctagtcccaagagcagccgcagcggccagatcgagagtcaccggaggggaaggtcgtcgtctttccacggccagggcgtcatgtccgtctctcagctccgccgtccgaagaccgtttccgaccttccgtcaatcagaagcctcgccggaacggcggcggcgactttgccggagggcttgcctagacatccgtcgaagatgctgctgaaggtgacgatgctgagaagcctcgcgcccgtgcagatgctgatgacgccggaatccaccgtccgcgacctcatagcggcggcggtgcggcagtacgtgaaggaaggtcgccgtcctatcttgccggccattgaagcctccgatttcgacctccattattcacaatttagcctagaaagtaaatctcaaacaatctcataaattaaagagaaaatctagatacaatttcataaatgtttttttaatccgaattaaagtttattctcacgtttatatttattaaaatccttagatgtcatcacgaattatcaaagtgaaattataanttctgatcgaaaaaatagtactacaaatatttataaaactgcatccaacttttattcataaattaattagtcatttagtttcttctattgatttgg

SEQ ID NO: 129828 - DNA, 504 bp, Glycine max
  Clone ID: PAT_MRT3847_88242C.1
gggagcaagaagaaagagttttcaagacaaacaagctttaacactcttgatctgaacatgaaagctgatgaaggggataaagcaggagaaagtagccccatttcaagtgatcagaccggagaaactatagctgatccactgaaccaaaacggatttcttgactcaattgtgaaccggtttgagttcaacacaaatccagttaaggacagagagatggcagagttgtttttgtgtaagttcaaagagtcttttgaagaggtttatgggaagaaatgtttggagaatctaagtgtagatgagagggtgattgaggatgtgggtgttgggtgtggttattttaccaacagcttgtttgagaaatggctgaaagacgttttttaacccagtttaaaaacggttaactttggagggaaggaggggatactttttaaactttcttgggggggggaaggggatagaaaaatcggtagtgggttcatgaattcttctttgcccaagaggatc

SEQ ID NO: 129829 - DNA, 303 bp, Glycine max
  Clone ID: PAT_MRT3847_88243C.1
cggacgcgtggggcgcttggtgggagtgctcttgctgtgttttggacgaacagaccaattcccctcgatgacaaagatgacttcaagaaatgaaaatgtgtaacttctatgcatattttcttttgtaggaaaaattttttattagttgttttgagaaaaaaaatgatttctgaattcactttagtagtcactcacacatgttagaacattaagaatttaggatgagtctataacagggagtgtggcaaccccttactttgagaatcgcactgcgatttttacttttttaggttttatagcttg

SEQ ID NO: 129830 - DNA, 331 bp, Glycine max
  Clone ID: PAT_MRT3847_88244C.1
ctcgagccgcacgacgacgctagaccctcccccattcttttttttccgtttaattcccctgacgccattccgcgaaatttcgctcttatatcccacgacctcgtttccaatcttttttcttaattgattctgattctgatttctttctctttttctctctccctatataaaagacattcgcagtcttttttacattaaaagaataatcatttttgcactgccacgtgagtgccgtgtggcgaaagagtaaacaaaaccgttactccctgccgatggcgatctccgatgtgcctgcagccgctggcacgaccgccactaccaccagcgactc

SEQ ID NO: 129831 - DNA, 397 bp, Glycine max
  Clone ID: PAT_MRT3847_88245C.1
taatgtgatgcgacggtcgaacaacatcgcttctggcacgacttccatttcatcatatcctgaaggcgattgtaccacacaaagaccatagtttcatcaacacacctaaggaattgtcaataaggaaacatatcctactgacaggtgcgcaaaagatcatgaacaccatgtatattccaatgttccttcactgcctacaactgagaattcaggttatgatcatcttccaaaagaattaaatgacatgaacatcgcatatgacaaaagcaaaaacaacaatgacaacgatatggaagcaactattgtcactggtaatggaacacaaaccggtgatattattacaactgctattgaaagtctagacagacaaccaaacctgacaatcttatacatatct

SEQ ID NO: 129832 - DNA, 128 bp, Glycine max
  unsure (1)..(128): unsure at all n locations
  Clone ID: PAT_MRT3847_88246C.1
ctcgcgtcnncgannttcacagcgaagtcgtagganggtttccaaanangaagaacatgtcagagcttctggcaattnggcgatgaactccgtggnccactcaanagcatcggangatcacaaatggt

SEQ ID NO: 129833 - DNA, 430 bp, Glycine max
  Clone ID: PAT_MRT3847_88247C.1
tagctggatcttaagggcggctttgtttgttttatatattactttttgaccttagaatacaaatacccataggacagacgggggttgtgcttttgtcaacaacgacagacagggagttagtacacacccgcacggctgtttgtccgggaggactccatcttcgaccaacgtcagcaactgggcccgatgggcttcaaactcccaatcggtggtcccaatcacatacaacataagacccgcgcaacacacctgggccgagagcaggcccagccatagcccacagaatccaacgtcaaaccagaacccaagtccaactgccacgggcatcccgaccaaatagaacgcgcccaggttcacattcgccgccgtgttcggccgcgccgtccctctaacgacgccgcaccccaccgtgtgcggacagttcccgagt

SEQ ID NO: 129834 - DNA, 139 bp, Glycine max
  Clone ID: PAT_MRT3847_88248C.1
cccacgcgttcgaccacgcgtgcgggcattggaaaacaatgtccttgcgggcatactgccatagttgttgtggtgggatgtaagatatctaatctatgagagcaccgctcgggaagtacagggctttgactcaagaaag

SEQ ID NO: 129835 - DNA, 213 bp, Glycine max
  Clone ID: PAT_MRT3847_88249C.1
tcggacgcgtgggcggacgcgtgggcggacgcgtgggtgacaatgtaatcttattgcgattttgtttggctccctggtttgtctcgcatttatggctaagctttagcttcaattttatgtcgtgttgattattgcaaccatgcatagacagacaaagaaccgaatccacattaccagaccaaatcgaatgccaccaagtaacaataacaaagg

SEQ ID NO: 129836 - DNA, 1853 bp, Glycine max
  Clone ID: PAT_MRT3847_8824C.1
aattattctcgtggtgatatcaatatgtcttacttcaagaaagaaatctagaagagtcaatggcatgcttccccttagccatatgttatcggtttcagatgagatcaaggaaattagagttgatcaagtttcagccaataatcatcctcagaatggagcttttgtgagtctgtatgacaggtttagtgacagggattctgaaaaagttttgatccaaacaaataacggggaaaatagcagtcaatcaggctcatttgttcatcttaagaaagatgatggctctcaatcaggcgaagaaagtggtgctaagtctgtttctacttacaggtcttcttcacatcctataactgcaccgtcccccttgtgtggtctgcctgaattttctcaccttggctggggacactggtttacgttaagggacctagaacttgcaacaaacaggttttcaaaagacaatgttattggtgaaggtggatatggtgttgtttatcagggccagttaatcaatgggagtcctgtggctgttaagaagctactcaataatctaggacaagctgaaaaggaatttagagtggaagttgaggctattggccatgtgcggcacaagaatttggttagacttttaggctattgcattgaaggcactcacaggttgctggtttatgagtatgttaacaatggcaatttagagcaatggcttcatggagccatgcggcagtatggttttcttacttgggatgctcggattaaaattcttcttggaacagctaaagcgctagcttacttgcacgaggcaattgagccaaaagttgtacatcgagatattaaatcaagcaatattctaattgatgatgacttcaatgccaaaatatctgactttgggctggcaaagttattgggtgctggaaaaagtcatatcacaactcgagtaatgggtacttttggatatgtggctccatacggctgcgaaaagacgacagaaggggagaagagtgatgtttatagctttggggtattgctcctcgaagcaattactggaagagacccagtggattatagccgaccagcaactgaggtaaatttggttgactggctcaagatgatggttgggaataggcgcgcagaagaggtggtagaccctaacattgagaccaggccatcaacaagttcccttaaacgtgcccttttgactgctttgaggtgtgttgatccagattctgagaaaagaccaaagatgagtcaagttgtccgcatgcttgaatcagaagaatatcccataccacgcgaggatcgaagacgccgaaagagccaggcaggaaatatggagctggaggcccagaaggagacctccgacacagagatgactgagaatccagattccaagtccaatggcagaaggaaccaaaggaagtagagccatgaatctcaaagctaaaggtaccaattcctggataagatacactattggaggggccatttttgcattcttttgagcttctgagtttggataactgccacgtttgacatcaaagacatgggaacaggaacgagttactttgggatggtttgtatacctatattttgttgttatagcatagatgtagatgttagaatgtagatgattgtgtattagtatgggactaaaaagatccttacactacactagtgtgtacagctcattgctattcatacatgccctttgctttttatttgtttcaccactcattaggatcatgaaggaattaatgttttcttgtggaagatgacatgaaaattttaccaaagcatgaaagacagaaaagatgtgcttattgtctataaattgcagtgaggaatttcttgattattatggt

SEQ ID NO: 129837 - DNA, 483 bp, Glycine max
  Clone ID: PAT_MRT3847_88250C.1
cctggatgagatgtctgagaaggttaggaaggggaagttgtctagggtgaatcaaaagattttcgactttgtagtcatatgatctatgacagcgacaaccatgaaggaatatgttttactaacatggacaaatattcatgtggctctagttgcaattgcttttgctgctgcaatttctgctggtttttctaggaggctgaagcttctcattatatgcatgaaaatttattttcaagacaggaaggggagccaccttgttcatcctcgtctttaatgggttactatcatagtcattagttgtgttggcggaaaagtattaagcctgtaggatccgttgattgtttacataccaacaccttgaagtgtcttgtgaggttgattataccttctacagctttgacgctccattctgctcacctcactgattttgtattttaatggatgatttcagctcgtgtttcatctttagcaactgtatatggt

SEQ ID NO: 129838 - DNA, 340 bp, Glycine max
  Clone ID: PAT_MRT3847_88251C.1
tttaactcgaacactctattttggattttgatattaaaacacacacttggtagggcatacttacaaacagagagtacatagtttttagttgttcacgtcaaaaattacttaagaccatactgctaacaacatgggaggaggaggagataaacacacagattaagagacggggaacgctttggatattagacatattttaagggccacgctcaaagaacttgcaccatatgagcagtggattgatttacttaagccttctccgactagaggggatcgaccacttaccatgtgaaagcaaggtctactctttcatagtgtgcataggcaccattcttgaaaa

SEQ ID NO: 129839 - DNA, 690 bp, Glycine max
  unsure (1)..(690): unsure at all n locations
  Clone ID: PAT_MRT3847_88252C.1
ccacgcgtccgtaaaaatattcacaaaagtaatgattattgattaatggtggaaaaaggtgtctatagcctctggcgaggctctcgtatttaagcttttgcagttcaaaggcaggcaggggcaaaattcaggatccaagaacagtaattgactaattagtgaatacatatttcacttttgagttcatgccttactcctctccaatgggtttaatgtcactgaaataacccataacccattgtctgtgaagtacatgacaaatacttcttcataactagggcccctacacatacaactgatacaagcagaaagagagagattcgtaggtggtggtgagtgatgaagggccaattgtgattttttttttttattttttttttgcaatggttttggtgttctaattatgcattagctctgcgccggcctgccaatggttggtaatttagacccaattaacttccttttctattggctttaattttgaattgagaaagagaaatggcaattatggcaccaacaatgttaattaaaataataatgcacaatatagttaatagcatatatttcaactttcacatgtgctgcatccttatttgctagtgttagcctcctcggctataacttantgagtcgtatagatgcaataattcagtagagaaatccgtagaaagctcctacctagtatatatt

SEQ ID NO: 129840 - DNA, 415 bp, Glycine max
  Clone ID: PAT_MRT3847_88253C.1
accaattcaattcaattcaaactttttttttctctctcaaaacccattcgttcccagggccgtgcgtggattggtgatccggcaaaccccgtgaattaattggaggcgcggcaccatgtaggcgctcgattttaacatacaagagctttgaattatagttcgaggaagaaaacggcatcgcttgccccctgtgtgaaagacgtatacggttactatctccttgactataccgacgaaatgcttcacgagcagagcgtggggggcctaatgcgcgacctagctccctttaacaagttgctccctaccggcgctgttgccacagggaaatcctgtccggcaccgtcgttacagaaatgatccctccggtgcagaggcggaatgcctatagcccgcaacggcggcgttgcttttaacc

SEQ ID NO: 129841 - DNA, 1837 bp, Glycine max
  Clone ID: PAT_MRT3847_88254C.1
acctcgagccgcaattttattgctacttttctccatcacctaaaaaatgggcactagtttcatgctattttctccaccgcctctgctcaagcctcaccaagtacccctcaccactccattccctcttcctcaaacccatcacacagcatcaagaaacaagagggtccacagcaccagcaaattcggaaactttcttgacttcaaacccgagaacaaacccgaatccttagattttgaccttccatggtgccacccttctgaccgcaatcgttttgatgtgatcatcattggtgctggccctgcaggcacaaggctcgccgagcaagtgtccctctatggagttaaggtttgttgtgttgatcctgaccctctttctgtgtggcctaacaactatggtgtgtggagagatgagtttgagagccttggtcttgaggattgcttggacaaaacatggcccatggcttgtgtttatgtggatgatggcaagaccaagtatttggatcggtgttatgggagggttggtaggaggaagctgaaggagagattggttcaaggctgtgtctccaatggggttaggtttcacaaggcaaaggtgtggcaagttcagcaccaagagtttgagtccaaagttttgtgtgatgatggggtggaattgaaggggagtttggttgttgatgctagtggattcgcaagtaattttgtagcatatgacaaggtgagacaccatggttttcagattgctcatggtgttttggctgaggtggatgatcacccttttgatttggacaagatggttttaatggactggagggattctcatttggggaatgaaccctacttgagagctagtaattcaaggtttcctactttcctctatgcaatgccatttagttccaatttgatatttcttgaggagacttcccttgtgagccgtccagtgttgtcttacatggaagtgaagaggaggatggttgcaaggctaaggcacttaggcattagagtgaagagggttttggaggatgagaagtgtttgattccaatgggaggacctcttccaaggatcccccaagaagtgatggctattggtggcacttctggggtagtgcacccttccacaggttacatggtggctagaacaatggctgtggctcctgttgtggcttttgctataactcagtgccttggctccaccagaatgatcagggggaaacaacttcatgataaagtttggaatagcatgtggccaattgagaacaggctggtaagggaattttactcttttggaatggagactttgttgaaacttgacttgaatggaagcaggagtttctttgatgcattttttaacttgaaaccttattactggcaagggttcctctcttcgaggttgactttgaatgagcttctttggttaagcatatcactctttggacatgcctcaaatccatccaggtttgatattgtcacaaagtgtcctgttccaatggctaagatggtgggcaatatcgctttggagtacattggatgatgatgatgatgatgatggaaggttgtgaaatgcgtgtttaagtttttgtttttcattggctgaacttgcatcttgatttgttgagttgtcattgaattgatatatatgataatttagctgctaataaaaaattaattcagttccgaaaactgagcccaagacatcccctccttatgcacttttgtcatttgtctcccctggcaatatagttttaggatgatctcggagccactcttccactccttattcacttttgtcgtttgtgtatgtgtatgtgtaatgagtaagctaatgaatctattttttgtg

SEQ ID NO: 129842 - DNA, 439 bp, Glycine max
  Clone ID: PAT_MRT3847_88255C.1
accagcaacaactgaaaagactgttcttagtgttctataaccgttgccattggtttgcatggatgtgcatgagtttgtgtaaattctacatataaagtagatttttgttttccttcttatgttctagtactggtacaaggttttcttggaagttagtatcaccttcacccatgttttgagcaaatatgaatagattgtcacccctttctttttaataaatgttaaaagcatttaagaagtatacatggatgtattctccttcagttaaacccttgtttaaagggtactgttggttaaaagtccatttcttttaaatggcagggagagaatcttacagccagattagcaattgtggaaactagtcaattcaaaactcattctgaaagtgcaaagaaaaagattgatttgcccgtgcagaagaatctcttaactaagtatt

SEQ ID NO: 129843 - DNA, 451 bp, Glycine max
  Clone ID: PAT_MRT3847_88257C.1
aacaaaaatacattttttatttattttagtttagctttttgtttttacaaccaaagaaacaggggttattcattttgatttatcacaataagattgaaaggaatattagctccccagttccaaaaaacacgattgttctaaaaacttgggggaatcttgaatgccgattttatttggtttttccttccaaaaaaggagaagataccaaccgcctaatatgttgcatttgcccctttccctggtgaggcaaaaaaaacctttaatcctaacgggggatgggggggaaacaactttcaaacaaacacatcattttcttaaagaaaacagtgatgggggggcctgggaaaaatatccaaacctctttttctccaacatgaccaaatgggttttggggatatacaaggttggaaccctcgttggggagatatccaaaaaaaaatgggggatacta

SEQ ID NO: 129844 - DNA, 393 bp, Glycine max
  Clone ID: PAT_MRT3847_88258C.1
ctcgagccgaatcggctcgagcggctcgagcggctcgagcatgaaaacaagttgaggcattcaaaatcaggctgtcaattaaataatggggctgagtgttcaacacatggcgctggcaaatgcagccttcttgggggtgttgagtgtattgctagcataacatgtagtaatggaggatggtactgcacctgcactacccttttctgatctcgaggaacctggagctaccattgataatctttggcggcagtggtgcttccacctttacagcgtggatccgaagtctctgatgatctgccatgaatacagagagtgctcttactatctcatcttttgtgatggttacaccctttgtgtttttgttcaagtgacaataatgtaatgtccctgctc

SEQ ID NO: 129845 - DNA, 1072 bp, Glycine max
  Clone ID: PAT_MRT3847_88259C.1
atgtcggatgctttgatcaatggattggccggagctggaggagggatcattgctcagctcatcacatacccacttcaaactgtaaacactcgccaacaaaccgagcgtgatccgaagaaagacacgaggagtcaaggggccctcgaacgaatgtgccaggttgtaaaagaagaggggtgggaacggttgtatggaggcttgatgccatcggtagtgggtacagctgcgtctcagggagtttactattatttctatcaaatattcaggaacaaagctgaagcagctgcactacaacaaaagaaaatgggcgttggtgatggatcagttgggatgctctcctctcttgttgttgctgctttatctgggtgtgttaacgtgctcttgacaaatcccatatgggtagttgttacgcgtatgcagacacatagaaaagagtcgaacagaactccagctgatcagggtttgtttgttgccactgagcagccaattctttctgcagttgagcctcttccttatggaactagtcatgtgattcaagaaatctacggtgaagctggaatttggggtttctggaaagctaagcttggagctactgttgtaacttatccgatcctagttgtgaagaaattttactctattcttcctttcctctctaaagttgcacaattttctttaaattcaggtacatgggatgctattattaaaatgatccgctatgaggggtttaatgggttttacaaaggcatgggcacaaaaatcgtacaaagtgtgctggctgctgctgttttgttcatgatgaaggaagaattagttagggggagtgattcaaacaacatattgaaatatggctttaactgtatcttgattattttcatcaggttagtttccatagaggaaattcatgccaaaaattacacactgggttcattggtttgtttcatgaacaagacagggttgtagatttgaagtatgctgctgaaacaaatattctttttacgaacgaaaaagaaaaaagaaaaaaacaaaaaacaaaaacaaaaaaaataaaaagaggaagaagaagaaaagataa

SEQ ID NO: 129846 - DNA, 187 bp, Glycine max
  Clone ID: PAT_MRT3847_8825C.1
ttttttttatgtttggtagtacactaccttcccttgcaacaaccttttttgagttagtgtcccacctctccattagatagatgtgtatatcctctaacatggacacaataagcttttctctagcttctaggatgacgctattaaatgattcacatattattaagtaaaacgtcacacttggagtcca

SEQ ID NO: 129847 - DNA, 1627 bp, Glycine max
  Clone ID: PAT_MRT3847_88260C.1
gcgcggcgcagttgagagtcgtgtcgtgggggtacaatacattatacatcgcactcactctcattgattgatactaatccaagaccatatttaatttgccaaccgcgccagatcgccattactacaacaacatagactagtgcggtgcattccctcgtttaccatgctttcctaagagaaagagaaaagtaaaacccctcactactgatagattttcattcctccgaggaaaaaaaaaacatgtcggatgctttgatcaatggattggccggagctggaggagggatcattgctcagctcatcacatacccacttcaaactgtaaacactcgccaacaaaccgagcgtgatccgaagaaagacacgaggagtcaaggggccctcgaacgaatgtgccaggttgtaaaagaagaggggtgggaacggttgtatggaggcttgatgccatcggtagtgggtacagctgcgtctcagggagtttactattatttctatcaaatattcaggaacaaagctgaagcagctgcactacaacaaaagaaaatgggcgttggtgatggatcagttgggatgctctcctctcttgttgttgctgctttatctgggtgtgttaacgtgctcttgacaaatcccatatgggtagttgttacgcgtatgcagacacatagaaaagagtcgaacagaactccagctgatcagggtttgtttgttgccactgagcagccaattctttctgcagttgagcctcttccttatggaactagtcatgtgattcaagaaatctacggtgaagctggaatttggggtttctggaaagaccaacattaagcaatccttccatacagttcatgctgtatgaagccatgttggcaaagttaagaaaaagacgtgcttggagtaagaagggtagcaacggggtaactgctttagagatatttcttattggagctttagctaagcttggagctactgttgtaacttatccgatcctagttgtgaaggcaaggctccaagctagacaggataaaactggagacaggagacaccattacaaaggtacatgggatgctattattaaaatgatccgctatgaggggtttaatgggttttacaaaggcatgggcacaaaaatcgtacaaagtgtgctggctgctgctgttttgttcatgatgaaggaagaattagttaggggggttcgtttcttgcttgccaaggatgctgtaaagccaaagaatctgtgattggaggccactagcttgatcaagatttcatgtaccatcttcagttagcaaattagttcaaatggtaggggaattagagtgattcaaacaacatattgaaatatggctttaactgtatcttgattattttcatcaggttagtttccatagaggaaattcatgccaaaaattacaccctgggttcattggtttgtttcatgaacaaaacagggttgtagatttgaagtatgctgctgaaacaaatattctttttacgaacgaatatcactatctgatttcattggcagctaaagatttagatcaaaatttaaattcatgaatatcactatcatgttgcttaatccattttccaggtactgaatgaaaattcccacctttccatcttt

SEQ ID NO: 129848 - DNA, 1769 bp, Glycine max
  Clone ID: PAT_MRT3847_88261C.1
cccacgcgtccgcccacgcgtccgtacggctaccaaagacgacacaagggggaagcccaaagtgcaacgtactttgcaaaaaccctaaaccctctctttctctctccgcgactctgtactcatcaatggcgacgcaatcgttagacgaagaaacaactaagaaagtcatacgacaggtcgagttttatttcggcgacagcaaccttctcaccgatggtttcatgaggaagagtatcactgaaagcgaagatggcatgattagtttggcgctgatttgctcgtttaatcgaatgcgaaaacaccttaatttgggtgatgttaagcccgatgaagtggcccaagaaaccgtgaatactgttgctcaaactttgagaaattcggcttcactcaaggtctccgaagatgggaaaaaagttggcaggaaaactgaacttccaaagctagaagatgttgagcaggtggagataagaacacttgctgtatcaccatttgaatatgatctgaagcttgaagatgtggagaaattttttggtcaatatgcaaaggttaatagtgtccggcttccccatcatgttggagacaaaaagttgttctgtggcactgctcttgtagaattctcttcagaggaagaagtagaaaaggttatgaaggaaaaaatggtatatgctggggctgagttagaattaaaaccaaagaaggactttgatgcagagagagaaaaagaattagaagattataaaaaatctcgtccacctgtgggttcaaatcaccagaatagctcaaatgtagaagaagactaccctaaaggcttaattattgccttcaaattaaagagcatttcagaagaaattccgtctgaacaaaatggtgttgatcaacaagccaaggacaatagtgttgtctccaaaacagatgaaaacccccgctctgaaattacttctggggaaaatgatcaaaaggtaacagaaaatgttggtgttgatgaagaaaaaaatgagatgaaagaagcaaaggaaactgtaaatgaagaggacaatgagatgaaagaagcagaagaaactgaaagtgaagacaacactgacatgaaagaagcaaagggaactgaaagtgaagacaacaatgggatgaaagaaggaaaggtaaccaaagatgaagaaaagaaacaacaagctggtgaaaaattttctgccgctgcttacaaggacaacatggatgttgtctcacgtgaggatttgaagagtgtctttgagaaatttggtaccgtgaagtacattgatttcaagattggagcagagtcaggatacatccgctttgaagaaactgaagctgctcagaaagctcgtgctgctgcagttatttcagaaaaggatggcttggttgtaaagaattatattgctattctagatccagtgactggtgaggccgaaaaagaatactggagcctgcttcgtggtaatcaaggcaaacaccgagaattcaagaataagcaaggaaggggaggatggcatgggagagggggcaaacatgcacgctctagagataatgggtctagagatcgccgaaataaggctcagaaagttggtggtgcataatgttgggttggttagatacagcagttttgagatcaacttgcctgatgtattctccgctaatatatactcaagttttgattttatggttcggctgtaacatggcacattatcattacttgcaatatttctttataatttatcgcttccatatatttctctctaaaaaaagcgtcaaaa

SEQ ID NO: 129849 - DNA, 941 bp, Glycine max
  Clone ID: PAT_MRT3847_88262C.1
tgcagatagagaaaaagaactagaagattataaaaaatctcgtccacctgtgggttcaaatcagcagaataacacaaatgtagaagaagactaccctaaaggcttaattattgccttcaaactaaagagcatttcagatgaaattccttcagaacaaaatggtgttgaccaacaagccaaggacaatagtgttgtctccaaaacagatgaaaacccccactctgaaattacttcaggagaaaatgaccaaatggtaacagaaaatgttggcgatgatgaagaaaactctgagacgaaagaagcaaaggaaactgaaagtgaagaaaacaatgggatgaaagaaggaaaggtaaccgaaggtgaagacaagaaacgacaagctgtggaaaattttctgccgctgcttacaaggacaacatggatgttgtctcacgtgaggatttgaagagtgtctttgagaaatttggtacagtgaagtacattgatttcaagattggagcagagtcaggatacattcgctttgaagaaactgaagctgctcagaaagcacgtgctgctgcagttatttcagaaaaggatggcttggttgtaaagaattatattgctattctagatccagtgactggtgaggccgaaaaagaatactggaacctgcttcgtggtaatcaaggcaagcaccgtgaatttaagaataagcagggaaggggaggatggcatggtagagggggcaaacatgcacgctctagagataacgggtctagagatcgccgaaataaggctcagaaagttgatgctgcataatgggttggttgcctgatgtattatcccctaatatatactcaagttttgattttatggttcgttgtaacatggcacattatcattacttgcaatatttctttataatttataatttatcgcatgccatttatttctctcaa

SEQ ID NO: 129850 - DNA, 254 bp, Glycine max
  Clone ID: PAT_MRT3847_88263C.1
aacaaaacatgctcaatgggatttgtgtgttaaaaaattcgcgtgtcagatttactactcctaacttagagaagactacagaattcgaccgcaaagaatctcaagaaccgcagccgcgtaaaatacatcatttttcctgttgagggaacaacacctgcgagtatgacttcttacattactatcgcttcacaatctttcggttccactcgagcattttttaagcgcaccgtacacgcttgaatgctacacacact

SEQ ID NO: 129851 - DNA, 618 bp, Glycine max
  unsure (1)..(618): unsure at all n locations
  Clone ID: PAT_MRT3847_88264C.1
ctggacgcctgcaggtgtganagcacactgttggtcaccggtccggaatcccggtcgacccacgcgtccgctcaaaccagctttaagcttaagctaacctcagtgacccttcttcttcttcttcttcttccccttgcattttggatttgctccaacggtcactctgttggaggaagaagaaatgctccctttttttgctttgttcttttttcttctttgctgcaactctcttgcacccgtggtgtattctctgaatgccgaaggttctgtgcttttgacactgaagcagaccctcacagacccacaagggtccatgagtaactggaattccttcgatgaaaacccttgttcatggaatgggatcactagcatccctaagaggaaactctatggctctcttccttcttctctgggatctctctcccagcttcgccatatcaacntgcaagaacaacaaggctctttggaaacttgcctccacggctctttcaggctcagggacttcaaagcatggtgctttatggcaattccgcttctgggtctggcccaactgagattcggaacctcaggtaccttcaagctctagactaatcaacaaatttcgttcaaggggtcatt

SEQ ID NO: 129852 - DNA, 393 bp, Glycine max
  Clone ID: PAT_MRT3847_88265C.1
ctgcggtaccgttcctgattcccggacctctttttaaactttaggcagaggcgggcaggcgaagcattagctcctatctgaagacgatgatgaagacaaggagcaatggtctggacttgggtctaggttccgaagttggaggctcatgatgctctgttacccaaaaatctcaacctatcttgttgacccgaaggtgcacgccggtcaccagcctacgtcgtgattcgtcgattccgaggactactggaatcgttttgtggagtgtagtggaattgaaggctcttgttcttggtgccaggatcaatgtaccatggttaccctttgttattgacacttataggccctttcacagttagaagaattgaaggacaacccggtcatcttcttatgctg

SEQ ID NO: 129853 - DNA, 973 bp, Glycine max
  Clone ID: PAT_MRT3847_88266C.1
agcattatcgacatcaattgaaaacaaccaccggctcgagcacttagtggtttcccttagaaaatttcctttgtatacgtgatacggttgtagcaacacttgcatcgcatattctttccctttgacaactgcaatctaaggaagagataacaaacacaacatgggttctttgggcacaatcaacaagcctcatgctgtgtgcataccgtacccagcacaaggccacataaacccaatgctaaaactagcaaaactccttcacttcaaaggctttcacataacctttgtaaacactgagtataaccacaaacgccttctcaaagcaagaggccctgattcccttaatggcctctcttcatttcgctttgagaccattcctgatggtctacctgagactgatctggatgccacacaggatattccttccctgtgtgaggccactagaagaacttgctctcctcacttcaaaaaccttcttgctaaaatcaatgattcagatgctcctccagtgagttgcatagtttctgatggtgtcatgaccttcactcttgatgctgctgaagaattgggtgtccccgaggtgctgttttggaccactagtgcatgtggattcatgtgttacgtgcaatatcaacaactcattgaaaaggacctaacacccctcaaagactctagttatatcacaaatggttatttggagactaccatcgattggataccaggcattaaggaaattcgattgaaggatattcccagtttcgttaggaccacagatccagatgagttcatgcttgatttcatacagtgggagtgtgggagggctcgaggagcttctgcaatcattttgaacacatttgatgccatagagcatgatgttttggatgcgttctcatccattttgcctcctgtttattccataggtcctttaaatttactcgtgaaggatattgatgatcaagatttgaatgcaatt

SEQ ID NO: 129854 - DNA, 306 bp, Glycine max
  Clone ID: PAT_MRT3847_88267C.1
ggctctctttcgttgcagcccattatatctcattacagatcctgtcggaaggccaaaacaaaaactgtctaatatatagagaggtatttgagtgcgatattgtagggaatagagataaagcctctgggcattacacggactctatgaatgattgagaaactgaaaccttggctatgcggtgaacactgatccattcagagtgagccattagagcgcattgaaagttggttctacagcttgctacgcatacgaaaaacaccgagttctagacaggggaacacgtgattaccgctgcggctctagata

SEQ ID NO: 129855 - DNA, 259 bp, Glycine max
  Clone ID: PAT_MRT3847_88268C.1
gaagcatatttatgtgatactgattctttttcggtgatataaactgcttcatttagattcctctgatttttaagacttgcagattttcaacggtgccagaaaagtcacattccccttgtagttgatttttttttttttttaccggtattaagttggagaaaccaacaggaagatccaccacttgtttctgtgcccattatcaaaagcatagtaaagggcaagtttgagtctttatgcatgtttatcgctatgcgcttgt

SEQ ID NO: 129856 - DNA, 185 bp, Glycine max
  Clone ID: PAT_MRT3847_88269C.1
ctactccatccgcaatgggcatcgatttgaaggcaatacgtaagtcctcggagaccaatagctttggcaccagattcgatgatatctcactgattcatattgaaactccgcattgcagttgctgctctcttgcttaggagtcacttgcgtgctggcgtcttcacttgaccggccagggtacgcgt

SEQ ID NO: 129857 - DNA, 1188 bp, Glycine max
  Clone ID: PAT_MRT3847_8826C.1
ccggtccggattcccggtcgacccacgcgtccgcaaatacatgtgtattgccaaaatcttcaagtaaagatgattctatctcggaggggcaagcagttgaggttagtaatttaaattgtgaaaattgtccaaatatgcaccagaatgtggatgtcatagagaagacgacacatggcggcagcagtgttactaaggaagatgagctattgaacactggtgatcatgtggatacagtgattttgtcaagcaagtcagagacatctatgcctactgcagaagaaagtaacatttccactattaatgaaggaaatagtgacaatatggtaggaagtttttcaagtagcagtgcgacggccttttcaacaaaatcttccattttgggtgagtctactcaaatatgtgtaaacaatgaacctgacagacagaatgaccatgaaaaatgtgatctagatgtctctgtcaatgatcaggatgaactaatgaacactggtgatcatgtggatacagttatattgtcgaacaagtcagaggcatctatatttacttctgaggaaaataacatttcctccatccgtgaaggaaacagtggcaaaaaggtagaaggttttcctagtggcagtgtgaaggatttttcaacaaaatcttccattttgggcaagtctactcaaatatgtgcaaacaatgaatctgacagacagaatgaccaggaaaaatgcgatcaagttgtctctgtcaatgatcaggagcatgaaaaggttccttctgattctagccagaagcattgtgatgtcgataagggtgttgtttcatcatctattagtgaaggtagcatggaaatcaagttgacaacttccacagtatcaatccatgtcacacctatcaataattctgtttcacaagttgtttcggaaaataatagtttgacatcacatgagataatagacattccaccttctagcaaagttgtttccactcatgaagttactagtcacaatgaatttcaagggataactcctgttggaaattcttctgccgaggaaaagggagaatctacagcaaaagctgaggaagcaggcacatctaccctcgttggatgttctgagcaggaaactgcttcttgtcctgtcccaggaactgaaaaacatcattcttctgaaacttctaggcaattgttacatgacagcgatt

SEQ ID NO: 129858 - DNA, 142 bp, Glycine max
  Clone ID: PAT_MRT3847_88270C.1
agaactcatgtgggaaggaagcaccactatcatgctaacttctaataaccaaaaattcctgaaaacttcaatagcttatgtatctaaaaaaccaattatcactaacaaacagtttaataacttacaactaaccctaaagata

SEQ ID NO: 129859 - DNA, 482 bp, Glycine max
  Clone ID: PAT_MRT3847_88271C.1
ggggagggggcaaatggggaggaacatttttttgaaaaccctaaaaggggcaaaaatgggtgggggggggggaacctttttaaaaacccccctaaggggggaaggttcccattttcttgcccaaagggggggggggtggttttcccaaacccaaaaaacaattggggggaccttagagagatcaagggaaaggtccccccctttttttgaaaaagcccaccccaacctaaaaaacctaggcttggggggggaaaaaaaagcccaaggggtgggtttaagcccttagcggggcccttttccgggggggggaattcccgaaccttaatcccctcaacactggggggggggcctaaaaaggggaatgcaagggggccccttggcttcttaatttctatatttttggggggtaagccgaaattcccaaaacccccccatttggacaaaaagggtttggcccccctttattccttttttttaaaggg

SEQ ID NO: 129860 - DNA, 430 bp, Glycine max
  Clone ID: PAT_MRT3847_88272C.1
gactgtgattattatttgataagtagtattgtttattctcttgtggttttcgtgcggaatggtagcattttcagtagggtcttcaatgattaggatcattgatgagaaatttgaaagcaggtatatacttacacaatgggtttgaagtaacttaaaggcaaactttatcatgattcacaaaaggttgggatcattgttgttatgggatgtcgttatacaatatcctccgaagcatgataaagtatgtctttcggttactttgaacccatattctacaataactatatatctgcttttaaattttcatcaatcactgaagacctcttgaagatgttgtctttctgtgctaaaaccacaagagaataattagtactacatatcaactaatgcaacactcatgatattgaattactaatctatctataatata

SEQ ID NO: 129861 - DNA, 391 bp, Glycine max
  unsure (1)..(391): unsure at all n locations
  Clone ID: PAT_MRT3847_88273C.1
tgcaagttntcaaagaatacgagcgtttgaagtacttacatatctgttacctgataatacgcacgccggctggctaccttgccgatgaattgaagattcacattggcccattttccaatcatgatgctcgggattacactaaggccatataggaaggtctgatccacgtgcacaataacgggtttgataactgagacataaagctgcagatcattctagtattcggggacggaggtatcaaaattgaagatttaagacttgcaatggatgcagggcacaaacaagagaatagtgaatgcagggggactccgatgtttatgtcaccggaacaagcgaccggcggcaagtgcaaatcaccggccgatatatggactatgggatgtacaattgt

SEQ ID NO: 129862 - DNA, 1079 bp, Glycine max
  Clone ID: PAT_MRT3847_88274C.1
ccgctcgaggggcgcggggcggcggccaggcgacgccgcatcggggggggtggagcgtgcgaagggagagggggtcagtcaaggtcagcatagaaagactccctctcagttccgacgaggcggcgactctgcattcccacccacctaacttctctctctttctctctctagggtttcgccatttatccctaattaagctaatttcaatttcatttttaaggctgtgtttgaaagtgtgttcaatgggtactccggaattcccagatctgggaaagcactgtgctgtctcggattgcaagctcatcgatttcttgcccttcacctgcgattgctgcgtccaggtgcgtgcagagtgatattagtattctcatgtacaattaagtgcagggactgcacagtagagcattgtttaaagcatcggtccggacctgatcataaatgtcctggtcccacaaaggtggaatcaagtttttcattcatgaatcttttgaatgggagtaaaaagcaggagtccaaacccaagtcaagtgcaacctcatggagtacaagctttcttaatgcggcttctaacgttcgagcttcggctgaggctggtgtgtcaaagttaagttcctggcagacagcaaggggtggggttggacagagccatagcagtggtcaagtggagcaatgccctcagtgtggtgctaagttttcctcagttactactttggttgaccatgtgcaaaaagttcatgaaaggagtcgcaaccgatctggagcaaaggttacaattgatgtttgtccaaagtgtagtagaggatttcgagatccggtggccctagtggaacatgttgagagggatcacggtggaagttctagatcataggtacgagttgctattgttattgaatgaattttaacttgaagaaattgcatatttttgctataaatagtctggaggaatatagtgtttataaacatgaatttaattggaatacatcgagagtgtaaacattgtcattcaatcatgtggtaaaaattgtaaattgttgacttttcttgtaattactttaaaagtcatatttaaggtgatatat

SEQ ID NO: 129863 - DNA, 492 bp, Glycine max
  unsure (1)..(492): unsure at all n locations
  Clone ID: PAT_MRT3847_88275C.1
catggcgaaggtagctgattgtagagctcattatgaaactgtgccaatacagtggatagagatagtgaaactggagagaaagatctttgccaaggccgattgactgtctacattttttcacctttaacttacaacgaaaatcactgggcagctatttttttttgagggggggggaanngcaagctacgccatgcacncaaaaaactacgccccnggcgggaggcgtcggggagctttctcttaaacgacccctcgccgcccccacgtctccctcggcgccctcccccacccccccatccccccccctcccgccccccccccccccccgtcactctccttctccccccccccctcaccactccccctctccccccccccccccttcctctccctctccccccccccccccccccccccccccacccctctcccccccccccccccccccccccccccctcccccccacccccccccgcccccccccccccccc

SEQ ID NO: 129864 - DNA, 188 bp, Glycine max
  Clone ID: PAT_MRT3847_88276C.1
tgcaaggggaggactgaagtttactgattgcaaaacatgggattgaagggtgtactattttaggcttgtaatttatattaacttgttaactgccagcacaaattgaagctaggtaggaatactattggaatgcacaatctgattactatctttatggatcaattttgtaaacttttgaaagagtatat

SEQ ID NO: 129865 - DNA, 166 bp, Glycine max
  unsure (1)..(166): unsure at all n locations
  Clone ID: PAT_MRT3847_88277C.1
actcanacacncgnntaaanacacaaaannccccnccnacacaacacnnnccancatctacccnaaccaactaaaccanccaacncnaaaatnnacnaacnaccacnnncnnaaaaganatanctnanaacaaaatagcaaannaanaagcnnntacnaaaangnt

SEQ ID NO: 129866 - DNA, 591 bp, Glycine max
  Clone ID: PAT_MRT3847_88278C.1
ggctcgagctcgagccggccgaagtcgaggcttacctcgacaagatcggtcggggtgaggtccttccttctgcctttatgctcggcaccctcaatgtgtttatcgagcaggggcgaggtcattctcagttcctgcgttcggctacagacgatcctggcgctaggtctcgtatgggtcatattatgtctgccctagccaaggctcgcgactcctgtgtggcctttaaccccaatattgccagatctcgccccgctcctgattgtatttacctttctggcaaacccgggcgtggcaagagtgcatttgctaagatgttggcccgcgcctggctcgctaagcgcctcgatcctgacgcgcttgagcttgctgagcgccatttatcggccttagtctacaatggtacccctgagaccgaatattgggatgggaacgggcgacagcctggttgcatcttcgacgacttccttcagaagaaagaggtcggcggaggcgattcggctgcccttgacatgatccgcttgtgttaatggggaggctgccctgctttatttggcaaacctcaatgaccagggatccacctattttactagt

SEQ ID NO: 129867 - DNA, 190 bp, Glycine max
  Clone ID: PAT_MRT3847_88279C.1
ttgcgtattgagtatttcccccctcttaattttgtacccctcctttatctgcataaaacagcaagatggttcatcttaacctcatacttatcatggttatttttattgagactgagcctttattaatagtactacttgggcgcagataattagacaccattattcaaaaaggtgtcccaatgttgaaaac

SEQ ID NO: 129868 - DNA, 1363 bp, Glycine max
  Clone ID: PAT_MRT3847_8827C.1
ccacatgctaaactgccagctccacccagaggtctcaactaaacaccaaggggctcgagccccagatgctgatggtccatcttctttatatcaagcacttcagtgacaggaggagaaaaggtggcatcttgtaccgcgagtccctccatgtggcctaaatgaaaactcaaggaagcagttgcagcacaagcgtgattccacaaaccaaatattaaaggctgcaatggccattaacagcatcactttagctgaaatggattcccctgagtcctatttggaattttctcttccaaaggtaagcttggcggccatgttttgcatgtttttatctttgtatcctgtatgcatcggatcaattttctctcctgagcatgcttgctagcttgctgcttgatttatcttctgacttgtggcattaagctattgcgaaccgagccgaggcttccatgtatatttggcgcaaaaggaccaactccaagcctgctagtatcagtgccaggtctagttcaagaacatcatgggaaatggtcaaggatctgatggttgatgcagacaaaagggatttgtttgctgagagagcagaaagccttttgctttccttaaagcagcgttttcctggtctccctcaaacagccttggatatgagcaaaatccaatacaacaaggatgttggcaaagccatcctggagagctactctcgagttctagagagtttggcatttaacctggtagcgcgaattgatgatgtgctctatgtagacgacttgaccaaaaattcagataaaatctcatctctctcaaaagttggtgttgttactcacaagagtatatcagttccacactcagtgcctgtcccaggcactccatacaaatcggctttcggcacgccaaccctttctccagcacatgggattagtagtcctgccaagggtgggaagtccccgctcatcaattacagcaaccttccccaaagagggtcaggggtcaagaagtctttgactgattttcttagcattgatccaaaagggaaggacagtgacacttcaattgagaaacaagattcagaatcaaatgtacttgatgaagtgacaacatgtgaaacagatgtggagtccagtgcctgcacagaggtgctgccagtccaagtatcttggaccggaaatggcatgtgtgaggctattgatcttttatagtcgaggcatttctcaacctgcctttcttttttcacatctttgagtctttgtatcattgtatgtatatgaaatatgtagaaggtttcatagttaagaatggatagtgctttttgttatttacttgtggtagtaatgtgatgcctctaagagaggtattctattttttcaaa

SEQ ID NO: 129869 - DNA, 242 bp, Glycine max
  Clone ID: PAT_MRT3847_88280C.1
ttcacgggtacggttgccaaagccttcacaacttctagtgttctggaggcccaatggataaggcccaacacatgtgaagtcgcctattgcagatatagcactgtgccaaggaagcacaaagcatgtgctgaaggacacatgtctttgcacctaactgaacaagatggtagtggctaaatgcaaggacagtatgagaatgggaaacactgtggctcaaataatgatggctccagggctcatat

SEQ ID NO: 129870 - DNA, 276 bp, Glycine max
  Clone ID: PAT_MRT3847_88281C.1
cttatagataatggggggaaatatggggggtgcgaccgggccacttataacaaaaggcccttaaaactgaataacaaccatccattaacttaataggggggggaaacaaaaacctttgcggttattcataaccaaaacaaattccgtgtggggcaaaattaaaaaccactcaaacctacttagagaaccaagggggaaaaagcgcgtaacactttaagaagaaggacaaaccgggccaaaaacccacataccgagaggactactttagatcctagg

SEQ ID NO: 129871 - DNA, 382 bp, Glycine max
  Clone ID: PAT_MRT3847_88282C.1
ctcgaacctaatgggcttaatgaaatgaacacatcgatgagctggttaagaacatagaatgagtacggcacactgaatggaagtgctggtctgggacaagagaactactggtcatttgataaaccagaacgggtgtatgaccactcttgacaagaactaaagctatttaatcctgagcactctgagacatcttatgtaatgcctttgaacaactgggaatggtcagagctatattaaagctggaaaaccttcaaacatatttacccatcaccaaggaatcagaccatttggaatgagaactgccaaatggaaatgttcttaagaaaatatttgtgcgtgttatgagctttatcgtacactgtgataggagatgtgacactct

SEQ ID NO: 129872 - DNA, 238 bp, Glycine max
  Clone ID: PAT_MRT3847_88283C.1
cctcccgtgactgtttgttaagaagtttaacctgattgtcacaatcttttctttcatttgcatagtcattatttgaatatcaattcttaaagattcttaaagcatatagatcactaatataaatatgcatcataacctatggtatgaaagttggttttgtgggagagttttcgctgttttcaactggtgatgtatatgggatttggtacccttgtacctatatatcatatatgtttta

SEQ ID NO: 129873 - DNA, 535 bp, Glycine max
  unsure (1)..(535): unsure at all n locations
  Clone ID: PAT_MRT3847_88284C.1
aaatttaaaaatataaaaaaaaaaaaaaaaaaaaaaaaaaaaaaaaaaaaaaaaaaaaaaaaaaaaaaaaaaaaaaaaaaaaaaaaaaaaaaaaaaaaaaaaaaaaaaaaaaaaaaaaaaaaaaaaaaaaaaaggggggggccgttttaagggttcaatttttacttccgcgtgcttgcaaagaaaaaattttttttttgggccccttaatttaatttcatgggccgttttttaaaaccgttttaatgggaaaaacctggggttaaccaacttaattcgcttggaaacaattccctttttcccaagttggggaaatataaaaaaggcccgaacgtatcgcttttccaaaaattggcccaatttaaatggaaattggaaccccccttttaccgccccattaacccgggtgggggtggggtttcccccatgggtnnnccggaaaatttgcaagggccttaaacccggtttttttgtttttttccccttttttnntgagagaatttcgggggttttccccgtaaggtttaatatgggg

SEQ ID NO: 129874 - DNA, 383 bp, Glycine max
  Clone ID: PAT_MRT3847_88285C.1
agggagaaaaaaaagatcacaggattcgttcttgtttgtttacaaaattctcattttattgaattaatatttatcgataaataaacctaattaccttatagttacttttatgtttgatttctgattatttatgataatagctgttgagtttttaggaatttcatttaacattattacttggcttcacccttatttctattgtttgtattttacttatattgttttttattatctttcacttttttttttattttgtcttcttttttatcatgttttttttattttttcctttttttttcctcctcctcttttataaaggtctttttttttgttctatctcctgtctggacgactatctttttccttttattatcttattttta

SEQ ID NO: 129875 - DNA, 224 bp, Glycine max
  Clone ID: PAT_MRT3847_88286C.1
gggacccgtggcgcgcttattttctcccccttggaccgcccaggaagaggggcccactcctaataagaggccccttttgggaaaggaacagacagtgagctcggggaggacctcggggcgcttccaacaggggaagtttatgtcgcctcatttccgttcccttggggggacaatgccctcccggtgttagagggtaagatacccccatctcccattaaaaagat

SEQ ID NO: 129876 - DNA, 439 bp, Glycine max
  Clone ID: PAT_MRT3847_88287C.1
acgcctctctcctctctcaccctcgctactgaagtttcccaccctggctatacctctaggatctctccagaccttcgaagctctactttgcaagcatgccctaccgacaaggttcacatcaacattgtggaggttggccatgtccaccctgcacgaggcaccccacccttaacgacctgaacaagcctgttgtggagaaagaagctccagggcatgccatatgagggcatgcacgcacggcctcgcaggggaaccacaaccatcatgctaacaaaataatctgcaaccccaatgcatccctgccctcctcagtgcgcaccctaacctacctttgctatggccaccttcctttgacatgagagccttgatgaacacgcacccttctgatgtattgctcttccctgaaaggtaatagcatgcttcctatccttctggccac

SEQ ID NO: 129877 - DNA, 384 bp, Glycine max
  Clone ID: PAT_MRT3847_88288C.1
ggagacaaagaaaagaaccacccaattcaattatactattttctttctttcactttatcccttcttcgttcctctctaactccatttttcttctcaaacaacatgatgtgggaatgggaagattatgaagacaccatcaccgaacccgaacccgaacccgattccgattccgattcccacctcaatttcgatttcttctccgccctctccagacccaaggattattataagatactggaagtggattacgacgctacggatgacgctattcgttccaattacattcgcctcgcgctgaagtggcacccggacaagcacaaagaccataactctgctacctcgcgattccaagacataaacgaagcctatcagggtttgagtgat

SEQ ID NO: 129878 - DNA, 454 bp, Glycine max
  Clone ID: PAT_MRT3847_88289C.1
gtagtgatgtaccatagtgctcagttattttctagagctaacttatttcttttataatttgttctcagattcctccattgttgatattctccggcctaagtgcagcatttggaggtaacttctgttctagcctatttcttagatttatattagggccttcaaattttaatagtgctcactgctgaatatttgaaaactattgtgttgtagtggctttaacataaaaagaagcatgaaatgataggtcatgctccatttgtttctggctttgttttttggttacttgaatcaatgttgtaaatctcaagatactactacctagggtaagaaggatgggtaagagacaagtatgtgtgccagtaacatggatcttaagtaagagcccaacatgcaaaattataaaatgactgaaataggcaaaataacttaaaattactactaacatgttgtctac

SEQ ID NO: 129879 - DNA, 360 bp, Glycine max
  Clone ID: PAT_MRT3847_8828C.1
gataaatacaaacatcacaagaatctatttaaaccaactcaaaatccaagctgcgggtgcttttctagagtgtgcgctttattaatcatcacataatccattgcatacacacctactatatgaaggccataatcatcaatccccaaattacaatactcatctctaactccattcactaccccagaaccacccctcaaacgtgggaggatctaattcggaaggcaaaagacggacgccttgatctcatcgacacttatgcctcttgaaatgttcatgaaccatctcctgacaattacaatttttaacggaagaacgatctgttacagctcattaaaacaatgcaaatagtggtgctctatg

SEQ ID NO: 129880 - DNA, 371 bp, Glycine max
  Clone ID: PAT_MRT3847_88290C.1
agggcatcatattgctgacgtacccaccggaatgaccgccggcgcgaccagctcactcggctgggggcgccctttttcattgattcaagtgagaagcatctacatatgactagagatgccagagtcaggcacgctgagaactaatatacacagcgcttaatcaggaccataaacttgaccctatattggcgacacaggacaacctgaagtgtgtggctcaggcactcgtgtttcaaacggcggtttacgttactattaccgagcctgaatgacgtggcggaggaaccttgtactagaggatcatcggaccgacgttgttctaaaacataacattaaatcggagatggcggcataagcactatctattcttt

SEQ ID NO: 129881 - DNA, 190 bp, Glycine max
  Clone ID: PAT_MRT3847_88291C.1
ctggatgtcacggcaattttataggtcctccatgaaagagagagagagagaggaaaacgaatccaagggagatatacaaccaccgtccaaaccaccatcaacaacgtacgtcttacgttgctacatggccactcgtgttatccaaccaggattcctaaggaactttcgttccaacaccgtcacaaaaccc

SEQ ID NO: 129882 - DNA, 142 bp, Glycine max
  Clone ID: PAT_MRT3847_88292C.1
ggagagagccgtaacaaacaacttgtcttacaatttttggtttcatgaacataaccttgaacagtttgacgagtaaaaattcttacctaaactctagcatgctttcaaaaaatagtagcctggtccccagtatataacggat

SEQ ID NO: 129883 - DNA, 1322 bp, Glycine max
  Clone ID: PAT_MRT3847_88293C.1
cggccgctcgagccggcccacgctttcacttttctttttctcatttcgtccgccctcaaccgccgtgatggccctcgtccgccaccgccgccaccccaacctccgtctccccctcccggagccctccgagcgccgcctccgcttccccctccccctccctcccaccaccaccgccaaaccagcctccggcgacgccattgccgccgccgacctcgagaagctcgccatccttggccacggaaacggcggcaccgtctacaaagtccgccacaaggccacctccgccacctacgcgctcaagatcatccactccgacaccgacgccaccaggcgccgccgcgccctctcggaaacctccatcctccgccgcgttaccgactgcccccacgttgtccgcttccacagctccttcgaaaagccctccggtgacgtggcgatcctcatggagtacatggacggcggcaccctcgagaccgccctcgccgccagcggcacgttctcggaagagcgactcgccaaggtggcgcgtgacgtcctcgaggggctcgcgtacctccacgcgcgcaacatcgctcaccgcgacataaagcccgcgaacatcctagtaaactccgaaggggatgttaagattgcagacttcggagtcagcaaactcatgtgccgctcgctcgaagcgtgtaactcttatgtcggcacgtgcgcgtacatgagtcccgaccggttcgacccggaagcgtatggcgggaactataacggttttgctgcggatatttggagtttgggtttgaccctatttgaactctatgtgggtcacttcccatttcttcaagcgggtcagagacccgactgggctacccttatgtgtgcaatttgcttcggcgacccgccgagcctccccgagaccgcgtcaccggagtttcgcgatttcgtggagtgctgcctcaagaaggagtccggggaaaggtggacgacggctcagctcttgacccacccgtttgtgtgcaatgacccggatacatgttaagtgggttgacccggttgtttttttgttatgacttggatcttggaatcacctttttgagttggtgtatattcccccggattcaaaccttttcagttttaggagaaccatcccctttgtaaattatgataaaagggaatttaaaattctgaattatttatctacggctctattgttttcaattcttaactgagtctaagagaatcattccctttgtacgtaaattatgcttgccaatgataaaaagaatttaaaattctgaattaaaaacaacgtcgctgaaattaaaaaaaaggggcgg

SEQ ID NO: 129884 - DNA, 658 bp, Glycine max
  Clone ID: PAT_MRT3847_88294C.1
cataaagcccgccaacatcctagtaaactccgaaggagaagttaagattgcagacttcggagttagcaaactcatgtgccgcacgcttgaagcgtgcaactcttatgtcggcacgtgcgcgtacatgagtcccgaccggttcgacccggaagcatatggcgggaactataacggttttgctgcggatatttggagtttgggtttaacccctcgagcggattcggctcgagattttccatttcttcaagcgggtcaaagacccgattgggctacccttatgtgtgccatttgcttcagcgacccaccgagcctccccgagaccgcatcgccggagtttcacgattttgtcgagtgctgcctcaagaaggagtccggggagaggtggacggcggctcagctcttgacccacccgtttgtgtgcaaagacccggaaacctgttaagtgggttgacccgttttttttttacttggatcgggtgtatatgacattagtttatcttggaataacctttttgagtaggtgtatattccccctgatgcaaaccttttcaattttaggagaatcattccctttgtaaattatgttcagcaatgataaaaaggaatttggaattatgaattatctatggctaaaataatttcagaaaaaagaagagag

SEQ ID NO: 129885 - DNA, 368 bp, Glycine max
  Clone ID: PAT_MRT3847_88295C.1
ctgccgccctttttttttttttttaaataagaatggctttgaacactatcacttactggattgtggggacatattgccccataaaaatcataatcctatatcacatcagatacaaagccaaagcccccaattctgtaacactctgttggaggaaaattggatggtgaaaatacagccacagaattctcacacacagtctcattttatatacaaaggaaattctttaaaaatgatgggagaatgaaactctataacgggcgtcagaatgtccggggaagtattacattgccggcacaacctgacaatagtggactcaaaaggacctttacactgactgagcatagttcctttaccaactaaaagtatca

SEQ ID NO: 129886 - DNA, 439 bp, Glycine max
  Clone ID: PAT_MRT3847_88296C.1
ggaaaaaccctttattttgttttttttaaattaatataaatgggattgaccaaccccctgatggggctaccaccctgaaggcctggcaaagttcccatgccctgttcgaaatcccaaggcccaaatgttccccaaaagaaaggataggtcccgtaaagggcctagggttccataaattttggggaaaaggccctggttccaaagtcctaacattgctgtccaaaattttcccgatgggcatgtcctaaaaaaaaggtaaccttggagggaaacccccatgcatcccttggctttcatatgccgccaaatggggccatccaattttattaagcaaagaaagcttaagggcataaaatttctttttggcaggctctgcgtcatcttgaattatgtcacacagtacctctaacgcagtcccaaacctttgagctggcctttt

SEQ ID NO: 129887 - DNA, 555 bp, Glycine max
  Clone ID: PAT_MRT3847_88297C.1
tgggaaaaaaggcagtcaaaagtcttggcaaaagcaaaattgagaatgatgagggaagaaggtgctgataagaaaaattcatactgggacaatctttggggcaaacagaaagactaccaaagttcagatgaggaagttgaagaaagagcaaaaagagctgcttcccccgcgcgaaggtggtgagaatactcaaggaggggtgttgataagcctccaacatttaaacttccagaggctagccttggcaaggacaagtgaacaaacagaaattcattcaccttctattgcatctagtcccatgcaattaattcatttatagcctcttaagttaaaccatgattgtatatgcagcaactcctattaaggtaaatttttagaaaatagattaatcatagtaatactttggaaaatataagaaagattgtttataattatggttgcagtgtgctcgatctatatcgacgcttaattcttgcggaaatttcaaagaacgaatactttgttgacaaaaaaaaaaaaaaaaaaaaaaaaaaaaaaagcggccgctctagagga

SEQ ID NO: 129888 - DNA, 1353 bp, Glycine max
  Clone ID: PAT_MRT3847_88298C.1
gcacccgcttcatgatcatgatgtgaaactgaaactgctccttcccttccttaacccctgtatgaatcttctcttcattttcttttgtagcaacaaaacggaattcttttgaataaagtaaatgttttaaagttaaacccagaagaatattcattcggctcgtgcaagttttcccctccgcggaacaaaatggggatgggaactagcacctttgttactagatggatcaactttctcaccatgcttttggccattgttgtgataatatttggagtgtggatgagcactcatcatgatggctgccgaaagtctctcactgtgcctgtaataggcctcggagcagttattttcttaatatctgtagttggctttttgggtgccctgaaaaacaactccatactattatggatttatctgatcacgttgttctttgtcttggtgggaatcctggtcttcacagtattggagttcatcgtgactaacaatggatcgggtcatagtgttactggcctgaggtataaggaataccaacttcaagattttagttctttgtttctcaaagagtcaaacaattctcgtaactgggaaaggtggatcgggtctcttggcgactcgcctgtcggctatggcctacccccttcaagataagactcttaaacaatataaatcagctaaattatcaccaattgaagctggctgctgccgacctccttcccaatgtggatatccggctgtaaatgcatcctactatgacttgacctttcatccagttagcccaaacaatgactgcaagcggtacaagaattctcgagccatcaaatgctatgattgtgactcttgcaaggctggtgtggcacaatacatgaaaaccgagtggagagttgttgcaatatttaatgttgttttatttgttgtcttggtaagacaaacaaacattcttgccctttttctaagattacaacaatcagagacccttgtttcaatttatgtttttcaatgaataattgagattttaaaccataaatatgataaaagaaattcttaaggtcattggtgccttaattctatctacctttgttttgtgcattgccagagtattatatactttgtgggatgctgtgcgagacgaaatgctgccaggagccattctaaagcttgaagggaacctcctctatctatgcacccatcatcatatcaaatgcttattgaattgttaaagaggatatcagtgtcctcaaattcgtgttatttttaggaccccttggtgatggattgtgtaatcgttgtgaacaccatgacttgatttgttttattatttgatctaatgtgaatagaaaatccaaaatcaaaaaa

SEQ ID NO: 129889 - DNA, 238 bp, Glycine max
  Clone ID: PAT_MRT3847_88299C.1
ctcgagccgctcgagccgggatcatattttcttaactagtgagttttagccctcttctggttgtggcatatcattcttgccaccttctctgtcataacttttgtcatgcatttcaccagtgtgttttagagagtttcttgtcagcatgtcctcctttctacagtccttggtcatgttctttattttgactgttattttcttctactgctgtgacatctctgaggtgtcctaacgattg

SEQ ID NO: 129890 - DNA, 339 bp, Glycine max
  Clone ID: PAT_MRT3847_8829C.1
ggagatcattctttgatcttagacagggagatttcacttgagaaaaattcctgaaaaaaagaaacattctaaccaactgaaaacaaaaacaccgagcagacaatggagggagctacctacattatcagacatgacggtcatcaccggacatagaaagccaaaaaaaagaaacagggcggtggaaaaaatcggaacaggattagtggcatcacggccgcagtccctaaagcacacaacaggggaatcttcagaagggctagttgaagtaaggctacacgcacctacaaccatggcatcacagccagaaccagcaccatcagctaaagagcagagcaagga

SEQ ID NO: 129891 - DNA, 388 bp, Glycine max
  Clone ID: PAT_MRT3847_882C.1
tttttctcgcaaatgtaatgaattcatcatctgcgctgaccccatgtttccattatactcgtgcgtctgtccttcactgtagacggaaagtgcgcaccgtgcccttttccatcaagaaatgacgataggaaacacccgtggttttctcgacccgggtagcagccgtgttctgccagattctcagccccatttccctgacgtcacacgcgcggactggcatgtgatcgtgcgcgtgcgcgatggtcgacggtggaagtcatcgcgcggggcgcgggcagcggctcgtagcgtatttcagcttagaaaccgtgaaccttgatggtcttgacatcaagacccaggccttcctttttgttggtcaaaaagtcctggatatccttgcgctgat

SEQ ID NO: 129892 - DNA, 277 bp, Glycine max
  Clone ID: PAT_MRT3847_88300C.1
attctcatgaatttgccaaatgctgtactttcaatgtggggatttttcgttggagatctcgtctttaaagtttctaatatgacttctccctacattaaatgtacagtctctttcttcatagcatttgcaaattcggctggatgatccatcacttttgatgcttttccccacaagctgtcgcagttcggagagattcacgaacattgtgttttgaaattctcacaatacgaatattttacagcttggttcattcaggtgccttctttatcaacttttg

SEQ ID NO: 129893 - DNA, 534 bp, Glycine max
  Clone ID: PAT_MRT3847_88301C.1
cttagaagtttggaacagtgaaatgtcgtaattgtttagtactaaaacctgtagattgataaggatgctttcttgctgttataggccatctttatttagaaattagaacttccatttgtcttttggttgctttcaatgatctcattattaatttaactcttgtatatctaagtccaatacttttaatgtcatgtttggccaagattgtagtaagttcttgaagagcattcactaagttgattgttgtgttgtagtgtgatttactagacttgcctgctgttacacaactggagaaggatgccaaatatgctctgttatatcagcttcttaagatttttcttacccagaggctggatgcatacttagactatcatgctgccaattccaccttgttgaaaagttatggtaagcactgtttatgaatgattatcatttatcaatagttacatatacagggttcttttctactttatgttactatctaaatgttttgatgttatgatgctcttttaggccttgtgcatgaagaatgca

SEQ ID NO: 129894 - DNA, 475 bp, Glycine max
  Clone ID: PAT_MRT3847_88302C.1
ggctcgagattagatcttctatatgggaaaaatgcctgggaagctctggaggcacaattaccttccaattatgtgactaatgggggccatggggttgaggaggagcgtgctgatgtggttgtactggcagatggcatagttgaacgaactgacttagagtgtgagactatggacttgtatgccactgctgatgatgcagtcaaagatgtgactagtggggggccttcagggagaactatagtggtgtctctagcttgtaggtctcactctgcgggggaaactccgaccatgtgaggcaggtgactggcgtgtacagctggaagagatgtattgtgtgacttactcgctggggatacattacgcagaggaggagaggagccattcattgatggaccgcacagcttttctagagaaagacatgaggatatctcctgtagatactctacatctaactctgtgccatgttaaagaagac

SEQ ID NO: 129895 - DNA, 436 bp, Glycine max
  unsure (1)..(436): unsure at all n locations
  Clone ID: PAT_MRT3847_88303C.1
cccacgcgttncgccacgcgtncgtacggcgagaagacgacagaagggtaagcatcaagagtaaaagtataattgatttgagtgataagtttgatagaagtttagaaagaaaaaaaagtttaaaagtgacatttttttgttgttgaatgtttctaggcgtcattttcgcccgataaaaaaagttccggttaacgattgaaattagctaccaatatcaatcactattttcattccctcgctttttctgaaatgtgcaattttttttattattaatttgacattcaatatttataaaatgctaatgtaacaatatatagtgttgatagaaaagtgcaaatgtggagttagaattggtgctggaatttgagtcattatatatttcaaataatgcaatctagatcttcctctttttcaaatatccaacagttaaggaatg

SEQ ID NO: 129896 - DNA, 237 bp, Glycine max
  unsure (1)..(237): unsure at all n locations
  Clone ID: PAT_MRT3847_88304C.1
tttatcactccntgcttttcggacggaatttgattgaaataaatatgcctccgcggggttacaacaacgagggcccaattaaaatcgccccccaggtggaacctctaaccagcctacggataacctttagggggctcaatgggtcctgacaccctattgtttatgtcaggggggtttatttagccaatcaaagctctaaggaaagacccaaaggctgggtctgacgcctatttaccg

SEQ ID NO: 129897 - DNA, 972 bp, Glycine max
  Clone ID: PAT_MRT3847_88305C.1
atcagctacaaaattggcacacaagttctatttaattattaaagccacagatgctaaatgggctagtgcaagagctgaggactcgctgcttttccagaatggtgaccctggatcctaacaagtcgaactgaaagatcgacgtatcttacaccataaccttcgaaagccaaaagaagaagggttgcgtcttacgtaaagaatcaaagctaacaagaaaagtcctaaccggagtaaccggagtagtgaaccccggagagttaacggcaatgctgggtccctccggcagcggcaagacgaccctcttgaccgccctggccggaagactcgccggaaaagtctccggcaccataacctacaacggccaaaccgaccccaccttcgtgaaacgcaaggtagggttcgttccccaagacgacgttcactaccctcacctcacagtgttagagactttaacctacgcagcgttattgagacttccgaagagtttgagcagagaagagaagaaggagcacgcggagatggtgattgcggagctagggctaacacggtgtcgtaacagccccgttggagggtgcatggctctgttccgtggcatttcgggtggggaacggaaacgggtcagtatcgggcaggagatgttggtcaacccgagtttgttgtttgttgatgagcccacctcgggcttggactccaccacggcccaacttattgtgtcggtgctccgcgggctcgccttggcgggtcgaaccgtcgtcaccaccatccaccagccctccagccggttgtataggatgtttgataaggtggtcgtgttgtcagatgggtacccaatttatagcgggcaggcgggtcgggtcatggactatctcggatccgtcggatatgtcccagctttcaacttcatgaacccagcagatttccttcttgaccttgctaatggggtagttgctgatgtcaaacatgatgatcaga

SEQ ID NO: 129898 - DNA, 349 bp, Glycine max
  Clone ID: PAT_MRT3847_88306C.1
tttatttgtccggccacacgttcggacacactgtgactatgataaagtggccccggaacaatgaggccatagaatgcctcccaaagaggccaacctatccaagcttagtagaagaatcctatgaggccaaccactccaaaatggtgcccaaaggatccgacgcaatatggaaaacaattgatgcccatagtgaaactgcggcacagaagggttcgacattaaatagcatggatcgtaagactgagggatgtgaacagggtaaggcaaggatcgaagaatgacctgtaaagacatgtttgctggcatgcaaatgggctagcagggcgggcagaattagaattcaaggaag

SEQ ID NO: 129899 - DNA, 453 bp, Glycine max
  unsure (1)..(453): unsure at all n locations
  Clone ID: PAT_MRT3847_88307C.1
cttggccaagtgaataaaaaatgtgtcaaatatgtcctatttcttattcccttttaccatttcaagttgctgagagatatgtgttttttttgttggagttttttantgaaagaaattggaaccaacgacttctccttccctccttctgccttcaaccactgaaccaaccttataacttagatatgtgctttttttggcttcacaaatttcctccttttggtttttgcagaaagacgaagactgtggaagaggtcttgaaaatatatatcaaacctggttggaagaaaggcacaaaaataacatttcctgggaaaggcaaccaagaagcagaagctactgctcctgacgatctaatctttgtggttgatgaaaaaccacatgctttgttcaagagagatggaaatgatttggttgtcacacagaaaatcctacttgtggaagctctagtgggaa

SEQ ID NO: 129900 - DNA, 209 bp, Glycine max
  Clone ID: PAT_MRT3847_88308C.1
aggagccaccgcttccaataaatgtagaccagatacatcgaacccgaatatgacacactaagggggatccaattaccgcagccaaagcctaccgaaaagatcagaagagcaaaagagaaacataaaaagagacacaaggaatgacagaacaccttactcaacctgcaccacgacccattacagcccaccaccagtaccagcagcacacc

SEQ ID NO: 129901 - DNA, 1900 bp, Glycine max
  Clone ID: PAT_MRT3847_88309C.1
agaagcttggatagggatatagtggagagtagacttacttttgcaggttttgtggtatttaattgtcccataagatcagattcagccactgttttatctgaattgaaagaatcctcacatgacttagtgatgattaccggtgaccaagctttgacagcttgccatgttgctagccaagttcatattatatcaaaaccaacattaatccttggcccgacacgaaatggtgagggatataattgggtgtcccctgatgagactgaaaacattcactacagtgagaaagaggtcgagtctttatcagaaactcatgatctctgtattgggggtgattgcattgagatgttgcaacagacatcagctcatcttcgggtcattccttatgttaaggtttttgctagagttgctcctgagcaaaaagaacttatcatgaccactttcaaaacggtgggacggttaactttgatgtgtggggatggaaccaatgatgttggagctttgaaacaggcccatgtaggaattgctcttctgaatgcattgcctccaactcaaagtggaaactcctcttcagattcatctaaggaagaaggttcaaaatctggcaagcaaaagaaatctaagcctgctagtgaaggcacttcaaaagccaaagttgcttcaaaatcagattccactagtcactcatctggtaaccgtcatcaggcagctgttgagatgcaacggcagaagcttaaaaagatgatggacgagcttaatgaggagggagatggtcgtgcacccattgtcaagcttggggatgcctcaatggcatctccattcactgctaagcatgcatctgttgctcccaccactgatataattcgtcaaggtaggagtaccctagtgacaaccctccagatgtttaaaattctgggtctcaattgtcttgctactgcatatgtgttgagtgttatgtatctagatggtgtcaagctaggtgacatacaagccacaataagtggtgtcttcactgctgcatttttcctctttatctcacatgcacgccctcttcccactctttctgctgaacgtcctcaccccaacatcttctgtgcttatgttttcctttccctcctgggacaattttctattcacctgcttttcctgatctcgtctgtgaaagaagctgaaaaacacatgccagatgaatgcattgagcctgatgcagattttcatcccaacctggtgaatactgtttcctatatggtgagcatgatgcttcaggtggccacatttgctgtgaactatatgggccatcccttcaaccagagtatttcggaaaacaggccgttccggtatgcacttgttgctgctgttgttttctttactgtgatcacatcagatctcttcagggacttgaatgactggttgaagttagtgccattgccagcgggattaagggataaactattgctttgggcgtttctaatgtttttggtttgctattcgtgggagagactgttgaggtgggccttccctggcaagatcccagcttggaagaagcgacaacggcttgctgtatctaatttagaaaagaaacaggtctaagtagttgaagagatgtgatgaagaaaaacactgacgatgggcattgcaatgatgacttgttcagagacaagacatggtgaattttgttataggttctttattaattatctttctagttcttttcccaatgatggatggggaatttatccgatatcattatttttgggagaaaggtatgaattttagaacacgtgcctccccagatatctgagatgattttgttagcacaggagtttttaattatttaaatgttacgattcattataatcaaaaaaaaaaaaaaaagggaggtcgctcccgggcagtagtaatg

SEQ ID NO: 129902 - DNA, 264 bp, Glycine max
  Clone ID: PAT_MRT3847_8830C.1
aaagaagatgagaagcttaggaaactcgccaaatgcgcaaactttccactctatggtcactgggtatgctgccgttggagggaattatcaaggtgacagaactgtggggtgagatgaaagctcttgcttcttctatctccatgaagtttgatcaggaacttcttgattccgtgctgtacacgtttgtgaggggcggattctttgttcgggccaatgaagttgtggcaatgatggaaaaaggaaaaatgtttgttgacaagtaca

SEQ ID NO: 129903 - DNA, 596 bp, Glycine max
  Clone ID: PAT_MRT3847_88310C.1
caaacataccgatcctcctaacaaaatgcttaactaaatacaaagtactgatgtactcaccctctacccgcgaaacaagaatctatccgattaaactgtcagcacaacaatgtgtgagcgacctaagccattaaacccactattttcagaagataataaaaaggatcgacccacacacttgcgagagaatatactgactaatgctcaaacgctttatacaacaactgtatgaaaggcatcactgggtgcggcaatgcccctaccagctgaattaccactaatacatggccagggggaccggagcttatacactttttgaactgaacggaacgcacaatcaccgtcagcccgtcttccactagcttgctctgcaccctcggcgactgccacatgggcgaacgccgcccgggctactcctagcttgccctgtacgaagtaactagggctaccgacctcagaatcgtgacggcgctgaacttcttctccagctgggtgaccaagcaaaccatgtacacggtggcaccgatcaccgtcaggcgatcattgttggccccttccagggacaccgtagttacacctcggacttctgctgcaat

SEQ ID NO: 129904 - DNA, 397 bp, Glycine max
  Clone ID: PAT_MRT3847_88311C.1
gaaaaaggggtatatcaccttcatgatttccctttttttaaaattttattcctcgtttttcataatttattatttatacaacatcccaagttttcttcctctataggctttaacaaaagaaaattaacacgttttacacttcacactaaacgacaaaagcaggcttacagaattttaaaaatttaaaaacacttcgaagtcccaaccaaatccatcaccacctttattatccattccctgtttccgttcccaacgcccaatatttacaacccttacacaacctcgccatgtggcagtcttcaaacaagggttttgctttgttaagtctgggggtcccacatttttggcccgaaaaacctcttttcattcgcaccatgcgcatttgaacttcccccgg

SEQ ID NO: 129905 - DNA, 588 bp, Glycine max
  Clone ID: PAT_MRT3847_88312C.1
aaggcaataatcaagtgatcatcataactgaactgcaattacaacttagaaagttagaagcttcaatgcgatccacccaacccaacacatttctccttgaaatacaacgccaaccaaactaaaattcagctttacagtgttaatatgaacaaagtcgacgttttcatactaagcctttattagacttggcacatttcactttcatattattcctaaccaactcccctcaccattaacattaatctaataacgccacatggaaccccttcttcaattcattcattcatacaaatacagttggacctagtaaggtcccatgaaaatcccataagtgaccaagcataacacagggaagaaagagtttagtaaatgtgtataattttcagaacttgctcaacatctttcgaactttgacacgagatactatcatttcaggaaaacttttcccaccatcaagtggataatatgatcccctttgcaaaactatttacagtgatgttaccatttaaaacaatcaacaaataataacagattaataaacacatgccggcaaaaagtggataatatgatgctatagaaactaatttt

SEQ ID NO: 129906 - DNA, 252 bp, Glycine max
  Clone ID: PAT_MRT3847_88313C.1
gtcttgaattcccgattcgaccgactcgtacacacaagaatacatactcctcatataacactatctaacaagacacaccatactatcaattatggattttttatataaacgcgctgatatcatccattgttctctattatcttcaactactaaacttctacactctttttattattattccaaaataactcaaaaaacttctttatgcacattttaatctgaatactatcttcaccttaacactctttccta

SEQ ID NO: 129907 - DNA, 275 bp, Glycine max
  unsure (1)..(275): unsure at all n locations
  Clone ID: PAT_MRT3847_88314C.1
tttatttgtacggnacaacgttgctcataacgttgagcaggcccaagagaaagatatgttggagggaaatatttccattgatatgaaatctcgaactagattggaaaaagattcctctacaaaagcacaatctgctagtggaaaaactttcaaaaatgacataaaaggtgctggttcacactcctcagaagaattaccagaaaaggaagatcaagaaaaaccccaaaaagattgaagccagattgagacaaagaataaaaccccaaaacaatgag

SEQ ID NO: 129908 - DNA, 303 bp, Glycine max
  Clone ID: PAT_MRT3847_88315C.1
tttttactcttttttttaccctctaactccttaccttttcctggggtctttccaaaattccctattccataccacttttaccttttcttaatcatattcatacctgcctcctctattaaatacttatcctcttacaattccacacaacatactaccacataaccatcaaaatacaaatccttaatcatcctaatttaataaccctaactcacataaatatcaatccaactcactatcctcttttcaatcctaaaacctcacattaccatcttcataaaattaatctacccaacttcacttaat

SEQ ID NO: 129909 - DNA, 278 bp, Glycine max
  Clone ID: PAT_MRT3847_88316C.1
ccacgcgtccgtacggctgctagaagacgacagaagggggcacatgtacatagagcaaccgcacctgctcatacaggagcactagcagtgaatgcatcgagtcaaaccgaatacggttcaagtatcatctaagccggtgattgagctttattactcgctcatgaatctgtacttttttatcatcatccatcatctggagtatattattattattttgcacttattttcttattaacttgatcaattttttttttttattatgatttatttttaatctt

SEQ ID NO: 129910 - DNA, 622 bp, Glycine max
  Clone ID: PAT_MRT3847_88317C.1
catcacttaccaccaaaataaaatatgaccaaaacattacttctatggatttttttattgatcagcatcctcatgttttcaactactgggagcacatttactacaaaaattgaagatcttgggacttccaggcaacaaaaggaaaccaaaaccatgtacggtgtgatcatggaatcaagcaaaccaaacactcaaagaagaacaaatctaggattgcatgttgttcaacacacaaaggtgtcacagaaagcaaagacaaatggtggagggaataacgtaaaggatcataaggggaagaatagtgcaagcacctattcaatcaacaaatcttcatccttgttcattcccgtgatgcttttgtttggttacttgttttgaattccaaggcttaaatttatttacagtgaaggcacaactagtgatgcttaataacatgatgccgctagtggtactttggatttgtatcatacatgcagacgttccttcttagtttgtgtattgtaacatgttctctgtgggcttaattcagtaagtctcctcttaaaggatttgtgggtatattttgaatgcttgatgatgaaattgtgtgtgaaactaatgaaaataaagttttaccgaacaa

SEQ ID NO: 129911 - DNA, 699 bp, Glycine max
  Clone ID: PAT_MRT3847_88318C.1
ctcgtatccgtcatgaaaggaggaaagtccaagaccgaatctaagagagccgatcccaagtaagtttcactcgcttttgatccaaccatgaattgtttgtttctcttacgattcgacgcttcttactgtgaaataatcaaaaaagctaaggttcacgaatttccagatctgagatctgagatctctgtttggtacggcgattatttcagatgtgtgcgttttactatattgtggttttttattctatttattttgctatgaatttcagacttgctgtgaataagaagggagccgccaccaaggctaggaaacccgccggcaaggggaaggcagcgaaagaccctaacaagccaaagaggcctccaagtgctttcttcgttttcatggaggagttcaggaaggtattcaacaaagaacatcctgaaaacaaagcagggtcagctgggggcaaagctgctggagcaaaatggaagaccatgtctgatgctgaaaaagcaccttatgtggcaaagtctgagaaaaggaaagtggagtacgagaagaacatgagagcctataacaagaaacaggcggaaggtcctactggaggggatgaagaaaaacctgagaagcctgtatctgaggtgaatgatgaagacgatgatgaagaaggcagtggcgaggaagaggatgaccaatagagaatggactgacaattgc

SEQ ID NO: 129912 - DNA, 478 bp, Glycine max
  Clone ID: PAT_MRT3847_88319C.1
acggctgcacgaagacgacagaaggggggtgaatttgaactgactgatatctgcggattagcttatttcctaggcatacaatgtgtgacatctaatagtgtcatattccttcaccaaaagagatatgcaattgatatattgaaaatgaccaacatgctcgattgcaattctgttactactccttgtgaaccaataataagactgattactggtgaagacactatcttggttgattcaacactctgtaggcaactcattgcctcattgagatcttggtgtaattctatgctaagaatcacctatggagtccgcttggttggtatattcatgactaaaccttgcacggatcatctacttgcagctaaaagacttcttagatctatgactggcacactataatgtggaattgtgtttcttgcagctaagaaaattctgaaatagaaattgttggctacacagatgcatattggagtggaga

SEQ ID NO: 129913 - DNA, 145 bp, Glycine max
  unsure (1)..(145): unsure at all n locations
  Clone ID: PAT_MRT3847_8831C.1
ttcgttaggttgggaattgggttggagttattacaaaatatttataaatgtgactgtaataaactccncttggacactgactttggggtnannnancaaaatctaatgtggaaggtgcttttgtaaggaaagtaattgtatgatg

SEQ ID NO: 129914 - DNA, 986 bp, Glycine max
  Clone ID: PAT_MRT3847_88320C.1
ccacgcgtccgatacgcagcaatccgaacccgctctctactgcttctacgtcgttttgccgattccggcgtgattttatcaccttaagtgcgttttgagattccaaaatggaggagggaagttccgattgcatcgacaacgagagggatctcatccgcaacatctgcatcctagcgcacgtggaccacgggaagaccaccctcgccgaccacctcatcgccgccgcgggcggcggcgtcgtccacccgaagctcgccggccgcgtccgcttcatggactacctggacgaggagcagcgccgcgccatcacgatgaagagctcctccatcctcctccgctacgccggccgctacgcggtgaacctcatcgactcccccggccacatcgacttctgcagcgaggtctccaccgccgcccgactcagcgacggcgccctcctcctcgttgacgccgtcgaaggcgtccacatccagacccacgccgtcctccgccagtgctggatcgagcgcctcaccccctgcctcgtcctcaacaaactcgaccgcttaatcaccgagctcaaacttaccccctccgaggcctacacgcgcctcttacgaatcgttcacgaggtcaacggaatagtcagcgcttataaatccgaaaagtatctcaccgacgtggattccctcctcgccggcaccggcaccggcaccaccaccggcgagaccctcgaggactacgacgataacgaggatgtttttcagccgcagaaagggaatgttatattcgcatgcgctttagatggttggggatttgggattcgtgagtttgcggagatttatgcttctaagcttggggcgagtgtgaatgccttgctgagggcgttgtggggacagacgtattataaccctaagacgagagatgattgttgggaagaaaggggttggggggaataagaagcctatgtttgttcagtttgtgttggagcccttgtggcaggtgta

SEQ ID NO: 129915 - DNA, 481 bp, Glycine max
  Clone ID: PAT_MRT3847_88321C.1
gtttttttttttttttttttttttttttttttttttttttttttttttttttttttttttttttttttttttttttttttttttttatttttttaaaaaccccaacccggaaggcatttataattttccaaccccccaagggggaaccctccccccggggggggggggaaacccccccaaaggggcctttggacaaaaaaaaaaatcttcccccccccaaaaaaacaacccaaattattaaaaaacccgaccacaaaaacctttttcccctttaaaaatcccaagcgaacggcccaagggtttcccccccggggggggaggggacacccggggccaaccaaaaagccccaaccccgaaagaggggccaaccccaaagggggggggggccccccccccaaacccgggggggggggggggcaaacccacatgggggggaagaggggccccttcaaggccccggaaaaccctcccctcggggac

SEQ ID NO: 129916 - DNA, 577 bp, Glycine max
  Clone ID: PAT_MRT3847_88322C.1
gctatcaataataaaaatcaaagactattttttatttttttttttatttggcgaaagtttataacagttataattatactctataaatatagaactgatatgttgtaataaggatggcaacttgtaaacatcctcatatcttgtctctgcaacactcactaatcaatgctttctccttcagtttagtagaaaatatatgcaaaaataaagaaacctggaccctaatcatgctttctccttcagtcatcatcctcaggatcaatcaccattctcagctgccttctagatctggcattgtcaggaaatccactaacagccacttcatcttctgaatctgctaagtcatccatttgctgatgttctatttgggaggaattcatagaatcaacacgattatccctttccaaagcatctgttttgccttcattgaaagaatcatcgcccattattctctcctgaatttggatattttcaagctcaacttgctttgaattaagagaggatcttctctggtgcggaattgcagagctgggcatttcatcatcagaatcatctcttgacaatgcattcacattga

SEQ ID NO: 129917 - DNA, 464 bp, Glycine max
  Clone ID: PAT_MRT3847_88323C.1
caaaaccaaaaaaagcgcggggggctttttttgggaaaaggaaaacaccggggtaccatcattgaggatccatacccccgttttttttttgggggtccccctaccagggggggggcctttggccccctgggggaagcccctcaggggggaagagcccttttttagggggttttggattaagcgagacgccgggggggccggaaaagtttaaaagggggaccgggggcccgtaatggggggggggaggacccccctcttaaaacagcggggggggcctttggggaaaagcttttggccccccgtctaatgggtgggggtcttggggagggggccttggggggggggacccccttttgaatatgaccccgggggccccatgtgggcctttcgccccccccgggggggggcccattcacgggtccaacccagcccccattcccccaaacctttgtaagcaacttttg

SEQ ID NO: 129918 - DNA, 183 bp, Glycine max
  Clone ID: PAT_MRT3847_88324C.1
atttgaaccagatctacacgccgatcgtggttttggacaggtcttttatatatctggagcttagccgcttagatctacagtaccgaggctcaacaaaaaatcgatgacaagaacgcatatccgactgtagatccagccgatttcgcttgttctatcgctacagacccctgtattggatcatta

SEQ ID NO: 129919 - DNA, 130 bp, Glycine max
  Clone ID: PAT_MRT3847_88325C.1
cggaactcccctcattccctgccgtcataatgaggggatttattggaatgtagtctatcctgttctaccctctggcgtgtattggatgctagcggggccgtccacaaactgggtgtatcactcctatggt

SEQ ID NO: 129920 - DNA, 258 bp, Glycine max
  Clone ID: PAT_MRT3847_88326C.1
acaaattctcattctcataggaacatagattaaactacacaccatgacaacaaaatacttatgcaaatattaagtctgggaaggagtcaaaaaccaatccttattctaagcaaaattcgattcacaagaagacattgcctaccctaccgacttcgtagtgcacattaacgtgggataggacgtgactggcccgaggtcgcagatggtattgcctcctgatatgcttgatatagaaaaggggctttaaggggatcgtct

SEQ ID NO: 129921 - DNA, 263 bp, Glycine max
  Clone ID: PAT_MRT3847_88327C.1
gaaagatgctacaataaggagatatgttaatcaaatcatgttaggttggttgacaaaagtctttggtgatatcagtcagccaagcagcctaatgatttaggttttgctaggtctgcataatgtgcaatccaatagtgcattttatgcctttcttttctaacatttttgaactcttaacatctctcagcttagtttgcttcaaacattttaattaaggaaaaaaaaattaatgccagcaatgataattagacatgttaaaattt

SEQ ID NO: 129922 - DNA, 485 bp, Glycine max
  Clone ID: PAT_MRT3847_88328C.1
cctcgtgccctcgtgccgaattcggcacgaggcttgaactgtgagatatattggattaagatttcaaagaattataaaagatttttttataataaaatctggtgatattttattagattcttaaataatataaataagttttattttattttaatattcttagataatctttaaaatttacaaaaaaaaattatactaaaataatttttttttattgtaattcaatacacctaaaaatctttgtgctcgttcttatgaggtgaaatatggcttatgtggaatcgggggagccttgaaggaaagggagtgtcatgtttaatctattccattgaattattcctacggtagtcccacatatattgtagccgttgattaaaaacctattcgggtttcctgctgtagaacccgtctttaatttttttttatgttagcgctccgcatcaactttcggagggataaagcggtgtaagagagatgcaaaaaga

SEQ ID NO: 129923 - DNA, 365 bp, Glycine max
  Clone ID: PAT_MRT3847_88329C.1
ctaaattttttttttttttttcgcgcgctgctttatttgtttttatgttgtggttgcaggccttatgggtgcttcgtaaaaaagaggcgtctaacccactaggggggggcggcgccaggccacccagacccgggggagaacttcccccggggatttgcccacaccgggcgggggtataaccaccgggggggtgtttttttttttattttggcccaggggggccttggggtttttagagagcgggccaaagaggactgggttttcacctcccgcgcacgggtggggggggccccttccaaggggccccccccggggggggggaactggcgcctttggggggggggggggggtaaaacccaaaaatg

SEQ ID NO: 129924 - DNA, 373 bp, Glycine max
  Clone ID: PAT_MRT3847_8832C.1
ggagatgccattattgacactgcttcaataattccttgttaattttaatccacttccgtttaaccctggggccgtttttctttggtgggggggtgggaaggttttaccaccataattaatcctttgcttgtttaccattgaacaattaacccttaaaaaaaattttccacctattttcccaccttttcaatcaaatggaaaaaataccattaaggtccataatttccttaaccttccatcttttttccacaatccattttaagccttacttaaaaataacccttttttaatccttaattggaattaatttttaaatcccatttttaaatcataacctaaaactaaaccatccaagaaccattttaatcattat

SEQ ID NO: 129925 - DNA, 718 bp, Glycine max
  unsure (1)..(718): unsure at all n locations
  Clone ID: PAT_MRT3847_88330C.1
ccacgcgtccgtttccattgattttttagtaccagtacttgttgattttagaatttaaaaaagttcaagtcttttgggaagattttaaggacacgttcgttctttgattgggaatagtagcttcttctatcttgcttacgttacgtccgtgtacaagtgaaaatcttattctctctggtgctctgtaagttccaaaggcaagaaagaatgaagaaagaaaatcaagaaacaacctcagtgttgaatttcaatggtttctttctgcaccagccgccatggtttcttgattgggtttttattgaattatgcattacaattttggaaaggtggaagatacttcggaaggaaaggttaatctgcacaatgcttcgtggacttgtgtttttggtggtgcggtagacctcatcagaaagatgttgcattcttatggcatttctggaatttacgaccaagcaattgctctgccctgccctgccctggacgacactgtctttaactatataattgacatcatatagttatccaaaattaaacacatttttaaaatttaacattattctttaattaaaattgaaaatctgctacattaccatgtaaatcttaattgaaaataccanagagtattgcaagtagttcactgttgctcgcagactagtagtggcacatgacacgcgggaggtttggaacgttctactcctacatcactggtggataagct

SEQ ID NO: 129926 - DNA, 473 bp, Glycine max
  Clone ID: PAT_MRT3847_88331C.1
tcctctatagagcgcgccccctttttttttttttttttttttttttttttttttttttttttttttttttttttttttttttttttttttttttttttttttttttttttcaaacaaaagggaattaacgtttttttaacccccaaaataattatattctgggggaaaaaattccatttgaaaaaaaaccttcctttccaaaggggaaaacccctttcatcccccctggtaaacacccgggcaaataaatgttaaccccaaaaaatggtaactaaaaaaaatttttccggttctttgctcaaaaaaaaaaaaaacccttttaagggaaaactacacccccccgggagtatccaaacttgatttgtttaagaaaaaaaaacccccctttaattttaaatgccccttaaattccaaaaggccccccccccattggggccaaaatttggttaaaatatacccccccaaccctttcg

SEQ ID NO: 129927 - DNA, 150 bp, Glycine max
  Clone ID: PAT_MRT3847_88332C.1
atgcagtatactcatcttcttttaaactttcaactcaaaaatacttttcattaactttacttcaaacaaaaacaatccctcttcctttcataaccatttacaagactcctattaaaattgaaaatcattaatatcctcattacttacata

SEQ ID NO: 129928 - DNA, 260 bp, Glycine max
  Clone ID: PAT_MRT3847_88333C.1
gtgaatgctacagatgttaaaacatcacagaatgcgccagtttcccgaacgagttgatggtttagtatgcatttctcaagcaacgtgtcttcagttctaaaccagcatatggaataccagagtgaatggtatcaaataaattctaacgatcttttagctactactgagtttgaactaatgactccctccgtactataccagtactctaaccactgaattacgtaggtcatttatcaacacccccccccataagaaaaccc

SEQ ID NO: 129929 - DNA, 282 bp, Glycine max
  Clone ID: PAT_MRT3847_88334C.1
agaggaattaattttcttttaagaattatacttgtgcacactgaaaagtaatctaattacatgtacataagcaaccgtcgcacatgagacccctactatttctggcacttacgcatacgtacggacgaaaattgccagtggcacggataaaattaaaatgctacaatcgctgcgacttaatcagcgtcaagaatgcgcctatcgacgggtgcaaatactccagatctacaatcgccagttataggtacttatacctgacctctatacagaccagacaatttc

SEQ ID NO: 129930 - DNA, 705 bp, Glycine max
  Clone ID: PAT_MRT3847_88335C.1
ccgccgcgtcgtccccgcgcggcaaccaccttcttcctcgtacaacacacacacaaaaaaaaaaaaaacaaaaaaagcatagctggttggccatatagaagaagaaaataccacaacatgaaaactgctttattaaagcaggtaacttcttcgtactcaacaaaaataataacagcttgtttgtttctcttcttgaactgccatgttggctacggccaaaatgactttgaaaaattttcgtccttgtcgtcgccgccaccgcctctaatgacggagctcgacgcctgcaacggtgtgtttctcacgtacgcgctccttgggcgcgtgaaggagtacccgcacgtgaagaacacgtcgaagcaggcgtgggcgttcaaggcggaggcgtccctgacaaacgtcggggacgaggaggtgcaggggtggaagatgtacgtggggttccagcaccgcgagattctggtctccgccgacggcgccgtgctcaccgacgccggggactttccggcggaggtggggaacgggaccacgatgatggggtccaccgcgacggacttgaagaccgccatagataccgccggggatattgaccagatgagtgtgaggattcagatgaaggggacgcagtttgggttgggtgctggggctacgccaatgcctaaaactattcatcttgagaatgatggcttcaaatgccctgcaccc

SEQ ID NO: 129931 - DNA, 355 bp, Glycine max
  unsure (1)..(355): unsure at all n locations
  Clone ID: PAT_MRT3847_88336C.1
atactgttccctgttgactgaacctatcccatctctctcatcctttgttgtcatctctgagaaaaggggtttctcttcttgtttcatttatttttcttttttccaccactttctaaggtgaccttggaactggtttaatttgaagacacttattccatttgacattataggccgtgttcgaatacttcatcctccagtcatgacttgtttcccattctcatttggtaagaaagcacgatttgtggcaaaacatgatccagatattgatgaagtccagccaataaaattggggagggtggatttggttcagnnnatangggattggtntatgacgggaaagtaggtggtataaaag

SEQ ID NO: 129932 - DNA, 524 bp, Glycine max
  Clone ID: PAT_MRT3847_88337C.1
gcacccctgcgggccccgccccgaaatccccgggacccccacgcgcccgattttcgttcgaggaaccacgctgcacaggatctattgccttaaaaccggacacagggcaatcgtagagcaggtgtagaattgcagcgcactcatcctactaaagggaggacgaaaacggagggcacagatggtatctctgtgaattcaccacaaacattgggctgtgctatgaatagcacttttagggggcgtgccagcactgatctaacactatatgacctcaagactgagaaaaacggaatcctgcttgcacaaaagcgacgactatgttataagatccaaacccgggagctgatgcatggaactcgcactctcctatgtggactcggattcagtgggaagacatgtgtatcactggacggactgtcactctcttgtactgactgaaccgtacagccgatcagagtggtctcatttgagaaacacttgcgcggacctacagaggtttgaatccacaatattctctggagaca

SEQ ID NO: 129933 - DNA, 519 bp, Glycine max
  Clone ID: PAT_MRT3847_88338C.1
gtcagtaggagatgcaaggagaaaacataacccaatatcaaatataattgggataagaagatacataataataaatcagcttcagccatttcagtacatgatgaaaaggaatcattgtacttacggcccagtaatgacgatttgcaatgtcccaaccaccttgataacgtcgaaatccgtgtagaatgtcaggcctattggtcctgtttgctgctagcacaagagtacccttagttctaggacgtgctgcttgagctacttgtgtgacgccattcttccatggacccaaattctgaccccctaggataaactttatggaatgtttggctgacccagttggagataaagctgaaatcaagtgaacagagagtactagggggaagatgaacaagagcaaatgaaacacggtagagggaacacacttcattgctataacaaagttcactgtttcattttggattcttagctcaattagccaaactcttaaaacattaatctaacatagagattgagccaaca

SEQ ID NO: 129934 - DNA, 276 bp, Glycine max
  Clone ID: PAT_MRT3847_88339C.1
attttgctctagctttgcaagcctcttcttcatctaaaaatagtaggacttgctttaatgtcaaagctttgaacttgaattctttgaattataatgccaatattgctagtgaaactgaaattaggagtgtaaatgcaaagggtaaggaaatttcagctttggatagggatgattggaatggtaagtttttcccttgtgatgatgagctttctagcattgattatagtaaggagttaactgtgagtgcttctcctttggtggatgatgagaaggcaa

SEQ ID NO: 129935 - DNA, 2505 bp, Glycine max
  Clone ID: PAT_MRT3847_8833C.1
ggcttttcaaaccctctttctccgttccacccaagctcttgccaacgctctgcgtcttgtgaatctactcaaatgtcaggttgaagctcttgaaccgcttcttcagcactaacttgtgcaccttcctgttctcgttcaaacctttagggctaagagaactcagaatcttgctccacgtttcaacctggtagttcttgtgcttcgcttttccttcaagatttgtgtccagaagctccattaccctcattaactgcgccgcaaaaggtgacacattttctttttgtttgttgttgttgtttggtttggaatcttcgtagtgtggcctgcttgttgaatttgcacgctccattttggagtgttctttgaacacctcttctaaagtgtctttgtattcacacgctagccttaaaccttttttcctccgtatattagttactcatctagttatcttctttgtgcttgagttgcattcacttttcctattgccgataataaatcacattcatacctcggctataatttacgtgatctttcagagggagagagaaaaaaatgcagaagcatggttttgcatcaaagcgtaacgtgttgccgtatcaaacgccgaggctaagggaccactacgttctggggaagaagctgggacaggggcaattcggtacgacgtacctgtgcacccacaaggttacagggaagctctacgcgtgcaaatcgatcccgaagaggaagcttctatgccaggaggattacgatgacgtgtggagggagattcagatcatgcaccatttgtcggagcatcccaacgttgtccagatacaaggcacgtacgaggattccgtgttcgtgcaccttgtcatggagctctgtgcagggggagagctttcgacaggatcattcagaagggtcattacagcgagaaagaggctgccaagttgataaagaccattgttggggtggtggaggcgtgccactctcttgggctcatgcatagggatctcaagcctgagaatttcttgtttgatacccctggtgaagatgcacagatgaaggccaccgattttggcctctctgtcttccacaagccaggacaagcctttcatgatgtagtgggaagtccctactatgttgcccctgaggtgttgtgcaagcaatatggaccagaagtggatgtatggagtgctggtgttatcctatacatcttactgagcggggttccacctttctgggctgaaaccgaagcaggaattttcagacagattttaaatggagatcttgattttgtttctgaaccgtggccaagtatctcagaaaatgctaaagaattggtaaaacagatgttggatagggaccctaagaaaagaatttctgctcatgaagttttatgtaacccttgggttgttgatgacattgcacctgacaaacctctggactctgctgttttgacacgcctaaagcatttctcagcaatgaataaacttaagaagatggcattacgggtcatagcagagaggctttcagaggaagaaataggtggattgaaagagttgtttaaaatgattgacacagacaatagtgggacaataacttttgaggaactgaaggaggggttgaaaagtgtgggctctaatctcatggaatctgaaattaaatcacttatggaagcggctgatatagacaacaatggatcaatagactatggtgaatttcttgctgctacactgcacttgaataagatggaaagagaggagaatttggttgctgcttttgcctattttgataaagatggtagtggttacatcaccattgacgagcttcaacaggcttgtaaggacttcagcctaggtgatgtgcatctggatgagatgatcaaagagattgatcaagataatgatgggaggattgattatgcggagtttgcagcaatgatgaaaaaaggtgatccaaatatgggtagaagcagaaccatgaaaggcaatttgaacttcaatattgcagatgcatttggaatgaaagacaaagactcttcttgatatgctacctgaatttttgtgtacagttaggaggcatgattgtagaagaaaaatcatagtcaaaatttcttagccgcgtggttataatctgtttttgtattggaactttgtttaatttcttaagcaatggtttaatcccttaacttgtttagaaaccttcagtgaagttgaatatattcagcatatatatgatataaattggcttgaatgaattaattcaaaaaagaaaaaatgtgatgctattttttatctttttttttcggacgcgtgggcggacgcgtgggtggcaactgagcatatccactctgcattcttaaaaagattacaaaatgatagttggaaatttttataagcttgatatttcgtggtcttgcaacttctgtttttgctccattttcttttattaagctattctgggcctagtgttttgttccctaatcaactgtattctattggctaaaatcggacgcgtggg

SEQ ID NO: 129936 - DNA, 481 bp, Glycine max
  Clone ID: PAT_MRT3847_88340C.1
gtaaatcaggactcaatgatatttctaatattggacttcatagcccttttaactggtctttatcttctcctgtttggctcatctgcttctggtgtgacttctgctcagctctattttggtggagctactctcctcctcatcttcccattatgtattcctggcattgtatatgctcgggcttggtttcggcgtaccatccattccagctttcagatgggaagctctagcttcattcttgttcatgatgatgatcttgagatgcatagagagctccatagctgtcacaatagttttgttagaaatggagatacttacagtctgcttagtgataacggatacatgtttgggagccagagggaaaaagatagtgatatgtgttgtgagacgatgattgtccaagatcacttaacagtgctaggagaagagcacccagtagcagtagttgtccgcagattggatttttggctatactatgctacat

SEQ ID NO: 129937 - DNA, 1418 bp, Glycine max
  Clone ID: PAT_MRT3847_88341C.1
gagttcccccaggagcgaaatctccatgtacatcctctacctattcaaactgaaccctaatcctaataatatcctctcttcttttctccatagatacttgaatttgtattgtcactggaacaaacaacactgaagtgcaagcaagcaatgtcgacggaagcagcagcaagagaatcattggattcagattccatgaagcccaactacatcctttcccaaaccctaagcgggcacaagcgcgccatctcggccgtgaaattctcctcaaacgggcggctcctggcctcctccgccgccgacaagaccctccgaacgtacggcttcacgaactcggactcggactccgacagcctgacgctgtccccgatgcaggagtacgaggggcacgagcagggcgtgtccgacctggccttctcgtcggactcccggttcctggtctccgcctccgacgacaagaccctccgtctctgggacgtgcccactgggtccctcatcaagaccctccacggccacaccaactacgtcttctgcgtcaacttcaacccccagtccaacatcatcgtctccggttccttcgacgagaccgttagggtttgggacgtcaagtccggcaagtgcctcaaggttctccccgcacactccgaccccgtcaccgccgttgacttcaaccgcgacgggtccctcatcgtctccagcagctacgacggcctgtgccgaatctgggacgcctccaccggccactgtatgaagactctcatcgacgacgagaaccctcctgtttcctttgtcaagttttcccctaacgccaagttcattctcgttggcaccttggacaacactctgaggctttggaactactcaaccgggaagtttctgaagacttacaccggtcatgttaattcaaaatactgcatttcatccactttttctataacaaatgggaagtatattgttggtggttcagaagacaattgtatatacttgtgggatttgcagtcaaggaaaatagtgcagaaattagaagggcattctgatgctgttgtttctgtgtcatgtcaccctacagagaacatgattgcttctggtgcacttggcaatgacaacactgtgaagatctggactcagcagaaagactgattcaatttggaacaaatggttattcaaagttgagttgggggtaagtgacttgtaatgaaaccttaaactcattttgtagttgagaattttggttgagaaactctgtaccatttcccagtcgagaacactatttaagtctctgatcggttccactttgagagattggaacatggatatgggaacacaatattatgaacatttcgtttttcaacccttgtatcttggctagcaggtttcgccatttaattaattaatgtcattagtcatttgctagtaaacac

SEQ ID NO: 129938 - DNA, 1452 bp, Glycine max
  Clone ID: PAT_MRT3847_88342C.1
gtacgacctgcaggcgacgaggtccggttccttcccgggtacgacccaggaagccggcacgtgtgcacaattcctcaaatatttaagaattcccatacaaataagcacagtgtgtctccgctatttcttcaacatttgttctctccgcgttcgatgctatctaatgacttcttcttcactcttggtgtcactgcaagtagcgcttgcgattttcgcttgcatattccatgcagcaacagtgacatgtaaaccccaccaccgcgaccgtaccttaaaaatattctcttctacgagcaactcctcaaagagtagccaccattggatcggacccattggtcaccgtaaaatcaccgttgacattaacggcggtggccactaccggtccgtccaagacgccgtcaatgccgtccccgacaacaaccgaaggaatgtccttattcaaatcaacgccggatgctacaaagaaaaggtagttgtgcccgtgacgaagccgtacataacttttgagggcgcgggtaaagaagtgacggtgatagaatggcatgatcgagcaagtgaccctggtcctagcggacagcaattgcgtacttacagaaccgcttctgttactgtttttgccagctatttttctgccaggaacatcagcttcaagaacacagcacctgcaccaatgccggggatgcagggatggcaagcggtggcgtttcgcatatccggcgacaaagcatacttctccggatgcggtttctacggtgcacaagacaccctttgcgacgatgcaggcagacattacttcaaggaatgctacattgaaggatccatcgatttcatttttggcaatggcaggtccatgtacaaggattgcgagctgcactcaatagcaacgaggtttggttccatagcggcccacgataggaaggaggcagaggagaagacagggttcgcattcgtaggatgcaaggtgacaggaacgggtccgttatatgtggggcgagcaatgggacagtattccagaattgtttactcttacacatatttcgatgatattgttgcacatggcggttgggatgattgggaccatgccgacaataagaacaagactgtgttcttcggagtgtacaagtgctggggaccaggagcagaggctgtacgtggggtctcatgggcccgagacttaaatttcgaagctgcccatccatttatcaggaagagtttcgtcaatgggagacactggatcgcgccatcagatgcttaattagtcataacgtctttgttaactcactcacccttcacaagtgaacaaaacaatttacattcaaattacaaaaccgttgttgcatccttcattcattcatttgtttttgtcaatataggaatttttttatccatccttgtagaatggccggaacactttccaagattttttttattgaatattcttctatcacctcc

SEQ ID NO: 129939 - DNA, 1026 bp, Glycine max
  unsure (1)..(1026): unsure at all n locations
  Clone ID: PAT_MRT3847_88343C.1
cagcaaaatacttttaaagtctaaaccaaacacacattgagattaaaaaccacaactgcctgtgccgtgtggtgttgtgtttttttttttgtttcatctccatctttttcttcaaatttccgtgaagagacactcacaaagatgaggttatcgttgaggcatgctttggtgtttgtgttaatcggggcgttgtggaacttgcaaagggcagagggtatccgatttgtgatagacagagacgagtgtttctcccatgatgtgaagtacgagggtgacactgttcatgtctctttcgttgttattaaggctgattctccctggcattacggcgacgaaggtgtcgatctcgtggtaaagggaccttctggcgagcaaattcaagaatttcgggacaagaccagtgagaagtttgactttgtggctcacaaatccggggtccataaattctgcttcaccaacaagtctccttatcatgaaactgtcgattttgatgtacatgttggtcacttctcttactttgagcaacatgcaaaagatgagcatttcacccctttgctggagcagattgggaagttggaggaagctctatacaacattcagtttgaacagcattggttagaggctcagactgaccgccaagcaatagtgaacgatgcaatgagcagaagagcagtacacaaggcaatttttgaatcagcagcactgattggggctagtgcgctgcaagtctaccttctgcagcgattgtttgaacgaaagttgggtacctcgagagtttagagctacgaaaggttctgcgaatctgtaacagtacaaatgagaatgttattttaaacttttttccgttgtcatcacatggatatttatataactagttgttcaatcctactcataatacatgtggaaatatgttatttaatgttgattatagttgatttctttttccggtaaactaaaatatgacaggccatttctacgctccccccataaaaaaaaaaaaagnaagggcggccgccgnctggtgag

SEQ ID NO: 129940 - DNA, 806 bp, Glycine max
  Clone ID: PAT_MRT3847_88344C.1
accacccgtccgcttttgtcgtcctgatttttctcagcacacacttgaaagcgagaacacccttgtttgttttagctcctaagttggaagcttgtagattgattttcactgccaagcaaaagaaagtgagggaatctaacccttaattgaacacaatgagttcattttacatgtctctgaacccttcaatttctcaatcgtgttacaaacccaagcaatttttcaatttggagagagagagtactttggtgggaagaagtcctgttattcagattagatgccggagggttgtgagtgcgtgtcttaacgtggatgttgatgcacctgatagtgggaagacagcattggagaaaaccaaggatgtgatcgagatggaagggaagttcttggtggggacatatgcaagaacaccggtggtgcttgagaggggggaaggttgcaaattgtatgatgttgaagggagagaatatttagatttgagtgctgggattgctgtcaatgcactagggcacggggatgcagattggttgaaagctgttgttgagcaagccggtactcttactcataccagcaacatattccacacaatacctcaggtagaacttgcgaagcgtcttgtggcttcttcttttgctgatcgtgtgttctttgcaaattctggaaccgaagcgaatgaagcagctattaaatttgcagaaaatatcagagagacacaactactgacggcaaagagccggcacagagttcatagcttttagtaactgcttccatgggagaacccctggtgcacttgctttgacaagtaa

SEQ ID NO: 129941 - DNA, 506 bp, Glycine max
  unsure (1)..(506): unsure at all n locations
  Clone ID: PAT_MRT3847_88345C.1
cgcccnaattcaatttaagtggacactttaactcaaaattatagaggaagacagtccaatatgaaaaatatagtaaaatcatctcaaacttggcatcttctctttgcacctaagacattgagaattctaagaatgttacacgcaagtcccatcacaacttctagcacttggatcagcacaaccttcaggaacagaaatatttacttgccaagtttgctttgcctccaattcaagattggaagaaagttcccctgttaatagcatcctcgttagcatttccaagtgcagcctcgttcaagtacttgtcagccaattggactctcttgacattctcttgttcttggacaagcatgttaccatacgtcaagagcttcacggtatctctgcctgatcagttttgctggctctcctgcatttccactttccaactctccagcactcatcatgatggggttgattcccatcttggcaaagacaagctcacattggaaagattttccttgtcc

SEQ ID NO: 129942 - DNA, 495 bp, Glycine max
  Clone ID: PAT_MRT3847_88346C.1
gcacgagccctattgtaatttctgccagcctcaaaaaagacttgctctgcctctgccactctctgagtaggactacactgccatggctgcctcagtctccactgttggagctgtcaacggagctccactgagcttgaacagctctggagctggagcttcagttcccagttcagccttctttggcaccagcttgaagaaggttattgcctcaagggtccctaacgtcaagatttcttctggaagtttcaaaatcgttgccgcggaaaaagagattgatgagaaacaacagacagacaagaacttcatgaccctgcccaacatcaaggttcctctcattcttggtatctggggaggcaaaggtcaaggaaaatccttccaatgcgagcttgtctttgccaagatgggaatcaaccctatcatgatgagtgctggagagttggaaagtggaaatgcaggagagccagcaaaactgatcagacagagataccgtgaagc

SEQ ID NO: 129943 - DNA, 342 bp, Glycine max
  Clone ID: PAT_MRT3847_88347C.1
acgcgtccacccacgcgtacggacatcgcgagcattcttttcccgtaaaaccgtttcttcatacgcggcgtctcaacactcaaactcttatgtttcaccccttcaccttcaacgcttaaaacctcttgctctcgaatcactcacgtatattcatctcatgaaaaccatggaggtccgtttaatttcaatggaatcaacggccttgcttcttgtactcttacagcttatacacttacttttggttcatttacccttactgctgctacccaaagactttccccattgtcaaccgatccccatatctttgagcctgcctttattgtcaacacaattggtcaaacc

SEQ ID NO: 129944 - DNA, 1635 bp, Glycine max
  unsure (1)..(1635): unsure at all n locations
  Clone ID: PAT_MRT3847_88348C.1
cccacgcgttcggaagtactgaatatttattttactgtgacattgcagttgaacctgaatggttctggagctggagcttcagctcccagttcagccttctttgggaccagcttgaagaaggttattgcctcaagggtccccaacagcaaggtttccggtggaagcttcaagattgttgctgtagaagagaagaaagagattgaagagacccagcagaccgacaaggacagatggaagggtcttgcctatgatatctcagacgaccaacaagacatcacaagaggaaagggtttggttgactcccttttccaagctccacaggatgctggaactcactatgcagtcatgagctcctacgagtacctcagcactggacttcgccagtacttggacaacaaaatggatggattctacattgctccagcttttatggacaagcttgttgttcacatctccaagaacttcatgaccctgcccaacatcaaggttcctctcattcttggtatctggggaggcaagggacaaggaaaatctttccaatgtgagcttgtctttgccaagatgggaatcaaccccatcatgatgagtgctggagagttggaaagtggaaatgcaggagagccagcaaaactgatcaggcagagataccgtgaagctgcagacatgatcaagaagggaaagatgtgcgctctcttcatcaacgatcttgatgcaggagctggtcgtcttggtggaaccacacaatacactgtgaacaaccagatggtgaatgccactctcatgaacattgctgataaccccaccaatgtgcagcttccaggtatgtacaacaaggaagagaacccccgtgttcccatcattgtcaccggtaacgatttctcaacactctatgcacctctcatccgtgatgggcgtatggagaagttctactgggcaccaacaagggaagaccgcattggtgtttgcaccggaattttccgcactgatggtattcctgaacaggacattgtcaagcttgttgacaccttccctggccaatccattgatttctttggtgcactgagggccagagtatatgatgatgaagtgaggaagtggatttctggtgttggtgttgacggcattgggaaaaagcttgtgaactcaaaagatggacctccaacctttgagcagcccaagatgactctggagaagctcttgacgtatggtaacatgcttgtccaagaacaagagaatgtcaagagagtccaattggctgacaagtacttgaacgaggctgcacttggaaatgctaacgaggatgctattaacaggggaactttcttccaatcttgaattggaggcaaagcaaacttggcaagtaaatatttctgttcctgaaggttgtgctgatccaagtgctagaagttgtgatgggacttgcgtgtaacattcttagaattctcaatgtcttaggtgcaaagagaagatgccaagtttgagatgattttactatatttttcatattggactgtcttcctctataattttgagttaaagtgtccacttaaattgaaaaaaaaaaaaaaaaaaaaaaaaaaaaaaaaaaaaaaaaaaaaaaaaaaaaaaaaaaaaaaaaggggggnnncgatataa

SEQ ID NO: 129945 - DNA, 1788 bp, Glycine max
  Clone ID: PAT_MRT3847_88349C.1
taagtcccttccctattgtaatttctgccagcctcaaaaaagacttgctctgcctctgccactctctgagtaggactacactgccatggctgcctcagtctccactgttggagctgtcaacggagctccactgagcttgaacagctctggagctggagcttcagttcccagttcagccttctttggcaccagcttgaagaaggttattgcctcaagggtccctaacgtcaagatttcttctggaagtttcaaaatcgttgccgcggaaaaagagattgatgagaaacaacagacagacaaggacagatggaaaggtcttgcctatgatgtttcagacgaccagcaagacatcacaagagggaagggtttggttgattccctcttccaagctccacaggatactggaactcactatgcaatcatgagctcttatgagtaccttagcactggacttaaacagtacaacttggataacaacatggacggtttttacattgctcctgcttttatggacaagcttgttgttcacatcagcaagaacttcatgaccctgcccaacatcaaggttcctctcattcttggtatctggggaggcaaaggtcaaggaaaatccttccaatgcgagcttgtctttgccaagatgggaatcaaccctatcatgatgagtgctggagagttggaaagtggaaatgcaggagagccagcaaaactgatcagacagagataccgtgaagccgcagacatgatcaagaagggaaagatgtgtgctctcttcatcaacgatcttgatgcaggagctggtcgtcttggtggaactacacaatacactgtcaacaaccagatggtgaatgccaccctcatgaacattgctgataaccccaccaatgtgcagcttcctggtatgtacaacaaggaagagaacccccgtgtgcccatcatcgtcaccggtaacgatttctcaacactgtatgctcctctcatccgtgatgggcgtatggagaagttctactgggcacctacaagggacgatcgtgttggcgtctgcaatggaattttccgcactgacaatgttcctaaggatgacattgtcaagcttgttgacaccttccccggccaatctattgatttctttggtgcactcagggctagagtatatgatgatgaggtgaggaagtggatttctgttgttggtgttgacttcattgggaagaagcttgtgaactccaaggaaggacctccaacctttgaccaaccgaagatgactttgagcaagctcttggagtatggtaacatgcttgtccaagaacaagagaatgtgaagagagtacaactggcagacaagtacttgaaagaggctgctcttggtgatgctaatcaagattccatcaacagaggaactttctatggcaaagcagctcagcaagtaaacattcccgttcctgaaggttgtactgatccaaatgcctcaaacttcgacccaactgcaagaagtgatgatggaacctgcttatacacaccctgagaacctaagcattctccacttggagagaagctaagagttgagataataaaataagttatcttgttcatattggattgttatcctgtataattttgagttacattgtctacattttacaatgtgtgcaatgttaaagtcttgatgtctttctctttccgcttgcgcatttgttgcttttctacatttaattttttccttgacacgatattaatgttatgctacctgttcgttttagttaataaagtttattttttgtaatttgtaac

SEQ ID NO: 129946 - DNA, 867 bp, Glycine max
  Clone ID: PAT_MRT3847_8834C.1
atgatacattgatactaacatttcaccacactctcaccatcttcatcactacttattttttcccttcaacctaatgaatcacctccctcatttttattttgactgaaagttctgaagaagaaagatatgagtctttttcagtcttctcttttacttccttctacatggttgaagcatagccattccccatttcatcaatagctataaaaatataaccccttgtttcagcaacctgcaaacttgtcaaagttgaagtcttcaagcacttagtttcttaaagttaactcctttaaggttcattcacaatcttctcagagagaaagagagtgatccattcgttctgatcatttggggtgtcagaaacattcacattcacatctgggtctgaagttgtgaattcatcaaccttcatctggtgccactaacaaagtgacccttcctttggatatccaaaagggtatctgaggatctcacaaatttgttgaatttctctggttctatgttggatatagtgtgcaagaagtacagaatcatggtgagtggaaatggtttgttttaccccgttgtggggtttgcatcgatcgtgttgttcatttacatgtcttttggggatgtgaggtttggttttgaggaagaagctgaattggcttttgtggagagaaatgggactcagtttatggtgggatggaaaaagctttctacattaatgggtggaactcttattggttaatggggttcaatctgtggatgagttccaggccaaagggtagttgaatgctaagggctggggcaaagatggggctaactgtgtgtggaacttgggccttgaatgatggggactacagagcccttgagaggggccctggg

SEQ ID NO: 129947 - DNA, 2566 bp, Glycine max
  Clone ID: PAT_MRT3847_88350C.1
gatgaaaattctgagaagataataaaagaagaaatctgcaggatgagaggaacacaatgctggtgacgtggttcctacagaggccccactccatacccttcgtcctcgccttcttcctcttcctcgcgtggatctcactcgccctccagcgcgcgtcctactcctacgcgccgcctcactcctcccacacagacatcagggccaacctcgtcaggttcgacgcttccgaggtcgcaaaggacaagcgcggttggatcttcgaccccatcgctctcgccctcgcttccggcatctcaggtaccattgttgttggatgcaattggaatacggcgtcgtttttgtgttgagaatggaacttttgaaagtgcaggtggagcagtgacgtgtgcgtcgcttcacgtgggagaaattagggctgggaacaagagagcgaatcacagacaccaccattgtaatgagactttcctcatttggggcgctgctaccaagtataggttggagaacaacgatgaagataatggttatgctgaagtgatgcttggcagagatgagattgttgtagctgcaagtccagttcacaaagcgcatgctttagtgaacattgattctattcggagtatcttctttataggatgtcaagacaatgttataagctataatgcctctagtactgactttaatgtttggaaagatctttgaacatttttcatattttttttgtttctaaatctgaaatgtatctgagcctcaaaaaatacttgctctacctctgccactttctgagtacaatacaacactgccatggctgcctcagtctccactattggagctgtcaacagagctccactgagcttgaacagctctgaagctggagattcggttcccagttcagccttctttggcacaagcttgaagaaggttactgcctcaagggtccctaacgtcaagatttcttctggaagtttcaaaatcgttgcggcggagaaagagattgatgagcaacaacagacaaacaaggacagatggaaaggtcttgcctatgatatttcagatgaccagcaagacatcacaagaggaaagggtatggttgattccctcttccaagctccacaggagactggaactcactatgcagtcatgagctcttttgagtaccttagcactggacttaaacagtataacttggataacaacatggacggtttttacattgctcctgcttttatggacaagcttgttgttcacatcaccaagaacttcatgaccctgcctaacatcaaggttcctctcattcttggtatttggggaggcaaaggtcaaggaaaatccttccaatgcgagctcgtctttgccaagatgggaatcaaccccatcatgatgagtgctggagagttggaaagtggaaatgcaggagagccagcaaagttgataaggcaaaggtaccgtgaagctgctgatataatcagcaaggggaagatgtgctgtctcttcataaacgatcttgatgcaggagctggtcgtcttggtggaaccactcaatacactgtgaacaaccagatggtgaatgccaccctcatgaacattgctgataaccccacaaatgttcagcttcctggcatgtacaacaagcaagagaacccccgtgtgccaatcatcgtcaccggtaacgatttctcaacactctatgctcctctcatccgtgatgggcgtatggagaagttctactgggcacctacaagggatgaccgagttggtgtctgcaagggaattttccgcactgacaatgttcctgaggatgaaattgtcaagcttgttgacaccttccctggccaatctattgatttctttggtgcactcagggctagagtatatgacgatgaagtgaggaagtggatttctggtgttggtgttgacttgattgggaagaagcttgtgaactccaaggaaggacctccaacctttgaccaaccgaagatgactttgagcaagctcttggagtatggtaacatgcttgtccaagaacaagagaatgtgaagagagtacaactggcagacaagtacttgaacgaggctgctcttggtgatgctaatcaggatgccatcaaaagaggaactttctatggcaaagcagcccagcaagtaaaaattcccgttcctgaaggttgtactgatccaaatgcctcaaacttcgacccaactgcaagaagtgatgatggaacctgcttatacacaccctgagaacctaagcattctccacttgaagagaagctatgacttgatataatcaaataatttatcttgttcatattggattgttatcctttataattttgagttacattgtctcactactaaaaaaaacacttgagataatcaattaatatttcctggtgttcattgtggttctgctgaactttgtggcttcaaataatagaaggtgttttactacaaaggttttaattaatgatgtcattattcatttaatattttcattgctgaattttgaaaagggtttataaaatctcataggagacattggttcaattacatattgccattcatgaac

SEQ ID NO: 129948 - DNA, 510 bp, Glycine max
  Clone ID: PAT_MRT3847_88351C.1
ggcggccgctgcggtttgtgtagggtccttttaatagacggaaagagggcacctttagaaaaaaatgccacccatttatcttagccttaaaattttaaaacctctggaatgtttacaggcacccctctgagaagatcacctactgtgttttttttaatgatttctcaagcctcaaacagtgtttttactacacgacgaacccgtgagttttcatactcccaactgggattattaccctgccttaaaaacattccggccccggtcgtggctaaaacttgcccggaaccctatgaaatatgcgctattacatgacgtggagccaagatcagagaccctgatcaaggacataatgctcaaacctttcgaataccaggttgcattggcctggatggcttggataatcataaatgccaatgaacaaggccgtaccgggcttctttgacgtcaccccactgggaccctttttccctgggagacggcaccatgctcatcctggaggaccttgatttt

SEQ ID NO: 129949 - DNA, 1836 bp, Glycine max
  Clone ID: PAT_MRT3847_88352C.1
ggctcgaggcaattgaagttgaagtcttgcccttctctcttcaactccaaacacaagacatcatcatccatggctgcctccgtctccactgtcggagctgtcaacagagctcttttgaacctgaatgggtctggacctggggtttcagctcccagttcatccttctttgggagcagcttgaagaaggttattggctcaagggtccccaacacaaagatttcctctggaagcttcaagattgttgctgtagaagagaagaaagagattgaagagacccagcagaccgacaaggacagatggaagggtcttgcctatgatatctcagacgaccaacaggacatcacaagaggaaagggtttggttgactcccttttccaagctccacaggatgctggaactcactatgctgtcatgagctcctacgagtaccttagcactggacttcgccagtacttggacaacaacatggatggattttacattgctccagcttttatggacaaacttgttgttcacattaccaagaacttcatgaccctgcccaacatcaaggttcctctcattcttggtatctggggaggcaagggacaaggaaaatctttccaatgtgagcttgtctttgccaagatgggaatcaaccccatcatgatgagtgctggagagttggaaagtggaaatgcaggagagccagcaaaactgatcaggcagagataccgtgaagccgcagacttgatcaagaagggaaagatgtgtgctctcttcatcaacgatcttgatgcaggagctggtcgtcttggtggaaccacccaatacactgtcaacaaccagatggtgaatgccaccctcatgaacattgctgataaccccaccaatgtgcagcttcctggtatgtataacaaggaagagaatccccgtgtgcccatcatcgtcaccggtaacgatttctccacactctatgcgcctctcatccgtgatgggcgtatggagaagttctactgggcaccaacaagggatgaccgcattggtgtctgcactggaatttttcgcaccgattcaattcctgaacaggacgttgtcaagattgttgacaccttccctggccaatccattgatttctttggtgcactgagggccagagtatatgatgacgaagtgaggaagtggatttctggtgttggtgttgacggcattgggaagaagcttgtgaactcaaaagatggacctccaacctttgagcagcccaagatgactctggagaagctcttgacgtatggtaacatgcttgtccaagaacaagagaatgtcaagagagtccaattggctgacaagtacttgaacgaggctgcacttggaaatgctaacgaggatgctattaacaggggaactttcttccaatcttgaattggaggcaaagcaaacttggcaagtaaatatttctgttcctgaaggttgtgctgatccaagtgctagaagttgtgatgggacttgcgtgtaacattcttagaattctcaatgtcttaggtgcaaagagaagatgccaagtttgagatgattttactatatttttcatattggactgtcttcctctataattttgagttaaagtgtccacttaaattgaatttggtgccttttccttttgtcctaaaaaaaaaaaaaaaaaaaaaaaaaaataaaaaacaaaaaaaaaaacaaaaaaaataaaaaacatattaaaaagaaaaaagaaaaaaaaaatgtacaaaaaaaaaagggggggccccccactttgggcctcttcaccccgggatttttttccggaccgtgccctgggggcgtcccacttttccattttgg

SEQ ID NO: 129950 - DNA, 3014 bp, Glycine max
  Clone ID: PAT_MRT3847_88353C.1
gttaaaagccttagtcttccctacaactccaaacacaaagacatcatcatccatggctgcctccgtctccactgtcggagctgtcaacagagctcttttgaacctgaatggttctggagctggagcttcagctcccagttcagccttctttgggaccagcttgaagaaggttattgcctcaagggtccccaacagcaaggtttccggtggaagcttcaagattgttgctgtagaagagaagaaagagattgaagagacccagcagaccgacaaggacagatggaagggtcttgcctatgatatctcagacgaccaacaagacatcacaagaggaaagggtttggttgactcccttttccaagctccacaggatgctggaactcactatgcagtcatgagctcctacgagtacctcagcactggacttcgccagtacttggacaacaaaatggatggattctacattgctccagcttttatggacaagcttgttgttcacatctccaagaacttcatgaccctgcccaacatcaaggttcctctcattcttggtatctggggaggcaagggacaaggaaaatctttccaatgtgagcttgtctttgccaagatgggaatcaaccccatcatgatgagtgctggagagttggaaagtggaaatgcaggagagccagcaaaactgatcaggcagagataccgtgaagctgcagacatgatcaagaagggaaagatgtgcgctctcttcatcaacgatcttgatgcaggagctggtcgtcttggtggaaccacacaatacactgtgaacaaccagatggtgaatgccactctcatgaacattgctgataaccccaccaatgtgcagcttccaggtatgtacaacaaggaagagaacccccgtgttcccatcattgtcaccggtaacgatttctcaacactctatgcacctctcatccgtgatgggcgtatggagaagttctactgggcaccaacaagggaagaccgcattggtgtttgcaccggaattttccgcactgatggtattcctgaacaggacattgtcaagcttgttgacagtgttgggaagaagcttgtgaactcaaaagatggacctccaacctttgagcagcccaagatgactctggagaagctcttgctgtatggtaacatgcttgtccaagaacaagagaatgtcaagagagtccaattggctgacaagtacttgaacgaggctgctcttggaaatgctaacgaggatgctattcagaggggaactttcttccagtcttgaattggaggcaaagcaaacttggcaagtaaatatttctgttcgtgaaggttgttgtactaatccaagtgctagaagttgtgatggaacttgcgtgtaacattcttagcattctcaatgtcttaggtgcaaagagaagatgctaagtttgagatgatcttactatatttttcatattggaccgtcttcctctataattttgagttacagtgtccacttaaaattatagaggaagacggtccaatatgaaaaatatagtaagatcatctcaaacttagcatcttctctttgcacctaagacattgagaatgctaagaatgttacacgcaagttccatcacaacttctagcacttggattagtacaacaaccttcacgaacagaaatatttacttgccaagtttgctttgcctccaattcaagactggaagaaagttcccctctgaatagcatcctcgttagcatttccaagagcagcctcgttcaagtacttgtcagccaattggactctcttgacattctcttgttcttggacaagcatgttaccatacagcaagagcttctccagagtcatcttgggctgctcaaaggttggaggtccatcttttgagttcacaagcttcttcccaacactgtcaacaccaacaccagaaatccacttcctcacttcatcatcatatactctggccctcagtgcaccaaagaaatcaatggattggccagggaaggtgtcaacaagcttgacaatgtcctgttcaggaataccatcagtgcggaaaattccggtgcaaacaccaatgcggtcttcccttgttggtgcccagtagaacttctccatacgcccatcacggatgagaggtgcatagagtgttgagaaatcgttaccggtgacaatgatgggaacacgggggttctcttccttgttgtacatacctggaagctgcacattggtggggttatcagcaatgttcatgagagtggcattcaccatctggttgttcacagtgtattgtgtggttccaccaagacgaccagctcctgcatcaagatcgttgatgaagagagcgcacatctttcccttcttgatcatgtctgcagcttcacggtatctctgcctgatcagttttgctggctctcctgcatttccactttccaactctccagcactcatcatgatggggctgtaatggaatcaatcacaataccacaaaggggtttaaaagttaaagagtgttggattttttagttgtgaggttcaataataattcaaatctttgatgcagcatgagtatagcaagacatcagttctttccattgtgtgtgtttgagtgagcttttgtaaaacttattttgaggtgaaatgatttatatttagacgattttattttaaaattagcaagttaacagcccaaatttactataaaattttggacccaacacacaaaagttacttttaaagccgtttaaaagtcaaaatcaattcctcagcatgacatcgaacaagtgattttatatataaaattacattagctgagctgatatttcaatgtggttttggatgaactaacgtgaatctaaaaatgcacataatggaggggctagttcagctagaaactcacttgattcccatcttggcaaagacaagctcacattggaaagattttccttgtcccttgcctccccagataccaagaatgagaggaaccttgatgttgggcagggtcatgaag

SEQ ID NO: 129951 - DNA, 424 bp, Glycine max
  Clone ID: PAT_MRT3847_88354C.1
aaaaaaaaatatttcccttttacaaaaaaaatgggtcacccccctgcctgggggggggaaaaattttaaccttttcccccccaaacccgggtagaggccccccctttttttttttttttttccccatttcccaggttttgccggggccccccccaactttttggggggggtccaaacatttttttggggtttttcccctaaaaacatttgggcccctttttacccgacaaattgctttctcccactttttttccaaagggttcttctctcggaatttctctaccgggttctcttcccccatgcccccagggtccaacgggttccccgggttttttatccccccactttcacccttttccccaaaaattgggtggggctttggggttttctggttgaggcgaatttttggggggcccaccccccc

SEQ ID NO: 129952 - DNA, 536 bp, Glycine max
  Clone ID: PAT_MRT3847_88355C.1
attaatttcttgtattatctgttcttctaatgtcgtaactatgttgagacttgttcgatgtatattgatattgcatagaaataagtttgcactgtctcatgttgagcttgtactgttttgatgttgcatctttatttatcgttctctattatggaaaatgtattttgtgtgatgagattgtgcagaaagagtgcaaaccaaatggtagtttggtggtatggctcctcctgtctacaatggtagtgcaagatcaagttaaattcttgataactttagcagacactgcctgcactattgccaggttgactggctttcactttccaaaacagcttattgagtgcccatgataggtttcagactgtattgtggatcagttccttgttatactggtctacccagtctttcaagttcagcagcttgtcagggtcagtttttccattgctgcaaatgctggtatccttcattgtgatagtggttcaattttctatgaagtaggaatatgtgaaaatcaatgaagattaaatgatttttaaaga

SEQ ID NO: 129953 - DNA, 600 bp, Glycine max
  Clone ID: PAT_MRT3847_88356C.1
ccgggtcgacccagcgttcacggacgcgtgggcggacgcgtgggttcgaattcttcaatttactccagagcctatttacctttcatttgtgtttcatacacatttccaatacatccaatcccaccaccataatgctggatgagctcggaaataagtccttccaatgtcaattctggtgttttcttctgtaagaatggtaaacagtgtgctacccttcatactgatgaaatccatctgaatctttgaaggcttgaccttgcagacctgttgcacttaaaaagctgagagttgtatttgctccacaattagttgcttctacatccactttcccagcatctgtttgttgctattaatttgctccacactcttcttgatctccaaaagctgagagttgtatttgctggtcacccactttaagaactccactgaattctccaaggctttcatttgtgaccccacttgttgatccccaggttggcccaattgatagaaacctctggagttggtgaaagaaaaggtgattcttatttatttagtgaagctgaacagaacaaggagaaagaattcacctttaaagggtttttcccactttacaatttt

SEQ ID NO: 129954 - DNA, 304 bp, Glycine max
  Clone ID: PAT_MRT3847_88357C.1
atttgactctgcgagatcgctgcatctggcttcactacctgcatctatggctaaaccccaccatctctttctccttcttcttcttctctgcgccactcttgagttttcttcatcttcaccctccgatcacctctacaatgttggagaacttgtcccattgtttgtcaacaaagtgggacccttcaacaaccccagtgagacatatgagtactatgatttgcctttctgcaccccagacccaattgtcagaaagaaagagtcccttggggaagttctcaatggtgaccgtttgagcaatgctttg

SEQ ID NO: 129955 - DNA, 160 bp, Glycine max
  Clone ID: PAT_MRT3847_88358C.1
accacccatcctgaaccaattgggatgtttggaccagacaagtacagcgtttgggaaatgacaatctgcctcgcgaatgtacgaattatagtggctagaccactagactggatttcactgatacgggagcctccatttagtcgctttgtggtagtcgttg

SEQ ID NO: 129956 - DNA, 292 bp, Glycine max
  Clone ID: PAT_MRT3847_88359C.1
catttattctgataaataatacagggggagcacttgtcctcctgtggcttgagggagggggtctactaagcataccttatggacccaatgttactctctaaaagcacgtcacaccacaaacattaagaagctcagaagtccaaccgccacctgagagccatctagtaccagtggagaggctaagagtacaaccgatcgaaatgcttgcaaactatgaggcaaggctccaaataattggctacacgctctcctatcacaaatcctgtaactggttatgccacctttccacata

SEQ ID NO: 129957 - DNA, 515 bp, Glycine max
  unsure (1)..(515): unsure at all n locations
  Clone ID: PAT_MRT3847_8835C.1
ggctcgaggcgactcaagaaggagaatggggtgctgaactctgagctcacaagcatgaaaaggaagtgcaaggaactgcttgatttggttgccacatattcatcacatgcaaaggaggagaaaaaggatgaaaggccaatgttgtttggagtgagattagaggttcaaggagggagggagatgaagaggaatagggctgagatgagtgaaagcacaagcattatgttgtctcagtcatgcaaatagctagatatgatatcatacatagaggctttttaaaagtattgggtatagatactgaatagtaataatcaaatatttgattaattagcttgctaggcttgcaaagagtattttcgcccagtgttgtagttattttggctatcatattgggtgcatcaagaaactaattaagacacccctcaagcatatgctgtagttatgtaatgtggtttagaacgataaccacgtattaaaaataattaaaataggctcaagtaccgntaattagttag

SEQ ID NO: 129958 - DNA, 244 bp, Glycine max
  Clone ID: PAT_MRT3847_88360C.1
aaaacaatcaacgggaattggtttttatattaccttaaaccaaaaattgtttattttatgttctaaaaattaaatttcccccgaagatggcaaataagaactttgccaattcttaacaaaaataaaaggaaatggtcttcctttcttaagggaaaaaaattcgggcgagaggaacattctggcatggggtaattcatgggtctgcataaaagtatttgcattacatttaaactcgagccaaatt

SEQ ID NO: 129959 - DNA, 233 bp, Glycine max
  Clone ID: PAT_MRT3847_88361C.1
attctttttccccattttttctctttctttttttttttcttttccttttttcattttcattttccccttcgcttcgtctcaacagttgacgccattctcgtctcccttttccaaaaaaccgtttcctcgggaattgagagagttccaattctgcccctcggggcttcgcgaatttaccaatccgagagtcatggctccagccaccagaaattcctggcccttggatcagcgca

SEQ ID NO: 129960 - DNA, 321 bp, Glycine max
  Clone ID: PAT_MRT3847_88362C.1
ccgccgatgtctaccgaatctgcgtgtttttatatcaaagggaatccaataaatgacagaagcttattactctcatgtgtgcaattgtgctgagggaacatccatcatcaaccatagtgactgattctcgtactatcatggcactcactatattcattttttatttatttggacaccatttcctataccgtgtctcatacataaatgtcattgacatggtattgcatcttaacaatgacagtatttaaacgcatcttatgattgaaacatcttgtcatggtgctctcaaagaaaatcattttcttgatgactgtgcttaca

SEQ ID NO: 129961 - DNA, 558 bp, Glycine max
  Clone ID: PAT_MRT3847_88363C.1
cagtggcttatagtacctcaagtatgaagacgcgaaacagaatcatggcaaccaatctcagcgaaaaataatatgcagtattaaatttgaatatcaactctgaaaatcttaaactaaatccgattttgaagtgtcacagcataagaagatcctttcatgtcatccatagaggctcttgaatttgctcccagaagttacttatacatgcacagccaaaggggtccaccgcatctctctcatctctgcttgatatgcctcctctcaactctcaattgaagtacaggttgggacttattcagttttaatatcatgatttatgtgatgcccttgtcttttagtttagtgattatctgaactaacaaagtaacaatacaactagtaaacgtactgtaccataaggatatgtgagggcatgtgccagacacatattgcttttgtgtctgggccttttgttttgtaattgttttgttttcctttgggcaggaccagcacaactaccacctgcaggtgacagtgacattttcatgcataaaaaaaaaacacacccttttctgttct

SEQ ID NO: 129962 - DNA, 404 bp, Glycine max
  Clone ID: PAT_MRT3847_88364C.1
aatataaaatttttaggcttttaatacaagggacagggaagtccaagcgcgaggcttgggctacatagattggcatacaacgcaaccttcaatcacaatataggtgccatgaaaaatatactatactttgcgactcatttcataaaataatggcttgaacctatcacattcagcaaaagatgcggctaatgacggacatagcaggggatatgctattgttcccccatgggacaagaaacagtgacacggggggagcatgcatcgtacaataagagggtgacaaaaacctggccgagacaaagcatatatttcctaaagccgcggagctgaccattgatgctgcaacacattaaaaccattttctatatgctgactcgaagactattaggctgaaaactatgaaa

SEQ ID NO: 129963 - DNA, 251 bp, Glycine max
  Clone ID: PAT_MRT3847_88365C.1
acgcatctttactccaatgcaagaaatgactggataccatcgaactcgagaactcaagagcaaaagtttgaagatgctacttcattgacgaacaaacataagatgagctcgcatggacaaggaactagcactgagcatctcgaatgatggcagaatatgggtttacaccagggtttggatttcatttgactaataaactatcggatcttcactacatgagtgtgaaaacttcttgtcaaaaggactttact

SEQ ID NO: 129964 - DNA, 221 bp, Glycine max
  Clone ID: PAT_MRT3847_88366C.1
ctttctctctcccttaggggaagggtctcattgttcttctcccaggttatttacaaaagcaaaatggtgaagatttgctgcattggtgctggatatgtggggggtcctactatggcagtcattgcacttaagtgcccatccattgaagttgctgttgatgatctctctaaattccgtattgccacctggaacagtgaccatctttctatctatgaacctgg

SEQ ID NO: 129965 - DNA, 312 bp, Glycine max
  Clone ID: PAT_MRT3847_88367C.1
ggattttatactatatattatctaagagtccccttatatttcaacatctttaaaggtcaactattccattaacactcttaaatttttccaaatttatatatgttatttttgagaatatttaaaatagggggttttttttataaaagatgtgtaatttggtatgtttacagaaatgaggccacttgtgctttatataacagaaggagaggtttttttcttatggaacgaaaaatttcagtgtgcaaagtgggacctgctatactgatatgaccacccattgtaacaagaccaagtgcccgcaaagcttgttta

SEQ ID NO: 129966 - DNA, 147 bp, Glycine max
  unsure (1)..(147): unsure at all n locations
  Clone ID: PAT_MRT3847_88368C.1
caacggggtgcgcatcttcatccctaacgcgtgcatatcagagtcacacacacacaccaatcattcgactgagacttccangtcttataaggggttggggacaacccataccccaagtcacgtttctgccgtcgtcttccttatccc

SEQ ID NO: 129967 - DNA, 200 bp, Glycine max
  unsure (1)..(200): unsure at all n locations
  Clone ID: PAT_MRT3847_88369C.1
cgngaggagagtgatcgtgangnaagatggggnaaggtcggcaagaattgatgataaatcatgctgtgcgtcgtgatgatccaagggcgannagggcggcacacctcaacgcgacagtctcgggcctggngtaattttcagagcatgcatcggatgtatgtgggtaatgtgaagttctaataccatgaacctgatcccca

SEQ ID NO: 129968 - DNA, 1751 bp, Glycine max
  Clone ID: PAT_MRT3847_8836C.1
ccacgcgtcgtacggctgcgagaagacgacagaagggggtggaagtgaaggaggagagggagaagaagaagaagtaggaggaagaaaaggggaaaacgcaaagaaaaaaagaggaagatagatcaagatctcccttgcgtttgtctcagttgaagaaattcaagagcagaacgagactaactcaacggtatcagacgtttcagggtttcagcacttccatttttttttttccggatttgagttggaagaagatcaaagaggttcctagttgcttggattgttcctctgggtggtggagactttgtgtatttttaaaatattgacaattcaaaatgccaaaggagagaagggataggtctttgtcacatgaaagtagcagagcctcaccttaccctagcagctctagtcgtgttggaagatcttctcttaaagagtcagaggaaaatgttaaagaatgggaagaagctaggtgtccagtgtgcatggaacaccctcacaatgcagttctcctcatatgttcatcccacgagaagggatgccgcccttacatgtgcaacactagttatcgccactcaaactgtcttgatcagttctgcaagtcttttgcagacacctcatcaaccattcctcaagtagaaggtcaaatttcagatacttttgaaagtagaattgatgtgcccgaagacagaaatgaggggactgtccaaagtagaattgatgtgccagaagacagaagtgagggtttggttacaatgcaagccttatcctgcgaaaatgatgcaaaatcaaagttagtatgccctttatgtagagggaaaataaaagagtggaaagtagtggaggcggctcgtcatttcatgaatgaaaaatcaaggaattgttcttgtgagacttgcaacttcagtggcacatacccagatcttaggaaccatgcaagacttgaacatcctctcgagcgcccatctgcggtagacccagagcgtcagcgtagctggaggaggttggagcgccagagggatcttggcgacctccttagcacacttcaaacttcatttggggttgatgaccccatagatgatggtggtctgctggctgtgtttttcctcattcttcagcctgcttccatgtccaggggtaccacactccaaatgcgaataaggagacccactactacactttggggggaaaattatgatggacaatctggatctgatgatgcaaacgaatcttcagatggaggctctgataatagacctcgccgtgtccggaggcggcggacacctccaccatgatttacagatgggtcaaatttgaattatcattgatcctggctcgctcttcttcctcacccttctacctttccagatgctcatgaatacatgtcggttattaattgtttatcagtatatttgatatttctgccatctttcccaaggattctgaacgattgagcttgaaataaaatttactgttgtgcctattttttttattagcccatcttgcttcttgctaaatgtaagataaaaaaagaagagaaaaacatagtatgtgaggtgtgatgtagttcctggcttataagtttgagctggaagaagattgtgttgttcaatgatttcattgctagagtatctgaagagaatttgagtttgtgttttttccttctgaattataaaagagatttatgttgggtatacgagggagatattaagtgccaaatttttgtacttactgtgctttgtaacttgtacgaa

SEQ ID NO: 129969 - DNA, 313 bp, Glycine max
  Clone ID: PAT_MRT3847_88370C.1
ttgcaagttcttcatcggtgttgccattcaggttctacacgtagaagagtgggaaacgaatttaatatcacccctcttcttggtgatacaaggtacatctatagttacaaggagagtaatgctgcaagcaataactcatcttggtgatacaaggtacattttctagttacaaggagagtaatgctgtacgtaaaaaagaaagttgtacggtgtgtaaattatatgcgtgaaagaataattaaatgtcagtactacagaaaatgaattagaaataatgttgtagaattttcattggagaaatcatggatatgat

SEQ ID NO: 129970 - DNA, 429 bp, Glycine max
  Clone ID: PAT_MRT3847_88371C.1
aatgacaaatacaaatacattcagccactccaaaaacatgacttaagcgtacacaactgattaaagaatctggtttcttcaatttaacatttatttaaaaccagagacagtacttaagcatccatatggtccttagatagagagactgaggggaattcctctgaaaagcaatccctactcactagaaggatagagcaaagggtaacgcattttaactggcccatgacggcttatcaagggcatatgtctggtgatcactataaacgcttttgcaatctcttcaagcttctttccaacacctattaaatgcctcttatggaccggcatcagaagtccagaagtcaccaccatctttttgccccatgtagaactcatcagatgcgtgccctgacgagatgtctataactggcaggtcaatgagggtcttct

SEQ ID NO: 129971 - DNA, 337 bp, Glycine max
  Clone ID: PAT_MRT3847_88372C.1
ctgggttgggccgaaaaaacagtcttattctttaaaaaaagatttgcccttttggggttccacccccccctgcccgaaaaacaaaaactgggggggtccccaaactcccaggggggggccctcaccaaccatatttggggcctttttcaaaaacacctgggggggaaattcttatccaagcctgaaaaagcttttatcccccaagcgaggtctgcccttcctccccccctgccccgttttttcccttgatgaaaaagacaactttacatccggaacaacgggtcaaaatgggcccaggttttacacaagtattatccccccctgggggggcaccccc

SEQ ID NO: 129972 - DNA, 364 bp, Glycine max
  Clone ID: PAT_MRT3847_88373C.1
ttttaacatgttgtttttcaattcaaacactctctctctttctttctccctgtcgatccgagttagcattccaaggagcgagtcactgactcgctagcacaggcggcgttttctcgtttcgccacgcatcattcgatttcgctctgttctgctacgctccactccgcaccataacgaatcgaatcgaatatcccgaaacaatcacgtgatattcgatcatcatctattttctccgatcaatcacgagatattcgatctccttctcaatctccacagtttaactccagcttcaaacacacaccacgcgcgcaaacttttttttttttttaacttcgcgttgttatggattttccgggttgatctc

SEQ ID NO: 129973 - DNA, 412 bp, Glycine max
  Clone ID: PAT_MRT3847_88374C.1
aattcggctcgaggttagtcaatgcgtgtctcaaaagatgtgactttcaggttgggttggcaaagggtacattttgacaaggtgctttagacatccctaaaatagatgatgtttttcttccataatgaccaaacaagaccgcaaagaaaggtagtctctctcttcttattatttattttatttttctcttagatggtttttagcacataactttttatggtcagaagagacttctgcacattctccaaaagtggcacacacttttttgctaatgttaaaggtcgtccgggatttagggaaaaacatgtttattaggacttggattttgacgggaagagagactaatggtgtttaagtgacaaatgttctagtaagcacttttcgttcaaacctgtcccatgttagcttttga

SEQ ID NO: 129974 - DNA, 287 bp, Glycine max
  unsure (1)..(287): unsure at all n locations
  Clone ID: PAT_MRT3847_88375C.1
gcaaaaaattgtgaaaaaggtattgaagatttagaaggcaaaagaaaagcaggcgtcaaagagttaagctgttgagttattcgtgagtgaaaaaaagatcttgttaaaatttgtgctaaagaattttgactttgaatggtgttaactatgaatgtggaaaataaatttcaaattaagtttccacattcatagttaacaccattcaaagtggaaacttaatttgaaatttattttatgattcttgtgcccccncaaaaaaaaattattataataactaaaaaaatatt

SEQ ID NO: 129975 - DNA, 374 bp, Glycine max
  Clone ID: PAT_MRT3847_88376C.1
gcctttgtttttttcttttttttttttttttttaccggcgggaaaggcgtttgtaaggggttccgtttaccaaaggtggcttaggcggggtttccttagttttagagtcgttttttattgttccttccattaagttttcttactttttcaaaaagtttttttaccggaggttgaaaattgttgggttttcaaaacctaaattgtcttttttttttttttgcaggttttacttttgacttcctgcacccaaattccaaagaaattttcttggctttttaccctttcgcaaaacttcattctttttttccagttttttgggatcctttgtttcattttttttagcaggaaacagcacagcttcaacagtgccttcc

SEQ ID NO: 129976 - DNA, 149 bp, Glycine max
  Clone ID: PAT_MRT3847_88377C.1
cagtttccaagaaatcctagatgctagctacaaatttgatgagaagctacttcttggtgtcggtggttttggacgggtttataacggcacgcttgccgctgggagcaatgtagctgttaccaggggcaacgccgcgctccgcgcaaggc

SEQ ID NO: 129977 - DNA, 294 bp, Glycine max
  Clone ID: PAT_MRT3847_88378C.1
ctactgtatctctgtctgctgtgtgtgggttttgcactttgcactctgcttgaggtttattttgatattgatttgatgcccatcaaatgattcaaggcaacaacattttcattttgtgatcattgagatgacttccaagttccatctcaactcaattctaatgcctttcttctttacatccttcttgcaatggctggtgacaaacaagtgatgtgagagaagtattttgatggcaagaaaaaaaaaaaaaaaaaaaaaaaaaaaaaaaaaaaaaaaaaaaaaaaaaaaaaaaaa

SEQ ID NO: 129978 - DNA, 670 bp, Glycine max
  Clone ID: PAT_MRT3847_88379C.1
cggaattcccgggtcgaccacgcgtccgctcacactcaacacaatcttgggagaggtaacaacagctttgatttttctttgcagccttcacagctgactcaaaaatgagaatcttgagttacctttacattcttctcctttttcatcaacaccaccaccattattcaagcgagcttaaatagggaaagaggagcaagaccttttcagtacctctaaatccagtttttgcaattccatttgtgagttattggaatttggaagtagctagggagtgtctcaaattaatggcatccatgtctcttattcttctttggttcctaatgtttgctggcgaaatgatgtcaatgggaaatagtttacacaaggggcacatgataatggaagaggaggaatgttgggattgtttgaagtgatgggtgctcttctggaagacccttacagggcccaaacacatccacagccatgtactgatactccatggccaggtgttgagtgtgaacttagcaatagtaaccaaccaatttttcatgtcacaaaaatccacattggtgctgatatagtcttcccattccaaccttgcaaaccctcagcttatctgtcacagtccttgatgaaactcaagtatataaaaaccctttcaatatttgactgttttggtgcttcaccagtc

SEQ ID NO: 129979 - DNA, 639 bp, Glycine max
  unsure (1)..(639): unsure at all n locations
  Clone ID: PAT_MRT3847_8837C.1
taaagaatgcncaaaagcattagaattgaatcnctgtgtacattaaagctttggtaagaagaggagaagctcataaaaagcttgagcattttgaagaggctattgaagatatgaaaaagatcttagaaattgatctctcaaatgatcaagctaggaaaaccattaggcagctagagccccttgctgcagaaaaacgggaaaagatgaaggaggaaatgattgcaaaactgaaagacatgggcaattctgtcctgggccgctttgggatgagcgtagacaactttaaagcagtcaaagatccaaacactggttcctattctatctcattccaacgctaatttatgtagagcaaagtcataaacagcagcaagcaagaaagaggcagtctaaagtgatacaggttttagactcagttgtgcatgcaagttatttggaatatttgaatgttagttatgtatgagaactagggcatgtaacatttcctttgaaagggcatttaaactgcattaaggcttcagaacacatgtcaattgttttgaacttttgaaaaatactacattcgtccctatttatatgacgttgactaatttatgtatattagtattaaatttgtctataaaacaaaaaaaaaaaaaggag

SEQ ID NO: 129980 - DNA, 361 bp, Glycine max
  Clone ID: PAT_MRT3847_88380C.1
tggaacctttgggctgatttatgtgcttgtttatgtgcttgcatggtcgtgagaagatcatagaaggggaattcccgtacctcacctacgtaagagctagtaagcgtgccccggaagtagagattgaaacatcctgagacggtttgcataaagtaaatcgtctgcaagctaatcggaggaaaagtctttaggaagtagtccgtaattaaggtcgtatgcaagctcgtattaataatcggcggcgtgaagaagttctactgccactgtttcggaatcgccgtctcctgcgagaccaggaaacattagaagagtatcgagtcttcaactaggaagtccttcccttagaggccgccctgcgaaa

SEQ ID NO: 129981 - DNA, 233 bp, Glycine max
  Clone ID: PAT_MRT3847_88381C.1
ggaaaaaaaaaacttgttcaattcaatgcaaaaggatgataaatgctcctggtgcacagaggtgacattggattacttgacaacattagatttgttgtgtttacaaagagcaagtgaagctttttcaaacaaaattgtgttttgatgataagcttgtgttggctaacacacaaaaattttttgatggaaattgttcaagggattcttggctaccacattttgggaattggctt

SEQ ID NO: 129982 - DNA, 487 bp, Glycine max
  Clone ID: PAT_MRT3847_88382C.1
acgaggctttttctatgatttgaacgtcatagaatccaaaaacaattatatcatgcaccagttccatggaataacaactcaaaatagatgcacaaaattaaaaaaaaaattatgatttgaacccttgcaactatggttaagtcctcatgttctgcatttttttaaaattatgtcgaatatattaatgatattggtgactcactttttatatgatttgaacgtcatagaatccaaaaaaaattatatcatgcaccagtttcatggaataacacctcaaaatagaaatgcaaaatcaaagaaactatgatttgaacccttgcaactatggttaagtacccaagttctgcattttttttaaagttatgtcgaacacattaatgatatctgtgactcgcattttctatggtttgaatgtcaaagaaagcaagaacaattatatcgtgcaccagttccatggaataacacctcaaaatagaagcacaaaaaa

SEQ ID NO: 129983 - DNA, 374 bp, Glycine max
  Clone ID: PAT_MRT3847_88383C.1
cccacgcgtccgattcaaacaaccccttcttcactttcattcaaaaccaaagtcccacaccgaggaaaaccataaaattttagctctccacgtgtatttgaatcaaagtcttttctaatggtaggtgttgaatttggttaaccagtcttggaggtaatgctaatagtaattgctaagtgcttacaacaatgtttttcactttcttagacaattttcttttctccaacaccatgttcttgctgttgttgcttgtgaaaccgtattattaatcagtttatttatctgttcttccctgttatgtcttaatttgcataggtagatgtatagaactgattgttactccttggtgatttgagggtcttgcgttttgaagt

SEQ ID NO: 129984 - DNA, 960 bp, Glycine max
  unsure (1)..(960): unsure at all n locations
  Clone ID: PAT_MRT3847_88384C.1
tttcttgttgattctgtgaaagaggtagggaaggaagcactaatcaaagttcctgagcgatacgttcatccaaatattgaacccccaattttatttcataaagacactttgccacagctccctatcatcgacctaaacaagttattgtctgaagatgttaaagaacttgaaaaacttaacttttcttgcaaggaatggggcttttttcagcttctgtgcctccgcacaggcgatttttggcccaagctccccataacctggctcctctagtcatggtcatgtattttcatatcgcaaaaacacttcgtacagacacgaatctaatggaacatttcttaggggaataagcccaagcatttcagataaattactatccatattgtcacagctccgcatatacccttcacccaaataatcacattgatgcatatggagttggcatcaaattggtggaagatgtaaagaaaggtgcccaagaactcttaaacctttcaatagaagagaagaaaaagctttggcagaaaccaggagatacggaggggtttggtcaaatgtttgtttataaagaggggccatctgattgggtgcatttggtttacattttcacacttccatcccatttaaggaatccccacttattccctaatatatcaatgccattcagggaaaatttagaggattattgtataaagatgagagaccttgccatcaacatttttgttcttatagggaaagctcttggtatagagctaaaggatattaaagagtcattaggtgaaggaggccaatcaataaggttcaattactatctaccttgtccccaaccagaaaatgtccttggcctaaatgctcacactgatggatctgccctcaccatccttctccagggcaatgaagtggaaggcctccaagttaaaaaagatggaacttggattcctttttcaccatttgaatgnnnng

SEQ ID NO: 129985 - DNA, 532 bp, Glycine max
  Clone ID: PAT_MRT3847_88385C.1
ctctcaacaacttttgattgaacaatgtgggtgttatggataaattaaatgctgtattctgacatcacgtcaatttgttgaaatttaagtaactactactacttccctgggcttatgttgttgaaaatatgaccaagatatacggtttttctttttctttctttaatttgatgagaaatttggtgcaattctgatgcagctgaggccatacttcttggttttcaacattatcttgtgatgctgggtacaactgtgctaattcccactgctcttgttccccagatgggaggtggcaatgtaagcattaacaaattaaatatacttaagataccatattaaatttcaaatggaataattttgaaagggttatccaaccatttgattgaagttgcactattctcctagccaaaatttattacgtataaaaatattattctttcttgtcgattcaacgatgagccatatcctatagagaaattcaagatgattatgcgggcaacccaaagtgctcttattgttgcttcaactcttc

SEQ ID NO: 129986 - DNA, 235 bp, Glycine max
  unsure (1)..(235): unsure at all n locations
  Clone ID: PAT_MRT3847_88386C.1
tgacaacacaaataagcgtagtncttttccaccgtgcttcgtttgctcttgtcctttggggtgtttgttgctgcttatgagaggcttggtgctgttgggtctctgtcacttctaggattaggctttgttttcagttccaagaacatggatttcagtttctcacttttctttccctctggtgcgtttttcacaagaggggtattgaagaggttgaaaaccgttgtggctgttgggt

SEQ ID NO: 129987 - DNA, 355 bp, Glycine max
  Clone ID: PAT_MRT3847_88387C.1
tttttttcagctaatataatagtttcaattgcgttttgaggggaattaagggtacattattttccatttctctcttgaagacagcaaaacaaagggcgaaattgtttttttttttttttttaaaatcccagtttggaccaaaaaaggggggacccaggtccaacctttttttccccccccccgattttttggaacccaacctttttgttttttaacccaaccccagggggggttatttaaaaaccctttcccccccaaaggaatcgggcgggaaaaaggggttaaaaacaaaaagggctaaaaggcccataaaaaaaagagcttagaaaaaagagccccggggggggggcctttg

SEQ ID NO: 129988 - DNA, 126 bp, Glycine max
  unsure (1)..(126): unsure at all n locations
  Clone ID: PAT_MRT3847_88388C.1
ctactcttcnncccattgtttcttctntaaatccctcgcctatatcgttcaganaaattaagatcttgcttcacgatctagaggttgtcccttttcccaaatcacgagtccgttgagttttgattt

SEQ ID NO: 129989 - DNA, 354 bp, Glycine max
  Clone ID: PAT_MRT3847_88389C.1
cactattcaccaattttattcaggacgcaacttaacacatgagagagctgaatgaaggaaagcctggattctctgaccgacacaaggagctccaaacagatcatggttaacttgcatctgaaccatctaggagtttcaaactcgagggggcagtttgtgtaataggtcagaacctccaaacgaatgacacattacagacagagctggtacttgtccagcgcaataatgctgcatgatagcaagctagctcaaacgcaaaacagatggcctaattctggtggcctgcggggcatgcttgtcggttctcctacccctagcctgaatgcaaatgatgcgtgaacctttaaactgaat

SEQ ID NO: 129990 - DNA, 341 bp, Glycine max
  Clone ID: PAT_MRT3847_88390C.1
gaacggaaactaacgttccccataaataaatccggggggcttaaaaaaaccccaggtttttaaaaaaattttaatctttcccgggcaataagcatttcctccaacttgaaacttcaaaacgggtttttttaaaatttggggggtttaaagggggtaattgtccatttaacaaataaaattgttttaaagttaccccttgatagctttttttctaagggggaaaattaactttttttttttttccctttttggtttaaaaggggccgggggcttaataagccttctggaaatagccctggtttttttagggggggatttgaaagggcagttctttttttttt

SEQ ID NO: 129991 - DNA, 265 bp, Glycine max
  unsure (1)..(265): unsure at all n locations
  Clone ID: PAT_MRT3847_88391C.1
ctanaccttagtgttgggngttacagcnatttcaagttggtcttctattnnnnctgtnatttcatgtaggggcattcngtctataattgaagtagaaggantncnatctttcaagttcttgatttcacggntggaaagtctcanacgtangacatgangtattgggcgnactnagaagcctttgtggattangncggagcacatgcattgngttaaagtnacagtgctgaagcatttnaantctcnanncaaagaaagggnaaca

SEQ ID NO: 129992 - DNA, 257 bp, Glycine max
  Clone ID: PAT_MRT3847_88392C.1
gacccacgcgttcgcggacgcgtgggttttattaaacggtctctagatgaatctgacctttatttatgattggatacagggagatcgaacaaaatacgttggacgggaggatgctgaatacatagaacactaccttagagccacccttggaggcatatatataactacggtcagataagtgccatatttaccatagaggctaatcacgaagagggactagttttacctctataaagatcatttgcttattaaacact

SEQ ID NO: 129993 - DNA, 361 bp, Glycine max
  Clone ID: PAT_MRT3847_88393C.1
ccatgctgtgtgcaggacaacagggaaaataattcaaaatttagttaaaattggccctaacaggtaattaacggtgcaaggaccaattgggaataggggaacaaaggggggataaccgccatgcgctgtgccgtgattaaatggaaacaaccttctgccctgcgaatcttcaacagaataagaagcggcctagtggcaaggctaacacagcatgatcttcgaaatatgtgccctatgcattagcaaggccaggcacttagcgattatatggaagaggacctatttgacgtcccaaattaactatgatctcgtatccctctgcttcaagaacagtaggttggaacatgctccaatgatgcaa

SEQ ID NO: 129994 - DNA, 439 bp, Glycine max
  Clone ID: PAT_MRT3847_88394C.1
ccgggaccagctattcctcttgagcttgatactgagataccacactgcataccttaggtcttccgaattcggatcatgttgcactagggctagctgatagggtcagatcaacattgcggagggtggtcatgtggaccctgaggagacaacccccgttcgcgacctgaagaagcctgttgaggataaacaatctcccgccgatgccatatggatgccatgcacaagacggggctccgactcgaaccagaaaatgtatgctaacgatagaggctgatagaccccttaacgcatcatggtcttcctcagtgggtagttatagacttagctttgctatggttacgatcgtggacatggagagcgcttgatgatcagtaccatatctgatgtattgctttccttgaaagataatgcttgcttcttatcttctgcctttcaactg

SEQ ID NO: 129995 - DNA, 633 bp, Glycine max
  Clone ID: PAT_MRT3847_88395C.1
aattcggctcgagcttatatgattatgaaaaccaaagattgttacttgatattaataggaatagagaatgcttagtagttctgaaactataatttgatcaacaacagtgcaagtatacggccgtgcctccagaagtcccctttaactgttctatacactggagattattgatgatgtgtaaatcagttaagcattattccatgactcagttttgacatcactgcaatatctcctattgaagatgtttactttccagtttgtcctcgagcattataatagtctttttgtatatatggtttaatgtttcatggtggtgattcttatatgattatgaaaaccaaagattgttacttgatattaataggaatagagaatgcttagtagttctgaaagaaacgacaaaatttttctaggctagaggaaattatttttttcctagtgtctaaatattattagtgcatgcagataacaatatggtttactgcaatacaaagctcaactcgtgtctgaatgtctagtttggtccattacatgttactcgtgaaccaattgtcccaaaagcttagttgggtgaaattgcataaatggtttttatgtttctatcgggttcatttattcatcagctgttagaac

SEQ ID NO: 129996 - DNA, 314 bp, Glycine max
  Clone ID: PAT_MRT3847_88396C.1
aacattggaactttttggtttggtttttccaaggggaaatctatacaatgggctccccccttcataaaaattgaaaaagggaactttacaaggggggagttttctaattttcttttacattaaaaaaggttctaggtctatcattaaattttggtaacacccccactaaaacatcccatgggaaatcaattttgggggaccaaagtatggacaattttgatggggatatcctgccaataaatatttttttttaaaaaaaactttgccaacaaaattgacaaaatttttaaaaacatttttttaatttctttttt

SEQ ID NO: 129997 - DNA, 554 bp, Glycine max
  Clone ID: PAT_MRT3847_88397C.1
gcccctcccgcgcacattcgggcgcaggaacgctggacctaaccgaccaccaccgagccctcttggcttcagggcaccttaaacagaatatgggtgaatgccatgccaggtattgagcgtggttatagccctgagggatgaccacatatccccacagggctacctgccctactgcaagcatccattccttgctagaccccggctggaaccggctcattctcaagcactgaaaatgcgtgatttactgaatatcattactcctcaaagactacctgatcacacttacatcctactcaagctgagcatgcaataacagaaaacatgttcctgaaccagcctactaaccatccaccaattaaaacgagaactatgatcacgacatcccggtacttcatgcagagcacctatactcagacagcttgctacgaaaccaaggctgattattaattcttgttgctactgacacccatccatatacagcctacgaacacaaggggggtgccgtgataaacccatgttctaaaacatgtgcctacggcaggatctcttatgat

SEQ ID NO: 129998 - DNA, 435 bp, Glycine max
  Clone ID: PAT_MRT3847_88398C.1
cctcaattcaactcttttcactactccccctctcaatcttttcccacttcataatataacacaaattagtgaaagaataaaaataaaaacaaaaacacatgcacttcattttttagcttccctttccaacaatcttttttcctagccatgatataccctcatcacttaatttctattactcaacagaaaaaccctaactagtcctcgaaagaacaacttgatttaatttctatatatatatatatatatattttgcagggtagcgatggatccttctacttgaacctagcatcatcatgatcatcacaagatctaagtgaaatccagtcaggaagcatcagatctcaacaatggagagcgtggcatccccgatgataacttgttcaagcaacaacaacaatggaagtggtagtaataatactactactcctagca

SEQ ID NO: 129999 - DNA, 264 bp, Glycine max
  unsure (1)..(264): unsure at all n locations
  Clone ID: PAT_MRT3847_88399C.1
cntcaaaactaagatatttttgaactggtaatcttttaacaggtcctgtaattgattactagagagaaaatgaacatggccttttacaaattttgaactggtggaataacaacacaaatttatttgaattttgatatgtgtaatcgatgaccngantactataatcgattaccagcaaagacattttagaaaaactttgagaagtcatgactctttagaaatataactatgtaatcgataaccaaaatcctgtaattgattatc

SEQ ID NO: 130000 - DNA, 2040 bp, Glycine max
  Clone ID: PAT_MRT3847_8839C.1
agtatttatttttaataaattttaattttataaaataaaatatttattactgctaaaataaatatttagtgtgcaatgcacaatctaaattctgcatagatgttattttccttaagttttcgtttttttttatctttcttaattttttttttagaaaagactaagctaatgcgtggtgcaaggtgtaagtttaaaaaaaaaaaaagtttcaagctcaaccacacaagtttaatttaaaagagaaaagaaaaaaaaaatcaccaaagggtgcgttctgttttcgctcattctagaaacacccataagtcggcattacaagcaccatatttcggaagctggaagctcacacatttttttctgcgtccgagaatcgcatttttctagttcctgcgcatccaaacgagtccttaatatcgaactttcctgaagatggtgttgatagagcatgaagagagcaagcagagaaacgcgaacccctccaacgccgccaacgacgattccgacggcttcgaaaccgccagcgacaccgatctggccggtgaaggcgacgacagtggggccggcatcccggaagaacagaatcgcaccgaacagagtcataccgagaagcagacggagcaagagccggaacacgatgcatttttgtatttcgtgcatcgaaactttccagaagatggtggtgatagagcaggaagagagcgagcatcgaaacgcgaacccctccaacgacgcttccgacggcttcgaaaccgccagcgacaccgatctcgccagtgacggcgacgacggtggagccggcagcccggaagaacagaatcacatcgaacagagtcataccgaacagaatcacaccgaacagagtcacaccgagaaacaccagcagcagcagcagacggagcaagagccggaacacgatgatcctcagagcaccgaatcatctgagaataatgcgttgatcaatgaagaagagtcgagacagaaagcattggatcaagcaaatgaagcaaaggtagaagggaataagctttttgtagaagggaagtatgaagaggcattattacagtatgaacttgctttacaagtagcatctgacatgccttcatctgtggaaatacggtcaatatgccattcaaaccgtggtgtgtgctttctgaaactgggaaaatatgataacacaattaaagaatgcacaaaagcattagaattgaatcctgtgtacgttaaagctttggtaagaagaggagaagctcatgaaaagcttgagcattttgaaaaggctattgatgatatgaaaaagatcttagaaattgatccctcaaatgatcaagctaggaaaaccattcggcggctagagacccttgctgcagaaaaaagggaaaagatgattgcacaagtgaaagacatgggcaattctttcctgcgctaccttgggctgaaggaaaacaactttaaagcagtcaaagatccaaacactggttcctattctatctcattccaacgttgatttatgtagagcaaagtcataaacagcagtaagcaagaaagaggcagtctaaagtgatacaggtaatgttggaactctgagttaatgaagtactaagtgagttgagcattgttggatggatgtcaaggtgttttaatcacgtggaagtgcactcatgaaagttgattggaatttgtaaacctttttgggttgtacaatgctgtttttctatcatcagctcattctgcatcagcttcactactgaatatgatgcgcattttagcaatttttagtatagtcatgtgatccatacatatattggctggtactttgatgtttataagttttggaattatacatgatatgtgattgtcaaaaatttataaatttataattttttttttttgcttctgcttgctatttctgagttgctatcatatgtggaattggtctttagcaaactgcagtactacaaaaactagtgctttatactggttattcactgaagtggagcagcaagttgtgagctctaaagatgctgtccctccattaattta

SEQ ID NO: 130001 - DNA, 856 bp, Glycine max
  Clone ID: PAT_MRT3847_883C.1
ccacgcgtccgcaagggaccacactataatacaattcatttggatcgtgttaacattaggtgggaaaaggatttggatgaaatggacatgattgtgttgtcttttgggaaatggtttatggctccttcagtttactacgagggtgaaaaagtcattggatgcttgaaccatcctgtttctaattgcaccaccgagattggtttttatggtccaataagaagagctttgagaactgctcttaatagcataattgagaggaaggttattaaaggaaatggagtggatgtaattttgagaacatacgcgccttctcattttgaaggtgattgggataagggaggtagttgtgcaaagactaagccttatggtgtttgggagagacaacttgaagggaaagatgctgagatcagaaggattgagttggaagaagtggaaaatgctaaggctaaagccaaaaactttagagggtttaggatggaggtaatggatgtaacaaaattagctttgttaagaccagatggtcatcctggtgcttatatgaatccttttccattcgctaatggggttccaaagcgtgtgcagagtgattgtgttcattggtgtttgccaggacctatagacacatggagtgagatttttctccagatgttggaaaacatggcacgagcagccaaggagtgaagagtgaagcattcttcatatccgttaattcatttgcaataattttttcgccacacatgtgatgtgttgcgtcaaaactagaaagagtattttgttattttgtttgtgtgtaggttggctaatgtaccctacttattttttttttataagaaataagttaacaaattttaacatc

SEQ ID NO: 130002 - DNA, 494 bp, Glycine max
  Clone ID: PAT_MRT3847_88400C.1
ggatctcgtttttgttggtttccacctttttccagtgggaggagctgagcagagaaggagtttaggaagtgtttggttacttctgagattctgctgttcctaagagagagagagagcgatgacggtagcagcaggaatcggttacgctctggtagcactaggaccctctctctccctcttcgtttccgtcatttccaaaaaacccttcctcattctcacagttctctccagtacgttgttgtggcttattagtttgattgtgctgtctggaatatggaggggggttttggaatactcattttctcatctgttgcttttcaagaagccctcagacttttcttctggaaaatatataagaggttagaagacatgttagatgcctttgctgacagagtatcaaaaccacatcttcacctgacagataagatgctgattgctctggctggtgggttgggtcatggtgttgcccatgctgtggtcttctgcatcagcct

SEQ ID NO: 130003 - DNA, 508 bp, Glycine max
  Clone ID: PAT_MRT3847_88401C.1
acgttgtgtaacttagagattaacttcatctcatggagataaataacccatatatacacttagtgcaatgtacccaagtaacattctgacataaaatggtttttcgacgcgagggggataatgtcccaatttaagcaataatctcttaatctactagattttcttttctgaatactttctgcaagcccgcattacgagtgaaccagcctgattgggttttctgtcaattttctccaaaccatcctcccacaatgaatcaaggtcaagattgcaaccaaataaagaagaggaatgccaacagcacaaccgccaggggccaaattcaccagagtcaccattccagcgacaacgtgaacaatgggaacaaaatattgatccactttgttcccctctgagtacccattaaatgcgatgaccattgagaaagtgtggattgtgacaaatgcaagagcaataatcgcagaaagaaggaaaaatggaacttttgaacacctgtcaacgaaatatg

SEQ ID NO: 130004 - DNA, 545 bp, Glycine max
  Clone ID: PAT_MRT3847_88402C.1
gtgaatttggcccctggcggttgtgctgttggcattcctcttctttatttggttgcaatcttgaccttgattcattgtgggaggatggtttggagaaaattgacagaaaacccaatcaggctggttcactcgtagtaagtgataatctttgtaaaaaatctagtctatagttgcttagtgctcgctattcctgttggaatacacaggataccaaaagttataatgcacaataggtttttccttgacgttatgctcccatctttttacaatgggttactattcggggcctcaagtcaactttctgcatttgtcagtttcacttgtcgtcactgcagtcaggcttactgaagttttggttgcagatgcgggcttgcagaaagtattcagaaaagaaaatctagtagattaagagattattgcttaaattgggacattatccccctcgcgtcgaaaaaccattttatgtcagaatgttacttgggtacattgcactaagtgtatatatgggttatttatctccatgagatgaagttaatctctaagtt

SEQ ID NO: 130005 - DNA, 1444 bp, Glycine max
  Clone ID: PAT_MRT3847_88403C.1
tacggctgcgagaagactaaatcagaatttttgttgttttagaaactagattgtgactggattacacaaggaccaaaattagttttacaaatatttatccaaacacgataaataaattgagaaggagttaggaagtgtttggttacttctgagattctgctgttcctaagagagagagagagcgatgacggtagcagcaggaatcggttacgctctggtagcactaggaccctctctctccctcttcgtttccgtcatttccaaaaaacccttcctcattctcacagttctctccagtacgttgttgtggcttattagtttgattgtgctgtctggaatatggaggggggttttgcctctcagcacaacagcttcgtggccttttggaatactcattttctcatctgttgcttttcaagaagccctcagacttttcttctggaaaatatataagaggttagaagacatgttagatgcctttgctgacagagtatcaaaaccacatcttcacctgacagataagatgctgattgctctggctggtgggttgggtcatggtgttgcccatgctgtgttcttctgcatcagcctattaactcctgcatttggtccagcaacgtatttcgttgaccgctgttcaagagttccatttttccttctttctgcaattattgctcttgcatttgtcataatccacactttctcaatggtcatcgcatttaacgggtatacagaggggaacaaagtggatcaatattttgttcccatcgttcacgttgttgctggaatggtgactctggtgaatttggcgcctggcggttgtgctgttggcattcctcttctttatttggttgcaatcttgaccttgattcattgtgggaggatggtttggagaaaattgacagaaaacccaatcaggccagttcactcatagtaactgataatctttgtaaaaaatctcatctatagtttcttggtgcttgccattcctgttggaatacataaagataccgaaagttataatgcacaaaagtttttccttgacgttatgttctcatcttacaatgggttactatgcgggcaagtcaactttctgcatttgtcagtttcacttatcgtcactgcaatcaggtttactgaagttttggttgcagatgcgggtttgctgaaagtcttgatcgtttagtattcagaaaaaaaagagaagaaaatctagtagattaagaggttgttgcttaaattgggacattatgcccctcgcgttgaaattccattttatatcagaatgttaattgggtatattacggtaaagagtatatatgggttatctccatgagatgaaattgatctcttaagttacacaacgtatccgctagtagagggagctagcggcgccggggatggcagaaatgataatgagaaaaaaaactctgaggtggcccgt

SEQ ID NO: 130006 - DNA, 211 bp, Glycine max
  Clone ID: PAT_MRT3847_88404C.1
taaaggtgtgacggactatccacacagcattgcggatgaccctgcttctgtgctttctgccttcaactggctactccctgggaccgtgtctatatctgcgggtctgttcacttcgacaccaactgaggctgatgctgtacctgctcaagctttccagattggtacaaagaaggtccatgacatcccggatgaggttgctcccaaaaagact

SEQ ID NO: 130007 - DNA, 476 bp, Glycine max
  Clone ID: PAT_MRT3847_88405C.1
cttttttttttttttttttttttttttttttttttttttttttttttttttttttttttttttttttttttttttttaaaaaaaaaaagggccttatgggccttatggcaggcggggcaaaaggaaggggtaaaacccaaaagggcccacaggggggggggggggggggtttttattttaccaaaaaaatttgaccaaggaaaaaccaaagctggccaaaaaagcaaaatttgacccatatgattcacctaaaagggggcccacaacacaaacaggtgggacaggaaacaagggcaaatttgttaaacaaagcaaaggcctgaacaaaaagcccttgaaccatccccagaggggaaactttctcaaaatttggccccaaaaaaagggccactaaacaaacaggggcgggccatatcccaaaaaaccctcacctaaaatacccgggcaaatgggtaagcacccattggtgcaagccc

SEQ ID NO: 130008 - DNA, 461 bp, Glycine max
  Clone ID: PAT_MRT3847_88406C.1
ggctcgagcccctttttagcagactacctgtggattactcaataaccaaaaacagagcattgatgggggcctaccaagcgtctgtcttttccatattatatcacacccttttccttactaactcaaacctatcacaccatgcacggttgacctacttgcatggacatagcccccctcggtgatgttgcataaaaacactgttctcgttccgattcaagtgctgataactctacccataaaagcagtccaccatcgaaccacagagcctgaccagatcttacacccttggtccctgtatcaataaaactactcaaccacaagcacaggcatagcgcttgatccgtaaaactgccaaccatcccacttcctcaaactacaagaagctcctcaaccttctcagggcaacaacatcccaccatagattctcttttgaagacggacaaatttgacttctttgacaa

SEQ ID NO: 130009 - DNA, 204 bp, Glycine max
  Clone ID: PAT_MRT3847_88407C.1
gctgcctcctcttacgagcctttctttttattccattgattcggtgtgtgctggtgcaggtgaacttagctagaccctgatcggcttctgcacaccttctgagaacaagattattgtctgcgtcgtcttcgattgtcatcataacaatcttctgtacatacatatctttacagaagccgatgatgctcttaagctacatcatat

SEQ ID NO: 130010 - DNA, 257 bp, Glycine max
  unsure (1)..(257): unsure at all n locations
  Clone ID: PAT_MRT3847_88408C.1
caannaattnaanagccatanaantnctnnanacttnntcaanccaannatcnnacnnaanatnnnntncaanttnntcnncanttnaacctnannncntnncnnnnnnnnnatncnananntnnnnacaanctnannatnnnnnncnnacnnccnnnnntcatncaanannnacnacannntattnctatncacnnacacancnaacnccannnnatnancnnnannncacnnactctnancaccanncaaacnnn

SEQ ID NO: 130011 - DNA, 299 bp, Glycine max
  Clone ID: PAT_MRT3847_88409C.1
ggggaggcgaaaattttttactataatttcattcggccgactataaacacacttagaattgtgggtcaaaaacgaaacccccgggaacccgaaacgaaaccaacccagatcccgaaccttaaaccccccccagacaaccccttaaaaaaattgaacttaatcataaaccctaatttacgggggcatatgcctaatttttccagtttccatgggatccaccgctttcccccccgggggagtggggaaaaccacctttcccaccggaaccccggtttttaccaccggcgtattcttcacct

SEQ ID NO: 130012 - DNA, 1403 bp, Glycine max
  unsure (1)..(1403): unsure at all n locations
  Clone ID: PAT_MRT3847_8840C.1
ggccgggccgggnatctgttgcgaggagaaaanaatannaaaaaaaaaataccaaccgcaacaaaacctaaaaccctctctctcccacacatttccaatcccctaaaccctattctctcctcaatgggaagcaaccaagccgccatttccttcctcaccaacgtcgcccgcgcggccttcggccttggcgcggcggccaccgccctctcctcctccctctacaccgtggacggcgggcagcgcgccgtcctcttcgaccggttccgcggcatcctggactccaccgtcggcgaggggacccacttcctggtcccatgggtccagaaaccctacatcttcgacatccgcactcgcccccacacattctcctcggtctccggcaccaaggaccttcaaatggttaacctaaccctccgcgtcctctcccgccccgacaccgagaagctccccaccatcgtccagaacctcggcctcgaatacgacgagaaagtcctcccgtcgatcggcaatgaggttctcaaagccgtcgtcgcgcaattcaacgccgatcagctcctcacggaccgttcacaggtcttcgtcatggtcctcgacaggtagatccgtcgcgataaagtcttcactatggtttttgatgatgtcgcgatcactcacgtctcctacattcgtcgatcctcacacttcatcatggagcagcaggacgtgcagaataatgcagatcgcttacggttggttgttatgccgcccgatcaagagcggagggccgccattattagggccgagggtgagagtgatgcggccaagctgatctcggacgccacggcctccgccgggatggggctcatcgagctccggaggatcgaggcgtccagggaggttgcggctacgctcgccaagtcgcctaatgtttcgtatttgcccggtggacagaacttgctcatggctctcggtccttcccgctgatctttgtggcggtgatgggctcaatgatgctgtgtgatgacatgcttggatcttgtctttagtttttccgttgttggaaatatttttcttgtgtttttacttgtagactctctcatttgagcatagttcataatgattttaggaaggtaataagttagaaatgaatttggaccttcgttttttcatggtgaaagggtctgtttagttgcagagtaaaaactatctccaaagtatataaggtgagagaggaacttgaatacttgattgtgtggttaatgttggttctttgaccttatcatcaatttaccgaagtatttcaatacagtcggtgccttcggttcaattttatttgtcaatttggctatttttgcttggaaatcagataaacttgttttggttgtgaatcaggcaatgtaactgtatatgtccttgagcccccc

SEQ ID NO: 130013 - DNA, 375 bp, Glycine max
  unsure (1)..(375): unsure at all n locations
  Clone ID: PAT_MRT3847_88410C.1
ggttggcgagtgagaaaaccaaggaagacangagcgaaggaggaaaggccaaagacacaaaccggacacaacacacaccccggcaacgacgacggaaaaggccgccgcgagcgcgaacagacgagacaccagngagngcaacaacgaacccgaggacacgccgacaccgacgaactacaacaacccccgcagccgaaacaaccgccccgccgcaggaaccggggcggagaaccacacaaccaacagcgcgaagaccacgcanacctcccaactaacaacgccagcgaaacaccaaggcgcgccgcaactgcagcaacaacggcatcgcgcaaaaaggagccgccatgaggacgaacaacagggacaacgaggaca

SEQ ID NO: 130014 - DNA, 238 bp, Glycine max
  Clone ID: PAT_MRT3847_88411C.1
cgtagaagcaagtttactttttcctgactattcatcaatctcaggacaattggctaaattctgagaatgatcacaacgaatccctggcaaactgcgacaacctggacaatactattctacttcaagaatctgtcctcttcactaaattacatttggataacatcggctgatgttcctcatccaacgaacctacactttgcaagaaaattggtgtacttggatacaatggacatagctc

SEQ ID NO: 130015 - DNA, 591 bp, Glycine max
  Clone ID: PAT_MRT3847_88412C.1
ccaccagaatctttgcatcttgaatgaaaaaaagggagcaactatggcatccagagaaagagagggtgaaccactgagtccaacagggaagctgttccatgagccatctttaaactgttatgtgattgccatcatgggttgcaagacaagcatcaatcctcaagtcattcgagaaggtttatgtcaaacactgctcaagcatcccaggttcaccagcaaactggttaagaagggaaggaaaacgaaatggatcccaacaaaagttgacttagacaaccatatcatagttcctgaaatagattccaacttagagtacccagatagatttgtggaagactatgtctcccatttcaccaaaactccactagaccaatccaagccactatgggaactacacctcctcaacatcaaaacctcggacgcagaagctgttagcgtatttcggattcatcattccataggcgatggtgcctctctcatatcactccttcttgctgccactcgcaaaacttctgaccctaatgcgttgccaactgtgccaatcccaaagaaagacacctcacatcaacgctcatcaagcccattccggtg

SEQ ID NO: 130016 - DNA, 239 bp, Glycine max
  Clone ID: PAT_MRT3847_88413C.1
ggaccgaaaaccccgggtggacccacgcgggatatcacccgcgagaagacgacagaggggggggggcagggacaaaggaagaccccgaaaccaaccgaaagaagacacgacaaggggacgcacagggccggagaaaaagagagcaaaaaacggaacccgagaaacgcagcgacggccgcgcaaaggacccgggggccagggaaggaacaggcaaggcggcccagaaaaagacccacaca

SEQ ID NO: 130017 - DNA, 637 bp, Glycine max
  Clone ID: PAT_MRT3847_88414C.1
tcgatctatctctaggcaacgtaccaggtacctgtcacagagcaagaatttttgggggtgggtgttagatttggggctgggtgggagttaagacgaacaatggtttatcacgcctgggaatgccgtgccgtgccgtgccgtccatatataaaaagaggacgagccacaaacacacggggcgcaacaagccacactggacaggcttgttccgcgggtcgggttatttcatgcagcaccactgccagggctacgatggcaactctaaccgtggtgttgctttgtgcttacttgtgagtaggttgcaccggcagcgggctaacgtgcagttggcccagggcttaccgcagggccactaacacacagatggtgggactattaaacaccttaaagagtttaatccaaagtctgtgaatacacttataaaggtcccggaggccaacctaatgcctggccatagataaaggcggatggtaaaacccaattaacggcgccgcagcaacaacatatggcggggtgatacaactagcgtggtgtagccaggtacaatgcaggccattagctagcacgagtctgtgagtaggtggaaactttgggagactagcgggttaacccaaaggcccagtgagcgtctgggggg

SEQ ID NO: 130018 - DNA, 258 bp, Glycine max
  Clone ID: PAT_MRT3847_88415C.1
ctcgagccgatgaaatgcaacaggttagccatacacgtgcaacatctattaaacactccaataatgcttaaaaacaaaatagaggacacgccaatatggtcagaagaaatcaatgatggccgtttctttgaagcaatcaatgggaagaaattttaccatgtatgtacagcaccagtgaaatacgaccctagatggagctctgacaaagatgtggcctttattgtcacaggagcacaacttcatgtgaagaaacatgaa

SEQ ID NO: 130019 - DNA, 222 bp, Glycine max
  Clone ID: PAT_MRT3847_88416C.1
gtcgtttgtgtgtgttttccctctttccacttcaaacttgtgaaacagaaagacactcgatgaattgtactttccattctcctccgtttcttcctccaatggctggacctcgatggctaacgtgaaattagtctcatttaccatctcggtcatgtgaattgcgcttagaaccgcgttgtctcgcttctgggcttggcttatcaataatcagcatgacgtttg

SEQ ID NO: 130020 - DNA, 318 bp, Glycine max
  unsure (1)..(318): unsure at all n locations
  Clone ID: PAT_MRT3847_88417C.1
ggaaaatcgngnggggncatctgngatggaagctgctgaaatgataggaccattgnatgagctggnttgatccgnttatttnccctgcatcctgggtngngagtttccatataggtttnaagctttgcatgctgnnacttttcatgtctaatgccctgtctgtctctggcatgattccttggcttgccatatngnatnttnntctaccttcagngtgtgtgatcattaacatgcaccttattngtgnaccccaaactcctgtgttcggacaagtatgatctggtaacacgaatactctcataggagatntcttcggcc

SEQ ID NO: 130021 - DNA, 140 bp, Glycine max
  unsure (1)..(140): unsure at all n locations
  Clone ID: PAT_MRT3847_88418C.1
tgacacaagcagacattttttcatttatgggagncaatttggggcagagcttncctccaaatttttggngggaagctggnattataccgatggnanttacaatatgggtcatgcggggggggaaaannactantagctga

SEQ ID NO: 130022 - DNA, 400 bp, Glycine max
  unsure (1)..(400): unsure at all n locations
  Clone ID: PAT_MRT3847_88419C.1
ctctcagtctctctcttatgtgtttcttagacgtggacacgtcctccatcacaacatcacaaactggcgtgtccctcgttttatttctgcagtaaaattcattagtgtgatctgcataattctgattaacactaaacagttttatttgagttaagcttatctttcagctcgngttctattgttctttggcatgcagatgcagacactattcagaggcagagattgttgagaagatatacgaagaagatgccaaatatatgtgttttgtagtggctgtttgatggtgaattggcaaattgtgttttagttattggtggaatctagaatgtgaagtatcactatccatgatagttctcagttatgggggtcttaaacgccgagaagaaatgggtatatcctt

SEQ ID NO: 130023 - DNA, 434 bp, Glycine max
  Clone ID: PAT_MRT3847_8841C.1
gcttgacgtccatgccccgtcgtagctcgattcgctcgagatcaatgcccggtttttagaagaaatttccgaaagtaggtgcatctaaagaacaggacggttgctttgtctggggctttctttcttggaaagattgtcttgcttttatttggtttatgaattcatttgcattatggcattgatcagatgaaaccaacttcccccctcccatgttttctctagaaactggtgggcataatatatattagtgtctctgataatattgactatgtcccctgaaatttaaaattaagccatctgttacgtcttgtaaacatctgagatctgaaatcttatattcaataagcaggatgtctggcaaggtactcagcttctcgccattgatgttgctgctgccatgggtttacttagaagggcattgataggggatgaat

SEQ ID NO: 130024 - DNA, 351 bp, Glycine max
  Clone ID: PAT_MRT3847_88420C.1
agagggcccgagagatccttatgcaccctgaaggaacactgacttcctgtcgcttttgaaaggaaggctagcttctccctggacaagtggggcaggaggccctgggctggaggtggggttggcaggggaagagaagcagcagccatggattccattagcctgggggaatcagagggaactagagggactggccaaatcccacactggcaggtacacctttgagcctttgggtccagccaaagcataccacccactggagtgtagattgctgctcctcagagggtgacccaccaattggctgtagcagctttggcgaggagggcaacagaaatgcagactctcaggcccctc

SEQ ID NO: 130025 - DNA, 183 bp, Glycine max
  Clone ID: PAT_MRT3847_88421C.1
gcttgggccgactacaagaaagccacctactctctcaggcttggagacacacgcattcagcttttcacaaatagactaaccactaatcaccacccaaaagtctagtttctactttctaccaataccaatatctcctcgtctttattgctttcatgtctttgttttcgtgtccttacaaggtgg

SEQ ID NO: 130026 - DNA, 1027 bp, Glycine max
  Clone ID: PAT_MRT3847_88422C.1
cgccgtctggtcggcgtcgggcatgccgcacttcccgcaagactcataaattcatcatcatcccccagcaagaaaaaaagaaaatcgcaaaggcagagcaagaacacaacacaagacatcgaagcagaagaagacatggggttgcagtggctgattctcacctacgtggtcgcagccgaagctgcggtggcaattctgctaacccttcccacgcccaaactcctgaggaaccgtttcgcctctctcgtttccctcattcaacaacccgcgctttccatcacccagcaagaaaaaagaaaatcgaagaggaagagcaaggacacaacacaaagaagcaaaagaagacatggcgttgcagtggctgattctcacttacgtggtcgcagctgaggctgccgtggccattctgctaacccttcccacgcccaaactcctaagggaccgtttcgcctctctcgtttccctcattcttcaacccgcgcttttcattgtcccctttgcggggttccaactccttgatatatactggaaaaatgagcatcggttgatgtgtacctctgaagtttgtactgctgcggagagagatcgatatgagaaatctatatacaaagctcagaggaatgtaatactgtgtgttacagcatgtcttctctactggtctatcagccgcatttgcaagtatcagaaggaaatccagagtctggaggaaggggagaagagaatcaagtcccactagattcttttagtcatgattagtggaggatatccttgaggctactttagttgagtctagtatggacatgccaacatgatgtaccaaattatacagtgtgatatactcatgtgattcagttctagactttcaaattccaatctttctttatcatactgtttggatctgctcttgacttgtatgttgtttaatggcttttagcctatatcagtgaaatatttttcttttttatatctaaaaaaaaaaaaaaataaaaaaaaaaaaaaaaaaaaaaaaaaataaaaaaaggggggg

SEQ ID NO: 130027 - DNA, 146 bp, Glycine max
  Clone ID: PAT_MRT3847_88423C.1
tagggcaactgaagaatctacacaagttctccttttggatgtgcaatgtgaatgaggcggtcaaaaatatcaccatccaattttcaaaagtgttcccaaatttggaagagatgaacatttactactgtgatattgtgtaattacca

SEQ ID NO: 130028 - DNA, 370 bp, Glycine max
  Clone ID: PAT_MRT3847_88424C.1
ggaaacagttttttaaatttttttttttaaaaacattttttgttaaaatataaaacaaacctttttttgaaaaaccacccgaacaagtttaaattttacacccccttcctttttttttttaaccttttgcccaaatgaaacattttaaacccgggttaaattattttggtttctttggaaaaaaaaaaaaaaaaacgggataaatgggattacaaacctaaaattgcaaccgatgtttttaaatttttttttggagctcgtctttttttgcccccaaaaccttgggaatttttttcctttttttaaaaaaaaaaaacgtgggattcgcctccaaattaaactctttccccaaatccggaaatttgtggac

SEQ ID NO: 130029 - DNA, 375 bp, Glycine max
  unsure (1)..(375): unsure at all n locations
  Clone ID: PAT_MRT3847_88425C.1
caaanctctcttgaactcttttttgatgcgaggaaatgaatgcgtttcgggggtttttttcatgggggggggggggattttaatttttggggaaataacattgacgtgtttttttttttgataggtgaagaaactgataagcaattttacgactacgagtttgggatgcaatggggcgatgaatctgctcgaagtgtgaatgagttaaaatttcgtaatgaactgaagcatatatagtggatacctccaggtataggaacaaatcaggactggcaagatttaataaacaacatacggaaagggagaatggaagttgatgtaacaggatagaagatggctatgtaaacctgggcttatgtttcattttatgatgaa

SEQ ID NO: 130030 - DNA, 391 bp, Glycine max
  Clone ID: PAT_MRT3847_88426C.1
ggagtctcttattatcctttgcactggaaagttataaaccctgatggtcaaaacacgcgtcatttttaatctgtgtctgtcaacaaatatttgtgggtagattcaattcaccatgacgagctcatcgtagtactctgaattttccggccaaaaaccggcgaggtcgccggagaaatcgagcttgtctcagacttgcagtctgttgagtcactacatcaaggagaaggctagcttcggtgatcttaccctcggaatgacatcatgtggatcacctgagacatcttgtcactctgttacaaccatgaacttggtgactcccaaggaaaacaacgtggcaccaaagaccctgactgctatggatctgctctctgcacaagcttactcctatgga

SEQ ID NO: 130031 - DNA, 663 bp, Glycine max
  Clone ID: PAT_MRT3847_88427C.1
gcaccagcttgttatgatgtgatggttgatgttccttttcccattcagagggaattgaatgctctggtggccaatgtggagaggaccaaagagatcgatgcatgtgatgagtccatatgtggaatcattagaaaaatacacgagcaccgaccacgcgtccgattctttgttggttttagtcagtctcctctggaatttattaaggccttggttgaatctcaaaacaaggatctgaaagttttacttggagaatctcgtcacaatgctgaaaaggaccgcaagtcagatttctttaagcaaccctgggttgaggatgctattgtgcgctatttgaatcgcaaaccagctgcaggaagcgatgctccagggagcacataatgcgcagagttttaagtttattatggtcattttctgctgtagctggtctttcatgcatgatgtatcattttaaatggctcatttgagctcatagaaactctgatagtttatgttgctagttacatattagtatcagtagtttcagtgctgcaacttgccttgcagttcatatgttaacttaagtgcaagcaataaccttgatagtttggactggtgtacagtaatttcagacttaagttgtcttatggcagataaagtaaaggtagaaaagaaactttgcatgcc

SEQ ID NO: 130032 - DNA, 593 bp, Glycine max
  Clone ID: PAT_MRT3847_88428C.1
gggaaaataaattggggattaaatttgaaaatcaggggaaacccccggaagcagggggggggcaaaaaaggggaaagggtttttgggacggggcaaaaaaggattgggggggggaaaaaaagaaaaaatcaggctttttccccagctaaaaaacattggggggtttgggtatttggggggggggccctgaaaattttaaataaagcttttggggcaaactattttttttgaaaaaaaaaaaaaaaaatttccttccaaaccaattacttggccaggggggatctcaaaaaaaaactggggccccaaaatttggggacaattggggagcccctaaatttttttaaaaagccggggggggaaaaaacccaaaaccccccaaaagggaaaggttttcaaagggtttaaaaagggggggggttttttttttccccccaaaagtttgggaaacgggttttcctgatatggaaagggacccttcaacttcgggaggaaaaatctggaaccccttttggtcttttaaaaaagggacctttttgacccccacaagttgttttggggaaacgggaacctttattggggggttaactaccaaa

SEQ ID NO: 130033 - DNA, 1671 bp, Glycine max
  Clone ID: PAT_MRT3847_88429C.1
aattcggcaccaggggttttttgaaaccaacgagtaaaaaaaaagggggggacatggaattggaagacaagttggagtgtggtggtctgttttaaaatccaacacttaatctctctcttcgcagcctaaaatcccaatggcttcactctctgttttgcgccacaaccacctcttctcgggccccctcccggcccgccccaagcccacctcctcctcctcctccaggatccgaatgtccctccgcgagaacggcccctccatcgccgtcgtgggcgtcaccggcgccgtcggccaggagttcctctccgtcctctccgaccgcgacttcccctaccgctccattcatatgctggcttccaagcgctccgctggccgccgcatcaccttcgaggacagggactacgtcgtccaggagctcacgccggagagcttcgacggtgtcgacatcgcgctcttcagcgccggcggctccatcagcaagcacttcggccccatcgccgtcaatcgtggaacggtcgtggtcgacaacagctccgcgtttcggatggacgagaaggtgcctttggtaattcccgaagtgaaccccgaagcaatgcaaaacatcaaagccggaacgggaaagggcgcactcattgctaaccctaattgctccaccattatatgcttgatggctgctacccctcttcatcgacgtgccaaggtgttacgtatggttgttagtacctatcaggctgcgagtggtgctggtgctgctgcaatggaagagcttgagctgcaaactcgtgaggtgttggaaggaaaaccacccacttgtaaaatatttaaccgacagtatgcttttaatctattctcacataatgcgtctgttctttcaaatggatataatgaagaagaaatgaaaatggtcaaggagaccaggaaaatctggaatgacaaggatgttaaagtaactgccacatgcatacgagttcccatcatgcgagctcatgctgagagtgtgaatcttcaatttgaaagaccccttgatgaggacactgcaagagatattctgaaaaatgctccaggtgtagtggttattgatgatcgtgaatccaatcattttcctactccactggaagtgtcaaacaaggatgatgttgctgttggtaggattcggcaggacctgtctcaggatgggaatcaagggttggacatctttgtatgtggggatcaaattcgcaagggagctgcacttaacgcaatccagattgctgagatgttgctatgagttctggtttttcaaggatctggtacttaaagattatgcttcttttgaaacagttttgtatgtgctagttgtatgtggttattcatttcttttgtgatgtttaactagtccaagtatcttttcaacgatgtggtagcacactagctggaaacagtttttttaaggtcttggtgcgtaatatctgcaatccttttcaccgggaataacaagcactggttatggcaaaggagagtaacctaatgtttaatcttttgaataaagaatttgttgagcagttttataccaaaaaaaaaaaaaaaagaatccccaaatgtttcatcttttgaataaagaatttgttccccagttttctatgatgtccctttatttttcccttaaaaaaaaaaaaaaaaaaaaaaggaaga

SEQ ID NO: 130034 - DNA, 459 bp, Glycine max
  Clone ID: PAT_MRT3847_8842C.1
aaggtttcccgtcttcactgtatgacgtcctccttctttgggtggggggggggggggggggggggggggggggggggggggggggggggggggggccaaatggggggcccccaaaaactttgaaatgggcccttaggggaggcgtgaaaaaggaacctattaagggaggatggcttggaagggggctttgatcaaaaggtttgtggttagagtttaggtaccaaaaagtttgaagggcaagccggagcccagttaggttggataattatataggagacgggccggtatgccgcagtgaggggcgtttgaggttaatgtatgtacccgatattcggaaacgggtggaaatttaaagggaaccaaaaacaacaccaataaatcccccggaagtgtaatacgataggcgttttaagataaggaagttggggcatctacgcggtcttgagggggattgtgtga

SEQ ID NO: 130035 - DNA, 1605 bp, Glycine max
  Clone ID: PAT_MRT3847_88430C.1
tacggctgcgagaagacgacagaagggggtgtaagacaagtttttctgaaagcaacaaatagaaaaagaggttgggacatggaatagaaattggattctggcctcctccctctgttttaaaatccatcagcagccgccaactctctcaataaaacctgctttctatttttctcaacctaaaatcccatccaccaaccttatgatgatgtcttcactctctgtttcgcgccacaaccacctcttctcgggccctctcccggcccggcccaagcccaagcccagcttttcctcttccaggatccgaatgtccctccaagaaaacggcccctccatcgccgtcgtgggcgtcaccggcgccgtcggccaggagttcctctccgtcctctccgaccgcgacttcccctacagctccatcaaaatgctcgcgtccaagcgctccgctgggcgccgcatcacctttgaggacagggactacgtcgtggaggagctgacggcggagagcttcgatggcgtcgacatcgcgctcttcagcgccggcggctccattagcaagtacttcggccccatcgccgtcgatcggggaacggtggtcgtcgacaacagctccgcgtttcggatggacgagaatgtcccattggtaattcccgaagtgaacccggaagcaatgcaaaacatcaaagccggaactggaaagggcgcactcattgctaaccctaattgctccaccattatatgcttgatggctgctacccctcttcatcgacgtgccaaggtgttacgtatggttgttagtacctatcaggctgctagtggtgcgggtgctgctgcaatggaagagcttcagctgcaaactcgtgaggtgttggaaggaaaaccgcccacttgtaaaatatttaaccgacagtatgcttttaatctattctcgcataatgcgtctgttctttcaaatggatataatgaagaagaaatgaaaatggtcaaggagaccaggaaaatctggaataataaggacgttaaagtaactgccacatgcatacgagttcctgtcatgcgagctcatgctgagagtgtgaatcttcaatttgaaacaccccttgatgaggacactgcaagagatattctgaagaatgctccaggtgtagtggttattgatgatcgtgaatccaatcattttcctactccattggaagtttcaaacaaggatgatgttgctgttggtaggattcgccaggacctatctcaggatgggaaccaagggttggacatctttgtatgtggggatcaaattcgcaagggagctgcacttaacgcaatccagattgctgagatgttgctatgagatctggtttttaaaggatgtggtacttgaagactatgcttcttttgaaacagttttgtatcttctagttgtatgaggttattcatttcttttgtgagaaagtacgaggatcttttcaacgatgtggtagcacactaactggaaacagtttttttaaggttttgtgcttaatttctgtaatccttatcaccgggaataacaataattggttatggcaaaggagaatcacctaatgtttcatcttttgaataaagaatttgttcact

SEQ ID NO: 130036 - DNA, 528 bp, Glycine max
  Clone ID: PAT_MRT3847_88431C.1
tttctcgcgtccggattgaagcatggccaaaattctaccaaaactctagcgaggacttcaaattttccatgtaccctctatcactgtatgatttttgatcctctttctcatgttctaaattttcccctcgtaccaaaagacatcttcttctcttcttgccatgtttccatgatgattttccatccaagaaaactatttcacccgtaccttggctcaagtgattctaccatggggatggggaggagaacaaattatagttcaataccttcgcctcttcactcaccaatcccactttcatcaattccgtgggttccttccctcattcatggagatcacatgcatctaaaccttgcacctatcgttataattgtcttagctggcacaacttgcataattatgtttctcatcaccttgttcaaaatcctaaggtactattatccaaatagatacaacgttagcagaagcgacccaccaatattatttgacattcgtggagattttcccctttctgatgatgaggaacgtgaa

SEQ ID NO: 130037 - DNA, 450 bp, Glycine max
  Clone ID: PAT_MRT3847_88432C.1
aagcaaaaaaaaaaagcaggggaataggggacaaacccaaaaattggggggggattggcacaaaatccacaaaaccttgaaaactaacagcaatcaaaggggggcgccatttggaatttgaaaacaaaaaccgggcatcgaaaaaaaaaccctatggacagagccaatggctgactgaaatttgaaacaaaacattatctattttggatcaaaaaaaaaggggaaaaatctttatgttacgggccacattatgggaaaaagggggaagggcacccagcgggggctttaacccttcggcttcccttttacttaaaaaaggggccctttgggacggtcacatttccttaaactggttaagcactggggaccttggttttacctccgaagggccaagggggtttcgctggagcaccccttaatgccttcactccaaaggggttgtttttgctc

SEQ ID NO: 130038 - DNA, 312 bp, Glycine max
  unsure (1)..(312): unsure at all n locations
  Clone ID: PAT_MRT3847_88433C.1
aactcgaattgcggctcgagttccttaactacctaaattattcacttcaattcctctttatcattaccgtttcttactccaaaacctgcaacctttaaaataataatccttgttcccctaataattanntttnaaaccacatcttttatcattttttttttcaaacaaaaaaatttttattaagctttttttatacttattttctttaaaatcaaactattttccatttttttccaccttttatattttccccaaaacatatattttttttacacaactttacacaaattttcaaaaatatattttacttta

SEQ ID NO: 130039 - DNA, 156 bp, Glycine max
  Clone ID: PAT_MRT3847_88434C.1
gagaagcaaggacctaggttctttcgttgctccaagtttggtagcatggcaaggccgtgcgcaccatatatttcctgttcggatgaacactgtctatcgtgcacgtactcccgacgaggaatgcgcacgacggaagcttgctgtggaagaacacaa

SEQ ID NO: 130040 - DNA, 1073 bp, Glycine max
  Clone ID: PAT_MRT3847_88435C.1
ctcatacctagctattcctacctaaacgaaactctgtatgacattgattgcgtggcgaggattttaggttattttttggaagaagaacgaaacgttgctgcaatcgacggccgcgctccgagatcgccggggctgatgctcgttggaaaactcatcgatggttatctctcggagatcgctaccgatgcgaatttgaagccgtcgaaattctacgatctagccatctcagttcctgatcgagcgagactgttccacgatggtctctatcgtgccgttgatgtctacctcaaggcgcatccgtgggtttcgaaatcggatagggagaagatttgtgcagtgttagactgccagaaactgacgttggaggcgtgctcgcacgccgcgcagaatgaaagactttcactgcgagcgggggttcgggtgctcttcttcgagcagcttcaactgcgacacgccatcgccggaacgcttgtggcggcggaggcagccgcggagcctgggcggcagtcggcggcgctggaacgggaagcggagggcggcggacgagaaggattagggttagacttagagcacgtgcaggaacggaacggcacgtggcgcgtgccggtgagggagaatcaggtgctgcgcttggacatggatagcatgaggacgcgagtgcatcaactggaacgcgagtgttcctctatgaagagagtcatcgccaagtttgacaagtccgacggcggcgccgccggtggttggagggcgtcgctgggccggaaattcggttgcaagtttaagactcaggtttgtgattcgcacgagtcaacggctgttgatacccgcaaaggacgccatcaccagcagcagcagccgcagcagcagcagcatccccatcatgtatagtcaccatcctaaacttcctcccctcacgtgagaatcattgttggagtaaatttcatacgggtcccacttgtaattgttcattttttttttctttaattttccataattttaatttcaattgattaatagtataataactttactttctcgaattattcggtatatgaaaatatgagatgagcttg

SEQ ID NO: 130041 - DNA, 533 bp, Glycine max
  Clone ID: PAT_MRT3847_88436C.1
attcatgtcactattagagatagttggattggttgaaatagttaagatgatggttatattagttagtctcctcctcccagtatataaaccaaaatatagctcattttgtaatttgtactccatttcattatcgcaaattctctttactttctctctattttgggctctgccgtgtttttcaactttgtattagagattcccatggtatcaaccatgaggagagagttctcttttgctgcatagagatcccgtgagcacattttcttcgtgctttcctcactttctcagctctgctcacttccctttctgtattaataattcttttttactttctctctaatttgggctctattatgcttctcaagagtcatgattgttttatgcagcttttagtttatgctttagcccataaaaaaaatgactatgctttttaattaatctgtattgatgtctaggatctatttactattggccttggctggatgatttttggtgggctaccatttgattttgtgagtattcttgtccttgct

SEQ ID NO: 130042 - DNA, 523 bp, Glycine max
  Clone ID: PAT_MRT3847_88437C.1
gtcacctggttgcagcccgctggataacgagcgggtccactgagcctctaacaactacgtgcagcggagcacaggtggctactcccgcaccgctgcccacgattcttactaattggtgaggcgttcgggcataaacgtgatgtctttacataacctgtcttctggcccgggtaacctgaactacccggagcgcagggattcgcggtcgcgatcaaccccgccttccaacacattacggttaaaaccgaggcgggagccgaactttattaattaaccgcggatgtaatgcaaagggtactctactaacaccgtgcggcttcaccactcactgccaaccaacggcccgccttgtacccggtgtaaggtagatgcccgcaagcaccatgtcatggataaagaggggcaccgtaggtgccgccagcggctttatactctgcggacaaagcagttaacaagtaatgcctgtgctaatttacgttagaaatatacccaatgctcgccttgtatggtgctgcccaaaacg

SEQ ID NO: 130043 - DNA, 454 bp, Glycine max
  unsure (1)..(454): unsure at all n locations
  Clone ID: PAT_MRT3847_88438C.1
aattaaccttatctcctagagcgggcgctannnatattttttttttttttttttttttacagagtagaatatatccatatgatcactcaccaaaccaaaacttcccatcaacctaatatatgggcattttacaagagaccgtgacagtaaccaccataaatatattaaagagttcctactagtgtctactgtggtaaaaccggaactcgaaaaagggacaacccacaattttatctaaatcagaaatcagcaagagataaaaatcatattctaaacaaaaggtatgagttctcaattttagatctaggtgtgaataaattctcctttttaactaggcttgagcagttgtagcaacagcttgttgaattctccgttgatgaacatcccaattatacacacgagcaattgtaacctgagtaattgtcacttggtccctcaagaattgtagatctgc

SEQ ID NO: 130044 - DNA, 385 bp, Glycine max
  unsure (1)..(385): unsure at all n locations
  Clone ID: PAT_MRT3847_88439C.1
acacctcacacagtgccacctccaaccttcttcttctctgttccgacaacagcagcacctgcttctacggtgatggtttgaaatgtgatggggcagatgtntctaactccataatctctcaccatgagggtggtggatgatcggagttgttgctggcatgtttcgcggcgcaaagagacgaaactgcgatggctatggtggtgagagaaaaagagcatttgccgagggatgattacttgatgagcctgacgattgcaggattgtacttagacttgttgtttgttagacatgacgctcttgataggattatcaaggctcattcttatcttgcatttggacccctgagtttttttttaacttgtaactacttggatcgcttactatc

SEQ ID NO: 130045 - DNA, 821 bp, Glycine max
  Clone ID: PAT_MRT3847_8843C.1
taatccgcaacaaaacctaaaaccctctctcatttccaatcccctaaaccctaacctctcctcaatgggtagaaacgaagccgccatttccttcctcaccaacgtcgcccgcactgccttcggcctgggcgcagcggccaccgccgtctcctcttccctctacaccgtcgacggcggccagcgcgccgtcctcttcgaccgcttccgcggcatcctggactccaccgtcggcgaagggacccacttcctcatcccctgggtccagaaaccctacatcttcgacatccgcactcgtccccacaccttctcctccgtctccggtaccaaggacctccagatggttaacctaaccctccgcgtcctctcccgccccgacaccgagaagctccccaccatcgtccagaacctcggcctcgaatacgatgaaaaggtcctcccttccatcggcaacgaggtcctcaaggccgtcgtcgcgcagttcaacgccgatcagctgctcacggagcggtcacaggtctccgccctcgtccgtgacagcctcattcgtcgcgccaaagacttcaacatcgttctcgatgacgtcgcgattactcacctctcctacggcggggaattctcccgcgcagtggagcagaagcaggtggcgcagcaggaggcggagagatcgaagtttgtggtgatgaaggccgagcaggagcggagggccgccattattagggctgagggtgagagcgatgcggccaagctgatctcggacgccactgcctcggccgggatggggctgatcgagctaaggaggattgaggcgtccagggaggtgg

SEQ ID NO: 130046 - DNA, 501 bp, Glycine max
  Clone ID: PAT_MRT3847_88440C.1
agcgtcgggaatatgcgattcattctgtactaaaagtacctagaacagattgctattaggtttggaatatatgctatcatgttgcaaattggctatattctttgtgacataatatgctatcatcaatcagacattatcttgtaacagaaaatgtttacttagaaaacattattctcctcctataagaacagtaggtaacattattctctgttatcctgaacttgtttcttcagaatccaaaagtgaaaggaaattttggccttctgttttgtctgtgtttttatcaaggtcgaagtcgttttcttttggataggctacgcttaccatttgtgtttaattttcaatgttactttaataaagagtgctctcatcaggaatttactaaacgagactatacgcatgtttagaagcacgatttacaacccacaacaattcacatcccagatgtgaaaaatctcaaaagctacagctagtagtgtttatcggatgtgaaaaatcatg

SEQ ID NO: 130047 - DNA, 435 bp, Glycine max
  Clone ID: PAT_MRT3847_88441C.1
aaagggcccaaaaacctgggaaaattcaaaaaaaaatcacaaaagggggaacatttaacaacaaacaaacaaacagggggttggaatttttttttaggacccggggaaaaaaacaaaaaacaacgggcctaggaaaaaggaaaaaaaaacctttttcaggcgggttcttgaaaaaaaacaaggccctgccccaattaaggggggaaaagggaaggccccttcaaatttcaacaattcctggggaaatggggaaagaaaaattcatcaagggccttctggggcggggggttcaggccggaaaccaaccaatgggtggaaaagccccccggattggccccacaccccttaaggggcccccatttaaacaaccctgccatttagaaaccctgcaagggggggggcatcgcgaacgggggaaaaccgggggccccccaa

SEQ ID NO: 130048 - DNA, 325 bp, Glycine max
  Clone ID: PAT_MRT3847_88442C.1
caccaaacacagggggtggtttccttgacaaaacctaaaagtttccatttaattttttttggtttttgaatgaaaaaggaataaaacagtttgtgcaattacaactttcttaagcaacttggccaaactaaattacatgaaacagaatggtcccaaacccttgttgaatgagtaaacttacgggaaaaacaggtttaaaggggaacaaactgttgttcgcattgcaacataaaattgggggggaactttttactggaatcagaaggggtttttttttaccactcaacatgctggaaattaagctacaaaaagaatttagcaaaag

SEQ ID NO: 130049 - DNA, 299 bp, Glycine max
  Clone ID: PAT_MRT3847_88443C.1
gatttattttttttatgattggacatgtatagaacaaaaaaagggaggaccttgttggctttaattaaatattagtatgaacaaatgtatattgtgtggggaaaaaatattaatatacataaccaaacattactaattagggtatcttgtaaggacacatagtagataataatagaaattaggagggtagttacatgtatatgatgggtttaatggtatagataattttgataggatggaagtttatgatatatataggataaaacattgtgtattttaaagataaagggaataatatt

SEQ ID NO: 130050 - DNA, 502 bp, Glycine max
  Clone ID: PAT_MRT3847_88444C.1
aacgacgatctcggactcattcaccgttggatcgtcatgaaatttgagcaccaagtttggaactcatttccgaacattctcactattgagaattacgaacacatgtcagagttgagagaaataccctttgcatcgtagattttccttttcccacagaaatccaaaattgtctcaataaaactacgatcccggactcgttaaccattggattgtcgtgaaattttgatatgtggttcgcgattcatttccgcacacctgcatagttgggatttgcaaaataatgtccgtggaaggagaaatactcatcgcacgtagacaatggaatagaggcttcaatctcttctccttctccctaacgtttgagaactctatcagagcagtcagaggaaaaacttgaggaatctcaggaaaccgttagagatgccgctatagctgtcacaatacacacatgagcccgtttagaggtaagagatgagtttatcgcaattggggttagagtgaa

SEQ ID NO: 130051 - DNA, 257 bp, Glycine max
  Clone ID: PAT_MRT3847_88445C.1
gctgctgcgcgtgccggtaccgggatcggccagggtccggcctcggcccaccgcgatttcctatcaagggctcaagtccgactccgattccgaatccgacttacaacgcttatcatgcttcgttgaacgaacgaagcaatgattgcgcgccttgtaatgcttgcaatgaatccaagttcatggaggaggatggctacactgttgttaccagtaggcgtaagggccggtcatttcctgagctgggcgtaacctgctgg

SEQ ID NO: 130052 - DNA, 587 bp, Glycine max
  Clone ID: PAT_MRT3847_88446C.1
tccaaggagaggtttcccagtcatcacgtgtatgacagtcctccattctatgggggggggtggggggtggggtggggagggggaggggtggggtgggaggggtggagggtgggtgggggtgggagggtgggagggggaggggtgggagagggtggagaggggtggtgtgggaggccgcccctatgagggataattaataaaattgggtaaatagattaataaaataaaaccgcggggaaaatttattcccggctgaaaatataaaaagatttataaaggtagcaaaaaaaataagccgtttattttttagaccctgatgccgaaaataaagggagtttaaataatatggtggggggtgttgtcccttatgaggggggggtttttaaattttaataccttcgccttttttgtaaaacccgaaaacccccaaattttttttaaaccccgctaaaggagttttatttggaaaatccgcatttggtttgggaaaaatattggtgataataccatattccccaattggggtattagattttggccggcaaaaaaaaaaaagttttttttggggggaaaaaaaagcaaaatgg

SEQ ID NO: 130053 - DNA, 412 bp, Glycine max
  Clone ID: PAT_MRT3847_88447C.1
gcctcgtgccgaatcaaaccaacgttatcgccatgagttcgcaatcctcaactggttccagcgttaagttagccaagctatgatctctgccccttatccattggtactctcacccactgctctaccctatcttgatgcctcaactcagaatatgaccatcctcttcaatggaagttgaccgtcaacaatcctgactttggtcaacaatgtattactaatccatggtatcaattcttggaaaataatgacttcgaccctagggatgagatatccttctacttcaggacttatcaaagagtatgagaattagttatcagaaaacagtagcattgggatgatattgactctgattagaaatcattgacaagctgttgggtttccattcaaaaaaaaaaaaaaaaaaaaaaaaaaa

SEQ ID NO: 130054 - DNA, 171 bp, Glycine max
  Clone ID: PAT_MRT3847_88448C.1
atagcgttatttatttagttagacagaacagagccttagttattcttctcatatagtgcgtttgcaatggatttatggtcagaaaaaatcaagtagttatttatactttttcatgatatcaccattattttgtgaactagaattgattgtgttatgatatggtgatttgca

SEQ ID NO: 130055 - DNA, 444 bp, Glycine max
  Clone ID: PAT_MRT3847_88449C.1
agaagtactagtagggagagtagattgcatggtttttagctgtacgagaagacgtagagagagaccaagaagaacatttgaggagattattaagagggatctcatagtgagtaatatccttgagaatttggtttttaatcaagtccaatgatgtcatgcaatccaagtagctaacctcatctagtgagatgaaatttttgttattggttggaatgttggacacgtaaatgttgaatgcagtgcttaatgtatcttcctattttccacacgtagtgatttagtgcagcttatatagccacccctttggggtaattcttatttgctgacctttgggggcctcagtaggtatgatagatagattagataaatttgaatactatgaggtaatcatggcccacatatgagtcatgacaattttttttatgatttatgtttcttttgggg

SEQ ID NO: 130056 - DNA, 313 bp, Glycine max
  Clone ID: PAT_MRT3847_8844C.1
aggaaccaaagacatgcttctgctgaatccggctaccctcactctgaaccttgattctgttggggggatcgtcacatatttgatgcccaaaatctctcacatcacggccatcaggtccatcgtggccaccacctgtcgcgaccagcccactaccgattccattcccgttctcgaaggccagaggaatatgacaaacgattgctcccttcttgacgaatttgatatgcctgtaattactacaccccccaggggtacgcctaacattgaactgaccttactacatgatctcaactgattcttctatgtgaaagcg

SEQ ID NO: 130057 - DNA, 373 bp, Glycine max
  Clone ID: PAT_MRT3847_88450C.1
cttcttcattcttgtgtttctttgtttgtgagggaaagtttttttttttttttttgttgctattgcaatggagaaaaactggtgtttgagatggatttttgtggtggggttgatgtgtttgagtgtggaagggattggtgtgaattggggaactcaagcaacccacaagttgccaccagacacagtggttcatatgttgaaggataatgggattaagaaagtgaagctgtttgattcagatgactccaccatgagtgctttggctgggactgggattgaagtcatggtggctatccctaataatcagcttgctgagatgaatgactatggcaaggccaaacaatgggtcaagaaaaatgtcacacgttacaac

SEQ ID NO: 130058 - DNA, 417 bp, Glycine max
  Clone ID: PAT_MRT3847_88451C.1
gctttaaattcacagaacgcttttgtgataaatagggggatggggaaactgactttcccacaaggtacttaccaaagggtaaaaagaaggcctgtctctatagggggaggagctggggcagagaatgctatcatgatgaatctggcaactgctgctgtttcaatggggacatatccagctggagatcaggcttctgaagtttataagaagagctgtgcctacatcaaacgctcagtctgtgtcttcataggaaaccggaaattctggctgatgacaccatcagatgatgaggctgttacccacaagagtggccgcggaaaggagagactcaagaaagagtcgtattgagagtcacacatgaggaatatattacagatgggacaacttaggtgcatgctgcagcaactgtagaaagtg

SEQ ID NO: 130059 - DNA, 286 bp, Glycine max
  Clone ID: PAT_MRT3847_88452C.1
gagagacaacgtgaatggagcggtggatcctacttcatcacaatccattgaaatttctggcctcggataccaaactggggatgatacacaatacaaggacatcaatgaatggtgctcttgttgctatgactgtacacacggtctattctatttcttgaactgcaacttttcgttgaagcctctacacttaatttgagagatactacttattaccataaatatttaaacacctttctacatatgttttttcataagttttataccgatcccctttattaccataaaa

SEQ ID NO: 130060 - DNA, 384 bp, Glycine max
  Clone ID: PAT_MRT3847_88453C.1
ctatcccacgctctaccattacctatcaccttcacagctcatctcaggatagcatccacagactctccagcaatcacagactaccctacaatggctcctcctccaccttcaaacctccctcttcaggagcgcgtgctccagctcgtgcagacattgcagttcgcatggttcgccggccatgtcactctcctgctgtcctcggtccgttacgctctgtcgtacctgaccttccacgcaaactcaaagtgggccatcttctcgtaccgcaccgctttcgttgctgccgctgccacgtacggcattgtcgtctttaagagcttccgcgcccgtgcccgtgccggcaaggctactggcggtcccctccagatcgttggcgacgagaac

SEQ ID NO: 130061 - DNA, 488 bp, Glycine max
  Clone ID: PAT_MRT3847_88454C.1
gaaaaaatgagactgttcgatccatggcctgtattcttcaagcgagaatggaagcgtaactggcccttcttggttggattcgccgtcaccggaactctcatcaccaaactttctcttggtctctctgctaacgtccttctcctcctccttcttcgccaacctccaaaattggatttttgttctgagtctgatttcccttttcgcagaggaggaagccacaaagtcaaaattcgtccaggcacacaagaggtgactttggaatggaagatttgcagtgactttgcacattgtattagatgtgtgaagagagctttgcttgtaataaatgaagagagatgttgtatacactccatgttcctattaccattttagttgtttactttaatgtgattgagaaattcatactaagcagttctgaatcgatggattcacattaagattactttaatctgataaataatggggacttgggattttgattttgcaat

SEQ ID NO: 130062 - DNA, 974 bp, Glycine max
  Clone ID: PAT_MRT3847_88455C.1
attccaccacgcgtccgcccctctctctcccctttcacttcacaccagtgctcattttcacttccccatactctcccttttaccattctacctgcgttaaacccccctagaatctcccgccacttttcactatcttatgatataccttcccctgttcagcttcttctagagtaccctcatactacattatttttttctcacttttcttccatacccatttcccataattctattttatcctcgaatgtatcaatagttcctcgatcagactcatttgttcactaaatttctcttcttttcttcttttttttttttttggggggggggggggggggtggcggctcgaagcgtaactgtcccatcgtattggatctgggagttgagttgagaaggaaaggctgaagaacacatagagagagagagagaagtgcagaaaaaatgagactgttcgatccatggcctgttttcttcaagagagaatggaagcggaattggcccttcttggttggattcgccatcaccggaactctcatcaccaaactttcccttggtctctctgaggaggaagccaaaaagtcgaaattcgtccaggcacacaagaggtgactttagaatggaagatttgcagtggctttgcacattgtattagatgtgtgaagagagcttttgtttgtaataaatgaagagagatgttgtatacactccatgttcctatttccattttggttgtttactttaatgtgattgagaaattcatactaagcagttctgaatcgatggattcacattatgattactttaatctgataattaatggggacttgggattttgtttttgcaataatgccaaattgctaaaaaaaaaaaaacgaagtaaatcatgtaaatttttttttttaacttttttttttttttttttggggggaaaagggttatagatttgctttttttttgcacatgggggtgtattaaat

SEQ ID NO: 130063 - DNA, 342 bp, Glycine max
  Clone ID: PAT_MRT3847_88456C.1
aaagaaccagccgaaagtccaccttttattccaatattattcacccattcctaattccattttgggtttaaccatgggggccacattttaaaggggccaaaaacccttataaacttccttgggttttccttgcatataaacctgaatattttccttccttcacttaatttgaaaaagcccttcaagtaaaataaaccggccatttcttccaagaccaaccttaaaaactggttgaaccaccatagccccagcttcaatttcccaagcttagggtggttcttgttccccgttccaaaacaccctttttcaaggaaaagtaaattattccttgcccaacctttg

SEQ ID NO: 130064 - DNA, 243 bp, Glycine max
  Clone ID: PAT_MRT3847_88457C.1
tatggtttctttagaccacaaaatggttctgcttctataatacaacataaaggttcttgtgtcagaatacgaaacaacggtactgcttttataacaccacttaaaggcattactacttgatttgttaaatgttgacttttactaccctttaatgccaaagtttattatccttcgccattttttcttgaatgtgccttgtttcaagaccattttttttttttgaaacaattttttttgtcaaat

SEQ ID NO: 130065 - DNA, 1032 bp, Glycine max
  Clone ID: PAT_MRT3847_88458C.1
atgatgcgaagccagcatcgactactactaggaatatcccacttcaaattcctcaacaaagacaatgtgagccaaactttgcacttctccactctgttacctccttttcttcaaccacatgattctccaatccttatacaaaggaaaattggtcgtgaattgggcaagttattgcaattgccatccccaaacattctcacttctcattactataagaaaatccatgcccacattgtggtgttgggttttcaccaacatgatgtcttccttgttaacactctcttgcacgcatactcaaaaatgaaccttcaaagtgatgcacagaagctgttcgatactatgcctcataggaacctagttacttggtcctccatggtttctatgtacactcaacatggttacagtgtggaagcactgttgttgttctgccggttcatgcgaagttgcagatgtatatgtggggtacgtcctttgattgacatgtatgccaaatgtgattccttgactaatgcaagaaaagtctttgaccttgtggctgctataaatgtagtatcctataatgcaatgatagaaggatactcaagacaagacaagctggttgaagcattggatctttttcgtgaaatgcggctaagtttatcgccaccaactctattaacatttgtaagccttcttgggctatcttcatcattatttcttctggaactaagcagccaaatccactgcctgattattaaatttggggtttctttagacagttttgctggaagtgctctaatagatgtttattcaaaatgctcatgtgttggggatgcaagactagtttttgaggagatatatgacagagacattgtagtatggaatgcgatgttttctggttacagccaacaactggaaaatgaggagtctctcaaactttacaaagatcttcaaatgtcaaggctaaaacccaacgaattcacttttgctgctgtaatcgcagcagcaagtaacatagcaagtctgcgacatggtcagcagtttcacaaccag

SEQ ID NO: 130066 - DNA, 421 bp, Glycine max
  Clone ID: PAT_MRT3847_88459C.1
gcgcgtttttgtttttttttgtttttttttttttagggaaggggggatatcatcgaaatcaaatagaaaaacatgggaaagaatgaggggataataaggtattttaagaatttctattttcctttgtgtttggggaacaatagagaaaataatttatgaatttaagtgaaggagtcagaaataggcaataatttacaatatttttttatttagatcttattttgggtctcaggctccggtacgagtgcttggggtgatcatcttcagtaaataaaaagatccttcctttgtgtcggatgagcctctcccttcaatttagggtcttcagtgggggtttctaccaaatttacacctcaaaaaatttggggcgccttaaaatcggtaaaaaaaatgcgttggagcaacaagtattatgtgaggg

SEQ ID NO: 130067 - DNA, 341 bp, Glycine max
  Clone ID: PAT_MRT3847_8845C.1
gggaagcaaaaaaaaggggcaaagcttgttacaacgctgcctgctccccccggaaaaccctggctgtttaggccttgatctttttttggccctcgaaggcccttttttcctcgaacggttggggccttccgggaccgaacttggacgacgtgtcaatgaacttgggggtgatctttttgagcgccccccccgacgtgtgcttaatgagccacttgcggagcgtgaccacccccttgacaacccccgggcacgagcccttgatcatgacccaatcgtttttgaccatgccgtaacggacaaaaccccccatcggggggatggccttgttggtgatgtcaaac

SEQ ID NO: 130068 - DNA, 508 bp, Glycine max
  Clone ID: PAT_MRT3847_88460C.1
aaaaaaaaaaaaactaaatttcaaatttcttttttttgatccctaaatgggggcaaaccttactttaaatgaaaatcatacccgggggaaacatttaattttttagggaatataaaataaaactaaataacataataaagggataatttcataaatttgcaaaacgacccagcaaaaacaaggggtaactaacagcatttccttaatgctaccgagtcatttataaatgtgtgtgggataaaacaaccttgcccacaaaaaaaggcaaacaaaatgcaccaccatggttctttgggttaaaaaacttaaaaggcccctttgcccccccatttttttttggattcaatttatttatgggatgttggaagttcactgggggcccctccgtaaagcaaagcatgaatccaacccccccatttgcttatgtagaaaccgtggcccaagcatatttaacggaccctttgaatatcttcttgcaatttgctagtggggtctgcaaccacaaaat

SEQ ID NO: 130069 - DNA, 278 bp, Glycine max
  Clone ID: PAT_MRT3847_88461C.1
gggctaaatagcatgaaaaagaactataaggactgggggttttaccacactaccacgtttatctcctactttggaaagtactgtttaactattcgagccattatttgtcatatcaagctttcattatctgatggggcgagaaaaatagacaagatctattttgtgcaaagaaggcttgatcatctagaatctatcactaaaaaaattaattaacatttaatctaatgagtattttttgagatggacatcaactttccttgttctaattgataaattca

SEQ ID NO: 130070 - DNA, 398 bp, Glycine max
  Clone ID: PAT_MRT3847_88462C.1
gctcagcatgatgtttcaaaatcattggcagatttagatggtggatctattccacaagattacaacaaaattaacagcactactacttcacgtgaaaatctagcagaaaatccacctcttcctgcattagttgcattccctccaaagatgggaaccttcaaccaaatggacagtggctgtaatatagctgctcaaacgtcaacagagtcaccttccaacacaatctttgatgattgggagaagttgcttgacgatgaaaacagcggtttccaatgggaaagagattctagacttgacatccacttctgcgtcaccaattttgtggtagaagaatcatcggttctctttcaggataatcccatcaacttatggatatagatcacgtaccaaagaaatgc

SEQ ID NO: 130071 - DNA, 957 bp, Glycine max
  Clone ID: PAT_MRT3847_88463C.1
gctgtcttggtcagcatagccggggttgtgatgacaactctggggaaaacatgggctgcagatgacgcgatatcaagtgcttccaatggacaacgctctcttgttggagatctttttggccttctctctgccatgtcatatggtctatttacagtgcttctcaaaaaaatttctggtgaagaaggagaacgagttgatgtgcaaaagttgtttggatatgttggattgtttacacttgtagcactatggtggcttatttggccattgtcagccttaggaattgaaccgaagtttacaattccccattcagccagagtggacgaagtggttcttgccaacggatttggcactttgtgttgtatggacaactccccttgtggccactttgggcatgtcacttaccattcctcttgctatgatggctgacatggtgatccatggtcggcattattcggcattgtacattcttggctcaatccaggtatttgcaggctttgtgatagctaatatttcagataggccaaccaagaagcagggattatagcacattgtttcctatactgattctttctttggttggttatctttccacaatactcacactgagtgagagtcaactgttgaaaaaatcaatgcctggttttgtaattttcaaggaaagcaacaagagtgtgctttccatcttgtattgttctgtgtatattgttctagagtgagaattttgttgtaaattttaagtgtccaagatgagcttgtggtcatggatgtaaagaagcatttttacatacatagtggctacgtaaagtaaatgccttctagaagaaattcaggatttcattaaaactttaaagtaattggaaacaatttaatcttgtttcctcttcgattataaaaacaacttgtacataaatacttacaaaataaatatatatttaatatgcacttaattgtttatcc

SEQ ID NO: 130072 - DNA, 369 bp, Glycine max
  Clone ID: PAT_MRT3847_88464C.1
gggaggaacaaaaggatttggatttcacattaaaaacatggccaaactaaaaaggccagtttggccaagcttatcccaaaaacggccaaaaacctatattttttttgcaaaaaaaaaattctacaggggggaaacaaccccggggcattttacaacaaaaacttatgggatcaccaggcccccaatctaaaaatttaatcgggggggaccccagggaaaaggaaattaatcccccacgaaactgggttcggaaccgcccgggggctgggtgggaaaaaacagggccctagggaaaccttacgggtaccaaaaagagggggggggataatggacaaggaaacccggggcccccaaaaaagaggggccttt

SEQ ID NO: 130073 - DNA, 522 bp, Glycine max
  Clone ID: PAT_MRT3847_88465C.1
ggcttgaccaaatttctatctgctccagacggcaacatggaatagtttccagatgtgaatagtaactatcttaataaggactgctaatattgggcttgacctgccggaggatcggccatcctagacactcgtggttctgggcttgcggcatgggcctcatgatacaacttcaggctctaggggcctttttacacgggagccgatgcctctggctttacgtatcatgccgatagtgtgccttcccaacccggaggccgaaagcttgaaactagccctcatacccctttgcatagttcataacgtcctgctatacgctccttccttatgcacaaactccttcatgaggcaaggttagatgtaacaggaagtatcggatagctgctgtactttgtggtgcggggcagaggctaataccattcaaacccttcgactagtttttgtctttgcccgctcccacagactccacaccttccgctaacctgacctgttctctgacacttaccacctgaagattctgtgcat

SEQ ID NO: 130074 - DNA, 1007 bp, Glycine max
  Clone ID: PAT_MRT3847_88466C.1
gcgaccgtttatagacaatcctgcaaaggcatcatggacaaggcattgtgcttggacaagatatccggaattttactaacaatctatcgtatcggctcgagattgagaccgataagcccaatgggattggtgagctgttggagatttttgggagcgtgattactgggtttgctttgcccttgaaagaggaacacaaaatcttcttgtggagggttttggtccccttgcacaagccgaaatctattggggcctactttcagcaattgtcctactgtgttatgcagtttatagagaaggagccaaagttagcgagcattgtgataaggggattgttgaaatattggccagcaacaaatagccagaaagaggtgatgtttctgggtgaactggaagaaattttggaagttattaacatggtagagttccagaggatcatggtcccattgttttggcggattgggtgctgcattaacagtttacactttcaggtagctgaaagagctcttttcttatggaacaatgaccacatcgtcaacttgattgcgcataaccgacaagtgatcctgcccatcatatttccagctttagacaggaatgttcaaagccattggaaccctgctgtcgtcaacctaactcacaatattagaaagatgttcttggagatggatgagaagctcttcatttcttgtcataatcactttaaggaggaagaagcaatcttgatctcaacagcggagaagcggaaggaggcatggaaacaactagagcatgcagccagtctcaggcccgtaattggaaatactgcagttttagtgtcctgacttgcattgcgggctggatcctcaatccttgttaacctcatgttatggtggaaaatctcaagatatgtggaatagctggttattgggagtggcattttgtatttgaatcctatgttcttagccttaattgcaaaaatattcctacctattttttctcatacttcaaagaaaacacaaaaaagaaga

SEQ ID NO: 130075 - DNA, 367 bp, Glycine max
  Clone ID: PAT_MRT3847_88467C.1
gccaataagtcactattcatatgaggtatcgatcattcattaacaagtgacatgtgtgttaaacaatacaccttaatgctagcagccaggctagcgccgatccactgtcatgcacaccacacactcaaaccgagatgctgtacggaacccccttatctgggcaccctgctccgatgaaggcttgaagaagtcatagggcacaataccgggaccgatccagctcctactggccctatccgaattcctggcgtcaataatgactatgcgctcaatgaactaccctctaaactcgtcaaacgcggacttaacaaggggtttctgctggcacgccgggtacacagtcctcctgagatacttctggtccggc

SEQ ID NO: 130076 - DNA, 388 bp, Glycine max
  Clone ID: PAT_MRT3847_88468C.1
ggcagcaatatccgcccggagcgaattttgcaggaccccataccggcgcctctacaggcctataaagaccgatcatcgacactcactcgtcactacacgtcaccaacgacaaaccgacaacccaaaatgtacgccaagtccatcatcgccgacgccgccctcgcgggtgccgtctttgccgaccctgttggcgagaagcagccccccaagggctggtggaccgagggtctcgagccctacatgacctaccacacccggtacctcgccctcgagtgctacaaccagcacaactcgcagttctttgaccagtgctgcagccccctcttgaagggtgtctcgctcgactcgcgccccgctcagtgcacttcctctgacgaggccactttgt

SEQ ID NO: 130077 - DNA, 201 bp, Glycine max
  Clone ID: PAT_MRT3847_88469C.1
ggagattctgatttgttctctcagatctgagcttaccgtagccggaatccaactcaagctagtgcggatacttgagtatgatcgcatcgacattcagtataacctctcaataagagattttacatcacttcaaatacgagcgacgacttgaagttcaaagtttgaatatcttaaccggtgtgtataacaaccaacacacac

SEQ ID NO: 130078 - DNA, 166 bp, Glycine max
  Clone ID: PAT_MRT3847_8846C.1
cacacgcgtccgaggatgagagaagacagccgacggtgagcgccacactacaatcgttgccgtcacgcgatgtttgactgcgccgactgcgatctccaacaataccgacccagatatgcaatatgagaaagatcgcttctggtgaaccgttcttcattaaactgaa

SEQ ID NO: 130079 - DNA, 317 bp, Glycine max
  Clone ID: PAT_MRT3847_88470C.1
ttatatttaaacacacttttttgcacattatgtaattgcgcctctatttcaagggaataaaagtactactatacatagttcacagaatgccaagaggacacttcatcaaccttgatattatgagacctcttacagtttcttaaaaagccgcggtcaagcataaggattatgtggctgtgagaactcaataatttcatttcttacggaccaaaagaacatgcctgtagaagctacctggaaaaggatcaactgctagcaagaaaaacaatttttcttactctttgccaagtgcgtgcgcggaatctcttttcgttgat

SEQ ID NO: 130080 - DNA, 576 bp, Glycine max
  Clone ID: PAT_MRT3847_88471C.1
ttcccgggcttggtcctctaaaccattttatgctcccaaggttctctgtgctagttctatacaccatgaaccttgaaaattgtcactgtctaagcaccataagaagcaatagcagtttgagttggtcaagttatgagagaattggctacgatcccattgtgtgtgtcaacaaatttgtgatcagattgaagatgggaagctggaaagcattgtggaggaagatcaagagacaaagaaggagattctttagaccttcacctgtgtttcatgtccagtatgatcctacctcctacttacagaacttcgatgatggctattccaccgacccggataatgtttctcggtctttctcagctcgatttgcagcaccctccaagatctttgggaaaattgaagtgatggatgatggagaattggagataagtcataagagtaacatggtgtaattttgagttcctttggactcattttcatttttttttcgatgaattatgatgcattgtacaaatgttgagacatctagttattagttaatctctttcactattagatgctatagaacttaagttctatctg

SEQ ID NO: 130081 - DNA, 181 bp, Glycine max
  Clone ID: PAT_MRT3847_88472C.1
cggccgaatcccggtcgcccacgctccgacggctggagagaccaagaggggcagctgctatttacgacccaagggaaagggttgcagaggcgcttcctgctaaccatacatttcgctgtggtctatcttgactattaaacattatagcggccgattaggggatatctactagtaccgtgca

SEQ ID NO: 130082 - DNA, 377 bp, Glycine max
  Clone ID: PAT_MRT3847_88473C.1
cgcgtacgcacacgaccgagaggacgactgatagggaacgatagcgtgcgagcagcgccactcgcgtattgatgtatattggtatcagacatcacattgtagatagagttgaccacaaatctgatatgaggcacacgctgccacacactcatgactatgaccttcttcgtacgcgacgcagcgatacgcacagaggcaattaacctatatactgattacgagagtaagctgctgatcaaacaccagcccatgcaactgacgtctacgtgcaaccgcatgtgttgaagtcaactgtactatgagattgctgaggtacacaaagtgccatgactactatagatgctgctatcagatatgcacggatcataatatgtcta

SEQ ID NO: 130083 - DNA, 222 bp, Glycine max
  Clone ID: PAT_MRT3847_88474C.1
tgttttaggtgctgtgcgccatactcactgtgtcatcatcaaaaaatctgacaacaacagaatcttcatagattgtggggaacaaaaaagctaccataaaccatagtgttgaaattgaagaatatttttgagtttttctttccatgtgtgatgtactactgatgtggtgattgctgatctgggtgttgctcaaaatcaaaatcactttttgtgatgagggtt

SEQ ID NO: 130084 - DNA, 317 bp, Glycine max
  Clone ID: PAT_MRT3847_88475C.1
ggtttcaatgggatattatattgagactggactctgctttgttaaccttgagatctgagcatctatctctacgctagtatactatgatattggcccaatagctcgtgctacctatatttgcactttattgttaaactcacgagaagagctctcttggcgaatgcaatcatgcctgtgactgccaacgagcatagcccagatcctcagtctgaatatgctgtgaaatctgatgcatgtgaagggaagcccgatcatcaaatatgtgccactgcatgaagaggacctgaccctgatctgattgccattgcagaacgaat

SEQ ID NO: 130085 - DNA, 386 bp, Glycine max
  Clone ID: PAT_MRT3847_88476C.1
aattcagatgttattacgcaaattccaatggtaaaagcatacaatcttcatgcaggtgccactgttgttagaggacccgggtttacaggtggtgatatcctgagacgaacaagtaatgggatggtcgtaacactaagagtagatgcctctgcagtaaggaaccaacgatatcgcataagattccgttatgctgcaacatcaaatttctattttgtcgtaaggcgtgggaatcttggtgttaatggtcgagagatcatgaaaacaatgagtacaggcgaggaattaaaatctgcatcttttgttttgggagagtttattacgccttttaatttttttgaaaatcaggttccacttcaaatagaaatacaatcactttctcctggggg

SEQ ID NO: 130086 - DNA, 313 bp, Glycine max
  Clone ID: PAT_MRT3847_88477C.1
tctctacaaactacattaatcacctaacaacatacaaacacatacgggtaatatacaaatttttctaaacacctacttcatcttctcattccaattatacttaataaatcaaatatttctaacttctactcaatatcattcattaacccttcaccctcttccaccttacttacaatctctcccttctacttctccactctccatccattaaattatttcttctcactccactctttcactcacccctacaccctttactattccactctcctcattaatctcaacctcttccacttcctcattaactactcca

SEQ ID NO: 130087 - DNA, 279 bp, Glycine max
  Clone ID: PAT_MRT3847_88478C.1
aaaaattaaatgaaaaaattgagaaaagggacataaatgtcttcaataaaaaaaacaaaaatattatctaaataaggggttatttattattgttaaaataaaaataacaaatcctttcctccgctaaccataaatttcctcctctttccatgaatggacaagctaaaaaggtatcctgactcgtgaacataaaaactccctttgtatgccttaaccagatgaaagaaggggtaatcctttgggataaaaatttcctccccattccacccaaacaaatga

SEQ ID NO: 130088 - DNA, 460 bp, Glycine max
  Clone ID: PAT_MRT3847_88479C.1
gggaattccggggcggaccacaggcgtccgaacaacaaaaccttattaagaatttccccaaaataaccgcaaaacaaggggttcttcggggagggggtgggacccgaaaccttaatcggagcttccgccgttcttccggtggacaaaatcggattactttaaaggaagtttgggggggaacgcaaccgcttccgacagggacaacttttacagccgcttgaaatccttcaagcgccagttggggttaatggacatccaggaggagtccgggagggttgagcagaaaaatttaaggcccgggctgttccaaccgcaggaggaggtgaagcggttccagtcggggccgttcgtaattggccagttaatggaaatggttgaccagaacaccggattggtgggatccaccactggattcaatttctactttagggtctttattaccattaaccggagggttttt

SEQ ID NO: 130089 - DNA, 261 bp, Glycine max
  unsure (1)..(261): unsure at all n locations
  Clone ID: PAT_MRT3847_8847C.1
agtntctccgttctttcacgcgacttnngngattaaanaacnnntatccctttatcangccggaggaacganggagttgntgaccggaggnnggcgcttcntanttcgttttccggtacggtccgaggtctctcttcgctcttcagtnttctctctcccttttncggcactgtccgaggnggtctcacttntntctccctnttccgacgaggtcaccactgtttgtgcgttttcnggcgaagtactctccgtgattttngc

SEQ ID NO: 130090 - DNA, 680 bp, Glycine max
  Clone ID: PAT_MRT3847_88480C.1
cgtaagctcggaattcggctcgaggcgcaacccagctgttattgcagacaacgtaggagacaatgttggagatatcgctgggatgggttcagacttatttgggtcttatgcagaatcatcatgtgcagctttatttgtagcatccatatcatcgtttggaacaaatcatgatcacacagccatgtcatatcctctcatcataagctccatgggaattgtggtttgcttgattacgactctttttgcaactgatctgtttgaaattaaaaacgtgagccaaatagaaccatccttgaaaagacagcttcttatctcaactatattaatgactgctggtattgccatagtcagcttcactgccttaccatcagaatttaccctctataactttggagccaaaaaggttgtcaaaaactggcaccttttcttctgtgttgctattggcttatgggctggacttgcaattgggtacattacagagtactacactagcaatgcttacagcccagttcaagatgtggcagattcctgcagaactggagcttcaacaatgtgatttttggattggcactgggatataagtcagtcattattcccgtatttgctattgctattgctatttatgtaagcttcagcctggccgctatgtatggaattgctggtgctgcacttggaatgct

SEQ ID NO: 130091 - DNA, 127 bp, Glycine max
  unsure (1)..(127): unsure at all n locations
  Clone ID: PAT_MRT3847_88481C.1
tccgggtcgagcctccggagctggaactgnggggaatttatagagacttttgtgtgttaaccccctgtatacataaggaggggataacaccacaggaaacctgaacctactgaggcggacagcaggg

SEQ ID NO: 130092 - DNA, 426 bp, Glycine max
  unsure (1)..(426): unsure at all n locations
  Clone ID: PAT_MRT3847_88482C.1
tcggcaacggcctacgagnatgtgcgaggatggagcacggtggctatgcgacgccaaggcaccccgaactntcgagggatccaggcggagatcgctcgccgttgtggatctgcggtggctttctcggtgtatcgagatcgtgtacactactatntattctgctcaagagcccgcgggctctttcgaatctcantaatactcgaagcaaggtcaggatgatagaatgcgcgtttggtgtggaggtgatagatattagatcgctgttctgtccnnnctggaatttggtaggtggcattggcaccttgtcgttgtttgtaccatatctccgccatgggttcttggaagtgccgtgcacctcatannttcgcattcaaggtttctacgagccttttgttatcaaccgataatctgaattttcaatttctc

SEQ ID NO: 130093 - DNA, 201 bp, Glycine max
  Clone ID: PAT_MRT3847_88483C.1
tatcgacgttgcgctgcgaggtgtggaacatgtctatgaaagcaaaggtgggaaagtggtaggtacacgccgaagatcgaacacaacatgggtggtgtgtttacatgggactcacaggcgcgcaagagatttttcagccggattaatcgaggagagcatctggtcttcggagatgggtctctatccacgcgcctgttgtta

SEQ ID NO: 130094 - DNA, 179 bp, Glycine max
  unsure (1)..(179): unsure at all n locations
  Clone ID: PAT_MRT3847_88484C.1
ggaattcagctcgagctcaagctgangccactggatttgatataggaagcatgtaaatttcgtagttgggctgaatcgattcctgatgcgctcagggtaatgttcagcaatctaactctgcaggataagataacagtgatccccagggtatgcagatcataggctactgtagtaagtgg

SEQ ID NO: 130095 - DNA, 338 bp, Glycine max
  Clone ID: PAT_MRT3847_88485C.1
agcaaataagacacaacagtgaaggatggcataaaaatgcatgttgaaagaaggagagggtcagggtgagtcctaccggcttggggagcatctgggacttaatgggccatcaaaatgtttctattaactcccttagataccgcgccgtagatgccgatcttcgagggtaccgcgaacctaagcaccaccttcaatcagcaaacaccactgcctccacatagggggggaaaccgaagggcatattgactctttgggtgttcaacaagagaaccttgggggtcatgactggggagccatcataggttggtatctatacatgtttcgccgtgacaaaactt

SEQ ID NO: 130096 - DNA, 315 bp, Glycine max
  Clone ID: PAT_MRT3847_88486C.1
ttttaagggggttgttgaaaaactaaacgccggcggatagcagcaatgtctgagacctgatttattacatcaaacccaccatttctgaaccctattgcaggtgctagtcatgttgatatactctgtcgtgtgaatctttatctataccattacgctaattgcattgacattttactcatttacgacatttatggctatagaatcatcatagttgaggaatattgcagacttggttgcagctgctgaatattatgcggtagaccctgacttttttaatggtgatcaatattaaacttagaatgctagtccggctat

SEQ ID NO: 130097 - DNA, 811 bp, Glycine max
  unsure (1)..(811): unsure at all n locations
  Clone ID: PAT_MRT3847_88487C.1
gagccttcgccaaggcgacaaattaagcaccacaccactctccaatatccccaacatggctcaagtgggttctctatcttccgaaatggagacactgaatcatgtcctagccctagtggaggcattccgagcatttgacgcggacaacgatggccgaatcacgcaggcagagctaggaggaatcttggggtcactcgggtacaaccctagcgagcaagaagttagggcaatgattgaacacggcgacaagaacaaagacgggttgttgagcatccacgagttcttggagatgaacaccaaggatttggagggtggaaatctcgccaacaccctcagcaccgcgtttgaggctttggatgaagacgggaacgagattttaaccggggaagagcttcatgaggtcatgcaaaacttgggtttggacttgtctcttgagaattgtgtgcatcttgttacttctcttgatgcggatggagatggggctgtgagcttggatgaattcaggctcatagtcgattccctaatctaattgtatcttgtggtgtatatggtgtgtgatcaataatcatatcatatatatgtatacttatagttagggttggagaaattaatgtattttcataaataattaaggaataagcacttgtgaggtgcatgttagtttaccaatagaatgcgtagtagcaaaagatgggataatgctattcattatatcattaattttataaattaagagagagattctaaaaagaaaaagtagtgtttaataattttgnngtgggtaataatttggtggggtggaacgccagct

SEQ ID NO: 130098 - DNA, 1636 bp, Glycine max
  Clone ID: PAT_MRT3847_88488C.1
atataactaacattcataacaattaaaaaaggcaaattatattgtaaaccgctcttgaatttcacagatatttggaccgcagatgctaaccagcaccaacagtcgcattttaacagggcaaaaggaagggatgacattacatcactcattataacatgagaagcaaactccacatcatcataaaaccatgatcacattctcatggattcagacctctactccaatgaaacatcaaattttcagctgctccaagctctttaccatgtcaggtttaggtggaatgttctcagtcttggtctctgcctctggcgttttagctggcagtttgtcttccgggctaggggcactaatggttggtggttcgtcttttgggatgggaacaggttcatcttttcgaatcggaggaggtggagtagcaaatactggaacagcttgccgaatagtgaccggaggtgcaactcgtacatgaggagctcgtagtacttgatgggacactgcagctgctgctggcggtggggagaatacaggtattgcagtccttattgtcaccggaggtgccatcccctgacaaggcctcatttgtctaatgggaacataaggtgctgctccggctgcagggaacttagggcgacggattcctcggctttctggtgtagcagaaagctgtggcatcgcagaattgtcgcaggaagctcgtgctggagatgctcctactagatgtctgcttcgaggagctgccttttggcaaattaagggaagaatctttgatgtagcagcaggtgggggctgaggactggttggcctgggattttgaatctgaaacttctttggaaatggaactggagcatttgaatttgacattgaaatcttttccttcagtctgtagttcagtaaggcccgtgctatagtgatctgttctagttcgtcattgttctcgggttcagttgaagaccttgcagtttcttttgccaattgctttagagaagaccatgcggccatagctgcatttttctccgcttgtttcttattcttggcaggttcaccagtaaacgtgattccagccagttctactatcccggtaaaaacaggtaaatgtcctaagcctgacctgtacgttgtgtaatgaggcaatggagctcctaccctttgcgcaatttcctgtagaaggttcttgtacactccagtctcatcgaggatcttagcggcgagggaatgggaggggccacggtgggagagggaattgagagcggcttcggcggcggagtgttcggcctgacggagagtggagcagtagtgaggggtctcgaagatctcgccgttaaagttgacggtggccttgaaccttggcgcgtgatcgggaccttcccgaatacacgtgtaggaaggcaggttgaagcagctccgctgggccagctcttgaagctggttcttgtacatttccagcagcttctctttctagagaaaacagtaaccacagctgaatgggcttttagggtttgtccaagtgcagaagaagagagtgatttctgggaaataataataataataaaattgggaggttatttattgcttccttgttctgagtcaactcaaacgctaggttgcagtccactactgcatggatgtgatcttttcc

SEQ ID NO: 130099 - DNA, 853 bp, Glycine max
  Clone ID: PAT_MRT3847_88489C.1
gggttcgggtcgtaacaatatgacaagctttcgggtcggattcaaacccgggaaatctcggtgctacgcgtgatgctaaacaaagagcgattcagatttgagacataactcttcagatccggcataacaggaagcttagcttagctcaataattgaagttgataacttcaaaaaaataaaaataaaaacagaaattgaagtgagagagagatagagataaagttaaagagaatgagatatggcggaggtagaaagaggcgaatgctgttgcaaccgtttttggttttgtgtgcgacggtgacaggtttgggattgtttatgttggcgctgaggccgttggatcctccgatcacggttgattttccgaaaaaaatcgagctcggagattcgaacagctcgagtttgaacggcggcggagagaagccgtgcgcggcggtggaggagatggggaaggatttcgaagctggtgttgtcgggaaggagacgctgagagtgaggagaattatcgaggaccacttcgatctgaacggtgcttcaagaatcagggatttgcccccagagcagttctgtagtcatggatttgttcttggaaagactgctgaggctggttttgggaatgaaatgtacaaggtcttaactgctgcagcactgagtataatgctaaaccggtccttgatcattggccaaaccaggcatattggttctttcccaagcctttctttttcatttttaagagaggcaaatatccttttggggattacatttgttattccaactttacctttaccatgaatgaagtaaaacatctgtggagacaaaaatctttgtgaaagcaatatgggaggcaactggt

SEQ ID NO: 130100 - DNA, 108 bp, Glycine max
  Clone ID: PAT_MRT3847_8848C.1
ttaggttttcaagtccatgacatctcagcagtcggatttcggtgatttcaagctcagatctggcatctcctcgacagtgtacgtagacctccgccttgctatatctga

SEQ ID NO: 130101 - DNA, 660 bp, Glycine max
  Clone ID: PAT_MRT3847_88490C.1
attcggctcgagctcaaaaggtgaggtcgaagttctctgtttcttttccttctcacaacaatgggaaggtgaaaaaaaaggttcccatcataaactttgacacatgaagagagatcacattacgggtttgccaaactaaagaaaaaagttggagtttttgatatggctcaatagctggttccatttgaaagtgttagtagtggtatttgatccttcgtgcaagcaaaaacaacagtgactatctgatataagttttgagaggttatcaaatttcatgctgagggtggtttgaggaatgagagcagaagataatggatttctggccagaatttcttgcaagcagttcgggaagagagtttgtagcaggtggctttggaggcattgctggtataatttcaggttatccacttgacactcttcgcatcagattacagaactcgaaaaatggctctgccttcacaatccttagacaaatggtgtctagggaaggacctgcttctttgtaccgtggcatgggcgcaccattagcctccgttacttttcagaatgcgatggttttccaaacgtacgcagttctggggaggggttgggctgagtggggggtggtgaggaccctgcttggtacaggtggtggggtggggggggaactgggggcggggg

SEQ ID NO: 130102 - DNA, 515 bp, Glycine max
  Clone ID: PAT_MRT3847_88491C.1
accacgcgtccgaaaccagagaagctgagcctatcatactagatcctgctgctgctgcttctgcttctgcttcttctttcccccttttctcactcccactcttgaaacttggctcactctctcaccccccaaaagaaaccaccaacaaacacttcaccaaatccccaacaaactcagttacttcattgcaagctctataagtctataacactgttaattccaccagagaaagaaacaatcacccccacgaagcaagcaaagcaacccattacgattcctgcttaaagcaccgattttgacactgaatcccaagacccagatggcgcaatagccagatccgtgattctcctcaaatgggtcactccaattcttcctcctcctcgtcaccttccaagcgcggccacgcgctgcggcaatggcggctcctggacttggtctccggcgtgttcttcttcctggggctgctcttcttcaccatggtctttaccccgctcggggacttgcttgccgcctcc

SEQ ID NO: 130103 - DNA, 265 bp, Glycine max
  unsure (1)..(265): unsure at all n locations
  Clone ID: PAT_MRT3847_88492C.1
ccacggcgtcgcgcaaaacaaacacagtacgttgatgaacctaagaatgaagggaaatggcttttcctcaatcggatctcctccgcgcagctgttacgcaanccgtcaacccccgtgccgnngtgccggnncatggttgcttccnaattcaccgnngcctcaaatccatggcttgnngcttccccacnngaggaagaacgcaacaatgacatngntacctccattggctagcannacggtggaaggagtaccaatnngcatgcag

SEQ ID NO: 130104 - DNA, 342 bp, Glycine max
  Clone ID: PAT_MRT3847_88493C.1
gtacgacctcgcggttccggtccggaatcccgggtcgacccacgcgtccggttctagatcgcgagcggccgcccttttttttttttttttttttttttttttttttttttttttttttttttttttttttttttttttttttttttggaaaaaaaaaaaacagaggccgggttttttattttttcataagggccaaccataaaccctcaataggggggggcccaaccagccctcccaggggcaaaattagccccccaaaattttttggaattgtaaaacaaggaggggggggaagcccgttttaatcaaggggtggaaaccaattcaggggaaataggaggt

SEQ ID NO: 130105 - DNA, 103 bp, Glycine max
  Clone ID: PAT_MRT3847_88494C.1
tcggaatgcgctctaggcattcggctcgagacacgtcattatatccaatcatttcacatggtaagtgacactcaagtcggtgcggcggctcagcccagctcag

SEQ ID NO: 130106 - DNA, 387 bp, Glycine max
  Clone ID: PAT_MRT3847_88495C.1
gtcgcccttttattttatattttttattgtttttgttttgatttgaatcacacgaaataaatgggcctaaaaaaatactttaccccggttaaaagtgtttgaccctttaactaatttatatggaggagttgtatatgagtgtaatcggtctaaacgttagaaacatgggttaatactatgcctggaaggcttatatttgattggaccaacattttttgttactatgaacttcatgaagttgattatgggaaaaagagaacgatagggattccagatgtgcaattgtaggccataaatatacctaaggtcttttcgcgacattgtccttgatccagggccagggtgttttgtgggtcaaaagttttactatctaaacagaaccgttta

SEQ ID NO: 130107 - DNA, 332 bp, Glycine max
  Clone ID: PAT_MRT3847_88496C.1
cggctcgagcggctcgagcggctcgagcggctcgagtacggctgcgagaagacgacagaaggggagtcagtattggaattgctactagtggggagttttacgtaagaaaagccttgaccatatgttctagtacaatatatatttgaataatatagatggactccaaaccaatacacacacaaataacaaataccagacgcgcatcatcataggtacttttgaactatttggcgaggaccatcctttgcacttgcatgcagattgcaacgaaagatcaaattatattaggagctagtgaacattgttgaataaatactattgatatattttaa

SEQ ID NO: 130108 - DNA, 643 bp, Glycine max
  Clone ID: PAT_MRT3847_88497C.1
tttttttaaatactacttatgaattttcatcataaccctttgaatcttgaaactttgagaaacaataattttgtttttcgtttttgccaaacttagacttctctacccctttatttgttgattttaaccaacagatggacaattcaatagacaggtgagtggccatacatgtaataactaatatcaagttcatagataacaactacctatctgaaaacaaaatattgaacaacataagcatcatcatacttacaatctcttgaatgagatcatacaaattttttgcgtttggttcaaaaggctagtgaatttgtatcacaagagaccacacaaacggggtcttgagcagaaatgtcttccattagctttgacaattgccatgacaccagcagttattccagcacagagtacagaagacacataatgctgtgtatttcggcccgcttgctgaaaagtgaaggttgttgctgtcaaacctccaattatcaaagctgatgccacaggcaggtacgttagaggttcaaagttattcgaccggaaaggagaaggaacgtttctgctgacattatagtgaccacttatcaaatccagggcatcctgccgaatcccatcctggaagttatttaagtaatatcgggaaaga

SEQ ID NO: 130109 - DNA, 143 bp, Glycine max
  Clone ID: PAT_MRT3847_88498C.1
gacatacagtcgcagcacaagtcacagaggttgtcggcggcgtgagaaagttggacatcaacctattcacagatgagaagggccacatacctgaactcttaagcgattctcaatgccgtcgtttcgccagcgtctaaatcctc

SEQ ID NO: 130110 - DNA, 1083 bp, Glycine max
  Clone ID: PAT_MRT3847_88499C.1
ccacgcgtccgggatattgctcgtttcagacctgatctcaagttgctgatatcaagtgctacacttgatgctgacaagttcagcgattactttgattctgcaccaaaattcaaaattccagggagacggtatccttatgaaatatttaactttaccgaagcaccaagtgactacttagatgcagcaattgaggcctcactcaaaatccatgtcactgaacctcctggagatagtaagatttatcacaaggatctggatgaaaacactgtaaaattatcacaatgatttggatgataacactgtaccagaaatacagaggactaaccttgcaaatgtagttttgactttaaaaagtcttggtattcatgacttattgaactttgattttatggatcatccacctgctgaggccttattgaaagctttggagcttctatttgcattaagtgcgttaaataagcttggtgaattaactaaggtgggtagacggatggcagagttcccacttgatccaatgttgtaaaaaatgatagtggcttcagaaaattacaagtgttcagatgatatcatttccattgcggctatgctttcggttgtaagtgcttcaaactgtatactgcatatacttttcacaaggaaatggacgataacactgtaccatcactacagcggactaaccttgcaaatgtggttgtaactgtaaaatgtcttggtattgacaatgtaatgcattttgattttatggatcctccatctgatgatgccttattgaaagctcttgagcttttatatgcattaagtgcattgaataagtttggtgagttaactaaggttggtagacggatggcagagttccctcttgatcctacattgtcaaaaatgatagtggcctcagaaaagttcaagtgttcagatgatataatctctattgctgctatgctttctgttggtaagtcaatattctaccgtccaaaggataaacaagtatatgcagacaatgcaatgaggaattttcacactggaaatgttggagaccatattgcattactaagggtctacaattcatggaaggagaccaattat

SEQ ID NO: 130111 - DNA, 597 bp, Glycine max
  Clone ID: PAT_MRT3847_8849C.1
tttgttgaagctatggaaccaacatctcttacagtgccctttgtccaagaaattgcaaaggatgccttgacgagggttccagagcgttatgttcgtccacttcatgagcgcccaatattattatcagccactactacacctttaccccaagttcctgtcattgacctaagcaaattgttgtgacaagatctcaaggaacctgagttggaaaagctgcactatgcctgcaaagaatggggattttttcagctgataaatcatggagtgagcacttcattggtggaaaaagtgaagagaggtgctcaagatttcttcaatcttccaatcgaagagaagaaaaagttagggcagagagaaggagaaggtgtggagggatatggtcaggcctttgtggtctccgaggagcagaaattagagtgggcagatatgtttttcatgctcactttgccaccacatttaaggaaaccctacctattccccaacatccccttaccattcagagataatttagagacatattctgccggattaaaaaaacttgcgatccaaatcgttgaacttatggcaaatgcccttaatgtggactccaaggaaatt

SEQ ID NO: 130112 - DNA, 495 bp, Glycine max
  Clone ID: PAT_MRT3847_884C.1
ggctcgaggatcgagataactagagacagtgagatgaacatgaaagcccttgttgtcttcgatgctacaattgagggagcatgggaatgccatgcgtacgatatggtccctgtccgaatgaacactgtctatggggcccgtacttccgaggtgaaatgctcaagacgtaggcttgctgtggaagcacacatcatcttcggcttcgagaccattcctgaacagagcgtcgaagcaccaaaggactgcatccatggcgaacaatatagatcagactccaggacagttaaccaacacgcttactggtatgccagagacctctaagtccatcccaaggacacatctgcgttcagtatagatggcaccgtactctctaatattgcatgctacggaatacatgcatatgtgtgctgaaatataactcgtccttgactgatgaatgagtacacaagggcaacgcagcggcactgcccgagactcttaagaattacaacagct

SEQ ID NO: 130113 - DNA, 504 bp, Glycine max
  Clone ID: PAT_MRT3847_88500C.1
ccacgcgtccgcggacacgtggccgaacgcgtgcgtggcgaacggggactaataccaacccaacctgaagcaagtcgaacggtgcatactcaacgaatcccctcactgatgccccagggatgaacggcaccggggaggatcccctgccctcactcaccaactgatggatttccaacttggctgcttgatcagctgcaacgacaatgatacactacgatctgctattgccccgtatacgaagaccttgaaccctggcgatactagatcctccccttcacacagcacaactcgccccatttgaattggtctcattattctaatacctacattcatttttattttttgccgcttgccagattcaattgtatctactgtaatatcttatacgttctaaaacattgaagaatgctcgcatataaatttctatgatgctaagaaactacataattcctgactgctctgctcctacttccaattcaccatgactggcacttgtatcatcca

SEQ ID NO: 130114 - DNA, 614 bp, Glycine max
  Clone ID: PAT_MRT3847_88501C.1
accctcgagccgattcggctcgagcttcatctgtcttttacagcaggcaaatccctagccaggtttctgagtggggaaggatgagcatgtgcgatgctgaaagaagactccttgctaatgcattgcttgatatctccaacgagtggtttattctgctgtctgaatcatgcatccccctctacaatttcagctttgtctaccactacataatgaaatccaagcacagcttcgtgggtgcatttgatgatcccggtccatacggaagagggcgctacaacgagcacatggcccctctggtgaatgtcaccaagtggcgcaagggctctcaatggttcgaagtaaaccggaagctcgccatcaccatagttgaagacactacatttcatccaatatttgaacaatattgtaggccggcttgttacgttgatgagcactatttccccaccatgctcaccattcaagcagccaatgtgttggcgaacaggagcataacttgggtggactggtctaggggtggagctcaccctgctacatttggaagaaatgatatcactggaggagtttttcaatcgagttcgcagaggtcacacttgcctatacaacaatagaaactc

SEQ ID NO: 130115 - DNA, 324 bp, Glycine max
  Clone ID: PAT_MRT3847_88502C.1
ggggggaacataaagcatgtgccccactttctcatggatgaacgtctagcctaactcggacttacctaggataaaagtccagaggccagtacttatttctttgctccttcaggcagacgacaagtatttgttggccgccatataccaaagatacagggctttcttataaacacaatatctggttgttttaaacagacaagggcttcggacgggaagacatgaaccccttcccacttgcgttcgcacttaagtaccaccctggcaaaaaccaccaggtttggtccaccctgaccgaaatgataccctagcctgcatgggaagggc

SEQ ID NO: 130116 - DNA, 280 bp, Glycine max
  Clone ID: PAT_MRT3847_88503C.1
ctttgactcaccggcgagtccatctatcgccagcggcgacggcgctccggccaccggtccggccaccgcctatggttccctcactttctcgtccttcttcttctcagaaatatgccttctcagaaagttgaaacaggtcatcaagacaccgaccatgatgttgcaatggattactatggtaagaggctggccacggcttcatcatatcacacaattaagatcattggggtcaataatactgtctattaccatcttgcaacatttactgctcaccaaggac

SEQ ID NO: 130117 - DNA, 623 bp, Glycine max
  unsure (1)..(623): unsure at all n locations
  Clone ID: PAT_MRT3847_88504C.1
tagggaatttggccctcgaggccaagaattcaagcgtttggtttataacgtaaccaaaacaacgtttttttttctctaaaatggctttccctccccacgtagtagaggactgcatgggcctcctcaaactcctgagtgacggcaccgttttgcgctccaatatcaacttccaagaacaacctcaacctacccaacacgacaacctcgtacaattcaaagactttgtcttcctcaaaaaattcaacctccacctccgtttctacaaacccaaatttgaggacaatgatgatgacgacaacgaaaacaacaacaagaagttgttgcccgtggtgatgtttctccacggcggcggcttctgctttggctcgcgcgcgtggccacacatgcattcgtgctgtgtgcgtcttgccacgagcctccgtgccgccgtggtggccccggactaccgtctcgccccagaacaccgccttcctgccgcggtggacgacggagtggaggccgtgcggtggctccagcggcagaagggtcaccacggcggggacgagtgngtgacaccgggtgttgactttgaccgtgttttcatcctttgtgactcctctggcgggaacattgctcaccacttg

SEQ ID NO: 130118 - DNA, 777 bp, Glycine max
  unsure (1)..(777): unsure at all n locations
  Clone ID: PAT_MRT3847_88505C.1
cggctcgaccacgcgtccgcttcccttttctttctcttccaactccaagctaacctcttttccttcgccactgcttcatcttcatttcacttcctcgcaataatcgttatactcctccacattgtctcactttagcctccaacaagccagcacgttaacaacaacacaacacataatttctttattattcccttctcttctcaccgacaaattcacctcttcttgttttacactatagcatcatgaatatggtgtccttagtgaagtacacagcattgcctctgaccagccctgattcctctagtcatgttccaaggcctcaactctgcgcgttaccttctgtccacaatgttcaacaaagcacccaaccctctctctcttccctcaaacctctttacatttcatccactcagaactttgcattcagaagaaggagggttccagagtgccaggcctatgaagcagataggtctcggcctctagagcttaacattgagctccctgatgaagaagcagggatagaagctactcagaggattaaaattggtttgtattttgctacctggtgggctttgaatgtggtcttcaacatatacaacaagaaggttctcaatgcttttccttacccatggcttacttccactntgtcccttgctgctggctctctcatgatgctaatctcatgggccaccaaggttgctgagctcccaaagttgatttccaattctggaaggccctctttccagttgcggtgntacatacatttgggcatgttgc

SEQ ID NO: 130119 - DNA, 353 bp, Glycine max
  Clone ID: PAT_MRT3847_88506C.1
gatacaacactgaagtggcgctgccttctgttctgttgctatggcgtttagggattactctgttaccgtcgtcactgactcttcttgcgtctagtgcagccaatctgttactcattcactgcattgcgaacaacatggcattgccaacgaatcgagatcagactcccaaatctgactccacaaacccctgctgtgaactctcgaagatgaaatacttgaagacccaagaatcgttgaatgctctgcgacatgccgacaaggctcttgaacacaaaattaacgaaatccagtcccgctacaacaaagtatgtggggtcacagtgggaagagaggaaaaattaggagaatttgtt

SEQ ID NO: 130120 - DNA, 458 bp, Glycine max
  unsure (1)..(458): unsure at all n locations
  Clone ID: PAT_MRT3847_88507C.1
cggctcgagaaaattattgaatatcttatctagacagtatggattgaaacaatgtatccacagtgcaacatcttagagattgaaaatgaagacagtttggattgtaggcatattgaatatcttatctagccaagatataaaatgaacaaaacaaaaacttccaatcttaccttgtagcaagctacacaatctctccatccatcagattccttgtgaaatgccttacaaaaggttccattttcataaagagagctacattttcaaggatcaaaccagctatgtaaggaaattatggagatgaatcaaatcccaaatgatttaaataaagaaactatgtttaagtgccaaataagtattttggataaagcaaaccataaccctgggttagcaacttgttcaattgtttctagctattgagcatgaagtttcatgtgacagaatangtctcataaatctat

SEQ ID NO: 130121 - DNA, 811 bp, Glycine max
  Clone ID: PAT_MRT3847_88508C.1
aacacaccggacaattttccacaacaacacactagacaattttccaattcaattatcgattcccctactcacaaaaattaacatgcaatccatttctttgttcaattcctcaccaatattattccatccattttcaccatctaggccatgttctaatggcaagaaaatgaattcgtttgctccaactaaggcttccatgagaggatcagcggatcagaacttcagtggaaggttggtggatgagagcatgataatactgaggaagaggatccatgagatgaacatgatagagaggaactatgagcctccttcagattggatggattgggagaagcgctattataacaagtatgactccatcatatgtgaagcagtgggagttttgcagtcccaattgatgaacaccaggccaagtttggctcttggggccatggctttggttgcaatcagtgttccaacttcttctgctgtgcttttgtttcatttggttgaattggccaaggttgttttggctggggctcatcttggctagctagactagaatattgttcattagatgctttgaatttggtttggtatttggaaaaaccattcaattcttttgaattatacatagagcatatagaattttaattgattggaatttggaaccactatctgatctgttagatttgaggatggatggggatagataagtttattcataagtagtgcaattgtttgacatttgtgacccatacaactcatgtaattaaatgctatgatttgacccctctttatataaggagttgcttgtcttcggattcccaaa

SEQ ID NO: 130122 - DNA, 732 bp, Glycine max
  Clone ID: PAT_MRT3847_88509C.1
ggctcgagggacaattttccaaactacacatactattaattatttccaattccactattattcccctaatcacaaaatatgccatccatatctttggtcaattcctcaccaatattattccatccattttcaccctccaagccatgttctaaaggcaagaaaacgaattcgtttgctccaattaagggttccatgagaggatcagcggatcagaacttcagtggaaggttggtggatgagggcatgatcatactgaggaagaggatccatgagatgaacatgatagagaggaactatgagccaccatcggattggatggattgggagaagcggtattataccaagtatgactccatcatatgtgaagcagtgggagttttgcagacccagttgatgaatactaggccaagtttggcccttggagccatggctttggttgcaatcagtgttccaacttcttctgctgtgcttttctttcatttgtttgagttggccaaggctgttttggctgcggctcatcttggctagctagattacaatattaattgttcattaaatgctttgaattggtggtttggtattttgaaaaaccattcaattcatttaaattatactcctacatatatagagcttcatgtatagaattttactccatctgatctgctgttaggtttgaggatgggtatacataagtttatcccatagtaatgcagttgtttcgtcatttgtgac

SEQ ID NO: 130123 - DNA, 183 bp, Glycine max
  Clone ID: PAT_MRT3847_8850C.1
cctattccttgtcttattgtttggggagtctttattgagaacaacagtggaacaaccaatagaaacacgcaggaaacatgacatgactataactacgcacaatgctgttccacccatgaaacaaccccttcacacatgaatgaacaagaaacacaccactcccatggcaacttaaccggtatc

SEQ ID NO: 130124 - DNA, 687 bp, Glycine max
  Clone ID: PAT_MRT3847_88510C.1
gaaattgcctacagaggattccaaaccagagggatttggaagactgtagagtgttttatgataatagaagtttaccctttggattcctcaagtccggaagccgtagtcgggtgatattcatactggtaggaatatttggtgggcttggctttattgtgctgctggcattggtcctcatgcttgttctaaaacaatgtcacaatcgtagaagcttgggagttcaaagggggaccaaagatggggggcctgttcaagaaggggaaagtcctatacctcctaaggataccgtctttgtgactgtgggagatgcattcagttttgagcaaatgctccatttgaccagcaattttgctgaagcaaatgtcataaagcatggtcattctggggacctcttcttgggagtcttggaaggtggagcaaccgtggttgtcaaaaaggtagatttgaatttatttaagagagaatcgtatgttgtggaattgggactattaagtaaggttccacatgcaagattggtcccaatcctgggccactgcttggacaatgaaaatgagaaattcatagtttacaagtacatgccaaatcgagatttagctacttccttgcgcagagtcaccggttcagatggtgaattacaggccctgggttgggtcccgagattgaaaattgccataggagctgctggag

SEQ ID NO: 130125 - DNA, 236 bp, Glycine max
  Clone ID: PAT_MRT3847_88511C.1
ggctgaacccagcaatttggatcaatcggacgtcgtatagatcgtattcgtagctaggacagggcagcatgcacgacgaacattcctttcccctcctcgcccaattccccctaaccatctccccctttctctccctcccaacctccacccccctcccctacacctacaaaaccctcccctcgaccctcccaccttcaatcctccgatcccccagcaacccttcaaactcctccgac

SEQ ID NO: 130126 - DNA, 556 bp, Glycine max
  unsure (1)..(556): unsure at all n locations
  Clone ID: PAT_MRT3847_88512C.1
gcagtacgtgtatacgagaacccagggactacatctcggcatgtcgtntgtgatcgtttntctcatatgtggaatgaagcatctttggccctcataagcccagatctgatatatccagcttcaatgtgagccagtgcgtgtcggcgtcactcgctataaatataggagcaatggtgcgatcgaacaatcgtctgtgcttatcaatgcgcacaatctatcctactcacgtctcttcgcatactcttcgctagctgtctatagcgaagcatctccgtacgtatggactgtacaggtgtgccgtaaaatctgcattgatggcagagagaagaaagtctgaagttaagcaacagtaggcccccatgatcgtttgcgacctagctatggagtattccccacgcttgctaaatacattttcgtactattcttgaccgcctgactcaatactcattccggaacccaattcaccctagaccctatggtcttacccgctctaaatgtacggcatcccccggcgtgcaggatgtcaatatcctgcttatccacaccgtcgacctct

SEQ ID NO: 130127 - DNA, 255 bp, Glycine max
  unsure (1)..(255): unsure at all n locations
  Clone ID: PAT_MRT3847_88513C.1
gtttcttanttcaacgttttccatcatananagatnccantcntntntcaagcctaatttcncntcatttccatggccacagaagantccantgtncgcggtggaacccgntcccgaacctgcntccgccgatcctcccccggaggagaaggaggagaccaaacctgaagccaaggctaagaaaaccaaggagnccaaacttaaaaaggntttagacttggnaaccctcccatnttcttttagnggggngttaag

SEQ ID NO: 130128 - DNA, 337 bp, Glycine max
  Clone ID: PAT_MRT3847_88514C.1
ccccgcttgaattttttttcgtaaaatttaaatacagcccaagcttacataaatatccattagcaatctaacttttgcttatgtttattctggccccaattttaataataatacaaggcaatctttttacggggacaggcaaaaaaaacactggggagggtacataaggggataacaagccaggaccctttttttaaagaccccatttttttttttttttcaaaccttactttagcaacaaaggcttggtcctttttatggggtcctattgattaggcggaaccagatttttcgcggggggattaacagcaggggtgctaacatccttttccacaaa

SEQ ID NO: 130129 - DNA, 240 bp, Glycine max
  Clone ID: PAT_MRT3847_88515C.1
cacaaataatgatattagtcctgctgttataccttcttcggtgagcattttggaagcccggagttgtcgaatatgtggaacgcaagttgaagctggatcttgtgatccttctgcggtggctgtaggatcgatattgggctccgtatctaatcttcgtaaagatttatcgctcctttcagctccctctaaaactggaaggagtgtgcaatgggactctgacatgtcatcactgccgtgtgg

SEQ ID NO: 130130 - DNA, 287 bp, Glycine max
  Clone ID: PAT_MRT3847_88516C.1
tcatcaatcatggattggtggccttggtggagtcttatgaaatgaaaattttcgaggtgaaacttattgtaatgatgtcttgttttacagccctgataacatacgtggctgatacatctgacgtcattgagactgcaactctgcttgttagaaatgctaactttctgtacattgacgtggtgcagatcttgtgggatgttttaatggatgctgttcaaatgtctggttaagatatctatccgaatgccaatgcttgccttgtgctagtaaacacttgggcagaattg

SEQ ID NO: 130131 - DNA, 1082 bp, Glycine max
  Clone ID: PAT_MRT3847_88517C.1
gcgttttcgcatatgtacttgtgtttcaattcattcttcggttgttctctatttgcgttttctcattttctttctttcgttctcttccgtggaacgagtagtagaaacttgaaatcaaaaggcagcgggggaaaaagaaaagagagaagtagggttcgaaaatggcagcagaatcatcagagggcgaagaagaaaccaagttaagcggaggtaaccaattgctcatagttgacgatgacttaacggaaatgggaaagaaagccgcttggagcgtgagttcctgcaaacccggtaacggcgtttcctctctccgtgacgacaatctcgaaacttattggcaatccgacggagggcaaccccatttagttaacattcagtttcagaagaaagttagacttcaattaattgtgctgtacgtggatttcaagcttgacgagagttacacgccgagcaaagtttccatccgtgccggtgatggttttcacaacttgaaggagattaagaccgtggaactcgtgaagccaactggatgggtttatctttccttgtctggagttgatcctagggatacctttgtgaatactttcatgttgcaaattgctgtgttgtcaaaccatctcaatggaagggatactcacgtgcggcagatcaaagtttacgggcctcgaccgaaccctatcccacatcagccattccaatttacttcaagggaattcatcacctactcttctataagatgagagtttatggaaggatttgatgaagccaccaagtgttaaatcaaaggatgcttcccactaagttattatagcatctggaaggtctgaaaccaaatcactacagaccgaaatgtcaaaaatacatttcacttcaatagtattcttaaaaattgtcatatcagtaaatgtggccatcagtgattcagtatcctttgtgtcttgctagtatttataatttgttgagatttgcaatgctattcagggtttgacttccttgaagagttctatatttattaattaacaaaatgatatgtgcattgtgtgaatttaaaaaaaaaaaaaaaaaggcggccggtttaaagg

SEQ ID NO: 130132 - DNA, 142 bp, Glycine max
  Clone ID: PAT_MRT3847_88518C.1
ccctattttgagctacgccgatttctaccagttggctggcgttgttgccgttgaggtcacggctggccctgctgtgccattccaccctggaggaaaggtcaagcctgagccaccaccatatgttcgcttgcccgatgccact

SEQ ID NO: 130133 - DNA, 510 bp, Glycine max
  Clone ID: PAT_MRT3847_88519C.1
tggaattcgggttgaaggcctttattttaaaagggccttcttttaacaatggcctggcttttttcaacaacctggtttaaggtggctttttcaaggccttattttaaaattaacaactctaccaaaccaacctggccctctggctggatttaaggaaaattcctttaatttttttttttctaaaaactaaaaacggttggctaaaacattaaattctacactattaaacgattaatttctaatccaaaattaattaaatttggataatggttttcaaaataactataacaaaggctctctctcttcttcctttttttttaaaaaaaaaataatgtaattaaacatttctctaaattttacattatggtggatgcgtaatatgtaccattttttcatcaactgttaaaacaatcttatttagtggcttatggaaaactcaaaacagcagtttttaaaacacaccttccattctgactgcggtttggtttacttacttacagaggaaaagaa

SEQ ID NO: 130134 - DNA, 250 bp, Glycine max
  Clone ID: PAT_MRT3847_8851C.1
ggttgtcctacagattcttcaggaactgcgattttggatcggaacctcatctgcggcgtagcaatgggacactccaatgtttggaattctcattcaaagaactaccgtcctggttcgcgcaattgccgaatgtgtgggaatccaaatagattgatcaggaagtacggccttaggtgtctgcatgagtgcttccgtagcaatgacagcgaaagatggcctcatcaagtaccgcgaacagagcggttgtcac

SEQ ID NO: 130135 - DNA, 134 bp, Glycine max
  Clone ID: PAT_MRT3847_88520C.1
ggggaaggggaccacggcttaatgggtggctcctgaggtcaaggcgaggttttggtcacatcttctttatgtctcttgcaataatcagagaatgcaagaagcctatctcagaaatcccggaaatgtgtaacgag

SEQ ID NO: 130136 - DNA, 399 bp, Glycine max
  Clone ID: PAT_MRT3847_88521C.1
attaaagaatagtttattattaccgccccaaattgacttccttattcctatagtccaagatagatcttggtggaataatattattaaaccaggtccggcccttcaccttttttacctggttatttggaaatggtcagattagacttcccattaagaatggatttaattgacctttaaaaaccccaattggaaggtgaataattattaccagtttaccggaaataaataccgtattaaattttaatggccaacctcctggattggcctgaggacctaagcccagccagaaccaacctcctgagacttgaagcccatggcttgggcgaccctatcatcggatccatggccgttgtaccggttgaaattaacaacggcttcgtcgcggcccggggtgacttc

SEQ ID NO: 130137 - DNA, 365 bp, Glycine max
  Clone ID: PAT_MRT3847_88522C.1
gagggaaaaaagcgcaaccgaaaactaatcgaacattaaagggggaaacccaattgggggaattcctgcggcttaagggcacaaattacttttgggaagggccccacaaaactatacaacgctaaaatttagttttttttacccactggggcaaacggtaaaaaaaaaactataaagcaatttttttttttttttttttttggggggggggggggagagatcaattactaaacggggctttggccaaagccaacaaaacagagaagggggatgaaaacccggaaccctggaccctgggcaaagcaaaattcgggaattcgggttccaaatccaaactaccccaaattcctcaacttaaagggggg

SEQ ID NO: 130138 - DNA, 268 bp, Glycine max
  Clone ID: PAT_MRT3847_88523C.1
cacaataaacacaacacccctaaaatagtgttattaaccaattaactatgattctgtaaaaaaaattaactatgatttattacataatactataataaggtcgagtataaaatataatttaaatgagaaaaaattgataagttattcgtttgttttttttttgtaccaaagttattcgtttcttatttctccaaagaaactacattaacaacaaaaaataatcagtaacaatgagttatacatagattaatatgcactttttgctttc

SEQ ID NO: 130139 - DNA, 833 bp, Glycine max
  Clone ID: PAT_MRT3847_88524C.1
ctttaaagttttcttctgttgctgatcaaagctgatcgaaataacacttgctagctgaactatggaactggagaagacaccaacaagtttggtttttggtgttaatggtgagaggtttgagctctcccacgttgacccatcaaccactttgctccaattcttacgcactcgcactcgtttcaagagtgtcaagctcggttgtggtgaagggggttgtggcgcttgtgtagttttaatctccaaatacgatcctgtgcttgaccaagttgaggattttacagcaagctcttgtctcacactactttgcagcatacatggctgttcaataacaactagtgaaggcattggaaattctaaagaaggattccacccaatacataaaagatttgcaggattccatgccactcaatgtggcttttgtactcctggaatgtgtgtttccctctttggaactcttgtcaatgctgaaaagactacttgtccagagccacctgctgggttctcaaaagtaactgttgctgtggccgaaaaggcaattgcagggaatctttgtcgctgtactgggtatcgaccgattgctgatgtctgcaaaagctttgcagctgatgttgatatggaggatttggggttcaactctttctggagaaaaggtgataacaaggactcaaagcttagtaggttgcctcaatatgaccataatcaaacgaatagtagatttcccttgtttttgaaggaagtcaagcatgatgtgttcttagcttccgagagcacagttggcacagacctattagtctaatggagcttcagagcttattgaaataaacccattgtat

SEQ ID NO: 130140 - DNA, 234 bp, Glycine max
  Clone ID: PAT_MRT3847_88525C.1
cccgagcccgactagttctagatcgcgagcggccccctttttttttttttctattactattacttttttttgtttttttttccaccccttagagaactttcccatcttctcctggacctcttttcttcctcaaccgaatccctgagaattgaaatccaatccgggcaaaacaaatggatcttcgaggatatcaagagcccttccatgaacgttggcaagtacaaatcgttaacc

SEQ ID NO: 130141 - DNA, 180 bp, Glycine max
  unsure (1)..(180): unsure at all n locations
  Clone ID: PAT_MRT3847_88526C.1
ctttctgttgtttctccctcaacncnacncancgtgttcctcttngnctggntcngnggcttctnncttccctnggtctctggcaganagangccanngttctctnccttggtctcgatggtgcnggcaaaacctccctccttcacatgctcaaagacgagngnttagttcagcaccagc

SEQ ID NO: 130142 - DNA, 364 bp, Glycine max
  Clone ID: PAT_MRT3847_88527C.1
atttctcttgatagttcagtgtctacaattccaggtgactttgtccttggtgttaatctggcaaccataaacaatttgtgtgcatttgggctcaatcctggtactttaggttcccgtcttctggactccactcctcacttctatttcacagtaaactgtttggtatcaaatggctacagtgagaacaccattgaattttgatcctagcaagcacagcttttgtcaattttctattgaccttctccgtggaggaattttagtggacataactggagatcggatcacactcatacaaaattctccaattagttacttgttgagagttgctgccttggaagaaaggctgtttaatgcgtaagattgt

SEQ ID NO: 130143 - DNA, 268 bp, Glycine max
  Clone ID: PAT_MRT3847_88528C.1
tatagctccatctctcctgcttctttaacttgataatgcatacttgatttttctatttgttatttcataaaccaattaatacacagataaaatgactgtatatcaaaccatgtttgtatagaaaaaatggattttggatgcctctcatatgtaattagttctattaaacatattaattgtattgtttaatttgtcaggtttttgacagaattttgtttacaagtaataaaaattttatctccaaaagaaaaaaaaatttttttttttg

SEQ ID NO: 130144 - DNA, 308 bp, Glycine max
  Clone ID: PAT_MRT3847_88529C.1
attctttttataatttccctcgggggacgaacatatacctaggggcatttttcatgagatatcagcggcattcccccaacaagacacaaggagttcaaccaaaacgctcagatgagtctctttcgaagcagcagggcttccactacgggccacgacacaacgtaacaagaggccttttacgaagaaggactagttgcacaaaatggtggatcagggagtacgggcctccatttgccgagtttagagaacttgtcactggggattcagtgcaacgacgctatctactgaaaaattgggaaccaaaaagc

SEQ ID NO: 130145 - DNA, 411 bp, Glycine max
  Clone ID: PAT_MRT3847_8852C.1
tcgcatacgacgactgaaagatgcacgcttcaaggatactgctgagaggtaccgatacggggatacgggagatgggttcgggtattaggagacgacctatggttaccgctgcgtcaataccaccgaatgctaccgcttttacaagactattgataggtcctgtttcgagaagactgacagcatgatacagttgctatatgacgactcattggtaccgttccaataagaccttagatggctaacgctatcacaagtcgacagaagggttcgagttcgtgaagaccacagagtggttcctgtgttagacgacgactgaagcggtaagcctctaaacttacagattgacattggcaattgctatgttctcacagtgccctggtatctctgactctcacaagcccaatactacct

SEQ ID NO: 130146 - DNA, 365 bp, Glycine max
  Clone ID: PAT_MRT3847_88530C.1
ggggaaaaaaaagcaaatgccggcttgggccccaccctgctttttaattggttaacccaaatttttgggacccaatccaaatggcctcagaccccatgtttttggtccttaatggggaaaatttttggggaaaaaatgggacccaattttccttgccaaaaaaaataagaccctggggccttacccgagacccaaatttacctcttcgggggaaatccgccccctttgggggcggctcctttcccggcccattggaaaacttttgaatatcaaacagctttttggcatcatccggggggacaaagtttatagaaactcctttttttccaaaccgaccactaccccctatgggggggggataggtt

SEQ ID NO: 130147 - DNA, 236 bp, Glycine max
  Clone ID: PAT_MRT3847_88531C.1
gcgtagtcgctcgaatcggtcgagacacagaaggagggacgggaaagcagttgatgatgtagagttggtgatgtaaatagtacctgatgaagctcgagtatattcatatatcaagggcgagtatctagagttagtaaaaattgataagttagaaacacttcgtaagtgttatcatgatagacaagtagaaaggatccaatttgagacagggttccaaaaaatggttggaaattagt

SEQ ID NO: 130148 - DNA, 1012 bp, Glycine max
  Clone ID: PAT_MRT3847_88532C.1
tttttctctaacaaaaattaatcattattatcgctgaagactaaaacaaacataaatgagaaaaaaatagacgtctttgtaccaacaaaatatatcaatgacataaaaaaaaattataagcaggggtgaaacgaatttgatctcaattaaaaaaagatttacaatgcacgcaaggaagtttacaattacaagcaagattacgtaaaaaattgataaatgtatgcaatcaatttcatttgtcaatttgaatgcaaatgaagcctctcttcagctgatctcacaccctccatcttcaacattcctagtaagaaatcgctccatgtgtctataggcccaggtaagcaccaatgcacacaatcattgtacagtgtcacattttcattaggccaatgcccatatctacttggttacgcataactaattggtaaggattatacagctaggcattgtttaactgcaaactcatgcatagacttgcacaaagtttgtgtgttttggtatgaactataaacaattttttatgatataatttctaggaatccattgtcttgatttaatgtttttatacatttggtttaatttgagcttgacaagtattctggatgttctcattttgtggcagttatattaagttgtttctattagagattttgctttagggttgacttcaatatttcaggtaaatcgcaagtatagaattgcacctatagcagcatattctgacagaagaagaaactcatccatgctatatttgaaagggaggcagaaagcctctatgaaaattgacagggatgagaccaacatccttactagatctcagatagatttagagttagaaaagataaggtctatgactccacaagaggcagctgcatttgctgcccgagcagttgctgaagcagaagccgccattgcagaagcagaggaggcagcaaaggaggctgaggcagcaaaagctgatgcggaggctgcacaagcttttgcagatgctacaacgaaatcagcgaaaggg

SEQ ID NO: 130149 - DNA, 232 bp, Glycine max
  Clone ID: PAT_MRT3847_88533C.1
cgataaggcaaaagcgcatttccgctgttgtatgtgtgagggtgccatgccaagccatagcaaccgtcagtctgccgccaccggtttctctgcgtccccctgcattcgcgtcgtccccgcctcagctgcccactcggtcgcagatcgctccggattcacttagacccgagctttcgtcgcatggcaatggcgatagtacgcggatcagctccaagctgagcattatgcccag

SEQ ID NO: 130150 - DNA, 328 bp, Glycine max
  Clone ID: PAT_MRT3847_88534C.1
aaaaaaaaaaaaaaaaaacaaaaaaaaaaatttataagaatgccacacttcaacaaacaggtagaccagaaaataagttggggcccatttccttcagcctcccccacttttcctttattctgtaaatttaaagctgaccataatcgagagcataacaacctcctcttataattcttccatcgctcatgatgaaccacttccaacggtcctgacccatcaagcttaactgatattatatctttttgggcaacaatctaacattttttagtttactgtaaatgtccatcttccatttccaatactcaaacttccttctgcattttctatt

SEQ ID NO: 130151 - DNA, 456 bp, Glycine max
  Clone ID: PAT_MRT3847_88535C.1
aattcggctcgagctcgagccggtttagctgagaagtattcaaagacaagcataactaggaccaattcatgcgaggttctactaggagcatgttatgcacatggagatttaggaaccgggagcagtgtgggagaatatctaaagaacttggagcctgaaaaggaggttggttatgtattgttgtcaaatttgtattgtgcaagtgggaagtggagggaagcagagatggtccggaaggcaatgctggatcaaggggtgaaaaaagtacctggtagtagttggattgagataagaaacgaggttacctcttttgtatcaggaaacaatgcatatccctacatggctgacatatccaagatactatactttcttgaattggaaatgagacatacatcgcctattaattttgatattgaaggacctttatagactagtgaagcatatgggaaagataat

SEQ ID NO: 130152 - DNA, 1030 bp, Glycine max
  Clone ID: PAT_MRT3847_88536C.1
acggctgcgagaagacgacagaagggagcaatggagacagagaaatggctgcagcattttatgctgctggttttgaaccatgagatattaccatgtcagaccttcttaatggaaagatctctttgctagacttccggggaattgtgtttgttgcgtgggtggatttagctatgctgacgtgcttgattctgcaaaaggttggtctgctagcataagattcaacgagtccgttttacaacaatttcaggagttttacaagcgtccagacactttcagtcttggtgtatgcaacggatgtcagctaatggctttgttgggatgggtaccgggtccacaagttgggggtgtgcatggtgctggtggcgacctatcacaaccgaggttcattcataatgagtcagggcggtttgaatgccgctttacaagtgtgaccataaaggactcaccggctataatgttcaaagacatggcaggtagcacattgggtatatgggctgctcatggtgagggaagagcttatttcccagatgaaggcgtgttggaccgtatagttcattctgagttggctcctataagatactgtgatgatgctgggaatccaacagaggcctaccctttcaatgtgaatggctctcctttaggggtggcagctatttgttccccagatgggaggcatcttgccatgatgcctcatcctgagcgttgcttcttaatgtggcagttcccatggtatccaaagcagtgggatgtggagaagaaggggcctagtccttggttacgcatgttccagaatgcaagagagtggtgttcctgaaatgatcaaatgtttttctcatcttgtcttatctttttcttttctttttccatataaagcacttgtccttgctttagttgacaacttatccatgtcctccttcaataattaatggacaggttactcatcaataacaaatagctagagtgaaattacaagttttaaggaattttatctaatgcttgtttgctattcaacaattcttttatctgccta

SEQ ID NO: 130153 - DNA, 253 bp, Glycine max
  Clone ID: PAT_MRT3847_88537C.1
ttttgttattatcttcggttatacctatggtcaggggtctttttgttgtatttcgcggatatgttcccaaatgagaccaaaccacaaagtggatgacaacaataagaaacccaaaagcaacagaaactaataatagggcaatatgagggcttaaagaatgatgggatgtaaaagggctggcaaaacaaagaatgtgggcctaccatagtataataccctttttctcgcatcaggttggacacccatgggcggg

SEQ ID NO: 130154 - DNA, 472 bp, Glycine max
  unsure (1)..(472): unsure at all n locations
  Clone ID: PAT_MRT3847_88538C.1
ccacgccgtccgaaataaatgaaaatatccctacactactaaacagccttggtataaagatgctgaacattatgattcatttatgttgcagccataaaaatttgtaagtttattttgtttctttttcaacttaacgtcttagattagaacttatttttatcatcttaagtttcttaactaatttctattaagcatcaagagacaatgagaagcaaatttatgtttgttggtgtaaaagtattttagccaaaaaaagtaaaaattatgaagatcacctttctaaagatgttagcctaaaactaatagcatctggatattttaatttgatttaaggcttctgatcttttatttatttgcatacttattctcttatagctaactacttactagttttccagactttngttggttgattattgacttctgcttaagctacatgnttctgttcacacacattgttaatttgcatact

SEQ ID NO: 130155 - DNA, 269 bp, Glycine max
  Clone ID: PAT_MRT3847_88539C.1
taggcaatacagccccaacgagaaatgcatagcttcctgcatatgtcggataaactgatacagggctttaagaatggataaaggcggccccagtctcaagatacttgtgactaggggatggaacttgttgagggtgtcttcactagctgtagctgggtttttactgacgtgtgttgacgtacccacgggtacaaggcacaatgagcatgggcatatggaggccattttgtggtaccatataccgcttattgaaacattgagttgattcc

SEQ ID NO: 130156 - DNA, 252 bp, Glycine max
  Clone ID: PAT_MRT3847_8853C.1
atttactagctagtgatctataagaccacggtcagttctgaaaaatgggttccaaggctttgcttggtgtaactatgttcatagcggctatacttctgatctctgctgaggatgcaccccatgaatacgataatttcaacaaacacgacgggaagcatgctccaaatggaggatatgatagcaaatggcgttccagagcttggagtagaccttgctactgcggctgtggtggcccttactatggatgcagct

SEQ ID NO: 130157 - DNA, 214 bp, Glycine max
  Clone ID: PAT_MRT3847_88540C.1
caggggtggtggagactctttgagtattgtgccgaatacgaggcttcaattgtactcctcgatggttccttgtgagtacccaaatcctataaaatccgatgataataaccatgcaaaatggagatgagtacatccgtccttgttccggccagttgccatacctggtcccaacccctttcatttttgaatttttctcggcgccaaaaacgcggtc

SEQ ID NO: 130158 - DNA, 215 bp, Glycine max
  Clone ID: PAT_MRT3847_88541C.1
ggctcgagctaaaatgcttttttctctgatcatgtggctgactattattgtttatctgcggccggggactgaatcaggactgacgccagtgttcagctctactaccccgaccaacgcagaggtcacattgcacactacggtcttggtctcttggatcaaggaaagagatccgccctcttttcaagcagctcaatctgcaatacggactcatctca

SEQ ID NO: 130159 - DNA, 1094 bp, Glycine max
  Clone ID: PAT_MRT3847_88542C.1
tcctctagagcggccgctttttttttttttttttttttttttttttttagcaagtagctaacacccaagatctatggcacctaaaatttttctacagccagtttcataggatgatagcaaattcaatggttatggcctaattaaaaacaacttgaactatgataataatgatacaagtcaatgcagagggtagtttggtcatctaaaaaacggttgcatgtttcccttttctagtacaaggagcattaaagtcttcctacacattttgcaaagtcacactcatttttaggaaagctccaaaagcactaaagcataaatgagtgacttctagatgcttttcttactcactaattaatccatagaggcagtggcagaaacgtaatatgcaatacagaataggccatgaacaaaacaacagattccaccaatggacaggaagtgatggtgtgagaaaccacaggaaccatctgacctattgtttgacatggtccctatcaccagcatggacaatccaatggccagcacaacccaagttaaaataaggcaagcagttgagagttgcctattggaggaagccttctcaaactcttgttgagaacaaatgcaattgcagccaccaagcaaattggctatagcatgggctagtcccaaaagcactgctgcacccaaccctaacatgaaggcttgatgacttggctctctacactcaaatatccacaatcttaagtgcttaaccttgttttgtgctatttcagcctcgaagccaagaatcccagctgcaacatccatgactaaaatcaggaggcacagaaaaatgcctgctactctagccatttgttggagaagttttcttctgtccaagttgtttaagatcagaaacagtggggaattaaatgtagtgtatgtatatgattatatataaagaataaagtaagtgcacaaaagaatgagattggtaggaggtggccgctaaaagcttcttttgtcaacaaagtgcaaactttaaatttgcttttgttgtttactttctcttctttttccccactcttggattcctttgaaagagatgccaaggtagaaacccggacgcgtgg

SEQ ID NO: 130160 - DNA, 340 bp, Glycine max
  Clone ID: PAT_MRT3847_88543C.1
gccacgcgtacggataactagactcagtgtgacgaaaacgaaggtacatgtgaccatcgctgctacaataacatgcatgcaaggctaggccatgctatcaagatgttgcctgtgataatgaacactgcctgttgtagcccgttctacataggtgaaacgcgcatgatagaaggttgatgtggaagcacacaacatgtgtggctttatgaccactgctgtagagagcgatttagcatcacaagaatacatgcgtggcgaactatatagatcagacttcaaatctgctaccaacacgcttacgtttatgccacatacctcatagaccatgctactgacacat

SEQ ID NO: 130161 - DNA, 389 bp, Glycine max
  Clone ID: PAT_MRT3847_88544C.1
aaaacaacataaactccgttttttggcccccaagggtggtggtgcaattccccctggtaaaaaaagggttaaaggctgaattttaaacaaaaaaccccggtttgggtttccttgaaaaggggggatgtaagttgaaaaaattcaaaaataattcaataaaaaacaaaagggtggccctgccccaaaaaaaagtaaaaaggggggggggtgggaaaaaaattggaaattccccccccctcttgggccattggttttttttttaccaaaaaaggagcccccgggtttttttcccccccccctttttacccaaggggttttttttttgggggggaattgaaaaagagttgcccccccccctcaaagggtttttttttggggggctcccaaaa

SEQ ID NO: 130162 - DNA, 521 bp, Glycine max
  Clone ID: PAT_MRT3847_88545C.1
ccacgcgtccggaggtatttgtacgtgagctgtgctgagcttgcaggggctcctttagactcctgtcgtcgcttgcatatatcatctgtctagctccaaacatgtacctgcttataaagggtggagtgagtgaaacgcgtattcaccgcatgtgtaggatgataatctattatctgacaccaacaagaaaggaggatctcacacatacacagtaactgtagtgaatgattcccagagtgcataattaagctaaccatgttttcatgtggccttcttgagcagataggatgttactggactctcactgtagacaactacacgagattctatgacctttgccttcaaataagagtgatgttacttgatctgaactcgtacttacttgtgatgcaactactgctctaacattcttatgggctataaggttattgtggctgagagaggacatcagcgctatcttgcacttaccttaagagatcgttccacctattgcagagcttgctatataccctatgtgtgaa

SEQ ID NO: 130163 - DNA, 450 bp, Glycine max
  unsure (1)..(450): unsure at all n locations
  Clone ID: PAT_MRT3847_88546C.1
acagaaggggggagcgcnaagtnagcanaatgatgncgaaaaccaaaaaacaagtgggatcaccttcttcttcttctttccctgagtgtgtgggggccatctcttcattcataccttgagccgtgagctcccaatttctcacttntgtgaggaaagagtanataantaatggganaagcggaggcgaggggtctntgnggnagaactgcgaatcgtgnctttntgcaagaggaggcgaaaagangtcccaaggtgggttntgncgaatcttcatgtgcgacatcaaaatcaggtnagactgggcctnccantacagganaggagtctnagcataatacaggtaaggtgacccattttaacaggagatcntcaatttctaatctatcatcagacggtggggggggnggtncgttcacaacctaattgatgggatcaaaagggggtaacata

SEQ ID NO: 130164 - DNA, 1349 bp, Glycine max
  Clone ID: PAT_MRT3847_88547C.1
cccacgcgtccggttccgagttccctctccgctatctgtgatcctacactggaccctcgccgctcctgttcgaaccttgccgccgtcatcgacgagaaggaagaaatttgaatttgaagaaagatgggagagaggaaggtgttgaacaagtattacccaccggactttgatccgtcgaagcttcccagagcaagaaggccaaagaaccagcagatcaaggtccgcatgatgcttccaatgagcattcgatgcaacacttgtggtaattacatctacaaaggaaccaagttcaattccagaaaggaagatgttattggcgagacatatctgggaattcaaatattcaggttctactttaaatgcactaagtgctcagctgaggttaccatgaagactgatccgcagaattcggattacatcgttgaatctggtgcgaccagaaattttgaaccttggcgtgcagaagatgaagaagctgataaaacgaaggagaagagggatgctgaagagatgggagatgctatgaaatcgttggagaatagaaccctggattctaaaagggagatggacatccttgctgcattggatgagatgaagtcaatgaagtctaggcatgcaactgtcactgttgatgaaatgctggaggctctgcagcgcacagcagctgacaaggagaaaaggctggaagaagaagatgaagctctgataaaatcagttgtctttcataattcagacggttttgtcagaagaattcgtgatgaagatattgaaacagaggagcaattggatcagttttcaaatggacatggcgaaacatccagttctaatactaagaggcaaaagatttcagaagattgtccaagcaaaccaactgacactttgacaaaagccagtttggatgattatggcaaacaagaaaattcacgcagtggtggaaagcttaattctttagtgaggatttctgtcattaagaaaccagtgacctctgacgttaaaagtcctgcagaaccagaacaaaagaaacaagagaaagataatgaaacaaatactgctagtggactattatctttgtgtcaaaattacggaagtgatgatgaggactagtagtcataaatattgaatgactttttgtttaactgttgctcattagattgtaattgtaagttgtacttgcaatggaatgtgtgtcatatgcatatttcttgtatgactagaatagaaatacacagttttcaagctcttacagaaatctgcagaaatgctggttatgttgtttaaggagaatggaagaaaaaaagcataaattagactgatttattttatttgtatatagagcatagatttgttat

SEQ ID NO: 130165 - DNA, 349 bp, Glycine max
  Clone ID: PAT_MRT3847_88548C.1
ctgctctttttttttgtcccgaatgcatgtttggtgtggagaagacgtgtattctaagggccattacctgattttctaggaaggtgggatgagctacttggataaacgagtcctgatccacgcgcagagaataacttggatactgtttcactcactgtctgactaatggtgatccacaataggttaccgaagtggtgtacgtccttaggaagaggtgactgacccaatctacctaggtggtagatgacagctattgggtcttggtgctgaccaagagactagggttcaacttaaggtgatggtgctcaatatcggacgatggtacatgtggtctatgtgaggcttcttt

SEQ ID NO: 130166 - DNA, 1356 bp, Glycine max
  Clone ID: PAT_MRT3847_88549C.1
ctactctcggaattcatctcaagaaacttgagttggaggaggataacagccgttgatttgaaacacaataacgataaatgaaaatgattgcgggagagagagtgagagtgagaaaagagatattatagaagagaagagaaaagaagaagagagtaatggcagtagtagcagtgtctcattcatcagcaccacccactttcaacttgaacaagtctcccaaattccctccctccccaatctctgctacctttccaatccctaactccgccacttccacttccagaattttctgccgcgccaccaattcacgcaccgaccccgtcaaaaacaaaaacaacaagaagaagaagcgcaagaagacttccgacgaatccctccctcaaatgaatcccaacgatgatttccaagttctgaacgattttcccctccaaaatggccccgacacttccgatgctcctatccattatccttccatgccgttgcctgaaccgccagctggattcgtcataaacgataacggcaacgttcgccacgcttccccaaatcgacttatcactgacgttgatcctactaacaaccttccgttggagtgcgtgattaggagagtcttcgaaagttccgagagagatgaatgtatgttgctctggcctgttgacacgcctgtccaaatattgaagagcacaaaagctgatggatggtctgctatcagtgataaggaagtttaatctaatctgcctgccgcatcttatgcacttgccaagatacacatgcatctacacagaagtgggtattggtatacagcatgtgcaggttttttttacatattcagagaattatatttgttgaaaagggacgacggtaagggagtacatggcttgccaactggtaggtgtagaaattacaaagttcgatcaggaagattcccgttgcaagatttatacatcatgggatttacggagttttttcgttaagaaggcttcgaacgggatgttatacattgctgatgatgatctacttgaggatcctgctgtcattgacgccatagatgaggagaccgaatttaatgccttggtggaagaagaagctgcacttatagaagcaatgatgcatgaaagataacctatgtttttaattctagtctttatcctctggaatgccccggcctggtctgactgcaaatatctggtgatgctgaatagaatggtcctcttgtatgcatatgatcaattttgtctagtatgggataaagcctccttggcgctatttttatgttttacgttttgatcatcaatattgaacgggatcattgtgttaaccacctctaatttttgttgttcattgttttgtgttggacta

SEQ ID NO: 130167 - DNA, 617 bp, Glycine max
  unsure (1)..(617): unsure at all n locations
  Clone ID: PAT_MRT3847_8854C.1
cgcagtcgttcacacctccaaatctcatcgtgttcgtctcaatcctttgtgataagaaaccctcacattggttgtctcacacacacactctcaattctcgcacatcttcgatcgcgtttgcgtcttcatttggctaattatttactcgaatcgattaaaattttgacatgaacggtggaagcatcggtgaatgaatctcgctgagttttgaaaatgccgggattagcgcagaggaatgaacatctcactagtggctcatccacaccgacgtgttcgctttctgcaaatggattctggtcgaagaattcggacgacgttagctacaatcagctccagaagttctggagtgagctgtcgctgcatgctcggcaaaaactctagaggatagacaaacaatccctgtatgagcaagctcgtaaaaatatgtactgttccaggtgcaatggtttgcttcttgaaggttttctgcagattgctatgtatggtaaatctttgcaacaggaagggctggatgctcactntccttgacacagatctggaggtttgagacagctaactaatgacggatcaagcattatcaatggatgccaagatgaaattcaagatccatctatcca

SEQ ID NO: 130168 - DNA, 576 bp, Glycine max
  unsure (1)..(576): unsure at all n locations
  Clone ID: PAT_MRT3847_88550C.1
tcgatctatggctaggaatgtaccagagtgccgtacacgcaactgggcgcctcctaacctaaagtgctaggctcagcctcttgttcaactgtggtcgtgggctctgggtgcgaatttgaaggggtcttagtcggccccttcaacttcagagggttagtcaaccaactatgttacacttgcagattgttcttagtaccagttaaggacagtaatgtaaggttaacagttaaaggtgtcacgtgtaaagtactcaaaacggccaacaacgcaacaacaaccatcaaaggagactacaaaaacaaaacgttaggcaacagaaagtaaggattagataagttggctacaagcacaggctggtgtgttacaaaaaacccgtatgccagctgcaccactagcggccaaacctgtagctatcgctgccgcaatgatacaactaccgccataactggaaaacccaatgacaaatatanaatagccacaaacgcaatgcgcaaatgtcacgattgcacggacacaaaaacaggtagcatgccaatgtanaagcacaacagtggtannacagaaagcaccaataca

SEQ ID NO: 130169 - DNA, 242 bp, Glycine max
  Clone ID: PAT_MRT3847_88551C.1
ttcgggttgagcgagataacttgaaacagggtggtgaaaatgaaaggccttggtttcttcggtggttccattttgggaggatgggaattgccttccgtccaaatttttccttttccaaagaaaaattggttttggggcccgacttccgaggggaaaatgcccaaattggaggtttgtttggaaagacaccaaattttttggttttagaaccattcttgaaaagggcgttgaacaaccaaagg

SEQ ID NO: 130170 - DNA, 467 bp, Glycine max
  Clone ID: PAT_MRT3847_88552C.1
ggccgaactctaaacattttaaaattcaaggaacataaggttgttttgttgcgacccaacccgtctcctttattgatagttaactgccacttgcccggaactcagagagggacatcttaaaaaatacactctaaaaggttcccctggtgcctcaaatcatgccctaagaggaccacagtgcctggccgaccctaattataccaacccctgctttgaaaacttgaaccctattcattagcaaccctgccccgtgaactttccgaagatctcgacggaacagatcccagccaggaaatgaccgattgggctagggactgtagaacctaccgatactgcccaagaaagaatttcggatggatattatggctttagccccttttgccccggcgaagttccctgcggaaaactctccggacctccccaatggggaggagacgctatggatgaatccagtgcttaagatacat

SEQ ID NO: 130171 - DNA, 297 bp, Glycine max
  unsure (1)..(297): unsure at all n locations
  Clone ID: PAT_MRT3847_88553C.1
gaaaatcactgataaataaacctaatctttgtttatcttgttttgcaccttcatggatgggttctttgtaccgaggggagggacgattttnnnaagtatcatttcttatgctagcactataagataccattcataattctatcaccatgcttcattcttatttttccatgtcaacactgccacaactactcctcgaacatatttatcaacttctacatttttttattaacttgttagtcactcttaccttcacaagttgaaaaatgaatgtagtgattcaatctatcctcttattcc

SEQ ID NO: 130172 - DNA, 629 bp, Glycine max
  Clone ID: PAT_MRT3847_88554C.1
ccacgcgtccgaaaccctccaattccaatctgtatggagtttttccctctacgagacacagagttgttccgagtacaaataaatctgcaccgtttaataatctcgcacctcatttctcagtgcttgatcaaatctgtctcagttctccgtttggttattatttctcagtaatggataggaggctcaacggacccaccgtttcgtccagctccaacggcggccccgccgtcggacgatcttctcctacgcttcaaccaaactacagtagccgattagttcaggaagcattggaacacttggcatccattgatctgattgagttgtgcaaagaagccaaagttgagcgctgtcgagcaactcgagacttgagaagctgtggtcgctatgtccaccatgtcttgaattcctgcagacatgcctctttatgcgaagaatgtagtcaacggtgtgatatctgcccaatttgtagaatcccaatttcaaaaagtggtgctaaagtgcatctccgactttattatgagtgcatagaagcaggccttatttccaaaaggtgtgatgagagatttcaagaaagagaagatggggagaaagacctaactgctgatgtacagcgcctttattctctggtt

SEQ ID NO: 130173 - DNA, 569 bp, Glycine max
  Clone ID: PAT_MRT3847_88555C.1
cggacgcgtgggttcagtttcaaggcagaatgttcaagggaaaaatatgtttggttctactgctcacagtataaataatggactgaatatggagaacttgcagcaaatgaattctgagcaaagaattgcaccaatgcaagattttcacgggaggcaagaactagctggatctttagagatgtcccaggacaagatgcttgtgcaggctccttcttcacagaacatggctaccttagatcctactgaagagaagattttgtttggttcagatgacagcttgtgggatgggtttggcagtaatttgggtggtttcagtatgctggatggtacagatagttttagtgggattccatctattcagagtgggagttggagtgcacttatgcagtctgctgtagcagaaacttctagtagtgacatatgcaaacaagaggagttgagtggtctaagtttccggaatttgggacagtcgtctggaaatgaacagccttcaactattgatagcagcaaacaacaatctatttggactgacagtaacttgcaatcagcatccaatataaattcaagac

SEQ ID NO: 130174 - DNA, 1089 bp, Glycine max
  Clone ID: PAT_MRT3847_88556C.1
ggctcgaggcgggactgtgagttcttggaagctgagaaaattatggattacagtcttttggttggcattcattttcgtgatgataatacgtgtgacaaaatgggattgtcaccttttcttttacgcactggcaatcgggatacttatcagaatgaaaagttgatgcgtggttatcgctttcttgaagcagagctacaggatagagatcgagttaaatctggaaggaaatcattaatcaggctaggagccaatatgcctgcaagagcagagcgagtggcccggaggagtgattttgatcaatacactactgctggaatcagccatttgaccccttatcgcagtggggagacttacgatgtcattctatactttgggattattgacattttgcaagattatgatatcagcaaaaagcttgagcatgctcacaagtccttgcaagttgactctacttcaatttctgctggtgatccaaagctatactcgaagaggtttcgtgattttgtagggagaatattcattgaagagaggtagcagatgggttaacaatgaggctggaatatttctcttcctgaaggtgaagatgcctgattgctcataacatccaggaaaaaaatgcgtgaaatttgaaacccttgtcaaaggtcttggagttgactggttaaaatgcctcgccacggtcaaatggctgaccgaagttccctggaattggggttttttatggcttaattttataaacacagccattgtgatggtgtgctgaaggatgggaaaacttgtacatggaagattgggatgaagttcggaatttgttttttctttcctttgttttaggaaatggggtggggcttgttgaaatttttgtggttactactaaatagaatttgaatatatggtggtgggagagataggaagagggaacaacgtggagtgttgtttccctgagctttgattcaaaatgcgtggataagtgtaggaaataaacaaaaaaaagaatgtacagtgtttatacaaaggatggatagttgaaagaattttttttttctactttgattacttgaattattgagagacattttgaagcccccc

SEQ ID NO: 130175 - DNA, 460 bp, Glycine max
  Clone ID: PAT_MRT3847_88557C.1
atgttttgtaaaactagagagagatcaggtttgatttttttcactaacgaggtcaactgaacactcaaagtcttgcaacttgggagtatagttcaaatcacgcgatgttcaattaattggtgggtttttctatctgtgtttgctctttctcttagactgaaataccagatcatttgttcttaagataagccactgacatctcctcaaccctatcttgctgatcctctattttcattttttttttccagttgggtaccaaatgggatttcatagtttcttcttgtctgccattttgataccatatatcaattttgggactagtactcttgaattgcagaactttataagtagtcctaatgatttgaaagccttgactggattctctagcttcttaaaatcaactatttcagactggaacagcttcacattccctgattactgcacttggtctggtgtcaca

SEQ ID NO: 130176 - DNA, 430 bp, Glycine max
  Clone ID: PAT_MRT3847_88558C.1
tttctcttttttttttttttttttttttgttttttttttttttttttttttttgttttttttttatttgtggtggtttatttataaagatttaaaatataaagtttatggtatttgaatgggcaaagaagccaagaaatacattctaggctcgggacggacgaaggaccagagttgggtggatgaaaagacaaaattcccttttctctgcatgggggggcacaaggctatcagccacgcaatagtttacaaggaaaggctcggaccaaagggcggaaaatttgggagatctctaaagcggggaaaaagcaacggggggaaggccaaatctcacggaaaacccaaatagccactcaaagggggcgagcaaagaccaggcaaagaaacctgtaaaatcggctccttcccttaatgcagccattagattatct

SEQ ID NO: 130177 - DNA, 746 bp, Glycine max
  Clone ID: PAT_MRT3847_88559C.1
cggctgcgagaagacgacagccggggggtgctacgaaaggaggttgatcatgaattttcaataaaaactgaaatgtattcttcctgttcctgggtcgatgcccgagcggttaatggggacggactgtaaattcgttggcaatatgtctacgctggttcaaatccagctcggcccaataatttgccaatccactatgaagttatataacccatttattgttctccggaaatgactgatgtgctctgatacggaagaatccaaatattaaacatccctattctttttttttctgtattctatctttccacaaattcgaatcttgctaataatctcgattcatatcaagatctgtaaatagaagatctagggaaaatatttaaaaaaacaaaaaaatatttttttgttttttttcattgattccattttcaatcgatttgtcaataacaaaaagattgctcgtaatctgtgtcgatctcacaaaagtgcatatcgatatagatatcaatcaatatatacaaaaatccgcctctttcatttacagcaaaatggttcgaatccgaaatagaaaaagaaaagcgtttgaaagaaaccgtaaaaatatgtatactgtacacccctttccctgggattgtagttcaattggtcagagcaccgccctgtcaaggcggaagctgcgggttcgagccccgtcagtcccgatggatccaacccccccaaaaaaaagacatctattcattttttgtgtg

SEQ ID NO: 130178 - DNA, 464 bp, Glycine max
  Clone ID: PAT_MRT3847_8855C.1
tttttcccagatccgtacttgaacatcgatgccctcgtcattgtcaagcccaacggctgtggcaagttctggatctagtctcgaaggaaagatctagtctgcgagttccagatccagtcttgacgccctcgtaatcgtcaagctcaacggcggaggcgagttccagattgagacatcagtggggactagagtcttcccatgcaccggcacggtagttgcggcggcgctggacaggttgtacccaacagagatatacttccaagccatatgttgatggatccgtaatgtcttgcgactttgcgaacagtcgtgatctttgtcgcgtgctatggtcttcgccgcgcgttatgttcttcatgcatttggggtcacttgtggtgatcgcgtgttcctgtgcccacggattgttgcaccggagaagtggaacgagaaccagcatagcaccggactccgtcggaacgcgg

SEQ ID NO: 130179 - DNA, 553 bp, Glycine max
  unsure (1)..(553): unsure at all n locations
  Clone ID: PAT_MRT3847_88560C.1
ggctcgagacagcttcgtattttcttttttttttaaccttccttttctctgcgagtattttctgctatggccgaagaatttgtgaatgactttgttcatcaaaatggcatcactgtcataatccacaatccccccaaagtgatggggagaaaaagaccaaaatttggataatattagttgttgtggtggggctaatatgccttggaatccatatatttctggtatggaggtttaagagaaaacctaaagcaatttcatcagcttttggttacaacaacaatagcgaaatactagtcattgatctaacgaggagtacagacttatcataaatttcagaaagtaaaggggggagaagatcgcagtggctatggcatggagctgaaggaggttgataattttttattgcagcagaaacacagcaaagataccaacccaattaatcacatcagaatcacctatacacaaatatataatcccagcagaaacaaaatctgtggcttttatattgtttgcgcccctaaacaagttagcttaaagaagntaaatatttttc

SEQ ID NO: 130180 - DNA, 449 bp, Glycine max
  Clone ID: PAT_MRT3847_88561C.1
tgacaattttggttcaaacttcaacatattgctttttttcaattttaaagtatttttttttcatttaacaattagcatagaaatatattaggttgaaattaagatacataataaaatataaaagagtaagatacattgtggagtcatttaagaagcttcgataaatttattttctaaaaggtaaattactgagttgtttaatgcaagaagaatcatacattaatatagaaatttacaatatgttataaaatattaaatataatacctcatttgagttgttccattgccattattggcattttatattagcattacttgtgcgtatgtctcttattcaatacttatgggtaaatgagataacctgataatgcttacataaataattgagagttcttagttcccggggacttgtatagttcttggcgttcgggaactcctacaattctttt

SEQ ID NO: 130181 - DNA, 144 bp, Glycine max
  Clone ID: PAT_MRT3847_88562C.1
acaggacacatgaggaggacaatacctcgtcaattaaggtgcagagcgtttccatagaaagcactgtgaactctaacatgaaaccaatcagatggtagaactgccttggctgacatgaatataaaagaggtgctgccaatttca

SEQ ID NO: 130182 - DNA, 391 bp, Glycine max
  Clone ID: PAT_MRT3847_88563C.1
taagtatgtacatatcactgtacaatcccttctcgcacagattcggagacctgacaagtgcgtatagggacgcaggtcctcctctaaaagacgttaaagttacaaaacgttgcgctctcactggaaatgactaccagaacactccaggcggacgactcattgttaccgcggcgctcagagagtgaactcttgacagggatctgaatgcgtgacacatttccacatagcgcgtcctataaaagattgtcctcacagtcatatggtagattcactatatggacctgcaagaagatgagaaaacctgtagtatagtaggcagtcttagcatttcttaagcctttggtgccaaaatagtcatccatctcaaatgcactgcttggatttcacgggg

SEQ ID NO: 130183 - DNA, 462 bp, Glycine max
  Clone ID: PAT_MRT3847_88564C.1
atgtttcaagcaggttgaatgactccaatgagatggcgagtgatggtggcgccaacaggcttgctgataaaggatcaaagaaaaaaaaggggaaagccactgcgaatacagtagcaaacctatctgaaagtgctgcagataaccaggaacagactctgacaaaatctaagagaggcccgaaaagaggtaaggatacatcttcacagacgtgagattcaaagacaggttctaggaaagaattgcttaaaatgaaagaggataatcccggtccctcacaagaatggatcatgcagaaaattacagcattactttcccgatttgaagaacaaggtttagatgaccctgaaacaatcctaaggcctttggctaaccaaattaggcctacaataatcactctctcgatgcgagaaacagaatgttttgcttacaaacaatgcagaaagaatgaaacgcttggttgat

SEQ ID NO: 130184 - DNA, 407 bp, Glycine max
  Clone ID: PAT_MRT3847_88565C.1
actcggtctttaattctcgactcaaccgtcccttaattccactccttcttctacacatactacatcattttattccatttaaattacataccatattagtaatcttctaaaaagtggagccttccattcattatatcaacactaaaatacattatacatttcttcctaatcaaatctactatatttaactattactacttccaaaaccaaattttataaatatatatattcatcatcttcacatatttattttcattattatatacaacttctacatcatcaaaatatacttcactactatatgcctacattgacttatacttctactaatcttcaaaaccattctcatttcatttctcataatatcatttatttccctacctcttttattttcttatcattatttt

SEQ ID NO: 130185 - DNA, 460 bp, Glycine max
  Clone ID: PAT_MRT3847_88566C.1
cctcgtgccgaattcggcaccacgtcgcgaagattttcttctctgtaacttctggttcttcttcctttggaaacacattcagagtaacatgtgatggcgaaaacatcgaagtccccggagagaaaggtatttgtgttctctcattcgataaggatctcaaaaatccttccatctgcaagatcttcgaatgctctgaccaatcaagttgcaattcgttttgctctgcgattgaaaagatcaaagatggatcttatttggtcttgggttataaaggaaattctgtgaagaatttcacttcggattgtaagaaaacaatttcgaatcttggaagtaaggagatctcaagattggatgatcgggaaagttgggctttgatcacaaagaaaggatcaaattctgttctcgaatatcgtcaaccaaaccttgttaatttctcgtacaatttataattttaaaaatt

SEQ ID NO: 130186 - DNA, 2034 bp, Glycine max
  Clone ID: PAT_MRT3847_88567C.1
cccacgcgtccgcccgagtgcaaatccaaaattccaaactcagaaaccgccatctgtgggggcacaatcactccctttttctctctcttctttttctttcatgtgaagcttttctatcacattacagacatagcccacaatttttgaccctctctctctctgattcagtggagatgaacacttgccagttccggctcttgaactctttctccacttagtgtgccagccaagaaggactcttcatggctgcaaagcgcgtgtaccaagtttggaaaggaagtaataaattcatatgtggagggaggttggtattcgggcccgatgctaggtccctgtttgtcaccttgttgctgattattgttccagttataatcttttgcatatgtgtagcaaggcatcttcggcatgaactttcttcatataattctggatatgctattttagctgtggctattctctttactgttcatgtcctggtggttctctttcttacttcatcaggtgatccgggcattgttccaaggaatccacatcccccagaagaagagtttcgttatgattcttcagtttctgttgatgctgggggagctggacgacaaacgccaagtcttcagttccctcgaacaaaagaagttgtagtcaatggcattgctgtaaaggtgaaatattgtgagacttgtatgttgtatcgtcctcctcgttgttcgcattgctccatttgcaacaactgtgttgaacgttttgatcaccattgcccttgggtgggccaatgtattgggctgaggaactaccgttacttctttctgtttgtttcttgggcaactattctatgtatctatgtgttttccatctcagctttttacatcaaggttctgatggatcgttatcacggcacagtttggaaggcaatgaaagaatcccctgcatctgttatattaatggcatattgtttcatctctttgtggtttgtcggtggactaactggctttcatttgtaccttattggcacaaatcagactacctatgagaacttccgctacagagccgataacaggatcaatgtttacaaccggggttgttttaacaatttcctagaagtattttgtacaaaagtgaagccctcaaggaacaatttccgagcttttgttcaagaggaggtaccgaggccaccccctccggtcatttcccgggaacccgaaccagatctgggtggtggagatccacgttctaaagttgaagacgatctagatatcggtgaagacctgttaaagatatcacagcgtcggaatattgaagaaattgacgaggacatccggagcagaggaagcaatggacctccccataatacttctgaagtagattcagttttgggttcagatcgccgggccccaacaattcgatctgaagcaaggcactcaagtgagggaagaagtgaaagctgggaaatcgggtctgaggtccttgccaattcaactgtaactgaaagcagaagctatgttgtatcaaaggaggtgcgccaaaaacttgggggttctttctgagatgtggggtttcttagatattaaaaatggaaaaggaaatggtgtttgatcagattataggaatgggaattgaattgattgaggcattaagtacaaaacttatttgatctttttttgtggtaaggttagctcttttggaaagaatagaaatgtgtgtaattttcgagataaagcaatagtgtcttttttttctcctgtcaattttttttccttgaagattgatcagattataggattgggaattgaattgattgaggcattaagtacaaaaacttatttgatcttttttgtggtaagcttagctcttttggaaagaatagaaatgtgtgtaattttcgagagacaaagcaatagtgtcttttttctcgtctttgtcaattttttttcctacaatcaaatatgtgcattgcatctttatgtggctttattctttgtgtaaataaccagttgtgatgctaaaatatatatctgcatactgtgctttaggcgttgt

SEQ ID NO: 130187 - DNA, 300 bp, Glycine max
  Clone ID: PAT_MRT3847_88568C.1
atagtggtccaatcttagtggcccttagtattattatggataatctcaatggtggaattttcaacactccttccttcgattagcaaaacaaatatactatttacctttgtatgggaaattcaaaagccccaatcttctttttagccaaagaaaaccaaattagtcacagatttgggttttctggaagggtagtggaacatttttaccagtggcttatttttcaaccccacaccccgattggaccaacccaaaaaaacccttaagcccctttatttttggcaatttaccggtggcccccca

SEQ ID NO: 130188 - DNA, 249 bp, Glycine max
  unsure (1)..(249): unsure at all n locations
  Clone ID: PAT_MRT3847_88569C.1
gaaaganaanaccatcganagtttcacttcagcattatccggnttagggnttcggtttttgacccaacctntgacgtatcgnnaccttaagtntcggatcaggtctgagcaatctggntggnagnacctntggtcttagagagtcaagtnttatgtctgaattagacgatcaaattcctactgcctncgatccttttgctgatgcanatgctgatgactcgggtgctgggtcaaaggagtatgtgcata

SEQ ID NO: 130189 - DNA, 611 bp, Glycine max
  Clone ID: PAT_MRT3847_8856C.1
tacggctgcgagaagacaacagaagggggttgttttgaagaataaaaagaaagagaattaagggtttggcaagagagagtaatgggaggaaagggaaaaagaagaagagagaaaaactacagggctgctcatggtggctacactggcctccctcctccacctgatgcttctaaacatgacgctttgccctccaaacttcgtcaaatcatctctttcacacaaaacccaactggggcgattgggttttcaaatgacaagaaaaacgttggtgggcatgcccaaaataagactgccttaaaggacacaggtgatgttgaaactgtagatgtcaaacaggggatctctaatggacaattgaaggcacctcaacttctggataggagtgaagaaaagcgtatggaaagtggtggtgttgacaagaaaaagaaaaaaagaaagaggaaggaggttaaagatctcaggtttgaaatggaagtggataaaacaagctcccagttaaaaagaaaggaacgtaagaaaaagtatttcgaagcaaaaaagaagaagcacaaaaaatccaatgaagaaaaaatggacttccctggacaagaaaaaataaaatttggagatat

SEQ ID NO: 130190 - DNA, 480 bp, Glycine max
  Clone ID: PAT_MRT3847_88570C.1
ggctagacggctcaatctgttagcttagtgatagtagtattgatattatttgttttatttacatctttttttcctcttttctttcccttttccttttgtttgtttgacccatataatatgcaaagagtggatattaattaattccaaaccaaatactatgatttgccacatgtttgatttatgattatgaatttatgatcacaggtcgttgataggtattttcgattttcataattttgtgcatttctttctgcatcttgaacttaggccaatttcctgagaacgaaaaagggccgaacaagaagacgcttcttcatttcaacattgggtttctacatattgcagtaaatgggaatgcatccaatcctgtagcttctcggtcagcgatcttttaattttgggggtcccttgtagtacggtgcagacccttcaacatccggccattgttttattaccgttcaaatttaatgtcagtcttcc

SEQ ID NO: 130191 - DNA, 334 bp, Glycine max
  unsure (1)..(334): unsure at all n locations
  Clone ID: PAT_MRT3847_88571C.1
tcaacaacagtctaattcctctccccatgatacttgatcaccagagatgaaaaaaagaaattaaaaaaatgtttttaaaaattttgtcaattttcttggcaaagttttttttaaaaaaaaattttgattggcaggatcctcccaatcaaaattgtccatactttggtccctcagaattgatttgccatgggatgttttagtggggatgtaaacaaaattaaatgatagaactagaaactttcttaatgtaagagaaaattagaaaactactccattgtaaagtttcctttttcaattttgancgaatggtggagtcaattgtatagatttcaca

SEQ ID NO: 130192 - DNA, 246 bp, Glycine max
  unsure (1)..(246): unsure at all n locations
  Clone ID: PAT_MRT3847_88572C.1
gttgcctggaagggaggagggggctgagccctgcggagccagggggcgtgggggctgggagtgtaggccaattggcagggcggggctgccttcgancctggncacttctcttaatcatcgcncttctgatccagggtgcattgtgtgtcccagtgtgcnagaatagccccagaagaggaaaggctgagcccagagcgcttcagcagggaagattcccttccccccncttcaggctgctgagcactg

SEQ ID NO: 130193 - DNA, 324 bp, Glycine max
  Clone ID: PAT_MRT3847_88573C.1
ctaacgggaaaaaaataaattggatattctataatcttaaaagtgtaatcatccaattgagtaatttaaaataattataccactcaggctaaaaagatgtgtttcatatatgggggggaaaattctatcccctaggggaataaggacaaaattcttgggggatgcattcatgcatttggggcactttttattggttcaatagcagcttttatgcatttttgacaatgggggtgactttagctttaacaaactggtgcaaaagaaaaagggaccatactcccaaagagtagatgggggctttattttttctttgattggttcaat

SEQ ID NO: 130194 - DNA, 779 bp, Glycine max
  Clone ID: PAT_MRT3847_88574C.1
tgacacttttaagaccttcccatactgaccttgcttggctcgctgctcggggacacctgcgtccgcctgttcgggaggctttcccactgcaatcatgagtgaccgaggagatacgccctgtcctctctgtgccgaagagatggctttgacagatcaccagttgaaaccatgcaaatgtggttatgagatatgtgtttggtgctggcatcacatactggtaatggccgagaaggatgacacagagggacgatgtcctgcatgtcgttctccatatcataccgaaaagattgtcgggatggctgcaaactgtgagagattggtggctgaggttcatatcgaaaaaaagatgtagcaccggttagcaaagtcaaatttttctgacgcacggaagcaactcagtagtgtgcgcgtaattcagcggaacctcgtttacatagtgggattgcctctcaatctggcaggcgaagatcccctccagcggcgagactatctcggtcagtatgggaaggtcttgcaagtgccaatgtctcgaaccacagctggtgttgttcagcagtttccaaacaatacatgtagtgtgtaagtttatgttgtcttcaatgcagcttagctttttttcttagtggtattgtgcaggattcttaggagcaatagtggtggcccccatagcggtgttaatttattggcacgtgcaccaatttgtcccaaatagtaaagtaaaacagaaatccgagtgttgagtccacatgaactttgtttgtactcagagttattatgcc

SEQ ID NO: 130195 - DNA, 139 bp, Glycine max
  unsure (1)..(139): unsure at all n locations
  Clone ID: PAT_MRT3847_88575C.1
nnaatngnatgnangcgtangtaagctcgganttnggttngngngananagtttanaantttaaggaanatccnntatncgtntaagngngcagagtgcanaatgtngctcaaagcactnaaattttcggtcattcttg

SEQ ID NO: 130196 - DNA, 422 bp, Glycine max
  Clone ID: PAT_MRT3847_88576C.1
gtctgtgtggcttattcaactgccgcataaaatgtttaacaaagcaaataagggatgatccataaacctgacggtggctctcatccaacgtaaggcgtccatgagggaagaaaaagtgtcctaaaatgtactctactcacccaccttacaccgaagacaaattataaaagcagctgattccttggggtgacgcagccaatttgacgactctggttcccaaggtccactaagagatgggccttcccataataaaaggccaggtcttgggaccctaatgatacgcaaccacctgtgtggctttttctctcaaaaaaatggaggaacccctgatactttaatgctataagcctaggtcctttttcaacagacccacacagccttttatttactcaagggcatactcaacgcctatgattcccttg

SEQ ID NO: 130197 - DNA, 563 bp, Glycine max
  Clone ID: PAT_MRT3847_88577C.1
tcagcaccagcgattcctcttaagcttgctaccgagatgccatcacctgctcccccatgctcttccgaatatccaacatgatttagcagagatggctaaggaaaaggctcatatcaacattgtgcgaggctggacatgagggaccctgaccaagccaccaccatgacctcctccaaaaacactatctgattccttataggcgccgcaaaatgacatatacatcgcaagagcttgcgtacgctgatgaccaccggactggtatgatcacgaaataatctggaaccctactgtatcagtgtcatcatcagagtgcacgttaagctagctttgctatggatacgttctttgagacgagcagtcttgatgaacagtaccattctgatgtattgcttccctcgaaagtccatgcatgcttcctatcttctgtccaccaaaaacaaaacccccccccccccggccgccccctccctaaaaccaccgaacccccccgccccgcgccaaccccccccctgctcccccacccccccccactcctctatgtccctccacgccctccccccccc

SEQ ID NO: 130198 - DNA, 320 bp, Glycine max
  Clone ID: PAT_MRT3847_88578C.1
aaaagttgcctatctaatgtttatctcaattcaacatgatttaattccgggggggggggcgaccgcaaactctttctttatgcggcactgaaaactggacgaagttttggttccacaatgtttagcacataaaccaggcccatcggaacacccttttatataaaaatcttcacgaattcaaaatcccagcctgatttaacgaacttactcaccaacagggcattgctctgacaatggctttgaaagcaaaaatgacctatccttcctttaccaaacggtttgaaaaatattctctcacaagaaacctttatgataccatg

SEQ ID NO: 130199 - DNA, 834 bp, Glycine max
  Clone ID: PAT_MRT3847_88579C.1
cttgatgcctgcgactaaaaggattttttatttaaatttacattaatgttacatatgaagcttacaaacctccatggttatctaccttgaatagttcatagccataaaactatttccttttttctgtctaagaggtcataaatgagcctccatgttacagtggcacatataatgcgacgctttcacgatcaagagtcagagttaaatgatgttgcactcatttcgcgctcacctcatccattgatcttgcaagcctatgtcgtctgtcacaaacgatgctttggaaaaggttttagataaatgagtttatgcgaagtgttttaaggttaggaaattttgggaaaacaagtggcatgacaataccaactactttttgccttctttttcattatttgtttttaattaaactacattatttagtcaacaataaaaaaaaatgagagatataaagaggattgaatggtcaagagaaaaaaaaataactctcttctcaccagtgaccgattatcattggatgaagatcaacctaataaattattaattgaccttcatcatccattttatatttaacaaaatttaaataatttaataatatgtaaacttgtacacttgtaatttaagatttaattaaatttaatatatttataagcatagttatgaccttgtttaaaattttgaacatacaacatatttttgtagaattcaatatatataaacaatcttaaattagaatttaaaatatatattatttagtgtacaataacaaacataatctaatacacacataaaaattagtcaagagaaaaattgaaatgataacaactttaacggctc

SEQ ID NO: 130200 - DNA, 750 bp, Glycine max
  Clone ID: PAT_MRT3847_8857C.1
agtgtgactgatggcactgaggacaccacagaaactcaaactccgtcctcttcctcttttctctgtcttcagcaaactccctctttcacaacgccccataacaataataataatcactccgatgcttcggttgccgacatcctcgtctcggtcttcaccgaacaacccaacgccgacaccccggaactgaactgcttcgcccccattctcacccctccccttgtcgagtccgtcctcacgcgcctccgcacgtggaaactcgcccactccttcttccactgggcatccaaccaaggcttccgccacacctgctacacctacaactccatcgcctccatcctctcacgctcccaccagacctctcctctcaaaaccctcctcaaacaaatctcagactccgccccttgttccttcacccccggcgcattgggcttcctcattcgctgtttgggccacgcgggcctcgcgcgagaggcccaccacctgttcgatgaaatgcgactgaagggtctctgcgttcccaatgattactgctacaactgcttgttggaggctttgtccaagtccggcgaggttgatttgatagaggccaggttggaggagatgaaggggtttggttgggagtttgataagttcacgctcacccctttgttgcaggcttattgcaatgctcgcaggtttgatgaggctctgagggtttataatgtgatgagggaaaagggttgggttgatggacatgtttgctctatg

SEQ ID NO: 130201 - DNA, 435 bp, Glycine max
  unsure (1)..(435): unsure at all n locations
  Clone ID: PAT_MRT3847_88580C.1
cggctcgagctcgggccggaaactatcatgttctctttgattcttctctaccagtgtcccttccctcgatggtaaaataaggcgagacacaggtttctggatgttctaaactttccctctcgtgttgagtcttcaatcatttcangtaacaacatccttcgttctatgcttctttgcttcccaaagaaattagggttattatttgcttctttttctctgtcattttggtaattaatctgataatcgattattttctttgatttcatgtgctgaaagtgtttgataaggttttcatgttctgacatttttttgcaggtaaattttttagacttgtggttgataattcgctgtaattttatggtttttaaagttcctatanataattccatactaaaggttttggttcatcatatttctcattcttgtaaatgtaat

SEQ ID NO: 130202 - DNA, 691 bp, Glycine max
  Clone ID: PAT_MRT3847_88581C.1
tacggctgcgagaagacgacagaaggggtaacttggtaatatattttgttgcactctatggcctcagagacagaagctgctcttgctgccactccctctgatggtcccaccgtatttgacaagatcatcaataaggaaattccttctactgtggtctatgaggatgataaggtccttgcctttagggacatagatccacaagctcctacccatattctaatcattcctaaagttagggatgggttaactggtctgtccaaggctgaggagaggcactgtgagattctaggtcgacttttgtgcactgctaagctggctgcaaagcaagaaggtcttgatgatggcttcaggattgtaattaatgatggacgagacgggggccaatcagtttaccacattcatgtgcacctcattgggggacgacagatgggctggccccctttctaaaatgtgaaaagattcgtagtgtcacggtatgcctttgtgcagacctgcagttatactctgcttatgcaatctataaataatggttttaatttttaaatgactaagtagtgtcttgatgttacaccaagaaattatgatgttgtgttagatggcctatactaactatgtttaaactagtgtgtcaaatttatgctaaaaccatattccaaagtcgtttatggattatggttgttgatggcgttcg

SEQ ID NO: 130203 - DNA, 352 bp, Glycine max
  Clone ID: PAT_MRT3847_88582C.1
ggctcgaggtcccttgcagagagcgtctaacgggctgcctcaactttggcgaagtctacatatggtcgacacattctggattgccatgcatatgaacaaccatctgcaactcgccctggtgacagggtcgaatctcctaggcgcggacgacgactgttgaccccctcgacccaggactggctgcagatcccattcctgctggcgagccctcttgctctatacagaatcgatgtaaatgccgagctcatctgacgtaggtggtgactcaagtgcgaaaggttgacatcatgtgcattttatatacacactcgttacatttcttactagggaaagcactggagaattcagacat

SEQ ID NO: 130204 - DNA, 467 bp, Glycine max
  unsure (1)..(467): unsure at all n locations
  Clone ID: PAT_MRT3847_88583C.1
gttactttctaacttggattcctatcattcagactctggcaccacaaattcctgcaaagcttctggcaacacctgctctcctctctactactaacacccagaaaagcaagaacaaaaacatgtacctcagagaaacactacccagaagcagtgatgtatttgttgaacctgtctgtgtatgtagttctccaaagtcttcatgaagaagatgctcacagtcaaaaggttattctgcctcaaggttaatccagatggttttcaagggtgctccagcatatacctggcactagtgtccgagcctatgactaaatctttcatgtgttagtctatcttttaaaactttgcaaatttagtcgtgttgaactgatgttcattttgtttttcttatacttcacacatgttgtgcttatattgataatatgacttctatttaccttaatggtatgtgatgtgttcttatgaaaana

SEQ ID NO: 130205 - DNA, 298 bp, Glycine max
  Clone ID: PAT_MRT3847_88584C.1
ccaatccgcaaggaagtcctgctcagatcaggggtgtagcaactcagacacacgcatgataggcaagcacttcaatctatacaggaatgaagggagcaactaaagcaatggagaccctgaataagcggatggtaccggcaaaacaggtaaaagcgatcaaagaattccaaaagcatcagcgcacttggacatgacgatagagatgatgtcacaatctattgatgaaactctagacatagatgaggctgaggaagaatacagagagctcactagccagattcttgatgagattcggagt

SEQ ID NO: 130206 - DNA, 550 bp, Glycine max
  unsure (1)..(550): unsure at all n locations
  Clone ID: PAT_MRT3847_88585C.1
gtacactgaaattaaacttgattatatatgtaaaagggaatgaacattggtgaattgaattgaactgcactgaactccttaccacttaattacagaagctctatctatctatatcacatcaaggaccaattctcataaaaaggtaccatcatcaaagtttttgagtagaggttatacatgacaagaacacattcttagataggtctgagcagttgacaagccatattttacttcataaaactagtgagaggagattccaagctggaaatatccgggtttggcggatcctgtcctttgagagaagccagagagcccacatgacatggagggggttgcattgcatacctgnaagcttttttagttctaaatttcaaattctgaatgtcatccaaaattcacatctagttcttcttttgaagattaacacggagatttattagaactgaatagaaactaccctcataaatgaagagaatgaaatatattggggaaaaattactttaagtaatacatctaaatgtccccatctgactattcatattgccccctt

SEQ ID NO: 130207 - DNA, 406 bp, Glycine max
  Clone ID: PAT_MRT3847_88586C.1
acgagggattttatcctattcaaactataggagtgcctgggctctacatctcaatccagatattgacattggatgggtacaccctttagtcggagtggtcaaatggtctcatgatcatggactgctagctcgcattgcttgttcatgatcgaattagccgatcgacttgctttgacatcgtacatgaacgtacgatttcgcacatgctgcgcttgagattggtatctatccatatatgcaaactgatcctactagttctggtcccgaggcccgtgcgcttgagacagaaagtctctgctacgcatcgaccaaggagctgtgcctgtactagatgtagctatgtccccggtctagatgcctaatatatactgcgctgtgatagcacatgctcatgatactgatgtgc

SEQ ID NO: 130208 - DNA, 572 bp, Glycine max
  Clone ID: PAT_MRT3847_88587C.1
gggaaaaaaacccattaagaccccttgtttcaaaaggggttgacccaaaaaagcaaggaaaattttacaaaccgggggccttttttgggggggaaaaaaaatggcccaccccccggcttgggaagggttaatccacccaaagggggggttttcccccaattttttaaggaaaaaaaaaaaggggggggaaaccctttgccggggggggggggggggaaaagaaaaaaaaatcccttttttaaagaaaaaaaattttggggcatttggaaaaaagactttttttacaggggggaaactttgggccccaaacccctttggaattttcccaaaaaaattggcggggcaaaaaaaaaagggggggggctgtaaagggccccccccccatttttttttttggggtttcccgtaaatttttccaaaaaatttggacaaaggggggaaaaccatttgttttaggggaggtttccataaggacccccccctggggaaaaaaaaggggcccttggttttgttaaaaacccaagggcaatatcgggggaaattcctaaaaaaggccccgccttgggggggaa

SEQ ID NO: 130209 - DNA, 268 bp, Glycine max
  Clone ID: PAT_MRT3847_88588C.1
tcctctagagcggccgcttttgggtttttttttttttttttttttgggggggcttataggtacccttaattagatgaactctggccaagccctagtattagtaactcattcccctggaggtttatgcaaaaattggaaaggcctgggagtacctttggggggggggaaaagtaccgcccggagaaaataacaactcacaaaccccctcccaatggttatttcctatcaaaatttccccactatctacatgatcccccaaattaaataa

SEQ ID NO: 130210 - DNA, 169 bp, Glycine max
  Clone ID: PAT_MRT3847_88589C.1
ggccacctctgctattcaccaatcagcattcactggtcaaactgctctgaagcagctcaatgagttcgtccgtatgaccggtggcgccggcaaaggtcacactaacatgcaccgcaccgtcaataatgctcctcacaccatttggtataaccctaaccctgccaaatac

SEQ ID NO: 130211 - DNA, 487 bp, Glycine max
  Clone ID: PAT_MRT3847_8858C.1
gtttttgatttatgaaaaaaaaataataagaaaaatcaattatgtgttaaaattaattgtgattatgaatgtgggaagtggggtctatgtttgcgcttgaactaaggacggcgtcgtttagtaagggagggtgtcacgtgacattgttgtgaggggtcggtggggaccacgtgcatggggtttgaagttaatttgaacccttcgattgtagggtcacacgaagaatttgacctctcgacaagactgttcttctattcattggtcattaaaagacaaaatttgacagagaaatccgcgccccagttaccccttctctctcacttctattcaattcaagtgaagtacatatttagtatattatttttctttgaatttgtattggtgtttaattgtgtttgtaatgagttagagttagagttagagttagcaacttggatagtttcacaaagagttttttattctagattcccaccaaaataaatttggg

SEQ ID NO: 130212 - DNA, 165 bp, Glycine max
  Clone ID: PAT_MRT3847_88590C.1
ggaggccatagtaaccattagttatactggtcttcgcctatcattaatcatgacgcaccaatctttctattcctcacagtcgcatatcacacgtttatccatgcccaccttccagactatgatggtcactctcacgatcgtccagatggaatgacatcatttcac

SEQ ID NO: 130213 - DNA, 352 bp, Glycine max
  Clone ID: PAT_MRT3847_88591C.1
gagcttcttggcgacaatgggagggcacactagctcccagaagcttatattgtgtccaaaaaaaaaacgaaaaaggttcctatcaggcggtcgaactagaggctcgctgcttaactgcccttgcctgcttgcgcataaccatcttatatgctcacgtgtaagaaatcgactgctgtttgtgatgcaaccttatgactgagcaaacccggccgttaacaactttagtggtgttgcaacccattctcatttcagcacctgtcttacaaactaagatgccgcttacgatagcgcttcccaaaaaatacgcagcctgaatgagccctcttaccccccctgtattaccgcaatatgc

SEQ ID NO: 130214 - DNA, 1091 bp, Glycine max
  Clone ID: PAT_MRT3847_88592C.1
aattctgatactttctctcttgcttctctcagttagctccaccttcctctttctttatcctattgctatattttaccaattttagttttaccgttgttgttggcaatgaaaaaaatcatcatcagcttcaaaaggtgcagcagccaatgatggagttattaagggaggaagcatagattgggagctaagacctggtggcatgcttgttcagaagagacaaccccttgattcctcttctagttccatgatcaaaatcaaggtctctcatggttcttaccaccatgaggtcactgttcctgcacaatccacttttgggcatctaaaaatggtgcttacatccgagactggtcttgagcctaaagagcaaaggttactatttagagggaaagagaaagaggatgaggaatgcttgcatatggtgggagtgaaagacatgtctaaggttatattgctagaggatccagccagcaaagagagaaagcttgaggagatgcataagagtgaagatatctcaaaggcatgtgaagccatctccaaagtcagaacagaagttgacaagctatatcaaaaggtggttgctttggagacaactgtttgtggtggtgctaaggttgaagacaaagaatttgctatcttgacagaattgctaatggttcaattgcttaaactggattccattgctgctgagggagaagccaaagggcagagaagagttgaggttcgtcgtgtacagagttatgtggacacaattgacaacctgaaggcaagaaattttgctgcatttagcaatgctggtaacaatgcagtccctgtgatttgggaggccttggaatccggagttggaagcttgaagtcaccaacttcatttccaacatctacagtgattactcaaaactgggagcactttgaataaatacaagttaatccttcccctttatttatagaagaggcttctatgatgacacttggttttttgtaatgacaagctgtttttggtagggaagggttatgcttgtacaaaattaatacatgtacatgttacttctctatgtccaaataaacactgattttgccttgtgtgttcaaaaata

SEQ ID NO: 130215 - DNA, 255 bp, Glycine max
  Clone ID: PAT_MRT3847_88593C.1
acgcttaccttaaccttttttatattcaaaaaattacaattatcttcttggactacactctgggcaatgacacatgccgactatgcaccaacatattgaagcaacaccctattttatacttaccagatgggcaaattcaccctctctcataagactggacttggctcctataacaagatacaaagcaaagaactttattccacatgcagcgcttgctgaatactacacttaaagatcttcaccaaatggatttct

SEQ ID NO: 130216 - DNA, 290 bp, Glycine max
  Clone ID: PAT_MRT3847_88594C.1
ctcgtctgcgagaagacgacagaaggggaaggagagaaaggattaccctcacatccgggtcatgaaggagcacaagctgctaacggacacccttcatgggcatacacatccatctcctggggcacacactacctaccaagggtacccacccgctcacggctaccctcaacaaggaggctatactccagctggttatgccccatgcggttatcctccagccccatagtggtcacgccctctgatggttacccttcacacgatcatcctagatcaaaatcttcacatggatt

SEQ ID NO: 130217 - DNA, 484 bp, Glycine max
  Clone ID: PAT_MRT3847_88595C.1
ccacgcgtccgaggacagatccatttatgggcttatagctgctgatagcatagatgttacttatctgctgcaaggtgcacatgataaaggagacagtgacagttgatactaggaaggtgattctcatggacctagtcctacctatcttgacctgtggagcgcttgacacactcattgtgatttactagctacgggcttggtaagtgaggagaaagcgagagactgactctttcacttatataactaaacacatcacatgccttggatgcgctactctgagacggagaggcaggaaatattgcaaaaaacccaagagtggtgtctgtgaaatcgtgcaaagaacataaaatggtcacagacgtagggcttgagactttcatggactacacagaattgaatgcgactctggatggtacaaggggagattacatgaaaatacaattgacggaagcatcgacacaggtgagtggtctgaatccgacag

SEQ ID NO: 130218 - DNA, 2158 bp, Glycine max
  Clone ID: PAT_MRT3847_88596C.1
cctgcattcacctcatcagctcttggttcttgttccgtaacaccatcagcatttctttctggcgctcctccatcaccccgtggagtcttgtcctcgacgtgcttctgttgagccatctacggcactgcgtagacccatccctgcgattgagaatgcttttgctgttgaaagtggtctgcagcaccttctctttttggctcaacgccatctccatttggagccaactcttcttaaaaacccggctttgggcaatctccatccctgtttaatactgctcctgctcaggctacatcttcaccatttggcaatagcatttttggcaacacacagtcatctccattatttagttctgcagcccctacaggtggacagacaggttcagcttttgggcagaatacctccccctttggacagactactacaccttcttttagtcaatcaagcctgttcagttcaccttcttctgggcttgttggaagtattttctcatcaagtgcacctctcacttctaataatctgacaggttttggtcaaacagcgccatccatttcaacaccttttcaacctgcacaacctgctcagtcgagtggtgcttttggctttagcaactttggtcagacacaacctgttggtgcaagcagcttcggtggcactccaagaatctttggatcaaaatattttagacccgtatcttgaacccccccaaggtgatggctcaagagagagactgaggacacaggttgctgaatttgaatcatatgatcccactaaaggagagtggaagaatcagggtcagccacttcagcatctactggcatctctagcatgaaaacagtcggataaatgatgacaactaagggttggtccgtttgattcgatacggtggatgaccacagtagatttgagcttcttagaaccaatgatcattctaagaatgatggttccaatggttgcattcttcagtgatgatgaggatactccaacgacacccaaggctgatgctctgttcattcctagggaaaatccaagggcgttgataatttgtcccatggagcattggccaggaaaggtttctgagaaggcatcaacatttaaggatagatccatcccagtgaatgagaatggtaatatctagagtgctgtagaaaatggttttgtcaaggagcaagctcagcctatatcgacaaagccaacatccaatgggagcaatgaagatcattctctacaaaaggcggacgtgtacaagacactcagtggtcacagagctggtgaggctgccattgtctatgaacatggagctgatgttgaggcactaatgccaaaactacggcgatctgattactacacactgcctcgtatacatgaactggcggccaaggaaagagctgaaccaggattctgcagtcatgttaaggacttcgtggttggaaggcaaggttatggcagcatcagattcttgggtgagacggacgtgcgacggctcgatcttgagtccctcattcagtttaacaaccgggaggtgattgtatacatggatgatttaaagaaacctcctgttggacaagggctgaataagcctgctgaggtgacactactcaacataaaatgtttcgacaaaaaaactggccatcagtatacagaaggaccgaagattgagaaatacaaggagatgctcaagagaaaggctgaggaccaaggtgctgaatttttatcatatgatcccactaaaggagagtggaagatcagggtcagccatttcagcatctacaagctagtagaagatgaaaacagttggataaatgatgacaactaaggttggtccgtctggttttgatacagtggaagaccacagtaaatttgatagtttcagaaccaatgttctgctttaaaatgtatttgtttttttcctgtaaattgtcactgtattgtgtggatatagcttgggccaatgttgttgatgtggttcttatcttgctttggggatatttgatagatcttacggttggggatgttcaaatatgggtttcctagtatcatttttttacgtacttaaattttgattcgcatagctgttatggttatttcaacttttatttttttgaattatgatgtttgatatgattttttttatttcaataagttgattaagagttcagtc

SEQ ID NO: 130219 - DNA, 464 bp, Glycine max
  Clone ID: PAT_MRT3847_88597C.1
cctttattgacatctcggcatctctctcaaagacgaataaggcttcctgtcaggaaatatcattctaagaatgatggtccaaaggttgcattcttgggtgatgagtgaggatactccaacgacacccaaggctgatgctctgttcattcctagggaaaatccaagggcattgataatttgtcccatggagcaatggccaggaaaggtttccgagaagccatcaacatttaaggatagatccatcccagtgaatgagaatggaaatatctcgaaagatgcatctgtaacacctgatagaaccacttcacaggataaagataaagagaagagtgctgtagaaaatggtgttgtcaaggagcaagctcagcctataacgacaaagccaacatccaatgggagcaatgaagatcattctctacaaaaggcggacgtgtacaagacactcagtggtcacagagctggtg

SEQ ID NO: 130220 - DNA, 187 bp, Glycine max
  Clone ID: PAT_MRT3847_88598C.1
agatactggtgggaattcctttgaaaggcaaccctttcttacttgaacgatggagccaagtgtatggcagcttaactggcccaatccgggttttcagacttggaacactggtccttgcattgattttttcttcaatttcaggcaggttggttcccaaccttttgaaagcttttaatgccttcttatc

SEQ ID NO: 130221 - DNA, 508 bp, Glycine max
  unsure (1)..(508): unsure at all n locations
  Clone ID: PAT_MRT3847_88599C.1
ccacgcgtccggtctccctctctccactacccttttttttttcactttccttcttattatctcttttttttttttttggggggatcttttcttttctttggatggactttatttatttattgatcttgggttttggtttattttattgggcgtggaatccaagtggggaagttagaatttttgctctttcccattttgcatgtgtagtttgagggcactactgacttaagatttggaaagggggtgttaagggtctttcttctggtattgcttattctcttcttcttcttcttcttcttctcagnttttagctatggacgttgtagttgaaaaaaagattgtttttaagttttttttttctttttaaatcaacctatggttgatccagttcttgggtttgcccgtttgggatggttgatatctttcgggcatgtctgggttggcttgttggtgggatgaaaagtctacggttgtgacaaacatggcagctgagcttggttggatatct

SEQ ID NO: 130222 - DNA, 308 bp, Glycine max
  Clone ID: PAT_MRT3847_8859C.1
tgtttggacccacttacagggcttctgtttcccgcttgggacacgcgttgtgatcgcatcattataccgagagggcttctgcttgcggtccttaaagcgcgggtcgccgtttgaatgctcttaatgataaccctctttatacatctctacaatgaaccttgtgatgctgaacgacaaccacacaaccatgaaatacatggtgcaacagaaaacccctgaggaaaaagccgtcaccaacatgtcccaccttctgtttggcattggcggctcgtctgctacatggcagacgcgtggccaatactctgaac

SEQ ID NO: 130223 - DNA, 252 bp, Glycine max
  Clone ID: PAT_MRT3847_885C.1
catttgacaggattggattcgtgacacaagatgatgttctgtttcctcaccttactgtaaaagaaacattgacttatgtggccctcctaagattgccaaatacattaaggaaagagcaaaaggaaaaacgagctttagaagtcattgaagagctgggattggagaggtgccaagacactatgataggaggttcctatgttcgaggaatatctggtggagagaggaagcgagtttgtattggcaatgagatca

SEQ ID NO: 130224 - DNA, 452 bp, Glycine max
  Clone ID: PAT_MRT3847_88600C.1
aagggattggaaaacatctttctttgctgttatccctcaacggaaaagatgccaatccgattcagaagtaaatgcagaagatataataatagaggcagaggaagaaagtgaacaaaatgatgatataacttcaaataaaaagatatgtgttgaggaggtcccttctaacagttagaattgtctctggcacaaagttttcctacaaacctgttgatcttctcctggccatcaagacagtagtttcaaatcagagctttcacatgcaaccttaatactgacatagggaattggcattatttttatatgcttgctttgtaacaatctgtaacaggatggaatgatttttgctccagggttttggattcatttacaattgttcttaattttaattttacattcattttcgtttctatctctttttcaccttatttatttaaccattttcttttaac

SEQ ID NO: 130225 - DNA, 239 bp, Glycine max
  Clone ID: PAT_MRT3847_88601C.1
tccaaaacaaacccaaaaattggttggggggctaaaaggtgattgttacaaaaggcaatatacctttgccggttggaatccccaggataaggaaaattaaaacaaaggccaaataatgggggacaaaatgggaattccacaaggcccctggcaagaaaaatttccaatttagccaacaatgaattgccggttttaacttaaggcaaccaaattcctccagaacaaacctgtcccttaaa

SEQ ID NO: 130226 - DNA, 215 bp, Glycine max
  Clone ID: PAT_MRT3847_88602C.1
aacaataccatccatctattttgaggtccaatgtataatcataccacattacatctcactcaattactatctccaaaattaatattcatacatcccaccatcacttcaacatcattatctaaaacattattttaacacaaattcctaccatctaataaaataactctatattataatttaatatcaaactatattcatatattccccacccatta

SEQ ID NO: 130227 - DNA, 657 bp, Glycine max
  Clone ID: PAT_MRT3847_88603C.1
atggcttctccacctgcctcgcctcctcctcctcctcttcctccttccaacgcatcggattcgccgtctgccgtgaagcggacacgcaaagcttcacgtctacgatccttgtctactagaccacctagtgttgagagaccagtggtccacgttgatcctggtaccagcaaggccgacggttcccataggaagaaattaagaacatatttggggattgtgacacgtgataaggtggacgtcatgtggaaggaggtccctactgctcaaaaggacttgatttggaaggatattcaggcggaatttgaaatcccagaggcttctgacagtaggacaaaaaagaagttacttcaaactgtcgacgagagatggaggcagtttaaatcagacctcacgaggaaatggacccttgcagctgaccaggacggtgtggacgacactgtctgtgagaaatacggcataagaaaggaaaaatgggcccagtttttccagactagcagagacctttcttgggagaagctcctggctgagaagaccaagaagaagatggaggaagttgcacagtcaggaagcgttgatggcgtcatcgatcctccatcccccgtcagacgccatgtgaagtggaagatatcccatgtggcgtccctaactaatgactag

SEQ ID NO: 130228 - DNA, 137 bp, Glycine max
  Clone ID: PAT_MRT3847_88604C.1
caaaggggacgtagcaaagtactcatactgatatgcaagtgacttcatcagtgatctagtgcgcatctgatgcaactgtaagccgagcaaccgttgtcaatgctggtgaatgatctgaagatcaggacttatgatgt

SEQ ID NO: 130229 - DNA, 363 bp, Glycine max
  Clone ID: PAT_MRT3847_88605C.1
ccggctcgagcgcttggaacatgactctgcactactcaacataaacgacactacaacaatcttagcacacctctctacaatcacatggacgcatagtcattgtagtacgacaatcactgaccactttcgactggctatgacatccgtagaacatgtgcgtccatgcttgcgggcaactctttccgataggtatcttgtgctcgctcctgactttgctctctcgatctgtgcatcacagccttcgtctctctccagtatagtacccctaaagcgactcactttgcactaagacttttgaaccgccttgccgacgatctctgaaacatgcgccaacgctatcacaagcacgactcctccacagat

SEQ ID NO: 130230 - DNA, 189 bp, Glycine max
  Clone ID: PAT_MRT3847_88606C.1
gagcaatgtatataggaaattgtaggccattcttattgcttacgctaatcctatcacatcatacgctggtttgcctataattgctgctataaagttctacagatgaaactagaaaagaattcacggtgtaacttctttgaagattgattccaccaacactgttctgtaacatgtaaggagcatttaatg

SEQ ID NO: 130231 - DNA, 311 bp, Glycine max
  unsure (1)..(311): unsure at all n locations
  Clone ID: PAT_MRT3847_88607C.1
cccacgcgtccggaaaaagccaaaaagcctaccttgttcttatagacttggagttaactgggattggaattaagtatggagtctccaacaccaataatccctttcaacgatcaagccttctgcttttcctcactgctatattttcccacgtacttgcatccacggctgacatgaccaaacaaattatcatcataacatttcacatgtcagggataacgggatgtgaaacactcatgtggattctcattcatgactntatgtgctactttatggtcaacttgcttcttttactgctgctagccaaattcttc

SEQ ID NO: 130232 - DNA, 105 bp, Glycine max
  Clone ID: PAT_MRT3847_88608C.1
gccgcccgctgtcagtgggtgaaagtccgacaggccgaacacgccagcattggctaggatcaacctctctacaccgagactcaggcagccatctatcctcggacc

SEQ ID NO: 130233 - DNA, 227 bp, Glycine max
  Clone ID: PAT_MRT3847_88609C.1
ctctttgatccacatactcccatcttggctcaggggggtttttaaagatattcggtctctaagccccatacaaatttgcggcttattttacgacggcagattctaattctggtctaaacacgataaaaatcttgctttgacagaagaagaaaagatggaattgattagaaacataagcattcctgctgttgttctttgcatagcgagcctaatgattttgaaaaaca

SEQ ID NO: 130234 - DNA, 154 bp, Glycine max
  Clone ID: PAT_MRT3847_8860C.1
ggacagtgtttaggatcacattattacatcctcgcacgcgttgtcgaatgatgattgccagtatatcctcctgcaattgcgcattggggtcaggtatcttcgactcagcgagcaaccgggatcgctccttgtatcctggtaattctccaacata

SEQ ID NO: 130235 - DNA, 342 bp, Glycine max
  Clone ID: PAT_MRT3847_88610C.1
gggggatggggaaactgactttcccccagggcactcccctatgagttaaaagaatgcctcttactatagggggaggagctggtgcaaagaatgctattctcatgaatacgccaactgctgtactttcaatgtggagatatttagctggagatcccgtactaaaagtatcttaagaagacttctccctacattaaatgtcctgtcaacctcttcatagcaacaggaaattaagctgatgacaccactaatatagaggatcttccccacatgctggagcagaatggatagattcacgaaaaaatcgtattcgaaattttcacaaacaagaatcccgcacagttt

SEQ ID NO: 130236 - DNA, 387 bp, Glycine max
  Clone ID: PAT_MRT3847_88611C.1
ttccacgcgtccgggtggggtctctctcctgtctctattttttctctttccctctcttcttcgccgctcttttgtaggggttctcacctctgcggttagggggttaaaccctggcttccgattcagattcggatttagggctctcgatgatcgattctgcctcccaagaaaaaccagatctagcgtttgatcattcatcatgggcactgttgctagtaccgaggatcaagcaactgatttgctgcagaagctatcgttggaaactcagcccaagcccttggagattcctgcgccaaccaagaaagccactgggaagcagaatggctcagttgactcaggaaatgctcgtgaaggccagatcccattggatgaacggtctgtaacccc

SEQ ID NO: 130237 - DNA, 494 bp, Glycine max
  Clone ID: PAT_MRT3847_88612C.1
tggcttggaacctttgggctgatttatgtgcttgcatggtcgtgagaagatgatagaaggggacagtagtactacataaagtaccgaacctaaaaatccaagcctaccttccgcgccccgtccctccttctaaaattaaatacgctgaatatacgtggtaatcgtgatcgtgtcgataagatcagtcgtattaagggaaatagtcacggcgccaccgcagagatcgagaagagccatactgagatcgccgctacggacgccttagtagtcgagtacgacgggaagcgtaagcgcggtatcaatcgtatccgtatggatcgtattcgcggttaccaaggaacacgcacgaaaacgcaaccgttacgcgcccggtaacataaacacttaaacaacgcaactcctgcacgaacaaacgcgcgcgtcgccacttcatcctaggctcgcgcagctacgtagctcgaactaccctaagccttcgctcccagcaacacaat

SEQ ID NO: 130238 - DNA, 324 bp, Glycine max
  Clone ID: PAT_MRT3847_88613C.1
tcatcgcgtccggcacagggtgagagacaggggaacctatgaggctctgtccgtatcaaacacgcaaaacaagccgcgggaagagagagcttgaagattagaactagcggcatgactgcatcatgcaggacaaggctggtctccgcggtctccaccggcgccgtggcagcacatactcgccgaagatccagcaccagatgcatcagcgacggggccggacacagcgccacataggggcacaactttatcggaaggaacgcgaactatggccttcaaacgaggggagagagcacggtcactgtcacaaagagcgactgcgtaagc

SEQ ID NO: 130239 - DNA, 525 bp, Glycine max
  Clone ID: PAT_MRT3847_88614C.1
cttcaacaccaacaaagtctacatccaaagagaaaactgaaaaagtcactaaaggaaaaggcaagaagaaagagaagtcaagccctagtgataatcagttacgtgatgcgatatgtaaaattcttaaagaagttgacttcaatacggcaacatttactgacattctgaagcaacttgctaagcaatttgatatggatctcactcctaaaaaggcatctataaagctgatgattcaggaagaactgacaaaactagctgatgaagcagatgacgaggaggacggagaagaggatgctgagaaagatgaagccccatctacaggccaggaggttaaagcctgattgaggagtagacctgactgcttagcaatgcatactataacccttgttatgcatgcttcatctgtacactttgttgggtggaagtggctgtaacttattcttagcatccatccaatctgaagaaacttgtattttgtcaatttaagcttttggtgggctgccagtgtgcagctttttgtttaca

SEQ ID NO: 130240 - DNA, 324 bp, Glycine max
  unsure (1)..(324): unsure at all n locations
  Clone ID: PAT_MRT3847_88615C.1
ctccccaagggaanggtgtaaattaaaaaggggttgggttcccaagaaagggccaacagggaatcacagcctacgccatctagactgcagtgggaggatgatccaagtcccaccccacttacataaaaaaaatccatggatactgcgagaataatacacccaccaacccatattatactatcataatacaaaaactagaaaccttgctgacgtgcagcgcaaacaaaacagggtgcctaaaccaagcgcccgtcgcaagaacctagaaggccgcatatactagacacacccacagatacatgcaaaacccgccatcccacaagg

SEQ ID NO: 130241 - DNA, 469 bp, Glycine max
  unsure (1)..(469): unsure at all n locations
  Clone ID: PAT_MRT3847_88616C.1
attttataaaaagccttttttagccccaagaagcatgacttttacaattattttatctaaaccatggacagacttttttttatggggatacacgccctgatcgaaataaaaaagaaatggtacgggtcaaatattttacaaaagtccttaantataggaacaaaacgttggccagtaatataaatttattttgcagaacatactacgcaattgtacatgaaggaaactactacacaatgtcttggcttcggggacaggagcatgggcctcgatattaaagctcctggattcttgtagaataagaagaaattatgtattatgatacgacaggggttgggtcaaaacccatttctccatccgacaatgcctacacattttgctccctttagagcatagaacccattaagttatccaaggaccgaaaaatattctgcataattccatcttgggacttcacttggcccaaaaa

SEQ ID NO: 130242 - DNA, 287 bp, Glycine max
  unsure (1)..(287): unsure at all n locations
  Clone ID: PAT_MRT3847_88617C.1
ctatcctcatatgtaattttntatcacgtgtaattgatnatggaaaaaaattacatatgaggataganganacaaactagaatggngaggaggnagagaaagtgagnagcacacacgaattaagtaaaatnnctgananannttatagatatgataagggnnaagctcanaaaactcccagaagattttcctgaaaaggnagatcangaagancccaaaaagattgatgncagattganacangaatagatcctcatgacaatgaggttcagctcatggnaacaaat

SEQ ID NO: 130243 - DNA, 384 bp, Glycine max
  Clone ID: PAT_MRT3847_88618C.1
tcacaatctcgtatcaaaagagatgaattacgcccgtctgatttccggcggaggatggcttctccggcgactgtgcacggcggctgagactcccgcgaaaaagccaaacctctatcgaatgttatcggcgctggacatcaccggaggcaccgtgtcgcaaacgttggaccaatatataatggaaggcaaagtcatcaaaaaaccagaactcgagcggtgcgtcgagcagctccgaaagtatcgccgattccagcacgcactcgagataatagaatggatggagataagaaaagttaatttttcctggagtaactatgctgtgcaattagatcttgtgtccaaaaccaaaggggtggatgctgcggagaattttttcggcggtct

SEQ ID NO: 130244 - DNA, 368 bp, Glycine max
  Clone ID: PAT_MRT3847_88619C.1
aaaaaaagaaaaaagagcataggactttcaacctccaccaaagggcaaaagggcacacgggaaccccaaaacaaaaggaaaaagaggcatggccccagagccaacggcccaacaaattaaaaaataaaaaaataaaccagaaaccaccgaaccccggaaaacccaaaaagcaaaaaaccttaaacctcaaaacccaaagtgcaaagggaattaacaaaaaacacgaaggccggaacggcagaccggaggcctgggggtaccgaggaacaaaccaaaatctgaaaacggagcagggggaacagggacccaagaaccaaagcaccaagccccacgcctgagcattgagggagacacggtacccctgggcc

SEQ ID NO: 130245 - DNA, 972 bp, Glycine max
  Clone ID: PAT_MRT3847_8861C.1
gttttttttcctatcttaattgctttaataattctttctcacacatggctctctctcttttgtgtcctcttcttgccacctttcttttcatgcaaactatggcagatacttcatttgttcaatctcgtgcagcattttacccaaactctcaagaaaatggcacagacgttggtgcatgtgaatttggttcctttggcgccactgtttaatggcggcgacgtatcagctgcatctaatctttatcgaaatggtgttggctgtggtgcctgttaccaggtgagatgtggcaatagtgctttatgctcaggcaatggtgtgactgtggttataactgaccaaggctcaggtcataacactgacttcattcttagccaacgagcctttgggagaatggctctgaacactgacgcagctgcttctctattagctcttggtgttgttgatattcagtatagacgtgtttcatgcagctacccaaacaaaaacattacagttaagatacatgagagcagcaacaaccctcactatttggcttttgtcatatggtttcaacaaggaaatagagacataactgctgtccagatttgtgagactcagaactttgtgtgcaagttactggaccggagtcatggggcagtttggaccactacagctccacctagtggacctttgtctttaaggatgttgtttagtcctgaagaagagggagaagaaacatgggtggttcctgttaacaagataccacaagactggaaggctggacaaacgtacgacttaggggtacaagtggaccaataggaaaagcagcaaaaaattattattaatctgctattgtctgtaatgaaatagtagtaaaaaaataagttcagtcgatttacactattttattccccttttaacaattttgttttctcataagtagtgaggactgaggaaattctatgatcttactagacatgctatgcctcgtgc

SEQ ID NO: 130246 - DNA, 512 bp, Glycine max
  Clone ID: PAT_MRT3847_88620C.1
ccacgcgtccgctctttaattttttttttttctttgtaagcattttcttcctttctactgttgtgaaacgtgttgattctttgtgtgatgcagtttccagttatgttaaactgcatgagactatgattgaccttcatgtttttttttttcttgaagtttctgctgcattgggggggttgtcaattattgaacatgctttatgatctggggcatgtgttagcggttctttgaattttttaatctgcaatcgtcaagtgtgcacttttgtccttccctttcaattcttggcatccatctcttgaaattttggttgcggcgatgatacccttttgttgaattttgctttctttttgacaattagagagtccacatgcgaacggattttatggagggaaccgtctgatgcctagcttaaagatgtttttgtcttcatttctttcgacactttagacatattataccactcatgtttgcttgtagcccagagcatggcgacaatgggtgtatgtgct

SEQ ID NO: 130247 - DNA, 404 bp, Glycine max
  Clone ID: PAT_MRT3847_88621C.1
aataacaatcattctgtaataatttatgggccatggggatattgtttgcatcattcatattcatcataccgcatcatgattgcaaggaatgaaataccgaaattcattcttcatttaattctcttcaaattcaatataccttctactagtgaatgtaaatgacttagcaccccgtattggcctttttcttccttcagagtaactcgagttatgcttcggtattaccacaacatttaactggtaaatttcctaggcatgtcataaacctttatagaaaataacaacctcatataaagatattctaggcatatacagttcgcttcgaatatagaggccataaagttgtactatcttttgaatagttaagtccaagggaaccattttcaaacagttgtcatggattt

SEQ ID NO: 130248 - DNA, 830 bp, Glycine max
  Clone ID: PAT_MRT3847_88622C.1
gaacgttttgatcgagaagaatttgttaatggtgtcagtagatggcttcaaagggcccagcgtgctcgagttgcatctggtgatgctggtccacacacaatgaagtttttaagtgattttcacacggaaaccgtccgggaacatgatctgctggatgtgggaggtcaggttaatgaagaggctgagggcattgagaatgctaaatggatttccatcaaagcagttctgcttctgctattgggtactattattgctgctgcgtttgctgatcctctggttgatgcagtggataacttttctgaggctacaagtattcctgctttcttcatttccttcatttttctgcccttagcaaccaattcaagtgaagcagtgtcagctataatttttgctagtcgtgataagaggcaaactgcctcattaactttctctgagctatatggagcagtgacaatgaataatgtgctttgcctatcagttttcttggcccttgtctatgcgaggggattgacatgggacttctcttcagaagtgttggtaattctcgtcgtttgcattgtcgttggcgtctttgccagcttgcgcactgtcttccctctatggacagctattctggccatcctactctatcccttctctttggcattggtgtacgttcttgattatgtatttggttggtcgtagaccaaaaaaatgattcagatattcgtgctgtatggctcttacccttgttggggtgtatggtttttgtttgtagtctttgtgtgagactatgttgttggtgacttaaatttatggtggaattgacatcgattgagaacgtttcaggg

SEQ ID NO: 130249 - DNA, 479 bp, Glycine max
  Clone ID: PAT_MRT3847_88623C.1
cgagaagatccccgaggctgaacaatgttgaacaacgacctccccctctgagacgatgtcccaggttgaacaacgagtcaagcgacaaaaaattgaaagacacgagagtgaagaagggcggtgaagctgaaacgaaggaaaatcgtgtcgtttcggacgagggtttcggtggaggaagaaagaagaagagaaacaggaagaggattgaagttgaaacgcaagaaaacggtgtcgtttcggataagggatttgttggaggaagaaagaaggaggaaaatgaggagagggtgaaaacgaaagcaaattgtttcgttttggatgagggttttgatggaggaagagagaagggggtaaatgggggaaagagaaagcgtggtggcgaagaaatcagtaaagggtggacgaaggaacaagaattggctcttcaaaaagcgtatcttgctgcaaagcctagcccccatttctggaaagacgtttcg

SEQ ID NO: 130250 - DNA, 1758 bp, Glycine max
  Clone ID: PAT_MRT3847_88624C.1
tgctctattgtgtctctcggtttattgattgcttattgtctttaccagattttccagccctggatacaaaggaggaaacttgaatttatcaaacacaagcatgttatcttaggacttttgacacatttgaagaagcgtgcattgggaaggcttctgaaagaaaatggtgaacctgacaaagaagagattagaagattgtttcaaaccattgacgaaaatcaagatgacaatcttactcataatgaattgagagcactggttattggaattcagtttgaggagattgacctggatcatgatgatgctgtaaaaagaatcatggacgactttgatacttctggtaatgaacgtgttgatcgagaagaatttgttaatggtgtcagtagatggcttcaaagggcccagcgtgctcgagttgcatctggtgatgctggtccacacacaatgaagtttttaagtgattttcacacggaaacaaagagggaacatgatctgctggatgtgggaggtcaggttaatgaagaggctgagggcattgagaatgctaaatggatttccatcaaagcagttctgcttctgctattgggtactattattgctgctgcgtttgctgatcctctggttgatgcagtggataacttttctgaggctacaagtattcctgctttcttcatttccttcatttttctgcccttagcaaccaattcaagtgaagcagtgtcagctataatttttgctagtcgtgataagaggcaaactgcctcattaactttctctgaggtttgttttctggtttttactctgtctctttagggcattagcatgcaagaattgattatgacctataaactattaagcttttgaaatcaactctttcactcaaattatgttgcatgatctattcattcagaacttagctaaataacatgggtgaattgactatgatttattcaggatgatgtttatagttaattcagttattatttaacgtgatgtacatgactaaggctggcttattttataagctttgcagttttttttataagcctttcaacacatgcacatgtataattagtgtaattttttcccctccttaagtcatttaaaaatgatttctattgtttttgcagctatatggagcagtgacaatgaataatgtgctttgcctatcagttttcttggcccttgtctatgcgaggggattgacatgggacttctcttcagaagtgttggtaattctcgtcgtttgcattgtcgttggcgtctttgccagcttgcgcactgtcttccctctatggacagctattctggccatcctactctatcccttctctttggcattggtgtacgttcttgattatgtatttggttggtcgtagaccaaaaaatgattcagatattcgtgctgtatggctcttacccttgttggggtgtatggtttttgtttgtagtctttgtgtgagactatgttgttggtgacttaaatttatggtggaattgacatcgattgagaacgtttcaggggttacagttttgagtcttttgactattccgctcattgtgagcagcaccgattaaaactatgttgcgaagctggtgattacaccaccgtatgtgattgttttctcatcattcagaaatcagaaacatgttattccattttataaggagccatacatgatttcgcacgaatatctgaatcattttttggtctacgaccaaccaaatacataatcaagaacgtaccggacgcgtgag

SEQ ID NO: 130251 - DNA, 2595 bp, Glycine max
  unsure (1)..(2595): unsure at all n locations
  Clone ID: PAT_MRT3847_88625C.1
ggtccggnattcccgcntcgacccagcgtccgctcatggtgatttgtgagatctaggaatccgccttagcccgtccagccggcgcgtggggatttcatcagtattgtaatggaaggaacatgaacagaaacacgatcgattgatagtctcattcggggttagaaatgtgacatttccatggatgaaaaccctaacccctcaatccctcgcgcctcttcctcttcctctcaggaattcctcaaacaagtccaagctgccctaaagcgccatcgccctctcggtactacgcaatcgcataacgtgaggccgaagcgcgccatggtggctctacgaaaggccacgaacaagctcgaggaggatccgccgtcgatctccgacacgtgcaccggcgaaggctgcaaaaatgagccctctttgctgctggaatctctgagtgttggtgcacacaacaaggttcagtttttaactgagatcaacaatgccactgcacagccgcaggatgaagcatcgattggattcaatcaacatgagaagcaccaaaatatgcagcaggcagaatctgaaactagcttggtatctgagggaggcaagacttctatgctgccaaaaagaacaatagttactcaagatcatctgcagcaattcaaaaactttttgaggcaaccagctacacaatcttctgtagtgggattgccatgtcctacaacgacatcagtccattcaacttcagctccaatgctgaattctataactcattcgaattcctgtatagatagtgggtcacatgtggctgcagaaccttatgggaacctggatggtaattctcgtcctataattcaaggggatgttaaatcaccaaatatttctctgaaagacaccaatagaatgtcaattgatcaggtggcaagtgcagtccaagattgtaattcaccaattgatgcagaggtgaccgttaagcagagtgacccatcttatgagcagcaaggatgtatgttaaaggatacaagtatttcaaaatgtacctcttgtcgtgatgacatgttaagtaaaggggaagtgtctgcagctgttaccaacttacagcctcaggttcctacttcatcttcagaagtgaaattggagtcttctaagttggaaaagcaagagaaaaataccaagttctaaagcatcatcaggccttcgaaagagggcctatgaccctgaattgtttttcaaagtcaatggcaagctttatcaaaggcttggcaagataggtagtggtggaagcagtgaggtacacaaggtgatttcatcagactgtacaatctatgcacttaaaaggataaaattaaagggtcgtgattatgccactgcatatggcttttgtcaagagatcgagtatctaaataggctgaaaggaaagaataatattatccagcttatagattatgaggtgactgacaaggctttgtttgagggagtcataaatggctccttcagtaataaggatggtagagtcaaggatgatggatatatatacatggtacttgaatacggggaaattgatttggctcatatgttgtctcaaaagtggaaggaactggatggaagcaaccagaccatagatgagaactggcttcggttttattggcagcaaattcttcaagctgtcaacacaattcatgaagaacgtattgtgcattctgacttgaagccagctaacttcctccttgtcaaaggttccttaaaactgattgattttggaatagccaaagcaataatgagtgatacaacaaacatccaacgtgattcacaggttggtactctaagttacatgtcaccagaagcatttatgtgcaatgagagtgatgcaagtggaaacatcataaaatgtggtcggccatcagatatctggtcccttggctgcattctttatcaaaaggtatatgggagaacaccatttgcagattacaagacattttgggcaaaattcaaagttataactgatccaaatcatgaaattatgtacgcaccagtttcaaatccatggcttctggatcttatgagaaggtgtctagcatgggatcgcaatgaaaggtggagaattcctcagctgctacagcatccttttctagttcccccagtcccatgtcattcatctttttaccaagaacaaacctttaaattgctgcaacttatatctgaagcttgcataaatgacccagaatcatcacagctctgttgtcagctccaacaggtgcttggtaatcccatcaagtcaactagtattcattcattaaattcactagaccaacagcataaattgctgtcccgaatatcagaactttgtattctactacaggaacgattgacaaagacagataaactataggtgcttgttttgtttaagcttatattgaggaatttataaattattttgtcaaaagatgtcttaagaggtgaagtaagccagtggtttcttattgttcattccaatttccagtggtttttatccaatcatttttctctccaatgtactagtaactagaaaggaaggtataaccttgttgtcatgacatgtttcatgtttatggtgcctcaattgtgttcctcaac

SEQ ID NO: 130252 - DNA, 1102 bp, Glycine max
  unsure (1)..(1102): unsure at all n locations
  Clone ID: PAT_MRT3847_88626C.1
tacggctgcgagaagacgacagaaggggagcttctcagtcatttcaattgttccgagatcaaccttggatcaggtttagggaatggctgcaatcttagctcgaaaatcactccttgctcttcgtgcgcgccaattggctgtaagcggtcaagggctgcacagctcccaatactatggccttcggttaagtgcacactccttctctaccaaaagagaggatgaggaaagggagcaactcgcaaaggacatttcaaaggattggagttctgtctttgaacgtagcattaacactctctttctcactgaaatggttcgaggactaatgctgactctgaaatacttctttgaaacaaaagttacaatcaattatccatttgagaaaggccctttgagccctcgtttccgtggtgaacatgcactccggcgatatccaacaggggaggaacgttgtattgcttgcaaactttgtgaggctatatgtcctgcacaagcaatcacaattgaggctgaggagcgagaagatggcagccgcaggacaactcggtatgatattgacatgaccaagtgcatctattgtggattttgtcaagaggcatgccctgttgatgccattgtcgaaggaccaaactttgaatttgctactgagactcatgaggagcttttatatgacaaggagaagctgcttgaaaatggggaccgatgggagactgaaattgcagagaacctgagatctgaaagcctttatcgctgaaattttccatgtgatccttgcctgttgctttttccgtctaattgggcaatgataaataaaatgaccagcgcatgattttaaagaactgtatgcatacacgattgttacatcagttttttttttcttttgtcaatgtttgcgttgctgttaagtgtacaatattgatgacttttatctccttgagatcttgaacaaatgtggaaataattgaatttttcaacaaattgatgcccttgaagccagttttttttttttcttttgtcaatgcttgcattgctgttaagtgtacaatattgatgacgtttatctccttgaaatcttgaacaaatgtggaaataattgaattnttca

SEQ ID NO: 130253 - DNA, 279 bp, Glycine max
  unsure (1)..(279): unsure at all n locations
  Clone ID: PAT_MRT3847_88627C.1
tttttttttttttttttttttttatgtncacaaaattacaccacataaagggaggggcctacccaacaaacgaaaacccgctccaaacctttaatgaaacttaatcccccatttcaacaagcaaaattttaccaaaccttatattaaaaaaataaatctcttggctcccccaattatccaaaactaaacactctttctcccatagttctaaaaaagtatttaattatggttgtccaaaactaaaccaaaatttattattgttttcaacatttaaccttg

SEQ ID NO: 130254 - DNA, 744 bp, Glycine max
  Clone ID: PAT_MRT3847_88628C.1
gttgcaagaaaatattggttctattaaagcagatcttaacttccattcaatttacggattcttacagtacatttctaacctacatacaagtttccttataacctccatgtttcccatgttctggcatgctaagatatgacactcacgacattagagaacaaataaagaaacaaaacaaccaagtcggggcaaggttactaccaaggctttcttgcctcacgattgacaatgaatgctactactgcctttttgctcattttattgcaacacaacttggccttcataagatccagaaccagccaagaactgaaccaccaactaagccaaacccaaggaaccctgtcatgacaatagcagataactcagattctgacaagggcactgacttgggtgctagaatcataaggacactagtaagataaccattgctaaatcctagcagaaaagtcagaaccaccattggtacttcagttttcagccactttggtccatgaagacacactacaaagagtggatagaatagtagtcttgctgtggctgcccatattgcccttgtcatagattgcataacatagaaggcagttaaagactttcccattagatcagctaagttataaactgttatcagtaaaataggataccaatcccttagaatcttggattcaagatcttcggctataaatccagggaaaatagacaaagtcactatgtagattatgaaaattccaaacgctgcccccttga

SEQ ID NO: 130255 - DNA, 263 bp, Glycine max
  Clone ID: PAT_MRT3847_88629C.1
ttatggtggccttcagactaaaaaaactaaacgccgcctagcaaaaaaccgggaggtggatcgctcgagaaacttagcttaccccccttggagatgggaaggtttccccctattaggacaaggtggaacaatcttgtgcttacaataaggggaaaaaatatgttcatgaaaattcccctttctgacttttgttaaaataactacattttttttgcaggtttcgaataaaaaatcctagaaatttgttaaaaaaatggttcccc

SEQ ID NO: 130256 - DNA, 431 bp, Glycine max
  Clone ID: PAT_MRT3847_8862C.1
gttctattttgcttaccgaacactaagccccgagtggtggtttctaatttgatgagaaccaggcagcatgtcccgcacttcattagaaaaaagtcatattgagcagaagaacaccgagtaccatttacgcacaatgccaagatcgcccaagggttacaagtccgaagacaatgatgttaacgcacagaaggaggcggagatcggcatacaaggcctggacaagagtaaaatcgttaatgagcgacatcggacaagtctcacttggaatagtgctagagcggcacatcaaaatgagccaatgtgggaagcgcatgatgtgcagagcaatagaattgttatgagcagacggcggtgccaaaccagacaaagttgtgattgaacaaaccgtgctcatttaccagggcatacggagttattggacgctgcagtgc

SEQ ID NO: 130257 - DNA, 625 bp, Glycine max
  unsure (1)..(625): unsure at all n locations
  Clone ID: PAT_MRT3847_88630C.1
ggcaaacattgagcgttttgcaagggaagcgcaagcgccaagtcttgttggcatcgacgcagtcatcgtcaatgaacaacgaggagcgcgccgtgtacacgatcattcgcgagaggaaggagatggggatatggcaaggagacatcaaacgagagaaaaacattcacattcccgatagtctgctgaagaaaaccctaaagatgctcatcaccaagaacctcatcaaggaggtcgtcaacgtccacaacaagtccaagaagcttttgatggcgaccgacttcgaaccctccaaggagatcagcggcggagagtggtacaccgacggcaaattcgacaccgaattcatcggtgctctgtctgatgcttgcttgagcaacatccgccgacggaaagtcgcgacgtgcgacgggatcgtcgggtggattaggaaggtggggagtgatgtgttccctggtggagttagtaaagggcaggtggagcagattttgaagaatttggttatggagaataaggttcaggaggtgactagtactggatttggggattttgagtctgttcctgttggtgaagtttgttatagattggtgaagaagggtgctggtggttgttgntgccatggcttcta

SEQ ID NO: 130258 - DNA, 195 bp, Glycine max
  Clone ID: PAT_MRT3847_88631C.1
ctcgatggctcccaaaccgcctaatacgggtctgcttgctggaccgaacaacggtcacggttttggctagaaggaattggcttcacaccccttacatcgtatggggaaaacaagcactagggagcactttgcgaggaaccacataagagaggttgccggcattgcaccctatgaaaagcgtataactgagtttgc

SEQ ID NO: 130259 - DNA, 601 bp, Glycine max
  Clone ID: PAT_MRT3847_88632C.1
aaccacaccagcttcgtcccttcatctcctcactttctcatttgtggaattacttttgtctcttcctctctgatcttccacaggctcctattatcccttttgctttcccaatccttttcgcgaaaaaaaaaagttcactttctattttggcccccttttgtggttcctgaaacgcgttaagggttctgtttgtgttattgggtcaataatggggtcctgtttttctaaaattacggcctcaatttttgcggtctgggggtgattgattttggggtgaaggaatgtagctggaggaggtggttttgtgttctcaattagaatttcatcctcattcttcaaagggggtgttgtaaatttcttaaatttgattccttttttgtttaccctttgttccggatacgctgaattggttccaaatttgatgactttggtgtgaaatttcattggattttggtgggtgtttgaagaaaggttatttcattatggagcatgtgattggtggcaagtttaaattgggaaagaaattggtagtgggtcttttggggagctctatttagctgtccatgtacaaactggagaggaagttgctggtaagctggaa

SEQ ID NO: 130260 - DNA, 2502 bp, Glycine max
  Clone ID: PAT_MRT3847_88633C.1
ccacgcgtccggttacattattcttcttcttttgtctctctctctcctcacgccaaaccacaccagcttcgtcccttcatctcctcactttctcatttgtggaattacttttgtctcttcctctctgatcttccacaggctcctattatcccttttgctttcccaatccttttcgcgaaaaaaaaaagttcactttctattttggcccccttttgtggttcctgaaacgcgttaagggttctgtttgtgttattgggtcaataatggggtcctgtttttctaaaattacggcctcaatttttgcggtctgggggtgattgattttggggtgaaggaatgtagctggaggaggtgggtttgtgttctcaattagaatttcatcctcattcttcaaagggggtgttgtaaatttcttaaatttgattctttttttgtttaccctttgttccggatacgctgaattggttccaaatttgatgactttggtgtgaaatttcattggattttggtgggtgtttgaagaaaggtaggattcttttttttacgcttgtgaatctgtgggtgtgggttgttttttcccctctctgattgggattgtgcacaatcacttcgaattgggcacaaatctgagcataaaagaagatcattgcagctggtgattttaggttatttcattatggagcatgtgattggtggcaagtttaaattgggaaggaaaattggtagtgggtcttttggggagctctatttagctgtcaatgtacaaactggagaggaggtggctgttaagctggaacctgtgaagaccaggcatccacagcttcactatgagtcaaaactgtatatgcttcttcaaggaggaacggggattccccacctcaagtggtttggagttgagggagactacaatgtcatggttatcgaccttcttggaccaagtctggaagatttattcaattattgtaatcggaagttcacattgaagacagtgttaatgcttgcggatcaattgattaacagagttgaatatatgcattcaagaggtttccttcaccgtgacataaagccggacaattttctaatgggtctaggacgaaaagcaaaccaagtgtatgccattgactatggccttgcaaaaaaatatagggatcttcagactcataggcacataccatacagggaaaacaagaaccttacaggcacagcacgctatgcaagtgtcaacactcatcttggaattgaacaaagcagaagggatgatctggaatctcttggttatgtgctcatgtatttcttaaaaggaagtcttccctggcaaggactgagggctggcaccaaaaaacaaaaatatgacaaaatcagtgagacaaaggtgtcaacttccatagaggtgctctgcaaatcatatccctctgagtttgtgtcatacttccaatattgccgatcactgcaatttgaggacaagccagattattcgtatttaaagagacttttccgagacctatttattcgagaaggctaccagtttgattacatttttgactggactatgttaaaatatccactgatctgtggcagctccagagggcggcatggcactggcaaggcagctatgcatgcaggtccacatgtacaaaaagcagaaaagatctcagttgggaaagagattcgagagaaattctctggtgcagttgaagcgttctcccggaggaaccctgcaaatgctagtcctcgtggtgatcacaccaaacacaggagttttgaggatgtaccagtgcaaaaggatttgcactatgcgcaacacaattccactcgatatggcagcagttcaagaagagccatgatctcatcaaacaagccaatatcctcaggtgaccatactggcaggcaaaccataactgggagccgtccatctggtgctcacagaattcaacctgtgtatgacaccaaacaagcaacttatacacgcggtggctctataagaggccaccgtgatgatcctctgcggaacttcgagctcctcaatatcagggaagtaatcaagtaaagggtgtgtctttttgttgttatattctgtattatgacacacctgagatgcaagatcaccttttattcaagaatagtctcaagcattatggaaagaaacgaaagagttgaggtcataatggcatgatctcctgatatcatcagttttggaccaaggtggacttttttctgcccccagaattgttgtttcaccaggtttctcagccactgtagcgtgttcttaagacgtgccgaagagaattcaactgaaattcttttaatattttaattactgtactagatgagacctaagttgtagtaagttccatgatacaacaccatgttcttgtttcttaacaatgaggtccaacgctgcctgcatgttacatattaaaactgcccttaagaatggaatttatttacaagctacttttattgttctgacatggcttgaaagttaaaaggattttccactct

SEQ ID NO: 130261 - DNA, 444 bp, Glycine max
  unsure (1)..(444): unsure at all n locations
  Clone ID: PAT_MRT3847_88634C.1
gccctgatgaaattcattttagtctcctcttcattttgtgccatttctctgtgtgtatcagtgttactcctagccacaccaaagatagtagaggtgggttcttcaccacaatatgtgtctgatcccaccactgttgatcatcttgtgtttggaattgcatcaagtggaatttcatggcctaagaggaaggaatacagcaagatctggtggaattggaaactcaataaaacaatgagaggatgtgttttcgtagatacacttccacatgaagaaaatgccaacaacaacaatgatggttctcgtcctcctctctgtgtctctgaagacacttcacagtttctctacacttacaagcctgntggtctccgatcagcaatccgcgtggcacgtgttgtgaaagagactgtggctttgaaccattctggtgttagaatgtatgtgttt

SEQ ID NO: 130262 - DNA, 276 bp, Glycine max
  Clone ID: PAT_MRT3847_88635C.1
ggggtgacatatttactgaattgatgcgcgtcaaccgacactgactaatggactctggattcaacatggaggcctggtgtctgttacacagcattaacacaacacgctggatgcttgaattgttcatatcccgtatgcaaaggctactagagatacacatatgtgtttagccgtcgatgcatgcatgcatggggtgcacatgagctaccgatgtacttgtcgatgaggggggtgagcgaggactttgggacagaccctattacgcttttcttattc

SEQ ID NO: 130263 - DNA, 399 bp, Glycine max
  Clone ID: PAT_MRT3847_88636C.1
ctcgagccgctcgagccgaaaaaaaaaaaaaaaaaaaaaaaaagggatgattacttgaggaggaacgaacttattattaaaaatatacggggctataaatacacaaccagccgccgggaacagaggggctcgggggtgggaactcgtgcgggttccaccactagcagcattctctttgccattgggctcccgggctctattcttggcgtggccaatttatctgcacttccaaagggcgataaactctaccgacactggctttaagagatggcccgaaatgaaccttttatgggacctgaaacatattatggccatgaccatgatggtcaccttgatgtccgcagcgcataggatagtatgggaacttatgtgccggaaaagcctgccctttcacaagct

SEQ ID NO: 130264 - DNA, 684 bp, Glycine max
  Clone ID: PAT_MRT3847_88637C.1
ctgtttgatcattggtgccgttcttgaggctcggcataacaaagcaatatctagggacacatggtctcagcttttggagtttgcaaagactgttggctcaaatttatctgattatgatgccgaaggtgcttggccatatcttattgatgaatttgtggagtatctcaacgagaatggcataatccaaaatgatctgatcaatgattctagtctaaaacgatgatgcattcaaatctcaataaattgttatttaagagaatttgatggagtctcttgtgatgagttgtgctattctgtgattgaactcctctttgttattaagtgggattcggtctaaattcaaaggggacatggctgctagagcaaactcattcttactgacaagtagtagcatcatttgtgagattgttgatatggcatatgaatttccttgggaagtattgtggaattagtaatgggagcctactaattccacggtgttatagtttctggtctctttttaatttaataattaattcttgaacgatgtcttgatagaagataagagacttacgtgattgtgattggctgtccttgtttctggtctagtttcatcttgtataatatgtggccccaagttattaaaacattcatgaaatagagaaggggaaaaaataactatgttgtgggtctgttttcctttgg

SEQ ID NO: 130265 - DNA, 326 bp, Glycine max
  Clone ID: PAT_MRT3847_88638C.1
aaaatgaagaaacaattcgcgagttcattactgaggaaattaagaaccctttgcacgtcgccatcattcttatagaatgattttgagtcagtttatgaaaatgtagaatgatgggtaatcatttgaatcagtttattacaacattcaaggaaagtatgtctttcgagtaaaaaaaaaaaaacaacaagaaagggcccaacatcactagttaaattcgtcgagccatgtgtccaactgtgctcttgactcaatacaaaaattcacgtcaacttatttttagaaataatagggggggggcgcgaatatgggtgcttgttaacccggga

SEQ ID NO: 130266 - DNA, 1503 bp, Glycine max
  Clone ID: PAT_MRT3847_88639C.1
cacaagcgtccgctttattattctctctcttctccatggacatgtccggtagtgtccaattctgagtgagccaaaaccaaaactcacctttcgcatccctcagctctccatcccattcggaaccaaatttcagttccacccaaaaccctaattttctttctctcccgcacctagatcttcaggttttaggcaccttccgccatgcacaaattgggaagaggtcatcgtgacaaactccagcagttcataacaataactggagccagtgagaaaatagcactgcaggctctgaaggctagtgattggcatcttgaaggagcatttgatttcttttacaaccaaccccagcttaaaacatttactgattctaggcacttggaggagctatacaatagatataaagatgcatatgttgatatgattttggcagatggcatcactgtcctttgcaatgatatccaggtggatcctcaagatatagtaatgttagttctttcatggcacatgaaggctggaaccatgtgtgaattttccaagaaggagtttattgaaggtttacagtctttggggattgattctctggataagttccgtgaaaagataccatatatgcgctctgagctgaaagatgaacagaaattccgcgagatatataactttgcttttggctgggcaaaagagaagggtcaaaaatctcttgcattggatacagctattggtatgtggcaattattatttgctgagaagcagtggccacttgttgatcattggtgccagttcttgcaggctcggcataacaaagcaatatctagggacacatggtctcagcttttggagtttgcaaagactgttggctcaaatttatctgattatgatgccgaaggtgcttggccatatcttattgatgaatttgtggaatatctgaacgagaatggcatcatccaaaatgacctgatcaatgattctagtctaaaatggtgatgcattcagatctcaataaattgctctttaagagaatttgataagcctcttgtgatgagttgtgctattctgtgattgaactcctctttgttattaagtgggattcagtctaaattagattctagagcaaactcattcttgttgacaagtagttgcatcatttgtgagattgttgatatggcatatgaatttccttgggtattgtggaattagtaatgggagcctactaattccacggtgttatagtttctggtctcttttaatttaataattaattcttgaacgatgatgtcttgttagaagataagagacttatgtaattgttgttagctgtccttgtttctggtctactttcatcttgtaaaatatgtggcaccaagttattaaaacattcatgaaatagagaaggggaaaaaataactattatgtgggtcctttcgacactagaccaatcacaagcaataccttgcatatcggttcaaaaaaaaaaaaaaaaaaaaaaaaactcggactagttctctc

SEQ ID NO: 130267 - DNA, 154 bp, Glycine max
  Clone ID: PAT_MRT3847_8863C.1
tatgtcaatgattacttgaatttgcaattacaacataccaattgcctatgtataggctcaagtgaccaacactctaatggggcgggaagaggactgcattactatatatctttctagagtttgcatgatcaagatcatatcatcataattctag

SEQ ID NO: 130268 - DNA, 192 bp, Glycine max
  Clone ID: PAT_MRT3847_88640C.1
cccttcatctttcccatcatctatctttccccttgactttctctgcatcaatttgtgtcatactttattcttctttgtccttacttctcttcatcataccttcccatcaatcttgctttcttgcttgatcttactctgcatgagtatgtgccatgccttgagctttcttagtgcttatgacttctttacgct

SEQ ID NO: 130269 - DNA, 315 bp, Glycine max
  Clone ID: PAT_MRT3847_88641C.1
acaacgtactgctgctgctgcacgaagacaacataacggggcaccggggacagtaaaagactctgcttgataaaaaacatctgacgggtgctgctcccaaacaactgaccgaatttacagttttggagatgcctaccaatctaactctttctctctttatgccagccggtgctcatctcaatacacatcctctgcacctgcacctactatcaccacgacctatcttgatcaagggataacatatgtgttgatgcttttggctatgctacttacatacatcattcattcgagctcaacttactacaccttttgaac

SEQ ID NO: 130270 - DNA, 658 bp, Glycine max
  Clone ID: PAT_MRT3847_88642C.1
atcaccattatcattattgttgttgtgttataactgacaagttgaaattcaacatatttacaaggacaagataaaattgaaaatatgtaacttccttcttaattactggaacaagactacagtttctataggtgaaaaatgatttagatactacttatgtggaagttctgtaatgtttacccttgctaattttagcagcgtctttgacaattgacatgatctttcaatcatttcttgattattatattttgtaataaatacttaacttcagctaatcagagttagctagcttgacattaaaatcaatgtaaggattttggttggatttttattggtgaactcgcattatcaagttgtcagtttcttaatttaatcgaagctctcgtgtcattttgatgttaattaaagaagaagaaagttaaaagtccatggaatatagtataaaactgaagttgatgttcagtcttgaaagtggtaatctgtgttatttcatttttatacgaattaatcctgcaagatagaattgtttatgagctaccaacctaataagataattcagtaaacaaattactactttgacccatacataaagatatacttttaaatataaaagcaacataaattgtcgaatttaagattcaattatgtttattataac

SEQ ID NO: 130271 - DNA, 509 bp, Glycine max
  unsure (1)..(509): unsure at all n locations
  Clone ID: PAT_MRT3847_88643C.1
gcggggataagataaatccaaaaggccaaacaaaaaaaaacaaagaagaagaaaagaaaaaaaaaaaaaaaaacaaaaaagaagaaacaaaaaaaacacaaaaaggagaatacagagtaaccaacaacgccctctaaaccccaagaagagttagtttccgagatgcaataaaagacgaatacaccaaacaaacacttgactcaaccacccaattcataaaaaaacgcggagnncnnnnnnntnntnnntnntnnannnntntnnnnncaataaaattattgggggaagacaaggttgtgccaaaggagttaaaaaaaaaaannannagatgaaattcatgttattgcaaaatatgttaatgactatggtggggatgtgaagaaagagatcacaggggtgctaaaaaaaaaaatgaaaaaaaaaaaagaaaaaaaaaatggaaatgaaaagacaacaagtggattaattgaaagtattgcagactatgttaggctgaaagcaaactatgc

SEQ ID NO: 130272 - DNA, 621 bp, Glycine max
  Clone ID: PAT_MRT3847_88644C.1
ctattccaacataagcactagaaccgtgggcacgtaggtttaaacatgtttcctcatctccttgatcaataattgcatacactttctctttctctctccccccatcacttccttctgacatgcacttccatctcttctatatattgtttcaagtaatcaacaactagcccgcaaaaccatattttcatttttcagattgattacaggatgagttcttctatcttccttctatgttgccttctcatattttctttatattccctctcccaacacacaggctactctctagatgctactccaacacggaagttgagcatgccagcccctgtccacgacctcaaaacccagtataaaatgcagggagcagacaaggcaatggaaagtacccctgcaaacgaagattccatgacaccagagtataacagcaacagttacagtccccatgatcttgtctttcatatagattaccatggagtaacaactcatccaactcctaaacatcccaaaccataggctgcaactttagttttgcagcgcgagagatttattcaaatatgtattcttgtttttatcaatatataaatataaatgaaatgcgttgtgtgggagaaaaaaaaaaaa

SEQ ID NO: 130273 - DNA, 262 bp, Glycine max
  Clone ID: PAT_MRT3847_88645C.1
caggcttctcagatcccagagtctctctttcctacctcctcgatcttcagttgaccacggtcaattcagtgcgtccattagggggacagtcccctccgggatgaccggattcacctccagcccagggaatggcatctagaggaatacgagtcgtgggtctggacaaggagcggcaggcatcatcacccatctccagctgaggagccctgtcgcaaggatagggaagctggggattcagagggaatcttccacgagaggtgtg

SEQ ID NO: 130274 - DNA, 297 bp, Glycine max
  unsure (1)..(297): unsure at all n locations
  Clone ID: PAT_MRT3847_88646C.1
agaaaaggaaaaaggaaattgaggagaagttgcaagggttgaatgataataaacataacctggtgttggtgttgaagcagattctgaatgcggaggaggagttgaagagacgaaatagtatgcaagtagttgcaatgcatggtccttcggtcccacttcaaggggatggaacaaatgatactggtttgatgattaggcatatgcccccgaggttgggatcccagggaaatcttgttgctgctgatgtggatggtggtgaaggggtatgtttttgttttcttttctnttgcttttttt

SEQ ID NO: 130275 - DNA, 252 bp, Glycine max
  Clone ID: PAT_MRT3847_88647C.1
tctcggacgcgtgggaagatttctcatgcaagttgagtccatggttaagcataacaatgttatacctaacggatactagtgtaagcacttagcaaatgatttgtatttaatggaatgtgctttgtctatggaataaaagaaaatcgagaattcataatttgaacaacaaatagtatgtacatggaaatggggcttattccagtaggcgcagtttcattttgcgatcaaaaaaaaaaaaaaaaaaactgacag

SEQ ID NO: 130276 - DNA, 502 bp, Glycine max
  unsure (1)..(502): unsure at all n locations
  Clone ID: PAT_MRT3847_88648C.1
aggtccatgtcacacgccaggaccacgagggcccgtgccagcaggagggcgccaacgtggcaccagtacccaaggaacgggtcacgccggtaccacaagccgtaatccgaggtggtaaagccgaagccatagtattacataataataaacgtagttgttgggcttagtgttttgcgtgtggggttaaaggggggtacgttaatagcacaagtggccggatgccaccgagtagccaggtaggcccgtgtatggacggcatacaggcagccaaaagcaaaaaaagcaccgtaggcgcgtgcataatgatggtatgccagttaacnagaattgtaaaaacgccaaggccgtagttaacagggcagtggagttcgtagcagcgtatccacttgggaggcagtcaacggcagtacagtgattagtggctaggtttgcgttgtgttgaggggtgataaagataagttacgaaacataagaaacataaagcgcaggcctatatgcaata

SEQ ID NO: 130277 - DNA, 665 bp, Glycine max
  Clone ID: PAT_MRT3847_88649C.1
cgacccacgcgtccgcgtagactcgcagtccaccctaccccgccgccaccatggccgataacgatcactcccactcccaccctcaccaccaccaccaccaccaccgtcctcatcgcctctcagtgccgccgcgcagcaccacattcggcggcactccgggaacccagcccgccttctggtactcctcaagcacaaccccaaccccaaccccctccaaaacccgccgttcattgtccttcccgaaatcgaaatcgaaatcgagatcctcagtcttcctcctcctcttcttctccctccgctccctctactccctccttcccttcctccgctcctctccttccttctccctcttccccttctccttcctcgtctccctcctctccttctccctcaccctctccttctccctcttctcttcttcctccacctcctccaaagacccctttctgcaccacaaacccaaacaccctcttctctcacctttcctcacaccctcccagcagagaatctgggtcaccaaatgaatcctccttgccctcgtcttcctcctgcggttccaggccctgcggtgctggggggccgcctccatgatcctcgccgggggggatgggctccatcgctgcccggcccagaaacccttaacagcacaacctccgggggtttct

SEQ ID NO: 130278 - DNA, 394 bp, Glycine max
  Clone ID: PAT_MRT3847_8864C.1
ttttattagcagcagcagttatccttggccaagggtacaaggcaaagaaacaatgaatggatttttcgtgatgtaccaagtgatgtaactatagaagtaaatggaggaacattttcattgcacaagtttcctcttgtctccagaagtggaagaataaggaggttagttgcagaacacagggattctgatatctcaagagttgagcttctaaatctaccaggaggtgctgaatgctttgagttggcagccaaattttgttatggcattaactttgagatcagatccacaaatgttgctcagctatgttgtgtctctgattaccttgaaatgactgaagacttttcaaaagacaaccttggctcgcgtgccgaggaatatcttgatagtatagttt

SEQ ID NO: 130279 - DNA, 243 bp, Glycine max
  Clone ID: PAT_MRT3847_88650C.1
tacatttggctggcttttgcgttataatcatattgacattgtcagcataaagacgccgatacaaatttcgctaaaaagactgtgatgtttcgtgataactgtatgcattaccatatataacagctttgataaaacttaagggcgtctaagagactatcccctgaaagcgaggtttctgagtttataaaatgtttccttatcctaaaaacctatttatagccgtagagcactgctttacctaca

SEQ ID NO: 130280 - DNA, 455 bp, Glycine max
  Clone ID: PAT_MRT3847_88651C.1
gcggtaccgtttccgggttccccggtcgacccacgcgtccgcggacgcgtggtggctggctaacgaagctgcgagtgaatatgtcaagcttgccaagaagcacagcctaacttcaggccagctcgcactgggctttgtgcgcgaccgtccatacacagctagcacaatcgtccggagcaacgaccatggatcagctagaaggagaacagtgatgcatttaccagagctgcacgggctttgacaccggaagttcttgatgacatcgaatccctcttgaagagataccgagacccaacactttcgaaggagacgatagagaaaaaagagcgctttcgtatgagagcattcgtcttttttgactatgaatgagccttgcacagaccggagcccatacactagttgagctttggtggattcatagatgaaaaactaataagggcggccgctctagagga

SEQ ID NO: 130281 - DNA, 356 bp, Glycine max
  Clone ID: PAT_MRT3847_88652C.1
tgccatgggaaggttacaattttgaagatgctgtactcattaatgagcgtctggttacggctgcgaaagacgacagaagggacatacggaaatatgaaattcagactcatatgacaagctatggttctgaaagaatcactaataaaattccacatctagaagcccatttactcagaaatttagacaaaaatggaattgtgatcctcgggtcgtgggtagaaacgggtgatattttagtgggtaaattaacacctcaaatggcaaaagaatcctcgtattcccccgaagatagattattacgagctatacttggcattcaggtatcccccttcaaagaaacttgtctaaactaccta

SEQ ID NO: 130282 - DNA, 1063 bp, Glycine max
  unsure (1)..(1063): unsure at all n locations
  Clone ID: PAT_MRT3847_88653C.1
nnnnnnnnnnnnnnnnnnnnnnnnnnnnnnnnnnnnnnnnnnnnnnnnnnnnnnnnnnnnnnnnnnnnnnnnnnnnnnnngtcttttttttttttgaatggcaaacatagctagcaacttgagatggtttcatttacttttcaacaaattaaaattacaattttggtgcaacatcagtgtgcctaaatccaatagttaagataactgcattcctcttttgaagcaagtgaattaaaattgcagcaaggaaaataaattgaaattgatggcaaaacttcatacacaatacagtctaatagttcaactcgtcaacattgattcggaaagcaaaatcttcactttctaactcttcatgaagtaaattaataggcgatgcttcaaacctcttaacaggtggaatatcatcatatgatgatctctgtccctttttcagaacatagacaaaatagtgaaaggtttcaccaaaagtagtccactcaacagaccagctgaaatctggtgcattaaatatagggcgcctgaaatgtggctgtccaaaagttactgagataaatgtgccaccagctttcaaaaccccgtgaacacctttcaacgtggccatgaccttggatatagtttcaggctttggattccatgggttaccactgtccacgaacaatacatccatagttccagatggggttgaatcaagtggcgaaaataggaataatcctagaaccactcgtattgctcctccttcgagaacctttcgtcccaataggaaggattgaggtaagccaaagcattgaacggcgtcaggtgaaaggtcaatgcaagttatgttggttgtgccatccttatgcaactgttcacacatttgtgagtttccacacccaagctccaggacagcggaatggggcgtgagatggggttgaatcaagtggcgaaaatgggaataatccttgaaccactcgtattgctcctccttcgagaacccctcgtcccagtaggaaggattaaggtaggtcaaagcagttgaaggtgttggcgtatcttccattgttactcttcaaatttcaatcca

SEQ ID NO: 130283 - DNA, 306 bp, Glycine max
  Clone ID: PAT_MRT3847_88654C.1
gagacctcacgtcaagccgggctacccgctgagtttaaacatatcagtaacccgttgaacacaactctctgccaacatgggtaatctaccagacgctctatacgatccaagcttacctatgcttgcatgcaaaatgactgctcgtctaaaatgtcatctaaacttagttcactggctgtcatttttaaactttcagactggaaaacacttaggatgatccatcttaaacgtcttgctgtaaaatccccgttattcagattgcgtactagcaattacgcctgcagaaatcacactttcaatcacttg

SEQ ID NO: 130284 - DNA, 375 bp, Glycine max
  Clone ID: PAT_MRT3847_88655C.1
gctcgagatgaaactctcaaatgttttcacaatatcatatcacaaaacgcaaaaccctaatcggtgcattttctgtgcgtggaaaggtatcaagacaggattcaccaaacgaatacctactcaaaaaacatccggtgaacttaagcaaacttgctcaagatcgaaaagctgaagtatatacgattatctgaagcgagtccagatacaacatgaagagcacattcagttcattccatcactgctttacaaatagagtggtccctatagactcgtgacatttaataggatataatacctctctgcatgtcatttcaactttcccaaattcatagttatgtacatctctcataactattttttcactaataaataaat

SEQ ID NO: 130285 - DNA, 241 bp, Glycine max
  Clone ID: PAT_MRT3847_88656C.1
acgaggggaccaagtcctctctctcctcgccgccgccaacaaccacggcgacctcgccgtaaaacctcatcgtaaacaggccaaggaccttctttctcattgcccctttcccgcgcctttctactgagactcatcttctccaacctgtccaaattgtcatcaaaattgaggagattggttttaaagcagttgagcactctcctacgatgatatctttactattaacatttttacgagatgg

SEQ ID NO: 130286 - DNA, 437 bp, Glycine max
  Clone ID: PAT_MRT3847_88657C.1
agaattttgggacctgataagttatatatgatgtattcacatgcgtgaatatttctgaacttttggaaattttacaacttttgattttgggacctgataagttgtatatgatgtattcttggggcttaaaatagacattgacataagtgattttaccatggtccagtcccttagatcttatgtataaaggaccctgaatctggctgaaaacccccagattttttacttcttttgaatagtattttgctagagagaacccaatgatcttcaatagtagaagtactcaagaacttttgtgaaaatttctgcactataatgtgttctctatttagcaaatagtttatattaactgctctaaactatccatcctaatagttcatattgactggtctaaaccatccatcctaatagttcatattgactggtctaactatcca

SEQ ID NO: 130287 - DNA, 599 bp, Glycine max
  Clone ID: PAT_MRT3847_88658C.1
ctcacccacgcgtcacaattcatcaacatctaacaccacacacacgcaacacgcttcagccactattcttcaaggaaaaacaaaatgaaagacacaatggaaactcctacgacactcaccaccttgctccgccacgtcgccgccaaattcccctcccgccgtgccatctccgtcgctgccaaattcgacctcacccactcccgcctccaccgcctggtcgaatccgccgccgctcagttagtctccgccggcgtcaaacccggcgacgtcgtcgccctcaccttccccaacaccatcgagtttgtagtcatgttcctagccgtcattcgggctcgagccacagccgcgccgttaaactcggcttacacagcggaagagttcgagttttacttatccgactcggagtccaagctcctcctaacatcaccagaaggaaacaagcctgctcaagccgcggcttcaaagctcagcatcccccacgccacggcttcgattaccaaagccgagaacgaagaagcggagctgagtctctcattattaaaccaccccgagttgaattccccgtactcagttgagtcactcgtaacgaccctgatgac

SEQ ID NO: 130288 - DNA, 895 bp, Glycine max
  Clone ID: PAT_MRT3847_88659C.1
cagctttgatggccaaccctgccatcaagcgcggcgaaaaccaatgggttgataaaatttagagcttatggatgctgtggataactacattcccatccctcagcgtcaaactgaacttccctttttgctggccattgaggatgttttcaccatcaccggtcgcggaactgtcgccaccggaagggttgagagaggtaccattagggttggagagactgttgatattgttggtgttaaggaaactacgaacaccactgtgactggggtggaaattgttcagaagattttggatgaggctttggctggggacaatgtggggttgttgcttaggggtattcagaagactgatattcagagagggatggttttggctaagcctggaaccattacccctcacaccaagttttccgcaattgtatatgttttgaagaagaaagagggtggcaggcactctccgttctttgccgggtaccggcctcagttctacatgaggactaccgatgttactggcaaggtaactgccattacgaatgacagagatgagtagtcccagatggttatgccgggcgaccgcgttaagatggtggttgaacttattgtgcctgtggcttgtgaacaaggaatgaggtttgctattagagaaggaggcaaaactgttggagctggtgttatccaatccatcattgagtaattagtaagttgttatgagattggtatcccaactacttgactcttacactgtgagcagatagtatctatcaccgacaatgggcttgtgcaattgagttttgtcattatacacaacttgctgttatatccattttgctatattttgtaggtttctagatcatgtttagtcgagttggacaatgagtttccgcattgtttaacttcc

SEQ ID NO: 130289 - DNA, 440 bp, Glycine max
  unsure (1)..(440): unsure at all n locations
  Clone ID: PAT_MRT3847_8865C.1
acggctgcagaagacgacagaaggggatgcaagtgttacctaattacaaacatgaaatttttttggtttcttcaaatcctgttctgcctggccatggttctcatcaatccctcggttgctcccagagcaccagctcctcctacaagcccagacccactccatccaccgctacctaaggtctccgattcacggccatgaagattttcttgattagcttatatatataaagtttggttcttcaatatataactatatatgtagtatcccttttcttctaaacctctttaatttctgcttgggatcaccagaaataagcatagtcctagctagctactccaatgtttttggctatatttgtttaattaatactttgatctttcttgttgcgcgtaatatataatacctccagttaataaagaatggctgtttgttganaaaaa

SEQ ID NO: 130290 - DNA, 254 bp, Glycine max
  Clone ID: PAT_MRT3847_88660C.1
cacaattatacttattaactaacataaacctacataattttctaatttcacataaaattcaatcactaatacaacactacaaactattcaaaaaactctattatacaatattcataccatttctcatatcatcctaaaatattacattacactaactaaaaaaactcattatcatttttctaccataacttctattctttattacatactaatctcttcaataagaaacttttccattttcttctaatcaattt

SEQ ID NO: 130291 - DNA, 1851 bp, Glycine max
  Clone ID: PAT_MRT3847_88661C.1
ccacgcgtccgaaggcagaaaaggataaaacttaacaagaggagctgttttgtccaccgcattcccaaacccttgaacactatcctcttctcagtctcatacaccaaaccaaaaacctcactttccaatggcaatttcttgggcagcagcaacaacctcaaagctcgcataccctcctcatgtccacttctctccttcaccctcctccaattatctcttccttaaaacccacaaaccctccgccacacacctctcctcttccttcatccaccccaccacaatcctccacctcgccgctgccaacaccaccacccgccgccgctccttcaccgtccgcgccgcccgcggcaagttcgagcgcaagaagccccacgtcaacatcggcaccatcggccacgtcgaccacggtaagaccaccctcaccgccgccctcaccatggccctcgcctccctcggcaatagtgcccctaaaaaatacgacgagatcgacgccgcccccgaggagcgcgcccgcggcatcaccatcaacaccgccaccgtcgagtacgagaccgagaaccgccactacgcccacgtcgactgccccggccacgccgactacgtcaagaacatgatcaccggcgctgcccagatggacggcgccatcctcgtcgtctccggcgccgacggcccaatgccccaaaccaaagaacacattcttttggccaaacaagtcggcgttcccaacattgtcgtcttcctcaacaaacaggaccaggttgatgacgaggagcttcttcagttagtagaattggaggtccgggagcttctttccaagtacgagttccccggagacgatgttccgattatctccggttccgctttgctgtctttggaagctttgatggccaaccctgccatcaagcgcggcgaaaaccaatgggttgataaaatttacgagctcatggaagctgtggatgactacattcccatccctcagcgccaaactgaacttccctttttgctggccattgaggatgttttcaccatcaccggtcgtggaaccgtcgccaccggaagggttgagagaggtactattagggttggagagactgttgatattgttggtgtgaaggagactaggaacaccactgtgactggggtggaaatgtttcagaagattctggatgaggctttggctggggacaatgtgggcttgttgcttaggggtattcagaaaactgatattcagagagggatggttttggctaagcctggaaccattactcctcacaccaagttttctgcaattgtgtatgtcttgaagaaggaagagggtgggaggcactctcccttcttttccggctaccggcctcagttctacatgaggactaccgatgttactggcaaggtaactgaaattatgaatgacaaggatgaagagtccaagatggttatgccgggcgaccgtgttaagctggtggttgaacttattgtgcctgtggcttgtgaacaaggaatgaggtttgctattagagaaggaggcaaaactgttggagctggtgttatccaatccatcattgagtagtaagttgttgtgagattggtatcccaactacttgactcttacactgttagcagagtatctatcatcgacgatgggcttgtgcaattgagttttgtcattttacacaactgctgctattttgttatattttgtaggtttctagatgatgcttagttgagttggacaatgagtttcctatggcttgtttaacttccatcttttttattgttatgattcatctgttagaacttgagagcaagattccataaatttctgcttgcctgaaattatgaaatttgtcttac

SEQ ID NO: 130292 - DNA, 421 bp, Glycine max
  Clone ID: PAT_MRT3847_88662C.1
gctgccgacggcgtcactggattcaaaactccatcaatgtcctgcacaatcctggtgataaaaccctgaacagactgcgtcatggagttatccacatcggttttctccacgggatccatcaattcagccacaacaataggctgaatcgggaccgtggacgaatccgcctccatcctcctaaacacaatcactaacatctgaatcaacgacgctttcgccgtcgtctgattcaccacattcttactaccaaggtatatgtcataacaagttctcacaatcaagagcaagcaatcaccgtgaattcgcagcgaaatcgatgtcactgcagataagagcgtcttcagcacgagcaattcgacggcatcgtcgccgaagtcgtggcacttgcacactgcctctatcaggctcgcgaggagcttcg

SEQ ID NO: 130293 - DNA, 1290 bp, Glycine max
  Clone ID: PAT_MRT3847_88663C.1
gcaattactaccatttaccaaagtaaacccagagatggagtggtgtgtgtcaatgccaaagattgagctgcatgctcacctcaatggatccatccgagactccacacttcttgaactcactaaggctttgattggaaagggtgtcatgaatttctccgaagtggagcatatcatcctcaaatataaccgttccctaaaagaagttttcaagctgttcgacctaatccacattctcaccactgatcacaacactgttacaagaattaccagagaagtatggttgctacataaatttttgtttttgcctaatttattgccttttcattgtgcaagtaataataatacttaaaagcaggttattgaggattttgcatcagagaatgttgtctatctggagttgaggaccactccaaagaaaaatgattctgtgggaatgagcaaacactcttatgttgaagctgtactgaaaggtctaagatcaatcacttcagttgatgtggatttcattccacattgtgaagattcaaagactctttttactcctgcaccggttattaatggacatgtgagaaaaaaaatctttgttaggcttctcttgagcattgacagaagggagacaacagaagctgcaatggaaactgtcaagcttgcattggaaatgaggccttatgtcgtagttggaatttacctctctggaaatcctcgtattggtgattggtacatcaaattgatatagaatttatttcatcttaacaattttcaggttgaaatttgcttcttatccaacgtatgtgcaacgactgttccctctataaatgttcccccctatactcatttgtacaacgcaaaacatcctttagccctgtgtactgatgactcgggagttttttttacctgtctttccaaggaatacaaaaatgctgctgattcatttgggctgggaaggagggaaatgttttagctatcaaggaatgctgttgagcatatatttgccgatagcaaagtaaaggagggttttagaaaaattttccattcagtggcaaaaaaatatggaagtgtaacccccgtttcctctttaaagaatatttgcctttagatataattaatattagagctttgttgataaaaaaaacaaaatattagagcttagctaacaaaaaagctgggggttgccccttatcctagtttgaagttggtaatcgagtccttcccgtgcaaaaaaaaaaaagtgtataagtgataaaataagggggtaggattcccctttgatttaatgagtattttaattcc

SEQ ID NO: 130294 - DNA, 293 bp, Glycine max
  Clone ID: PAT_MRT3847_88664C.1
cgctcctcacatatcaataacaagattcgcacagcacttgggaaaggtaagaaagttgtttttcttaccagagttgatccttttccactagcggtactggctgttctttttggcgttaagaggtggattctgagttctaacgccagcaaccctatgctgacgcgacttcttgagaactgtaagagtctcaatcatctggttgaagagtgtccttttgcaattgggacgcactatgttatattttattcactggagtagagcgcattactatgtgcaccgcttgtgttttaagt

SEQ ID NO: 130295 - DNA, 1644 bp, Glycine max
  Clone ID: PAT_MRT3847_88665C.1
cagtttggtgtggttttggatcgcttgtgtctctcttttccttccaactgcttcttccttaacatctccttttctcccatttagcagagcaaagagaaaaacaagagatggagtggtgtgtgtcaatgccaaagattgaactgcatgctcaccttaatggatccatccgagactccacacttcttgaactcactaaggctttgattggaaagggtgccattaatttttccgaagtggagcatatcatcctcaaatataaccgttcagtggaagaagttttcaagctgttcgacctaatccacattctcaccactgatcacaacactgttgcaagaattaccagagaagttattgaggattttgcatcagagaatgttgtctatctggagttgaggactactccaaagagaaatgattctgtgggaatgagcaaacgctcttatgttgaagctgtactgaaaggtctaagatcaattacttcagttgatgtggatttcattccacattgtgaagattcaaagactctttttactcctgcaccggctattgatggacatgcgagaaaaagaatctttgttaggcttctcttgagcattgacagaagggagacaacagaagctgcaatggacactgtcaagcttgcactggaaatgaggccttatggggtagttggaattgacctctctggaaatccaagtattggtgattggaccacatacttgccagcattgaaatttgctcgagaacaaggtctttatgtaacacttcattgtggcgagttacctaattcaaaggagataaaaaatatgcttgactttcgcccccaaaggattggacatgcttgtttctttgaggatgaacactggagacagctaaagtcatcgaacattccggttgaaatttgcttgacatcaaacgttaggacaatgactgttccatctatagatgttcaccactttgctcatttatacaacgcaaaacatcctttagtcctgtgtaccgatgactctggtgtgttctctacctgtctctccaaggaatacaaaattgctgctgattcatttgggctgggaaggagggaaatgtttgagctatcaaggaatgctgttgagtatatattcgcagacagcaaaataaaggaggatttaagaagaaatttcaattcagtggcaaaaaaatatggaagtgtaaccacagtttcatcttgaatatctgcatttagatatattaatattagagattagctaacgatcatgcaggggattgccccttatcctagcttgaagttggcaatcgagtccttcacgtggaaaaaagaatgtgtaaagggataaaataagggtgtaggattcacatttgttatgagtatttttaattcaaatctgcaaaaatgttgtcctttattttctgattttgcacgtcactcgaggagttgatgaaaattgttcaatcaagtgattattcttctaggaggtttcggttgatgagccatacaggatacgccattgtaagggtcaatggtcacgtcattggatatatgccgaccacaatcttggctattaatgctgcagttaccactttcttttttggtgccttgcaatttccacttttaaatttgaccatgacaatgaacatttttccatt

SEQ ID NO: 130296 - DNA, 250 bp, Glycine max
  Clone ID: PAT_MRT3847_88666C.1
aaggcaatgaagtttaccatgtttcacttggctgatataatgcggcagagcttccaaagcatgaattaagcatgtcagtattcacaacaccagggctaagagcaatggctgccaatccaggaggtagctctttagccaacgatcgtgtcaagccctcaatcgcccacttcgaagcaaaatatggagcaacctgaaatgacaatgtgcaatttagtaggcattgaggattatgattcatcagaagaaacaa

SEQ ID NO: 130297 - DNA, 275 bp, Glycine max
  Clone ID: PAT_MRT3847_88667C.1
tacggctgcgagaagacgacagaaggagtcggtcgttatatggcctcgactgatatctttcagccgacattgcgcaatttcttttacaaacgctggccgataatgtttttttatttacggtagaggaagttttttgttttggtgttgcctaaaaaatttacaacgtaggacggctaggtttttccgtgcgagctcaaccgagggttcgttccgaccgacactggcatgttgttcttctcatttaggaggataagaaaacgttcgcccaccccggc

SEQ ID NO: 130298 - DNA, 514 bp, Glycine max
  Clone ID: PAT_MRT3847_88668C.1
ccacccatagttaatccggccccgataaaaaaatccgttgaatttttggcgaccatttgggtttatcaaacaaaacaaggccccccaaaaaaccatccccggctaaggctttcctggaaaaacaaggggtttaacactttgttctttacaccgggggggtttcaaaaactgaattcagagcaaatttttcaggggaacctatttaacctggtaaaagaaccccagctttttcccaccaacattttttttcctagctttttaatgacccaggaggccggttggggtagtcaacccattttccccaacttgttttggggggagcaccctaacatcccacctttaattttttttgaccccaacttaaaaacggggactaatacccccacttttgttcagtctccctttcatttcaacaccattttttccggctttgggatcataaaggtactaaaactttccagggtccccatgcttttgcttccccaaagggatttttttaatccttttggggggg

SEQ ID NO: 130299 - DNA, 815 bp, Glycine max
  Clone ID: PAT_MRT3847_88669C.1
ggctcgagcaagatcacatgggagtggggattcccagacctggacccatgggccaacaggagaagtgtctgctgttgattctcgcatagatatgtgcaagaaaaggatagcaagcacaaacgaagagactcatgattgtgacagcactctgataaatggttctcctttacgcatatctgatggttcttgttccttggatgagaactttgagtattgtgtgaaagtaattcgttggctagaatgtgagggtcacatcaaacatgaatttaggttgaaattgctaacatggtttagtttaagggcaacagagcaagaacgcagggtggttaataccttcattcaaactcttatcgatgatccaggtagtttggcaggacaacttgtagactctttttctgatattatatccaacaagaggctaagaagtggattctgtagtaaagctggggcatcaaattaagggcattttttaaaattaatcaccttccaagggattcatttttattgcagacaagctttgtcttgctaaaaggatttgctttgatgatctcagaaacagtaactcatttttcccaggagggaggatttatggacatgaagtttcaggatgtaggaggcattacgtcatttctaaattgctgcaatgatttttagtaatgaatttaattacggaagatattagaaaccttttcttataacctttatttgaagaaggtacatgattcaatcgctgatttgatttatatttgtcattcttttgtaatcttcttgttcctcgtactgattagctggcaaatgaaaatgcttgcttcaaa

SEQ ID NO: 130300 - DNA, 677 bp, Glycine max
  unsure (1)..(677): unsure at all n locations
  Clone ID: PAT_MRT3847_8866C.1
gtcaaataagatgatatatattgagccgttgatgtcttcaaatatttcacccttctcacaatgcaatagaaaaagttaagctgtctaatatattaactttgagcacattattgctcaaactacatttcatttcactgatattatgagatgccccttcatggaaacatggaacgtttccatcgtttacacttctacattttggaattgttgttacctcctgaagcattttaaccacatttctcattgtagggcgagttattgggatggagctggtacaatgaagccctacgctcaataccttgctgatttcttccctgtatttggagtccaatgtaggatcaatcacatgatccagtccttcatgttccaacatggaggaaacccatttcaccaaatcactttcaccatactctggatcaattgggggtcttccagttactaactccaaaaggaccacgccaaagctatatatgtcacacttctcattcaccctgagtgtacgcgtattctggtgcaatgtagccataggatcctgcaatcacagacattgatcatgtcctttggctgactccagtaaccattntggcaactccaaaatctagtgggcaaatccaaaagacttttgttgttacccttcaacaaatcaaccaaacttccatttggcatatattcataaa

SEQ ID NO: 130301 - DNA, 444 bp, Glycine max
  Clone ID: PAT_MRT3847_88670C.1
caagagtcaccaaaactcaattgcatctattaaatgcaacattcacttacagggactgtgcgagggctgcaaaaaagcatgaccaagtgtcatgtgcgctttagatgcagttatgctcagcactaatcagattgttgtgcccgaatccgacttattcactcaataatgcgtagctccaataaagcaaattcacatttcttaatgaagtttcttatgactgacaaacatatggatgcatgcctcctaggtcagaattatgcaaagttccaccttatgttcaaacgtacagttcatgtggcacttggtgattctaaacataacaatcaatgacgacttgctctatgcagatgataggacactgctaaggcagatatctctgtgacaagcacgttgagttttgatcactaatatatgaactgcgtagcagagtcctaggagaggcta

SEQ ID NO: 130302 - DNA, 438 bp, Glycine max
  Clone ID: PAT_MRT3847_88671C.1
aacgcaacaacgcaaactaacaacaaccaccaccaccaccacaacaacaacgtttgtgtctggtcgtgttgtgttgttagggattcatggcaacaataaacccttgattcctctccccattctcccaagagaagggccattttgttacagtgttggacacttgcaaatggatttagaagacaagttcctcgctaaagggagggttctgggttctagtgcaggtcctctagctactgctgattgatgcatacatgataaatagtttctggtgttcaaagcctttcatccagtgcacaaagtactccagaaaaaaatggccattcagatgatgcttcaagaagttcagaacttcttcaggagttcctaaaatctggtcctaagaaggaaattttacgaacttgctttgataaggacaaaaaagacatttcttcaaaaagc

SEQ ID NO: 130303 - DNA, 743 bp, Glycine max
  Clone ID: PAT_MRT3847_88672C.1
acacgcaaactaacaacaaccacaacaacgtttgtgtcaggtcgtgttgtgttgttggggatttcatgacaacaataaacccttgattcctctccccattctcccaagttgattggaattggatcttttccatggggcaacgtggatttaagtcaaatgagctatagagaagggccattctgttacaatgttggatactctcaaatggatttagaagacaagttccttgccaaggggagggttctgggctctagtgcaggtggtctagctactgctgattgatgcatacatgataacaagtttctggtgttcaaagcctttcattcagtgctcaaagtactccagaaaaaaatggccattcagatgatgcttcaaaaagttcagaacttctttaggagttcctaaaatctggtcctaagaaggaacttttaccaacttgctttgataaggacaaaaagaaaatttcttcaaaaagcaggatggctgaaactaagtcaaccagtaagattgtcaagaaacaggactcgaaaaaagtttctggtctcaccaatcagccttctaggaagcaacatcgcaaaggagaaaacccggggcgggtcgtaccagctcctgacccacctagtgattttggacattcaaactcctggatctgtaagaattctgcctgccgagctgttctctctaaagatgacactttttgagaaagtgctcttgctgtattaggaacctttttgatgataaca

SEQ ID NO: 130304 - DNA, 259 bp, Glycine max
  Clone ID: PAT_MRT3847_88673C.1
cgaaaaaaaattatatattttattcaacataaacatcataaataataagcagtaaaataaaacattaccaatagcatatttattaaatacttgacctgacacgtaactatctaaatccaagttgcaatgtttacaaaaattgtgactcatttgtgaggccatcgtttaggcttccaacacttgccataagcactacgtcactctatactttagtgcggctacgccattaaggtaaatggctcgctgtaatacgactttc

SEQ ID NO: 130305 - DNA, 1339 bp, Glycine max
  Clone ID: PAT_MRT3847_88674C.1
cccacgcgtccgtccacgcgttcgcccacgtttccgtgaaacgcaacaacgcaaactaacaacaaccaccaccaccaccacaacaacaacgtttgtgtctggtcgtgttgtgttgttagggattcatggcaacaataaacccttgattcctctccccattctcccaagagaagggccattttgttacagtgttggacacttgcaaatggatttagaagacaagttcctcgctaaagtttctggtgttcaaagcctttcatccagtgcacaaagtactccagaaaaaaatggccattcagatgatgcttcaagaagttcagaacttcttcaggagttcctaaaatctggtcctaagaaggaaattttacgaacttgctttgataaggacaaaaagaacatttcttcaaaaagcaggatggctgaaaccaagtcaaccagtaagattgccaagaaacaggactcaaaaaaagtcttctggtatcagcaatcagccttctaggaagcaacatcgcaaaggagaaaacggggtggcggttcgtaccaactcctgaccacctagtgattttggacattcaaactcttggatctgtaagaattctgcctggcgagctgttctctctaaagattttaccatgtattgtgtgaaagtaattcgttggctagaatgtgaggctacatcaaacatgaatttaggttgaaattgctaacatggtttagtttaagggcaacagagcaagaacgcagggtggttaataccttcattcaaactcttatcgatgatccaggcagtttggcaggacaacttgtagactctttttctgatattatatccaacaagaggctaagaagtggattctgtagtaaagctggggcatcaaattaagggtgatcctgttattcaagtttgccatttgcttcaacttttccatttatcattttctgtcagaaaaagtcaccctctgattgtttttgccttccttgtacaggcattttttaaaattaatcaccttccaagggattcatttttattgcagacaagctttgtcttgctaaaaggatttgctttgatgatctcagaaacagtaacacatttttccctggagggaggatttatggacatgaagtttcaggatgtaggaggcattacgtcatttctaaattgctgcaattatttttagtaatgaatttaattacggaagatattagaacccttttcttataacctttatttgaagaaggtacatgattcaatcgctgatttgatttatatttgtcattcttttgtaatcttcttgttcctcgtactgattagctggcaaatgaaaatgcttgcttcaaa

SEQ ID NO: 130306 - DNA, 447 bp, Glycine max
  Clone ID: PAT_MRT3847_88675C.1
taatcaagctagtgtaaaattttgcacttagaattctggattcatacaaggtctatattatcttcaagttttgaatctagaaacacacaagaatgcgtactatggtcaaatactttaccaattgatggaagaatatgaacatggcttaacaagtttctataaaggaacacctgaatgcaaactgaaacttcttgagctacagaataatctaacctgctgtcataggcagcatatacaatgaagattggggtattgatatgtgatgccacatattgtgggaaagacactgcacaagttagaatcatcactaacaccgaaagaagttgcaaagctataaggaaatattacaagtgaaaactcaaataagctactcatttagagttgatatgtgatgccacatttagtattggtctgagttatgaagtacaggatgtgggcaaaagatat

SEQ ID NO: 130307 - DNA, 2284 bp, Glycine max
  Clone ID: PAT_MRT3847_88676C.1
cccttatcaagtttgccacagaatattactgtttttgtctttcacatcaaagcgatttaaaataaagtatttttatgtttatagtacaagaaataaaagcatgtttttatctaatttggtcgtttacaatacgataacaaaccaaaatgtttgtagcttgcgaatctcaagatcactctgtgcaaacatggaaatttgtaaaccataataataaccctaagcccaaatgagcgtaatacaattttgaaagatattactgctttggtggttccacttaaatatgctaaggtctgtaaatcataaacagctgtagcatagaaaaaaaaaaactaagaagttttgctttaaacttttggtccaaaaggaacatcacatattgcaaaattttggccgacaaataagcagtgttaaagaaaatttatccgagtacgatctttttttccaaatgaacggccatcaactccaataaaaaaatgacctttttaagcttgaccatctatctgcttgtcttccacatcattagtagtagtagttgcctctcccccctcagcaccctctgatggaggctgaacttgttcatcctccggaagtggctcctccacgtagtcattttcaaaagcatccgcaggaacctcgtaaatcctaacctggggcttagatggatctttcacaagaacatacttcccctcattcaatttcatgcacaaatccacaatagacttcacaatcccccacatattcgtcgtgttcaaattaatctgtgctgcaaagtccctgggtttatatccaaccacagccaaaatcacatgattgaaatgatcacggggatgaatcctcgacacataccccaacttcattgtatccgcactcgccaaaagagcctgagcagtccacttagccaacttatttgcattgttcttaagttcagtagccaacacagcacccctctgagtctccaacttctgcctccaatccacaccggaatacttaggatcaaactcgttcaacgcattcaaagtaaggaacgacctctgcttgttcacatcaacaacactatgcacctcacacctcgcaacaagatacatatcatcatcaagcttccacctcctatacctataagcgacagaagcaacctcctcaccttcattagcaaaagggttagcctcatcaaaagtaaccttattcccatccctaataagcacctgctgagagaaattctggttgatataagcagcctcaacgctcaacgaatgggcagagttaatatcatccttcgactcaggcaatggctcctgcgaggtttcatgaacagagagcaaatcgagctgcgacccatcgcgcttatcaaagaaaagcttgtttccgacacgctggacgacaatgtcccaggaataaacagaacgaggggcacacatgagagtggacagaatcgtgtcggtggcgaaaacggtggctttgtcctcgttggcgagtctgcgaatgacggggtcgtcggtggtggtgactttgaagaagttccgattcttgaagcgttcgaggcggcgttcgtttttgggagtgatccgatcgtaggtgcggtcgtaatactcgagggcgccgcagaggaggaggtcttcgggttcgggaacggtgaaggagagcttggagaaggtgctgaaggggatctggtcgtgcatgttccattcgggttggatatcgacggaggatttgaagacggcggcttcgcggcgctgttggttagggtttgagcggttcatgtggtagagacggtctctgcgggctcgttccttctcctgctcgcgcttcttggcctcgacttcctcgtcgcgccgctgagggagctggcgctgctgctggaagcgccacttggggccgaatttggggcgcggcgggggctttccgtcgacgaggcggaaggaggcgtcgtcgtcggcggaggcggggaaggagtcgtcgttggcgaagtcgaagacggcatcggcggggttcttggagcgggtcggattgttgaagttgcgggtccagtcggcgatgcggcccaatttgtcggagcgggagaagggggcgaaggggacgttcagagggaggttgttgttgttgctgcctgaggtcgcgttgtccggcggaccccacccgtcggcgttgaacggaacggctccgatgtcgaaggcttttcccattggcgccacgcaaggtggtgttgaatctgaggaacagagtagtggtgtgtgctcggagatcagtggaaaaccctaattcgagaataatgtttccgacgcgtggg

SEQ ID NO: 130308 - DNA, 464 bp, Glycine max
  Clone ID: PAT_MRT3847_88677C.1
ggggggaaaagaaacaatttaaattccccaaaatatattttcaaactttgggggagctttttaaaaataaacccatgctgaaaaattgttcctaaggggccaataaatgaagtgtgacctacaaacacatttaacaccttcttgtttttttcccagctaaggaatgaaaaggtttaaactttacgagcccgggccccttggtttgttccatgctggactaccttttcctccacaggaaggcccttaccccgggggactggattaaaaaatttttttgccggttttggaaaaaccctaaaaccctttccaaacttttaaatttccttttccgttttagggacaaaaaaagggtccccaggaagggcttcccaggggctaaggacaaaaagtgcacttgcggcaccaaaaatccaccttttaagctcatccgcaaaaccaaagcttttaaaaacaggaaaattccc

SEQ ID NO: 130309 - DNA, 213 bp, Glycine max
  Clone ID: PAT_MRT3847_88678C.1
cggtccggtaatcccggtcgacccacgctccggaggactttgcggaaatacccaggtttgttttgctaaacgcctggagagaggtacaaggacgctttgagaaaaccctgaacccgggggtactaaaacccgaaaaacggaaagctgatttggcccacggtgccaccaagaatggcagaaactacattggcattggggtaaatggacactata

SEQ ID NO: 130310 - DNA, 507 bp, Glycine max
  Clone ID: PAT_MRT3847_88679C.1
cggctcgagacggctgcgagaagacgacagaagggatcccactaatccaatcttatcatggaataggacatattggattaagcacttttatcatggtaaacttacttgtggttagaaaagtatttgtacctttcatggtggtatgaatgactttctttagcgcaaagcttatcaattttaaaacacataatgcttgactttacttgcaatagtaccattttaagattacatactgttggatatggccaacgtctactttgtgcagatcccaagagagatcaatagcaattccatttccccacccgatcgaagggtcgaatgagcctttacagaaagtgacaacatggacttggaccatattaaccgttgtagttatcatgtaacattattagtgattgaagattggacaacatttttgcaaaaataattatgatattccctagctaacaaagtaagaaatttaatattctatatactcattattcacaagatgacaagaaatttttt

SEQ ID NO: 130311 - DNA, 3011 bp, Glycine max
  Clone ID: PAT_MRT3847_8867C.1
ctctctctctaacccaagacagtctctttctcttcgaagcaagacggtagctttccgacccggaaaacgccctctcctcctgggactcctctgccgccaacccatgccggtggcgcggcgtcacctgtgaccctctcaccgccaccattactgccgtgagcctcccctccgcctccctctccggcccctttcccgccatcctctgccgcatcgtctccctaaccaccctcaacctcaccaccaacctcatcagctccaccctctccgccgtcgttgctgcggtgtgccgcaacctcgtcgtcctcgatctctcccagaacaacctcgtgggccccattccgccacgctccaacacctcgacctctccggcaacattccgccgagcctcgccgccctctcccgcctcaaaacgctcaacctcgtcagcaacctcctcaccgaagcaataccctcttcccttcgcaacctcacttcattaaaacaccttcaactcacttacaagctgttcttgccgagtcgcataccgatcaactcggtaacctccggaacctcgaaacgcttttcctctctggctgcaacctcgtgggtcccatccctgacaccctcagtaacctctctcacttaacgaacttagattttttgaagaacggaatcaccgctcacattccgcagtggttcacgcgcttgaagcgcgtgacacaaattcaactatttaaaaacaaacactccagggagttacccaaaggaatatggaacatgagagtttgagattcttcgacgcgtccgtgaacgagttggctgggacgattttgacggagttatgcgagttgccactagcatcgttgaatttatacaataacaagctcgaaggggttttaccaccgattcttgcgcattctcccaacctctatgagcttaaattgttcagtaacaaacttattggaacgtagccgagggattcggggagtaacttgccgttgaaccacattgatatttggtttgaccattttccagcgagattctggcgatcatttgccagcggggggagtttgaggagttaattttgatgtgcaattatttttccgggaaaattctggcgagtcttggggactgcaggagtttaaagagggttcggttaaagagcaataacctttctgggagtgttcctgatggggtgtggggtttgccccatttgaatttgcttgagctttcggaaaattctctttctgggaaaatttctaaggcgatttctggcgcttacaatctatcaaatttgttgctttcgaataacatgttctctgggtcgattcctgaggaaattgggatgttggataatcttgtggagtttgctgctagtaataataatctctcgggtctggattccagagagtgtgatgaagttgagtcaactggttaatgttgatcttagttataatcaactttctggagaacttaatttaggtggaattggggaattgagtaaagtcactgaccttaatttgtcacataataggtttgatggaagtgttccaagcgaattaggaaaatttcctgtgcttaataatcttgatctttcttggaacaaattttctggggagattccaatgatgttgcagaatttgaagctcactgggctgaatttgtcttacaatcagctttctggggatattcctccttttttcgccaatgacaagtataagacgagttttatagggaatcctgggctctgtggtcatcaacttgggctttgtgattgtcattgtcatggtaagagtaagaatcggaggtatgtgtggattttgtggtccatatttgcgcttgctggagttgtgttcattattggggtggcatggttttactttaggtacaggaaggcgaagaaattgaaggtgttaagcgtttcgcggtggaagtcgtttcacaagcttgggtttagcaagtttgaggtatctaagttgctgagtgaggacaatgtgataggaagtggagcatcagggaaggtctacaaggtggtgctcagcaatggtgaggtggtggcagtaaagagattgtgtggagcacctatgaatgtagatggaaatgttggtgctaggaaagatgaatttgatgctgaagttgagacccaggggaggatcaggcacaagaatattatgaggtggttgtggtgttgttgcaacagtgaggatcagaggctcttggtttatgaatatatgccaaatgggagtttggctgatttgttgaagggtaacaacaaaagtcttttggatttgcccactaggtataaaattgctgtggatgctgctgaggggctttcttatttgcatcatgattgtgtaattcggctcgtccaggatgtgaaatccaacaacatattggttgatgcagagtttgtggcataaattgcagattttggagttgccaaaatggttactggagtcagccaaaggacatgatcaatgtctgtgattgcaggatcctatggctacattgcaccagaatacgcgtacactcagggtgaatgagaagtgtgacatatatagctttggcgtggtccttttggagttagtaactggaagacccccaattgatccagagtatggtgaaagtgatttggtgaaatgggtttcctccatgttggaacatgaaggactggatcatgtgattgatcctacattggactccaaatacagggaagaaatcagcaaggtattgagcgtagggcttcattgtaccagctccatcccaataactcgccctacaatgagaaatgtggttaaaatgcttcaggaggtaacaacaattccaaaatgtagaagtgtaaacgatggaaacgttccatgtttccatgaaggggcatctcataatatcagtgaaatgaaatgtagtttgagcaataatgtgctcaaagttaatatattagacagcttaactttttctattgcattgtgagaagggtgaaatatttgaagacatcaacggctcaatatatatcatcttatttgacaagggtg

SEQ ID NO: 130312 - DNA, 421 bp, Glycine max
  Clone ID: PAT_MRT3847_88680C.1
gaatttttttcatgacaaattgacaatgggcagcaaaactacgaagcgtgcagtgcagttcaggtctaataattttgtacgttggttccatgaatttgactaggggtacagtcccttttaactttgaccatgtcgccatgtagcttagcttgtataataaggtggtttcaaaatcaaaattactttgatcgattaatgttatgtcagcatatcaagaataatagtatcaataaaaaactgccgacaatttaaagacaaacctccttagtcaatactattaactttgagtataaattttcatgtaattacatttgagattttcatgtaactactatttaagctttaggtatatatttgttttcattcttctaaaccaaagaacacagttaatgtctatatctagttttttcctttaaaaagt

SEQ ID NO: 130313 - DNA, 310 bp, Glycine max
  Clone ID: PAT_MRT3847_88681C.1
aaaacctcaagggtcggtaatggaaaaaaaaaaagagtttttccgggtccaaatccccctaattgggagggaaatttgctggggaacaaattccccttttgttgtacccaagcaatttttttttttggtccccccaatttttttaacaggtgctttcttgctttaaaataggggataagttttttgggtgccaaaaaagcttttttgccccaaaatgaactaaagccttacttttcgtagttgttggttaaacctcgggtgaattttctttttaaagccctcaggatcctttgaatgattcaaggggtcc

SEQ ID NO: 130314 - DNA, 302 bp, Glycine max
  Clone ID: PAT_MRT3847_88682C.1
aagcaagctatggcccatgacgctgttcaagaggctctccaacacaaagcctctatggagaagctcaagcaacctggggggtcaagcatacaggggcacaacctcttggacgccacctttgccggcagtcccctaatgatacgtcctcaacagccgcctcaccggtccgaggtccggcactcaatcacgcggaatcacgctctgcggatctgaagttagagtcgggaagttaattggaaaccgaggacgcgctcacgaggttctcaaactggatcgacctcgtgaaggaacgggcaaagcca

SEQ ID NO: 130315 - DNA, 551 bp, Glycine max
  Clone ID: PAT_MRT3847_88683C.1
ggctcgagacaccttcctctccacaccattcaaagaagaacctcacgaaaaaaatcacgacttgctcttcgatcaaaatggtttccttcacagtatacaaaggcggcaaagatggcaaagtcaccaaagccaccaccgagaaaggcgaactcgagcgcgaccaagttctcgtccgcgtcacagcttccggactctgcggaacagatctccactaccgcaccgcagatatggcgttgggacacgagggcgtgggtgtaattgaagatgtcggaccacaagtcacatacatgaagaagggcgatcgtgttggttggggctacctgcacaactcctgcggacactgccaggaatgtctcaaaggcaatgagacgtactgtcctgagcgtgccatgtacgccatggcgaacacggaccagggttcttttgctagccacgctgtttggcgggaagcatacctgttcaagattccagactcgctgagtgatgaggcagctgctcctctgatgtgcggtggtgccacagtcttcaacgcattgcatgcatacaatgcg

SEQ ID NO: 130316 - DNA, 131 bp, Glycine max
  unsure (1)..(131): unsure at all n locations
  Clone ID: PAT_MRT3847_88684C.1
tcagcnaatgtngggaaanctgctttcatcaatgcttnacnaagtaagtcatatttccatgcaatcctaaataggaaggactnggcttgtctgtcnncnatgattganaanngcngtgagtgcnaaatana

SEQ ID NO: 130317 - DNA, 1091 bp, Glycine max
  Clone ID: PAT_MRT3847_88685C.1
gccgccctttttttttttttttttatttaaacaaatttttttgcaggaaaaaatttaatttataacatgtaatcaaccttttcctttatctgctatatataaggactgttaatttacaacaggctaatttatcaacacaaagaaataacaatccatgaaacctttgaactaaaaacaaaactttatccttgggataaaaaacaatgaaatctggcaaccaacaaaaaataatctgacgtagcctaaggaatatgtaactttacaaaagaaatgataacaaggtataaagggaacaagctaacttctattatcttggtggaccatctgaaacaggcagcatttctatctgtccaactccattgtcttttggattcccaaacttctcagtttctttcgaaatctgaatgtcgctgggaaaataatactgatacatatattttacaactaatcgaggaagtaacgcagctatcacagttccgagcaaacataaccagaacaatccagtgcctgcagcatgaaagatagcccagtaaccaggaagggctggtatggcatcaataataatgacacaaatgaaagttgcaactatagagccccaaatggctgcatgagtaatccaattccacctgatgacatccatggccaagtgcaaattaaccaaaataaccactgaaagagtccaaagatctcctatgcttgttacatctacagtggttccccaatatgcgattaggggagtaaagaagacagcaatgctttgccacaaagtatcagccattgctaaccaaaacaactttttgttgtaggcctcctgtctcagcccagccccataaagctgaggatactttaggagtgtccttttactaagatccttgtcaagaataccaacaacaatagttggaaatgcagagtagattattgaatataacacgctgctccattcatttatagcagttgtcaaacccaaagcagtaaagagcacataccaaaaaaggacaagaacaaagatagcatttctgtagaagttgtatattatcatgtagcccaatcgttggtaattccaatgcccatgtatcaacaagagaggaacc

SEQ ID NO: 130318 - DNA, 454 bp, Glycine max
  Clone ID: PAT_MRT3847_88686C.1
gtattttttcatccaaacacatttatcgtgttatttcaacatctgatgcaggcgctgggggtcatggattggtggagaggcgcccatacccaattataactgattaattgtatggctttcaaaaattgaaatagcagaaaataataattgaggaaaataattaaatcatagtccaacatatttcaaaaacctatgtatttgatggattgcttacaataattaacagcttaaagctctgaaataacacttgcttctttgcaaggaggcaagtaaaattgaccagtgagtatgctgattaaatactgtgatttcactctgtgtcccaagtgatttacgtgtacatcaacgcaaaagctaagactgaagagtgaggcaaaatgtgaccaggttagcaggctgggctgtgccgtatggcatcagaatgaatatatgcacattgttctctggagtgagc

SEQ ID NO: 130319 - DNA, 186 bp, Glycine max
  Clone ID: PAT_MRT3847_88687C.1
acgagtaccttaattctcttgaacaaaaaccaaacccacccaattccatgtgtttggttttagattgtagcaaatgcaggattgtaggacaagaatattagtgtgctgagactgtcaaagatcacgcaggctgttgaggtggaatgtgcaatcatgttagaaataattggagccatgttaattcag

SEQ ID NO: 130320 - DNA, 544 bp, Glycine max
  unsure (1)..(544): unsure at all n locations
  Clone ID: PAT_MRT3847_88688C.1
cttnctctacggttttcttttttttctggcgngaaaaaaatcaacttatattgtaattaacagcagagaatttacagatcaaaatttccctactttctaggaagctatccatacctaaactttgggcttcctcccaccaccctgccctctaacaaaaaaaaaataatggttatggaaacattctgtttttggagtatacatttctgaaaaacattttaattttcaaggcacaatcgacacaagcagaaccataattgagtgtaaaatccccaatgctaaaataaattattattgaatcttcaatttgaatttggtgccaggctataggcaggaaccttagcaagccttccttgtttcattaccgatcttattctctccacctccttccataagcctctattggcatagatattagacaacaccacgtaaacaccatcattcccaggttccaattcttgcaaatgcttagctacccattctgccatgtccacattcccatatttttcacacgcacccataagacacccccacactacagaatttg

SEQ ID NO: 130321 - DNA, 642 bp, Glycine max
  unsure (1)..(642): unsure at all n locations
  Clone ID: PAT_MRT3847_88689C.1
tgacacctatagtaagaaaanctatgacgtcgcatggcaccgccgtaccgtaagccttgggatccctctagaagcggggccgcccttntnnttttttatttatttattatttatttatttattatttatttatttatttttattttttttattttttttttttttttttttttttttttttttttttttgggaagaaaaggggaaaaggggacctaaaaaaatcaggcccccaggggaaacccaaaatcaggaaggggaacccttggaatcccccccccccagcccattttttttttaaaaaaaaaaacttttttaacaaaaaacaggggggggggggggcccccaacacccaaaaggggggggggatcccaaggcaaagggggggatttaaaaaccccgccaaaaacattgggggaaaaatggggtaaaaaaaagtcccaaagggtccaaagccttcaaaaaatggctaaaagcccccgggaaacaaacccccaggaggctatcccggggggggaaaacggggtgggggaaagaacccctgggaggggggggcaagggattttggggccccccctgggccaaaaaacctggagtccaccccttttttttcccaaagaaaaaaagggcccaaggggaaaggg

SEQ ID NO: 130322 - DNA, 460 bp, Glycine max
  Clone ID: PAT_MRT3847_8868C.1
tacggctgcgagaagacgacagaaggggacaatcagctaatcccacactctcttttctctacctacaaaaaaaaaaatcatctaagttctaacgatgaatcaccaacaacaatctcctgtgactgcatatccagcaggggctcagagcaacctagcagctccaccaccacctgtaggttatcccactaaggatgatcttccttcccaacaaaatgttcctgtcaaaaccactaccaggggtggtggcttctggagcggatgttgtacggcactccgctatggttgctgttgcatacactgtctgcaatgttgtttctcctcttgaacatcccttcactttatggatttgagcttgttctctctgtcttttggtattttctttaccagattaattttgtatcttggtgatctttttgtactttggggaagggaactaataacatgcatggaccattattcc

SEQ ID NO: 130323 - DNA, 669 bp, Glycine max
  Clone ID: PAT_MRT3847_88690C.1
atgagcaagataaagcaggcttccatgactctggtcaagacgtacatggctcgagtgacaatggagcttgaatccattcggaattcagacagagaatccattcaagattctcttctgcttcagggcgtgcattttgcatatagggctcatcagtttactggaggattagactcagaaacaatgtgtgcttttgaagagataaggcaacgtgtaccaggaaacctaacagggtctcgagaacttttggctggcataccataatcatgagaaaccactgatttttttattctgctactaatggttacaaaagctggctattacacattcactattctttttcttatctccaatgtcattgcttggtagacactgaacccctcttaagaaatatcgaagagcataaagagattctgaagaaagaatacttcatagtaaggtcataaagtggcggctctaaacatgtcataacctaggaataggatcttcagttcagggtagtttaatttcaacagttaattttgttaggtggttctttctagtgctgtaacaaacaacataagtagcttaatttgccgtttgtaagtacatatgattaacgtttacccagttactttattgatttaacggtcatgttcaatgtgtagagcttggggaaaacattttgaagcg

SEQ ID NO: 130324 - DNA, 408 bp, Glycine max
  Clone ID: PAT_MRT3847_88691C.1
gggggggttgtgtttttttctctagtcttttttcccctaaaatttggggggtttaacatttaaaaagacagtgcactccccgcctaaccaaaatagaaagctcaagcacagttgttggagcaagccacatctcccactatttggaggaaagggggacaactcactttactatctctttggaaggttagacacccttttaaagccgactttgaccccaacctgaggtgggaggaagcatcaacttctcccttgcttcagccccaaatggcatgctgcaacactggaataaacaactgattcgctacaaaagaaaccacaaaaccctgggagcgggacaaaaactccccctgaggccctacactgtaaaagcgaagcacttctggatgacgcttaaccctttccaccctc

SEQ ID NO: 130325 - DNA, 845 bp, Glycine max
  Clone ID: PAT_MRT3847_88692C.1
ccacgcgttcgcccacgcgtctttattccatgtggagctgccttaaaaaagagagccagtgtataagacgggggtgaccccaccatacaaaggctaatcaagctacgaagttcagtcacacattcatatcaaatgtacaacattccaactgcatggatgcttgattctggaataatgagcgagataaagcaggcttccatgactctggtcaagacatacatgaaaagagtgacaatggagcttgaatccattcggaattcagacagagaatccattcaagattctcttctgcttcagggcatgcattttgcatatagggctcatcagtttactggaggtttggactcagaaacaatgtgtgcttttgaagagataagacaacgtgtaccaggacacctagcagggtctcgagaacttttggctggcataccataatcatgagaaactactgactttttatgctgctactaatggttacaaatgttggctattaaacattcattattctttttcttatctctaatgttgtggaagaacccctttgaagaaatatggaagaacaataagatattctgaagaaagaattctcaatacttcctagtaaggtcataaactggcagctcccaacttgtcataacctaggaataggatcttcagttcagggtagtttaatttctatagttaattttgttaggtggttctctctagtgctgtaacaaacatcataaccagcttaattttccttttgtaagtacatatgattaatgtttacccagttactttattgatttaacagtcatgttcaaaaaattcctgcggccgtgaattcttcctggtgccgaatt

SEQ ID NO: 130326 - DNA, 122 bp, Glycine max
  Clone ID: PAT_MRT3847_88693C.1
atttcaacacaaaaagaggctcaccaacttgctagagacggagcatttgaattcaaacaacaactctgtgaactcagccgcgcctttcttgatggcgatgcggtacaacgctctttcataca

SEQ ID NO: 130327 - DNA, 1880 bp, Glycine max
  Clone ID: PAT_MRT3847_88694C.1
ttttatataagtccctctgaactggagttctgtatgtgtaacctgtaaggctgtgtttggtggacctttcccttttctcttttgaaacagagaatggctggtggaggagtagagattggaggaccaggaaaaagggctcatctttacgagcacaagttcagttggtatttcgtctatacatgcttcgttggggcccttggcggttctctctttggctatgatctcggtgtttcaggtggggtgacttcaatggatgatttcctgaaggaattcttcccaaaggtttacagaaggaagcagatgcatctgcatgaaacagactattgtaaatatgacgaccaagtgctgacactgtttacatcatctctttatttctcagcacttgtcatgacattctttgcttccttcttgacaagaaagaagggaagaaaggccagtatcattgtgggagcccttagcttcctggctggggctatcctcaatgccgcagccaagaacattgcaatgctaattattggcagagtccttcttggtggaggcattggatttggcaaccaagctgttccattgtatctttcggaaatggctccagctaagaaccgaggagcagtgaaccaactgtttcagttcacaacttgtgctggaatcttaattgcaaacctagtgaattactttactgaaaaaatccatccctatggatggaggatatctctgggtttggcaggtcttccagcatttgcaatgcttgttggaggtatttgttgtgctgagacaccaaacagccttgtggagcaaggaaggttggataaagcaaaacaagtattgcagagaattagaggtaccgagaacgttgaagccgaatttgaggatcttaaagaagccagtgaagaagcacaagctgttaagagcccgtttaggacactcctcaagaggaagtacaggccacaactgatcataggtgcattggggattccagcgttccagcagctaactggcaataactccatcctcttctatgcccctgtcatttttcagagcttgggctttggtgccaatgcttcactgttttcatcttttattaccaatggggctcttcttgttgccactgtcatctcaatgtttttggttgacaagtatggtagaagaaaattctttctggaagctggctttgaaatgatatgctgcatgattattacaggtgcagtcttggctgtgaactttgggcacggcaaagaaattgggaaaggagtgagtgcctttctggttgttgtgatcttcttgttcgttttggcatatgggagatcttggggtccccttgggtggttggttcccagtgagctcttcccattagagataagatcatctgcacagagtattgtggtctgtgtcaacatgatcttcactgcacttgttgctcaattgttcctcatgtcactttgccacctcaaatttgggatcttcttgctctttgcttccttaattatcttcatgagcttctttgtcttcttccttttgcccgaaaccaagaaagttccaattgaggagatttatcttctttttgagaatcattggttctggaggagatttgtaactgaccaagacccagagacatcaaaggggactgcttaaaattctcaacaaaatagattgaacaagtgtaggttttttgtttctctttctttattttggagtcaattatttcttacttgcagctttgtcaaaaaaataaatctgttaggacatttcttttaaatatggtttcttgttttttatattcattgaatctctttccctcggcgatgagaacttcctactgtaaagaaggccatcaaggttatatttagagtacaaaagatataaaataagaaaagataataact

SEQ ID NO: 130328 - DNA, 1418 bp, Glycine max
  unsure (1)..(1418): unsure at all n locations
  Clone ID: PAT_MRT3847_88695C.1
aattcggctcgagggtagccactgcatttctgcttgttttctctgaacatggtagtcacaaacacaaaccagttaggggaaaccattgattccacttatgataggaaagctgaaaagaaagcctttgatgattcaaaagctggtgttaaaggtcttgtagagtccggagtgacaaagattcctcgcatgtttcatgctggcaagctggatgtcattgaaacctcacctagtcactccaagttgagtatccccatcatagacctcaaggacatacactctaatccagctctgcatacacaagtaatgggcaaaattcgaagtgcatgccatgagtggggatttttccaggtgattaatcatggaattccaatcagtgtcttggatgagatgattgatggaattcgtagatttcatgaacaagatgctgaggtaaggaaagagttctatactcgagatttgaagaaaaaagttttgtattactccaacattagcttgtacagtgaccaacctgttaattggagagatacatttggttttggtgttgctcctgatccagccaagcctgaagaaataccatctgtatgcagggacattgtgattgaatattcaaagaaaataagggatttgggttttacaatgtttgagttattgtcagaggctttgggacttaatccttcttaccttaaagaattgaattgtgctgagggactctttattttgggtcactactatccagcatgccctgaacctgaattaactatgggcactaccaagcacacagatagtaacttcatgactttacttttacaagaccaacttggtggtcttcaagttcttcatcagaatcaatgggtcaatgttcctcctgtacatggagctctggttgtaaacataggagatcttctacagcttatcacaaatgacaagtttgttagtgtgtatcaccgtgtcttatcacaaaacacaggcccaagaatatctgtagcaagcttctttgtaaattcacatgacccagttgagggtacatcaaagatgtatggtccaattaaggaactgctttcagaagaaaacccaccaatctacagagacacaaccttgaaagagtttttggcatattattatgcaaagggccttgatggaaattcttctttggaccccttcagggtgtgaatcaaacatgggaaagcactcttaattctcttggatctggctgtaattcatctaaataagaagccactttctagttttccagaatgacctttgtataaacagcagcaacaagttctccagattgaaaataaatgaattatctatgttcacattttccaatgtgtgcttattgagtttaacaataaaatttattaaataatgtaaattcatatgaatgatgatttgaaatgtaatttnnnttataattt

SEQ ID NO: 130329 - DNA, 255 bp, Glycine max
  Clone ID: PAT_MRT3847_88696C.1
tttatgagaaacacaactcatttgtatttattcctataaaacatgactaccgcgagttatgattcccatgaatctagattcctcggtaaaaaataactcttcttgtaccaagcaccccctaaggtgctattagcacacaccagtcacataaccaaaatctatgcggaatctttgagttaacaaaatttcttcgccaccaacatatatggctattctgactaagtgattctaccaacatggcctacggcaaaaaca

SEQ ID NO: 130330 - DNA, 494 bp, Glycine max
  Clone ID: PAT_MRT3847_88697C.1
catcaaatcaatgggtcaatgttcctccgtaacatgaagctcttgttgtaaacataggagatcttctacagcttatcacaaatgacaagtttgtcagtgtgtatcaccgtgtcttatcacagaacacaggcccaagaatatctgtagcaagcttctttgtaaattcgcatgatccagctgagggtacatcaaaggtgtatggtccaattaaggaactgctttcagaagaaaacccaccaatctaccgagacactaccttaaaagagtttttggcatattattatgcaaagggccttgatgggaactcttccttgggccccttcaggttgtgaatcgaacaagggaatatactcttcattctcatcgatcgtatctggatataatttatccaaacaacaagcctctacttttattgagaatgtttaacaatttgtttgttaaaaagacattaccgcctataagaaatatgaaacacttacattattatttaaaaa

SEQ ID NO: 130331 - DNA, 287 bp, Glycine max
  Clone ID: PAT_MRT3847_88698C.1
tcgctccgagatcatattaaatacccgctcatcattttaaaacaacaattcactaagcttatatcaggacatcattggattcctcctgttgtctttctctgacacagctactgttgccaactgcacaccagtgtctcagaataatgcgatcacttgtgggaagtacataagctccttttctttagtgggaggaaaccgaaggtgatcattttttgacgctcacttggagcccaatagccctactataagatacccggattgcatgagccatgagtggaactatgtcg

SEQ ID NO: 130332 - DNA, 129 bp, Glycine max
  Clone ID: PAT_MRT3847_88699C.1
cgatggaggggtaagtggaggatagtgatcgaggttattgattgaaggataataatatatagcatatgagaatgaatctggataatagctcttgggctgatacatggggagcatagcttccaagagtgc

SEQ ID NO: 130333 - DNA, 454 bp, Glycine max
  Clone ID: PAT_MRT3847_8869C.1
gcgactgtacccggtgcacgactcaaaaacacgatgtactactgagaggctgaaacaacgaagacaagagggatttattgggaaaaactgtaatagaatactaatgcaaatgtgtaaaaaaattcagcaacatagtgtgataatggaccccatttactccacaaaaaagcttggcccatgatcacctactggtctgtacactgtacagggttttacttcttgagtgaaccagttcacagtctactaatagggatataacccgttaagcacgatgtatactaatgtgactatgctttctaacacatgttgacttcattaccaatggcttatagctactatattgatagatagtggccgagcgactaacttatggaacggtacatgcacaatgtaatgccgtatatgtgtatcacaactatatagtttatattctcatacataaaatggcggtgac

SEQ ID NO: 130334 - DNA, 483 bp, Glycine max
  Clone ID: PAT_MRT3847_886C.1
ccacgcgtccgtgtacgcgtggggcgacggcattccagacatacttcaccttcagctcaggaattatctctactcgttcgagtttttcctggacgacaagagctggagggcatcgatacacaagtaccaagctggaaagacgaggtacgcgcacttccggcaggcagacgagctcctcgccgattcagggtggcattgcagcttttgcttccgctacataagcgatttcgcattcaagatgcaagcgtatagccacgtcgaccggatcaggttcaagtacttcctgaaccctgagaggatccaagatgtcatctgcagaggggcggaccttttcgatatgcttccagaagagtacacgttccaagagatcatcgccaagctggggccgatcccgagcacgtattctggcgttcatcttcctagctatctgctaaggaatggcggaccggtttagataccttctaccggcaactgcaggaaaga

SEQ ID NO: 130335 - DNA, 173 bp, Glycine max
  Clone ID: PAT_MRT3847_88700C.1
cccctcactactccatgtgacgtgagagaacactttgtgcgatccagtgataaccttgcttgggttcactctctctcccacatcatagaaaacccatcagttacaatgaacaagtgcccatgggggatcccaggagcccaagcgcgtacgcgctgacccaggagggggggggg

SEQ ID NO: 130336 - DNA, 858 bp, Glycine max
  Clone ID: PAT_MRT3847_88701C.1
gggagctccaccacagaaggagctgttcaatgcttgcagcatggttgtattctgcatattctgccactgcactaagcagcatggcatgccatagccatagccatagcaacaatgctcatggtcatggccatgccacatcagcatatgacatgatgcctttgctcccagatgactccgaaacatgtgtgaatgagctgggaaaggccttggtactgagaggggttgagctgacaaagcctaatgagacttgtgatgtggtgtattgcttctgtggcattaggctgcaccacttgacatgccctgattcattttctgttggccaaagtggggaacttgttggggatgcaattgtgagaaggttggagaagaattgcttgagtagcagcactaatgtcaatggcttaccaggtcttggagggtgctctaagtgcttaaataccctctatttgcttaacaagaagacttcaaattcaagcaaagcagaagacaggaccaccaagatccacaacaaagattgtgagcttatgggcttgacatggcttctggctaaaaataggacagcttatatgcacacggtttctgcggttctccgtgctttgatgttgaacactgatggctcttaccctcagtcctgctctctaaacagtgatggaatgcctcttgcagtggattcatcggaaatctctgatcactcttcatcaaacaacctccaaccacccatctctctttctttgttattcctttgtttgttactactgcctatgcatttaacaatgttatcctcatagctataatctgagccaaaagaggatctcaaacatgacattttgtagatttgaatctctatggtgttgctta

SEQ ID NO: 130337 - DNA, 693 bp, Glycine max
  unsure (1)..(693): unsure at all n locations
  Clone ID: PAT_MRT3847_88702C.1
ttgagaagctatttaggaaagtcatgctcaaaacaaancttggaagaacctcataagcgcgtttctccagagtctttctatactaattcttggcctgagtgcttctgccaaacatctacacagaacccggcagacaaatgtcccccaaatgacattttaaatatcatgaatgacgaattacagaaaacagagaccgacgcaaattctacaatatcttgagccaaagttgtgccattgggctaatggttcttcaactctgcagtaatgaactgctgtgggccaaagcgaaaaggaatgaagttctattactgagatttgcaggtgatcatttttgtctcaaactatttactctactcggggaatggtgtagttagacattgagaattcaaggtgctgatttgtatatttgcattctttagcttcatgtagacaataggaggaagaccacacggattggatagatagctggctatgtgactggagttttattttttaggaaaaatcaactaaaattgtaatagttcttcgatctgccagagaaaggcaattctagttacctagggaaggttgaaaagtgtggcagatttatgttatagatctttggagtgctggaaaaaaccagatgtgctaaatttatgttgttttatttatttaatcttttttcgggtcgcaatgaaatgagcttgttcaagt

SEQ ID NO: 130338 - DNA, 361 bp, Glycine max
  Clone ID: PAT_MRT3847_88703C.1
gcgtgcgtataaaaggaaaataaagaaattagcgtcaaaatgccgggtgtgctcagcagctccatagtgtcgccgggggacgagctcgtggccgccggcagccgtacttcgtctgcgaatatgaccgcagctgaactgccgaagcaggtcgaggagaagaacccctacgacgagtcactggaagttcgagagcatgtccagctcgcttatacccagcacaacgagtctgcgattcagcccacatcctttgctgtcaacgatgactgcgcctgctcgtttgaggtagcccttgacagtttgggaacactgatacaacaatatggactgcacaagtcagtcaatgaagtattggtcgtcattg

SEQ ID NO: 130339 - DNA, 126 bp, Glycine max
  unsure (1)..(126): unsure at all n locations
  Clone ID: PAT_MRT3847_88704C.1
anttgggcncgcgcgtacgtnngntngganttcggctcgaggngatttctgtgagtgatgnngtcgtgtacaattgatgctcnntcatnantgcntcagcgtcaantgcgcaagnncagatagccc

SEQ ID NO: 130340 - DNA, 372 bp, Glycine max
  Clone ID: PAT_MRT3847_88705C.1
ccgggaggggaagagaaagaggaacaagagagcgggagacgacaagatatacgtgcaggctgaagcaggtccccctgacttggtatctcaagcaaggcctgggaatatgaacagcttcatcaacgacatcttcagaagcttgctcagaatcttcaacttgcccgctcacagaaccccctccttaggggggggggagcgggcgcttggcttccgtggttgccagccgccgttgtgggggccgcgccggccggcgccccggcgcgcggcccggggggcgcgccgcctgcccgggtcgtgcgtggcgggggggcgcggggggggcggcggccccccccccccgccccccccccccgccccccccgcccccccccc

SEQ ID NO: 130341 - DNA, 833 bp, Glycine max
  Clone ID: PAT_MRT3847_88706C.1
ccagccagcttcgcaccagtcctgaaagttctcttgtggtctaagagtttcaacagccactggttcaactgctgcaatgcaatcagcaggtggatttccaatgcccattttatctcaggatctccaatacatgttaagagaacctatttcactgggggcaacctcaaactatatgcatgggttgatcaaacgtaaccagacaatagtggccacatggacttgtagaaaaggtgtgatatatattgatggttctcatgtcaattatactttcaaagatggggatatcattgccatatcttccaaagcaccggttctgaaagttctcttgcctcataagtttttatagagatgtcaagtaaatttcacagcatatcgtcattgggagaatatgcaaatttggttggaggagtagtctgttgtaatgaaaaatataaggccacatgagctgacatggctgtaagcttgcagtgttccattccttctttaaggcttgagctacaaatgcaattcagaatctcatgcattaatatccaggccataaattcgaagctgactagactttaaaattgaggagcataaagattccaatgtacgtatcactcaagctctaaggggagtatatttcataatggaaagaaaattctgtggttcacagatagccagggcattttgctacttagtgcatctcatcttttatcctttataatgaatgagagctttgctatatcccttttattaaagttaaaaacaggcccatgtagaacatgctattgtattttggtgctaatagctagctgtaaagaatgttcttgcaatggagaaaaacatgcccc

SEQ ID NO: 130342 - DNA, 456 bp, Glycine max
  Clone ID: PAT_MRT3847_88707C.1
acggttatgtctacgacgaatggtatttgccttgactttcatatataaatgtcgaagttgctttatgaacacatcttggatgacttgttgcatttttattttcccctccggagttgcaggtttttgtgctgtctttaatcctgagaccatgtgcttgatcctaatgcaaataattcaattagtttgattttaaaattccttccttctcccctgtggttttacgagagtctcttaaagcaaaaacgaattctggaaagatataaataacttatagtgcaagcaaaatgagttaactcaaagtttctccaaaaatgagatgaactacaatttgaacattataactatattcatataatccattaaacaaagcaaatatatacaatatacttatcttggatgatattaaataccttttgaaaggggtaaatttgggctgcgtttttaggactgctttca

SEQ ID NO: 130343 - DNA, 254 bp, Glycine max
  unsure (1)..(254): unsure at all n locations
  Clone ID: PAT_MRT3847_88708C.1
cccatctttgtctacctttgcttgatctcaaaggtggctctcacaaaaacgtggaaaaatttcattcccgtgagattctcctccaccgatgcagattgaatttcaggaattcttgttgtttactatacgnaatcaccctttttcatgtttgtattcattcgatctgtgatgatcataatgtcactcatcgaaaacttgttgtatcatttgattttgttcttcctttccctgaattcccctgttttttactttta

SEQ ID NO: 130344 - DNA, 395 bp, Glycine max
  Clone ID: PAT_MRT3847_88709C.1
cccacgcgttcgcccacgcgtccggccacgcgtacggaagtatggactactgcttgcacaatagcaatgactatgtaatttaatccagacccgtgttgtgatgcatggaggttggaatctctgaagcgtaccgaatttcattgtgatattatatgtgctactggatggactgacactgcaatgcaggatgttgagggtacaattgattggtatatatgctctcacgaatgcgatcgcaggacctattgagatataaatccacagaatacttttgtgataaataagcggatggtgaaactgagtattccccagggcacttaccgaagggctaaatgaatgcctgtatgtatatggggaggagctgctgcatagaatgctatgctcatgaatatgcc

SEQ ID NO: 130345 - DNA, 294 bp, Glycine max
  unsure (1)..(294): unsure at all n locations
  Clone ID: PAT_MRT3847_8870C.1
ttcttttcttttttttttttttttttttccggaaaaagcaaggtacattaagttggattcgggatacacaagaaattcacattatttgaagtacttcaccaaacccaaaatctaaaaacctctcaaaaaggcatttcggttctttggacgctcactttccgggggacaaaagttggtcggcatagcgccccaggcggttgntagttagacagggcccaggcaagggtgactcggcggaagttccttcacatggaccccttttccggagacaatgggcccagaacaaaagaagcc

SEQ ID NO: 130346 - DNA, 423 bp, Glycine max
  Clone ID: PAT_MRT3847_88710C.1
ctcagggcctttgcaagttccacatcggttgagctttgtgtcaggtggcttagtgttatccttaattattcttgtggtcagtatttctcttctttctttcttcttttccaatgagctttgatttgtataactgtataagaatttgcgattcaatatattttttctattgttagctttttaatttcacttgtgacttcattgatttctattattatcatgttttagatttgttttgaagaaactgtgtgtttagattcaatttgaagcttagctagttcaagctttcttaaacgatttactatgcagattgctgaataatcaaactcatatgtgtcctaatttagtttttttcgaggatagcaatctcaattctcaacctctgaaatttgtcttcaacttattctgaatactgatctaagcttc

SEQ ID NO: 130347 - DNA, 480 bp, Glycine max
  Clone ID: PAT_MRT3847_88711C.1
gaacaaaagccgggggccccctttttttccgtttttgaagggaaaagggaagcccccccgtttcaaaaaaaacgggggggcaaaaaccaaaccccttttgccccaggggggggtaatagtaaaaaagagggcccccaaaaggggggccccactttttagggccccaagaccccctcccggggggggccccccaaaaaaaaaatttaaaatggacaggccccttgggcccccaaaggcaattcctttccttttagggggggaaaaggaaaaaaaaaaaaacccccttgcccccaaaaaaaaaaaattggggtttccccccccccccccctggggggaaaaggccccccttttcaacccaggggggggtaaacatttgggccctaaaacgggcccgggcgggagtttcatttatcatttttggggggggggcccccccttccctgccccaccttggattcaagggccccaaatttggggggg

SEQ ID NO: 130348 - DNA, 358 bp, Glycine max
  Clone ID: PAT_MRT3847_88712C.1
gggctcgagatcgattgtgggacaaccagaagagagaaacacagagtggtagatgccgtcacgttgtgaaatatgctgcgagacaatgatcgccagcttgatccctcctctcggaaccagcttttgccacgggtggcgccgtgacaggattcatcatgctggctgctgcctgaccatgttacggtagcttcctgggatgagactggcgatatatgcgataatccagggccatcgtgtgcagacctgccaggagaacacagcgctctctgtttggcagagactgactgaagatgttagtgagagtgcctctgatgggggctctagtagaccaggtgctgtgctactgacaattgcagct

SEQ ID NO: 130349 - DNA, 258 bp, Glycine max
  Clone ID: PAT_MRT3847_88713C.1
gggtctctagtttagttaggtatagcacggatggggcacgagccccaatgtaggtgttatatgagtggcatcttgtggtcgaaatagtcgatgttatagtaggaaatttatgacttactgcattctaaggatatcctacatgagagcattaatctgtgcaaatttttaagcatagattcgaatgctttttaggggctagatatcttttacgggaatgcttatgtctcctacaatctaaggattgatccaatattggga

SEQ ID NO: 130350 - DNA, 475 bp, Glycine max
  unsure (1)..(475): unsure at all n locations
  Clone ID: PAT_MRT3847_88714C.1
atggcgcgactcatgtccgnttgcggtacacccccccagaatattttccccggctccacgagcatctctactccgcggccgcccttttttttttttttttttttttttttttttttgttttttttttgctttttttgtggtggttttctttccctcttgtgtttggaaaacccaaaaaaaaagggtgtccctttgcccaaacttaaacccccggtatcccatttttaatcccggaaaccaaatgggaatgggatttccaattgggctgggggaatctttttttcctgaaataacccccccaaataaagatgtctaattgaaagcttttgtgccggggttttaaaagccccaaaacccctccccctttaaaaaacccccccctggttaaagctcaaaacccccccccggggggaaacccaaaaccgggggttccccgttttttttttgcttcttcccaagaaaaccaaaacccctt

SEQ ID NO: 130351 - DNA, 228 bp, Glycine max
  Clone ID: PAT_MRT3847_88715C.1
ggcacaagtgagtttgttgatccagataactaaaaacaatcttatcaatactattgtccgtgttatcttcgttcctacaattttggcaggggtcaaactaccaacttttcactctctacctcaccgatgtgcttaggcgctcaagacaccattcacgtgacatgttccagttccctgcttggcttactatcaaacaacgtagtcatgtgtgggggtgttcctgcatct

SEQ ID NO: 130352 - DNA, 422 bp, Glycine max
  Clone ID: PAT_MRT3847_88716C.1
cgtaaaccctagctccggaaagatcgtcaacctctgcctctaaggatcgcaagctcttcgccggcatcgcggaacccgtggttcggtcggagcgtcacgaacagatcatgggatcaatggaaaaggtgctgaatctcagacgcttaactgtcggtggcggcgcgggactcactttctgtggggtcaaggaagccaatagcgctcgcacatcgttctagaggctcctgtcttccattgagcgtaacgaaaaagcaaaaacgaactattgcgagtgcgaatcatgctaaggcgtacatactgctggcttcattggagcgacacaacatctggaatgatggtacttgagtgagtcttgtgcacactattcactctgttgtagctgtggaaaacactgtcttgtcctatgtgaccctaggggcgtg

SEQ ID NO: 130353 - DNA, 202 bp, Glycine max
  unsure (1)..(202): unsure at all n locations
  Clone ID: PAT_MRT3847_88717C.1
gaanacccgggccgacccacgcgtacggacgggagaaaaagacaacagggggattccacatcaaccactcttgactatgccctggtcagggaaattcttacacacacgcattcaatttaaaatcatcttatacccaaaaagttgcattcttgattgcacctctcttgatcagttgctctaattcacccatcccacattcact

SEQ ID NO: 130354 - DNA, 1724 bp, Glycine max
  Clone ID: PAT_MRT3847_88718C.1
ccgggccggaattttttcatcggatctcctccaactccttgacgctatctgcagcagaatcgttcattaattcatccattcgacaaaaccttgagcaattgacgatgatgcagatcagctccaccgtaccagcccacaaccttcacaagttccaagcaataaggtgccccagcttcagcttcagatgccaacaagcttcctcttcctcctttcagaagcccttcatctccaccgagtcaactcgcttgcacctcgccaacctccacaaactcctcgagacccagaagcccgaggtccctccacccacccaaatccaacaccaccagccaatcattaacgatccaaaggaaaagaaaggaagaagctttctggagggtctcaacttggccaggctatggccggagatgaaagccaccgatgaaatgtccccgcgccacctcaaacgcctccagcgcctcctctccatgacgggggagtattccccgaggaacatcctcggcggccgctggagagaatatcacggcagcaacgactggaaagggatgttagaccctctagacgagaatctccggcgagaggtcgttcgctacggcgaattcgtccaagccgcgtatcaagccttccattcagaccccgccatgtcaacggaggagccgccacatccacaacacgtggcacttccagatagatcataccgaatgaccaaaagcctctatgcaacatcatcaattggtttacccaaatgggttgatgaagtggcaccggatctgggatggatgacccagagatcaagctgggtcggatacgtggctgtttgcgaggatagaagagaaatagcacggatgggaagaagagacattataatctctcttcgtggaacttccacgtgtatggaatgggcggagaatctcagggcccatatggtggaaatgggagacgaagaaggaaaagccaaagtagagtgcgggttcatgagcttgtacaaaacaaaaggagcacaggtgccaagtctggcagaatccgttgtagaagaagtgaggagactgattgatctttacagaggagaagagttgagcatcagtgtgatagggcacagccttggggcgacgctagccttattggtggctgaggagataagcacgtgttgcccccaagtgccacccgtggctgttttttccttcggtgggcctcgcgtgggtaacaaggcctttggggatcgcttagctgccaaaaacgtcaaggtgctgagaatagtgaactcgcaagacgtgattactagggttccagggatcttcgtgagcgaagagcttgaacagaaaatacggaacgttggtgggggtgtgttggaggagaacacgcccttagcatactcgcacgtgggaacagagctgcgtgtgcacaccaagatgtcgccatatcttaagcccgatgctgacatggcgtgttgtcatgacttggaggcttacttgcacttggtggatgggttcttggcctccaattgtcctttcagatccaatgctaagagaagcttggctaggttaatgcaagaccaaagtgccaatgtaaagaagttgtatactagcaaggcaaaatccctcactgtcaatcttagtaggcagggatctatgtctatgtctaattgtttgcctagtccatcttaatcaaaactcaaatgctaccctttttcatgcttctgtaagggcagccgctcgcgatctcgagcc

SEQ ID NO: 130355 - DNA, 1195 bp, Glycine max
  Clone ID: PAT_MRT3847_88719C.1
ggagagaataccacggcagcaacgactggaaagggatgttggaccctctcgacgagaatctccggcgagaggtcgtccgctacggcgaattcgtccaagccgcgtatcaagccttccattcagaccccgccatgtcaacggaggagccgccacacacccaacacgtggcacttcccgatagatcctaccgaatgaccaaaagcctctacgccacgtcatccattggtttacccaaatgggtagatgacgtggcaccggatctaggatggatgacccaacgatcaagttgggtgggatatgtagccgtttgcgaggacaggagagagataacacgaatgggaagaagagacattgtgatctctctcaggggaacttccacgtgtctagaatgggcagaaaatctcagggctcatatgattgacatgcccgacaacgatagctcagaagaagcccaaggaaagcccaaagtggagtgtgggttcatgagcttgtacaaaacaaaaggagcacaagtgccaagtctagcagaatccgttgtagaagaagtgaggagactgatcgatctatacaaaggtgaagagttgagcatcagtgtgatagggcacagccttggggcgacgctagccttattggtggctgaggagataagcacgtgttgcccccaagtgccacccgtggctgttttttccttcggtgggcctcgcgtgggtaacaaggcctttggggatcgcttagctgccaaaaacgtcaaggtgctgagaatagtgaactcgcaagacgtgattactagggttccagggatcttcgtgagcgaagagcttgaacagaaaatacggaacgttggtgggggtgtgttggaggagaacacgcccttagcatactcgcacgtgggaacagagctgcgtgtgcacaccaagatgtcgccatatcttaagcccgatgctgacatggcgtgttgtcatgacttggaggcttacttgcacttggtggatgggttcttggcctccaattgtcctttcagatccaatgctaagagaagcttggctaggttaatgcaagaccaaagtgccaatgtaaagaagttgtatactagcaaggcaaaatccctcactgtcaatcttagtaggcagggatctatgtctatgtctaattgtttgcctagtccatcttaatcaaaactcatatgcttcccttt

SEQ ID NO: 130356 - DNA, 253 bp, Glycine max
  Clone ID: PAT_MRT3847_8871C.1
ctaaatgcgagccacgcatcactcgttcgtgaagttttgtcagtatggtttcatttttggctacttcactgcacattcggaatcatcaatgctaacggtctgcttattgtacatgaccacatgtggtccagcaagatattccatcttcacatcaatcgccattgtatcatatacattcttgaacctacatcatatcctttcgtattggataaagtttcacattgcaagccgtctctttttttatcttttattt

SEQ ID NO: 130357 - DNA, 213 bp, Glycine max
  Clone ID: PAT_MRT3847_88720C.1
aggaaaaaaaaaccggtcggcctcgaccacgcaccgctgcaagcataccacacttttttactactccaaaaagactaccatagggcacggcttttttaataccacttactcctctctctgctattcttcttcccccacacccgacgagagaaaaacaacataacttttcactttttagaatacgacataaatttactccttatacaatactac

SEQ ID NO: 130358 - DNA, 668 bp, Glycine max
  Clone ID: PAT_MRT3847_88721C.1
aacaacaaagtcttatcccattaaataaagtcagttacattattatactacagtactcgacacaacgccgaagaaaatcaaggtttcaaagatattgagtctaaggtctcccttgttgatttcctacaatgtcctcttcagtctcccttttctcctttttgctggactaaaaaatcatgttatccacccttctaattgacatctcttgtgatctcttttgtacatgtccaaattaccttaagtgatttcctttactttttttgtttagaaaaacgacacaaagctttctctcttaaacaacaaagaacccccaaaaaaggtaacccaatgaaccccttattcttgaaacgacattgcaggaagaaataccttttccacgaggggttggcaaaaaagccccaatctcgtctctcttcatccaccgaggcttccatgccgcgctgagcccctatgtccacggccccgcgcttgcgttgtcgattgctgaagaactctaaaagatggcaacgcatgcaagaccaaatcacgtgtatcttcattcaaagatgcaaacaatctgctctgatcctctatgtccataattacacattttggtagtagaaatttacttacgctggcatatgaggaacccaccttttggaaatgatgactgcccattctattgaacc

SEQ ID NO: 130359 - DNA, 584 bp, Glycine max
  Clone ID: PAT_MRT3847_88722C.1
gcgtttgatgttcctgtgttcggcccaatacccctcttcacttgggtggtcctattctcactacaatgaggagacagatatctcacatgagtaaatacaaatatttaccgttttcatctggaaaacagcgctatgatgtaaagagagctccaccagaaatcacaagcctttcagaggactgaaattttcagatggagcaatctgaggatttgatggaagttgaagaaagttgcttttgaggtcttgtatggacaacgggatgtctgatttccatttgagaaattgtttagactttgggcgtcttggatgttcttacgccctagtaaaagattcagtttagggagatataattggagtttctaagggctctttcttttactcctttactttctatttctttctatataggtgggctaatggctcttgttcttgaattagtactagtagtcaaataacgagaattttagatagctagcttgtgtagaatgaaatctttttcatttcttacaatgaagttataccgatctattttttttattgtatatataaacattttaatttttaatcaatgattttttggaact

SEQ ID NO: 130360 - DNA, 853 bp, Glycine max
  Clone ID: PAT_MRT3847_88723C.1
aaagctgaggaccctgctgctcgacgttacattatttcattcaatgcaaacaccactcttgtagttgagggcgtggaatttgtaaagtgtgaggttgtgggacagagcttcatgcttcatcagatacggaagatgattgggctggcagtggcaatcatgagaaattgtgcaccagagtcacttatcgatgaagctttgcagcaggatgttaacattaatgtgcctactgcccctgaggtgggattatatttggacgagtgcttcttcacttcatataaccagaagtggaaagatcatgaagagttgtcaatgaaagcatatgagaaagaagctgatgagttcaaaatgaagtacatatattctcatattgcttccacggagcagaaggaaggaactgtcgctctttggttgcattctttgaaccatagaaattatccagatctgcgtgttatcaacgaggaagccatccccaataacaagagtgctgatcccaaagaagccatcactgataacaagagtgctgatcctgaagatgccaccactaaaaacaagggtgccgatctcaaagaagccatcactgataacaagagtgctgatcctgaagttgtgactgagtgaattgtgttccagttgttcaatatgaactctttctttctaattgatttgtgcctgactattcactacttctgattgattactatttgcctagcacccctgcttcgcaacattcacatacaatcaatatacaaaagatgtggtctgtttgtgtctgtcactcggtaaagacactaataagaagaaacgaaagaatatttttgttatattttctgttcaatatgatttttacttatct

SEQ ID NO: 130361 - DNA, 254 bp, Glycine max
  Clone ID: PAT_MRT3847_88724C.1
tgaaaaaactaaaaatcgtctttaaaataacaaaaaaacacataattaactgcagtcttcttattcttaccatatctgtggttgaatttacaagcattggtaattcaccgtcgtgttcttatatattcttatttatttgggtcttgtttgtcgtgaacatttttaacgaataaatattaacttccaaaaatgaaaggaattcaaaattcttttaaccccttactctcttatatatctcttaacaggttgcaagt

SEQ ID NO: 130362 - DNA, 411 bp, Glycine max
  unsure (1)..(411): unsure at all n locations
  Clone ID: PAT_MRT3847_88725C.1
actcccactttttttctttacagcntnagagaatgaagaaaatttaatccaaccaacacccatnaagaccaaaaaagaaaagaaatcaacaaatgaacaacacctgcaaaagctaaccttccaaataaagaaaggaaacctaccccctctctaaatctataaactcaaataccaacattgccctatactatatcttactaagaatacataaaaccctagatctccccaaccaggaactatctgcctcttagctaactatctgcgactgaaaacctaccacacttacaaagaacacaagaaaaacaacccgccccgattaaaaaagaaacaaaacaaaattgattaatatacaggcaaagccgagaacgtagccataataggaaagataccacttgacgaacctcctcaacc

SEQ ID NO: 130363 - DNA, 479 bp, Glycine max
  Clone ID: PAT_MRT3847_88726C.1
cggctcgcgcgtttcacgctacctttctttctctctcctcttcactgttcattatgctaaattcaattttgatgatctattgagaatcctaatttgcctgacctatttcgctgcgtaccgacaaccatgcagcttgatttcatgtctggttgtttcttatgagtaggacattttgttctcagaatcctatcgcctccgttacgaaggaggcaatgactgctacgactacgattccgaaatcagaaagaatgaacatcgcagcagcaataacaacattggttagttgcttttgcgaaaggtggtggagcgccaattcacgtatagcgaagaaccaagtgcgcagactcagaaccataactagtcttctcgcgaacttacaaaaagttacgtggtgattgtttgaactggcgttagtggaacgagtgcttgtacgcttttgtttttcgcggaccaaagtgctggactctcctaatgaggag

SEQ ID NO: 130364 - DNA, 358 bp, Glycine max
  Clone ID: PAT_MRT3847_88727C.1
gattcttcgcggaaacgtgcaatgattccctttaaattcaccaaccatatattcgctccaaccttgtacgaagccctgggctccttaccatgaaccggtctataatcttgttgatgctgttaataaaattataccaccagtgttgattggaacatcgctgcaaggattgaacatttaccttaaatgggatggacgcaatggcttctattaaaaacagacctattattctttctgttctcaaacctacggttcaatgagaatgccctgttgtaaaatcttaccaatggggtctaagaactgccatttttgaatgtgggagcccatttactcccgattattatgatgaaaaaatacccgt

SEQ ID NO: 130365 - DNA, 139 bp, Glycine max
  Clone ID: PAT_MRT3847_88728C.1
cgccacaaaaagtcataagtgactttttaaaccggggtaacaccccacataatagtcctggaggtctttgcgcttaacacataacaaattacgcgttcccgacatgtgtacaaagtataagccagggcatttggtgctt

SEQ ID NO: 130366 - DNA, 757 bp, Glycine max
  Clone ID: PAT_MRT3847_88729C.1
tcaacaacaacaataataaatcccgggggcctaaccctaaccccaaccgtaaccctgaagaaccaaaacaacatcacaatcacaaagacagcaccaaagaacgaataattctccagagaccctttcgcgccttgcgacaacaacttaccgtctcagagattctcatcttcggcgaccgccaaaaggtcacagtccgccgggaggaataagagtgttattactacggcggcggagagggatccctcaccggcggggaaggggaagaggtccgcgtctccggtgccgtccaagtgtgtggttccgagcctcgtttcggcgcgggaggagaaccggaaggtgtcgagggagccggcgattatcgtgccgtcgaggtaccggcagccttctccgaccgggaggaagcagccgtcgtcgagtccgcggcggacatcactttctcccgggaggaggttgtctgggggacttaaggtttcgccgctggtggcggactcctccgtgaagaagaagatggccaccattgtcgccggaatctcgaaggtctccgatgcgctggttgggtccaagagtgccaggaagaattgggatgagcaactgccggccacgcctgttgaagctggtggttctaagagtaaggttgatgcacaagcaattttgcgtactcaggctgcaatgtcaaggcggttaagtgatgtgagtggtcaaaaaccgggtagcaatgattcttcgagcaatgagaaaactaaagctgtttctcctc

SEQ ID NO: 130367 - DNA, 2546 bp, Glycine max
  unsure (1)..(2546): unsure at all n locations
  Clone ID: PAT_MRT3847_8872C.1
ctctctacaaacaatatcaagacaacttcatctaattaaccatgaatcaccaacaacaatctcctggtaagtctttcatatatttactttttatactgaatataattaattaccagcattccttcatcaaaactgatctccatcattaagaaaaattctttctcactttcttaccaaatatgcatggttttaacttcctataatttaatgaatggcttgatcatattcatatttaggtgcttaattaaaaatcctggttttatattcaaaactagaattattaatttctatagacatattgatattttaaaatatatatatctaatttggattgtatgattttccaccagtgactgcatatccagcagtgagtcagagcaacccagcagctccaccaccacctgtgggttatcccacaaaggatgatgttccttcccacgcgtccgcaaacttccttcgcttgtagtactgccctaattccccaaattcgggtcttttttttttcttttttttttttttcttcttcgttctcagatcccggtggccttttccctctctttctctggaaaattcccccgattttctcgagaaagtgaaacggaattatgagctttcaggacatcgagggctgggcggcccttccgttcgaggcgcgggttgatgaacgggaagcatagacccgacgcaagcggtggctgccggaatattccagatcataacaccgccgtctccaccttccagagactcgtcaacaccctcggaacccccaatgacaccccctacctccgcgaaaaactccacaagactagactacatattgggcaattggttgaaagatacatcaggctaaacttaagcaagccagtgatattgatcaccatgctgaagttattgcaagcaagaagattgcagatgctaaacttgcgaaagattttcaaggcattgttgaaagagtttcagaaggcacaacgttttgcagctgagagggaaacagcgtacactccttttgttccacaagcagtccttccttcgagctatacagctagcgaagtagatgttggttctgataagtcaccagaacagcgtgccctgcttgtggaatcaaggaggcaggaggttttattcttagataatgagattgccttcaatgaggctattattgaggaaagggagcaaggcattcaagaaatacaacagcaaattggtgaagttaatgagatcttcaaagatcttgctgtgcttgtccatgagcaaggagccatgattgatgatattggctccaacattgagaactcccatgcagcaactgcacaagcaaaatctcaacttgcaaaagcttcaaaaacccaaagatcaaattcctctttgacatgcttgcttttggtgatttttgggattgtgcttctcatcgtgatcatagttcttgctgcttagtcaaagattgtctcaattccattatggagcaaatgcatatatacagggaagcagatagcatctcccttgctgatgatgtcacttgattggtgttttgccgggtctggtggttgactggagtttgttgcatctgatttcagttcatgatgtgggaattcccataattttgttgtgtggttttatgtgctctctatgttagtgtttggggttttaaaatgtgtcacggattatggtgtaagttctctccatgtttctttaattaaaaagtatttaattctttgattgtcctttacctgtaaatgcaacgctaaaactggctagctgtgctgagtgctggctcttcggcaaaaccttcgtatatggtattttgtttttgttttagtgcttttctttcccagaattggaattataatgtgtatggagaaaacatggatgtatttgatgagttaaagtcgatgattggcatttattcgaaaaaaaaaaaaaaaaaaaaaaaaaaaaaaaaaaaaaaaaaaaaaaaaaaaaaaaaaaaaaaaaaaaaacacccaaaaaaaaaaaaaaaaaaaacggggggcncgcaaaaaaaaaaacaaaaagaagcttttaatagcataaaaaaaggggggatttttattaccagaatcttactttgtctaattaattagggcccgaattccttttatttatagcaagtccaataattaaggacacaagttaaagaattttaaaatagaaagttttgtattgaaaataactattgaattaattgtataatttgtattagaaattactgtgaaatatgccatcaatacctttttttttatataaaaaagtaatttaattttaattcattaatcaaagtatttattggccctttacatctaatcgtcatgttttgatttctcaaaagtatctactttttttttcttgcagttgtgctggattgtgctgttgctgtgccctggattgttgtctctgattgaagttatggatttgggcttatcctctctgtcctttgtcattttctttaataatttaattttgtacctgtctaataagggtatttgtgtcctccgatacagcaaaattttatttatgtatgtgatggaaaa

SEQ ID NO: 130368 - DNA, 409 bp, Glycine max
  Clone ID: PAT_MRT3847_88730C.1
tccgggataaattgtcttctagggttaggcttacggcgtcgagctcgcaaccaaaatttgtgcttcgattcaaaagggcttgcagatttctcgtgacttgctatcatttttatttttgttttccatggctaatattatgtttttagatacttgccaagatggtactgatcaaacagaaagaggaggtttggaaattggaaggaaaagaaagggtagatatttatttttaaacaagagaattacatataaatttaacttaatttgtccccctcttctaaaaatcatccctcatacccaccaagtctcttagaagtgttctaaaacagcaggtcttcgagctctgtagtatgaaatgactaattgcctgattgtatttgtatcagaaatgtaattttgttctttcacaacg

SEQ ID NO: 130369 - DNA, 864 bp, Glycine max
  unsure (1)..(864): unsure at all n locations
  Clone ID: PAT_MRT3847_88731C.1
cgagtcctacttntcctttttttctntcttcatttttttgagttgatcacttcaggggngggttaatttcgaattcaattcaaggattctaaggattatgtgggagcaaaatcgggaagagaagaatcaaaagaaagtcgcagttccaactttgaatcagaatatattatatatgcagccctctcctctcataatcaaagtccagcaatagcagattcagataaaaagcatacaaatgatatggtaacaatggtgaacttagttttctccttggacatacgatccgacaagatttcttggtaacggctaaaaagctcatctgtgatagcttcaccgaagtggctaaccagcatagattctgccacagctctcatgcactgtgtcacattgcatgtatcgccattaccaaagtatttcaagatccaaactcaaggagcgttccactcatcatgagcattccagtttacctcagacacctcgattaatggcaaattatccntctttaagaacttcccaatttcactttcaaaatggggatnggagtggtaaataaaggggatngttaaaaaagttcctaggtggctccttccctttattaattnccctggnggggaaaatagcaaaaaaacattccanttttcatggccatccttggcttaattnaaaatttatttttttaactttnnnncaaannnacannntataactctgnnggggggggccccgggnccccaatttggcctntaanagggngggngantaaaaattcacnggccggggttttanaaagcngggtnnggaaaacccgggggtacccaaataaaaggttggagnaantccctttgcgatgggggaaaaaaaaag

SEQ ID NO: 130370 - DNA, 564 bp, Glycine max
  unsure (1)..(564): unsure at all n locations
  Clone ID: PAT_MRT3847_88732C.1
atacctttcatcactnggccagctcaaaaatttgggtgtgtttgatgcatcacacaatagactgcagggtcatatcccagactcattctcaaacctctcattcttagtgcaaattgatctatctaacaatgagttaacagggcagattccatctaggggacaactgagtacacttccagcttcccagtatgcgaacaatccaggactttgtggtgtaccattgcctgattgcaagaatgacaacagccaaaccacaacaaatccaagtgataatgttagcaaaggagaccgtaaatcagcaactgcaacatgggcaaacagcattgtcatgggaattctcatctctgttgcttcagtgtgtatcttaattgtgtgggcaattgcaatgcgcgcaaggaggaaggaagccgaggaagtcaagatgctcaatagcttacaagcatgccatgctgctacaacatggaacattgacaaagagaaagagccccttagcattaatgtggcaacatttcagaggcagctgaagaagctcaagttctcacagttgatngaagcaactaatgg

SEQ ID NO: 130371 - DNA, 298 bp, Glycine max
  Clone ID: PAT_MRT3847_88733C.1
ggctagattagcttgtctgaaaatggatagtgatgaaacatttgatgctacactgtggttggaacgtattctcattcgcctatgttctatgttaggtgactaccgcaaggatgatgcattgtcttagtcattgaaccgcacatttttacttttcccacaggttatgttcaatctagaacatctacagtttgtacaggtttttaacagcagtccatatgagactgcatatatccgcatgttgatagacagtgaaaatattatgtatgctgccgtcttgattcacccgtcattgatatcg

SEQ ID NO: 130372 - DNA, 410 bp, Glycine max
  Clone ID: PAT_MRT3847_88734C.1
ggctcaagtggttcgcggtggcaagccacaatcggcgggcggaattcaccaatcaccgacgtcatcgtactggtcgccgggcttgcctttggttgctgaccaagccccgttatactatgtgattccgctgtgcccgccggtggataattctaatacagtgggcgatgcagatagttccgactgcactgacagcgacgcggattgttctaaatagtccgataggaacaagcccttaaacagtgtacatgatgtggagactggatctgtaatgggcgcttctgaatgatggaccactttgctcgcgttcaccaaaggctctgctgaattgactgctgaatcattcttcaagactgtgaccgatgcatgatcactctccacttcttagtggcccctgtcttcacaatctcctc

SEQ ID NO: 130373 - DNA, 511 bp, Glycine max
  Clone ID: PAT_MRT3847_88735C.1
ggctcgagagatcattatatatatatatttattctgtagtggctaggggcctctcaaacatctgggggtgcttttgcgaaggctcaccagaagaatctaaaagatacacatgcgatggtaatgtgggtgttctgaaaacccacaaagaaggaaaaccgtgcgaagccacacacattattccatatcaagaaaataacgcatggccttgatatttagttgccccctcctgccaaaaggtatcatatatgtagagagagagcctcatgtcttgcacggggccatcaacacaacaagttacactgtatggctccatgcgatcactgacgttcttccatcgctttttttttttttcgttaacaatataaagcgtatttatttcttgtacggtaaaattaaagtgaatccttggacgatatatatgttagtgtttaaatgctatatacccatcaatattaaggagatttgaactttgatttttaaggcaaggatgaatgacttctaagttgatcta

SEQ ID NO: 130374 - DNA, 152 bp, Glycine max
  unsure (1)..(152): unsure at all n locations
  Clone ID: PAT_MRT3847_88736C.1
gagtntgatgcacgngnacgnnagctcggnattcggctcgngcncancattctcnngnaacaactttcanactctgagnnagaatggntgccaanacntngatgngtactgctatgtcngccttggnnntctntnctttcttnntnaaantc

SEQ ID NO: 130375 - DNA, 431 bp, Glycine max
  unsure (1)..(431): unsure at all n locations
  Clone ID: PAT_MRT3847_88737C.1
caacatagttgttaaagacttaaagtctaaaaagtaaacaaaccttggacttttctaaggcagtgtctcttttggcagcttcacccattaaagccatatgatttaataaatctttttgcaaaggcataacctcataagatctgcaattaattaatttgaaaaatgtcacaatgtgtacttccaaaccaattatgagaaacagaactccagaactttgaaaattacctaaactccttattcttactcaatttatcccacacagacttcgcagatgagtcaggattcttcttcacataactaaggaagtgagtggtgatcaaagtagtccttattatggtatcctcatagctcttacgaggcttctcaagtataatccatcttccatcctttgatagcactgatatctcangcctaacataggaaaaatcaaa

SEQ ID NO: 130376 - DNA, 543 bp, Glycine max
  Clone ID: PAT_MRT3847_88738C.1
ttatattagagcctgtctttacaagcattattattatttttttcataaggtaacacgactgctataacaatatgatggagttgatcagtttcaagcctttagcagatgctgaggtagaagaaaccatgcgctttgaaaagtctcttcaggagctgagagaactaaggtctgagctacacaaagctgcagaatactgtgaaactacgttctctaaaagcgaagagaagagtgatgtgctggacaacacaaaagagtacatatgcaggaccatggtcactgttgttgatcatcttggaaacgtttctgccaatcttgatggccttatttctcacacaaatgcattttctgaagctgagttacgaatccaatgcctacaacaaagacttctctcgtgtgaacaatatgctcgtaaattggccctcgcgaaattgcaatggaatgagaattcgcttagatttcattcgcgttatttatcaacatctccccttgagagatcaagcagtaaaaaagtaataagagattctgaaagtcaagttccttcaa

SEQ ID NO: 130377 - DNA, 1254 bp, Glycine max
  Clone ID: PAT_MRT3847_88739C.1
cccacgcgtccgaaagaaaatggccaactcgaagaacaatttaattctagtttccactctccttatgttgcttcaactccacttcaccccatcaaaagccgccatcaaaggaggctactggtactccgaaagtggccttgcagtttccaacattaacccctctcatttcacccacctcttctgtgcatttgcccacctcgaccccaacaccaacaaagtcaccatttcctcgtcagactcatctcagttctcaaccttcactcaaaccctccaagcaaagaacccttcagtgaagacccttttgtccataggcggcggtttcggtccttctttggctgcaaatttctccagaatggcaagacaagccaacaccagaaaatcattcatagactcttcgatccaacaagccagatcgaacaacttcctcggacttgacctagattgggagtacccttcctcggacacagacaagaccaactttgcatcactcatcaaggagtggaaagaagctgtgaccaaagagtctagaacctctggaaaggcaccactgttcttatctgctgctgtggctggctctgaccagatcacacctttaaaatactacccaggaaaagacgtagccaacaacttggactttgtcaatgttatggcctatgaccttttcacctcagaagggtaccccacagtgacacagccacctgctccttggaacaaccctagaggccaattcagtgcagaacaaggggtcacggaatggaacaaaactttaggggtgcccttaaacaaactgaatctgggtttgcccttttatggttacaagtggagtttgtcagattctaataaaaatggactctttgcaccggccaagcagggacttggggcagtgaagtacaaggatatcaagaatgttgcggcgcaggttgtgtttgattccacttatgttaccaattactgcttcaaagggaccgattggtttggctatgacgacactcagagtatatctgcaaaggttgttaatgcaaaacaaaagggattggttggatattttgcttggcatattgaacaagatagcaactgggctctttctcaagccgcttctcaagcatggggaatgtagctatggatttcggacacagacagctaataaattgaacttaacaaataaaactgtattacaatctgcgtgcgcagtacattcataaatatgaaataaacttcaatctcagctatatgatatcattgggttttcaaaaa

SEQ ID NO: 130378 - DNA, 668 bp, Glycine max
  Clone ID: PAT_MRT3847_8873C.1
cggccgctcaggcggcggcgggattttccggagaatggtcaaagctcggaaacttcatccaaagctactccaattcctttattgtttattgccacctttcgcttataagttactactttgaagatggccaaaggaaatagtcccctcgagaggcctagcttggcttcacttgaccaaaaattggccttcgctaagcgctgttctcatgagggtgtgttagcgggagcaaaggcagcagttgttgccagtgttgcctctgccattccaactctggctagtgtaaggatgctgccttgggcaagagccaatctcaatcacacagctcaagctctcataatttccacagcgacggcagcagcatacttcatagtagctgacaagaccgttttagcaacagcaaggaaaaactccttcaaccaaccctccaattctgaagcatgaatccgaatggatagcatggacaatagtcgattataccacagtatccaaccgtgaatcggtgttatttatccaaataaataatgtgttcataagaatatttatgtacaaattatctgaattaatcatttatttcatttcagcattaatcatttacttcctaacagtgcactatcaaaacatggtacaaccaaaaatttgacaaacagtgcacccaatagggtgtttag

SEQ ID NO: 130379 - DNA, 415 bp, Glycine max
  Clone ID: PAT_MRT3847_88740C.1
aattagttctaaaaatttttaagcatcctgaaaaaacttggggatcatttccccttgaagtagtttcacctttttaaagcccccggaaatttctccacgagctttaattttcggggggggctttaagggcttcaagggggtaaagcacttgagactttttaatagcttttaggccccccaagaaaggagaccttgttttgacaaaattttttggattccaagcaaaattggaaaaaagggcttctttaagtagttctgggcaataattaagttcattttcccatcctcctagggtttgaagagccccctgtttatgaaaccatgcatgataatgttgggcatcaacggacagtttttttttggggaacccgagcccattgtttctagcttcaggacctaacttttgggcaaccca

SEQ ID NO: 130380 - DNA, 334 bp, Glycine max
  unsure (1)..(334): unsure at all n locations
  Clone ID: PAT_MRT3847_88741C.1
ggcangccgagcggcaccccaggaacagagcatgaaacgaatcaacgaaaaaaagggcaggcgagaacggaagggcgcagcgagaggcaacaaacaaccaccgaccnangacaacacacagacccgaaacaagccaagccacaccagcagcaccgaaacaacagggacaacaacgcaacgggaaagcacgacccacaacaaaaccaccaccgcgaaccgaaagaaaaaaccaccaccgaagacaaaaccaaagcccccaaccaaacacccacacccccccgcacaaaacgacagaaaaagcaaaaacaaaacgagagccgaacaaacaccaacc

SEQ ID NO: 130381 - DNA, 613 bp, Glycine max
  Clone ID: PAT_MRT3847_88742C.1
cagagacagaaaaagaaccccttccgttgtttctaacccgctactttcccgagaaaattccccgagaaaggggaagaaaaacaccaagagaaaccctagaaagcaccaaaatccaaaacaaactcaatcccgatcccgatccgatccaacgaaatggatcattacaaggttctcggcctgcaccgaaccgcgaccaaggaagagatcaaagcggcgttcaagaagctagcgttccagttccacccggacaagcattcgcaatcgccgaaggccgttcgggaaaatgccacacttcgattcaagcaggtctccgaggcctacgaggttctgatggacgatcgcaagcgcgccgattacaatttccggcggagctccggcgccggcaccggaaacaactactattctcagtatagctacggatacggtaggagtgggaacagttattatgagtataaacctaggtctggtggcggcggcggcttcgcgtccaagttcgaactcgcgtttcggattttgacggcgcggtcatcgcttctcaatctcggcttcgcagcacctatcttatgggggttagcggtctgtgtttcgggtggtgtgtcctgggggtgtgtgt

SEQ ID NO: 130382 - DNA, 280 bp, Glycine max
  Clone ID: PAT_MRT3847_88743C.1
gtcagtggggctgcgataagagcacaaaacggggtggcggggtgcgtcagagtgaggcgagaatcaagaagcgacacggatccagacgcgttcgcatcggcattcttggagcactgcaacgccagcttcgacaccactcgcaacactctcgcgaatctccaagaagatcgttcgattcactcttgcgacggtcagaacatccacggctcctaccacatcgtcgtcaaactcaactcacatcccttccaccagtgccagcactccatcatcaccgtcgatt

SEQ ID NO: 130383 - DNA, 724 bp, Glycine max
  Clone ID: PAT_MRT3847_88744C.1
ccacgcgtccgctctccctcccacaatggacctccatcgccggccgccgcccgccgctgacgacggagcaatccaccccaagaagaggagggacacttcctctcccaaggcctccgacgctctccctctccctctctacctcaccaacgcgatcttcttcacgctggccttctccgttgcttacttcctcctccaccgctggcgcgacaagatccgcagccacacccctctccacgtcgtcactctctccgagatcgccgccattttctccctcatcgcctccttcatctacctcctcggcttcttcggcatcgacttcgtccagtccttcatctcacgcgcctccaacgacgcctgggacctcgacgacgccgttacagattctccctcttcctctccctctccctctccctcgcccgcaattaccaaaatgccctcacgggatgcctcgattatattatcctccgaggatgacgaggagattgtaaactccgtcgtggaaggcgtcacgccctcctacgcgctcgagtcccgcctgggcgactgtcgccgcgccgcggggattcgacgcgcggcgctgcagcgcctgacggggcagtcgcttgagggcctgccgctggaggggttcgactacgactccattttagggcagtgctgcgaaatgcccgtagggtatgtgcagattccggtaggggtggcggggccgttgttgttggatggattc

SEQ ID NO: 130384 - DNA, 328 bp, Glycine max
  Clone ID: PAT_MRT3847_88745C.1
caactactttttcaacccaaacctaatccacacccagcgcattttttaaatctgggccacacaagttatcctaatttttcccattaaacgttaccgtattgctgatggccccctcggtgaggtcactgacccaatctacccaggtggcagcttcgacccattgggccttgcttatgacccataagcttttgctgagcttaacgtgaacgaactcaataacgtactattggccatgttctctatgtttggcttctttgttcaggccattttcacctgaaaggttccattgtagaacctctccgatcaccttgcttaccctttcaacaac

SEQ ID NO: 130385 - DNA, 421 bp, Glycine max
  Clone ID: PAT_MRT3847_88746C.1
ttggttttggagcatagtcctatatccttaagagggcctatgagcctgaatggcctttcaatgtaaggcgcaagttttataatacggtttacaagatctgttgtgatggctgtattgagggacacagaaatgatttcatgagacttgcacgtgtctatgcccttaaaattataaaagcgaacgggccggagattaggggcctgcatgtggaatcagaactacatacatggtttatataggcttggggaaccacacatggaggctgcttagtaagtatgaagcgactgacgatgctctgatgcgggctgtatatacattgggtcctacatcacatctgtgactcgtagacccacttgcgaatgggcctatatacatggatcttcaatccggcgaaagctcaaatatttagcctttacaataa

SEQ ID NO: 130386 - DNA, 1393 bp, Glycine max
  Clone ID: PAT_MRT3847_88747C.1
ggagaatgttcctctgaatccgaagcccgtgctctgcccagcgacttagccaaaaggtgcaactgaacaaagagcataaaatcctttagagtgtcagtaatcaagaatgcatacaggaatggcttcattaactcaactccattataaagtacatacctccactttcagaagggtgcattctagaagccaaggattattgaaatctggaaaactatcccaactccaacgatctgcctttcctagtattcacattaatcaatcctgcatatgctgcacgaagttaactccatgggagtcatcacctgtcacatatgctcctactgataatcaaagtgatacttttttgccgcaaaatgccaatatatttgaaactcttgaatctagtaaaacagctgattcatcaataacaaatgctgaaggggttgtagagacagaatctcagccaggcctgcagcttcaggttttcaaatggccattgtggcttttgggcccttccgttctcctagcaactggcatggtcccaacattgtggttaccgatatcatcaatctttctcggccccaatatagccagcctactttccttaattggacttgattgcatatttaacctcggtgcaaccctttttctcctcatggctgatgcttgttcacgaccaaagtctccaacacaagactgcaaaagcaaggctcccttcagttaccaattctggaacattgttgcaactcttaccggttttgttatcccactgttgatgatgtttggatctcagaagggttttctccaacctcaactacctttcatcccatttgcagttctacttggtccatatcttcttcttttgtctgtacagtttctgaccgagatgttgacttggcattggcaatcaccagtctggcttgttacccctgtcatttatgagtcttaccgtgtgttgcagctaatgaggggattaaagcttggggttgagctcagtgcaccggcatgggtgatgcatacaattagggggctggtttgctggtgggtgctaattctcggtctgcagttgatgagggttgcttggtttgctggcttagctgcgcgaactcgtaagcagcaattgtcttctgatacttctagtgctaatggtgattggtgattactgattaataccattgcaaaaatattctgaaagagacggattatagaataagtagatgttgtttattatagttatgggtgttttccatcccatccatataccatagtgatagtggtacacatctaatagatatatatatacacaagtaaattgcatacaagactttgatcactgggctttatgctgtatcaatggttgttttgtctgttatcttcaagttgtgaataaattggtttatctgtttttacctcc

SEQ ID NO: 130387 - DNA, 157 bp, Glycine max
  Clone ID: PAT_MRT3847_88748C.1
caacatattcaccaacgatttttacacttcgcaaaaggaccgctgacccccttccaatcatactgccacgaaaaggcgtgctccgaaccacaaaagctacaggataaactgaatatgggggacaagaaaagggggggaaaccaacataaacacgaaa

SEQ ID NO: 130388 - DNA, 256 bp, Glycine max
  unsure (1)..(256): unsure at all n locations
  Clone ID: PAT_MRT3847_88749C.1
ttcaanatatctatcanaagtaaaaagcgacgngaagggaaaaactttaatttttttatggtaaaaaattcaattatacctgttatttcacaaganagaaaaganaaaaacccaggatcggttgantttcaaatattcagntttaccgatagantacgnagacttacttcacatttnganttncnccgnananactatttatctcnaagaggtttacgtanaattttgggannacgacaaagattgctgtcttttt

SEQ ID NO: 130389 - DNA, 215 bp, Glycine max
  unsure (1)..(215): unsure at all n locations
  Clone ID: PAT_MRT3847_8874C.1
ggggggcgccctnnttttngggggnaagtcaaaaaaacacccgtcttcccacacaaacggagcacagagagagaaaagccaccaccacgggcacggcaagcaccagcacgaaaacatacggaagactacatcaacaccgaaaactcaaacttcaaagacgccccaagaatcaaggcgtagccaaccagcagacacacaaggtgggagacacaaac

SEQ ID NO: 130390 - DNA, 307 bp, Glycine max
  unsure (1)..(307): unsure at all n locations
  Clone ID: PAT_MRT3847_88750C.1
gccaattgtgttggtgacaaacagcgatggcatcgattcccctgncctcacacacctcattgaagctctcgttcaacaaagcctgtacaatgtccacatctgcgttcctcaatcaaacaaatcaatttccggccactccataacgcttcaaaaaactatagaanctacttctaccaaaattaatgacgccaccagctttaagatgtctggaactcccataaattagatttcactagcattatctaaaacattgttttcgtaatcgtaacctatgcgtgttattagtagaattaaccgcggatcagac

SEQ ID NO: 130391 - DNA, 427 bp, Glycine max
  Clone ID: PAT_MRT3847_88751C.1
cggctgcgagaagacgacagatgggggtatatgttcttttatcaggcaccatagtgaaatataagtttgccgctcaatttaatgattcaactcaaagttttatattccaatatgagtacaagtagaaaccaagaactatttctctgctggtaactaagttggcacttggagtaggaactaattgacaacatacatcaaagcctctttaaaacatggttttaaaataatgaataccaacgacctgctcagaaaggattttggttccaccaagtcttcctctatatttggtagcttcattggagacaataggaatctattttacagatgacataatatcaagaaagatgttatgcctatgtctgtcaagatgggattgcaaaatcaacctctgtcattggatactacaacaataatcataattgcaaaa

SEQ ID NO: 130392 - DNA, 924 bp, Glycine max
  unsure (1)..(924): unsure at all n locations
  Clone ID: PAT_MRT3847_88752C.1
gttgtgttgcctaataataacaagccagacaagtcacagccagttttgccaaccgagaatggtcctgacaccaagtcccagttgccaaaactggtattgaagccttcaaatggttctgtgaagccacctaaccgtaaaaagggtgggcacaaggaactgtcatcgaccattcatgggcagcgtttggaggttgcagttcggtggagaccattgaaacttgtttatgatcatgacattaggcttgcccagatgccggtcaattgcaattttagaggactaagggatgtagtaagcaaaaggtttccttcgtcaagttctgttctgatcaagtataaggattgtgatggtgatttggttactataacctctactgatgaactcagactggcagagtctagtgttgatagccatcttgtgaaagaacctggggaagataaaagtgattctgtagcaatgctgagactgcatattgttgaagtcagtccagagcaggagccacctttattggaagaagaggaagaaaaaccagttgagaatgaagggggcatgggagaagagaatggatctcattcttctctcggcgaatctgtctctgaagtagctgataccgtcaaggttgataagactgtgaaggatactccaaaggaaaagccaggaaccacaggagatactgaatgcaaagaagtggagatggatgattggttgtttgagtttgctcagcttttccgctctcatgttggtattgatccagatgctcatattgacttgcatgagcttgggatggagctttgttctgaggcactttgagaaacagttactagtgaggaggctcangatctatttgacaaggcggcttcaaagtttcaagaggtggctgctttggctttcttaactggggtaatgntcacatgtgcgcagctagga

SEQ ID NO: 130393 - DNA, 263 bp, Glycine max
  Clone ID: PAT_MRT3847_88753C.1
cttacctgcctcaacgggcagcccgaaacgcagcatttcccgtgatgtgacgctgcccgaactgcccgattcttggctgagaaattacgagcattcggtctgcagtacctgttttagagctccaaaccttcagatgcacctcattcgtctccagatcttccttcctggataacgttttcgggttcgagaaggcacttgtgttgtttttcgtacgaaatggagactaaacagagttcggtgacggttacgctcagttacggcgc

SEQ ID NO: 130394 - DNA, 930 bp, Glycine max
  Clone ID: PAT_MRT3847_88754C.1
gattctgttccgcagaaaaccctagcccaaccggatcttcacgactaggagatggcaaagtcgaagaaccacaccgctcacaaccagtcctacaaggcccataagaatggcatcaaaaagccaaagaggcatcgccacacttccaccaaagggatggatccaaagtttctgaggaaccagaggtacgcgaggaagcataacaagaagagcggtgaaacagccaccgaagaagagtaaagtgccactctcaaatgggcctattaggatttgatttgttatttaagccccatatgttttgtgtcgaatctatctttagtagtatagtcatttttatgagttaacttaatccagagagaatgcagtacttactcttatagcatcgttgttggtttttgttaaggacccttgaaattttatcaatggattattattcagttgttaaaaaaaaaaaaaaaaaaaaaaaaaaaaactcgaaactactcactctcctctgatatttctatattttggtgctctgtgtctctacgatctggatccaacggtccaaaatgttcggggcttgtgctgcttgttttcccaggttttagagctccaaaccttcagatccacctcattcgtctccagatcttccttccttgcacttgtttgtttgtcgtacgaaatggagactaaaccgagttcggtgatggttacgctcagttacggcgcgttgacgtgcgccgcggaagttctcgcgactttgctagcttctgctgtcgtcaaagccacgcttttggccccggatctctaccggctgctattgaccaacacgcctacaaccaaaggagagagaaaaactcagagtcaagacaagcaacgtgatgcagagggcgaagacggtaacgatgatgaaggggacgatgatgacgatggagatggtggatttgggga

SEQ ID NO: 130395 - DNA, 482 bp, Glycine max
  Clone ID: PAT_MRT3847_88755C.1
gcaacccctattccacacgtttggagatcggaaagagagtatttgttgtcctcatgtaagaaagcagtcgcaattaattaaagccaaaacatattagacttacggagtgtttggacacgcgttttcaacactcattttcctgtattttcacatcaaatggaaaaaacaaatgcagaaactactatttgggatttctaacttgatgcaaatctttccggatacagtgaatgtttggtaagtcgatgaggatccgcattcagtacataatcaacacaaacaattattaattgcttcaacaattgaagttcagtgcaaaccaacttgttaccaaacacattaatagaactaaacatgcatttaattaatacgaatttgagttagggtgcttatttgaagtataattcaactttttaaaacaaagtatggctggtattaaaatagtttgattctatttcctcctaacaatataaagagaacttatt

SEQ ID NO: 130396 - DNA, 982 bp, Glycine max
  Clone ID: PAT_MRT3847_88756C.1
tacggctgcgagaagacgacagaaggggatccttcatttccaaacatatctcatttatagtttactattgaaagatgagtttgaaaatggcaatactgatcctaggcctgctggccatgttccttttggtctcctcagaggtggcatccacgaattcaaaagaggtgacaaatggagttgaagatgccaaatatcctggtggaggctatggtgggggttacccaggcaatggcggtggtggctatcctggccgtggtggtggctaccctggtcgtggtggtggctatccaggtcgcggtggtggttaccctggtcgtggtggcggctatccaggccgtggaggagggtattgtcgctatggctgttgcggtggccggacatacaatggaggttgtagaaggtgctgctactacgccggtgaagctgttgctgcacaaactcaggataagactcacaattgagacaatgcagttctacgtaatgcttaagatgtttcatgaataaaatctcgtgtcacgagaggcatggattccccgtgatctttcttaccactagatctatttcgaatgtagaaatagtgtctaatgtgtaatacgcctttaatttgtacgtgcatgtgtgatcagtttaagagcaaattaacgtgatgaacatcatctattgtagaaattctaatttgtcttaaatatcgtgatttttatttctaaaaaaaaaaaaaaaaaaaaaaaaaaaaaaaaaaaaaaaaaaaaaaaaaaaaaaaaaaaaaaaaaaaaaaaaaaaaaaaaaaaaaaaaaaggaaaaaaaaaaaaaaaaagggggcccctggaccccaattttttttccctttaagggggggtaattggccccttggggaaaaaaagggaaaaagtgtttcccgggggaaaattttttcccgttaaaattcccacaaaatataaaaccggaaacaaaaaggggaaaccccgggggccctaaagggggg

SEQ ID NO: 130397 - DNA, 1213 bp, Glycine max
  Clone ID: PAT_MRT3847_88757C.1
atggttggagaagataatcacagtcatagtacgattacacgcgtcccgaaacgcagcatttcccgtgttgtgacgctgcccgaactgcccgattcttggctgagaaattacgagcattcggtctgcagtacctgtgtgttttccttctgtctctctctgacctctgatatttctatattttggttctctgtgtctctacgatcaggatccaacggtccaaaatgttcggggcttgtgctgtttgttttcccaggttttagagctccaaaccttcagatccacctcattcgtctccagatcttccttcctggtaagctctcaaaccttcttcttcttcaattctcgctaattccacctgaaactcttcctctcaccacgagctcgctctctaggtttcacgataacgttttcgggttcgagaaggcacttgtgttgtttttcgtacgaaatggagactaaacagagttcggtgacggttacgctcagttacggcgcgttgacgtgcgccgcggaatttctcgcgactttgctagcttctgctgtcgtcaaagcctcgcttttggccccgcctcaacctcgacaagatctaatgttatctgtatcttttgtgaaagcaatttgtgttatctctcgagttcatgtttttatggtctataagcaattatgggaagttttttatggtctttgtcaatatgcgccaattctacatgctaatatgcgcatgttgatcaaaagtcaaggaagcggattcgtatgggttattcgcttggatatgccgttgagcgtaaagcacgcttcacgaacgcgtgtcgtttttgtgttactgcttcctggcatcttgggtgggaaaaaagagggagaagatggtaacgatgatgaaggcgacgatgacgacgatggagatggtggatttggggagggtgaagaggagttgtcatctgaagatggaggtggatatggcaacaattccaacaacaagagcaactcaaagaaggcacccgaaggtggcgcaggaggggcagaagagaatggggaagaggatgaagatgaagatggtgatgatcaagatgacgacgatgaggatgacgatgatgatgacgaagaggacgaggcaggtgaagaagaggatgaagatggtgctgaggatgaggagaatgaagaggacgaggaagatgaggaagcattgcagcccccaaagaaaagaaagaagtga

SEQ ID NO: 130398 - DNA, 1363 bp, Glycine max
  Clone ID: PAT_MRT3847_88758C.1
tctgtctctctctgacctctgatatttctatattttggttctctgtgtctctacgatcaggatccaacggtccaaaatgttcggggcttgtgctgtttgttttcccaggttttagagctccaaaccttcagatccacctcattcgtctccagatcttccttcctggtaagctctcaaaccttcttcttcttcaattctcgctaattccacgttttctctttctaccctgctttcttttcgctactttcacctttcttttcttttctttcatgatctaacgttgtaaattgctgcttctccaaagtttatcagctgaaactcttcctctcaccacgagctcgctctctaggtttcacgttaaaatttaaaaccaaaattctatttttctcttacgcttccccaatttagcttcaattttatgtgaaatccagcgtcgtgaattgtgcttcccctggataacgttttcgggttcgagaaggcacttgtgttgtttttcgtacgaaatggagactaaacagagttcggtgacggttacgctcagttacggcgcgttgacgtgcgccgcggaatttctcgcgactttgctagcttctgctgtcgtcaaagcctcgcttttggccccggatctctaccggctgctattgatcaacacgcctactgccaaaggagagagcaaaattcagagtgaagacaagcaacgtgatgcagagggagaagatggtaacgatgatgaaggcgacgatgacgacgatggagatggtggatttggggagggtgaagaggagttgtcatctgaagatggaggtggatatggcaacaattccaacaacaagagcaactcaaagaaggcacccgaaggtggcgcaggaggggcagaagagaatggggaagaggatgaagatgaagatggtgatgatcaagatgatgatgaggatgacgacgatgacgatgatgacgaagaagatgagggaggtgaagaagaggatgaagatggtgctgaggacgaggagaatgaagaggatgaggaagacgaggaggaggaagcattgcagcccccaaagaaaagaaagaagtgaatttagtttagtcaagcctcccgtttgtattgttatgtacgaatttggcttctaacttgcatgtttttacttttttgggtactaaacttccatgttcttatttagtttataaggaggcttatgtaggacatgttttaattgatatctatgtttaccattgcgtaattagaatgctacattattgagcagtcaatgctaaatttaagagaggaaaaactatgatcttggttttgaattaagcctacacttgattgactctattgatagtaaggtcgtatagtatgtct

SEQ ID NO: 130399 - DNA, 664 bp, Glycine max
  Clone ID: PAT_MRT3847_88759C.1
ccacgcgtccgctccattccttctctctcttcctctccaaaatctcccatttttatgccaccccactaaacccaaaccattaaaatacacaaaacacaagatgggcactaatgaatctttgttcttgattcctacatagagaacccagatggaaatagaagagagagattaaacggctactagtagtacttttgtttattttatttgtttgggttttgtttctctctccttcgattccaatcttcttaatgagaatgctcccagtcggtgatgatcgtgatgttttgtttctaatcggaccaacgtttacgagacctgaaacgttgtagctgaggaaacaacacctcagaatcacatccagttcggttttgacagcgatgatgtcaaaggggtgatcacattgtttcgagcatgagaagacaccgtgaaattcatctctctcatgctctgttgtgcaccgttttctgtttgcttgtggcagcttctgcagcgactgagaaggaaattttgctcgaattcaagggtaacatcacgggaaatccacgcgccagtttgagttcgtggggttcaagtggaaacctgggtcatgattacaggggtgtttcttgtaattccgaagggtttggggaagaaaatgggctttggaacactagcttggaagggg

SEQ ID NO: 130400 - DNA, 472 bp, Glycine max
  Clone ID: PAT_MRT3847_8875C.1
gtcttttcacaacgatgctggatagactgcgctatacatatctgcaaagaataatttgcaagagatgttcagctatttgctcagcatgtgtcactttgaggtcgccaagattcgctccaaggctgatatgaacgcctttcttgttgctgtcaaacgtggcaaactacattttgtgagggagctttccgatattttgcctgatgtttgaagtttatgggactcctcaaacaccaatcctttattttctgctgcaggtcaagaacacttggatgtggtggatgctatcttgtatgtcgatgtcagtaccatgttcaaagttaggattaacggcgtatcttttctgcgctatgctgctgggcatggtgaactttgtggttgaaaatcatgtcttgctcgagatctatgacttggatgcatactagagcgacaaggtatatctgttctgcttatggctgttaaaggaaacatactt

SEQ ID NO: 130401 - DNA, 273 bp, Glycine max
  Clone ID: PAT_MRT3847_88760C.1
cttctcctctggtggggtgtctcaattcaactcgatgtcctgtgcgccagcgttccactgcttcgcctgtttctcgttggcggtcgctttgcaaactggcgactgcttgggatgtgggttacgggtgtctgctggaactcgttcttggtgcgggtgtggtataaggggggcgggtctctgctcttctaaatcggtcccaagtgttggcttgacaccgttcctttggtctgtggtccccgtcggtgctgtggtgttcttccttgcctgcttgcc

SEQ ID NO: 130402 - DNA, 1514 bp, Glycine max
  Clone ID: PAT_MRT3847_88761C.1
ggctcgaaaaagaaaactagtaatatggcttcaagaactatatgttttaccattcaagtgactcttgtagtagcttttctaacaacaaaggttgttttatctgatgacactgtgccaattcccgcgaacaaagcacaattaggtgaatggtataatactaatgtggggcctttagatcaaagaaagagcaccgtggacccagcattggtgactgctgaagaaggcgctaaggttgtaaaggtgatgcaagatggcagtggggaattcaagaccatcactgatgccattaaaagtatacctagtgggaacactaagcgtgtaattatttacattggagctggaaattataatgagaaaatcaaaattgagaagacaaagccttttgtcaccttgtatggggtaccagagaaaatgccaaacttgacttttgggggcactgcacaacaatatggcactgttgatagtgctacattgattgttgaatcagattattttgtggcagctaacatcatgatctcgaacactgcaccgagacctgatccaaaaacgccaggaggtcaagcagtggcattgcgtatttcgggtgacaaagcagcattttataattgcaagatgtatggattccaggacacaatttgcgatgataggaatagacattttttcaaagactgcttaattcaaggcaccatggattatatttttggaagtgggaagtcactatatgtgagtactgagttaagaacgcttggcgacaatgggattactgttatagtggcacaagcaaggaaaagcgagacagaggacaatgcctactcatttgtacattgtgacgttactggaactgggactggcactttcttggggagagcatggatgtctcatcctagagtggtctttgcatacagcaacatgagtgacattgtaaataaattagggtggagtaacaacaatcaccctgaacatgacaaaactgttcgttttggagagtatcagaactcgggacctggtgcagaccccaaagggcgtgctactataactaagcaactaagtgaaacggaggttaaaccttacataacacttgcgatgattgaaggctccaaatggctacttcctcctccaactcccaaggtttaattaattaccacatttttgtctggcttgaggaataatgcaccccatgttttagtggatggtgaattagaaaatggtattccaattcaatactagattgctcgagttgttgagttttggtgtcttgtaatttatttgctttagtcttggcattttaaaattaagtgagatccttgtaaattttgattaagtgagttttggtgttcatgtgcactatgataacacctttgttaaaaataattggaaatttattattgttctagcttcaagcttttaaaaggacataatgtagtcaatatatgtccctataaattcatgaaaatgggaaatgtattttaatttatttaattttatatgaaatagatgatttgtattgtggatat

SEQ ID NO: 130403 - DNA, 313 bp, Glycine max
  Clone ID: PAT_MRT3847_88762C.1
ggcaaccactgtgatgaccactctcccccacttcagaggtcttagaccccaattctcatctgcccctgagaagacttggatgctgtgaaacccatgaagcccaaggggaaagacgcaatgtgagtcgatttgggaatacattgaatcatcgactaatatgattatggtggcctccacaaccctgatgctgattgctggaagggttggaatagctccatcaacacaaaagaaaaaaaatggaggcttaagatggaggtgaagaactcaagaatgcacaaccggagaacctgcaggcttaccactagagaacacc

SEQ ID NO: 130404 - DNA, 193 bp, Glycine max
  Clone ID: PAT_MRT3847_88763C.1
aacaaaaaaccaacctttcgaacaggaaagcagagacatacttcgattgatattcaagggggatgacagtaacaaccacgtatttatcaggcaaattaaattaataccgttgacttcgcagcattttctgctatagggaaaattaggagggggggaaacactaaacaagagttgatactcttccacattatct

SEQ ID NO: 130405 - DNA, 454 bp, Glycine max
  Clone ID: PAT_MRT3847_88764C.1
agataaaaataaaaaccctgctaaatagcttccaagacaaatatgcgcacataacagtagacagtacacgtcatgttgggaggaaaaaaccgaacacgcgataagaaaagagacacatttcataacgaaaagaagactgcccttaacctggcatggtttatctcaaaaaaaagaaaaaagttgattaaatgtgaatcccacaagcgggaaaggatacaaaaaaagaggggtgttagaatcacaagaccacgcgaaactggggggcgtgggactgaaccggggggaggatctcccaccggctgggcttaacgtcttcagacactgggcaataaccaggaagggtgaccttttcaatggaggctggcacgggcccaaactccaaattcaaaaacgaggtgtgcgatggccggcgaacccccaccgtgcctttcctgcgtagggccttagagagggg

SEQ ID NO: 130406 - DNA, 875 bp, Glycine max
  Clone ID: PAT_MRT3847_88765C.1
ttaacatataacttggttgtggcaaattgtgaagcatgaggaccttattacttgcactcttgttagccttcatgatgatggtgaccatgctgcatgctggtgcagtgaaggtggagcatgagcaaagaacaaagccaaaacgcaatctactgagtgaaacttctcttggccgaaagggtatgggaaccgacacaaataaccaacaaaccatgaaggtttctgcaagtagtagtgcaaataccattagcactgctgattctgtcaacaatagcaaagcgaaaaagaacagcgacaataacggcgacgacgatgacgacaaaaatggtagctatcagagctacggtccagggccagtccttaacagccaccactattttcatattcgcaccccacccattcacggctagctctatctagttactgtgtaagtgggagaccaatatatatatatgcatggtgttgtatgtactgagcgcaccggttaaataaagtgcaactagcatgtgtctatatatgtgtgtatgtgtgcatgttagtttcactaagatatataaagctattagtctctccatgtgtaatgtgtaagtatgcattcctggttactctagggcaactgcatgtatgcatgtttttctctttttggctgattttcttggtaaacaagactatatcataagcaactaaaaacaagctagtatagttctttagtttcatcttttaatttctttattttcatatctgattggtttggaaagcatgagtgaagtaactaaaaatcaggttatagattatagatcattcaaattcctctatcccgagcttaaatgggtgaccaaaacctgtgaacttcatcactcaagcaaatctaaataaaa

SEQ ID NO: 130407 - DNA, 249 bp, Glycine max
  unsure (1)..(249): unsure at all n locations
  Clone ID: PAT_MRT3847_88766C.1
gggctccaaagagacagggagagactatttctcaagggcataagaactatgngctcatgcttaatctgcagcttggtatcagacatgctgttggaagacctgctccaagtacatctcttgatttgaagtctctgcatttgatcctaaagaaaaagtgtggactaaatttcccccagaaggatctaagcacacgccacctcaccaatcttgtgagtttagatggaaagactactgccccgtagtgttggg

SEQ ID NO: 130408 - DNA, 202 bp, Glycine max
  Clone ID: PAT_MRT3847_88767C.1
gctacagacgttcacatcccatagatgtcaaccattttttcggtaaaaaaaaagataggtaaatatgtgtgtcgagaagtctaaccttttaagcataactaggtgttcacattaactatatttatatcaaaatatgaaactgggggggatgtaaatcctaaaaaaaacgaacataaaaatggagcttattaattcacatagt

SEQ ID NO: 130409 - DNA, 354 bp, Glycine max
  Clone ID: PAT_MRT3847_88768C.1
ttcgaatcatagaacaactgttcacacaacacaactttttgtagcattgaaccattatgactggctaagacatcctgcatataatgaaggcgaaagcagggtctgctcctccagacacagggaatggaaatggcatattatcatatcacatcacacatggctctcacttgatgatgggctaatcggctcatcctatggaagattatctctcttctgaattgaagcaagaaaaggatagagaattaagcttgtttgcaatatttgatggccacttaagccatgatgagtgccagctgtattgagaaccaccttttccataacattttgaaagatcatgacttctggactagagac

SEQ ID NO: 130410 - DNA, 437 bp, Glycine max
  Clone ID: PAT_MRT3847_88769C.1
ggccgtgaaacaccataatttgcattgcaagtttctgaagttggcccccaaaaaaatcaaactaaaaccatccacctaatttacttttaagggtccttggcaggggaggggggagactttaaatgattacagtatctcgtagggttttacatatgaacatgcatttgtgataaatattgcaaatgttaacttgctcaaaaaactctattattgtatgatccaagacatgaaattcaacatttgtcacaaaataatagcagaggcagaaaggttggcagatgaggatggcctaccttaaatttctcaaaccccaccaaagacaatagaagtctctttccttgaaactggaagtgacaacatcattgaggaaagcatctgcgaacataccaaacttatatttgagggtgatcttgctctttgcggcacatctgctgatt

SEQ ID NO: 130411 - DNA, 622 bp, Glycine max
  unsure (1)..(622): unsure at all n locations
  Clone ID: PAT_MRT3847_8876C.1
ttgcgtgctacacgtgtaggagtaccacctgcttgggggggggggggggaatcgaagcatgggggaggcgcgtgtcgaatatgagaaaaaggaggagagtaagaaaaagataggatataggaggcatagtagatcgaaaagaagagaataagaaagaaatatgatgagagggatgccaataccgatatgaggggaaaatgtacgaataggcgggtacaggaaaacgacaatagcgaaatgcttgtaacgacagaatagcaagcaggaggcaaggaaaaagccaacggcatagataggaaaaaatacggcaattggtaaaaagaccaatggtaaagtcaacagggtgcgccggtgtaagaactaagatgatataccgaacaatggcgaaaaaaacaatagcgaagaagagagaaagtcctaacgtagtaataaaaagcaggacgcacggcaaaagccgacgtcaaaggcaaagataggaaaaaatacgataataagtaaaagaccaatggtaaagtcaacagatgggccctggtgcagagtgcaccagtgtaagaaactgggaaactagataccgaataaagcgagaaaagtctcacgtaattgtaaagacagnatagagagc

SEQ ID NO: 130412 - DNA, 506 bp, Glycine max
  Clone ID: PAT_MRT3847_88770C.1
ggaattcggcacgaggtatgtagttatataatctatttaaaaatttaattttaacttgatgctgacctacgtatgtgtaggcttcttattttatcttgatgtatatttgcaactttatttaatcagtttattataaatagatttgtaaatatagtttcgagttagctagaccttttaaaaaaaaacttatgtgaattaaataggaaaattaaactcaacaattctgaaattaggtcaattcctaatgcatttccaaaccttgcatgtcacgtacgttttgccggtctatattttcggctgttaccatgcattatgcataaaagagacattatacccatgaatgctttagcctttaggtatacatgcatttatattggtgcatagtaaacaaacaaataaaataagaaacataaaatactttgaattaatggagacgtagtaggagtcttggtaaagaggaaaaacaatgcatggaggattcagtgcaagctagctacttgcctaga

SEQ ID NO: 130413 - DNA, 1057 bp, Glycine max
  Clone ID: PAT_MRT3847_88771C.1
ccacgcgtccggcgatagccacttctactcgtgccttgaggaggagtaattgcataccaagttgttcagtatcttatcaaaagtttgttgagtttgcattggatgaaaccaaacgccacactcacttgatcccttcgcctttacaggaaaagttcagtttcatgaattccaaggatgttaaaggaagttttagtatgctatcatttgaagctgcaaaaattaggcttctacgaagtttgatcattcagacagaaacaatgcaggttttggattttactgtctttccaaaagcagaatatgatgtccccatattttgtgctaactttttcacctctgctaaaacaaacattattgtgttggaccttaaccctgtgcatgatatcatcaatcagtatgagtacaaggagaagtactttaaaagcttaattcctcttggccttaaatatgctgaggtatggttggaattgatatgcaaagcagttaaagagacagatgaatctcagattttccacaatctcgaagcacaacatagatatctgacatggagagctgaaaaggatccaggacaaggtggtttgaagaagctgattggtgacacacttgccaaggatatgctgagaagctttctctttaatggagttgatgaactaggaaacaaaacattcaatgattattttccacgctactgctgtcaagagggaactctaaataaaaaaggcaatgttattgggaagtcctttgaaaatcgcccatggaatgctagaggagaatttattggtgaatgactgtacactggagaagcttgtgcacacgtttgcagtcaaacttttacaaggcgtgcccctggttatattttcggctatagaggttttgcaagcatacaaaagaccgctgtaatttttgtagacaagttatgccataagatgcttgtaatatattatggaaagaattttatgtaacaaatttcagaaaaagttcctatggctctacatgtttgtaatattaacattcgtattggaagattctagttatacattaactgcagccgtatccgatt

SEQ ID NO: 130414 - DNA, 138 bp, Glycine max
  Clone ID: PAT_MRT3847_88772C.1
gactcttcggtggaatcatcactgcgtcatcttcaaccaagtaccgcgaccagaactcttcgcggccacgtccggagctcttcaccaacaggttcaacttggttaaggataatgggtcggaaagctggtacccatttt

SEQ ID NO: 130415 - DNA, 318 bp, Glycine max
  Clone ID: PAT_MRT3847_88773C.1
aagctatatattgattagcctgtcttcttttctttgggaaaggcttttaacgggatgcatattcgatcacgggggatcttcttcattttatccttctcatcctcctcatccaatatgtcacttttattattctatcatttccatttcatattaattatcaacctttttcctttcatatttaaccatatataaatttatcctacacaactcccttttattcaattaacttatccatttccaacttcaccttctattttaatcccctttttcacatcttgttaatctaccttttatttttctttattcttcatttccttt

SEQ ID NO: 130416 - DNA, 529 bp, Glycine max
  Clone ID: PAT_MRT3847_88774C.1
ctctctctctcactcttttctgtcatctgcgcaacttcattcattcaggctaaatggggaggatcaaacctcaggctctgctacagcaaagcaaaaggaagaaggggccttctcgcataagtgccaccattgttacattctatgcattgattcttgtcatgcttgtgtttatcctgtttgttacatacagacattggtccaacaggacaagacttcaaccagagagctatatatcagtctctgaggatgaaaatacatctgtggaatccaaaaaatctgatctacctggatatgctgttgtaattacctctaaaggttctattatagtagaactttacaaggaaagtgctcctgaagttgttgatgaattcatagatttatgtcaaaaagggcacttcaaggggatgctttttcaccaagtaattaaacactatataattcaggcaggtcataacaaagggcctggagctactgaagattggaacctgttaggaaagaaatacgcaagtatgagacactaagcattcat

SEQ ID NO: 130417 - DNA, 257 bp, Glycine max
  Clone ID: PAT_MRT3847_88775C.1
aaatagatacatgcgagatcaattaaccatataataatccatccacatccatatcaccatgcaccccacgttcatattccccatctttatgttgttgttaaccactttgcgacaatcccactgtcaacccaatgatccagtttgtagacaagagtcatacaattgtggatcattgtccaacatctcttaccctttctggggtctcaaccgatcccgttcttgtggcgggggtgacccattcgagtaaaatgccacga

SEQ ID NO: 130418 - DNA, 918 bp, Glycine max
  Clone ID: PAT_MRT3847_88776C.1
ccgtaagttcagtttcacgccgatcttcacagggatcagtatcaccactgcagaaatctgccagtgttagtgattggatgttggattccaaacaaatgtccaccaaagattctatcaccaacggtatctctgcatcatttcttacaactcaccttcaaaatcttttacagcaaacatctattcaacaggatcttataatgaatctgttaaatagtgtgcaatctgctgaagcaattgaagtttctcagaatggaaagctgccaccattacctcgcagttcagaaatcaatggaagtgttgatacagcagcttcagagagggaacgtcttctgctgctcaaaattttagagcttcagactcggataatcactttgactgatgagctgactgctgagaagttaaaatacatgcagttgcaacaacagctaactctctacagtcaggaacaaaatatggacaagagagaggaaattgcatgaaagctgattaattatgatctgatcattccttaatgaagtacatgcacatccacttgagtgatgaacctctgccgaaggagaacgggatttggatattgaaaaaaaaagagttgtatatcatccgcgatccaacttgccttgccattaataagtttctatgaatacctatagtttagcaaggccaatatacagagttgcagacataatatctcagttaatctcattgtttatttcatacaaaattccgatgtaaccaagcttccctgctgtatcttctgcaacctgataagtttgcagatccaacgggttgttgtaaatgtagaatatcactacatatttaactgttaatttcatagcagctaaagcttgtatataattaattaatgtgttgtaccgattgaaaaggccaaatatttgagctattcaaaattagttcgtc

SEQ ID NO: 130419 - DNA, 278 bp, Glycine max
  Clone ID: PAT_MRT3847_88777C.1
tagaaacggcgattaatatcagtagaatttatcatatgcctggtagtaagttagtaagttggaggaatagatacaaatataattggaaacatagccgcagggattgaaatgaagtattgtaagtagaactaatgaactctctgaagtagtacatatacatatggatggatgtggtatctccgtgatgaaaccatttagaaagaaatatgaatgttcctatccattacttattatagctcctctttggcctctggtatattcactggaaacttgttttt

SEQ ID NO: 130420 - DNA, 513 bp, Glycine max
  Clone ID: PAT_MRT3847_88778C.1
cagagagagaccactctcctctggagcaaatccaccggcctccctcttcacaacgccattgtttggatggatgctcgcacttcttccatttgcaggagattggaaaaggagttatctggcggtagaaaccattttgtggagagttgtggcttgcctattagcacatacttcagagagggaacgtcttctgctgctcaaaattttagagcttcagactcggataatcactttgactgatgagctgactgctgagaagttaaaatacatgcagttgcaacaacagctaactctctacagtcaggaacaaaatatggacaagagagaggaaattgcatgaaagctgattaattatgatctgatcattccttaatgaagtacatgcacatccacttgagtgatgaacctctgccgaaggagaacgggatttggatattgaaaaaaaaagagttgtatatcatccgcgatccaacttgccttgccattaataagtttctatgaatacctatagtttag

SEQ ID NO: 130421 - DNA, 2987 bp, Glycine max
  Clone ID: PAT_MRT3847_88779C.1
tgtgctctgcaacgaacccaagaagcatctatatgatgtatcatttattacttgcttgatatataagcgctcatttatcttctaatgaatcggatgactcttcaccaattcatcagtccaccaaagatcctatcaccaacggcatctctgcatcatttcttacaactcaccttcaaaatcttttacagcaaacatctattcaacaagtgaggaaaatgttagaatttttataatcaaaactgtgaccttgccaatttatggtctcatggaaagttctattttaattccaggatcttataatgaatctgttaaatagcttgcaatctgctgaagcaattgaagtttcacagaatgggaagttgccaccattacctcgcagttcagaaatcaatggaagtgttgatacatcggcatttccgaggagtgcgcgtgcgtttggtgtggtcaacggaagcgagataaataaaccgagggagagagagagagagagagaggtgtgtttgttctctgagtagaagaagatcaagatcaaggaagaggatgtcgaaagaggatgtgtttgttggcgcgatcgaccaaggaacgagcagcagcaggttcataatatacgacgcgaagactggagtagtaggatgccaccacgtggagttcacccagttctacccgcaagccgggtgggtggagcatgaccccatggagatcttggagagtgtgaaggtgtgcgtggccaaggccgtcgataaggccaccgctgatggcttcaacgtcgataaaggcttgaaggccattggtctcaccaatcagagagagaccactctcctctggagcaaatccaccggcctccctcttcacaacgccattgtttggatggatgctcgcacttcttccatttgcaggagattggaaaaggagttatctggcggtagaaaccattttgtggagagttgtggcttgcctattagcacatacttcagtgctttgaagctgctgtggttgatggaaaatgtagatgccgtaaaggaggccataaagaaaaaggatgcgctgtttggaactattgacacttggttgatatggaatctaactggtggggtgaatgggggattgcatgttaccgatgtttcaaatgcatctcgtacaatgctcatgaatctaaaaacccttgactgggatgcatctaccttaaaaacccttaatattcctgctgaaattttgcctaatattgttagtaatgccgaaattataggagaggttgggtctggatggccaattgctggtgtccctattgctggatgtttaggggatcaacatgctgcaatgttaggacaatcatgccgtaaaggggagactaagagcacttatggcacaggtgctttcatactactaaatactggtgaagggataattcaatcgaagcacggtcttttatccactatagctttcaagcttggcccaaaagctccaaccaattatgcattggaaggatcagttgctattgctggagctgcagtgcagtggcttagagacggtcttggcatcatttctagtgctgcagagatagaggagatggcattacaggttgaatccactggtggggtttactttgttcctgcttttaatggattgtttgccccatggtggcgtgaggatgctcgcggggtttgtattggaataacaaggtttacaagcaagggtcacattgcccgagctgtgcttgagagcatgtgtttccaagtgaaagatgtcttggattcaatgcataaagattcaggagaaagtgaatcccaaaaaacagagtttttgcttagagtggatggtggggcaactgtaaacaacctgctgatgcagattcaggcagatttggtgggatgtccagtaattagacctgctgacatagagacaacagcacttggagcagcctatgctgccggattagctactgggatttggaaagaagattttattttcaatactgaggagaagttgaagaatgctagagttttccgtcctgtaatgactgaggaagtaaggaaaaagaaagttgactcttggtgcaaagctgttagtaaaactttcgacttagctgatcttgctctttgatggtaaaacacagtttatgtttctttttatttttattttttatgtcctttacttctgggtataactttatttttagccttactaaaatgaagggagtaattatgtcaactcaaataaatttgacattatgtttctgtattgttccttcttttccttgtattttggagaagaaaaaagcatcacataaaatggaagaaatacattagtgggagtttcttattaattttttcgatatcatatgagaactggtacagagtactatcgccttcagagagggaacgtcttctgctgctcaaaatttcagagcttcagactcagatgatcactttgactggtgagctgacagctgagaagttaaaacacatgcagttgcaacaacagctaattctctacagtcaggaacaaaatagggacaagagagatgaagttgcatgaaagctgattaattatgatctgatctttccttaatgaacatccaattgactgatgaacctctgccaaagcagaatggcttttggatattgaaaaataagagttgcatatcttctgcaatccaacttgccttgccatcaataagtttctatgaatatctatagttcggcaaggccaatatacagagttacagacataatttctcaaaagttaatctcatttatttcattcaaaattccgatgtaaccgagctccctgctgtatcttctgcaacctggtaagtttgcagatccataacgggttgttgtaaagaaatttattgggacacaaccgggaattaatgtatgaatatcactacatattgaactgttattttcatagcagctaaagcttgtatatgattaattaacgtgttgttgtcccgattgaaaagccctgaatatttgagctattct

SEQ ID NO: 130422 - DNA, 1131 bp, Glycine max
  Clone ID: PAT_MRT3847_8877C.1
catcatgttggtgcctcagcagctgacactggagactcatctctgcagttgtcaagagctgctagcattgttatggtgattgcatattgtgcttaccttgtcttccaactgtggactcacaggcagctatttgaagcccagaatgaagatgatgaagagggtggcagtgattcagaagcagtgataggattctggagtgggtttacttggctggttgggatgactatgaccattgctttgttgtctgaatatgtggtgcaaacaattgaggttgcatctgattcatggggtttttgtattagcttccttaacataatcttcaatttaatttttggagatgcaactgaacatgcattagcaatcatatttgctttcaagaacaaactggatggcacttcccactacatgaaaggccctgttcctctactcagcatgtttgtggttcccctatgtgtgattgttgcttggatactgggtatcaaaatggacctcaacttcaacatcctagaaacagcttcttttactatggcaataacaatcacagccttcacattacaggatggaacttctcactacatgaaaggccttgtcctcctactctgctacattattattggggcatgcttttttgtacaaagaacaccctccaaccaaactaatgttgctaacataacgcttaaatcagcaaccgaagcagtgtttagagctcaataggcgtattggctaattttggtctctctgagataaaggggtgcaacatccaagcttagaacaagattcaatggatttcttatttgttcattttaatcattgttatccccagaaagctgaagaagtttgcatgcagtagcttgcgatcaatttggttgtctctgtatatagttcccttcaaaggattttgtgtcaagattttcatctcataatgtataatatagatgagagttgtggcatgattctcaaataaaatgaggtcctttggaatttggagtcacaggcaaggctgttgatagtgcaagacaattaaggccattgccttaagcttcttaattttattttacttgttattatgtaaactttacatgaatcagttcctattgttcaaattgcaatggacaaggatgttctatgatg

SEQ ID NO: 130423 - DNA, 1225 bp, Glycine max
  Clone ID: PAT_MRT3847_88780C.1
gcagtgaagaaaatgccttctacagaagaagaggcaatatctcggagtcaatatcaacaaggagttagcgcgtggaattttgatattgatgatttgaaagctcaagcttcattggtgagggatgatgatgatattgcagagatgagggaagaagctgaaaagaaattttttactaattacaaggccattgcaattgattcccagtctggtactgtcaaaatgaattcagagaaatcaccacagaataaaatcacatcacaggtaggtgcttttgacataaaacagactgagcaggatgaatacttgaacaaaaaggagaagaatcccaaaagtgatctccaggaacctggattgcccaaaaatattatttggaagagaaatgggtcaattacggaggcaacaacatctactctagagaaagatataggtatgtgcaaaatcaaaggtcaatccaggaaaatccgtcaaacccaaagtggaccgctgttgccaggcactgttctcagtcattctgcattagaaaggggacgaacattagaaaggcttgagaatggaaatcagttactgggtgagaaaaataaccatgaagcgcgacgagcgccaagttttagtggtccattgatgcttccaatgcgagcttcagcaaatagtttatcggctccaataaagtcttctggaggattcatagattccttggatgacaagtctaaggctaatctagtgcaaattaaagggcgattctctgtgacatcagaaaatttagatcttgtgaaggatattcctgtaagttcagtttcacgccaatcttcacagggatcagtatcaccactgcggaaatctgccagtgttagtgattggatgttggattccaaacaaatggccactgaagattctgccaccgacagtatctctgcatcacttcttacgactcaccttcaaaatcttttacagcaaacatctattcaacaggatcttataatgaatctgttaaatagtgtgcaatctgctgaagcaattgaagtttctcagaatggaaagctgccaccattacctcgcagttcagaaatcaatggaagtgttgatacagcagcttcagagagggaacgtcttctgctgctcaaaattttagagcttcagactcggataatcactttgactgatgagctgactgctgagaagttaaaatacatgcagttgcaacaacagctaactctctacagtcagg

SEQ ID NO: 130424 - DNA, 361 bp, Glycine max
  Clone ID: PAT_MRT3847_88781C.1
ctcgagccgaatcggctcgagaagaacccttcttttgctccacgtttcttcactctcaaccgttcgactcgttcgatatcaaccgagttgactcagatctctaaggaagttgcagcactgaattctctttttttgcttgtgacgcagagcataattaattgacacattcatcacaccacagcaacacagccctgatttatctttttctgcctttgggtttcaaggcatataattcttcctctactgtattcatgaaatcttggtgctggctttcttttcctcattaactctgtaaagcagtgactttcttctgtagtcagttgggattgctctaggtctcataattcgccaaatttatttt

SEQ ID NO: 130425 - DNA, 386 bp, Glycine max
  Clone ID: PAT_MRT3847_88782C.1
atgcaccccacgcagctcggaattcggctcgtggtatttgtatgccaagtgtagttactaccggaactctagccacaggctgacgcaattcagtggactgtctctcgctgaactgcaccacacggtcgaataagctaacgtgtcagcctaaacgaaatgagaccgtgtccatgagacgccttgctctgctccctctgagacgcggctatctcagtcctacccagttgatctatacactgcgttctatgaccatgagatcaaagccttaaccctaccctctatacacttcctggggtggaccacagagtaccatacaaaggataccaagaggcgaaaagagttgaatcaggtccgtgaacaggcggctgagaaatagaaaacttttt

SEQ ID NO: 130426 - DNA, 452 bp, Glycine max
  Clone ID: PAT_MRT3847_88783C.1
tttttttatgggaaaaaaaaattctattttctagttacatacagttgtagtgtttgggggagcagatgactaggtgaattgctttacggaaccatgtgctgaaggacgtcgggacacaacgctctgataggatgtggcattggggtatagggttttatagacggccttgtttgagccgaagtaaatttattatttatttagaaaagcattatgatggtgttagaaaggtgaatgtgagcctgctaccctcttgaaaggcttgtatttaaatatgttttaaaaacttgaattaagtttaactttttttaattatttcttttattattagtacatatatgtatggggtagagggtgtcacaggccctatttctatggcttcccaaatacttaagtctattgcctcaataaaaacttgcattcgggttttccagtagtggtaaccctctccatta

SEQ ID NO: 130427 - DNA, 435 bp, Glycine max
  Clone ID: PAT_MRT3847_88784C.1
cttacgcctgcttgtcagttgctgtaagatcttgtgattgattttgccgagcatgtgaaagccagagcttgtttcggctgtgcaaccaggaatgtctcgctcgataaaagcatccttcgctagatggtatatactgctcgcataaccatagactatgtacagacactacgtccagaggacaccatcttctggtaggattgctctaatcaagtgccaggtcaaccctggatctgagctgggctttaatcatgcatgattcatctgccgatcgaacagcctttgtgccccctacacttatgtcagatgacacgccctgtgaacttgcgatactaatgataagatctcaccatgactgttacagcagaaccctgatcatggtgaagaattctctgagggagccgacgaaactggttccacttgctgcgatgccgccta

SEQ ID NO: 130428 - DNA, 400 bp, Glycine max
  Clone ID: PAT_MRT3847_88785C.1
cacctccgatagggattataattggcatgtcttgtgttggagcaatggacggtgttgtattcgatcacactggtcaattggttaaatgtaatggcatctcattcgctataggtgactatggatattactttgcacgacattccgtgttcccaaatatttaccagtctatggctgacaggacacaatttaccacaacactactaatatgtaatggcttgtgtgtcaagatatatgcaggcactgcaataatgggatatctacatgtttggtgatggcactctgacatagataacattgtatatgccaccagactcatttgcttccaaagctgcattgaggacaacaactattaacccgccgtctaaatctgctcagttgatgaacaaactgtcatctagtt

SEQ ID NO: 130429 - DNA, 589 bp, Glycine max
  unsure (1)..(589): unsure at all n locations
  Clone ID: PAT_MRT3847_88786C.1
cgagggcagctctccgggatcgaggtggcgtggctgcgctatgtcgggttcctggcggtgatgctcgttgccgccctggtgcgggcgcatctgaagcgcggcgcctcgccgttccgcagcgcccggccgggcctccaggtggtgcgcggcatcgcgctcgtcgcctcgtcgctgctcttcctcgccggcttgcgcgtcctgccggtggccgagaccacggcgatcgccttcgtctcgccgatcttcgtcaccgccctgtcgatcccggtgctcggcgagaaggtcggcgcccggcgctgggaaaaaaaataaaaaaaaaaaagaagaaataaaaaaaaataaggggaaaagaaaataaaggaaaagaagaaaaaagatgacaaaaggaaggtaagaaagaccaaaaaaaaaaaaaaaaaaaatctcgagggggggcccggtacccaattcgccctatagtgagtcgtattacgcgcgctcacttgccgtcgntttacaacgtcgtgactgggaaaaaccctggcgtacccaacttaaatcgcttggagcacatcccnctttcggcagctggcgtaatagcgaagaggcc

SEQ ID NO: 130430 - DNA, 341 bp, Glycine max
  Clone ID: PAT_MRT3847_88787C.1
ggctcgagcttccggagatgtgtggaactgagcggccacttgtagctgggaatgccatcctcatcaccatgcagttgtgttcagcgggtgtacttgggctttgcctacaatagctttttcaagaccgatatggactggcgcctggagtctccctattcattgcagcccatatctgagaaaaccctatatggaaggcattgagggcaaccaccatcaacattggacgtggccctgaatacgaaggcgctggtccagctctgttccattaggtgataactagaacacacactggccgtgctctctgggtggcatcataccggcataatctttccaacgtgaca

SEQ ID NO: 130431 - DNA, 275 bp, Glycine max
  Clone ID: PAT_MRT3847_88788C.1
ttcaagttttagactgtcaatacggcatatcttcagaataaagtgctgatgattgtgatgctttcaaaaatacgaacagatataaaaatgtgaaagcacacataataatctcatatataacaaaaaaaacagggcgcacgatgtagactatccaggactacatccacgatcgtgctacaatttattgtttcaatttggataccaaatgacaatgaaagtgccatgaaacgaccacacggtgtctggaaaaaccctgacattacccgggttatcgt

SEQ ID NO: 130432 - DNA, 708 bp, Glycine max
  Clone ID: PAT_MRT3847_88789C.1
ttttcgttcccacgcgttctcccacgcgtccgcccacgcgtccgtacggctgcgagaagacgacagaaggggacggttgggccatcttgtccatctatcccacaactaatttttgattttccttgtttatttatcttcttcctcccttgtttgtttgtttctttgtttctttggcttgacaagaagaagatgatgatgatggacaagggggtgttggatgatgtgataagaaggcttctggaagggaaaggagggaaacaggtgcagctctctgagtccgagatccgtcaactctgcgtcaacgccagacaaatcttcctctctcagccaattcttctcgaccttcgtgctcccatccgcgtctgcggtgatatacatggtcagtaccaggacttgctgaggctttttgaatatggtggctaccctcctgcggcaaactacttgtttctgggggattatgtggatagagggaagcaaagtttggagactatatgtttgcttttggcctacaaaataagatatccagacaaaatttatctcttgaggggaaaccatgaagaagcaaagataaaccgtatatatgggtttttatgatgaatgtaaaaggagggttcaatggtaggctatggaagatatttacagactgctttaactgtttgccagtggctgcactcattgacgagaaaatactttgtatgcatgggggac

SEQ ID NO: 130433 - DNA, 365 bp, Glycine max
  unsure (1)..(365): unsure at all n locations
  Clone ID: PAT_MRT3847_8878C.1
ttttaaaaccctttatagttaccacaacgccggataccccctctgggggactttttggttccatcagcggcgagttccccacacaggatantcttaaaatatctctaactctgcattcggccttgttaaaaaaagacgaggaactggcaagctgtaggaattggcttttcagacccatcaatgaaacaccatcggtcttactgaccacattagactgtttagacatggaataaacgtgaagaatgttaacaaggaccattttactaaattctcatatacccgtaggcttgaaaaccttaaccaaactatttttccttacctctacaaataatgccccttcctttgatggaccctaaatacacacc

SEQ ID NO: 130434 - DNA, 247 bp, Glycine max
  Clone ID: PAT_MRT3847_88790C.1
cttgtcggtggactcccttctaaccactacagcctgattttttttgcccacagccgtcaccactttatggcagggggatccctaaatcaaccccaatgaccagccaatgaccggaacatctctctcgcagctattgaccgtaataccacgagcattctgacgccatgcattacacctatgtctatgcatgctgtacatccgttatgttatcttccatatacggcgtatccttaattatatcacgaac

SEQ ID NO: 130435 - DNA, 1784 bp, Glycine max
  Clone ID: PAT_MRT3847_88791C.1
gaaaaatcagagttgaacccacccacttcaccctctacctgggagttgaaaaaatccaaaaataataataccaaaacattactattaatcaatcccatgatcacgataaatggatcaatcgatcacggatcgttgatttttagaacaagatcatcagcatagtttaaaagttcaaaaggtgggcttctggaagtgaaagtggggggatcttgtccatctatccaaatttccccatcccgcaactaatttatttatttatttttcctttatttatcttctttctctggctcgagcatccaaaagggttgttttttttttttataagaagaagaggagagggaagatgatgatgatgacaatggaggggatgatggacaagggggtgttggatgatgtgataagaaggcttctggaagggaaaggagggaaacaggtgcaactctctgagtcggagatccgtcaactctgcgtcaacgccagacaaatcttcctctctcagccaattcttctcgacctccgtgctcccatccgcatctgcggtgatatacatggtcagtaccaggacttgctgaggctttttgaatatggtggctaccctcctgcggcaaactacttgtttctgggggattatgtggatagagggaagcaaagtttggagactatatgtttgcttttggcctacaaaataagatatccagacaaaatttatctcttgaggggaaaccatgaagaagcaaagataaaccgtatatatggtttttatgatgaatgtaaaaggaggttcaatgttaggctatggaagatatttacggactgctttaactgtttgccagtggctgcactcattgatgagaaaatactttgtatgcatgggggactctctccagaattagaaaatttagatcagataagagagattcaaaggcctactgaaattccagatagtggtctcctatgtgatctgctttggtctgatcctgatgctagcatatgagtgatggggctcttgtgtgaccctttaggataatggactcctgctgatgatgtatcagcaagtggttcatcaaaaatgaattttaagaagccacccaaacttggaaagatatagtatttggcaaggattttcggttcaaataggaatccaatccagctaactcaacttgtacggagttgaaattgtcaagtaggagtttgacatggggagagccttccttgaacctcttgtatgttcctttgagatacttgaaacccgctgatagagcttcaggaagtggttcatcaaaaatgaattttaagaaggccacccaaacttggaaagatatagtatttggcaaagattttcggttcaaataggaatccaatccagctaactcaacttgtacggagttgaaattgtcaagtaggagtttggcatgggagagccttccttccactttacgattgcagattgccaatgatactatattgtaaactgaactacccaggcattcttctgtgcaggagcagagattattgctttatacaccagttggttgcttgtgtttggcaaattaacatgtaatttgtgagtgcaaagagatttcatgttaccaaatgcgtaaatttctatgccatttatctgaatgatgagtgctctcaggtatgttgtttttggtagagaccggttcgtgtaccttaacttgttgctatgccacttataacgtaatcaattatatgactacttgtctttgccacgttggaattctcttatgacaatgataccatgttctgaatcttagaattag

SEQ ID NO: 130436 - DNA, 755 bp, Glycine max
  Clone ID: PAT_MRT3847_88792C.1
tgattagttaacataggaaacatttacttcacaaacacgagcccatccgaagtgtaccaagcataccttgaccagtttagtccatatttcaatctgtttctaaaatcacgcgcggaggaattattgcgtggtggtggcatggttctaagcattccctttattgaaaaaacttagtacccacacaccaccccgcaataaatccaagatgtggtagttgaaattgttattacgaccactgttattctcacgactggcaggttacttttcgttactattgggttgacggtttgaaggagaaaggcacatgaagtttcgtattagaccttaatgtcagcttcaaattcatcgccaaattaacaagggctactaaaataccttttatgacggcacggtttggagaaggaataattgatgaattatttcctaaatacagaaacaaggttgcggaactgttggaagaagtgatattagagcatgcttacctggtcatgtttatgacaaaaaaatgatacaaatcactcaagttaaagaattgtttgtattttttcttctaaatatgttaatctgggttaaagatctctaatggaggtgcttaacttgtttgtgcataaagatctgatgcctaatgagaccgatgcattggaaagagtttttaatgagtgtgaatgaagcaccaagtgctcatatcaagtttttcttgctttgttactcagggaatgaaatttaagcttagtaagattcagctcaaaaaaaaa

SEQ ID NO: 130437 - DNA, 188 bp, Glycine max
  Clone ID: PAT_MRT3847_88793C.1
cagcctgaaggggtcagaaacaattaattaaaagctaaaaatatttctcgttaaattgggcaaacaattaaaacaaaccccttcatctgccttccgggggcaatgggaaaagctccaaagttctatgtgcctcctctctttggggcttgcaagggctgggacgcccaggtgctacactgcttcaacgg

SEQ ID NO: 130438 - DNA, 307 bp, Glycine max
  Clone ID: PAT_MRT3847_88794C.1
gagcaaaatgccgacataacaatataagttggctacttaaaaactattaggctcaaaacaattaacattgatcaacaccggacctgtgaatatgaaaccagtacctgtgtcaaatccatcatcaccgaaggatgagaccaacgttatttttcagaagtgagtggacctagttcttatgcctaaactgggtactatgaaccgactttttcttgcggcagtgcacaaccctaagatgcagacggccatagcacttgcggcatatcatgttgtcccggaagtatttgcgagccaaagccatgagggaagg

SEQ ID NO: 130439 - DNA, 622 bp, Glycine max
  Clone ID: PAT_MRT3847_88795C.1
cttggcattacattgtcagaaggagagggcataaacaaattcaggagcttctcacaagaagctcattgaatgctgacgttgatattttaagtgctgaaactagcttagatgagaggttggatgcggcaaatggttttgaagatcctttaacaggtcagaatgagacagtggactgtttggtcaatgatgtcaaatcttcgacagagtttcttctaggaagtagttctggtagtttgtatgttgactctagttcaagtttaggtgaaggtactaacatcgctgaagaagcctcagctaatttgtttgtagaggatggacttagtaaagtagaagatcatgctgaagtgctcaacgatgtaacggaggggaatttctacccaactgaattgattattgttgataatgattatgatagttcaagggaaggtcttcatcccaacttcggtagccaaagttccatcatgcctacagaaatttctggtgaattacctattcagacagtgtcttctggaaattctgagtctgaggatagtttagtaggcaaaatggatggagagataaccttgtcattgacggaaagccattccaacacttcattcaatgattccaatattgacactga

SEQ ID NO: 130440 - DNA, 192 bp, Glycine max
  Clone ID: PAT_MRT3847_88796C.1
atatccacgttagctttcacagaaacaaaccctatgacaatatacaaaccgctcggcgtgatctcccaacactttatgcgatacaggaaccatcatctctatttcgaatatgaggactatcaacaccaaaagacaatagtggctaaaacaaaagcccatcactgcgggactacaactcccaacccctattgt

SEQ ID NO: 130441 - DNA, 130 bp, Glycine max
  Clone ID: PAT_MRT3847_88797C.1
cattgggaaatatattgggtatgggaattttgtttatggggctggatacaaaacacatcaaatcaacttcataactataactgagtacagatactctaaatttactagcctacttatattcttccccaac

SEQ ID NO: 130442 - DNA, 209 bp, Glycine max
  unsure (1)..(209): unsure at all n locations
  Clone ID: PAT_MRT3847_88798C.1
cttgtatagcatgtgttggattggattctttcaataacacattatngttgtttgtattcctttgtgtactttaaagataaaataccatgttaatattctgatatatatatgccaangnannagtgattcagtatgttgctcatatcgaatgcaagttatgcaactatcnagaggacatngtacnctactntcagtaactagctccataa

SEQ ID NO: 130443 - DNA, 1066 bp, Glycine max
  Clone ID: PAT_MRT3847_88799C.1
gaattctgcattagggaacaacggctccaccatggcggcgtgtagggctgccacggccacaaggtttaatgggttctccggcgatgctttcaaatcttattttccattgcaccaatatggggtgggcccttcagaagcctcttctgggttcatgagatcaaggtttctgcagaagcttcccaacaagaggagcatgagagccccccacgcgtccgggacaagcaccctccatgcgagatttgttcatgcggttgaacttcttggtggccatgaaagagctactccaaaatcagttcttgagctcatggatgtgaaggatctaacactagctcatgtgaagagccatttgcagatgtatcgaactgttaagaccactgacaagcctgcggcatcttcaggccattcagatgggtctggagaggatgatttatctccgatggttagcaccgccgatcgtggtggtctccgacaatttcccaaccacagagggcggccggagtgggcggcacaacaagacatggactactcttccaccaccactactctatggagtaattcttcaagttgtggggagtcacggctaagacctagttctaacgacatagatggtctcagatcacctatcctccattcacaaacaatatcaggagggcatcaaattcaggagtgtgattcaatccaactcaagagcaacatgccaggttctaatttggagtgcaagatcccaagcttggaattcacattaggaagaccagattgggatggcaaagaacaagcctagctaataattttgataattggttcccttgcttaatttcttttaattttgcaatttatttataaaccatggtgacaacttcgtcatcttatgaaatgtagagctaattatttagataaatataaattggtgtctaggagaggaagaaaagaccctccgtgcgtagttctacttagctagctttcgaaaagtgtttttgagtttatgaacagttttgtttatattttattttgtttttatttatttgtgaggatgagaaggagggaaattaagatgtggcaattaaca

SEQ ID NO: 130444 - DNA, 240 bp, Glycine max
  Clone ID: PAT_MRT3847_8879C.1
ccctcgctcgttttcacttttttcaacctggaacattccttttgatactgatattaacagacacaatggtcagaaaacacggggtacattttttacttgatcatctaaaaggttacaactcaaaggcacgagaaacacaatatgacggacgaccactacacaaaaacacagagcagcggacgtggaaacttatgcacaagagacattatcacggcaaccctaaaaaactccagcacattg

SEQ ID NO: 130445 - DNA, 560 bp, Glycine max
  Clone ID: PAT_MRT3847_887C.1
caagggttacagtgctaagtccaaggccaccatgggaaaaagaaagccacccatgggtaaatgaaaactgagccttggtggatgtattggaatctttgcccgaggactcggggatttatacaaatgacatttggtttaaaacaacttgggttcttattatttcgtcaaggggaatctgatattgaaaattggaccccgacagtccttaatgggcgaaatcattcctttaatttgtgagttgtcaagctaaaaaaaggggtggtagccgacaccattttgtgcccaccctttccatagttggccacttctttactaaacctggttttgacaaactttaccttaaaaacatgagcttggtcttaccaatatgccctggattaaaacttttgttcgaggattctaaattttcattgccaatacttgaatgactggggcttactatggctgtccgggacaaacgtattctttgcatgaccatggggggcccgaaaaacccttgttgcctactgaacacacccctttggctccttgtccacgcgttttgcgccctttttttaaaa

SEQ ID NO: 130446 - DNA, 257 bp, Glycine max
  unsure (1)..(257): unsure at all n locations
  Clone ID: PAT_MRT3847_88800C.1
acccacccgtacacccacgcatccggccactcttccaaaaaaatttaaatttcttctcccatatgaaccctaaggtcnattgttacatcacaaacggtcttcaacactcttaaccaaccctcatataccaaataatctacaataatacctaaactacttacccacaaataccatataatcacatcaaatacaacaaatttaaatactgacattcaacttcatctttacaaatacacttatactaactaacataccaa

SEQ ID NO: 130447 - DNA, 737 bp, Glycine max
  unsure (1)..(737): unsure at all n locations
  Clone ID: PAT_MRT3847_88801C.1
ggctcgagggtaaattccctattgaatctctcacaatctcagaataaatctttaagggatggacttaagttagctgccaagggactcatcctgcctttccttccaagcaagcactggtccagcgtgatatcaacattctcccagaccgagacagacattctttcactgaatcctatatgctcaggaacagaatttgaaagacgaaacagaaatggatatatggatccaattagcgccatgacggctacagtggttccggtgcaaagtccaagtacacccagccacaatgttattgaaagaagagatcctagaacctggggggcaggtgcaagttcacatattgaagtggaaggtaaatggctaaaggggcacaaggctgggcttaaaaaagagctaaggatgttgagggagcttgcaaaagctagcttctctggggataccaggtttgatgaagccagtactagctacactttaggggaacaacagcattcatctggtgaaatctatttgggtaatccaaagcgaagatattgctgacactaatgcacaagggccatacatcaccacatcctactttggaagattttggacaatgcacattacttcaaatttctatctttattccacaatcattatttgtatagcttcttctgtagttttagtgaccttaacttgcttctaatgctattctaaatgactcacatgctgtaacaactccaatnnnnnntctcaggaga

SEQ ID NO: 130448 - DNA, 282 bp, Glycine max
  Clone ID: PAT_MRT3847_88802C.1
gcttattgtattatttgttttgatcttttcagttgttacttctatatctacttatctgaattcagtttcagttcttaatggtacaaattttaaggactggaaagagaacatgcaaattgttcttggttgcatggatctatgttggagatggtaaatcaatggaggtggaagctatatggaattttagattattattatgtactgatttttttatttggatttaaaagacacttttgttgtaccgtcatttaaacagaatttagtttcagtttcttatttggg

SEQ ID NO: 130449 - DNA, 212 bp, Glycine max
  Clone ID: PAT_MRT3847_88803C.1
aattcggctcgagacgggtgcacaagacaacggaaggcggggatatagctggaggttctaaacatagaaaatgccttagtttggggactagaaggcctacttgtagcagagttgtgatacaccgcgaggagatgtggactatacactatgaccggctgaacatgggcattcaacaccattttccgtcctataggaatacgtctgaagaatac

SEQ ID NO: 130450 - DNA, 923 bp, Glycine max
  Clone ID: PAT_MRT3847_88804C.1
aggggcaacacaagaaaccatatataaagaaacttaataagatgacataaaattctagagcaaaaaaattaaaacaacgttcaagattatcatatctagcgtccaaaatgaccagcaaaactgaaatgtagttcaattcggtatacacctcaaaccaaaacttcaaaacactaactagcatactacttagtacttaacaggagcaaggatttcaatttgggaaccaagcttcttctctgcaaccttctcagctttctccctcaatttggcaagctgcttcttcctctcgtaacacaattgtgctctatccttcctcttcttctcaagttccctgatggtatcatagtagttccatccaacctcagatgacaattggcccagatgacagtatttgtgtcccttctgaagcctcaacaccttgagagcatcaggaacaaccatcctcttggtcttgtcataaggaggaggaatgccctcatacaccttcaatcgcgcaagagcagcttcccctcgctttgtcttgtgtggtatcatcccacgaacggtgcgccagaagatcttgccgggtgcacggaaatggatggggccgtgagagggcttggtgttcatgcgcttgcggaggaaacgcaagtacttcatcttctgcctgacgagcccaccggagatgcaaatctcctcgcagcgtaccaccaccaccttctgcccattcagaagttctttcgccacgatcgatgccagcctccccagcatgtggtgccgcgcgtccacaattaccctcttcgcgcagattcctgaccccgaaaccattttctctctgtgcctctgtctctctcacaaaccaagacgctgctgtttgtgttcccccccccctgtcgtcttctcgcagccggacgcgtgggcgcacgcgtgggcggacgcgtggg

SEQ ID NO: 130451 - DNA, 495 bp, Glycine max
  unsure (1)..(495): unsure at all n locations
  Clone ID: PAT_MRT3847_88805C.1
ccacgcgtccggtgcgtccataagaccccttactccgacctcccctgctttcaaactttgaacgcctgtacctaacatctcatctcagagtcctaccttttcgacgcctncttagtgactatattatcaacgattggtccacaatggctgcaaccagtggctcgagaatagctattatctttcgcattggatcaactgtagcacttatataaatccttgcacttaaaacagtggcccctatgtagtggacaatggtcattgaatctagacatatccaatatactggacaagatagactgggccgttactgtctgcctatgcacttgaaatgataatggaatatgcatgaagcacctcgaccatatgcttacatcgaaatactgtaagtcccaaggacttgagcagctatcagatcacatcttcaatgccagagcatccacttactccaatacgtccctagcctctgtgcctactctgcaggctccccaacgctat

SEQ ID NO: 130452 - DNA, 782 bp, Glycine max
  unsure (1)..(782): unsure at all n locations
  Clone ID: PAT_MRT3847_88806C.1
gttatattttgaggaacctgaagatggagtacccaaaatagtgctagcaacaaatattgctgaaactagtatcacaataaatgatattgtttttgttcttgactgtgggaaggcgaaaaaatcatcatatgatgcactgaacaacacgccttgtttgcttcccacctggatctctactcgagccgttcaacaaagaagaggaagagctggtcgtgttcaaccaggagaatgttatcatctctatcctagatgtgtatatgattcttttgcagagcatcaattacctgaaattttgaggatgcccttgcaatctctctgtctgcaaataaaaagtttgaaactaggaagtatatctgagttcttgtctagggctttgcagtcacccgagatacttgcggtgcaaaaagcaattgaatatttaaaaacaattggagctttggatgagaatgagaatctgactattctagggcacaacttgacaatgcttcccatggaacccaaacttggcaagatgcttatatttggtgttatcttcaattgcctggatcccatattaactattgttgctggccttagtgttagagatccttttctaacacctttggataaaaaagatcttgcagaggcagcaaagtctcaattntcccaagattacagtgaccatcttgccattgtgagggcctatgagggatggaaggatgctgaaaaagaccttaatggacatgaatattgctggaaaaattntctttctgctcaatcattgagagtattgatgctcttcg

SEQ ID NO: 130453 - DNA, 431 bp, Glycine max
  Clone ID: PAT_MRT3847_88807C.1
ctttctttcttttcgaaaatgctgatttttcattttttttgccttttttcttcttcttccgtctgtatttgatttgttcccattaattctgaaatgattcaccttatttatttggaattgcgtggttttgatgtccaaatcttttctcacaactgatgtttttgccttctgtcaaattgaagcagtaaagttaattgatcaataatctaattggagccgatcggacttgttgaatttgagcaatggtttatttgtgttggcaggtttaccctcttttaaatgtcagcttattatttggctggtttataaatcttctatattcgcccctatgcattgcggagttgcaaaatgaaatgaattaaacttctcttataagttaaaatcaatttatacactttaacttttgtagaaactttcttatttaacttctc

SEQ ID NO: 130454 - DNA, 364 bp, Glycine max
  Clone ID: PAT_MRT3847_88808C.1
accaagcgtccgtttatagatacttcttatgaccaaagattgcagtcccaacattccctttgtttaattgatgcctttcatattattctaatttgtattaggaaccttcctggttcctccttgaatttaagccctttgtttagcacacagtgcatctaccatttcacttcacaacctttttttaaggaatattatttatagatacttcttatgaccaaagattgcagtcccaacattccccttgcttcattctcctgttctcaccatacatgttgttgtcatgatatccatcactttcattgctgcatccagcatcgtcttcctgcatgggatatgcattatacatagtccatccagattcacg

SEQ ID NO: 130455 - DNA, 361 bp, Glycine max
  unsure (1)..(361): unsure at all n locations
  Clone ID: PAT_MRT3847_88809C.1
tccggggccaggattggtaccccacgaggcaagaagaagatgcaacattcaaggctatcacgtgccaaaaggcacacgtgtgtttgcaaacgtgtggtaactccacagagaccctagtgtggggggggagcccnnaaagttttcacccnagaggtttattagtgagaaagaaaaacttgacgcggctcaccattttgagtacttgccctttgggtcagggagaagggcttgccctggatccacttttgccacaaaagtgtggctcttggcactttctcggttgctccaagggtttgacttgcacgtgccaatggaagaacccggnggattggaaagaggggtggggcacaccttggccaag

SEQ ID NO: 130456 - DNA, 1226 bp, Glycine max
  unsure (1)..(1226): unsure at all n locations
  Clone ID: PAT_MRT3847_8880C.1
cttgagagagaggtttcaaattgatatctctgttttcaattcatgttctttaccctggcgtatgtccccaaactcgtggggttctctaggttgtgtgcgtaacacaatcaattaagaagctgtgattctgattcaaaatcagaatgttgcgaagatggagcaaagcagttactccaatctccaaatttggatcgcagcaaagtcatttgaatttcgtgaaggacgtcgcgcgccaaagctacgccggggttgcacccgcgccaacaacgatagaggataaacctcaaccccccgtggttaaacttgacaaaatgttttggtctaagccctgttcgctggccctgccccgggactcacccctcagagctgaagaacctgattatcagggcatcaagcgtttcatgctcaagctcatgctgttttatagtaagcagagcaagtcaattcgaggcgctaatgttgtgtaccgaagaatcatttctcaaattgataaacctcccatttatgaagtgtttaacttggagaaaacattcaaaacaacattctctttacttgtacttcatatgtggttatgtttgcgtcgcttgaagcaagagggaaatgagggtgttgaatttggccagtacctttatgagatttacaatcatgatgtggagctaagagtctctaaagctggagttaacctactactgactaagtggatgaaagagctcgagaagattttttatgggaacattgttgcttatgatactgccatacttccagaagctaaaccgggtgatttttctaatgttatatggaggaatatattctctgaagatggttcttcaacaccagatgctgctgcatctcaatcagtacaggcgatggccagatatgctcgccgtgaagtaagttgcatgaccttaacagataaagaagccctatattcagggaattttatgttcacctctttgaagcatgagaacagaagcggaaaggggcctcaatgatgaagtggtgatttttaaatttgtgatttagcaaattgaaaatacccgctgttcttattttatttattttttacaaaaaaattgttgaataattacgacataaagctcatgtccttttccgtaaggcttttattatacttgattagcttggtgcccagaaactagcactctcatattcttgccccggtaannngagaaaagaaaaagcgcagaagnnannnaaaaatgctgtca

SEQ ID NO: 130457 - DNA, 528 bp, Glycine max
  unsure (1)..(528): unsure at all n locations
  Clone ID: PAT_MRT3847_88810C.1
atcagcaaagataatagaatatatattaatgagaaagaagtaccagaggtactaagtacataggtaggttaccatacacatggttccatagaaaaactaatatagtttgtttaggaaccatattatggctacataagtaataaatctgctagaaatgcaatcgaaaccacccactactgatacaaaaaaccttgccggatttgactcgaccattgataaaaatgaatattaaaatctttctccaagtttcttagccacgaccagattaagaacatggcatcctctaacagcttgttgacattgaaggatgcattggagaatataatactatttcgcatctgccaaattgaccaaactacagccatctaccagcttcgccacctcttaatccttataccattcacctgtacatatgagtgttggaggaaatgatgtatcaaatctgtcgggaacacacttttaatgttcacccaagccatagtttcccaccatatggggtgtattntcaagcaatgaaaaaataaatgg

SEQ ID NO: 130458 - DNA, 968 bp, Glycine max
  unsure (1)..(968): unsure at all n locations
  Clone ID: PAT_MRT3847_88811C.1
ccacgcgtccgcaagataaaacctttacaatgcgggaaaacgaaacaatagagcagctgattcaccacttgaggctaaaacccctcattttcttattttaatatctgaaggtttcagggaagcctggggtgctttgagtcgttctgggatcacaagtttgccttcaaatcaaagtcctgttaaagtagatgctgtttctgtaacaccagttacagaggcacccccaacttctatgccagttaatggatctattccaaaccggcaaccagttcctgctgggaatgtggctcctgctactgtaaaagtggagccagttcttgtagcctccatggtatctggacctgcttttcctcacaattcgtcagttcctcgtgctactagtactagtcaaggagttccaagcttgcagacgtcttctctatcttctgtttctcaagatattataacaaataatgaaaatgcgcaggatacaaagcctacagtgtcaatgctgccccttcgtccagtgaatcctgttcaagcaaatgtgaacattttgaacaatctctctcaagcacgacaggtgatgaactctgctgccttaagtggtggaacctctatgggacttccgtcaatgggtcagactcctgttgccatgcacatgtcaaacatgatatctagtgggatgacatcttctgtacctgcggctcaaaatgtattttcatctggacagtcaggaataacatcaatgactagttctggacctcttactgttcctgcacaggttggacaaaattcaggtctcggttcattaacttcgaacacttctaatttgtcttcaagttcgaacattgggatttcacaaccattgggtaatcttcaaggggttgttagtattggacaacaagtgtctcgtatgagccaaggaaacctttcangggcccaaattgttcaaggtggagttagcatgaaccaaaatggtatgagtg

SEQ ID NO: 130459 - DNA, 431 bp, Glycine max
  Clone ID: PAT_MRT3847_88812C.1
tttttttttttttttttttctttttttaatattcttttacccttggtggatatgcttatatatatattattagaagggggcaaaaaacacattccattcttaacttcccccaaaaagggccaaggggggcacccccccaaagggaaagggggggattaatccggcccctgggccgcccccgaaattccagccccgtgcccggagggggaccccctttccccttaatgaggcccaataaaacccggccaaaacctgggaacaaccctactcccgtggaaaaatggtatccgcccacaattccccccacccaaaaaccccggaaccaaaaatgcaaaggcccggggggcccaataaggggcccacaccccccataattggctgtcccccccctccccctttttcaagccggaaacccaatcggccccccccat

SEQ ID NO: 130460 - DNA, 1407 bp, Glycine max
  Clone ID: PAT_MRT3847_88813C.1
ccctgttcaaaatcggtcgatccactgccaccgccagctttgtagttcgtagatagccgatgtgcttgtcttagtgtgtcagtcattcctgttcctcaagtcaagctttgtagtgagcagatataatggctgttgaaaggtccggaattgccaaagatgttacggaattgattggtaaaaccccattagtatatctaaataaacttgcggatggttgtgttgcccgggttgctgctaaactggagttgatggagccatgctctagtgtgaaggacaggattgggtatagtatgattgctgatgcagaagagaagggacttatcacacctggaaagagtgtcctcattgagccaacaagtggtaatactggcattggattagccttcatggcagcagccaggggttacaagctcataattacaatgcctgcttctatgagtcttgagagaagaatcattctattagcttttggagctgagttggttctgacagatcctgctaagggaatgaaaggtgctgttcagaaggctgaagagatattggctaagacgcccaatgcctacatacttcaacaatttgaaaaccctgccaatcccaaggttcattatgaaaccactggtccagagatatggaaaggctccgatgggaaaattgatgcatttgtttctgggataggcactggtggtacaataacaggtgctggaaaatatcttaaagagcagaatccgaatataaagctgattggtgtggaaccagttgaaagtccagtgctctcaggaggaaagcctggtccacacaagattcaagggattggtgctggttttatccctggtgtcttggaagtcaatcttcttgatgaagttattcaaatatcaagtgatgaagcaatagaaactgcaaagcttcttgcgcttaaagaaggcctatttgtgggaatatcttccggagctgcagctgctgctgcttttcagattgcaaaaagaccagaaaatgccgggaagcttattgttgccgtttttcccagcttcggggagaggtacctgtcctccgtgctatttgagtcagtgagacgcgaagctgaaagcatgacttttgagccctgaattcccgtttaaggctctcactactgaattttcttgttacttgtaccaggctttaactagattgttagagtactactgtttgtgactctgactctaaaataaaacttgctccaaaagactagtttttcttgatgcccctggagcgataattttgtgcctgcaacattaaaaagtattcaaagttgcttataagtaacatgtttcatcttttgttgttgttgagacgaacacggatgaggtcataataccatgtttctgatttcctttggtagggaagatatagaccgaagttgatttgttggac

SEQ ID NO: 130461 - DNA, 290 bp, Glycine max
  unsure (1)..(290): unsure at all n locations
  Clone ID: PAT_MRT3847_88814C.1
agagcatatagcatggntctttctcacttttccgctgncattttcatcnntttcnttctcnncanttctccangaccangnngaatncnantnagnnnttcctattcctgcgactcgtcgtccaactgcaccctactacccattctggaacaccaggctcnccatnaccagaagagcccaagantcgtctcgnggatcactntcngacgagaaatcgccaaatcgtcaanaggcaccgnngattcccggctcggntccgggtaacagtgntggagtgaagcgctgcaggc

SEQ ID NO: 130462 - DNA, 331 bp, Glycine max
  Clone ID: PAT_MRT3847_88815C.1
ggcgtgtgtcttttttgttttttttcatctccaaacccaaagagaaccgtgtactcgggcattttaatccccccaaaaattcccattttgctccttttagagagagaaaagaacgatggggctttcacgagagaggctgagatagaaaaagattgggtttttttttggggcgttccaaaggttgaaccggaaatccaaagaagggggtgagaaaaaaaaacagcatcttcttttggggggtgcctctgaaaccatgacctcgcgaaaacccggaaaggaaaccttcggagcgcgttggttgataaatagagagaacttattgttgttggga

SEQ ID NO: 130463 - DNA, 199 bp, Glycine max
  unsure (1)..(199): unsure at all n locations
  Clone ID: PAT_MRT3847_88816C.1
cttgtagtaatttaagagtttatttaaagtaaattttactcagaggcaaacancgaggcagccacccggagaacccccaaaggaggaaagcctggggaagccatgcacaccccaaaaaaggagtgcaagggggagtctaaggcaactaaaaacccgacaactacaggaaaacccggacacaattggaccccccaaacac

SEQ ID NO: 130464 - DNA, 591 bp, Glycine max
  unsure (1)..(591): unsure at all n locations
  Clone ID: PAT_MRT3847_88817C.1
aaaaaaaaaataaatttaaaaaaaaaaaaaaaaaaaaaaaaaaaaaaaaaaaaaaaaaaaaaaaaaaaaaaaaaaaaaaaaaaaaaaaaaaaaaaaaaaaagaaaaaaaaaaaggggggggggtttaaaaggaccaaagtttacgaacggggcaatgaaaaataaaagcttttaaaaaggggaaccaaaataaaaacaaagggccccggtttaaaaacgatgggacgggaaaaacctgggcgttaccaaattaaatcgccttgaaaaaaatcccctttttgcaaggtggcgaaaaagcaaaaaggcccgaaccaaacgcccaaccaaaaaggggccaancctgaagggcaaaggggacgccccatgaaggggccaataaagcccagcggaaagggggataacccaaaaggggacccttaaaatggcaagggcctaagcgcccgaccattacggtttgtaaccttaaataaagcggaaagtgtggggggttttcccgggaaaagataaaaaagggggggctaccttaagggggtcccaaaaaaaaggggcttaaaaggggaacctttggaaccccaaaaaaaaaactttgaa

SEQ ID NO: 130465 - DNA, 250 bp, Glycine max
  Clone ID: PAT_MRT3847_88818C.1
gttgtattctttgctgttcgaactcattgtaattcttcttatacagtgaaaaggtagagagatattggacaaaaaaaaaaaaaaaaaaaaaaaaaaagggggcccccccgattatggccctccccccccgggaatttattccggccccggtccctgggggggacccgttttcccctaagggggcccgtttaaggctttggggaaaccggggcaaagctttttcccggggaaaattttttccccccccaaa

SEQ ID NO: 130466 - DNA, 422 bp, Glycine max
  Clone ID: PAT_MRT3847_88819C.1
ttgctaattttacccattccgtgacgaactccaggggctttttaagacttactgggggctggaatgacatgtggaacactgcacccgatacgacagatggagctgagcagcttgaacatcttccggcttctagaaagtccttgtctctcgttgcgacccactcttcacagccagtccttcgaccgtcttttgagatggaggttgcccgattggctgccctgcctgacgatgaagatgatgatgggggtattgagtcagccctgttgaagcttgagggcagatatgagaagaaaagccctgacccgtcgccaaaagcagcagagttttatgtgcctaaaggtgctcctcctcagtccatgaagcgagaggattctcatggcggggatgaagaaacgcccgaggaagaaaggcagactcacacc

SEQ ID NO: 130467 - DNA, 772 bp, Glycine max
  unsure (1)..(772): unsure at all n locations
  Clone ID: PAT_MRT3847_8881C.1
attgaaatctctgttttcaatagttgttccttaacttgggttgtgttctctagcttgcgtgcgtaacataatcaattaagaagctgctattgtgattcgaaatcagaatgttgcgaagatggagcaaagcagttactccaatctccaaatttggatcgcagagtcatttgaatttcgtgaaggacgtctcgcgccaaacctacgccggggttgcacccgcgccaacgatagaggacaaacctcaccgccccgtggttaacctagataaaatgttttggtctaaaccctgttcgctggccttgcccggtgactcacccctcagagttgaagaacctgattatcagggcatcaagcgtttaatgctcaaactcatgctgttttatagtaagcagagcaagtcaattcgtggggctaatgttgtgtaccaaagaatcatttctcaagttgataaacctcccatttatgaaggtccattctgctcacagcaatataaactatggctgtagctcagatgcatttatgcacttgttatgattgggtatacacaaaaggcttacttgcgtgcctattctccnatatgttttaagctcttgctgcctagggnnnnnnnnnnnnnnnnnnnnnnnnnnnnnnnnnnnnnnnnnnnnnnnnnnnnnnnnnnnnnnnnnnnnnnnnnnnnnnnnnnnnnnnnnnnnnnnnnnnnnnnnnnnnnnnnnnnnnnnnnnnnnnnnnnnnnnnnnnnnnnnnnnnnnnnnnnnnnnnnnnnnnnnnn

SEQ ID NO: 130468 - DNA, 164 bp, Glycine max
  Clone ID: PAT_MRT3847_88820C.1
ggctcgagggattactaaaatattgggtgatcctctattgcttcttagcaatggaacactacatcgttaggaattcggaccctatacactactgtcctggttattgtacttgcccagtgagtgggaataccacatggattgaccataatacttttatcctttac

SEQ ID NO: 130469 - DNA, 245 bp, Glycine max
  Clone ID: PAT_MRT3847_88821C.1
atttttcacatttcaacgctatcggccattcatattttaacatgtggaagctcgtgccatggaaatttactgcgcaatagatcaaagccgcaagaccaaagattctaaaatccgataaaactacatgaattctgcccatcaaatgaaagaccgaatccctagtcgagacataaatattgttgctcgcagccacatttcatgccttactcgtcatccattcccacagcgtcatgaccgaagttttc

SEQ ID NO: 130470 - DNA, 344 bp, Glycine max
  Clone ID: PAT_MRT3847_88822C.1
ttgttttttttttttttttttttttttttttttttttttttttttttttataaaagttggcttatatcaatacaagaaatggggttttaaccatacaccataactggttaggaagaacccatctgaggaagaaaatcagccaacggtctctgggtattgagcataaccagtgttagctccgatctatgaaaggggagagtgagaaacactattggtatggatgaaaaaaaacagaccctaaagaaatagtattaggtaatgaagtctgcaacagcactacatatgttacatagatactaaacctgaaatggtctgaaacagagcgacttgcatgtggggggcat

SEQ ID NO: 130471 - DNA, 222 bp, Glycine max
  Clone ID: PAT_MRT3847_88823C.1
ccacgcgtccgcttaaaatgatcacctttcaaagtaaaagaatcacttgattcatgcataaggaagaactacgtaggtctgatttcctctccaaaggagggtacgtaggagcagaagccccgcttttgtcaacctcaaaaaataaaaaagaaataaaaaaaaaaaaaaaaaaaaaaaaaaaaaaaaaaaaaaaaaaaaaaaagaaaaaaaaaaaaaaatagg

SEQ ID NO: 130472 - DNA, 271 bp, Glycine max
  Clone ID: PAT_MRT3847_88824C.1
agcaattacattgtcaccacaaacagaaaaatacattaattttagatgatgtcaatttgcaacgttgattagtgatattcattattccagaagcaaaataaaaattacatattgatttcagcataaagtgagaagtgtatgggctaaaaaagacaaatcaacaagtattatcaccaatcaccataaagtgaaataaatataccagttttagaatttaagatcaatactcgtatgaaggatactagttagcaacattgacaatcattaattc

SEQ ID NO: 130473 - DNA, 292 bp, Glycine max
  Clone ID: PAT_MRT3847_88825C.1
aatccctgctctttacaaattttcctaaatatataccggaatccctcaggttcacactttcagattgagggaacattgttgcctgtagcccaactgatggttctcctgacaacacgaattcacatgctgccctttgaagcgggcaccatacgaaaaacctgagcttaggcttaggctaactaaaaaagccattaaacctcactgtttccagcgctctggtcttcgatcattctactatgctgcttatgacctcaccatacccttctacctctatcatgttgccacccattac

SEQ ID NO: 130474 - DNA, 741 bp, Glycine max
  Clone ID: PAT_MRT3847_88826C.1
ggcttcaaaacgctaaaatatatcaataatatatcaggtttcattctcctcaaaaccatcaaataataatagaaaattttctccgaggactaaagcaaacaactagaagaaaatataatatccctacacaaaactgaaatttaaaaaataaacagcaaatggagtataagtttgtagcataaaactgaaccaacaagccccaaaaaactttggaatttgttttttaagttcgggcaggagctcctactccagcaggacgtggggcttgaccaggctgaccaggccttggtgcatcatcctggcaaagagatcaataaactcatcaaacaagagcaggtgttacataaaacaattttatatgcagataatcagagtctatccccacaaatatagtaatctcctaattcaaactaaaatgttaaatgaattcccttagtacattcaaaaggaacaataacttttctatctttctttaaccattaaccaactgattgaaatatcaatttttcatcaagatagcaaaagcaaatacaagtttgtatagaattccgaatcatacaactcaattgtaagaatagaaaaaggcacgattttaatacgttaaattccaatctcagatctttccatccactatatcaagaataaaccacaaatttcatcccccaagtattaccttcgcttagtagccccttgagtcataaaattattcgagtcatccatgagggcctaaaatattaaata

SEQ ID NO: 130475 - DNA, 2155 bp, Glycine max
  Clone ID: PAT_MRT3847_88827C.1
ggctcgagaataatctataatgtatataggttttctttatagattttgttaacttatttggttaatcattttttaatgtctcaggagggatgtttactgatttttctaatttgttcaagccaaggtcctttaagtgccaatgatcagtatactatatatatcccaggaacagtgaaagtactagtttctatgctcccaattttttttttctctccattgattttgtgctttgcttgtctactatgttactgccagttgatgcaagggaacatatggttagtaccaaatgctcaaggttttcctcaagtcatggccctttttcttcggtttcaactgcggcggtctattgccgtatccatctctgaacctggggaaaattctgagccatccaattcaaattctttctttagaggtctgccaggatgcttgtttgtccatgtttttcatagcttggtgtgacaaaaataactgaatttggttattttgtttcgggttttcattgttcatcttctcgtccctgatctgtttggggcccagctctggggagtggggggggaggcgcgctatcgtgctttgctaccccctacaagggttgctttgttcgcttccccggcacgtcctgcatttcagaaagtccattgcgaggattagagtggagctttccactctctttaggcattgcttctaggttcctttagcattgactgtattctgggcttttttttgtctttccttagtttgtttctaaatttctgtctattatgttttgttatatgcagttcatgcaggggaacatatggttagtaccttgtaatcatggttttcctcaaagcatgacacttcttcttcggtttcaattacgaccgtccattaccatagccacctgtgtgtctggagaaggttcagtgtttagggattccaaattcaatgctgagaagtctgcatggtctttcttgtggacaatgtttttgtaaatatagcagttacgaaaaggatgcttcagaaactgcatcgtggtgtaacaagttcagaagccggaattggcctgtgaacgttgcctggactgcaaggacagacgatttgtgggaaagttgtaggcattttcgcgcgtgatatagacggcttcgaagttgccaccaggattcgaaagtttagaagtggaaaccggcctatgattgttgccttgactgcaagtgcagaagaagatttgtgggacagatgcatgcaagttggtattaatggagttatccgtaagccagttttgttgcatggaattgctagtgaactcagaagaatcctgatgcagggaaatattgtcctgtgagaatggaatggagggtgcaagttgtaatactttagcatctcaagtattattttaaatcacaatattggaagaattccaatacaatgctcagtggtctgcaagttcttttagtcgaaaatgatgatgtaaatagagcagtgacccaaagattgcttcagaaactaggttgtgttgtaactcctgttgcttcaggatttgaatgccttactgtcattggacctgcaggatgttctattcaagtcattcttttagatcttcacatgcctgatttagatggctttgaggttgccacgaggattcggaagtttagaagtggtaatcaacctatgattgttgccttgactgcaagtgcagaagaagatttgtgggaaagatgcatgcaagttggtattaatggagttatccgcaagccagttttgttgcatggaattgctagtgaactcagaagaatcctcatgcagggaaataatgtcctttgagaatggaatggagggtgcaagttgtaacacttaagcatctcaagtatttaagttattattttaagtcacattcttggtagaattagaacacagcactctttggctcccccttgctagcaatttttagcttagagatgttattatacaaacgattttcataaggaagaaaaaagatggtatacagattagtttcttttcaatgtcttcacgttgttattgtcttgtatgtagcttcaaatccaatacatgcgtcctcccacgtatccatacaatcagaagaatgaaataaaaaattatctttgtttttttcaaagaaacaagcacccacgcgaagacaaagaaaagagagggg

SEQ ID NO: 130476 - DNA, 371 bp, Glycine max
  Clone ID: PAT_MRT3847_88828C.1
tttttttttttttttttttttttttttttttttttttttttttttttttttttttcccaccataaaaaaccgagggaaaaaaggggggaacaataaagggggaaaaacccaattttccaccttttccctccaaaaataatggacaaaaagaccccatttttcccaacccaggtaagggaaaaaacccttttttaaagaaattttgctcggggggcatttccggaaagaaccttggtaaaaccaacaaaaaactgtttaaaggaggtggggcgggggggaaaaaaaagggtttttaatagccaaaaaacttgggatttaaaccaccaaaatgctaaaaaatttttccttaaaaaattttggggttcactggg

SEQ ID NO: 130477 - DNA, 441 bp, Glycine max
  Clone ID: PAT_MRT3847_88829C.1
ttaacaaggcgcggaggacatgcagactgtttaaaagaccttaccgaccacaatattcttgggcccaaccagatacatgacctgtggacgcaaatactaactaaaatttgctcaggtgcctaatataacaagaagaagaaggccccggaaggtgttggccgtggccgaggccccattgccgagctaaacaaagagaattttcctctcatgacaagccctttgagaaaaaggagaggaacaaattgtttcccaaacctggcacaaaaaactttgatgatccctaaaaggtagaaaacccggcctataatttaaaaacccttttggccctatacccccagaaggccaccctgggggcaggccttggttgccacattttaaaagggccgggaacccccccattggaagtttgaaaaaaaaccgttttaacaccctaaacaaggg

SEQ ID NO: 130478 - DNA, 667 bp, Glycine max
  Clone ID: PAT_MRT3847_8882C.1
tctgtttgcgtcgcttgaagcaagagggaaaggagggtgttgaatttggccagtacctttatgagatttacaatcacgatgtggagctaagagtgtccaaagctggagttaacctactactgactaagtggatgaaagagcttgagaagattttttatgggaacattgttgcttatgatactgccatacttctggaagctaaaccgggtgatttttctaatgttatatggaggaatatattctctgaggatggttcttcaacaccagatgctgctgcatctcaatcagtgcaggcgatggccagatatgctcgccgggaagtaagttgtatgaccttaacagataaagaagcactattttcagggaattttatgttcacctctttgaagcatgagaacacaaacggaaaggggcctcaatgataaagtggcgatttctaaatttgtgatttagtgaattgaaaatacacgctgttcttattttattttattttatttatttatttataaaaaaatgttgaataattatgacaaaaagctcatgtccttctctgtaaggctttatacatgattagcttggggcctagaaactagaattctcatattcttgccctgtaagacgagaatagaaaaagggcagaagtgattgaaaagtgttgttctttctt

SEQ ID NO: 130479 - DNA, 179 bp, Glycine max
  Clone ID: PAT_MRT3847_88830C.1
ggttaagggttgctggtatggtctactggcatttgtcatcagctattactcgctctatggatcttcctagagttgctggagaaaggaatcgagatgaggagtggcatcctgtatctcaagtacacgatgtattcgcaagagatgactgcagtggatttggtgatactactggtaagaca

SEQ ID NO: 130480 - DNA, 416 bp, Glycine max
  Clone ID: PAT_MRT3847_88831C.1
tccatccctccatttcttacgttaggtaattgagtatgcttgtttagaatgttgatgctatattatctcaaatttcttttaaactaggctcggccgtgttttgctaggtactaaaattatttattttgatgtgtttgtgggtttcaattctcctatattaatccttttattttgtcaaaacaatctatgcccagtaacttttctctcaagtgtgcatccaatacgataatcatgttgaattgatgcttgattcattcatgtgcaaatgatacttagagaacacgatgatgctatttttactgaaaactatgatttttttaatttaacattttatcaaagcctgaatcttttaatacaggatcagatttatacaattttaattaatgtttctccatgatgaaattacactaataaaa

SEQ ID NO: 130481 - DNA, 381 bp, Glycine max
  Clone ID: PAT_MRT3847_88832C.1
ggatgtgttggtcaatgcgcagtgtgcgacatcgatcatcgtccgagaacaatcgtggtaggattatatacttaataataatgagacgagtgggtggcttcttagacttgttcggttcgtatgcatgttctgtccgttcacacattattcctctccagtcatgagtcgtcgattggcatggtttgaggaacgccagagtaagaataagtctcggcgaatgaaaaggtactggatgtgaaagggatgcctcagtcacctcccagctctagtatggttatacatctcccactgatattcactcctcacgcacaggtggttctcatgttacgatgtgatcacatgcatgatctaagttgatccaggatggaaataacttcaggg

SEQ ID NO: 130482 - DNA, 266 bp, Glycine max
  Clone ID: PAT_MRT3847_88833C.1
tgcattcggccaatctcatggccattgtgggataaggtttttggttgttgaatctttgatgaagcatgctggctgaattataattaaatgaatgtcctctgttggattattttttgtagaaacgtagttatgcagtattttagttaggattcatgatgggatacctttgtgaaatgggtgttgtattccaaggggctgcaaactttctggtgcttgttgacagattgtgggttatcgtttgaaatggcatcggtatccagtcaacc

SEQ ID NO: 130483 - DNA, 380 bp, Glycine max
  Clone ID: PAT_MRT3847_88834C.1
tatctggtggggcaagtccgtgggcatcatgttgaccgagctggagaaagccttgaactctatcatcgacgtctaccacaagtactccctgataaaggggaatttccatgccgtctacagggatgacctgaagaaattgctagagaccgagtgtcctcagtatatcaggaaaaagggtgcagacgtctggttcaaagagttggatatcaacactgatggtgcagttaacttccaggagttcctcattctggtgataaagatgggcgtggcagcccacaaaaaaagccatgaagaaagccacaaagagtagctgagttactgggcccagaggctgggcccctggacatgtacctgcagaataataaagtcatcaatacctc

SEQ ID NO: 130484 - DNA, 442 bp, Glycine max
  Clone ID: PAT_MRT3847_88835C.1
ggtgcgtggcgctcactggccttgtgggggagttttctaccggaccattaatatactgcttgtgtacatacgacgaaatgatgataccaatgactgggcaggtatcgctctcatgctgtgtagacctaatgctgccatatatgctatggttgagaagaaaatcattgacggttgtgcgtatcaagaaaccaaatacgggggaactatttggtttgatacagatgctctcctcaaactcactacaaatggtggttatgttaataaagagaataaggtgaaggaggcttttaaaactcatgacgtgccgaaaatggtctctttccattggggaactggggacgggccaaagattggaggtgagcttaagtacctagtgccctgtgtacctatgttgttgaaggatgagcacataattctatggagaggtaatgtacacgaatat

SEQ ID NO: 130485 - DNA, 1025 bp, Glycine max
  Clone ID: PAT_MRT3847_88836C.1
cccgcgtccgctgaaagtctcttcctttttcttatttatattttttttatattccaagaaaaggtctttttttttttttggtttttcagtggcagcaatgacggaggtgctccatttctcatcctcttcgtcgccagccacttgttcttctgatggcattctccaagaagcaccgccaccaccaccaccttcttcttctgtgagcgcggtggtggacgggttttctacggtcaccgactgtgacgggtgcggggtcacattcacagacagaacgcagcagcaggaggaggagctctctcttctggcaattcttgtgaccctcttgaggaaatcgcttattgcttgcaacaagagcgaggagggccatggcgccatggagattgggtggcccactaacgtgcgccatgtggcgcatgtcaccttcgacaggttcaatggcttcttgggcttgcctcgtgagttcgagcccgaagtctccacaagacctcccagtgctagtgcaactgtttttggagtttcaacagaatccatgcagttatcatatgacacgagagggaacagtgtgccaaccatactgctactaatgcaaaggcacttgtatgctctcggagggttgcaggaagagggaattttcagaattaatgcagataatagtcaagaggagtctgttagggatcaattaaataggggattggtcccagaagatgttgatatacattgtttggcaggacaaattaaggcttggtttagggaactgcctactggtgttctggattctttatcaccagagcaagtaatgcaatgccagactgaagaggattgtactgaactggccggccagctacctcacactgaagcttcccttttggactgggctattaatctaatggctgatgttgcccaagaggaagacttgaataagatgaatgcacggaacatcgccatggtttttgcaccaaatatgactcatatgggcagaccctttgactgcattgatgtatgcagttcaagtgatgaacttcctg

SEQ ID NO: 130486 - DNA, 672 bp, Glycine max
  Clone ID: PAT_MRT3847_88837C.1
ttttagggggagggtttgtcaagcatatgcaggaaaatgagttccttcaagaagtatttaatttcccacccaaaagaagatattttaataccaatgaacttcggatgtttagtggtgagaagaaaatgtttaagtctccaaattcagttcagaacaaggctagggcccaattacttaataagccccggttgttatttgagggcagaaacttgggtccctacccagccaaaatggttgatgactgatgcgttttgaaagggacatttaataattagcaggcggtaacagcgattgagattatccattgtaatgcaataaaagaagtttattataaagctaatttcagggcaatcagtgagtgatatattcccgtgccatgactcaaaagcctcgtctgggtataatctgctgaggttacaaagcgtgagttttcctttattctagtttcaaattgaagaaatcagcgtttgcttccaaccctggtttgtcaagggggtttccctttttttttttttttttttattagggggataaaaagttgagtaattttttccaagtaaatttttcttctgtttattcataaagggatcttccccagtgagatttttacttggattctttcccatgaaaatttttcctatccaaaaaaaaaaaaaaaaaaaaaaacaaaaa

SEQ ID NO: 130487 - DNA, 403 bp, Glycine max
  Clone ID: PAT_MRT3847_88838C.1
aagaaatctgcgactcttttctctctctgtttcggtggtgcctgactgcttcatccctctttcttgcgactcttgtatctctctctttgtttcggtgaattgaagcagcggaggagatggcgagtcgcatgaaggaagatgagaagaacgagcgcgtgattcggggtcttctcaagcttcaacataatcgcagatgcattaactgcaacagtctgggaccacaatatgtgtgcacaaacttctggacgtttgtttgcacaaactgcagtggaatacatcgggaattcactcatcgagtaaaatcagtttcaatggctttattcttattagcatggttggtgccagtaatgttgacaggctccgaaactttattaaacatgtttatgtggatagaagattcact

SEQ ID NO: 130488 - DNA, 357 bp, Glycine max
  Clone ID: PAT_MRT3847_88839C.1
tacggctgcgagaagacgacagaagggtgatacagtaactaacataagtaagattgaatggtaggtaccaagggagtctaactggtttaagagggtatatgactgtagtgatactgttttgatttctattgaccaaaataaagattcaacggtaggttggcagcattcccatgtaataacggctaggaacctcacagtcgagtgtaaaatgttctctatttttggttggtaattattaatatttgcactgatttttttagcatcgcatctacaaactaaacgaatagcacggttgggaaaacctgacttgcagtggaagcagctgtaaaaagaccactcttcgctaactaactacat

SEQ ID NO: 130489 - DNA, 300 bp, Glycine max
  Clone ID: PAT_MRT3847_8883C.1
ggggcaaagcatctcaacacatttgcttttttattttgttctcaccccttaatttcccatttgaaggcccgattccagaaacccaaaatacggggtgaggaaacccccaaaagcaaaagggggggggaatggattttttgttttaacaaacaaagggggggggggggtacaaaaggttggccaaattttcacacttaaaagccgggggggttggtggggatgaaactgatgcccttgaattggggaaaggtggcgaaccctatgatacgggtgaaaccgctgggggatgggggcttagcc

SEQ ID NO: 130490 - DNA, 138 bp, Glycine max
  Clone ID: PAT_MRT3847_88840C.1
ttgttcgattactgacgctcttcaattacactaatggctgtcaccttcttagatcctcacacctaagagggtatcaaattccccgattaattcctttttggaaaaatctatatctcttgtcgatcaattgacataaga

SEQ ID NO: 130491 - DNA, 417 bp, Glycine max
  unsure (1)..(417): unsure at all n locations
  Clone ID: PAT_MRT3847_88841C.1
aatttacaacacacgttaattaatttaaggattttctaaatctccctatttataaaattacatatagataacgattttcataaattgttgacaatttggcacgtcaagtaagatttgcaaatttccttatttgatgcgacatgattagaaagtattatcgggtatagagtaattgatgaaagattgaataaacttccactcatagataacaagaaaaaatgttatttagattctggtttgtcatttggaaaggttagttttctttaatttcactaaaaaattaaatgcataaattnaattttaaattataaaaagaagtaattacttgattttttttctaaatattatttaaaaatattcaacatatcttattatggtatcaatatattcgtactttacagttacagtaatttttga

SEQ ID NO: 130492 - DNA, 169 bp, Glycine max
  Clone ID: PAT_MRT3847_88842C.1
ggagaagtgtcggggattgtaaagagagaaatccgaatagaaaaagaagctagctagggtttcggcgcgaagaagaatggcgaagaagacagtcctgacataccgaatcgtgaaccaaagcacctcggcagaatacatccttcaaccagcacaacggattgattaccca

SEQ ID NO: 130493 - DNA, 411 bp, Glycine max
  Clone ID: PAT_MRT3847_88843C.1
gtttatcttgcgaacacgcgtactgtgtcaccaggattgtgtcaacactatgcatgggaagggcgctgatcgataatgaaaggatcatttctctatgcatggaatgaaccagcagttgttgctacaatactacaaatggcagaggtctaatgtatgctatggaggaagagtgctctttacacaaactattatatggggctactgtggagcatatgctagacagggagaccaggggggattctaacgtaatcaaactagacagaattctaagactggctattgttggttagcacacagaaatgacttgatggataatgactacatgatccatggataacaatgtctgtgcactgacgttatactgactgacacctagcttgatgaggcgacgcagagacatgtacatgtggc

SEQ ID NO: 130494 - DNA, 117 bp, Glycine max
  unsure (1)..(117): unsure at all n locations
  Clone ID: PAT_MRT3847_88844C.1
cttgattactnagtnggngcacaaactataancaagtatantgatggcagtacanttgattatagtntgtgcgnnaactagtaatttttgctgttanaagaacttgattatagctcg

SEQ ID NO: 130495 - DNA, 452 bp, Glycine max
  Clone ID: PAT_MRT3847_88845C.1
ccgggaggagacggatgaaagagaagatttcctatatcaaatcagaacaaaagccttcaacctgaggcccacagtaacaggaaagtcaaatgataccactggtcccaccgcaaacgtcaaagttacagcaattttggagaaggcaaatgcaatccgtcaggttgttgcgagtgatgatggtgaagatgatgataactggagtgatacatgacatttttttttatttcatacatgagcagtcttttatgttttttagcctcttgaagtgaagttgcatgaggctttgttttattgtatgtacacacgtgtgaataaatcttgtttatctgttattaagtgtaggcagtttcattcattttcgtatgatgaatttatgtcttctttagtttttgctttgaatatctgggctgaccctatgtattgtgagatcacaaatccaagccattgtttat

SEQ ID NO: 130496 - DNA, 269 bp, Glycine max
  unsure (1)..(269): unsure at all n locations
  Clone ID: PAT_MRT3847_88846C.1
taggagaactcgatcgtcactnntgaaattgtcatatggtcgtattctnnnttgtntgtgntgcngcaatgtggctgattcatgccacgctacgtacactcgtatatggaatctacaaccatctcagatagacgtgnggatnaggggattattctgcgctgtntngaatacttagacaagnctntnaaggctaaggatccatcaacatctttagcncattattttnatgtgtatcaggaactagtatgntgccctcatgactgcnatnn

SEQ ID NO: 130497 - DNA, 244 bp, Glycine max
  Clone ID: PAT_MRT3847_88847C.1
tcgaggtgctcctggatcgcatgcgttgagtgatgtgttgtcagaggtcgtctttttctgtctcgatttctctgtgaataaggcaactgatggctccgtcattcatcgcttgtatgacgatctctggttctggaacaaagactacgataaatgcgaagaagcctgggcgaaggtcttggagtttaaagatgccatgaccgttaacctggacgaaaagaagactggtagtatccgtgtggcgaac

SEQ ID NO: 130498 - DNA, 579 bp, Glycine max
  Clone ID: PAT_MRT3847_88848C.1
cggaaagcaaagtgaataacaacttaggggggtaaatgagctcctggggaagtttgagaaccaatcaagtaaatgcaagtacctatgcaatttagttgaatcaatataatccagtgttcaatcatctaaaagaactttattttccttacagaatatctagctaaggcttcacatattctctgataaactgttctaactgagagatctcccctgtaagaccagaagcatcttgaagtctaactttgttagggcactgggtgaaagaaaatggttctccaggtaccccaaggttgaactcatttgcaatgtcagctggtgatattgcacttcttgattcccgtaatttgtcaatttccttccccatctgtttgccgatgaactccttggaatgagcagtgactttgtccgttttgttgcagagaataagtaacggaatcttcttcctcacgacacttcccttggtcaatatatcatacagatactctgaagcagcacgacaattcggtaagaagtccacagcatcaacaacaaacacaatggcagcagccttgggcaagtactcaaccaccttgggctccg

SEQ ID NO: 130499 - DNA, 654 bp, Glycine max
  unsure (1)..(654): unsure at all n locations
  Clone ID: PAT_MRT3847_88849C.1
ggtccggnaattcccggngtcgacccacgccgtccgaaattgttagtaactattgaataacatatgatacgcttttataatattatttttttatcttgataataatatataataactaattattatcatattggttatgatataatttaacatttatgtgttttatacattttcaatggatttgtttatgatcatctgacaacttttgccggcgagggattaaaagtttcattagtaatttaatgataatatccaaaaattaatttatagtaataaatgattataatatttatagttttatcattacaataaatttattttggagtataaaaatatagattaatcacattttgatatatatatatatatatatatatacacaccagatcagtaagcgatccattaattcgatctctcacctatcgatcagtgtctcaatcgagttggtgactaagccggttttcacaacactacaaccaagtatattttagaagctagtttattgtaaatctataatattgggaaaaaaaataaagcgagattcaccaacaaatataacagggagaatgagagagggcaacaccaaccacggaggaagtgctgaaagtgaagtgagtgagaaaagagaggagaatgggtaccataaaggagtgc

SEQ ID NO: 130500 - DNA, 476 bp, Glycine max
  Clone ID: PAT_MRT3847_8884C.1
attaaattctacattaaaggtctgaaagcttctgagatgttcttaaggaatgttagatatggaattatggatatagtgacaggggctgttcaatataccctgataggattggcatttaactcaagccttattattattacttgttttgcatttcttcaattgctttctcttggtccataacattgtagtattttacaatacgtgattagatgttgaaacgcaatgcaggtctcttttagtgatgagaggaaacagtgctgacatggcaaggtacgtaatgtgtccatcccctaacagaagggtgagcatcaccttctttaaagtgagaccagactccaatcattgccaatcaccaactcctaccatgacaactgcgatgactctttggcacccaagcatttttagcccttttactttgccaaagggacctctaaatggctatgaggctatggatatgatgccccaatggggatttc

SEQ ID NO: 130501 - DNA, 372 bp, Glycine max
  Clone ID: PAT_MRT3847_88850C.1
ctcttgttatgatgacaactttgcagaatctttattgatgtctcaattcatatagcgctatgcactgggattaccaccttcaatgtatacaatcctggaccctaaacataaactaatatttattccatatggagcgtagcgttctaacaaggtttgttgcatgtaacatacatcatccctaaatagtctacacactcctaaaccctgactttcaaatctcctacaactgactgcaattctttataatcttgcaatacactattttcatttcagcctcacaaaatgtactcatgtgccaacaattaatactggtctttgcgccctgatctctggagccatgatgacttacaagaccgcatatggattccttgt

SEQ ID NO: 130502 - DNA, 2498 bp, Glycine max
  Clone ID: PAT_MRT3847_88851C.1
ggaaaaggaaaaatccaaaatatattcttcctaacggcgcatgccgggttctctgatcttgcctcttgctctgtctcaactcgctctccttccacccatccccccctttattttccgcatttctcaactctctccgataatacccacccccaaaacaaactcttcttcttactcttaccccctcttccttacttccactatcgccatggcctcccactcaaaccaaccaggtcccggagctgaagggctaggagagaaggaccccccaacaagtttccagaacccgctttctgagatatccccgtcgccgtctccgtcgtcggcgccggcgccggcgctggtgctgtcgaactcggggaagcgaatcgaccaggcggggaagaagaagtacgtgaagcaggtgacggggcgccacaacgacaccgagctccacctggcggcgcagaggggcgacgtgggcgccgtgaggcagatccttgaggatgttgattctcagattatgggaactctgagtggcgatggcgatgaggatgatctgaacgcggagattgcggaggtgcgtgcttgtcttgccaacgaagagaacgagctcggtgagacccctctgttcacagctgctgaaaagggtcaccttgatgtggtgaaggagttgcttaactattccaccgctcagactgtttccaagaagaaccgatccggatttgatccattgcatattgcagctagtcaaggccaccaccccattgttcatgttttgctagattatgatccaggtttgagcaaaactattggtccctccacctccactccgcttataaccgcagcaagaagaggtcacacggtcttggtgaatgagctactgtcaaaggattgtagttggttcgatattactagatcctatggcaaaaatgcgtggcattgtgcagttcgtcaggttcatgtcggagattgtaaaagccttgattagtatagaaccacagttggctcggaggacagacaagaaaatgcaaattgcattgcatatggctgtgaaagggcagagttgtgatgtggtgaaattgcttcttgaggcagatgctgctattgttatgcttccagacaaatttggtaacacggcgttacatgtggcaaccaggaaaaagcgagtagagatagtgaatgagttattacatctgccagacaccaatgtgaatgcattaactagagaccacaaaacagctcttgacattgctgaagatcttcccctctccgaagaggcatcagatataaaggactgtctttctcgatatggagcacttagagctaacgagctcaaccaaccaagggacgaactgaggaaaactgttactcaaatcaagaaagatgttcacacccaacttgaacaaaccaagagaaccaacaaaaatgttcacaatatttccaaagagctaaggaaactccacagggaaggaattaacaatgccacaaactcagtgacagtggtggctgtgctgtttgctacagttgcttttgctgctatattcaccgtgcctggtggggatgatgatgatggctctgcagtggtagcagcttatgctgcttttaaaatcttctttgtctttaatgctatcgcactttttacatctttggctgttgtggttgttcaaatcactttggttagaggtgaaactaaagcagagaaaagggtggtagtggtgatcaacaagctcatgtggttggcttctgtctgtacttcagtgacgtttattgctgcttcttacatagttgtgggtaagaagaatgagtgggctgcaattttggttacattagttggaggggtgataatatctggagttattggcactatgacttactatgtagtgaggtctaagagaagcagatcaatgaggaagaaggagaagcaagctgccaggaggagtggatctaactcatggcatcattctgaattctccaattccgaggttgatccgatttatgcgctttgagtttgaacttgcaaccttcaggggatcatgaagaacaaattgttgtgaaaaagatgacaggtttttaggtttgctacttgctccatgttaccactttaagagttcttcactgtacaggaaattgttctcttcggcttagctgctgcttttctaggatcttatatacaaattggaatgaagcatgcatcatcattggaatgaagcatgcatcatcccggtctgtgatttttaagaacaaaatccaacattgctttaattctcaattatgtattgatgtattagcaaaatgtctcccttccctgttcgttactgttttttttctatcactagaattgtcttcggggcctaatctacacaattgacccttgataatgctgcatgctgagttctgatagagaatgaaatagtaatacgtgttaattgtatttttttttatttgttgatatattttgtgttgtgaaaactaaggcttgcaatttgcagataagggtacaaattgaaattttgataaaa

SEQ ID NO: 130503 - DNA, 668 bp, Glycine max
  Clone ID: PAT_MRT3847_88852C.1
aaaagggtggtagaggtgatcaacaagctcatgtggttggcttctgtctgtacttcggtggcgtttattgcttcttcttacattgttgtgggtaggaagaataagtgggctgcaattttggttacattagttggaggggtgataatatctggagttattggcttctatgacttactatgtagtgaggtctaagagaagcagatcaatgaggaagaaggagaagcaagctgccaggaggagtggatctaactcatggcatcattctgaattctctaattccgaggttgatcggatttatgcgctttgagtttgaacttgcaaccttcaggggatcataaagaacagattgtggtgaaaaagatggcaggtttttagggttgctaccttctccatgttactactttaagagttcactgtacaggaaattgttctatacggcttagctgctgcttttgtaggatcttagacaaattggaatgaagcatccattatcattgtaactgttaaatggtgcactgcagggcctaagtaagcacctgtatcttaatcccagtttgtgaaacaaattgaacattgttgtattgatgtattatcaaaatgtgcctgccttccctgttcgttactgattttttacttacatatatactggacccttgattatgaaaccc

SEQ ID NO: 130504 - DNA, 815 bp, Glycine max
  Clone ID: PAT_MRT3847_88853C.1
tgtaactagctcgttctttacaaaagcttctaggtttaataaagcatccaagaatttaagcgtattccaaattgtatccatgcacttttttgaatgaaatgaagtaaatagactttctaaaaaaaaaaaaaagtttcaattgaacgatgcataatgtttttgaaaaataaacacgtgatttgtgcaattaactttcctaaaggaacatggaacaaacaccaaaaatcatcaaaatctatactccttcaattctgattgttgaactacaaagttggctccggcatatactgggggccttaagggtataaccgtctacgaagttcctccacaaattctgctctagaaatcttaatatcaatattagcctcgagatttttcaattgcaccacgccttcttcttttatttcctgctcataaacaagaactatccaagggatccttgattcttttgcatattcgaagtgctttgttcttcttttattgaccaagaattctgctttcaccctagcatcccacagttctccggctagctctgcagcaagtgtaaagtcattccccactatgctcactaagacttctgtcttggttggacgagccatctggttctgatccttctgttgttgctccattatggcaaatactctctcaattcccagacttacaccaactgcaggcactgaccttgagccaaacatccctataaggttatcatatcggccaccagcagcaattgaaccaacctgagtgcctcctttaaaaacagcttcaaatataactccagtgtaataatccagacctctggcaagctcgagccg

SEQ ID NO: 130505 - DNA, 506 bp, Glycine max
  Clone ID: PAT_MRT3847_88854C.1
gggtaaatttttttttttttcggaaaagtaatggtaccatgggataaaagggaccatcaatttacagcttaagtcgggataaaacatgtcatttgcgcaattaaatttggtaaaggaacatgaaacaaacaccaaatgtcatcaaaacctgtactccttcaaaattctgatgtcaaaatgaatgtggaactacaaagttggctccggcatatactgggggaccttaagggtataaccgtctccgaagttcctccacaaattctgctctagaaatcttaatatcgatgttggcctcgagatttttcaattgcaccacgccttcttttatttcctgctcataaacaagtaccatccaagggatccttgattcttttgcatattcgaagtgtttcgctcttcttttattgaccaagaattctgctttcaccctagcatcccacagttctcctgctagctctgcagcaagtgtaaagtcattccccactatgctcactaagacttctgtc

SEQ ID NO: 130506 - DNA, 368 bp, Glycine max
  unsure (1)..(368): unsure at all n locations
  Clone ID: PAT_MRT3847_88855C.1
ccagatgacaaaagacggggacaggggagaatctgctggtatcccttantttgactatgcgctctgttacctatgtgttcgtaactgctatgttcacttgacaagatttactagcatggctcattcatcaggtttgcaatactcgtcgtagtgatcacacagatccttgtcagtctagtcgtaacgtacaatgttcaagatcgacgcatggactagacccgtgatccaccttctggagatcaagactcaggctcaaatacgtatgctcatccatcgcatggctatgtaagcatctccgtctcatcatatccacatattcgaattaatcgaccatcacatccaagttgaaacggtggattaatacctcg

SEQ ID NO: 130507 - DNA, 386 bp, Glycine max
  Clone ID: PAT_MRT3847_88856C.1
gctcagcaaaaatagataatatattaattgagtaccagaggtactaaatatacaaacggggcattataagaccacagaccaatggttccattgtcagactaatgtagtcttgatggaaaccagagcctagattacatgtgaccagtattttgcacctatacattgtactgtcgacaactaatacacaaaccctgatctaagattgctggaccaatgattgtagctgatgctgaaatccttctctaagtgccgaagccacgtccacaataaaaaagatgcatcttccatgattttattagcatcaaatgattagaccaattctctaagctactgcaatactaagcatgaccttccaacataattagaccaatgggagttaatttagc

SEQ ID NO: 130508 - DNA, 504 bp, Glycine max
  Clone ID: PAT_MRT3847_88857C.1
caaaaaacccgggaaacccaaaaaatcctaaccaaaagggaaaaaggctaaaaaaaaaaaccttttggacatttaacccgggggggaaaccccccaaacaaaaaaaatcttcggcctattttaaaaaggtccaccaaaaaaaaagcttaaaagctaatggccaggccccaattggccccaaaaggaacaccccccgcccccccgttttttaaataggaggggggccccccctaaagaaaaaacccccaggggggggaggggaacaaattttcaataacctaaaccccgggtttaacaaaaagggcaaacaacctaaccgggccaaaaaaggttggaaaccaaaaaagccccccccaaagtggggccccccgaacccaaaggaattgaaaagggccccggggattccaggcggggggtgaacattgcccccggaaaaaaaaaaaacggcgggttcggggtaaaatggatggatggggggagccacccacccggggggaagggctt

SEQ ID NO: 130509 - DNA, 162 bp, Glycine max
  Clone ID: PAT_MRT3847_88858C.1
aattggggtcgaggattggaaacctttaaaaacacggccggtttttttttttgtgcattgggcccctgtggatcagggtttggtcttcggcaatgggctctaacttcaacagtatgggttttgttcataatatcaggagactttgtgaatgcctttctttca

SEQ ID NO: 130510 - DNA, 779 bp, Glycine max
  Clone ID: PAT_MRT3847_88859C.1
gctgcggccccaggcgagttgctgcatcggaaatgttcggcagaatcagagcatccacttcgtccctcgacaccttagacggttctccgtccaagattctcaaagacgacaccttctccatctacgaggctactctcatgaagctaaagcttggtgcgcgacgcgatacaagtgaggttacaaatgattcttcagttaattcaccttgtgcggaagaagcaaatctcaagccagatttaaatcctgcaacaagcacttcttgttccgagacaacgatgatggacacagagtctgataactcttcacctagggttagtgaccacgtttctagtgggaactcggaacagcgaaagcaaagcaacgtttccattctatatttcttcaaagttaaggataccggacacgccggtgtgtcctcttccgaagaggcaacggcatcaacggggaatggaagttctgaatctatctcatcaacttctgttgaatctgattacagagaaaagcctgcccagtgggcacgtggatggtgtttggtcaaatgtgacagtttccgtcagctagacagtatgataggtcttcttaattccccagagtgctgtggatagttctatctgcaccactccatcgagataggctgttgctctctctttagtcgcgtcccatccattctgtgacctaaatgtttctcaacaagcagaatgagggcatgtttatttatataacagatgatggtgatatcttgagagtagtgcataatgaaaaaaaaattccatttaatt

SEQ ID NO: 130511 - DNA, 416 bp, Glycine max
  Clone ID: PAT_MRT3847_8885C.1
ggttgttatattgacacgttcttacgggaaaaaggactccccccatgagaggaaacaaaagcaaccacccgggagggagatgattcttgcccccccgagaaagaaaaaaaaatggctccatgaagaaaaaagagccgatggggcaaaaaaaaaaacgccccaccacacaaaagaacagtggagacccccactttgcccgggaaacgtttttgcccccaaaggaaaaaacagcaactcaaaaaaactgccgactgctgcagaaaaaagaatgactttttgaaaaacaaatcccgccccggaaaaaagaagcccacccaaaaacagcactgggccgggacaaaaataccccgactgttgccaaagacacgaccaaagccaagagctttcagcacaaaaacccccccataggccccccc

SEQ ID NO: 130512 - DNA, 394 bp, Glycine max
  Clone ID: PAT_MRT3847_88860C.1
acgtgcttattgtgcctgcacctaataggatgacccttcatgggaggttgctatcttaacagcgaaattcatatatataaacgactctgatgtgattggaaatggttatacccctgtcctagactgtcacacttctcatatagttggctagtatggtgaactcatgatcaacattgacaggctatccggcccagagctcgagaatgagtctatatatttgatgaacagcgatgctggtttcgttaacatgattgcaaccacatccatgggagcagaaacttcatgcgactgtcctacagtctgtaggtttgctgctacggacatgcatcagacatgtgctgatggagtcatcaagagccatatgatgacagatcataccggagccaaggacacc

SEQ ID NO: 130513 - DNA, 782 bp, Glycine max
  unsure (1)..(782): unsure at all n locations
  Clone ID: PAT_MRT3847_88861C.1
tgatgcctgcagttacggacctttgggagtgtgtcactgtttatctttcgccatttcttttgtcatttatgctaccatggcatccatgactgcgagcatggtgggggcaaaataaaaggggtttttgaacattttattgacttcttggtccttgcaaagagtaggaaaaaagggtggaatttaacagtaatattgtaattagataaaattgatgacttgttttaagcaattttgctagttgtatatatattttaattatggcaagtactaacttggaaataaaagattttctattgcaccacgcttcttattaacggttctttggactagattaaaattttaaagcatcacatggatatgttccatgcaccatggtcccatctaattcaatgttatcgctagttgtacttgtgggttgccagaagtaatgacaggagtcttctggcctagtggactccgaactatacactgcttctccttttattaattgaatatctagctgcaccaacggtcgaagaattttctcttggcttaataaaaaagagagagagactaattagtgtgtgagaaaaagtagttaagcaacgcagagattgtttgtggttagtggttcattaacaaggtaacgtagagggggaattaaatgagaaatgaaatattgctaactttttccgctcacagtccaaggctatgtatataggcttagatcctcaggtctcgatgaagagaccaaacatatgangcatgggtcactgggccatctatattggcatggacctaat

SEQ ID NO: 130514 - DNA, 238 bp, Glycine max
  Clone ID: PAT_MRT3847_88862C.1
tgtcaaaataaattccccaacccaaaaacgagtttctccacctcagagtcgtcattttgagattggatcaagctcctctggaggtttgagaagtgacaggaaatttatatttgaattctgtacctttctttccgcttcattggtctcccttgtgttaatttcgaaaagcaatgggtgatggatgatggaggaaggatattctcatggaccgtcaaggggcaagtgaccacttcgaagc

SEQ ID NO: 130515 - DNA, 272 bp, Glycine max
  unsure (1)..(272): unsure at all n locations
  Clone ID: PAT_MRT3847_88863C.1
atgataaacgcacaacaggggcggccagctggggagcgacaaaccgccgcacacccggagaaaacgccacaanggcaaaaagcaacgggggcgccgaacgggaccanggacggcacggaaaagccaagaaacacggcancccgggaagaaggaaaaacgcgaacaaacgaggaagagcacccaagaaacagaagcgacagacgggccagaaccaccgaaaaacacacccggaaccacgcgggcaacaacnacgggaacaaccacgcgggaaa

SEQ ID NO: 130516 - DNA, 297 bp, Glycine max
  Clone ID: PAT_MRT3847_88864C.1
gttgggatgaacactggatcttctgggtggtaccattcatgggtgcagctcttgcaccagtgtaccaccaggtcgtaatcagggccattcactttaagttcaagtgattcaatcaaacgtttcatgcttaatcaagttgggaacaacaacatctacatagatcaagccaatgtttgtacggttttggattcatttcattaagatgatctgcttatatctattcttctgcttaaaatttaaagtctttgtatgtcgtatgtaaagatgtagaattatgattattaggtggtgcatgtg

SEQ ID NO: 130517 - DNA, 302 bp, Glycine max
  Clone ID: PAT_MRT3847_88865C.1
tgtggccgccacataccacatagggggagatagatccgcttccagttgctcgaacgaatttctagcatgcggagcaatggcagacgttgaggtcgatgtgactgctgcagcagcaacagggcatccaaagagagagagcgtacacgaagttgagttacaggggcgtggatctccactcgcctcaggacatgtctagcaatgaactcctctggatgttcagtgctcgcgcacatgaacggttcaacatacgcctcaatcaagcacccagggcaatgatcatgaagctccacaaagcgtcatga

SEQ ID NO: 130518 - DNA, 483 bp, Glycine max
  Clone ID: PAT_MRT3847_88866C.1
catgtttgagagccaattcaactccaaaagccgaaaatgtctcctgttattgcccctttcgtcctcgccatcattggcatcatcgccttgcccaccatcgaaggcgcagtcgggcgtcagcaagtcaagctgggcgagcagtacaaatacgagaatgtgcccggcaaattgatggtcaagcgacaaactgcggccagcaaggagccccagtatttgttcgccggtcaaacggcatggaccacggacggaaaagaccgctttggccatgccgagttggacttcgccactggcacaatgaccatccccaacttctccgagaacgacttgggctcctacaccttcccgcttgagcagcccaacttcagcgcagtgaatgggcccaacggatgcgagctgcagggtgtcggcgggacgatgttggatctgatcaaaacagaatgagcgaagaacagcgactgatcggagggaagagaagaatggtgc

SEQ ID NO: 130519 - DNA, 292 bp, Glycine max
  Clone ID: PAT_MRT3847_88867C.1
cctcaggggctatgccaacttttttttggccgatatcaaacaaaaaccaaaggttctgtggttaaaagtgggaaaagacgttaaaaaccgagttcaatttgtggggggccgcccccttcgaaaaaaaccccaacaaacccgccctgttataaataaagtttttttccaacgggggtttaaggccaaacccctaaaagggaaaggaaatgggcggccccaccttttcgtaggttttaacaaaacacgggtagaaggctccaaggctggggaaggaggttccccctacctgctt

SEQ ID NO: 130520 - DNA, 226 bp, Glycine max
  Clone ID: PAT_MRT3847_88868C.1
accctccgggaaaaggaaaatttatattccccaaggaagccattcaaggttcaaccagttggggtccaggcaaaaagggctcttcttttgaaacgtaacctcattcaaatcaaaggaagttcctttgaaaattgcccaaagaaaaccttgaaaataagttctaaaacaggcttttggaatcaaaatttacagttttctttccacatgtcccaaccttttaacggcc

SEQ ID NO: 130521 - DNA, 1319 bp, Glycine max
  Clone ID: PAT_MRT3847_88869C.1
ggctcgagtcgtgagtttccttttttgttatcttgtaaccgaccaaacaacaaaaaaacaactgagtcttgttcacactgattctgttacccggaatgagcatatattgtttgaattcctcagaaagggagaccttgaattgttggtttgcttcttataaggcttgtagttgacgcctttaggaatctctcaaggatgggtttctcagtggcagcttcgttgggtacctatgttgtgctgagagacactcatgaaacaagaatcaagtgccaatttttgtgcagaaaagaacagaatagtagaattggtttcaagttttcaaagcacaaggccattcaaagtgcaattttttttagcaagcatgagttcactgatttggatgagaggaagagctcagatgaggttaaagaagagattaaaaaatgttatgaactcataaacagattagggagaggagttgtgtatctgggttcttcaaggatgggacctagccattcacattatgtgcaagcacaagagctggctaaagagatagcaaatcttttggactgcacttcttggtcaggggctggaccagggctaatggacgctgttactcaaggttctatgctagcaggaaaaccagttggtggattcaagataggaagagaagctggggaatggactgcgtctaactttcatccatacttaccgtcagaaaattatctcaccttccggtttttctcagcaaggaagcatgggctagtggacgctgtagtgaggaacaattcgtttgataaaactgctgttgttgcccttcctggtgggattggtactttagatgaggtgtttgagatattggcattgattcagctagaacggattggatcaaagtttcctgttcccttcctgttgatgaactatgattcattttattcaaagctgcttgaatttttaaatgattgtgagggttggggaactgtctctaaaggagaggttgcatcattgtggaaggtttgtaacagcaactcagaagctttggcatacctagaagaattctatggcatttcttctagtgacaaaagtaagaatgtaactaaactgtatagcacgtatgaatcaccgtcctcataagaatttttcttttgttttttcttcttcttaataattgttttctttctttaaaaggcttgaactgtagaatattctcctgaattattgcaatattagcaagtttgatggtagccatgtgcagtctcaagttctaattgcaccaaaaatgtatcttaggattcatctgtaatcacagttgtgatttgcataaagtagccaaaggaact

SEQ ID NO: 130522 - DNA, 794 bp, Glycine max
  Clone ID: PAT_MRT3847_8886C.1
cggaattcccggctcgacccacgcgtccggtcgttgtctcgttgtgcatgtgcttggtgtggtgttgcagaaggaggaggcaattggcgaagaggagcaagtgggcgatctcgaagccggccccactcagcatcaagatgatggagaaatctggaccgttcgcgttcgagaccgagtcagggacatcatgggtcgctgacctcaaagaaccatcttccgcacccgtggtcgtgttcgagaagccactcatgaacctcaccttcgtcgaccttctcgctggcacgtcacacttcggcaaagactcccttctcgctgagggcaggtgtgggcccgtttatcgcgctgtcttacccggagacatccacgtggcaatcaaagtcctcgaaaacgccagagacgtccatgatgatgacgctgtcgctctcttcgttgacctctcccaactcaaacaccccaatctcttgcccctctccggttactgtattgcaggtaaggagaagctggtgttgtatgagtttatgtcgaacggggatttgggtaggtggttgcaggagctaccaacgggggagactaacgtggaggattggagtggtgacacgtgggacattattcaaaacggcgccgcttctcgagcctcgccccccgaaaagatggggtggttagtacggcaccgaattgcggtgggtgtggcgcgtggattagcgtttctgcaccacgcggggtcaaggcccgtcgtgcacggacacctcgtgacgtccaacgtgcttctcggcgacgacttcgagccgcgaatt

SEQ ID NO: 130523 - DNA, 513 bp, Glycine max
  Clone ID: PAT_MRT3847_88870C.1
gcgcttgtaattgattctctctctctttcttcttcctactaataactctcagctctcaaacaaaccttgtccctcacagtgccaactctctctctcagagcgtgtttttgaccttaacgtgtacaatacaacgtgttgaaggaagcttagctcagtcatgaattgaaggaccaacttcaagaatcgctcttcaaactcaaatcatgcacagatcttcaacgatccaacttacttcttccttgtggtgaattaagaaaactactgttcgagcttgaagcattccttgaggcttttggttgaatttcgagtgagaattgtccctaaaagaggataggatgaggcttctttagtgatatgatagttctggaaaataatggaggaaagcatcaatagaggggaatatcagcctaatttggctaaacagtcttctttgaggttaggtggcagttttaaatcaacactgtctggaagatcaactccacgaaattccccttcattttggcgacttaattc

SEQ ID NO: 130524 - DNA, 215 bp, Glycine max
  Clone ID: PAT_MRT3847_88871C.1
ctcaaatctttcaaactagaagatatatcatgcacaatagttaatttgaatgtgttggttcataccttcacatatatacttattactgattcatttcatgctcaaatgtacattaaacactatatcattcacacataattacattaattacaactatataactacatcttaattaataactacaaaataaaataacaaatgccatccacttacta

SEQ ID NO: 130525 - DNA, 314 bp, Glycine max
  Clone ID: PAT_MRT3847_88872C.1
atgccccaaaagaaatataaaggcaaagcaaatataaaacccccccggagggctgaaaccccgaccgggagaactcacccccggatgcgaatatacataccgcaagcccaaaaactatcgggtccggggggaaatacatgttctctaaaaaaccgttatctttccatcccagctggatactaatctcgagggtcggctcgacaaaaaaaaatccccgatcttgtaaaaaaaggcccctgtaacatcggagggcggtaacgaaacacctaggctcttacaccaggtgaccacacgcgggtagatttctggagggc

SEQ ID NO: 130526 - DNA, 402 bp, Glycine max
  Clone ID: PAT_MRT3847_88873C.1
cccactctttcttcaagcttatacaaaactctacaactagtaacttgttgggagttgctgcttgcaataatggctgattaaaggataacaatgttatgtcagcgaatgcataaagcaataggagtgattgcccctgactggtacaagtgtatttatcagacatctgcagtgcagagcatttttatgcatgtaagtgcacaaaatcagaaccacattactgtgaatagatcttaccaaaagatgtatgggggcctaataatggttttgtaatgtgcacgttctgtgtggacaaataaaacttcatcgggttggaagtttcttattgacaatcccatacagcctacagttattgatattctcttgggaatttctcaagactgtgaaaaagctggttatactctt

SEQ ID NO: 130527 - DNA, 468 bp, Glycine max
  Clone ID: PAT_MRT3847_88874C.1
tatccgggaggggaagggggaacatatgataacggccaaggatgcctgatcgataactgatcctttgcttccatgccatttggcttacacagtgacgtttatgacaaatttgtcacgaggatatggttcgcagataggagccattattgactaatctagagcatatggactgaccgaataacctgaccttgattcctcttatagatgcccacctgacaggctattacctatgctaagaactataatcacgcataaacaatgcatgatctatacggactaacatgtgtgaatgagtctctgttgagcgtaattagaaaggcattgacagtagtggtatcagctatatgttcctgtacaacacgggaatcctttgagaatgcatcgtcttatttcattcctcgaataatactttagtgtgagaagtacaatactagtaactgcacctgccgtcaaattgtgcatgcaaag

SEQ ID NO: 130528 - DNA, 1055 bp, Glycine max
  Clone ID: PAT_MRT3847_88875C.1
gctcgaggcccggcgggccggttccggccggcccaattagttatcctgtgaagaaattaaaatacggccaagcgaagacctcaggctcccactaataaacttttcaaataattaaacccacacatgaccatggcggaagccactgcatcggaactggaaatcgtcgagcccaccaccacggacgccgccgccgcagacgtggctgtcgacggcgttgaatcaaacctgaagcggactagagaggacagcgatgacgaagaagacggtgtttcgaagaagcagaaggtggatgcagaagaaaagaaagcatcaggtcccgtgaaattgggtttcaaaagcttcgcctcttccgtggaaatgttcgattacttctacaatctccttcatgcttggcccgcttatctcaatcttaaccagtatgaacatatgatgctactggagttgcttaagaacggtcacacagaacctgatactaagattggaggaggaatccgtgtttttcaagtccgcaagcaccctatgtggaaaagtaggtgcttcttcctcgtcagggacgatgaatctgtcgatgattttagcttccgtaaatgtgtggatcatattcttcccttgccagaagagatgcaagtgagacctgatgctaacagggcattaggaggaggaaaaaaacattatagaggaaagagtggtggtggtggaacaagtgggcatggccatgggaaaaaaaggaggatctaaacattttatgtgttttatgatctaaacgttttacgtatacttgacagtagcttatttcatgaatctaaatctcatcgaccccaccctcacacacagcacaacattagcccgcatgacctgcaaagtttctttatgtaattattttgagttttgagagaagtaatagcattttcctttactaattgcaaggcatctgtgtaagctaaacacacaagcgtgtaaagtattgtatttctatatccgtgttgtattatgcagtgtcttactaagtatccaagcttcacagttgctcataaaaaaaaaaaaaaaaaaaaaaa

SEQ ID NO: 130529 - DNA, 134 bp, Glycine max
  Clone ID: PAT_MRT3847_88876C.1
taacgggagcaccaaccataacgacttttcttggtcgctacttcgcatttccgttctttgcatttcacgggctacgaaaaacgacgtccttttcccaattttccccggcgaacgggaaatggtggaacccgtgg

SEQ ID NO: 130530 - DNA, 223 bp, Glycine max
  unsure (1)..(223): unsure at all n locations
  Clone ID: PAT_MRT3847_88877C.1
aaccccggagcgacccacgcgngcgcaaccacggaacaggaccagggaccggccgcaaacgcagcgaggacagcacacggggcncggcgcgcacgccaagagacagcaagcgancaagggcagcacagacgccaaaacaacggcgcacaggacagcgcacacacccaanctaccacaagagaggcngcgcaaagggagcaacccgcacaggacaggncaaagg

SEQ ID NO: 130531 - DNA, 422 bp, Glycine max
  Clone ID: PAT_MRT3847_88878C.1
aaaaaaaaaaaaaagtatttttccctaaaaaatttttaaggccttgggaattaaaggggatttttcaaaccccttttttatccccttatttgggttaccaaaaaaagggtttccccaaacatttgaaaccataacaccgggcaggggggaaaattttcgcccttggagccgggggagaaaggccctggcctaaagggaaaaaaccccacggggccttttggggacttaaaaaaaaaaaacccaccctcgtggttttttgggggcccaaaaccaaatgccaaaaaggaaaaaaacgggtttgtttttttggatagggcaattactggggggcccaaaaaaaaaggcggcctctcttgggaaaaaaaataaaggaaaccccttaaaaaaaaactcggtttttttggggggtttttaaaaatttt

SEQ ID NO: 130532 - DNA, 542 bp, Glycine max
  unsure (1)..(542): unsure at all n locations
  Clone ID: PAT_MRT3847_88879C.1
agtgaaggacactggcggaaatagcagcggtggtggtggttcggaacgagtcagtgctaaagtcgcgcttgagaaggttgttcgtcttcgattggcagttaccgaaaaacaaccacacaaattttgcagaatttgaatcgagctaggtctgcttggtgaaaacggtgcagaatttcatggaggagcagccactggcgcgatgctcgtcatggaagaggatgaggatgaggagactcttctggtgagggttgtcgcgcgcggtgatgaggatggtggtggctgtcacgtgcacaccgacctggtatggtagagggtcgtgattgtgcgcaaaggaggggtggcggtgcaaggattaagaagatgaatcggcttgggtagtggtggaaggatgaataagatgaatgggttgaggcggtggggccaggggtggattgggggctggattnnnnnnnnnnnnnnnnnnnnnnnnnnnncagtggcggggatgctgttggcggtgacgaccaccgtgaagagcaacggtggcacgggagagaagaggg

SEQ ID NO: 130533 - DNA, 234 bp, Glycine max
  Clone ID: PAT_MRT3847_8887C.1
ggctccagaagacgagaagggaagctcaaatgacaagctatcacaatctactgggaccttgacgaactcgacagagatgttaattcccaagtagtatctaatttgttgggcaacaccaccacccggggtactatgtcgcacaatttttcaaacaaaaccgtctatacatcgaagccttacaattacaagactcgaggctgctaatgaattccatggggagtacaatttctcagt

SEQ ID NO: 130534 - DNA, 389 bp, Glycine max
  Clone ID: PAT_MRT3847_88880C.1
cccacgcgtccgagaactagaatgataatttttgacaaatccttaatcactagaaagcagagtccttagctaagaggtggggtcgctgcttgttatcagcttgtgtgatgatacttctactgctgcagcaacaattcatgttttatggaatgaatagtctgtctatacaaacctagatgggaatgatgacatagcgaacttctgcatctttcatcctaacccaatgttcatgaagcatattccaattccagtatataaacctgtaccaaatgacaactccatgtgataaacttattccaaatgctgtctcaattacagaggacatgaacgattccatgtccagggtataagcctattaaaaagccagttccagtgtacaagcctatacc

SEQ ID NO: 130535 - DNA, 1084 bp, Glycine max
  unsure (1)..(1084): unsure at all n locations
  Clone ID: PAT_MRT3847_88881C.1
nnnnnnnattgagagagagagtctaatgcctttgttctgttctaataatcagtacagttgtacactattttacaatgtgcatttccaacatattttcaaggtctatttttcctccaaacggaaaacaaagatttgtaggaaaagattacccctagtatacagagcagctctatattgaaacatgcacaatgcaccacaaagactcttgcaagaaatggcagaaaaacttcagtaagtatgaactgtatacggtttttgtacaatctacccactagctgcaacttgtcctttcctccttgaccttacaaccctttgattcacttgatgttttggattaggatccacaagcaacaagcatgacataacataagacaagagttcttcacgatgggagaaggtgaagtctaaatgtgcatattcgaactcattatatgaaacatctaccctggcacccttcatcaatttataatgtctctttaccattgaaggtcttatcaccttgtccttctgtccagcaacaagatcaacaggaatgtctatgagtccgtagtgttcacccaagtccaaaggcataggcgaaccatacactttcatattggcagatgcactcccataatcaaacattctgaactttccagtgcgcttcatctgtgcaagatggagagcaacacgaaaagatactcctggcatgtcatttgtgttataatgtggtaatcctagaactccaacccagtttgagctgtctccaccaacaacataactcattaaagtttgaaccaatcctccaactgcaggtaggttatgaagatcccgggctaacttgttgacaagcatacgaaaaaatctggttggtatataaaaggcaggcacaagaagagacaaaacaggagccagtaaaactaatagaagctccgccatagaaaaaactccagtcgagtcctctccaaaaccagccggtgataataaaaccaatcttgaaagtctatggggtttcccttctatcctttgtgtaataacatacatcatcataccagctcctcccaaactatggcaaatggcacaaagattgtaaagctgatcatca

SEQ ID NO: 130536 - DNA, 243 bp, Glycine max
  Clone ID: PAT_MRT3847_88882C.1
ctcgaattctgctcagccaaatggtcctccagagacggcatctgtggccctcaaaccggcccttttcactgttgagaagtcctcagaatgaggccaaaccaccctctaaaggaactcctcctcattcagagttgtggccagcggcggcaagaagatcaagacctgacaagccttatggatataaaggcggcctggctttgagggaaggagtttgatgcttccggcaagaaaggaaagggaaag

SEQ ID NO: 130537 - DNA, 514 bp, Glycine max
  Clone ID: PAT_MRT3847_88883C.1
gcacgaggcttactttccctttctcccttaatatgttgaattgttctaatacaaataaaaccaacatcagattttgcaatcataatatatgaaatcatatcatatatctacatgcagaaccccaacaacctgcggcttcaataaactacacaatcgtagcatatgatcttaaatatctctaatttacttattataattgacatgtcttaacttaccagttcatctaataattttgtgatgcttgttgagtggttaatttatttattaaaattgatactgcatcttaatttactagttcatctacttgttttgtgaccgagtggcatcatgcatgactaagaaagaatgttgtgcaatattgtacatgagaaatgttatttgaacttacacaatagaatatgcaacaaaataagagaaagaagtaagagatgtaacaaaagatggcagggaaatagaaacaaaaatagttgtatgaataacaagggtgattgtatacattcagggagcgagtgca

SEQ ID NO: 130538 - DNA, 713 bp, Glycine max
  Clone ID: PAT_MRT3847_88884C.1
ctgctgcttaaaatgctgacagggaagaccccctttgaggtaccctggctatgaagatgtggttgatcttccaaggtgggtgaggtctgttgtgagagaggagtggactgctgaagtgtttgatgaggagcttctgagagggcaatatgttgaagaggagatggtgcagatgcttcagattgcactggcatgtgtggctaaggggtctgataataggcctagaatggatgaagttgttagaatgttggaggagattaagcatcctgagttgaagaaccaccacaggcaatcctctcatgaatctgactctaatgtgcagacaccaacaccatgatcaagtgcatttcttgggagagtaatcaaattttctcttgcctcctcatattgtgttttgcttgcatgccctcaaccaaataagcatgtatcattgtaaaatactattcatgatgatgtttttattcgtgttggccataaaagcttctttttcatgtttcacattatttgttacgttctgagctatgtcacttttggatattcagtcggtggaaataattcaagtattcattttcctatcaatttcttttcggaaaatacttaaggaactgttagcccagaagaattgggcctgaacaagatgagatttcggatatgggggcaaagccgaatataactagagagggctgacagtgggccttttcttcctacaccatata

SEQ ID NO: 130539 - DNA, 2782 bp, Glycine max
  Clone ID: PAT_MRT3847_88885C.1
ccacgcgtccgaccacacgatgctctttgtttactttgtatttttttttaggagcttcccgtcttagttgtttctgaaacttagaagcaccgactaatgacgcactttctttattctaagtaaaaaatgcactcgtaaccctacattttttaaacttcatatacgaacctttatcttctcattttttcttttttcaatggaggagtccttgtgccacttgcctccacgctaagaaagtaacaaaaggctcgagctgagccatgctgatgcgtctgaaagaaggaagtcccttcctttctaaatggatcagctaacaacttgctccaatttccaaagctagacaaggaaagaatgaagaacagttaagctcagaatctggaaccatcacttgccttgattttgcaccaaaatatacccatgaaggtgcagttctctattgttgcacttgttctattaggctccacactgtgtctttctggcctaattgtagctgacttgaactctgaccaacaagctctcttggagtttgcttcaagtgtcccacatgccccaaggctcaactggaagaaagattctgtttcaatttgcacctcatgggttggtgtgacatgcaactcaaacggcacacgtgtcgttggccttcaccttccaggaatgggattaatcggtaccattccagagaacagcataggaaaactagatgctcttagggtcctgagtcttcattccaatggccttataggaagtcttccttctaacattctctccattccttcactccaatttgcataccttcagcacaatggcttctctggcattattccttctcctgtgacccctaaactcatggcattggacatttcctttaacaacttttctggcagcattccaccagcttttcagaaccttagaagactcacttggttgtatctccaaaacaattctatatctggagctattcctgacttcaaccttccaagtctcaagcatttgaacttgagcaataataacttgaatggctcaattccaaattccataaagacatttccttacacttcttttgtaggaaattctctcttatgtggtccacctctcaatcattgctctacaatctccccttctccatctcctgccactgattaccagcccctcactccaccaaccacacaaaaccaaaatgctacacaccataagaaaaactttggcctagctactatacttgctctagtcattggggtcattgccttcatctctttaatagttgtagtgatctgtgtgttctgtttgaagaagaagaaaaacagcaaaagcagtggcatactgaaaggaaaggcttcttgtgctgggaagactgaggtttcaaagagttttgggagtggagtgcaaggggctgaaaagaacaagctctttttctttgaaggttcctctcatagctttgaccttgaggatttgctgaaggcttcagctgaagttcttggaaaaggaagctatggaacagcatacaaggctgttttggaggagggaacaacagtggtagttaaaaggttgaaggaagttgtggttggaaagaaggagtttgagcagcagttggagattgtggggagagttggaagccaccccaatgtgatgcccctaagggcttattactactccaaagatgagaaacttctggtttacaactacatgccaggtggcagcttgtttttcttgttgcatggaaacaggggagcaggaagaaccccactagactgggactccagagtgaagattttgctaggagctgccaagggaatagctttcatccactcagaggggggtccaaagttcgcacatggcaacatcaagtcaacaaacgtgctcataaaccaagaactcgacggctgcatctccgacgtgggattgcctcctttaatgaacactccagcaaccatgtcaagagccaatggctacagagctccagaagtcactgactcaaagaagatcactcacaagtccgatgtctacagcttcggggtgctgctgctagaaatgctgacagggaagacccctctgaggtatcctggctatgaggatgtggttgatcttccaaggtgggtgaggtctgttgtcagagaggaatggactgcagaagtgtttgatgaggagcttctgagagggcaatatgttgaagaggagatggttcagatgcttcagattgcattggcatgtgtggctaaggggcctgatcaaaggcctagaatggatcaagttgttagaatgttggaggagattaagcatcctgagttgaagaactaccacaggcaatcctctgagtctgagtctaatgtgcagacaccaacaccatgatcacgatgagatgcatttgatgggagactaataaaattttctctgcagaatgggatggaaaaatagaggctgcaggaagcaactccaaaagaagtggacaggtttgttgggcctgaacaagatgagcagctttcggatgtggaggcacagccggaatatgactagagggttgagagtgggccttttcttcctacaccgtataaaaatcattttgcaccccttctcatttaaattttcgtgtgatttccaaaataccctgcattatttattccggatcacatgtttcgtaattatttttgaatatattacagaatgcattccagaattatgatatttagttacggaataggtgtttcagaaaaattacacttgtctgtaagatgttcagaaatgtcccttccataattattttaaatgtattgcgcccttccttcct

SEQ ID NO: 130540 - DNA, 742 bp, Glycine max
  Clone ID: PAT_MRT3847_88886C.1
cccacgcgtccgcccacgcatccgtacggctgcaagaagaggacagataggggtatcacattggtttattttgaaaccctaaagtttgcccccttacacgttttttgtcttcttttttctcccatctttgtttcgagaagcatttgacgaagagaagagacagtgaatcgcggtttcaattcaacccacttcatctcaggtgtttgaagttgagataaaaatgagcggaacagagaaagcaggatcaggaaccaccaaaacccccgccgatttcctcaaatccattcgtgggaggccggttgtcgtcaagctcaattctggtgttgattacagaggtatacttgcttgtctagatggctatatgaatattgcaatggagcagacagaggaatacgtcaatggacaattgaagaacaagtatggtgacgctttcatccgagggaataatgttctatacattagtacctcaaagaggactctagcagagggggcttagaaagtataggaatctgatttttttgtttttgtttggaagacgcttatgaattttaaaagcttattggactgccattatgttgcaactctagtctattgtaactgatttgccctggttatattttgaaggtaaagcggtatggccagtttgtaaaatgcttgttgacatattttagtagaatattctatcctgttttggaagttcaaaattgcaatagaaaactgctattactttctctcctagtgc

SEQ ID NO: 130541 - DNA, 187 bp, Glycine max
  Clone ID: PAT_MRT3847_88887C.1
ggagagagaactagtctcgagttttttttttttttttttttttttttttttttttttataataaccaagttttattatctgcttcagtactacaatatcataatgcaaattccacatttacacaaacatttaataacttacacatgaatccaacatatacaaatttttaatcacaaggaaaagccca

SEQ ID NO: 130542 - DNA, 782 bp, Glycine max
  unsure (1)..(782): unsure at all n locations
  Clone ID: PAT_MRT3847_88888C.1
tgctccanntattattgaatcattattgggtttaatctaacttacgcttttttcccaaaaaaaaaaaaaccatggtnnnnnnggctattccaacatctgatgatcctggctgaagtttagagactccttccatatgagctcctttatatcttcttctttgagaattnnntgttcgaaagaaaatatgaaaggagttgggcaagtgggctcctcgttgatctcatgaagactggcgcatataggggtgattcagggcttcctcgacagttatgcgcttggagggatcaaaaaccagcattttctcagcaagatcaattgctaagggggacatttcaggaaaccgctctgcgaaggattgcttttctacatgtgggagctgcttaacatatttctttgcattatcacttctgaggaatccaagatccgagtcatttggtgaacctagtaactcagttataagggccaactgttggacataatctttaccaggaaataaaggctcccttctaactatctccatcaaaatgcaaccaaccgaccaaatatcaatagctgcagtatattctgaacagtttagtagcaattcaggggctctgtaccaacgagtgacaacatattctgtcataaagtcggtctcagaggttgttctggcaagcccaaagtcacatatcttgagatcacagtttgcgttgagaagtnnnttgcttgnnnnnagatctcggtncnnnacatttgcagannngatgtactttcatcctcnnnagagttgatataagaagtac

SEQ ID NO: 130543 - DNA, 1537 bp, Glycine max
  Clone ID: PAT_MRT3847_88889C.1
tcgagaaaaaatgcataaaacctccccctctaaaccctttgtacaatgtcatcatcattctgttgtgttgagcaccacttcattaactctttcttctcaccgttaagctccattactcatcccccatgatcccttcaggaataatgaagtatcccagaggaaagcttcctcttcccatcattgtcatcacaacatgtgttcttgtttttgtggctatcttgtatgtagagaggctcagtttcctctcttccaagtccattttcaagttcaaaccatgtcctagaaaaaccaccaaaacaaagtctagtgacaaaaaagcagatgaggaggttgtggttgtgaatgcatcaacatggattgatgacaggtttgattttgaccctgaggagtgcaatgttgcaaatgggaaatgggtgtttaaccattcaataaagcctctctactctgacataagctgtccatacatagatagacaattttcttgtgtcaagaatgggaggaatgattctgactatcgccattgggagtggcagccagaagattgcaccttgccacgtttcaacccagagctagccctcagaaagcttcaagggaaaaggctgctatttgtgggggattcactgcaagaagaccaatgggaatcttttgtctgctgggtatgatgggtcatacctcataagcataaatctatgcgactagactcaatcagttattaccttaagaacaaagcttagatggagacttatgtgttttgggtgttgtttccaattagaatcacagttttacctatgatctgcataacccaaatcaacagagttgaagaactaaatgtgatagcagaacaacacaaagaagcaacggtcatataccatcttaatttcgtccttaacgtatggtggatgagtggtgttaggatcaaaacaatatggggttcatttgctaatggacaagaagggtatgaagagtttgacaccccagttgcttacaagttagctttgaaaacgtgggccaactggattgactcaaccatcaatccaaacaaaacacgggtctttttcaccactatgtcaccaacacatacaagaagccaagactggggcaacatggaaggtgtgaagtgcttcaatgagacaaagccagtgaggaaaaagaagcactggggcactggttctgacaagagaataatgagtgtggtggcaaaagtgacgaagaaaatgaaagttccagtgacattcatcaacataacacagatatcagagtacagaattgatggacattgttcagtttacactgaaaccggagggaaattgttgactgaagaggaaagggctaatccacaaaatgcagattgcatacactggtgtttgcctggagttcctgatacgtggaatcaaatacttttggctatgttgtaacaaacaaatatatatcttgcacaaagatccatgccccttttttttcttacatcttgtgacatgaacatgtcaactatttggttttgtgtacattcaagttgaaatgccatttgtgtgatata

SEQ ID NO: 130544 - DNA, 409 bp, Glycine max
  Clone ID: PAT_MRT3847_8888C.1
acgcacgaagtagaaacacgaaactcataatccatggcgacaccagcgactacgaatcgaatacgagtgtttgtgaacgtgggtcagttaataccttccaccaatgactacacactgaccatgaatgtattcaggttccattcgatcaaatccctcagtaccctctgatctagaccgatggttctattcgaaccctcattctgctttactacatggagtactgtagcaggctcacttttatcgctcttcaatgcctccactaattacctactgtccttctctcattcatcctctatatccatctccacaactacaattttatcaacctcatcgttttcacattctatgtactttctactgtattactatgattacaggcgcctattgcactgatgcatcttattaatgc

SEQ ID NO: 130545 - DNA, 800 bp, Glycine max
  unsure (1)..(800): unsure at all n locations
  Clone ID: PAT_MRT3847_88890C.1
attcgagctcggtacccggggatcctctagagtcgacctgcagaaantctaacattcttaatattataatcatctcaacattctagtgttccacttagcatggtagaagtgtagatatttgttctttcttattaaacttacaagttacaaattcacattaatatagatggtattattgtttgaagtatgaatttcagtggcaatattgtcaaaccatgctaatatacgtatcaaattacttgatgtaaatcaagacatagtaaaagcttgttttacttaaatggagcaaaactccattgggtgttagaaaccaatacaacaacaaagccttatcccactaggtgaggtcagctatatggatcatacaatgccatttggcatggctaaaaaccaaagtcttagtaatattttttagcatgagatcttctctgacaacttcctctaacgtcttgttagaaaccaattttaaaattgaagtaaacaataaaagcaactagaatcatttttgggggcacaaggtaattgtttccttttatgttttcaaaggtaagaaaatcaacttcttaactctnttaagtttccaaagattttcattagaaaaaaaaccgattccaaacttggagtttttgttaccgctttttgcccctataattcataaagaagagataaatccttactatntattatcgttattaatttttaacttgcttggacaacatcatctatgacaaaatctttgcttgcttttttgcagtgattgattaattnttttctaaattttatttatatatatgttggga

SEQ ID NO: 130546 - DNA, 360 bp, Glycine max
  Clone ID: PAT_MRT3847_88891C.1
gtgattgaattattccgctagaccgtacgctggtattttgtgttcattggcacacgcgcacgcacttggatcttttcgagaaaaaatagtgcaagcgagcatgatagggtgcttaggcacctggaggattactaatagatcacgcgcttgaaaccggagaccacacctatatactgcaatataggcctggtttttggatccttagacgcaaggagagaattctaagcattagcttatagacttagatcttctgagtatgaagttaaagcgatgttgggtgaatgaatgggaagactcggcacactcttaagaggctcctgccatgataagctttcggaagggcattactataaagaggat

SEQ ID NO: 130547 - DNA, 343 bp, Glycine max
  Clone ID: PAT_MRT3847_88892C.1
ggcagcatctctatccacagggagtcttcggttgcttgttgccaccctcaattgtattgagcaagatacaagtgtgtgagggaagctcatcaaatctctatggcaaccgaagacaagatccctaagaagaaactggagtttgaattaaaactggttgcctagcttcatgatctggaagaactttttagcttggcctaatttactttaattatgcagaagtcttaaattttcttttgttttaagaaaaaccaatttttctttcaatgctttctttaatggatcagcacttttatccgtttatttattgaaggtaagatgctgttttttaatcatctattaaccc

SEQ ID NO: 130548 - DNA, 357 bp, Glycine max
  unsure (1)..(357): unsure at all n locations
  Clone ID: PAT_MRT3847_88893C.1
gtgnagagccggtattggacgtcggactctaactaaacctaccggtcaggtaagtgtcagctccaaccacagtgatgggtatctacagcgaggggaggcgtgtgtaactacaacttatcaccagggagagcgtgcttctactagattagaaccaacccatgaactctcagtgatgggcgtacggggttgcgttganagcatcacaactgagggcccttcatgcaagcgccttaccatatgcggcgcggtcttaagtgaaggaatattaaagaggaatgtgatgcgtcgcaatcgaggggattcgtgactttgacagactggcgggtatactccctatgaccatggctttttcaaacc

SEQ ID NO: 130549 - DNA, 1715 bp, Glycine max
  Clone ID: PAT_MRT3847_88894C.1
gtgactctatagaagagctatgagctatgacgcacgactgtcacctcacaaaagctcggaattctcgagctcgagcaaccttttttctccctcctccatcaaccatgggtgtgaagcacaccaccaccaccaccaccacaattcttttcacttcaatgctacttcacctctccatcatagccattgccaacgatccatgcgcttctcaacacgacgacgacgactccgacatcaccatgattcccatctacggcaattgctcgcctttcaagaactactcaacctcgtgggagaacatcatcatcgacatggcctccaaggacccagaaagagtcgtgtacttgtctagcctcgacgcctcattgaggagaaagcccatttccgcagccccaatcgcttcgggccaagccttcgggattggtagctacgtggtccgagtgaaactgggttcgccgaaccaactattttttatggttctggataccagcaccgatgaggcttgggtaccgtgtaccggctgcactggttgctcttcctcctccacctattattcccctcaagcctccaccacttatggcggcgccgtagcttgctacgccccgcgttgtgcccaggctcgtggtgccctcccttgcccctacactggttctaaagcttgcacattcaaccaatcctatgcaggctccacattctccgccactctcgtgcaagactctctcagattgggcatcgacaccctaccaagctacgctttcgggtgcgtcaactctgcctccggctggacgctcccggcccaaggcctattgggcttgggccgcgggccccgtccgcttccttcccaatcctccaaactctactccggcattttctcctactgcctcccaagtttccagtcctcctacttctctgggtccctcaaacttgggcccacgggccagcctaggcgaatccggaccaccccgctcctccaaaacccgcgtcggccctctctttactacgtgaacctcaccggcgtcaccgtgggccgggttaaggtcccattacccatagaatatctggcgttcgacccgaataagggctccggaaccatcctagattctggcacggtcataacccggttcgtaggaccggtttacagtgcaataagggatgagtttagaaaccaagtgaagggaccgttcttcagcagaggtggtttcgacacgtgctttgtgaaaacctacgagaatttgacgcccttgatcaagcttcgcttcacgggcttggatgtgactttgccctacgagaacaccctcatacacaccgcctacggcggcatggcgtgcttggcgatggcggcggcgccgaataacgtgaactcggtgctcaatgtcattgccaactatcagcaacagaaccttagagttttgtttgataccgttaataatagggttggcatagcgcgtgagctttgtaactagctagttgaacgtgtgtaatttttgtttgtcttcttaattggtacgtttgtatttgtttgtttgcttgtttaatttcctatgttgttttgctttttggaccttgttcaaatgggtgtggtgaataagccgtgtgggcactgatttggttggctttggagtttggagtattttctcaaaaataagatgtgtcatgttgtggactaaaaaaaaaaaaaaaaaaaaaacaaaccgctccgctgtataggatccaaggtt

SEQ ID NO: 130550 - DNA, 516 bp, Glycine max
  Clone ID: PAT_MRT3847_88895C.1
agacaatataatatttttagactaaatgtcacttttatttttggtgttttatgtttagtgtttttttcactttaatcctttaagttataaaaagtctcattttgatcaatagtaatttttacattcaataataattttttcaaaattttcattttattcctatttataccaagtaccaagtgttaacaatataatatatgatgtgtatttggacttgtcaccattctattcttttatataataaaaatagatgaccatttttgttttaaacattaattttttttatatgtaagcgaatttaatataaaatttatattttgaatcggatgaagatcgtgtcttaaaatttagaacatttagtatttcaaaaatgataaatgccttataaaaaaatcttacttaaggaactattttaatccttaataaataaggaatccaattacaacttaaaagaccaataatttaacatttttcttatttcttccttaataaaaaaataccattttcttttttaaa

SEQ ID NO: 130551 - DNA, 237 bp, Glycine max
  Clone ID: PAT_MRT3847_88896C.1
ttccaaggaaggtttcccgtcatcactgtatgacgtcctcgcttctttggggggggggggggggggggggggggggggggggtgtcactttaaaggtttcattggatcgatttcgctaggtcatcgtagattgtggtgagacccgtattgaaaggaaggtagccttcttggggataatgtgcatgccaaaatttgcctgatacatgtccgagtttttgggtgttactgctttgaaga

SEQ ID NO: 130552 - DNA, 1842 bp, Glycine max
  unsure (1)..(1842): unsure at all n locations
  Clone ID: PAT_MRT3847_88897C.1
gaattttgtccacatgtattaattattgataattactatctactcctttctatgtgcagtgcagcgagcgaagaagcagttttagtcacttggttggtacagtgtgtcagaaagatagaccaaaaatgtgctcttcgactctatcgtcctattctttcctcacaatcagctccacatttttcaaatcccaattttgccctcctcccttcccctctcgcgtggtggcgtgtcacgttggatccaattccaatgttcaaaagcacgttgccaccgacctcaagttcgtcctccacgacgccctccatgactctggaatcaacaccactcatgccagagaagctagggagcatttctgctcacaaattaggagattcactgatattgagaagggaaccagtatttgtatcaacaggtgtgttgatttggggagaactgctctctacatagctgcagaggatgattctctagtgtcacattcatcagttccacttcctgtcgatgattttattacgagattagatgatctttcgatggactactgtccgcactacagccccaaatatgattcatcgccggagaagttcttagagagcatagagagatttctatatattcacaagggtttcaggagagccaatgccaatgtattggagccacgagcactttatctccactcggttttgacccatcgttcaggatcagctgcaatgctatcacttatatactcagaagttctgaaaatgcttcggttgtggagccttttgcattttgatgctgaaattttcttccctcgtgatgctcttacccttcccacaggctatcataagcagaaaagcaaggagtcagaccaagctcacataatgacttcaggaaacctattagttgagatcttaaatgatctgaagcatgcattctggccttttcaacatgatcacaccaaaactttattcttgagggcggcaactgctgctaactgtgttgacagatctgattttgttggagaaagtggctcacaaattgcattagctaaggctgctcaacataggctagatcgaggtgtttggaccagtgtgcgttttggggacatgaggcgatctttgtcggcatgtgaacgtcttatcctgttgaaaaatgatgcaaatgagttaagagattacagcattcttctctatcattgtggattatatgaacagtcactggaatacctgacgaagtaccgagatctgaagaactcatctacgcaagaattatcatcatcaaactctcttagcagcctggaggaagatgccgtggataacctgatgatgcgcttgaatcttgtactgatggagcaagggtggagtcggccatcttatgccaagaattttcttggtaataattctgaaccatggtagttcctcttcttccatgtttattgagacaacatcacagaagatttgcatcaagccatattggaaatgaatgctgatggttcacggctgcggcaacttcatgaaaaggaaaaggagaatgagaaaaggagatggaaagatcaacatcataatcttggatgataagatgaggatgattcgtcacaaagaatagaattgttcgataagaatctaaggtttcacaccaaaaaaccaagaaacacatcattttaatggtgtatctgatctgaatattggcaactaagtgttttaaagagtctatttatatctttctaggcccaataactattctaataattaaaagacttgcaaataatcataaaaagtcctcagtccattgcaagtcaacaaatagacgtaagatacaattaaaaacacaaataaatcttattctaaaagttgantaaaatgt

SEQ ID NO: 130553 - DNA, 485 bp, Glycine max
  Clone ID: PAT_MRT3847_88898C.1
ctcgtagcgcgtgtaaatcgtgcgccccagttgtctttcgagcaaccctcttagcgatcgcgttggtaccctcttcacgagtgttttccccgccgcgccgttaacgagccaattactcgtaacaccacagccttagccagttcgtctcgcatagtaggtgtctcggtaggtaaaatcgtcagttcggcctcttccagtagccagggttcgcgtgtaccaggaggttcccaggtagtccgccaacaagccgcaaaccgtgtaaatgtaggcgtcggatgcagtagcacggtcagacgtaggagtaggagaaccagaagacacgatgtttggtttagcgcagctacaatggctgaagcatcaacgggcccgccgatacgttacaagatagtagtaatcacggcaagagaaatgtacgcagaatgatcttggcgtatcacacagtggcttagcaatgtaccatgatatacacttgatgaagacactga

SEQ ID NO: 130554 - DNA, 679 bp, Glycine max
  unsure (1)..(679): unsure at all n locations
  Clone ID: PAT_MRT3847_88899C.1
attggcaaccaagtgtaataatcttcaggcatagattttacattactaaaatataacatacaaaaactataacaatagtaagcacaactagtaacaaaaaaaatattatctaccacgtgtatcagcaactgagcttctcttctttggcaatagaatttttgcagtgagcaattgcagcttgaatagctgcttgcaactcttccatggtgctgtcattcgcaggaggaagagcagcagttgctagcagaagaccactgtttgttggagaagttctcatagatgctggtgctgaatactcgcctcttcttcctctcaattcaggcttgtttttccggatcaaattccccgaatgagaataagcttgtccatggaaccgacctttttctcttctccctccgaaaagcactagtggctgcaccattctcaagtacttcttaagtgcatgcatcacatcatacccgagtttcttcttgtgcttgatgttatcctctttatcttctttgtctctaacttgacaccctttacgcccctttgataaaccaaacaatgagaaactaggcttggacttacttccttcctttgtgactctattgttgnggtcttctatgttgttgctgttggtaatgctatctatggtgaagttgctgctggtgcagctattggagctggtgcgtttttc

SEQ ID NO: 130555 - DNA, 525 bp, Glycine max
  Clone ID: PAT_MRT3847_8889C.1
aaacaacccaagatttttcacatccccccttttatagaacagaggggacccgtttccccaaaggacttaaggaaaaattcttcatttttagaaaggcacagggactaagttggggctaaaaacatcgattgggaaagtttatggggccaaagccctggggggggaaacaagaagggccccccccgcaagaaaaccaagggggggcccagcccaaatagccaagccaggcgtaccgccaggggaaacatcaccggggggagaccagccctggggggcgaaaaaaggacgggaaccatcgacattagccccggtttgggctacaaacggggaaacgccctttccctttcctttccgggcagaggcaaaaactccttccctaaaaggcaggccaccattaattccataggggtgggcaggctggatctttttgccaccacgggccacaactttgaaggaagaggagttccttgggggggagggaaggcctctaacggaggacttctcaacagggaaaggggcaggttt

SEQ ID NO: 130556 - DNA, 804 bp, Glycine max
  Clone ID: PAT_MRT3847_888C.1
cggctcgaggtaactaaaattaagcatgaaggtgcatcagttcgcacgtggattctgggagcacgaaccctccctcacactcgggtgcaaacgcttacgcccccttgcccccaagctttccaacaccgacaccatttctccacctcatcatcctgttacaaccttcgacctcaagagcttcatcaaacctgaaagtgcctccagaaaacttggaattggatcctccgatgataatactaataagagagacccatcttcaccccagggccaggctgaaacgcatattccaggagggacacggtggaatccgactcaagaacaaatagggatattggagatgctgtacagaggagggatgcgaactccgaatgctcaacaaatagagcagatcacagcacagcttagcaagtacggcaagatcgaagggaagaacgtgttctattggttccaaaaccacaaagcacgcgagagacagaagcagaagcgtaacaacctaggccttgctcatagtcctcgtactactctcaccacttcacccccctttagttgttgtgtaattaccactatggacaccacaaaacggggggaagtagtagaaagagaggaggaagatagcccgttgaagaagtgtaggagctgggcgtttgagtacttggaagaccaaagagaggaggaacatagaactctggagcttttcccattgcacccggaaggcagatgaaggggtttgttttaattgtttgaccaatttaacgagaaatatttttagcttttaattaattgtttctgaacccttcagggctg

SEQ ID NO: 130557 - DNA, 220 bp, Glycine max
  unsure (1)..(220): unsure at all n locations
  Clone ID: PAT_MRT3847_88900C.1
tcgcacgcacgcgtacgtaagctcggaattcggctcgagngnacancnccgtncttaganntngnncgcagaatctnctagnangncntcgcntgtcaaagggagtcggttgngnaaatggccttacgaggnaagangtcnccngcgcnggnaaaagcaggnactntcggggctanttntctggaagaaagtacagaaggctcttctncaatccgtntnt

SEQ ID NO: 130558 - DNA, 979 bp, Glycine max
  Clone ID: PAT_MRT3847_88901C.1
cattcgcctccatccccatctccgtgcctcatttcgcaaagccacaattgtcaccattcccaaccctaaccctaacccttctcatacgatggtagtttctctcggtcctgggaaattctacggcaccagcctcccccgacctcggatctacaccgacgtcaagttcaacgaccaccgcgtcgacccacccgttcccgtcaacgacccactcatgtcctgggcccaagaggcccactggtccatgggcggcctcagcttcaagcgcctccgtctccagggcaaaattgaaggcaatgtcgaaaggcttcgctcccagcgcgagaagttccaggctcaaagcccaagcccaagcccaccggcacgcgccgacctccgcagatccaaaagagctgcttcccctctgactccaccggccccgttcatgccgaaacggcaaagatacatggatcttatccaagaggaagaagaggaagaagaagaaggggttgtggttcggaggaccagtgttcggaagagcggcttggtgaagaagcttggggatgattttgacagggttgccctggaaaacgatgagtccaatacggtgtcgtcgttgaagacgactcgtggtcggaaattggttaagaatggtgaacttgggaacaaaacggtggttgaagtagctgaaaaatcaaacaccaaaggaaagaagagtgcaagtgaagccgagaagagccctggggttagaacttcttccagattggctaaacgtgtgtccaatcaaacgtcttgtaattagatgtttgataaaattgtggttttccttttccttttattattgtccaattagccattctgtgtatgtttcaagatttagggtttgttcaacaattggtattttgcagtaagtcatacatgaatgaatgaaagcagatggcattatattttgcaacaattgccgctcttccgaacactggtcctccgaaccacaacccctctt

SEQ ID NO: 130559 - DNA, 402 bp, Glycine max
  Clone ID: PAT_MRT3847_88902C.1
cgacacatgactacggatgggagatgccctcagaagggactgcttcaagaaattattttagacccaggcgacgacattgaccgcgatgatgatggatcacacagatcaaccaattaacgggaaataagtccacgctatcgatactaacaacatggaagcctaacttaaccgttactagacaattcgatgactggtcctccaactcgctatacttgattacgctagagctgctttagcactgcaccggcatactgtcacttcattagctgagtaattttaacacgaatttcgatcgcatctattgaaagaggacagctacgtttatatcttatcataatttcaattggttcacaaagcatgcttcctcgcttagtgatggcaaccattcctctggtttttaca

SEQ ID NO: 130560 - DNA, 548 bp, Glycine max
  unsure (1)..(548): unsure at all n locations
  Clone ID: PAT_MRT3847_88903C.1
attttatctcaccagtaatcgctctgaaagaccaaatcttgtttcattagactactttattgttgtttgagtctagtctccacatttgaaacatcaaccgttaaacccttggccaaatctctgacatgaaaattctaagtgtaactgtgtttagctttagcctctcatgatctcatcttatgctctgcaaattccatttcaaaaagcagctccgtttccctccaatcccttattcatttgtcactcaatgcacccattcatggagcataatcagagcttctgtgccatttcctgatgaaacccatttcagggaccctcacactgttcatttgttttgtgccaatgccctcaaagtttctgccaaaagggcccttcttcctgaagggaaacagctacatgcccatttgataaagtttggattttgccatgttctgtccctgcaaaatcagattntgggtgtttatcttaagtgtacggcagctgatgatgcggagaaactgtttgaggaattgtctgtgagaaatgttgtgtcatggaacattctgatt

SEQ ID NO: 130561 - DNA, 449 bp, Glycine max
  Clone ID: PAT_MRT3847_88904C.1
atgggtaaaatatacgagtagtaatcataaggatgcttcaaggcatcgtatgctttggccgagtctagaccacgtcaaaaaaaaatactgtcacatttacagttcccgcaatgaaaaacgatggtgaaaaccatcaactaaagccctgtcaatccttgcatatgcttcttcatcgcacggtctctccggtgatggttatcccggccaccacctctccttccacctctgcctccacgaggtgcaggccctcctcgagcgaagccctgtgctgcatctggatcttcatggtcctccgctggatggtcatggttcctgcctcctcttgttgcgccacggccaaatccacgttggccattcgggttctcgtttgcctctggctggttgccgggatttctgcccccttttcttccaccacggccaaatccctgtggcccggtttgggttctcgc

SEQ ID NO: 130562 - DNA, 429 bp, Glycine max
  unsure (1)..(429): unsure at all n locations
  Clone ID: PAT_MRT3847_88905C.1
attcttctcaaatttgaagttggattttgagtttcagggtttcaaatatttcagacaatggctgtccgaattttaaacagtttcattatttaaaatatcatattaatccatattaaatatacttattttttcgtgaaatttgttaacttaaatttgattaatgtgttcccatcataacttttattaaaaaaattatttattaatttttaattattatatggagaacaattattttatttttctaaatttaataggcatgcataaatttttcattgtaacctatcagaaataatgacttttaaaaattttaattacattcttttgtattttttcttactcccttaaaaaatattaaataaaagattaaaaaaatttaatgcttgaaaatataaaataaatntaatgcttatacatnnatatataaaaatg

SEQ ID NO: 130563 - DNA, 1029 bp, Glycine max
  Clone ID: PAT_MRT3847_88906C.1
aagcaggtgaagaatcatttgagtttttggcataagttacattattttcctttttcaagcaatctaaggtgcaaatttgacaagaaataagtacattttaattttatcattgggagggtgtgaaagttagagtaagaaaggagatgctttaactgggtccctaggacaagaagatgctacacattgaattgacctatttgatgaagcttccttggtgtcactgcaacaagcagtgtcactgtgtagtattcgaccttagctcagcagctgaaatcatatacagcagggaaaaagaagagaatgagagacattcaagttcaactgctaaactagtgtggccaaggatgaacacaaacttttgatcaactcatttacaagttgtgaatagagagtgttgtaaaagcttagctaagaagaagaacaatatctatgaaacagaatatctcctactcctaccagttttcccctccgaaccccgagacttcctacctgatttctggcgctttcccccgccttgactgctaaaaattgcaattctccctattcccttagaaagtgaggttaagaatgttcttccatttcctgccttgtcaatgatgccttgtttcatgaacatctgctccttctccaactcactcagcctcaccctcattcttgaaatctccagcttcagttcccggttctctcttcgcagagaagcatagttgtccctaggggacatggctgcacttggaacaccactgcttattctctgcgacagcagcccgtctccggaactgcccgacaacgcgttcttcaaacgcagctgctcgaagtacaggacttgcaccaccatttgcagtggaagcctgtcattctgggctgcatggttgcatgcttcttgagacagcttctggcagtctatcaacttgcaaagcttcttgcattcttgttctgttagtgctggatgtgccttcaagtaaatatccacagctctataaaagccatcatcgataacacgagcataatcaggaagtatctcaatcaaag

SEQ ID NO: 130564 - DNA, 219 bp, Glycine max
  unsure (1)..(219): unsure at all n locations
  Clone ID: PAT_MRT3847_88907C.1
tggtgtganaatgttagatgtgtggatatgaacgtgaattagaatagtgtggctttattgtatgnnccattgtgnaagtcaagtgtggcannnnnnctctnangccaggagcttgctntcctactttccncaanctgtanatcgcnctncaattacnggtggtcngcccctaaanatccctgaganttgacgacnggaggntaacttgtnnagagcttg

SEQ ID NO: 130565 - DNA, 602 bp, Glycine max
  Clone ID: PAT_MRT3847_88908C.1
aagcaggtgaagaatcatttgagtatttggcataagttacattattttcctttttcaagcaatctaaggtgcaaatttgacaagaaataagtacattttaattttatcattgggagggtgtgaaagttagagtaagaaaggagatgctttaactgtgtccctaggacaaggggatgctacacattgaattgaggtatttgatgaagcttcctcttggtgtcactgcaacaagcagtgtcactgtgtagtattcgaccttagctcagcagctgaaatcatatacagcagggaaaaagaagagaatgtgagacactcaagttcaactgctaaactagtgtggccaaggatgaagagaaacttttgatcaactcatttacatgttgtgaatagagaatgctgtaaaagcttagctaatctatgagacagaatgtctcctactcctaccagttttcccctccaaaccgcgagacttcctacctgatttctggtgctttcccccgccttgaccgctaaaaattgcaattctccctatccccttagaaagtgaggttaagaatgttctcccatttcctgccttgtcaatcatcccttgtttcatgaac

SEQ ID NO: 130566 - DNA, 141 bp, Glycine max
  Clone ID: PAT_MRT3847_88909C.1
gcagtttttgttttaattccctcaaatttgttgggtggaccattaggggccatacttgcattaggggacattattagggtccgtacattcatgtggcctaaactactaaagaagtattcccaatagttcaataatgtaaaa

SEQ ID NO: 130567 - DNA, 432 bp, Glycine max
  Clone ID: PAT_MRT3847_8890C.1
tccggacgctatcccccgtaacctcgcttctgcttatgctacgtgtctaactcaagacttccgacttcgaacatatctcgatgaatgcctagtgaaaaagcacacatctgacttgggtggataggaaatgtcgacccatgagacagagatccccgtaaagcagctgtccaagcctgtggtgtccaatgattctccaattatggtcatatgatggcctgcccgtacggacacggactgggaaccatccttattagtaggtaactgatacaattcttgtgaaccgctaatagtatcggctgtaagtcatctagcgtgaaaactaagctgttactggctattgctaccttctttaacacgaaaatcctgatgaacaagtaccattctgaggcactactttccttgacagtctatgactgctgcatatcccctgcc

SEQ ID NO: 130568 - DNA, 263 bp, Glycine max
  unsure (1)..(263): unsure at all n locations
  Clone ID: PAT_MRT3847_88910C.1
aganagcgagcgagcgngcagtttcaaagagaggatttgggattgggaaggcgatggattgcgctggcgtctcttcctcttctctttcgattcatccctcattcataatcttccaatccaacaacctcagcctcanactcacacatacacacatctgaacgcgtatcgtccctcccatggcttaaagcgcancctnaaggagcgnaaggacgtncagaaagacccaccaacgtntttcagcgctnggnagnngcnnaggacat

SEQ ID NO: 130569 - DNA, 453 bp, Glycine max
  Clone ID: PAT_MRT3847_88911C.1
cgctgctaaggcagctataatgttgcgccgggctattcagcgtgctcggctgcatctgccagcgcccattggccacgataacggcggcggtggatcatccagcgatgaagaagattattctgtgagtcccagcgttgcatacaccagcctacgtgacgacgaatcagtccgtgatcatttccgcaagcgtccggaggacgtttctggtgtgcatttgattattgcggaagaagcagcaaagacaaggaaaggccaagtagcagaactactgttggaagaacaacgcagtgctgcgaatgcttgggcacgactgcagaagctctacgggctgttccgggagcttgaagctgcgacggaggaggcaacagcagacagcgactctaagagcgttaaagctgaagcaaaacgacaattgaaaacgactcgacgacgacccaaacgtgatgatggact

SEQ ID NO: 130570 - DNA, 1395 bp, Glycine max
  Clone ID: PAT_MRT3847_88912C.1
caatttataaagagaaactatagtctatagctgccacacattcaaacagtagctaaaagcatcaaaagtagtatatatttttatgtttcagtaacaacactaccaaaaaaaaggcaaaatggatctgcaaaatgtgcaaaaccaaagcatgatgcgtttggttctgtccactgatgccaagcctaggctgaaatggactcctgagcttcaccaacggttcactgaggctattaatcagcttggaggtgcagaaaaggcaactcctaagagtctgatgagagtgatggggattccaggactcactttgtaccacctcaagagccatttacagaaatataggcttgggaaaagccaaccactagaaacctgttctgacaacaagcaacaaggttacagtgaaatccagaacagtgatggtcattgcagcaaggaaatcagcattgggacccagaatcagatgactgaaagcttgaagattgctgaggctctccaaatgcaaatggaagtacaaagaaaactctatgaacaaattgaggtacaaaaacatttgcagcttaggattgaagctcaagggaagtacttacaatcagtgctaacaaaggcacatgaagcacttgcaagacacagttcttccacaactggtgtagaacttgcaaaatttgaactttctctgttagtgtcaataatcaataatgcatgtccaagctctccaatttcagaactcacagaaacacgagggttaagtttgaactgtggagagaggaaacaagacagaggaaccatgtgttcacttgaaagctctttgacatcatctgaaagctctgaacaacaacacatcatggatgaggcagaaaaccctcaaaagtttgatggtgtttcagttgaattgccgttgatttccattcatccagcagaagttaaagcattcaagggagatacaagtgttgatgggagaaagagaagtgcagaaactgattctgatcattgtgttgatcaagcttgtggcaaaaagaagttgaggaaatctgaagtgtcacaaatgcttgacttgaacagccaataccagagagacattgactcaagtgtgaaagaaatagatttaaatttcagttcaagcttttagggacaataaagatgtgtctggttatgttaaaaacatatgcaacaaaaatcattctcaaaagaaaatatgtttataaactatgtatatttttataatcagaaagaaaaaaaaagtcaagaatagtttcaagcttttagggacaataaagatgtgtctggttatatcaaaagcatataaacaaaagttcgcagaagaaaataaaattatagcaagtgcctattttgaaaacgattaccccccttcttgggtggtgttatacaaaaaaagggggg

SEQ ID NO: 130571 - DNA, 207 bp, Glycine max
  Clone ID: PAT_MRT3847_88913C.1
ttctcggacttttggctttaccaagagtagtatctggttcttatcagtcctaatattctgatatgtcggatcatcttgtccacacggcattacattacttttttaaaggggagaatccaacacagtagcttgttactgggattttcatgtgtcgcccaagtgttgcactatagcatgggactgttacaccctgttaaaaaaaaccaa

SEQ ID NO: 130572 - DNA, 1675 bp, Glycine max
  Clone ID: PAT_MRT3847_88914C.1
aaatcaattactattatattaaataatttatgtcttggaaattaaataatttttgaaacagtttgaaggctgggaacggagaaacaaacatgctgtcaacgttcagcccaaagctacaatatagttgcttttttgttttgtcccttggaatgtatgaatgtccattttggaagctcctaatggtaatccaaacacacactatagtttacatcatcggtggcaagtgataaaatcagaatgagttatagaaatatccgttcagctttacttggtgtgtcaaaattaaattacttttttttaatcggtaaaacataaaaaactttttttacgtttatctttttgtgagtcctttaatgtgtgtatcattcaacatttcaactcgaactcatcatgttatgctggaaggattacctcggagacgcagttaaaagttatattcacgaaatatctgacttcagtcacgaaatatctgacttcaactttaatctatacaattcctcatcttgaatcacggttggaatactccatgttccaagagggtgctctgatacctttccaccttctttagtggcttctgcacatcttttctggtagctcagagagagatgtggatcaagtgatttcagtaaacttgcatacttgtcttcagcctcaccaatgcacttcgccagcatagcaggggcagctgaaggtccatatattcggataaacatgcgcaaaatattgaaattgttctctaaaacatcatcctcataatcatacagatcatcagaaacttccactaggaactccgaaattgagagaaattccatatgcaactcctccaccttagtcccttgaagttgatagagaagaagattcagcactcgataatcaaaagactttaaatgaatagccttcatcacatcttcaacaagaatctcctctttgtttgttagtgcagaacagagctttctttcaagagcccagtactcttctccaagtctaagttcttctcttatcctttctgtcaaaaggcctttgtgttcaagaatagaaacaagtggtctaactggctcatttgagaagcaagaaaccaatactttagtttctctctcatctttttctccaaatacacaatttccattgcatggtgtttgcagcaatttctcattcataatgaaagaataggtaagtatttgaagattgattgtggcttgctttcattcaatccataaaaaatgaagtaagattagataaaatccttaagacaaataatttgctcagtagcaatggtcaactagagaatgtgccaattgcttggagtccagcaagaccatggcagcgttttcattacatctcagtaactaactgtagtctttcatctgatcgcagctaagcaaaaaattccttgcaggaattgggacaaaaccagcagaattttgttgatgaggtgttgagacgcgtctttgaggaatgaagatgagagggtaggaataagatgggaagggaagaagcagtggtagtttatggcaagttttcctgagggtactatcaaggagagattgaaactagcgaggaagcggttagagtgatgatcgaggtttgaaacgccccgtgattccatgaattccagcatgctatgtactttctctagtttccgtaattcttccatggccgagaacagagttttcat

SEQ ID NO: 130573 - DNA, 391 bp, Glycine max
  Clone ID: PAT_MRT3847_88915C.1
ggaaggtaacagggtttaatatgatcttatttattctacggggccgttttccacccatttttgttttgtgcttgaaaaaagaaaaaagaaaaaattctggccaagggccttcggggggccttatccccccacaaatttttatgggtggaccatccgggttacctttccatttttaaaatggttggtttaacctaaccctgaaatgggctgaaagggaaaaaatcctgtcccccttggaccaaaaccaccgtggaaagggtttggaaaatcccccccttccaatttgggggggggtggatttggggggaaccaggccgggtcaggaaccgtttcggcaaaaggacagggctagtactaatgttccttcggagtcccatgtttggagggctta

SEQ ID NO: 130574 - DNA, 1148 bp, Glycine max
  Clone ID: PAT_MRT3847_88916C.1
atcttaaaagtcatattaataataatttatgagtaatttgaattaaagtgacttttataaaattctataatatgagtaaatattcattaaatatgtgtcacaagtgtgtttctagtgctccttttatctttattgttactccgatctttaaagggaaaaacacttaggaatctaaagcatgtgacagttgaagctgtataacaatgccacatatatatcaggtcattgttgcaagaaataagactacaatagcttttaacaattgctgacacttacaattgatcatgatatttccctactaccttggctatgccccgctgatattttgtaagataaccagtggccaatgatgcatgaagtgcagccccataaggaagtccatcttcattgattacaagatagggtgagtgtaatggcgcaaccggttcaaatgaagaagcattcttcattccaagcgtgaagtagtagccaggtatgacctcttgataaaacgcaaagtcttcagcagccatgtcttgttccatattagtgtcaactttattgataccaagcaaattcccagctacatcaacaaaaagcttgtgcaggtcaccattatttatagttggaggatataaaggattctcttcttcaaagaagttgacacttgcattgcaccttagcacagcagcttgaccaatgataacctgctcaatgcgttgtttaaggtgctccaatgtttctctagaaaaagctcggaaagtgccaccaattgtgacataatctggaataacattgaaagcatcacctccttggagctttgcaattgtcaaaacctgagggtcaagaggatcagcctcgcgagaaacaaggttttgtaagctaataatgacattggtagcagccattacagggtctatagaaagttggggaagagctgcatgacctccttttccacttattattgcttcaaagaaaccacttcctgccaacaatggaccagacctagaggccacttcacctattggaaagttaggtgtcacatgcaacccaaaaatagctgcgacattttctaaggctccagcatctaaaattttcttagcccctccacctccttcctctgctggttggaaaacaagaactacagttccctattttgacacaaaaat

SEQ ID NO: 130575 - DNA, 250 bp, Glycine max
  Clone ID: PAT_MRT3847_88917C.1
ggctcgagaggaggcgttcgaggtcgttggcgattgcatcaccgtagaaaggctcatgagctacgttgggtcgggtctgaaacccggatcggatccggacgagctcaaggaggcgtacgaggtgttcgacacggatcgtgacgggaggatctcggtggaggagctgtttagggttttcaaggccatcggtgaccagcggcgcacgttagaggagcgccggcgcatgatctagggtgtggaccgaaatggg

SEQ ID NO: 130576 - DNA, 230 bp, Glycine max
  unsure (1)..(230): unsure at all n locations
  Clone ID: PAT_MRT3847_88918C.1
catacttttcattctccttaaccttttatctctncaccnaacaaccaanccctcaaagaaagacttttatttanatctgcccccaccctctanccccacctttnttattcaaaatttttcttacaactcatacaataaatcacatctcttaaatttaatcataaaaaaccttttacttattcatccctatccaaataaatatatcctttattttatacccttccccccaa

SEQ ID NO: 130577 - DNA, 261 bp, Glycine max
  Clone ID: PAT_MRT3847_88919C.1
accgagaagacgacagaagggggtcggatagaatgattcttaactttgtttaaggccttgtttgtttacttatttcaataatagcttttgtttttttaaatttgtttgtcccagcccctaatcacattgggaagtgtttgtcccatggacatattttttgttttttaaaagtttgattttatagtacatggatagagagtacttgaagaaaacaaaaaagatggggaaacatttcctagtttttgccttttgattctgaaa

SEQ ID NO: 130578 - DNA, 546 bp, Glycine max
  Clone ID: PAT_MRT3847_8891C.1
agtttccgtcatcactgtatgacgtcctccttctttgggggggggggggggggggggcgcgagccaatgcgtaatgaccaataatagagaggccccatctgagagaggagtacaatagataacagagggtaaggtgcactgaatatacaaaactacaaaacaaccgggccggggtgcgcgccccacaccccccagaacaatattgaaaggtataacgatgatgacgaaggcccggaatagatagggataaaatgatatttctagggcgcgtagatttaaccttgagaagtagccaaagcattaatacgtagacgcacgggtggcgtgtaacgtttgttgcgcaggttgaggttagcataaagagcaccccagtgttaacggcttggcctggcataaaagagataatccgaaaagttaagcttaaaaacaaatataatttggtaatcgcacagacgtaagctttacaacgtaggtggtttattaacttactgcgacggcagacaatacgtgggggtggcttaggaaactgcgagcgcggcgacggag

SEQ ID NO: 130579 - DNA, 288 bp, Glycine max
  Clone ID: PAT_MRT3847_88920C.1
tatctggcatatagtattagtaaaggtcttgttaatcagtgtccttaggatattgattaaaaaattaaaaggagaaagtatttattatgaaaatcataagagagcataaaaaaatcatgagcagtgtaattttacacatcccaataatttttttctccttttaattccttaaccaatgtcctaagagagttagcatttgcctatattagtaatagtacctaccttgaaatggggaatggttagtttgaggaaatcaggattgggctggaaatctgcatctaatattgc

SEQ ID NO: 130580 - DNA, 318 bp, Glycine max
  Clone ID: PAT_MRT3847_88921C.1
cccacgcgtccgaaaaaaaaaaaaaattaaaaattaaaaaaaaaaaaaaaaaaaaaaagaaaaaagaaaggccggccgttttaaaggtcccagctttccttccccttccttccaacgtattactttttttttagggtaccctaatttaattcaattggccgcctttttaaaacgtctgaactggaaaaaccttggcgttcccaactttaatccctttgcagaaaatccccttttccccagttggcttattaccaaaaaggcccgacccaatggcctttccaaaaaatgtcccaccctaaatggcaaatggaacccccc

SEQ ID NO: 130581 - DNA, 392 bp, Glycine max
  unsure (1)..(392): unsure at all n locations
  Clone ID: PAT_MRT3847_88922C.1
gttcgagctgacatgtatctcccgacacatctacctcaggaagcacgtcggtgttggtgctctcgccaagctctaccgangtgcccaccgacatggaaacaggccctctcaccacaagtgaccacgtaccggtgtccagagggccgtcctccagtctttggagaagattggtgtgctcgagaaggccactgacggtggaaggaagatcagcgttgacggacagcgtgacttggaccgaatcgccacttcgactttggagagccaggtcgaggaggagtctgacgaggaggaggatgaggaagatgactaggaggagaacgactaggactacgagtaaactctttgctcgatcttaccgcctctatcatcattcatccagcgtagcaacagcg

SEQ ID NO: 130582 - DNA, 290 bp, Glycine max
  Clone ID: PAT_MRT3847_88923C.1
tttttatttttctttttttttttggggccgaagataactttttcctctctatcaaatctttttccttctgctctaactgattccgcatctcagctacaagttcctttttctgcagctcaagccccagaaagttttggtctctctcactttgagctgttccagctgggctcgacttctccaacaccatttgtgggtcttctgactcttatgccactttaaaagggactaactcccttggcccatatgcctgtgacgcctgtttcttctacctgagcgttggtgtttaatat

SEQ ID NO: 130583 - DNA, 192 bp, Glycine max
  Clone ID: PAT_MRT3847_88924C.1
ggagagacacaacaaacctcattattacatattcccgctgcaaacaccctggaacacatatcacgttagtctggccctatcttatccttcccctgcatattgttgtccgtcaagaataactaccccaatgtggacgatccctactctgtggggtcatttactgtaataagatattggtccatgacttcggca

SEQ ID NO: 130584 - DNA, 254 bp, Glycine max
  Clone ID: PAT_MRT3847_88925C.1
tagcggctcgttgagtaaccctgctgcatcttatttatctttgcagatgatggaatctccttggttcgcaagacctgttggtgtttctaaggtaagatgtgagttgcctgctaatcatgcagcacacacagttctaggagttctgttattgtttctggtggcttaggtggatatcatgctgcaaacacatcagatgctcttttgcatgcaaataaaaaggaagaagctaccagcatttgcttggcaaaggatcc

SEQ ID NO: 130585 - DNA, 418 bp, Glycine max
  Clone ID: PAT_MRT3847_88926C.1
aggaaggtttcccgtcatcactgtatgacgtcctccttctttggggggggggggggggggggggggggggggggggggaaaattaattgaaaagtggctcgaggtaaatcacaagttgatggtaataaacataaggaaaagaaaagcagatggaaataaaacaagaaatgccgccgtatccggtaaaaggcgagacaagaccggatagaactgtagagaaaagttggatataaatggggggtaattgggaaaaacgagagccgactagccctttaaagtcctggatcctgagagtgaagtaagggggatttaccaagacagcaattgaggcaattaaacgtagcgtagaaaagttaagccgattccggattataaaaaacctagaacatgtgagacctagcgatttaaacgaaaagag

SEQ ID NO: 130586 - DNA, 448 bp, Glycine max
  Clone ID: PAT_MRT3847_88928C.1
ggggggaaaaaaatttaagaaaaaaaccccaaaatatcaaggaaaaacccaaaactaagggttaaagagcccaaccctataattaaaggggcaaatcttaacaaaaaaaaagagaggggttttcatcattcaacgaaaaaaaaaaaaacaattttccggagcagggatcccaccaaaacaaggggggggtaaccaaacccttttgggggaatttttcaagccgggacccgacccattaaaaaaaggaaaatttttttctttaggaaacctttttgaaaggccacaaaggaaacgggggaaagcctttttacccccattgggggggggcccaaattttttcttcccttctcaaaaaacacccctcattttttgaggatggggcactttacgaacaagctttcgcaactccggacgaaaaaattcaaccccctgaacggaaaaaaattca

SEQ ID NO: 130587 - DNA, 406 bp, Glycine max
  Clone ID: PAT_MRT3847_88929C.1
attagacctttacccaacaaagggtagggactgtgtttctgtcacaaaaatgacaggaatgttgtttttaataacattaacaggaatgtttactacttgcttctttatcgccaagaagtccaaagctgaaataagccggaaaaacttagggcctcacactcagaagctaattaaatttagaacaccggacaattggactaccgaaaataattgtttttaaaagacaatgattataagttcacagaagctatggtttgattgctattcaggtcacaggacctgaagacaaagcttttgctttgggatataaacattcccggggtgtaccaaacaaaaacaatcaaaaatttttcaatgcaacaattttgtccccaaagagctgtctttcggatcctcttggaagcct

SEQ ID NO: 130588 - DNA, 475 bp, Glycine max
  Clone ID: PAT_MRT3847_8892C.1
ccacgcgtccgcccacgcgtccgcccattcccagtcatctccactctccagcagtcctcacgttccctctctctctctctctctctcccccgctttaggtttgcctgtgttgggtagagtcgtatagcgaggagaagaggcttggtggcaagaaactggcatttcgatttggggagtggctaaattcgtcgctgtggaatcatggttctgaagtcgcacacaaatctgctagatatgtgttgtgaagatgtgtttgacttccaacaacctttaagatctcctcgtcatgtggtgaactctcctggcatcatatctgaccctgattgggaaagtagtaatgatggcaactcagttggttctatgcctttttgttttaagagaaagattattgttgcaaatttccttcctgtgatctgtgcaaaaaatgaagctacccgagaatggtcctttgccatggatgataatcaactgcttg

SEQ ID NO: 130589 - DNA, 231 bp, Glycine max
  Clone ID: PAT_MRT3847_88930C.1
tatttttaaatttatgctcttttttaaggggcccaagggtcgcatcatttataaatttaaaggatttttgggggctcagctggcaaaaatttacagagcttgcccacactttatttttgtcgggcggcgcccattggactttttattaatacctgaatcccaaaatcaagggctgggaaattcgaagggcctaaagttcatttgcccaacattttttggggcctgggaccc

SEQ ID NO: 130590 - DNA, 270 bp, Glycine max
  Clone ID: PAT_MRT3847_88931C.1
ctcgatccgctctagccgctcgagccgttcgagccgattcggctcgagggcatttgacattgtctctgttgcaaacatgctgcgctcatgaacatggattgctccatacgcgaaatctcatactttcgaggggctgggtggaatcattgccagagagtgtgagcctgaatagggggcagtgctaccggaagagactatattgctagtggaatgagctggatttgcaattttgagatttgtacaaatattgcgtataatcacgtggatgtt

SEQ ID NO: 130591 - DNA, 444 bp, Glycine max
  Clone ID: PAT_MRT3847_88932C.1
tgttttccgtgctctctctcttctgtcaacgaattcatcatggtgtccatatgagaccaagtccctttctctggaacactccactcggacaacacactcaatcactcagcatcgtttaccacttccttcctcggagtattggcacactgatcaacaaaattcaagcatgtgtatctcattctcggattgcgatagcagtcaatcgttttcaagactttcagctcttgagctcaccctatgaatcaggttttccgtgcaaccaactggattaacaacactatgcttctactacaacaagatttctagtctgcatgttatttttaaatggagattaactaaaactgcatggaactcgctccatttcccgaatggtgtttgtaccagactgcgctcatttagtttctacataaccaacctaccatgtctccactggcaacaactttt

SEQ ID NO: 130592 - DNA, 837 bp, Glycine max
  Clone ID: PAT_MRT3847_88933C.1
cctcgctctcctggtcatatcacatatttatataaccatcttcatactcattgccaccttgtgatcacaatattttatttatgttcactacactcttatcatcataactagaacggctcgaggaaaagcagaagcacttttttcatcatggaagcctattctggttcttattcctcatcatccaactcttcatacttgacccaaaacaaccgtgaggactcaaaagggtatcacatgaaacaacaaatttaccctcttcaaaatcacagttcttcgtggctccgttccgtgagaaagacaccagcaaagccgtggaagaagcaccatgtggcaccgatgccaccaacaccagtgaaagtgtacaaagtggatgctataaactttcgtgaagttgttcagcaactcacaggtgcacccaagcacaagcctcagcagcttctccaaatcaacatcgcacgtgctgaatcttctgatgctccccttgatgtgccaccaaagcaaaaccaatcaagtggagacacgtgcaataaatggtaccaggagtttctcttgggaatgaattctccggggactaataataataataatgatggagcaatgacaccgggttttctaggaatgaatttgctctcaccaaattcttatagtaattatttctgtttctttcctcctttgagcccaagtggtgtcacaagtttggaaccggggaaggttctctaggtctaggccttttacaagattctagctatatgctatattgatatgtatttctgttctattatctactttctttctttttcgtttgttactgttattacagttgaattatccatctat

SEQ ID NO: 130593 - DNA, 979 bp, Glycine max
  Clone ID: PAT_MRT3847_88934C.1
acgagcttagacacatctctaggagtgcattttccgcagttgtttgtttaacaagaagaaaaaaaacagcacaataatacatgagcttatccacaagtctaggagtgcattttccacagttgtttgtttaactagaatttacacaaaaaagcatagctagcatgggcatggagaactgtttacgagtgaccacagtaggcacagccacaccccaatgcctttctccattctttccatcttcaagggataagcttgtcttcccaactcacagaggtttcaagaaatccttgcaaaactcaacactgtcatgcccttctctttactcaaccggtgctgcctatagaaagtcccgttttgtttgcaatgctcgtgaagcagtaaatgaagttaaagtggtgactgactcaagctggaataaccttgtgattgcaagtgagacccctgtgctggtagagttttgggcaccgtggtgtggtccatgcaggatgatagcgcctgttatcgatgagttagcaaaggattatgctggaaaaattgcatgctacaagcttaacacagatgattctccaaacatagcaacacagtacggcatcagaagcataccaacagttctgttcttcaagaatggagagaaaaaagaaagcataattggcgccgttcccaaatctacactgtccgcaacagtggaaaaatatgttgaattataaactgagaaaatgataaacaattgcatgcattacagtgctagaattgaagggatggaatgggagaagtgacaatagtgacattgcaaatttcattctcttcaattcttttccattccttaaatggcaatagatagtgtttgtttataagtttaaagaccatctttccttctgggatttgacaattttaagtaatacttgtactcttatttttcattttgtaaatgttacattggataatcaaacttcattcaatgattgaatgttgattaaaa

SEQ ID NO: 130594 - DNA, 276 bp, Glycine max
  unsure (1)..(276): unsure at all n locations
  Clone ID: PAT_MRT3847_88935C.1
attccaggtttccctcctttnccacttggtcactcatntnctccttcgccaatagnccatgttccgcttcccctccgtccttctctcccgcngcctccaccgccgagaactatcctcctccaccacctctnanncgccctccctccctctctcccaccccatctacctnatctggggctccaacaccggcgtcggcaaaaccctagtctccgccggtatcgccgccgccttcctcctctcctcncccancncctcccaattccactacctcaagcc

SEQ ID NO: 130595 - DNA, 452 bp, Glycine max
  Clone ID: PAT_MRT3847_88936C.1
cttcctttttttttttttttttttttatttttttttttgttttttttttgaaaaggaccaaatgtggtgacttaacttgtttaaaaaaaattttgcggactatgtgcggttttcattttgttgctacgggggggcttttgcccaacttctatgaaaaaagaggatgtcattacataaagccctgaacatttgtgataaacgccccttaactgcgtaatggggaacaaaatctcgctgaacatatatggttaggatctttattttactcggtggaccgctttggtgtgactttgctaatgcactaaccatttagatgggcattcattgaatcgggctgaaggatttcttcgagggggggagctaacctagaattaaatgggcgcgcgacaacacctgggtttttcggaaacctggcttacatgaaagagggtggttttagtggcctaccaccc

SEQ ID NO: 130596 - DNA, 488 bp, Glycine max
  Clone ID: PAT_MRT3847_88937C.1
gaacaaacattattatcaaccctaagctactatacacttgtgaaaaacgctaaaaaatgcatcgctcgaaagcacatacaactattatacaacaaaggaaaacccggctggtctagccaaagatgcgtacacacctcttatctttcaagcggtgtagcatgatcaggaattatttttgggatacaacctctctgaactcatcgtctctcagtgataatatcggagaggaccaataccgatgccttccagccccccgactttctagctttgtcttgatccccccaagtataactcggtgttgctgatgccgaatgggtatcccgttggatatcaaaatgcaatgctcaatcaatcggatcaatctttttcccacaagtgaaacttcggcttgttcgttcaacttccacctcacgatcaatccttacgtcgcgtctatttctttccgagaagaccgccgacaatggggatgttgctgacaccgccaccct

SEQ ID NO: 130597 - DNA, 1855 bp, Glycine max
  Clone ID: PAT_MRT3847_88938C.1
agctcgagcttaatagatggagctctagtatcccctttttcttctgcaagaactacaccaactaaaacctccttcttcttttttttttttttaggaggctggtgtgtgttcttctttcccttcttcttcttcttccaatccttaaggaaaaaaactaaagaaaaaaagctctcagccagcatttgacgacagacactaactaaacctacggctggtttaggtctggtctccaaccacgtttaggtttagcttgttctcctcagattagaaacaacccagaagtcgacagtctgtagcttacgttcaggtgaaatttgtgagctatgttcaggcctgtataattcccacttctctcctgtgagagcagcttctcctcagattagaaccaacccagaagtcgacagcctcagtaccttacggagttgctggcagagcatcagaagtttggtcccttcatgcaagcccttcccatatgcagtcgtctcctaaatcaagaaatattaagagtttctggaatgctgtccaatcaaggttttggtgactttgacagactgcgacatagaagccctagtcctatggcttcttcaaacctcatgtcaagtgtcactggaacggggttgggtggatggaatagtcttcagcaggagagattacgcggaacccctggaatgacaatggactggcaagtgtgcacctgcaagtcctagttcatacacagttaagagaattttgcgcttggaaattccagttgatacataccccaatttcaattttgttggaagacttctgggacctagaggcaattctctgaaacgggtagaagcttcaacaggttgtcgtgtgtatattagaggaaaagggtcaataaaagatccagacaaggaagagaaattaagaggaagaccaggctatgagcatctcaatgaaccactgcacattttgattgaggctgatttacctgctaatgttgttgacataaggctcaggcaggctcaggaaattattgaagaactgctcaagcctgtggatgaatcacaggactatatcaagaggcagcagttgcgtgaactcgccatgctgaattcaaatttcagagaagagagtcccgggcccagtggtagtgtgtccccattcaactctagtggaatgaaacgtgcaaagacgggtcgctgaaagttgtccttgattgatggtgtagatgatgagtatcgtggtcctccagctattgattgctgggaatatcttccagtacatgtctcattcaatgcaagctataaaagaataggctaacaattcttgctggttagcactctggtggtttttccttcccctttgtccctacctttttctttttgaacagacaggagacaaagctggaatgaagaatttttaaaagagaaaaattatatagttggggtattgagaataggtttgttcaaaccaaccctttttttttctcccttgcaaacttaatacattcattggatttattcatgcgtcagttactttttgagaagtgtggaatatatacatatgatggttggtggtgatgaagttttaggtcctaagacaatgcagtgtttattggcatgtgacattgtcaaagtctcatggtattttaatatttattataagttagcataggctggattctttttagttgtttgtcacaggcatttgtattctcttcggaggactatgcactgtaattggaatgatgcatgtcagataaacttcttaccatgtaccattaaagaacaaatgtggtatttgtttatatagaatggtacatataaatcttatgcaaattatttgatttttgcccaaaaaaaaaaaaaaaaaaaaaaaaaaaaaa

SEQ ID NO: 130598 - DNA, 141 bp, Glycine max
  Clone ID: PAT_MRT3847_88939C.1
gatcgcaaagcggcctcaacatctgacacagactctatccctaatccctatcttcatctctgctctctccgcacgctttggagcctctgatggcagtttctggttatgacttgtacgtgttattcgcgtgctatccgtgca

SEQ ID NO: 130599 - DNA, 240 bp, Glycine max
  Clone ID: PAT_MRT3847_8893C.1
gtagagctcgagccgattcggctcagggagggtagcacaaagaaagagagtcagtttatggacaacgaagtggaatcatttggaacagaattggtgataaaacaagatctctcaggcgaacttggtggaactgtatgggatgcttcactggttttgatcaaatactttgagaatacatcaatctttccgatcaattattttaaaggcaaaagaattatagagttgggagctggaactggt

SEQ ID NO: 130600 - DNA, 744 bp, Glycine max
  Clone ID: PAT_MRT3847_88940C.1
ggctcgagaattttctcactactatagtaacacaacgcagtttgtggacaaactaagcaatactaattaattaaaagggaaataaataaataaataaggatttgttttgttggatgtaaatttgagatagttgctgcatttgacgacacacgacacagacactaaactaaacctacaacggctggtctggtttaggtttaggtttaggttgagcgatgtcgggtctgtataactccaacttctcaccagtgagggctgcttctcctcagattagaaccaacccagaagtcgacagtcagtaccttacggagttgctggcagagcatcagaagcttggtcccttcatgcaagcccttcccatatgcagtcgtctcttaaatcaagaaatattaagagtttctggaatgctgtccaatcaaggttttggtgactttgacagactgcggcatagaagccctagtcctatggcttcttcaaacctcatgtcaagtgtcactggaacgggattgggtggatggaatagtcttcagcaggagagattacgcggaactcctggaatggcaatggactggcaagttgcacctgctagtcctagttcatactcagttaagaggattttgcgcttggaaattccatgtgatgcctaccccaacttcaattttgttggaaggcttctgggacctagaggcaattctctgaaaccggtagaagcttctacaggttgtcgtgtgtctattagaggaa

SEQ ID NO: 130601 - DNA, 1457 bp, Glycine max
  Clone ID: PAT_MRT3847_88941C.1
ggctcgagctcgagccgctgcgtccgattttggagcagaagaggccgtaacttgtttgttgggaacttgacctatccaagagacgaatatcaaccaaacccatttttttcatttttaggaatataaggaatccccttcttccccgttgcgcttatggttttgtgagcaaccctaatccaccccaacccaaccctattgaattgaattgggggaagaagaacatagaaagaagaagaaaaatctgcacaattgttgtaattgaacgatgtctgctgcggtgtgcggaagcaagagatctttgttcgaagagcttcccccttccccgccagtatccaagaggctccgctgttcctcctcccctattcgcctctctctcccttctctcatcgaccaccttcgccctctcttccctcatatggatgaccaggtcctcgagagagcgctccaagaatgtggcaacgacctagatgcggccatcaagagcctccacggcctctgtttgggatctgctgatgataattctcaacctgctccacaacctgaccaccctaacctcgtcgtcgacacaggtgcgttggaagagaatggggatgcttctgcttctggggatcagcccgctgctgccaattttcctgccggtggagcagaatggattgacttatttgttagagagatgacgtgtgctactagtgttgatgatgccaggtcccgtgctgctagattgctcgaggttctagagaaatcaattactgcacatgcgagttccggggcaacaacggctcttcaaagggaaaatttgatgctgaaggagcatattgaagctttgactaaggagaaaaattgttttaaaagtgctttcagaatccaacttgaacgtctttctgattatgagaataaaaatcaagagttgcagcaattgaagcagttggtgtctcaatatcaggagcagatcagaactcttgaggtgaataactatgctttgcgaatgcatttgaatcaggcacaacaatacaacccctttcctgggtgtttccctcccgatgccttctagggcgttcagtatgtaggatatcataattgaggcagtaaaatagctgcatctggttaatttcccaaagaaaaaaaatgcgtattgttaaattgttgcagtttgtgaagctcctgtaggtcaaggaatagtaactgtttccagttcaggggtgattcggacagagtttgacattatagataaaattattcgtcagtttattcaattgtttattccccattttagcattgagatttgagtgtactgtaattactaaggatgttcaagatcactttgatgtaccatcacagcagactactataaattatgttttatttcccagtcttgactattttcgattatcacaatggcagtgattgttctatgctaaaatttgattaaaaaatggttgagtttgagctttgtgtat

SEQ ID NO: 130602 - DNA, 903 bp, Glycine max
  Clone ID: PAT_MRT3847_88942C.1
aattcggctcgagagtggccgtaacttgtttgttgggaacttgacctatccaagagacgaatatcaaccaaacccattcattaggaataaggaatccaatccccttcttcctcgttccgctcctcctttgcatacatggtttgtgagcaaccctaatccaccccaacccaacccaaccctattgaattgaattgggggaagaagaacattagaagaagaagaagaaaaatcggcacaattgttgtaattgaacgatgtctgctgcggtgtgcggaagcaagagatctttgttcgaagagcttcccccttctccgccagtatccaagaggctccgctgttcctcctcccctattcgcctctctctcccttccctcatcgaccaccttcgctctctcttccctcatatggatgaccaggtcctcgagagagcgctccaagaatgtggcaatgacctagatgctgccatcaagagcctccacggcctctgtttgggatctgctgatgataattctcaaattgctccacaacctgacctccctaatgtcgtccacacaggcacgttggaagagaatgacgatgcttctgcttctggggatcagcccgcttccggcaattttcccgccgatggagcagaatggattgacttgtttgttagagagatgacgtgtgctactagtgttgatgatgccaggtcccgtgctgctagaatgctcgaggttctagagaaatcaatcactgcacacgcaagttccggggcaacaacggctcttcaaaggggaaaatttgatgctgaaggagcaaaatgaagcgttgactaaggaggaaaattgttttaaaagtgctttcagaatccacttgaacgtctttctgatatgagaataaaatcaagaagtgcagcagttg

SEQ ID NO: 130603 - DNA, 187 bp, Glycine max
  unsure (1)..(187): unsure at all n locations
  Clone ID: PAT_MRT3847_88943C.1
gtcgcangcncgcgtncgtcagctcggccttcggctcgagcanatgctcctnttgatctccngttgngcnttgntttgttgggtttnaanggngccggtacngcntttccanaccngattgnntttgntgataagcttgtnttggctancacacgagnnttcattgatggaanttttccngtggatc

SEQ ID NO: 130604 - DNA, 685 bp, Glycine max
  Clone ID: PAT_MRT3847_88944C.1
agcaaacaagcaaatcctttccctgggaccctaaaaaagcatccaaaataataatattgtactcagctgagaatgatgaacaagcaaaaaaggacgtgtctttgagtgttagctcaaaccacaaagaacacaaaatgagagagtagaaagaacacaacattgaaagcaaatactagcacacaaacacattggatccctccatggaaacacaaatcagcttcaacaacacttagaaaacagatggaaaaagggggagcaattaaagagagatctcacaaatcacaacataatgtgaaccccaccatgtaagtacattattggcctttgattcaagtacaaggactgaaggaccccactattgaaagctaaactcaaccatctcgttgggttgttgaactgaaagttgcaaaatcatgagtagaagtgggaatggaaattgaaagctgggttgtggatgatttatcatccaaatcaagccatgatcctctgcttttgggaggccattcatcgaagaagcgatgaacggttttctgaggttcttctttcccaagtttcatgaatgtttcgcacttgatatcactgcctgatatgtagcaaccttgatcttgctgtggatgctttgagttgttgccactgaggctctgaagttgcaagtaggagtactcattgctgtcattggataaac

SEQ ID NO: 130605 - DNA, 219 bp, Glycine max
  unsure (1)..(219): unsure at all n locations
  Clone ID: PAT_MRT3847_88945C.1
ttatntgagtactactttgacatgcaaaggtntcaacnattcgtgcntggaccantgccatgttcgtgattcagnngcttanttcngttagctagcttcacntgtnntgtatattgggctncacaaatggagtaggaanngattnatactgntatgatgtagttatctngcatntatntgtacatntntnctncactgtgtgtaanccgtgaacaactn

SEQ ID NO: 130606 - DNA, 377 bp, Glycine max
  Clone ID: PAT_MRT3847_88946C.1
gaggaaatgaatgtcgcaggaaactttcatcaccacagtgatgaaacttatcctcgtcttgttgttccatttggtagtgttgcaactaatcaacattgaagctctctttatatatatatagatatagattctttattattattattgtattgtatagtacacacatatactgcgtgagtctaacaacaggatcattggtttatttatcattattattttaatttgtaatcttcttctgtttacgttatatgctttattaatgttgaatatagacatttttttttctttttctctttttagacgtaacatataagacaattgtattttataaactctttgagatgtattgatatataaatattattcaaagaacaaaa

SEQ ID NO: 130607 - DNA, 241 bp, Glycine max
  unsure (1)..(241): unsure at all n locations
  Clone ID: PAT_MRT3847_88947C.1
agaaagaaggtgatgaatagaagatcatggatgattttcgatcattatttagtggtcacacagtagagtccgaatttgtttccccaacagcagaagtggatcaaactcttgtataaatccatttttcaggtcttattctagtttattttgatgaaagctttttgttagcaatgactagactgttggaaagctaatgaaggttgattntaaaacattacgagtcaagcatggttgttttgca

SEQ ID NO: 130608 - DNA, 709 bp, Glycine max
  unsure (1)..(709): unsure at all n locations
  Clone ID: PAT_MRT3847_88948C.1
ctttttacgagtgagtagtgaagttgctccctgaaattgccattcattatcattttaatctttaaaattgacaagatttaaaaaaaaatcctaaaattgtaatttcttcttcattttagtccttgctagtttcaacggtagtaagttatcaaattttgaaaatacagctagatttattttttgtcatgcaaatttatttatgattagtatccatctagacacctttgtcattcaagaacacaaaagaatttttttttatatataatttattgagtccaaattattggaaatcccatgattttaaataatccattaatatatttaatttttcctacgccatattatctatttatataagttaagatgtatggaaagtggatagcacacggtaagggtccggtgtggcgaatgattactatttgagctcttccctctcacaaactcagaaaacaagtccaatgagcaatttccagagaatatcacacgaatcccaccctcccccagggtacagatcttcttaccctgcaccccaaccgggttacccatccgcaccgtctcatgaagggtaccctcctgcgtcgccgtcttactgatacagtgggtaccctncgtcgagccgccgatggtcgcgtacatctatagttcttgtacggatcacgcgctcgcgcgatacctcacctgatacataccatagactggtctctctcag

SEQ ID NO: 130609 - DNA, 180 bp, Glycine max
  Clone ID: PAT_MRT3847_88949C.1
aaaagaaaaagaaaattgttgcgttatctggtgcaaaacattggggcggtctagacaagatcgcagtggttgggaaaagcctgaaactaactctaccgaaagctgagccaggagcacccggagaaaaatcctggaaagtgcaatggttgaaaattgaaaactcttaattcaagggacatc

SEQ ID NO: 130610 - DNA, 161 bp, Glycine max
  Clone ID: PAT_MRT3847_8894C.1
ggaagaagcagagggaatagcagcattaagaatgcagatcttcgtgaaaactctgacaaggaagactagtaagcctcggagtcgagagcagcgaaggatcgacgatagtcaagagcgagggttcaagagaaggaggggagtcgggccgggtgagcagcgtg

SEQ ID NO: 130611 - DNA, 265 bp, Glycine max
  Clone ID: PAT_MRT3847_88950C.1
gaagaaaagggggaccaccaatacattcagttttttgttgctggaaatgcataaaggtccaccttgtttttttttttataaaaggcaatataaagccgggtaacccggcaccacctgttccttttacccggaacaaaagatttacaagcctcagttgttccaagaataaggattttgcaaaacaaatgggttttctggattcttttttttgaaagggtccttgaccttcccaaaccccttgaaaaatttgaaaaaacctcgtttt

SEQ ID NO: 130612 - DNA, 396 bp, Glycine max
  unsure (1)..(396): unsure at all n locations
  Clone ID: PAT_MRT3847_88951C.1
gcaatagnggnaacccccgggcctgcagggggaaaacgtagtacccaacaaacttgcattgagctncagcggaggccaaagggtcttcgntcttggccagcngctggcngagggaaaaagcggagttggtactttgttttttcaactgcgaactnctaacttttgggggggggggggcaatngacaatttttaaacaaatcacgctcgctcaaaacaccacgcgaatcactccgtgcgggcactccccctaaacgccccaaccaggtttncacgcgacgaccatcaacgaaaaacgtccgacgaaattccgcggcccggaccaaacgngcctccaccggaaggaaagcgtcgggtccagaagcaaaactatgcggggattgatctcaagacggaac

SEQ ID NO: 130613 - DNA, 571 bp, Glycine max
  Clone ID: PAT_MRT3847_88952C.1
ggctcgagctctaaagctgcgaaggattgtggttgtcgtgaattcgtgacactaaccaggctctttgagcaagattcaggttttcttgtccaggacactgtcatattctctgctgaagttcttatattgaaagagacatcaacaatgcaggatattactgagaacgattccaagttaagcagcagtggctcccaggttgatggtaatgggaaaagaagttcattttcatggaaagtggagaatttcctttcttttaaggaaataatggagacttgaaaaattttcagaaaattctttcaggctggtggatgttaacttcggattggagtattcgagtcgtttgacaccatatgtattcatctagagagtgaccaggctgttggaagtgacccggattaaaatttctgggtcagatacagaatggctgttgtgaatcaaaagaacccagcctagacagtgtggaaagaatcttctatctgcactaagacatggaataattcagttttgtcattcatggaggtcgttgatttgttggaatctgatgcaggatttctgtccttgacactgaagt

SEQ ID NO: 130614 - DNA, 361 bp, Glycine max
  Clone ID: PAT_MRT3847_88953C.1
ggaaaattagtgggtgttttttccccttacttttaataattattacattgcatcagcattctctttgtggtttcaggcggagcgaagcaatggagcgcgctatttccgagttttcggaggagcaggggagccggttcctccttgttcgcaagctctctcaggaaacgattgcaattgcggtttttcgcttcgggagaaaatggcggcactggaggtgctgtggaggagatatccgaagccgaaaaggagcctaccaatttcgcgtggcctgataacaaaaacccagggtgggcatattaaggtggtggattcgggggcttatatactgctttaagggtggatcactggaggggcctgtaat

SEQ ID NO: 130615 - DNA, 173 bp, Glycine max
  Clone ID: PAT_MRT3847_88954C.1
gacagcgtaaagttgctgagaggagctgctttttctcgggtatgtgctagagcatttaaaggtacttgagcaatttggaaatgtcgaaattattgcggcaatctttgagcaaattcactttcagtcacataacgggaacaccaactgggcatagaagtagtagcaccagaaca

SEQ ID NO: 130616 - DNA, 298 bp, Glycine max
  Clone ID: PAT_MRT3847_88955C.1
aaaagcatacaactgtatctagaggtgggcgttcttaaaaatgaccatcgaaatgtgcaaccttgaatcatgaatatggactgtacactggcacccatcgagattcactacttaaccgaacatagctgaaacgctgatgcaaagggaggacggttatagtcagttgggcactcttaaccacttataaacgggtgccaagaaaaagttgcgctttgattaaatcagaccagaatggaagctccatgtgggccatttagcttaactgcctacacgaggctttgctcggatctttggatgc

SEQ ID NO: 130617 - DNA, 265 bp, Glycine max
  unsure (1)..(265): unsure at all n locations
  Clone ID: PAT_MRT3847_88956C.1
gtaancctggaaaccccagttanntcnagccctttaatcgnntgnnantggtcnaacntgccngantanngaacngnatnnagcnantactaagagggatcnaggtgggcctggcccacggntaccttctggtgggcccattcgtgaaggccgggcctcttaggaacaccgagatcnccgggcaagcgggntctctggccgccgtgggcttgtggtgatcctcagccttgcctcacaatctatgggatttcaatccttcaacgaa

SEQ ID NO: 130618 - DNA, 420 bp, Glycine max
  Clone ID: PAT_MRT3847_88957C.1
gtcgaacacctttttttttttctctaaagatgctttccctccgttaatttataaaaatgtgctaggcgggtgttatattattatcttttaaaagtgtgttacataataagatgtattttttggattctagtctttcatgtcattgaagttagttttcttttttattctcaaatcaaccttaatatttgttagatatatggatttaccttttcatttttataaagttaaatttaactaaaaaattatataatttatttatctcaatcaccatatgttttaatttaaaaactcacttttttattcttcacttttttctttattaacccaatataatcacttactttttcctttttcataatatattaatatttttctaattcctaattaaaaaaaaccattcatttcattatctaatactta

SEQ ID NO: 130619 - DNA, 121 bp, Glycine max
  Clone ID: PAT_MRT3847_88958C.1
ataaacgataatattccatcctcgtttgtttgcgattccctctgacttttctcattggagggcgaacatccaatcagagatttcggtcatagaagaatatggcttcgtcttccaccagtga

SEQ ID NO: 130620 - DNA, 428 bp, Glycine max
  Clone ID: PAT_MRT3847_88959C.1
ggaattcggcacgaggcaaaaggcttctttttgttttcttgataacataaccacaaccaaaaggtggttaattagtttcattttcatctctcttccacacataaaatagcaaaaccaaaagcacaagtgtgtagtgtagtaccaccacattccccctatgcgatgatttgtgtaaagagaaacaaccaacaaaaaatgagttgtgttatcctctttcttctgctcttgttattgagcaccaccccatgtcacgcagcagcaagaaaaaccagatttgacagactcaaaggtggttcttcttctgatgatgagttcaaattcaaaccctctaataacttccatggtgctggccttcaaggaaacaatgcacaaaaagatggagaccaagtttttggtgcagacaaaaggaaagtgtacacaggacctaa

SEQ ID NO: 130621 - DNA, 335 bp, Glycine max
  Clone ID: PAT_MRT3847_8895C.1
ctatcatgttgtttgagtcataccaggaggaccactgtgcatgtttaatttcttgaataacactacggcagttgcttatagtgaatgagagggaggcgaactgcgctgatttcacaggacagcgtgatctgtgtatagatggacccccacgcctactacgatatatgcagatgctcaatggatgtaacaccttggggcgcactcagctctagacctccaatcacgcagactaatctgcatcaatgttgcattgctcaacgacacagatgctaattctgataatacggagctattgtatattaactctagctctgtcccttttataaaacaatgca

SEQ ID NO: 130622 - DNA, 232 bp, Glycine max
  Clone ID: PAT_MRT3847_88960C.1
ctcgttcacaccgagggcgaggccgccaaacgaggatcaaaactccacaagcaggcacctggtcagagcagcaccatcaaggacaccacacaccacaggcagagtagagctgcgtggcacacgagaagaccatttaacgccggccggcacagcaccaaatttgagcacaacattctagcgaacaacccaggagaaagccctgcctgattccggcgcccgaggacggacaagg

SEQ ID NO: 130623 - DNA, 394 bp, Glycine max
  Clone ID: PAT_MRT3847_88961C.1
ttaataatttttttttttccgggcaacgctaaagatggtcatttataaaaactttcaggctgcaaaacacacgaacagaacagactttgaacactatacactgggacccctgaactttgaaccctcatatagcttaaccactagcctccttagttgctagaattgaaaagacaaagaacattcccgaattggacttatgacatataggaggggccccagctacttaggtccctgacagattgggtggactcctctgattgctgccccttctgattgattagcgctgtggagatcatggcatacgaagatcgcaacatagcctgaaagaatgagcccccaagggttttaagctgccgcggagctgatctgaacccatgatgacaccagagtatgc

SEQ ID NO: 130624 - DNA, 154 bp, Glycine max
  Clone ID: PAT_MRT3847_88962C.1
ctatctaccccttttagacaacaccattcctaacataggacttgcctgaatgacaatatgcagattatcaaaccaccattggttgatattgcctgaaatgcatgtcaatcttttcaactaccggaggactacaacgtgcaaacaacccgtcaat

SEQ ID NO: 130625 - DNA, 495 bp, Glycine max
  unsure (1)..(495): unsure at all n locations
  Clone ID: PAT_MRT3847_88963C.1
cgaccccgaggcagcccggggaccaggccaaacgccgcacagcccaccaccggagacgacggcgccgaaagcaaagcgcgcaccgaacggaccagccgcaaggacaccggagcccacgaaagagcagccccaacagacatgcaccgagcccaagaagcaagccttcccaggactggagaaaagagcgggagaacgccgcccgctctaaacgcgagaaaaaggccgacgccaacagacaagggcgagaaacccaggcccccccccccgagcccgacggagaggggagaggcccaggcaacgcccgcccacaaacagaagaggaagcgagcccgcagggngcaaacaacaagccaagaggacgaccccagcaggacgaagcagaagcagaaaaggggaaaagaccggcacgagaggaaaaaaggagaagaaagacaacaaagagcgcgacacaaccgacanaccagcaaacggcaagcaaacaaaccagaggcggga

SEQ ID NO: 130626 - DNA, 808 bp, Glycine max
  unsure (1)..(808): unsure at all n locations
  Clone ID: PAT_MRT3847_88964C.1
ggaaaagaatgatgtatgtatctatatagactttaacaaaatgattgagtatatacgaaagttaaggttaaaaaattttaatactatttaagtttaatttttaacaaaaataattattaattaaactttatttattttttaatcaaacttcaaattagtcaaaatcttttttccaaataaatcaaaggaataatatatatatatactttagttctaggtgataccaaagatcctcctacctgactcacgagccaagggcttcaatgaaattctcacaacacaattaaagagatcagtcaacaaagcgtgagaagttaagacaatgcgtgaagtctaagcctctaagtagatggggcgttagtttcaagaaattcttgaccagatggaacaaaacatttactagtgtttcaatagtactactagagttgttgccactcacttaatttcaaatatgatatcggaataacattttcatgaatattatttttaacaatataatcaattttgtgaaacaaacacacacacatatatataaaagtcaaaaaacatttatatctttcattatttataaaatttctttagataagtgataatcacacaccatgaataaaatatttgtaataatagaataaaatagaagtctgagtgtcgagtctataaaaactttgtttgtacttaagtatgtgaatatataattttcaagaaataaataaattggtttaaaagattgtgaagaaaacagaaataaattgacagaaaactaattttaattaaacaagagaaaaaaactanaagagaattatttatt

SEQ ID NO: 130627 - DNA, 497 bp, Glycine max
  Clone ID: PAT_MRT3847_88965C.1
ccttcgcgtccggtgatgatggacactttgtctatctagacaacacctttctaccttccttctcagcttcatctcaagtttataactccctctatatccatttattaattgaacaaaatgtgtcactgagtgagagagagagagagagagagagacatcatagaagaagaagaagaagaacgcaacatggcgatgtactttcacggaagcacttcggaaattcaaccttcttctgcagatggcggtttgcaaacgctttaccttatgaacccaacttacgtaccctacgctgacgcgccgcaccacccaacagcgctcctcgtcaatcccaacgcgctcaacctcgcgaatatcccccacgcgccgtcagtgtcaccaaaccatcagcagcagcagtccctcgccttcactataacctctggggtccggtggttgatcatccgggaacgccgtctagcagcttcggtggcggtggtttccggcggtcgggtcagcaa

SEQ ID NO: 130628 - DNA, 3033 bp, Glycine max
  Clone ID: PAT_MRT3847_88966C.1
cggaattcccgggtcgccctccgcgtccggcagagagtactactcatgaaactctcccaagtgaagtcccaacccaatataaatccatctgaaagcaaaagggagagaagctttaatttacttgcatcccctgccccgcgatgatggacactttgtctatctagacagcacctttctaccttccttctcagcttcctcaagtttatagctccctctatccatttattaattcagcaaaatgtgtcactgagagagatacaatcatagaattgaagaagaacgcaacatggcgacgtactttaatggaagcacttcggaaattcaaccttctgcagatggcggcttgcaaacgctttaccttatgaacccaacttacgtaccctacgctgacgcgccgcaccacccaacaacgctcctcgtcaatcccaacgcacccaacctcgcgaatatcccacacgcgccgccagtgtcaccaaaccaacaacatcaccacgtgattcacggcgtcacaagcatcatcggatccggcaattccgatgaccactcccgaccgtcgttgatcggcgaaaacatcgccgccttccacggcttctccggcggggcaggcactgcctccaccaccgcccctcgccttcactataacctctggggtccggtggttgatcagccgggaacgccgtctagcagctccggtggaggcggtttccggcggccgagtcagcagggtttgtctctcagtctttcatcacagcaaacaaattttagatcagtttccggcgagcttgacgtggccggacagggccacgttgccggaattgggaactcgccgatgtcggcgtcgatcggagtttcaggtgttattatggggtcaaagtacttgaaagctgcacaggagcttctggatgaagttgtgaacgtgggaaaaggaatctacaaagaggagaaattctcagagagcgtgaaagcgaatagggaatcaactaattctggtgctgctggtgatggtggagatggttcaagtggtggaggagaaaacagtgcagggaaacaagtggttgaactcagcaccgctcagaggcaagagcttcagatgaagaagtccaagcttgtgaccatgctcgatgaggtagaacaaaggtacagacaatatcaccaccaaatgcaaattgtggtatcgtcatttgagcaagcagcaggttatggggcggcaaaatcttacactgcccttgccctaaaaactatctcaaagcaattcaggtgcctgaaagatgcaatctctgcacaaatcaaagccacgagcaagacattgggtgaagatgattgcttaggagttaaagtagaagggtcaaggcttaggtatgttgaccaccatctcaggcaacaaagggcacttcagcagctaggaatgattcaacccaatgcatggaggccccaaagaggcttgcctgaacgagctgtttccattcttcgggcttggctttttgagcatttccttcacccttatccaaaggactccgataaagttatgcttgctaaacaaactggacttgctaggagccaggtgtcaaactggtttatcaatgcccgagttcggctttggaagccaatggttgaagaaatgtacttggaagaaatcaaggagcatgaacaaggtaatggctcagaaaacaccaaatcaaaagaatcgagcaaggagttggcttcaacagcaaatgttgcactcgatcatctccaatcaaaacatgaaagcttcaacaaccaaaatacttccccaaccgagatctcaacaagctcttcaatgtctccaatgggagggtcccttcaatcccactctggtttccatcttgcaggatcatctgacatgcaaattaggagtccaaacaaaccaagaagttctgaaatgcaaaactccccaagtagtatcctttcagtggacatggaaatgaagcatagtggtgaccatggaaataatagagatgccaacacaaagtttggtattgaaaggcatcaccaacaaaaagatgggtaccctttgatgactagcaatccaaaccatggtggggggtttggagcattcaccatggaagacattggaagcagatttaatgtcactactgagcaactagcttcaaggttccatggaaacggtgtttctctcacacttggacttccccacaatgagaacctttctatgtcaggaactcaacaacatgggttcctctcacagaatatacacctgggaaggagacttgaaatgggaacaaatggaaatgagttttgtactatcaacactgctccaccttcttctcactcaggaaccacttatgagagcattgatattcaaaacagaaagaggtttgttgctcatcagttattaccagatttcgtggcctaggaagtaagaactgatggctagctagctagctaaaacaatattggataatttatgagagaaatcttagagttctgatgagtgtttctctagacttggctaattaacttcgctagcagcaccaagaaaagaaaaggagagggtttatgttattttcatttacatatatatacacatgcatgcagtcactaattatgaaatattgtaccgtgattctggtatactggaattcctggcatgggaggggatgctagctccctgtaaacattgaatagtagcatatagaactatacttgcagagatttaagttagcttaatattaattataggattcataaagttggggatggggtatatatattgtatatggtattggatgtagccaggtacgtagatggatttgaaagatttcttttgatttgatgttatatatatttgtgcaccagagttattatttgggtatagaagaagaagcattgctttgtaaaattaggtattcctgcgctgtgtttttggttccatatccgtttgtcttctgtgcatagctggttcaaggtggaattaattgtgggagacatgcataagagggaatatacgcataggcgtccaatttggacgccttctataaaatagagtttgag

SEQ ID NO: 130629 - DNA, 306 bp, Glycine max
  Clone ID: PAT_MRT3847_88967C.1
ttcgaagggatggacgaacacagaattcatggaggatgtcaagcttcacgctatatggatggacccagctgggcctaaacccacacactgctggggacctacctaaaaggggggcatcagcatagggcaccttgctgatcactcaaaacgacctgagcaactttcctatccatcgcgaatagtggggaccgctactggaacattttgggctatgtacaggactgtggtgaccccaaaagagagggacccgatgagtggacacattgccatcgcagggacaggcctacaccaactataacgcatgtt

SEQ ID NO: 130630 - DNA, 217 bp, Glycine max
  Clone ID: PAT_MRT3847_88968C.1
ggagaaaacggatatgaatgacctatctcactgggagggtttcataaagccgtacccttacagccgtatcattcaagcgaaaccttttatccgattccttctgtcgtacccttaaaatctaacattggaggcggcctcttctgttcgtatccttcagccagtttcttacatccgaacccttaaaacataatcttttaaccgttcctttcagtcaaat

SEQ ID NO: 130631 - DNA, 359 bp, Glycine max
  Clone ID: PAT_MRT3847_88969C.1
ctaattgcatgattcaatcttttatttcttatatgatatctcaagagattgctcgacagagcctcacatctaacatgtcacatgtctaataaacccctacttgcctcctcgaggggagattaatggatctctgtaagcccaaatgttgcaggaataatactaactcctgcggtgacaacatatttcaaaactcggtcttactgactaaagactcaaacataacgaaaaggattgccatgctggaagaaggaaccacattcaagagcgaggaagccctctcttgtgacgatctatgcataatacatgatgaacatggatatatggggtgacaggggaaatcatttacaaacgtgcgaccc

SEQ ID NO: 130632 - DNA, 264 bp, Glycine max
  Clone ID: PAT_MRT3847_8896C.1
catattctcggtttttgtttttttttttcctttttttttgggggtaattcaaaataggtttggctcttcccttgacaaaaaaaaatttggctccccgggttttaaacttttttagcttaaatcattcaagtttacactacagactatctttagcgaaaatccccgccttgggttggggggggaattttactggctaaacgatcttaaccctttaattaaagcttgaaaatcagagtggggtcatccacctttttccattgcccc

SEQ ID NO: 130633 - DNA, 410 bp, Glycine max
  Clone ID: PAT_MRT3847_88970C.1
caaattatacactgcctccaactcactgtacggagtagcgggggcgacatgagattataccatataataataatctgacacaaactgacaagtagttatagacggcgatcaagacaatttggtgcatgggctggtggagcctcagctagagcagatcacacaacataggccccaaagccgatcgtgataagggcagtgcagatgacacgcaaagcctcataaccatatatgagcaatcctgactgctcaaagacaagagagctctatgctatgccccagagcaaccgggggccacagccaagacaaattccgtctgcccaaaatgcgcgtgctcgggaagagaggcccggccaatgtctggagtgccaccagggaagaacaagatgacaatcccatatattcactgaatg

SEQ ID NO: 130634 - DNA, 134 bp, Glycine max
  Clone ID: PAT_MRT3847_88971C.1
tagttgagatttaccctggctatctgtctcttccgtacctaaatacacccaaaagaaagtattggtactttggaacatttatgggacaagagactctacaggcacgtgttgggacatgaaaagcaaatgttagg

SEQ ID NO: 130635 - DNA, 333 bp, Glycine max
  Clone ID: PAT_MRT3847_88972C.1
ggcctacaaaccttatgctttgtggagggctatacaatgagaccatcccacccgttcacaacatccttttgcaatgcaacaaagtccacataccgatctaattaaaacccggaaatattttaacataacaaaatatatataccccctgaaaaatagcggcaatacaaaaggacgggagagctactcttcttttttcacacacaatcgagttcccaccctcccacccaaggtgctagatgtctgggccacgtacacaagcaccccagaggactctccttaccctagggtaacctgaagccgttgctaactttaaaaacatccctggcctccgta

SEQ ID NO: 130636 - DNA, 303 bp, Glycine max
  unsure (1)..(303): unsure at all n locations
  Clone ID: PAT_MRT3847_88973C.1
ggctctggaacctttgggctcgatttatgtgccttgtttcatgtgcttgcttatgtgctctgcttatcgtgcttgcatgcgtcgtcgagaagatcgatagaggcggggtataagtcgagcccgcacgactgagacaatcagtaaatagcgacgacgaaaacgaaggcttcacgcccctccntgccgtcataaccccaggcaggtacggtaacgtatacgctgcatgaaacactgcctttctccttgaacgtaataatcgagtccacggcgttatgcatccttggaaggcgaaacgttgtaagc

SEQ ID NO: 130637 - DNA, 318 bp, Glycine max
  Clone ID: PAT_MRT3847_88974C.1
cttacgcttccgcggacgcgtggggttgaaatcatgtttcaagataatgaatgctgcttgtacctggtcttttgactcttttctgatattttggtttgtttctgtattgtcaatgagacgtgttacaattcttgctcaacatttatttcaatggcaggaagaaaaagatggggaggcacctagggttttgcagcactacacagctgaaaaactttcatgctttggagaacttgctctaatgtacaataaacccctccaggcttctgtatgtgctgttacaaaagggacttttttggtcttttaaacgagaagattttc

SEQ ID NO: 130638 - DNA, 270 bp, Glycine max
  Clone ID: PAT_MRT3847_88975C.1
cagaagcagattaacctcagaaatcctgtctggctggcagatttcaagtaaaaaaaaaaaaaaaggtgggttggggggacccttttctttctagttgtctttaaggaaaattaattttacttttttttttgttctggccgaaatttttatgagatatcccccacttgccttccattttgaaccggttaaagcccatagctgtcagctctgaatgaggaggggaaaagcccctgggtctttctttaaaagcaatccgctgcttaagggctc

SEQ ID NO: 130639 - DNA, 1556 bp, Glycine max
  Clone ID: PAT_MRT3847_88976C.1
cgtgccagatcttgtggacaaggctgtagcaagtgaaggtggaactgatgatgccaaaagaaggggggatgctggggctcgtgcattgggagctcacttggcaaggctgatggaggagccttcatcatatgggaagttaggcctcgccaatctcttggaaatgagggaagagtgcttgagagaatttcagtttgttgatgcctatagaagtataaagcagagggaaaatgaggcatcgcttgctgttttacctgacttgctggtggaacttgatagtatggacgaggaatcaaggctgcttacactaattgaaggtgttcttgcagcaaatatttttgactgggtctagatctcgtgcatgtgtggatctctatcataaaggaactattattgaaatttacagaatgagtcgcaacaaaatgcagagaccttggcgtgtggatgattttgatgcctttaaacaaagaatgttaggaactggggacaagaaaccacccccacatagaagagctttactttttgtggacaatgcaggtgctgacattgttcttgggatgcttcccctggcacgagagctcctccgccgtggaactgaagtggtcctggttgcaaactcccttcctgctttgaatgatgtgaccgcaatggagctccctgacattgttgctgaggctgccaagcactgtgacattcttaggcgagctgctgaatctggtggcttgctggtggatgcaatgactaataccttggacagtcctagagaaaattcttcttctgttcccttgatggttgttgagaatgggtgtggtagtccatgtatagacttgagacagggtcagctctgagctggctgctgctgcaaaaaatgctgatttgataattttggaagggatgggtagagctcttcataccaacctcaatgcccgatttcagtgtgatgctttgaagcttgcaatggtgaaaaatcaaaggttggctgaaaagttgattaaagggaacattttcgactgtatatgcaaatacgaacctgctaactgaaagcttaatagcatccttggaggggatgtagaataaacttctgagagcagaatgctgtgtttaaatttgactattacttttttttttgtatcattgtgctatatatagttctctctctctctctctcatatatatatatatatatatatatataactatatatgcaaataagagatgcaagttgaaagcttctaagaacgtgcttattgtctatttcatcgggcatattttggggtacatgcaggaagtgtcagaaaagttaattgtagataacatttatgattgtacttttaaaaacgagcacgcagaacatccataccgaggctcggtaaaaatttccattctcttattttggttcaatgggtaaacaagatttgaaacctttctttttaactccatgatgattaatattagttgtgcctttgaagaaaggattaatttactttaagctatttttaattttaattacatgaaattggaatttcattgtgctaatgtaattttagataagtattcat

SEQ ID NO: 130640 - DNA, 664 bp, Glycine max
  Clone ID: PAT_MRT3847_88977C.1
gacatgtccaagtcttctgcaagtggtgggtgtcatattgttgcatgagtatgcattagttttttttaagaattttctcaattttccaatgctctgccctggtagagagatataaaccatgtctcagctcttaccttatgaattaaaccatgtcgcgtccgcggacgcgtgggagaaggcagaactcttggagaagttgatgaaaaccagagactctttatcagctccactaaccaagacacttgggctgtctataagctttttcaaaattaaacaattattgctaggggacatgtccaagtcttctgcaagtgatcttgaagtctcttgtgttcaaatgtttgaaatgtattgcaaaaaccttccgctttcaaaagatatggatccacaagagagcatgcatggtgaggagctgctttcaatgatatgtaatattttggtccagttattctggcgtacccagaatgttggctatttggtagaggcaattatggttttggagttcggcttggcaatacaaagatatgtgtcacaatacaagatcttgctgctgcatttgtatagccactgtggtgctctatcagtggcacatgaatggtataagtccctggaagtcaagaatattttgatggaaagtattttgcaccacatatggcctcagatg

SEQ ID NO: 130641 - DNA, 550 bp, Glycine max
  unsure (1)..(550): unsure at all n locations
  Clone ID: PAT_MRT3847_88978C.1
atgcagctcaaaatatacannngagatgaccaatcttagctatcgcctcatatatgagggaggatgggcaaacacatcatccctactagccnnnngccaaccggaaagtgaggagcataaacggaagagtgaaaagacaaattgactntcacagttattcctaagcttcaacaaactggacatagatactgtggcaaacgtgctgtataatcatattcccatatgcctaaaacattaatagttacaccatggactgcacactttgactgacactgttatttacaactaaatctgcagagtatcnnnnntatcttactgttaactgttaaggctgcaaccattgaccgaacaacctattcatgtaactcctctatgctgagcccgcctctaagatgatatctacctgatacatantgcccacctcattgctgacttgatcttcagccatcccacannagctctggctgagcaagagcgatcctnnnnntacctgggtatactgggagatggcatgactgatgggaatgaatagcnatcctcagcactcatg

SEQ ID NO: 130642 - DNA, 295 bp, Glycine max
  Clone ID: PAT_MRT3847_88979C.1
gggaagctattgctatggttccatctatcaaggtaaaaataatttgcttctctctatttttgtattaggtaagtttggtttttttgggaatgatttccattctctctttgatgtttgttaaaatgaactatgaaggaaatagaggatttaataaaagcaataatgacaagtttttataactttttgctcttctaataacagttaaaattcaattttgacatgcaccagaaagtttataaagtaatttattttacaaaacaccccgaagtggaggactcacaaaaagtaaatgctg

SEQ ID NO: 130643 - DNA, 731 bp, Glycine max
  Clone ID: PAT_MRT3847_8897C.1
ctcgagccgattcggctcgagggaacaagtacttcactgacggtttatggtctctcatgggtagttctggctgggcttataattcttttcaaggggttcacctttagccagaagatatcggtcaatttccagcttcttttgcgctttatacaaggaatctcccttttagttgcactggctggtttagttgtagcagttatattgactgaactgtctttaccggacatatttgcttctatgttggctttcattcctactggttggggaattctgtcaattgctgctgcctggaagccggtgatgaagaggtttggactatggaaatctagatcaattgctcctctatgatgctggtatgggaatgctcatctttgtacccatttttccattgtatcaacaactcccaaacttgatgttcttttaccaggctttgccgagggttagaaatttctctaattctagctgggaacaatcacaatactgggatatagttgtatttggttcatgccttgttcctaaacgtgatacgatctatggtgtctattaaattttgtggggttgagtcggtaattttttttaggaagcctagattttctgtaggtctcgtcagtattgtgaatacctgtatcatcagtattaattctcttatattcttccatctaaccaaaccttccagaattgaaattcagcactgcctacttttaatagtgcaaaatctatttagctaaaaa

SEQ ID NO: 130644 - DNA, 366 bp, Glycine max
  Clone ID: PAT_MRT3847_88980C.1
atataattgtattcttacttggtagttcatttgtataacggaaattacaaactggggagatcattctaactacacaataacattgactttaaatatatttaataagataagcgggcaacatgaatatatcttttcctttatagagcagttatcatatttcttaccatgcatattttatttaataaatatattcttctgcactgttttaaaatttctaatatgggcgttccttcttctatttagttttttctccttttatttaattttcggaccggtacctttcatcttaccatttttccttattgttagtcattttatatctttttgtattcatttccttatttttttcttttgtatatatttttt

SEQ ID NO: 130645 - DNA, 297 bp, Glycine max
  Clone ID: PAT_MRT3847_88981C.1
cataaactctagtggtgttgatggccaattcattaacatctttaacgtaatgaaaagtgtttggtggggaagatggaatcctaacaatttatggctatctaaagccgcattagaggaaggactaaagaagaataccggattcgggcaaagggtacaattacttgccacgatcacccggaacacaaaccaaaagcactattggctagaaggagacttgcaagatataggtgacataactgtaagaggaaggagaagatgtagcttgaaagggatctattgagctgctttacgaattgg

SEQ ID NO: 130646 - DNA, 292 bp, Glycine max
  Clone ID: PAT_MRT3847_88982C.1
gcaagatacgtgggagggaagaatgcactttgatactaaatcgcgctctaaatcggtaaaagtttctctacaaaagcacattttggtagtggaaaaaccactagatctgatataataggtgctggttcacatgcttcaaaaccaaatactgaagaggaagatcacgaaaaacccaattcgattgatgccacattgacacaaacaacagatctaagatcgctgatgttgaggctcatatgtaaacaaatccttctaaattgactctaagagatgttgaaactaccaaaggatc

SEQ ID NO: 130647 - DNA, 286 bp, Glycine max
  unsure (1)..(286): unsure at all n locations
  Clone ID: PAT_MRT3847_88983C.1
taaaaaaaaaaaaaaaaaaactatttaagtagtcctaaatcatgccaagtaatcttccaaatattagaaaatcttttaaattagactaaagtggtggacattaagtactccatctattccttaaatactaatttcattactctaaggactactaatgagggacacggggtaataataatagtttgatgatgaaattgatggtttattctatcgcaagcnnatgaacatannnnnatcgtgaaatcatttattctcctccctctcccgattccnntnatcgatcctc

SEQ ID NO: 130648 - DNA, 129 bp, Glycine max
  unsure (1)..(129): unsure at all n locations
  Clone ID: PAT_MRT3847_88984C.1
cnttgganctcgtgtaatnnagtatgngcaggaagattgtnactggcgtcatgcagcattgtcgtgntagncatttcagcangacagtgnatgncanaatcaagntagnnatttattcaatcatgaatt

SEQ ID NO: 130649 - DNA, 1202 bp, Glycine max
  Clone ID: PAT_MRT3847_88985C.1
atatccgctagacgtcattttcaaaggaaaccgagccatcagggagatccaacgccagttaatgcttggccgttgcaggaaaggctttggatccccactggagatcagcccccttctagcgactgaagggccccaacccctcgaaaaacctatcctttcatgtccaaggatgctgagaaaatgcaacaactgccacaaagccgagcattttacatcggatgggatggagatctccagcagcagcagcaacaacaacaacagaaacaccatcgccatcagtaccgctcatcaatccctcacacttactacgagcagagccatgagacaaccaatgagatagtgtttggggcagtgcaggagcaggataggaagcaggagtctgtggttatcaagcctgtggattatggggagtcaatgtatgaacacaatattaggtctagaatgagttccatgggctatggttacaggtattgagtatataacagttaggaagtttagattttagaaggtaatgatctcaatggagaggaaagaatgaaatcaggtataggtagtggtataattaatgatttctttcagtgggatcttagtaaggagaaggtggtggtgatcataatgtgaattgtttattcagttttgcagaatgtaggttgatatggtgtgtagtctaagaagcaactctggcattcatgagggggtagggtgggatcaagaaattttgcatgctatttcttctgatgatctcattatgtttaaatgtccaataatactctgaaaaaaattggtaattttttctttctgttaaataattacatttcctgaagcttcatgggttatggttacaggtattgagtatataacagctaggaagtttagatttttagaagtaatgatctcaatggagagggaagaatgaaatcaggtataggtagtggtataattaatgatttctttcagtgagatattagtaagaggaaggcggtggtgctgatcataatgttaatggttttcggcacgtcggccaaatggaggttgctatggtgtgtagtgtaagaagcaactctggcaatcatgagggtggggagggatcaagaaattttgcatgctatttcttctgatgatctcattatgtttaaatgtccaatagtactctgaaaaaaattgtaatttctttcaaaaaaaaaaaaaaaaaaaaaaaaaaa

SEQ ID NO: 130650 - DNA, 210 bp, Glycine max
  Clone ID: PAT_MRT3847_88986C.1
gacagctactttggggcttctctcgctaacaaagaaggaactagggttatacagaatacaagctctctatctctaacgacggttgtcgcaatgcaaatgcaatccgataccaaatatgaatcgtcaacccgacgctaagagggctcctaggcttcataaggcctataacacggtggcatccgctcagtcaaaacttgcagaacaggaacg

SEQ ID NO: 130651 - DNA, 234 bp, Glycine max
  Clone ID: PAT_MRT3847_88987C.1
cccacgcgttcgccacgcgtccggctaatcttaatgtcttaatctacagatgctacaggagatttcagttgtttacaagctttgaagatttccctaatgaattgggctttaattgcccatcataaatggcaagttaagccaaatttaatttactttacctcacggcttcatgcaatttgcttgcaattccctttcttctgttagagggagctacccaaatttccttaatgccac

SEQ ID NO: 130652 - DNA, 404 bp, Glycine max
  Clone ID: PAT_MRT3847_88988C.1
gttatttgaccatacaagcatgctccaatttttgccactatattcaaaagggtcgctacctgatgaaatttccacacagaatcaggtatcaagttcattgacgactttctttatgcaaatgcatacttttatggggctcaacacacaatggacgacttacaaacttatcgttctagtgtggagaaaccctgttactttattgcaaatgcttgcccgatgtacaagcttgtcttatattaacttcatgaaagcattcccatcaatgcttaaatggtgcgattcaatggaccagctacttgattcagccgaagctgctactgcgtaacctgaagcttttgctggtcactactatgatgaccttgatctcttactcgatgagactgtcgaagacaaacaggtgtcac

SEQ ID NO: 130653 - DNA, 1281 bp, Glycine max
  unsure (1)..(1281): unsure at all n locations
  Clone ID: PAT_MRT3847_88989C.1
tcaaattcctcagcatccatgccaaggcaatcaccacctcgtacccatgtgtgagtgttgagtggacaacactgacacgcatcatctctctcacattctcaaaatgctaaccttcaatctcaatgctatctcttcttcgttctcagttgttccatttcatgccaattatccactgtctactcaaacccaattgttagttccttccaatcttagttactcctttgctacaacaggaaccagaaagttcaagtctttccagctcaaggctggattttgggaatcaattaaatctgggttgatgaagaataactccatgcaagtcattgatccaccctctgcagatgaagaagacgaagaacctctgcctcaagagtttgttcttgtggaaaagacagaacccgatggtacaattgagcaaataatattctcttcaggtggagatgttgatgtttatgatcttcaagccctctgtgacaaggtagggtggccacgtagaccattgtcaaaattagctgccgctttgaaaaatagctatatagtggcctcactgcattctataagaaagtcacctgggtcagtgtacttggcgaagttatggtacagaggggaatgaacagaagagattaattggcatggcccgtgctacgtctgaccatgccttcaatgccacaatttgggatgtcctagttgatcctggctaccagggccaaggtcttggtaaagctcttatagagaaactgattcgaactcttctgcaaagggacattggcaatataactctgtttgcagatagtcaagttgtggaattttatcgcaatttaggctttgaagctgacccagagggcataaaaggcatgttttggtacccgaatcactaattgcaaccctaccaaagcttgtttttggattatgttaacattgcaatttgcaaccatgaaatatacaacgacagaagcagtgacaaatttatctatcacttgtaatacgaaagtataaagattgtacgtcaatcctgtaattattgtgttttaggtgtttgtaagttattcacttcttaaaaaagttttgcaacttttcgaacagatgatcatgagtctttgattatgcctgcttgatatttgtctgaaatccgtcagtgactacttactgattttttaatgttttttttcagttttggatgaattgttgtactatataaattagtggttttcttcgggcgtttctatgttgagtcttaataggcatgaatnntcaatgtaaaagtttcagaannnntatttg

SEQ ID NO: 130654 - DNA, 1299 bp, Glycine max
  unsure (1)..(1299): unsure at all n locations
  Clone ID: PAT_MRT3847_8898C.1
gcccgagccgaatcggctcgagacggctgacttgagacctttgagctggaggatccaatccaatgcgaacttatcgtcaaggaaaactaagttcttcagtcttgacttgagtgctttgagttcatggatccaatccaacacaagttcgtcaacgttggtgctctcaagctccacgtcgcagaaaccggaaccggtccaaacgccgtcgtattcctgcacggcttcccggagatatggtactcgtggcggcaccagatgatagctctcgccggtgccggattcagagcggtttccttcgattacagaggttacggtctctccgacccgccacccgaacccgataagacctcttggtccgatcttctcagtgatctccttcatattcttgatgctcttgctctttctaaggtgtttcttgttgggaaagactttggagctcgtcctgcatatctattttcaattcttcaccctgaaagggtcttgggagttgtcacgttgggagttccatatgttcccccaggcccctctcagtatcacaaattccttcctgaaggcttctacattttgagatggcaggaacctggaagggcagaagctgattttggacgctttgatgcaaagactgttgtgcgaaatatttacatcctcttctcaagaagtgaaataccaatagctaatgaaaaccaggagatcatggatttggtggaacctgatactccgcttcccacttggttcacagaggaagatcttgcaacatacggagccttgtatgagaaatctggattccaaactgcattgcagattccatataggtcattaggtgaagtgcttagcttgccagatcctgtggttaaagttccggcatttctgataatgggtggcaaggattatgttctgaagtttccagggattgaagatttaacaaagggtgaaaaagcaaaatggtttgttccaaacttggaggttacatttatcccggagggaacccattttgttcaagaacagtttcccgagaaggtgaatcagcttattcttgacttccttgccaagcacacttgatattggactgtcgtcatgaatggtgtatgtggattgtgaactgtgggaaaatcagacaaagtgcagcacaaaatgatcgattgctgaagctaaatgatgcaaagcttgctggtagagctttgttagatgaatttcttgtacaaagaattcgtgaaatatgcgactgagttgtctagctaataaataaataaccggtttcttagttaacaaaaaaaaaaaaaaaaaaaaaaaaaagcgnca

SEQ ID NO: 130655 - DNA, 782 bp, Glycine max
  unsure (1)..(782): unsure at all n locations
  Clone ID: PAT_MRT3847_88990C.1
accaattatccagaattgaagagaagggaagaacgacaaagtatggctggggaccgagatacgcataccatcatcatcatcatctacatacatgcatcatcagtcatcaactgataactatctgagtgtttggtggacaatactgacacgcatcatctctctcacactctcaaaatgctaatcttcaatgtcaatgctatctcttcttcgttctcagttgttcaatttcatgccaattatccactgtctactcaaactcaattcaaccagaaagttcaagtcttttcagctcaaggctggattctgggaatcaattaaatctgggttgatgaagaataactcaatgcaagtcattgatccaccctccacagatgaagaaaatgtagagcctttgtctcaagattttgtccttgtggaaaagacagaacccgatggtacaattgagcaaataatattctcttcaggtggagatgttgatgtttatgatcttcaagctctttgtgacaaggtagggtggccgcgtagaccgttgtcaaaattagctgccgctttgaaaaatagttatatagtagcctcactacattctataagaaagtcacatgggtcaggtaaaaatagtatgacatctttctctcctctgtctaaattagttagttagctggttaagngttttctttatcttattgctatctaaacctatttgatgaacatcttantgtactttggcgaantatttaacagaggggaatgaacagnanagattattggcatggcccgtgcta

SEQ ID NO: 130656 - DNA, 815 bp, Glycine max
  unsure (1)..(815): unsure at all n locations
  Clone ID: PAT_MRT3847_88991C.1
ctttgtgtatctcctataactgtacaactctttttctcatgcttacttttagtattgattattattacttttacatgtgtttgtgttgtttcaggttctcagttgttccatttcatgccaattatccactgtctactcaaacccaattgttagttccttccaatcttagttactcctttgctacaacaggtagacacactctcactgtctttgacttcttcccttgtcttcatttcttatcataatttgtttactgcaatgctttctctgttggttgcaggaaccagaaagttcaagtctttccagctcaaggctggattttgggaatcaattaaatctgggttgatgaagaataactccatgcaagtcattgatccaccctctgcagatgaagaagacgaagaacctctgcctcaagagtttgttcttgtggaaaagacagaacccgatggtacaattgagcaaataatattctcttcaggtggagatgttgatgtttatgatcttcaagccctctgtgacaaggtagggtggccacgtagaccattgtcaaaattagctgccgctttgaaaaatagctatatagtggcctcactgcattctataagaaagtcacctgngtcaggtaaaagtagtatgacatcttgctgtgtcctctgtctaaattaattagttggctggtaaagctttttatttattcttatagctatctaaacctatttgatgaacatcttagtgtacttggcgaagttatttaacagaggggaatgaacagaagagattaattggcatggccccgtgctacgtctgaccat

SEQ ID NO: 130657 - DNA, 941 bp, Glycine max
  Clone ID: PAT_MRT3847_88992C.1
ggctacggctgcgagaagacgacagaaggggataaaaaagtgatttagggtttttgcacagtctcttacatataaagggaagtccttatcttatagtatcggttagctcttccatttcgcaatccgttccaaaccacataagcttcaacaaagatggatgtagaaaagttgaagaagatggccagttctgttcgaactggtgggaagggtactatgagaaggaagaagaaagctgtccacaagactactactacagatgacaaaaggcttcaaagcaccctgaagaggataggagtgaatgctatccctgcaattgaagaagtcaacatctttaaggatgaaatagttatccagtttttaaaccccaaagtacaagcatctattgctgccaacacttgggttgttagtggttcaccacaaacaaagaagttgcaggatattctccccaacatcatccaccaattagggccagataacttagaaaacctgaagaagctagctgaacaatttcagaagcaggttcctgaagcaggagatggtgcaaccgcagcacaagaggatgatgatgatgcggtccctgatcttgtcccaggggagacttttgagacagctgctgaggagactaagtcttaagagtttttactgtgccatcttttatatatttttatggttgttactaaatctgggaattatcatgcacgattatggaggaaaagtgatctggatttgcagaatacagaaaattataaacagaaacatgcaagatttcaacttgaagttcacatcattggataacttttttgtcatcatcaattgggacatttgaaaatggatttaaactgcgtgtcatgtagagcattacatggtgttagtgaccgaacaagatcatggagcattacatgtaaaccgatttaattagaaaagtaaggctccctttcccc

SEQ ID NO: 130658 - DNA, 521 bp, Glycine max
  Clone ID: PAT_MRT3847_88993C.1
acaggattggtcaatattggaaacagttgttacatggcagcaactatgcaagttgtgttttcaacaagatccttcacatcacggtactatttgaaccaaagtctaaagaaggcatttgagatgtctcctgctgatcccactgtagacctaaatatgcagttaacaaaattggctcacggcatactttctggtaaatattctgttccggcatttgagaatgatgaaaaagaaaatgttgctacttcaactacaactgctaaacaagaagggatacgtccacatatgtttaaatctgtaatagctgccagccatcctgaattttcatctccgaggcaacaggatgctttagaatttttcctacattttcttgatcaagttgagcgagctaatgctgggaaagttgaactggatccatcgacgagtttcaaatttggtattgaagatagaattttgtgttcatctggaaaagttacatataatagaaagcatgactacattctttctctcaatatcccattaca

SEQ ID NO: 130659 - DNA, 237 bp, Glycine max
  Clone ID: PAT_MRT3847_88994C.1
gaagaacagttgcttttaagaaatggtatggaagcaataaatagtaatatcaaagagagaaggaatgctttcctatactcttgtatagcatgtattggtagagaaagtaccaaaaaataatcaggaagtcaaggttaaatacactttatccattaaaatgcactagggaatcatattcttgttcaccagagaagttctctgcttctagttcaagattttccttaatgaagggttttg

SEQ ID NO: 130660 - DNA, 430 bp, Glycine max
  unsure (1)..(430): unsure at all n locations
  Clone ID: PAT_MRT3847_88995C.1
tcaggggaatgtaccgtggcctttcaccaacaatagtggcattacttccaaactgggcagtttatttcacaagttatgagcaactaaagggtcttcttcgttcacgtgatggttgcgatgaactcacaactattggaaatattatagctgctgctggtgctggtgcagccactgcaatttctacaaatccattgtgggttgttaagacaagacttcaaacacaaggaatgaggcctgatgttgttccttacaagagtgttctttctgctttgacaaggattacacatgaggaaggcatacgaggcttatatagtggcattgttccttcattggctggcgtaagtcatgttgcaattcaatttccagcatatgaaaagatcaagtcatacatggcagaaaaagacaacancaccgttgacaagctaactcc

SEQ ID NO: 130661 - DNA, 445 bp, Glycine max
  Clone ID: PAT_MRT3847_88996C.1
ctcgagggtccatgcttattgaagacccaaattggataggtgttgcctgttgtgcattattagtggcacatcatgatccgtctaatattggtaatagatcgacacatcttgatcattatccaagtattggatacagttttcaaaataaacaggttttgaataaaacacatcaattacttccaatacatttgcagaatgatctggtcacaggtgaattagatcacttgctgattttgtttgcctctcgggaagaattccttctttttcctagacacgaaactgatatgcatggtcttgatacaaggggattcacaacttggatacgtgaccaccctaaaggtttgcggttgcaggtgaaaagttgtgggtatcgttgggtatttaaggaagatcttcaacaattaaacccaaacatgatgttcagaggaaattcttcatctaggaa

SEQ ID NO: 130662 - DNA, 259 bp, Glycine max
  Clone ID: PAT_MRT3847_88997C.1
gattcattgtattgcggcatagacatggaaatttcgtttttgtttctttaattaattaattagttaacacatgcttacttcttgggagttaatttaaaataatttcttaccttttttttttcctttctggttttatataacattccagcgaccgggtgtgagaaccatagctgccccacttgatgttgatgtcgtatatttttggagaaaaaagtgttataaaaaaggaggatgaattcgtatgaattgctttattggc

SEQ ID NO: 130663 - DNA, 365 bp, Glycine max
  Clone ID: PAT_MRT3847_88998C.1
cccacgcgtccggtctgcagaaacatattttctaggcttaggcggcaaacgccagttgcagtgagccatcaccaacatcgctatcaaaaacatctctcggtttagtgtattggaacaatgctagataaagcctgacttctgaagtttgtgacgtgtggagacagcacagcagatctgctcttctggagtgaaccactatctgacataaaaagcatgagatggtgacatgaagacttgcctttatgcgaacgctctagagagaaatttccaatgattgctctaatacatgcggacattatgtcctagatgcctaatcgagcattatacttgctatggtggaacggaacacaccctgatctagaatg

SEQ ID NO: 130664 - DNA, 329 bp, Glycine max
  unsure (1)..(329): unsure at all n locations
  Clone ID: PAT_MRT3847_88999C.1
ggttggantttggctgattagtgctgttattgcctgtttctacctgctcgtcggccccatcatagaaggagatccctagccggaatgagataacctaacgtaactcggtctgactacggataggaaaatacccgcgcccccgcctccgtcttcgtccgctccagtcctcgacgcgatggcgaagagagtagacgtgaaagaccgtccgataacggaagtattggccctatggctgacctccactcgataggtaacgcctatacagcgcgtatgagtcacagccctactggtggctagccttaatgtttcccccggaaacgtcccccgtc

SEQ ID NO: 130665 - DNA, 147 bp, Glycine max
  Clone ID: PAT_MRT3847_8899C.1
acaaccgatatggtcacatgagcgtcgtcccttcaatcaactatctcgtctgattgcttacagctactatcggattcttcagtttcaatccgtcgaagctatgattcaatggcaccctttaccttctacagcacacttaggttttgt

SEQ ID NO: 130666 - DNA, 529 bp, Glycine max
  unsure (1)..(529): unsure at all n locations
  Clone ID: PAT_MRT3847_889C.1
cgtccgtgctggttgaaggcattgcttgccagcaactcaatttgctggatggcgggcctttacggtccggctcacgcggcggacctgccggtcaagaccgcgccgccgattacggcagcgccgtcgaccctgtggaattggaccggcatttacgtcggcgcgcatctcgggggcgcattcggttcaagcgattggcagaccgccaccgggctgcaggcggatttctccaacagaggtttccccggaagcggcaacgccgaaggtctgcttggcggcggccagatcggcgttaactatcagtttggcacttgggtgaccggactggagatcgcggcaagcgccgccgatgtcgacggctttgcgaaatgcgcgaatcgtgcggacaaccgctacggcgtgatcagctttacctgcgacaatcgcgtcacctcgctcggcacgattgctggccggctaggacagacctgnggcaatctgctgatttacggcaaggccggcgcggcgtgggcgaccgacgagagcgatgaga

SEQ ID NO: 130667 - DNA, 679 bp, Glycine max
  unsure (1)..(679): unsure at all n locations
  Clone ID: PAT_MRT3847_88C.1
ttttnnttttttnntttttttttttttntttttttttntttttttttttttttttttttttttttttttttttttttttttttttttttttttaaagccaaaaacttagggctaggcaattaaggaaaaaaaaccccgcttaaaaaaaatacccgcagggtaaaaaaggggggcggtccattaaaaaaggatccccatggaaaaaaaacccgggggttacttagaaaaacccggggggaaaccccatagtttttgggccaaaaaaaagacaccccccggggggggggttttggccaaaatacggggggaaaaaaactggccccgggtcccctttactggggggggcaaggccaaaaaaaagggggggggggcccccggggggacattttaaagcccccgccccccaaacacattaaaaaaacccttcccggccctgttatcccgaaaaaaaaggggggggattgtcccgggaaaaaaaaaatttgaaaaaaaacccccccccttttcctgggaacggttgggaagttcatttgcaggaaaaaggggggcaagttttgacggcccaaatgccccccagggggggaaacttggttcaaaaataatttgggaaaaacagattccttaaaaaaggcaaaggggggggcccaaagggaaaaattaacaatttttcctttttttt

SEQ ID NO: 130668 - DNA, 1173 bp, Glycine max
  Clone ID: PAT_MRT3847_89000C.1
aattcgcgtccaggtaaagtaccctaaggcgccgcacaaacatattcacaagaagatgaggaaaacactcttcgtcgcaccaacgtcagtgcttgtgtcacgtttaagtgttttccatttgcgtccagccccacccatcttcgaatttaacacgatttttgggtcccgtgtgaagatgaagcgtgaccttaatgctattacccttttcaagcacatgcatgttaaggggattgttggaattgttgaaccaggtcttggtattttcaagatcttggtcagctgttcctgccacctgggtcatatgaaatttgccttttttatgtgacaaaggtctctgtcttaatggtgaaaattgcatggttgttcgataaaactgttgtgataatgtacaacacaattatcgatagcttatgcaaaaataatgtttgtttctgaaatgaaatcttattttgattaaacaattgcattattcaaaagcaattgcattattcaagaaaattaaagattatgcaaaggtggaagacttgagaatgcacaaaagatttttcaagatctttttcatgaaatgatagcttggaagaatgtttggaagatttaaattagattttactataatatctcaataaattggaatgattcagcgaagtctccgatgatgacagatataatggagtccaaatgaattctctgatgatggtagatataatggagtccaaatgaatgaactttatcatatttataaatatgatgacttaagacaaataagtccaagttttttgaagtattaggatgtttataattgttgagtgacataattgctgagaaagatgaaagagaaatgattaagctgaaatgttcattacaacacaatcattgatagcttatgtaaagataaacttgtaactaagacatgttatttatttttattacttttctgtaaaaaaaaaaaaaaaaaaaaaaaaaaaaaaaaaaagaaaaggctattcccttttagtgggggttaattttagcttggcactggccgtcgttttacaacgtcgtgactgggaaaaccctggcgttacccaacttaatcgccttgcagcacatccccctttcgccagctggcgtaatagcgaagaggcccgcaccgatcgcccttcccaacagttgcgcagcctgaatggcgaatgg

SEQ ID NO: 130669 - DNA, 1160 bp, Glycine max
  Clone ID: PAT_MRT3847_89001C.1
aagtaccccacgcggccgcacaaacatattcacaagaagatgaggaaaacactcttcgtcgcaccaacgtcagtgcttgtgtcacgtttaagtgttttccatttgcgtccagccccacccatcttcgaatttaacacgatttttgggtcccgtgtgaagatgaagcgtgaccttaatgctattacccttttcaagcacatgcatgttaaggggattgttggaattgttgaaccaggtcttggtattttcaagatcttggtcagctgttcctgccacctgggtcatatgaaatttgccttttttatgtgacaaaggtctctgtcttaatggtgaaaattgcatggttgttcgataaaactgttgtgataatgtacaacacaattatcgatagcttatgcaaaaataatgtttgtttctgaaatggttggtaagaaaatttctttccatatcatcacttacaattccttaatccattagaataacaagtgggtttgttgactgaaatagttgaaaaacctaatgttattacttatcattcttagatattttttaatggatgggtattgtttagttataatatcataagaataataaataaggttatgaatctctttaataagagatatatgttaaaagtcactcaatcaatattctttattaaatgttttgtgtagaaatcttattttgattaaacaattgcattattcaaaagcaattgcattattcaagaaaattaaagattatgcaaaggtggaagacttgagaatgcacaaaagatttttcaagatctttttcatgaaatgatagcttggaagaatgtttggaagatttaaattagattttactataatatctcaataaattggaatgattcagcgaagtctccgatgatgacagatataatggagtccaaatgaattctctgatgatggtagatataatggagtccaaatgaatgaactttatcatatttataaatatgatgacttaagacaaataagtccaagttttttgaagtattaggatgtttataattgttgagtgacataattgctgagaaagatgaaagagaaatgattaagctgaaatgttcattacaacacaatcattgatagcttatgtaaagataaacttgtaactaagacatgttatttattttt

SEQ ID NO: 130670 - DNA, 513 bp, Glycine max
  Clone ID: PAT_MRT3847_89002C.1
ccggccagggggggaaaatcccctcaaacagggtgggctggaactttgccacccaaaaggggctaaactttccataaaagggcttcaaaaaaaaaaaagacggtttaaacgggaccccaagttaaaaaaaaggggggggcccccctgtccacaaaggtttcgggcaaaaccccgaaaaaggcccagggtaaaaggggggggaaaccggttcttaaaaaggacaaaagctttcccagcctccccccaaaaaggccttccccctttggcgccccccaaggaaaacccaggccccacaaggctactttttgttgccaaaaaaaatattttaaaaaaaccggcttttggggaccaactttacaaaaaaaaacgggaaatcttcccttaaaaagccccccggggctgatccccccagtttggggggaaaaaaaactgtccccgggaaacagttccctttttaaaaatggccccaagggggatcccgggataaaccctccccggaaaacttcctgggcc

SEQ ID NO: 130671 - DNA, 547 bp, Glycine max
  Clone ID: PAT_MRT3847_89003C.1
ttataccattctggttcttgagattataacaaatggcttagcaccatttgtttctctgataaataggcacctcccacaattctctgtgtgaatgactatagggtgatttatcacaccttagattccggacgacttattcttgtttcctgacttttctttctagactttgtgtgatcggttgaaatgctgcttatccctaattgaaccatatttctacttcttctttggattcgctgttggatattgtcacccatgcagatgccgtacctacactcgataatcgcctgtttgtgattcttataccaagctctactttgttaaccaccacttaatacttgctcatggagcagcagtcaattgttacactagcaaataccatgctcatcacataggacatattgtagtgaccatagtgactatcttctttgaaccataatcttatagtgatgctgatcgctaggctgcaatgtgagctctggactttatgttatgctggattgcatatcccattacattgtgtgactatccttagagtatgagatcgttg

SEQ ID NO: 130672 - DNA, 385 bp, Glycine max
  unsure (1)..(385): unsure at all n locations
  Clone ID: PAT_MRT3847_89004C.1
ggtaccggnaangaacgggggggccgacgcgtccgtacatacgtnagaacacaaccgattgattcattcaaaataaacaataattctgggaggtttttataaaagagaaaacatctctaaaaattgcctatatactcaacagactgttcaaactatctgcgaatccatttctttgataagagaggccttcactaatttgacctattaatatcttagtgctgtaaaatataagccgaatacatacatagccattgatattattctgactatgaagcatgatagagagacatacatggctttcaatatctaatggaagtggggaagtgcatcacacattatgaaattgattcatatattgccatagacaacccttagctgaccatct

SEQ ID NO: 130673 - DNA, 745 bp, Glycine max
  Clone ID: PAT_MRT3847_89005C.1
ggctcgagctcgagccgattcggctcgagcgaaaaccaacccagtttattgcaaccaattcctttcctttgttcttgacatcatggctgaggcagttggtggtgcattcctctctgctttccttgatgttgtgttcgacaagctgtctacagatgaggttgttgacttcatccgtggaaagaagcttgacctcaatttgcttgagaacttgaagagcactctgagagtggttggagctgtgcttgatgatgctgagaagaaacaaatcaaactctccagtgtcaaccagtggctcatcgaactcaaagatgctctctatgaggccgatgacttgctggatgaaatttctaccaaatctgcaactcaaaagaaggtaagtaaagtgctttctcgctttactgataggaaaatggccagtaagttggaaaaaatagttgacaaattagacacagttttaggaggcatgaagggtcttcctttgcaagtgatggcaggggagatgagcgagtcatggaatactcagccaacgacatctctggaagatggatatggcatgtatggtagggatacagacaaggagggcataatgaagatgttgttgtcagatgatagcagtgatggtgtactagtgcctgcgatcgctattgtggcatggtgggggcaagcataaagagaacggaatcaaagaactggggacactttcaaatcttcatggttcactttctgttacaaagttggagaatgt

SEQ ID NO: 130674 - DNA, 276 bp, Glycine max
  Clone ID: PAT_MRT3847_89006C.1
ggcggatgtgccaatgagtggcgtgtgcctctctacgcggagttgcaccagatatttctttaaaattggtttgtcgaccaaagatcttcaacaaaccggctaagtttgtgtagtttggtaagatgggtggtggatttaaagggctagacttagataaaccatatttttttttaattactgaagattttactggggggggggggaaaaatttcgcctgaaaatctgcgggcgaagaacactaagaagcacaaagggggggaaaaaaaaaaacccccc

SEQ ID NO: 130675 - DNA, 488 bp, Glycine max
  Clone ID: PAT_MRT3847_89007C.1
caccaaagccaccgcatcacatcagatgattcctcacttctcattgtcccagttttttgttaggaagaagaaaaaaagatatctctctcccctctttgcctgaaacccattaaagcgataatcgcaaagggtgtcttggaaaaaggtggtttcattaaaaagcagggatctttgggggggatagtgaagagaataggggcaagctttgttttggggcattgggagatttggagaagcaagagagggtggaagatgatgcggaaagatataaagatatgcttttggatgctatggcgattttgaattttaacatgctttgttcctctgtggcgttgcaaagttcacatagaatttggggaaagcttgggggtggagatggtgatgacgacaacaaagtggggctctgaagatgtgggaaggtaaacttctagattgctttgatgatcgccgcatcgctttagaatctgcatgtctgccttgttaccgat

SEQ ID NO: 130676 - DNA, 369 bp, Glycine max
  Clone ID: PAT_MRT3847_89008C.1
aaacccaacccgaaagtcatttattatttttcaacccttcaagggggaaccttctacccatgaaaggcaagattacctcacatagcgatcttcctccttaaaaaacaattttccactctccaaataaacaactcaaattatttaaatatccgatcacaagagcatttttctccttttaaattctcaagcgaactgaccaaggttttcttccacgggggggtagttgacatccgggtacaactcaaaagccccaaccccgaaagagggctcaatcccaaagggggggggggcacccttcacaaacactgagggggtgattgctaataccacattgatgggaagaggggccccttcgatgcccttgaaaac

SEQ ID NO: 130677 - DNA, 365 bp, Glycine max
  Clone ID: PAT_MRT3847_89009C.1
ggatatagactgcataggctcaagcgcccacacaacacattgctccctacgattagagttctatagagggaaggacagattattcacatcaacatttgatggtcataggcgaatagaatgctactcttaatccattataaagattactctctagaaaaatagagatgtctcctaccctacccgaaccatgtgtaagtgtgcaccttactgcataaagtcattcagtctaaatgctacatgaagaacatacaccagcttattgaactgtaacacctaggatgcagaaaatcatacatgagggaatcggcagacttggatttctatatagccctctcgtgccgaacctaattgaatgatctatatct

SEQ ID NO: 130678 - DNA, 1509 bp, Glycine max
  Clone ID: PAT_MRT3847_8900C.1
tttctgtagtctcaattatagtaacagtgcaagatgatctattttccgcatcttggatatctggctaaaagattgaatattgtgttaatctttctagtagtcaaggggaacaatgaatgcactagcagccaccaacaggaactttaagttggcctctaggcttctgggattggattcaaagcttgagaaaagtttgctgattccattcagggaaatcaaggttgaatgtaccatacctaaagatgatggcacgttgcaatcttatgttgggttcagggttcaacatgataatgccagaggccccatgaaaggaggaatcagataccatcctgaggttgaccctgatgaagtgaatgctttagcacaactaatgacatggaaaacagctgtagcaaatataccatatggtggtgccaaaggagggatagggtgtgacccaccagaattaagtatatctgagttagagtatatgaaagacttactagagtttttacacaaaaaattcatgatttgattggaactcacacagatgtgccagcacctgatatgggaacaggaccacaggatcttggtggatctctcggtagagacgcggctacaggacgaggagtcctctttgcaacagaggctttgcttaatgagtatgggaagagtgtatctggacaacggtttgtcatacagggttttggaaatgtagggtcatgggctgcccaattaattagtaataaaggtggaaaagttgttgctgtgagtgacataactggagccataaagaacagcaatggtcttgacatcccaagcctacttgagcattccaaagtgcacaggggagtaaaaggattcaatggtagtgatccaatagaccctaactcaatattggttgaagattgtgatgttctagtcccagcagctcttgggggtgtcatcaatagggaaaatgcaaatgaaatcaaggccaaatttattgtggaagcagctaatcacccaactgacccagaagctgatgagattttgaagaagaaaggggttgtgatcctcccagacatatttgcaaattcaggaggcgttacagttagctactttgagtgggttcagaacatccaaggtttcatgtgggatgaggagaaagtgaacaatgagctaaagacctacatgaccaaaggtttcatagatgtgaaggaaatgtgcaaaacccatgaatgtgatcttcgtatgggagccttcaccctggcagttaaccgtgtcgcacgtgctactgtccttaggggctgggaagcttgacatccattgcttctgctttcaataaattaattaaagagctcccactctcagcaacacttcacaaagtttttgttgctttcaactaatgtgttgggtgaatcgtattttcacgccaaattttctttcaataaattagtatagtatataaatctttttgtaactacatgtgtggttctatgccacttcttgtgacagccacgctttttaatataatgtcactttgctttg

SEQ ID NO: 130679 - DNA, 259 bp, Glycine max
  unsure (1)..(259): unsure at all n locations
  Clone ID: PAT_MRT3847_89010C.1
ggcaaatataagttcactgtggacatccctgtcacactagtcgctggaaagaacacaattgatctcttgagtttaactgtgggacntcagaactatggagccttttttgacacatgggggagtggggatcactggtcccagtgatattgaaaggttttgcaaatggcaacacgcttgatctctcctcccagaagtggacctatcaggttggcctccaaggggaagatttgggtctgtctagtgggagttcgggacantg

SEQ ID NO: 130680 - DNA, 206 bp, Glycine max
  Clone ID: PAT_MRT3847_89011C.1
ggaattcggcacgagggagagagagaactagtctcctagtttgatgagaatatagcttattgcatgagtcatgagtggttgttcttgtcggttatgataaaaattgttggcatttaaacctattagatttcagtgttagcaacaatgaacgtagttcatgctgttaggctgtgctgctgcagccttcagttatgaagtttttaaaa

SEQ ID NO: 130681 - DNA, 479 bp, Glycine max
  unsure (1)..(479): unsure at all n locations
  Clone ID: PAT_MRT3847_89012C.1
gaatgatatttttatatgtggatggttttgttttttttataaatatgatttagagaaaatgttttttaaaacgagagaatgggggaaaaaattgaaattgggaaaaagtatgtgtaggaggaaaagttttatatattgggagtaaatttaggggggggaaaaaatagggaaatttgttgtgggtgtgaaaaattgtttaaatttnaatttgagaaaaaatatgagaagggtatagtttattgatggggggggggggtaaaaagagagaaataataattttgttggtttagatgacagttaccttttttagaaggaaaaatattgagatccatctattaaaaaaaaaagccccatagagagggagaaggagttttgtttttcgcccgaaggtgtttttttttataaaagggaaaagaaaaagtgtgttttcaataaggcggtgaaaaagaaaaagttagtataaccgtccattttttttt

SEQ ID NO: 130682 - DNA, 381 bp, Glycine max
  unsure (1)..(381): unsure at all n locations
  Clone ID: PAT_MRT3847_89013C.1
gggatattttgcatacatggcaattgatagtctcccagggaatcaagtntgggaaaggatatcgcttctgatcatcccaccaagtcgacgctataagatattggaaggttatcatgcctcgtttgtggagtcagtaccattcaagaccatagctgtattcacaatattacagtttgtgtatttcctaatctgttttggagtgacatggatacctgtaggaggaatactttttccattaccatttttccttctcataactataagagagcatttgcttccaaagatattcaaacctaatcatcttcaagaactagatgcatctgggtacgaggaaattggtggtgctccacatattacacataatataccaccaagggaaaa

SEQ ID NO: 130683 - DNA, 576 bp, Glycine max
  Clone ID: PAT_MRT3847_89014C.1
ctggcaggtttccggtcccggaattcccgggtcgaccaacgcgtccgctcggcttcaatcctttcgttattgtgttattcatccttctcttgtgaataatccagatctctttctgccctttcctccgtacgcttttcgtgaccgggtctggatggattggatccagatctacacgccgatggtggttgtggccgggtctttcatagatctggggcgtaaaggctgaaatctacggcaccgaggtacaacagagaatggatgacaagaacgcacatccgacgggagatacagccgattgcgcttgttctatcgatacagacccatgaatcggatcattaataagcgtgtctagcgcgttatacacgtgtatgctgatctcggatgatctataattagcttatgatgtgaagagtatgctagggaaaatatgcatgatgtaaatacatttattgatgaatgtcctacactcgctgattcggtattggatattgaaccctgagtgatctttgaatccgacctttgacatgacaggatcgctcatttgactggtgaaaacatgataatgaaataagatta

SEQ ID NO: 130684 - DNA, 428 bp, Glycine max
  Clone ID: PAT_MRT3847_89015C.1
cattcacagggccaaagctggagggaagtgaggaaaactaaccgcgctgaacaaaatactgggcaccggagtatatgatcatgggtaactgagccctgttgctggtgattaaaagatataactaccggcttacaaacacctaaaggcagctttgggagcagctttagcctttaaggaataagaggaaaagcccacccacaaaaaaaacggaccaggcccagaaaagacaccctccccaggcttgagctggatcgtcacttggcgaaccgatgctaacttataaaaaaacacaggcgtgctcgttgacgcaatcaacctagggaacttatttgaggctgcctcacacataaatggggcgcaaactaaagacgctgcaagggatcaagatccctaggagcgtattttggatgcgccccatctaggtgagg

SEQ ID NO: 130685 - DNA, 329 bp, Glycine max
  Clone ID: PAT_MRT3847_89016C.1
gggcaaacaaaatttcctgttgattcccaaacccagtaacagctttgttttcagcttaaaactttggacgaaataaattcccccaaagtgtttcaaaccctcaaaagggggggccccgggcccctaacaacggggggtcctttttgacaccataagcatttgtaaaagcaccggaaccaaactgggtttaaccccctactgggatctttggctaatttttgggggcttccttttaagcctcctaatacccttttttttccacttggcccttatggggaaaagaaaacaaaacccttttttgtttccgaaccctaaccgaggcggttgac

SEQ ID NO: 130686 - DNA, 887 bp, Glycine max
  Clone ID: PAT_MRT3847_89017C.1
gcacgagcacaactgcagtttggtccatggttgggcatattgtggggctgggtgaccggcatggtgaaaatattctttttgattctaccagtggtgattgtgttcacgttgatttcagttgcttatttgacaaaggctcgcagttagagaagcctgagcttgttccttttaggctaactcagaacatgattgatggcttaggtatcactggatatgagggtatcttcttgagggtttgtgaaattacactttcggtactgaggacacacagggagactctcatgagtgtgcttgaaactttcatccacgatcctcttgtggagtggacaaaatctcacaaatccagtggcgtagaagtgcagaatccacacgcacagagagcaattagtaatattgaggcaaggttacaaggagtggttgttggtgttggagctgcgccgtcattgcctcttgctgtagaaggtcaagctcgtagactaattgctgaagcagtctctcacaagaatcttggaaaaatgtacatatggtggatgccttggttttgaagatttggatgggtggagaaattcctcccatattattttaggcagcaatcgaaggaaggtatgaagtggcatacagaatgtacaggacttgaagaggcaaaacttttggaagcagagattcgacctcatcataaagttgggcaaggagtggctgaacgggaggttgacgcttcatagttgaatctatgggtactctgcttcatggcgatccattccatagaaacatgtttagagttgaaagtacaggtgttctggtatttgtttgtatattctttaaggtgattgtggacgcattcctttgtatatgaattaacctttaagcctgggaaacacaccgggtgc

SEQ ID NO: 130687 - DNA, 356 bp, Glycine max
  Clone ID: PAT_MRT3847_89018C.1
cacataacaaaattccatacattgtattgaataacgataacaaaactgataaacagtttaatttacaactttcaacagctatcaatctcacctccaccgatccgattatcaaaatgcaaatcatcccccggcctctactaaaacaaccaaaccttttcaagattccaagcttatataaaaaaagctaagcctctaatacccaaaaagcttaaaaaaagagcacgcatgattagagattcccacacatcgagccattattttcttcacttcaatcgctgccacgcttctgtttctcactttttacaccaaatgcagtcctctaatcattgctagctcaacatgtcacatctcgagcc

SEQ ID NO: 130688 - DNA, 469 bp, Glycine max
  Clone ID: PAT_MRT3847_89019C.1
cggcccgccggtttggtttgggggtttttttgaatgaaaatttactgtaacgagtgttaggcttgttgagccacagttcttgtgttgatgctaacgaggctgctctgtgttgggagtgtgatgagaaggatcatgctgataacaaacttgcctttaaacaccaaagagtggctgtttctatctcttggtatcatttgcccgaatgggacattggtcaggaaccctttagctattttttttgcctacaagaacgggctctgctctgcatcaaaatgtgattgtggccttacacactggaaaagcttttgtctctcgacatcaaaaggttcttttcactggtgtaagagtttgccttgaagctatagaacctggggcttccttaacttctttgacgacaaattctggggagagagtttcagatgcaaaaaattcttctgtctgtagaaaggttttcactgtgccccaacca

SEQ ID NO: 130689 - DNA, 623 bp, Glycine max
  Clone ID: PAT_MRT3847_8901C.1
aagaatggtaaatggattcttcccctttgataaatcagatattaaatcaaagaaaatttggggtgaaaatacaattcacccaacacatgagatgaatgcaacaaaatctttgtgaagtgttgctgagagtggagcactttaatttattgaaagcagaagcaatagatgtcaagcttcccaacccctaaggacagtggcacgtgcgacacggttgactgccagggtgaaggctcccatacgaggatcacattcatgggttttgcacatttccttcacatctttgaaacctttggtcatgtaggtctttagctcattgttcactttctcctcatcccacatgaaaccttggatgttctggacccactcaaagtagctaactgtaacgcctcctgagtttgcaaatatgtctgggaggataacaacccctttcttcttcagaatctcatcagcctctgggtcagttgggtgattagctgcttccacaataaatttggccttgatttcatttgcattttccctattgatgacacccccaagagccgctgggactagaacatcacaatctttaaccaatattgagttagggtcaattggatcaccaccatggaatccttttactcccc

SEQ ID NO: 130690 - DNA, 1104 bp, Glycine max
  Clone ID: PAT_MRT3847_89020C.1
gccgaattcccgggctcgacccacgcgtccgtgagttgtttttttctcttctccagtgccaatttcggtcactcttcattcatacatgaagaagtgaccactgttgctgaatcagttattccttcaatcatgtatttctcttcttgcttttcccattctccattgacactcaaggctatgaaaccttgtggttctgttgggaaggggaaaaattttgctttccctatcagaagtaatggtgctgagctttgtgacggacacattgtgagaagtagagtcaacttaagcggagattggagtttcataggaggatccagaattattgtgaaaccaaaagctacaagattgcttcttcattatccaaaaaggggtcaaatgcaagcttcatgcttcataggatctcaactcgctagcactgtatttacagtaggaacaatagcagtgctcccattttacacactcatggttctagctccaaaatctgaactaaccaagaagtccatggagagtagtataccttatgtagtgcttagcattctatatgcatatttattgtacctttcttggacccctgagacagttcggttgatttttgcaagtaaatacttgctaccagagctggctggtatagcaaaaatgttctccagtgaaatgactttggcctctgcctggattcacctgttggttgttgatctttttgctgcaaggcatattttccaagatggactgaagaatcagattgaaactcggcattctgtttctttttgcttgtttttttgccccattgggattcttactcatgtcatcaccaaatccatgaccaaacctgccagaaaggagggtcatggtttatagaagaaatctgctttcattgaggcaaactaggatttcatttcaagtttgagaatttgaggaactcatgtttgagttgaagttacttgtaaatgttcaagggtacttcatatctgtcacaaggtgcccaaagggcaattgaaatatatggaaaaaaaaggagtaactaacaattttattatacattggaaacaattaggaaacttaatttttaaaaactggaattggaaaatgagtttgaatttattaccc

SEQ ID NO: 130691 - DNA, 732 bp, Glycine max
  Clone ID: PAT_MRT3847_89021C.1
cacgcgtccgctctcttcttcttcttcacgggcaaaaccataattcctctctccgaatccacgcgcgatcggatcctcgtcgcgttttcaaattcaaattttcccggcgatccgattgatctctctcgctcgctcgctgtttcctccgatcagcattgctcgatcgtggcacgaaacttcggcgattcagcgtttgcatctgcgtttccgtttcaatgctcgcagcgagagtgaggattcacattgttatggtcggaaagctagggttaacgccaacggagttcacaatatagcgtcgttttagaatctgcgcgtgactcacgatttcggacatgggaagctcgtggttgaagaaacagtccttcgtcatcggccctaagccgccactgagctggttgatcctgtgcttgataagcctcctcgctctgatagcagttttgagttcttcttcgtcctcgtccttgaacaccgcgttggttcttcgcctcgcaccaccaccgcggaatcgctaatctacacgagctacaggaggataaaggagcaggcgggcggtgggctacttggagctgaggaccttgtcgagcggtggcggcggcgcgcggcaaaaggaggtcgggctttgcggcaagagagggagaaatttgtggccgtgtcacaaacgtgtctgcgaatttgatggctgggtttaaagagggcgaggagtttgatcggcatggccaggtgtataaggga

SEQ ID NO: 130692 - DNA, 151 bp, Glycine max
  Clone ID: PAT_MRT3847_89022C.1
aaagggaaaaagaaactaccccgggggaaatgcaacccgggagggccgccccgtcaaccccgggagttttgatttgggacggttacttgaaaaatatgcaaacacaaaataaaagtttgctctacaaaaaagcatgaaactccttttaagt

SEQ ID NO: 130693 - DNA, 271 bp, Glycine max
  unsure (1)..(271): unsure at all n locations
  Clone ID: PAT_MRT3847_89023C.1
tattacnntcntgcccantanactnngttttctgtcgcangctcacgcttcncagtactcncagtnatacatcatcgnagcagcaagatgnggnngcnaancatnncggtaaaaccgatttggaaagnggttctcggcctctgnatgccgatgatgctcgagagcgctgaaatnagggngtcgntcatcagaaaagtgtnctccataatcgcacatccagtgtgctcgtaaccatcgtcgtcggcgccgtcgtcgtcaccgtccgcccaat

SEQ ID NO: 130694 - DNA, 1004 bp, Glycine max
  Clone ID: PAT_MRT3847_89024C.1
ggctgtagggctcgaggtggaatacaagagggagtggaggccagtagaacccccttgtttattcggcatacacatcgtcgggggctagccaccgagtgcagtgcaaccatcggaaaataatggcagagacagattcgtcgtcctcttcagatggagaaccctcgcaatcgctggcgtcgattgcggagaatcttcagcgttctgccattcaatctgctcgaactgtgcaacatagctcttcaactcatttccgtgcctttcagaattttttaccagaagcagtatcacagtatagaacatatgaagatgcttttgtcaataaagttaaagatggactgatgattgcaaaggagaatccagctgtaagtgctggtgtagctatttctgctgcccttctggctatgcgagctccaagaaggtttctgtttcgccatacattgggtcgattccaaagtgaggaggcgcgatatgctagaattgagaagaatgtaaaggacttgaacctttcagtggatttactgaagaaggagaatgcaaaattgcttcaaaggacaactcttgctgagaaggaaatgaaatatgggcatacggaactagtgagtgccggaacccaatttcaacagctggcaaaatcagcatacaaggttgaaacccgagctgctgatttgcttgacaagctgcggtatatacctagtcgtgaagctctggcacttcgagctgaggttgcttccatggcttcaaatttgaagcgtcagagatcttcgctgaacaaacggataatgaagatcaacgagttaggggttcctgtgtgattgaattaatggacaagttgtggaccttctcttgatgcacccccagttttactgaataaattctcctgttaaagtagatagttctacgtataatgcagacccatgtcccggggcatctttttttgttttcaaatgatcagtctctttcatgcaatatatatataactttcaggcaatatactatttttaacc

SEQ ID NO: 130695 - DNA, 347 bp, Glycine max
  Clone ID: PAT_MRT3847_89025C.1
aggactcgaaaatgacaaaagagtgaatttttttttctgaagtttcagactcccttggctgtggggacacatactgtacctacaagagaaaagtgtgctcaagagggagtattctcccactcgttgaaggtatttggaagatccactacaaattatcatgtccttcataggtgaaaagtctaatcccttccccaatgcaactgtgatgagtggactgaaacagtcacaacctctgatgtgacttcatgattgatcttacatttgggtcaccaaagaatgagacgtttgacaaaagtttcttgtactgtaagatgaatcctagcgcctatgttggacctatcccttag

SEQ ID NO: 130696 - DNA, 449 bp, Glycine max
  Clone ID: PAT_MRT3847_89026C.1
aattcggcaccagcactaattgatcttgaggtgccaatgagcaccctttaagtctgacgctatatgttttgctgtagtaatagaagttatctggtgtctgtacttggttgtaaaggttcatcaattaccaatttctttgagtgactttgagatgctttatcattaaatttaacacaggtttcttcttagcagccttgcttgaaaacatgaactccactttctaaattgacccatttttttttctctttatggcatgtttggttggagctaatgattattagcagatctttgattaattccttatgaaaatcctcttaattctgaccaaaattctttaaacatataacaattatgataatgagtttgtaatgagtttttatgcccatgcatgcaaagaaagttataattacggtatatatatatatcctaaattctatttccgacaaaga

SEQ ID NO: 130697 - DNA, 550 bp, Glycine max
  Clone ID: PAT_MRT3847_89027C.1
ttgtgttcttctcctcccctcctcttgtttttgtgatttcttattgccgctttatttcattgtctccttctcacaacaaacaaacaccgttcttcttcttctcttcttcctctgcaactctctctctctcatcttacgtgtttatcatcgtcactcaaacgacgccgtctcctctccgattcctaagccacgtttatcaggtttcttggtgctgtttgtgcattgtacattattatttctacatgttctgactagaaggtgctctttctgtatcagtggatagaggcatgggtaaatggcttcaagtgagtggacttatttggggaagttggtaatttattacagttgtgaattatttgcagatctgattcaactacagtgtctattttgacacccaagattgcaagtggcagttatggggcatagacagttccataacacatcttcattgttcgagggtgagcctgaccagaactgaaatcatatgcatactgatcaacaatgtgtgcaccttggtaggactaaccacttcaaaaaaatgggttccatt

SEQ ID NO: 130698 - DNA, 138 bp, Glycine max
  unsure (1)..(138): unsure at all n locations
  Clone ID: PAT_MRT3847_89028C.1
ataaaaaaccaatggngtngcaacttgagcaccacatgacagcannccgtnttgttngaggganatggtgnaggttactaacacttggcggagttctaaagtgncactgctggccaagaccaatgtnggtgntggtcg

SEQ ID NO: 130699 - DNA, 453 bp, Glycine max
  Clone ID: PAT_MRT3847_89029C.1
ggtttttgtttttttttttttttttttttttttttttttttttttttttttttttttttttttttttttaaaaggtctcacaaggggggaactttcgaaacatattaattcggggtggctaacttgggcatttttaaccttgggaacaaaattttttggggggcaggcccgattggcggtggccccccccttcttgggaggcctcaaaaaaaaatgggttttttatttcaggtggggaaaacttccctcttggaaaattttttcttcacccctgggaagggacctggggtttttccagcggattaaaagccttattttataaaaaacatttttttattaataaaacccgaaaatccatgggatccccccaaatttttgttttggcaaaaaacttttggttctggagggttcaatcaagggggaccaaatttttcaaaaccgggggtggggccc

SEQ ID NO: 130700 - DNA, 1393 bp, Glycine max
  Clone ID: PAT_MRT3847_8902C.1
ttattatacttatattgtaccattcctcttgagcctagtagtaatagtgaactggagtgatgctcaagtgtgttgtgtgtcagtgttttagggaccaatggtggagagtgagttttctgagttaagatataagatatatgctatctaatgcctagtgggatataggaaaggacctcaaatctgctatctttcgttcacatacgcatcatattcttttaattgttagttctgagttctgaccaaagttgttgatttgagtgtttttagcatatttggggtgtctgcaaacaccgcaggaattttgctttttctattgaattagattcctctgggaattcaattctgattcttccttagttttcggttttctgtctttctttttttccttctatttatattttgggttggttttctgttgagtcttgacttgcttgctccaactccaacccagtttcacactagtttgttgctccaattcttgtagtcaaggggaacaatgaatgcactagcagccaccaacaggaactttaagttggcctctaggcttctgggattggattcaaagcttgagaaaagtttactgattccattcagggaaatcaaggttgaatgtaccatacctaaagatgatggcaccttgcaatcttatgtagggttcagggttcaacatgataatgccagaggccccatgaaaggaggaatcagataccatcctgaggttgaccctgatgaagtgaatgctttagcacaactaatgacatggaaaacagctgtagcaaatataccatatggtggtgccaaaggagggatagggtgtgacccagcagaattaagtatatctgaattagaaagacttactagagtttttacacaaaaaattcatgatttgattggaactcacacagatgtgccagcacctgatatgggaacaggaccacagaccatggcatggatactagatgagtattccaaattccacggttactctcctgcagtagtgactggaaaacctatagatcttggtggatctctcggtagagacgcggctacaggacgaggagtcctctttgcaacagaatctttgcttaatgagtatgaccaagagtttatatggacaacggtttatgatacagggttttgaatgtgtagggtcatgggctgcccaattaattaataataacggtggaaaaggtgccgctgtgagtgggggttgggaaggttgtaagtacggcattggtcttgaataaattaaactactccattttaagaaacatttcacaaagattttgttgcattcatctcatgtgttgggtgaattgtattttcaccccaaattttttttgatttaatatctgatccatcaaaccggaagaatccatttccaatttttaaa

SEQ ID NO: 130701 - DNA, 427 bp, Glycine max
  Clone ID: PAT_MRT3847_89030C.1
ccgcgaacacaggatgccgcgccttagaaccggtgacaaaagcaactcattcgttggaaactgccaaggaaaggtaactgctactaccttgtgacaaaattcctaggggatagaatacaactgatgagagattgcacggcacagaacatgagggatatgatccacttctaggtgaaatgcaaaaatatgccactcccatgatgccactagatgaagaaattaaacctaaggtggcatcattatcaggtctaggaatggtttgatggtgaagatgaggaagattcgtatgagggcttccactctactatatggcataggactgcggggggagactactatatggatcgaatttctttcactatatttttctcactgacccgcattgtctcacgcaaaaatggtgaaaaaggaaaaaggagatcttgtt

SEQ ID NO: 130702 - DNA, 167 bp, Glycine max
  unsure (1)..(167): unsure at all n locations
  Clone ID: PAT_MRT3847_89031C.1
tctaaaataaaagtttttgtctactgccacctgcataaacaacttgtactattttgtgttgtttacctatttaaactaccttggcaatgtgaagaaccgaggtgganaagaagaccctgagctcgtgacatgcgaacaccaatgcgcaacaggcacaagcgaataca

SEQ ID NO: 130703 - DNA, 103 bp, Glycine max
  Clone ID: PAT_MRT3847_89032C.1
cgccactccggcctgtgatggccttccgtactcctgaacatgcactgatggtggtgataaggtggctggcggacaaagagaagtctgagtggaggaagtgaaa

SEQ ID NO: 130704 - DNA, 203 bp, Glycine max
  Clone ID: PAT_MRT3847_89033C.1
aacccaaaaagatctgatgccacgtctgttactatagaatatgttccatcaatttcattgacggtttcaggctctagattggataacaacatttcgtttaatattgtcctctatgatggaatgttgaacactccttaaagggttccatgtttggatctttaaaattttctcaaatctaaaatttgcacttttctcaaaaacac

SEQ ID NO: 130705 - DNA, 248 bp, Glycine max
  Clone ID: PAT_MRT3847_89034C.1
gagcattctatccagcttagtggcattggctcctcgggggcacaaggatctgctattgactcttacatatcaagcttccaccacgaggtcagatggtgcccgtttggcactgagaattaggcgaaggtgtgtaaccttaaagaaccctggcttgttgtgctccatgcaccgcggtgccgcctctgctatgcactggaggaaccatcatgtttatttggtagtaacattagctgagtcaggaatgaatg

SEQ ID NO: 130706 - DNA, 312 bp, Glycine max
  unsure (1)..(312): unsure at all n locations
  Clone ID: PAT_MRT3847_89035C.1
tttttttttttttttttttttttttttttttttttttttttttttttttttttccttanntttttttctttttattaaccttttaaaatttcctttcaagaatatttggcccttcccgatatttttggggttggctaaattnggagggccttacgttggcgctttttaagggggggcctggggaacccaattggggtgaaatttgtgaataangcccgtttttaccagtttttcccttccgagatttgaaggctccactagagggggtcggttttccacctggttaggtgggggtttttaaaacctgcgggg

SEQ ID NO: 130707 - DNA, 367 bp, Glycine max
  Clone ID: PAT_MRT3847_89036C.1
gactacaagggcaaaataccacctgttgcctcgtttttttttcctttggcacacccgggcctcacttaaaactaaactgcacgtatggctcgcatctatcatataggtgaccgaaaatactatagttaaacagaaataccttgtatcaggcatcaaattggaaaagttcagtttatggcaaggttttgccgacggcccagaatgtattgtaatctatctaataaacgaacgaccttggttccttctcacttggggggataactaggttacgttttcggccgggtccggttcaatggggaatcgggggcctttcttatagttcccatttcacatcgctcctattaaatggttctccttagacaaccct

SEQ ID NO: 130708 - DNA, 276 bp, Glycine max
  Clone ID: PAT_MRT3847_89037C.1
ggcgatgctttttttttattttttttttcacctgtgtttttttgtactattgcttctagtttttggggggacccaaaccaaccaaaaaaggggccgggggggaccacccgggaatttgggcccgggtgcagaaggggtaccaaatcaacttcatacggagggatgtaaaggactggagaaatgctgggcatagggtgattctggggagaattaaatcccggcaacagcttcaaaaaaacttcccgccgaacgcataaagagcaatggccgggggcc

SEQ ID NO: 130709 - DNA, 1093 bp, Glycine max
  Clone ID: PAT_MRT3847_89038C.1
ccttaataatttccccccccccacccaatcatacacatgtattcatttatgatttttctgaacagacatttttgtatgtatctaccataatacaaatgtataaagaataatcagggtaatattataaaactaaataatttttttaataaaatgtctacgttatttacaactcacactcacaggctcagacttgctgaaagttccaagtgcacctttcaacgaatacggttcacatgagcaaatggatcagtgctagctgttggtgcaggtttggaagcctgtgcagtcccaaagacattccaaaatctcagtgtctcgtcccctgctgcagaggccacagtacacccgtttggactttgtgccatatacaacaccctggaggtatgacccttgagctctgccatcttcagcattgaagggtatttccaaagagcgagctggttctgggtgaaaccatgcgagctaagcaactcacgctcattcttgctccacagcagagcgcacacttgtgagcctgtgtcaacagagttcaagcacgcccctgtatgagtgttccagaacttaatgcagtgatcacccccacctccaccagaagctagcagatttgcctggaatggacaccaagctagtgccctcacagcagctttatgctcctcaaacctgtgaagccaacgggtcggtgaatttgaggaaaccatagccctgtcccatatgtgaataacattatcgttgcctccacttgccaattgttgtccggagggagaccacctgagcccacaaacctcctgctgatgtcccctataagattcaccaatatgatgtctcactctaacatcattgttaacaattctaccatccatccctcctgttgtgagaatatgattgttccaagacagtgaacctacccgtgcttgatgtccacctctcaatgttcttaccagcctagaaacattagaatcccagagcaggacatgcgagttgttcaaaccgatggctacatggcatccatcgggagcccaggcaacgcttgtgacaggaccctcttcctcatccacagtgacaagttcagccgtggagctataagatgcatccc

SEQ ID NO: 130710 - DNA, 779 bp, Glycine max
  Clone ID: PAT_MRT3847_89039C.1
ccacgcgtccgaacagcagttttcatatctttactacactggttaattgtattttaacgaattacgtttacgttgaattggtggttggctttgttcatgtaaaactcttataagagacttacattttccgaaccctttatgtgacaagggacaaaggcgatttctgggttcactttgggcgtgggactgtctatccttttcctttccctcgtcattgctcaacagtgttttctctctccaaacaacacgttcaagtgaagtgtgaaggatccaaaacctattattctatctatggccttcttggctttgttcaccaccatggactcttgttctaagagacttgcattctcggaaccctttatgtcacagaggagaaaggtgatttctgggttcagtttgggcgttggagtttctctccttttcctcactctcatcttgctcaacaacacttccctctccgttcccaaggttcaagtgtttctccaaggatccgattccaattcctcttcttcttcattctcgtggcgttttcccttcacaaccactctttcttccaacgcttccgtgagtcctctgcatagggttgaagtgagggtgtcgtcaagtgagggttcggagaaaaccccttttgggaaatctcactggggatcagaaaaatgcaagcttgcatgatgggcctgaggaagatgaagcttggtggtctttggaaaatggtaccttggccaggaagggaaatgccccccttggaaaatccgccttccatggggaatggggtggaa

SEQ ID NO: 130711 - DNA, 2365 bp, Glycine max
  Clone ID: PAT_MRT3847_8903C.1
cccacgcgtccgtacggctgcgagaagacgacagaagggggtgcaatgaaaccatctatatttatagccatttatgagtgacagtagaaccacgttttgcttcctaatgtttattattattatacttatattgtaccattcctcttgagcctagtagtaatagtgaactggagtgatgctcaagtgtgttgtgtgtcagtgttttagggaccaatggtggagagtgagttttctgagttaagatataagatatatgctatctaatgcctagtgggatataggaaaggacctcaaatctgctatctttcgttcacatacgcatcatattcttttaattgttagttctgagttctgaccaaagttgttgatttgagtgtttttagcatatttggggtgtctgcaaacaccgcaggaattttgctttttctattgaattagattcctctgggaattcaattctgattcttccttagttttcggttttctgtctttctttttttccttctatttatattttgggttggttttctgttgagtcttgacttgcttgctccaactccaacccagtttcacactagtttggtgctccaatagtataaggggcagcactggctacacagttcattcataagctatttcaggaaagtataacaaaggtttcctgaacacattaactttgaattgacagaacatgagaataataaatctgtattctcatcccaaggagcatggtagatttctgtaactattttttcttcttggatatcttgcgaaaaaagctagaatagtgttaatctcaatatagtagtcaaggggaacaatgaatgcactagcagccaccaacaggaactttaagttggcctctaggcttctggaattgaattcaaagcttgagaaaagtttactaattcctttcggggaaatcaaggtgaatggtaccttacctaaaaatgatggcaccttgcatttttatttagggttcgggtttcaacataataatgcaaatgtccccatgaaagggttcacatacgcatcatattcttttgattgttagttctaggtgtgaccaaagttgtagaattaagtatatctagcatatttggggtgtctgcaaacaccgcaggaattgtgcttgttcgattgaattagattcctctgggaatactttcaagacttactagagtttttacacaaaaaattcatgatttgattggaactcacacagatgtgccagcacctgatatgggaacaggaccacagaccatggcatggatactagatgagtataaattcacactcgtagtgactggaaaacctatgatcttggcgaacctctcagtaaagatgcggctacaggacgaggagccctctttgcaacagaggctttgcttaatgagcattagaagagtgtatctggacaacggtttgtcatacagggttttggaaatgtagggtcatgggctgcccaattaattagtaataaaggtggaaaagttgttgctgtgagtgacataactggagccataaagaacagcaatggtcttgacatcccaagcctacttgagcattccaaagtgcacaggggagtaaaaggattcaatggtagtgatccaatagaccctaactcaatattggttgaagattgtgatgttctagtcccagcagctcttgggggtgtcatcaatagggaaaatgcaaatgaaatcaaggccaaatttattgtggaagcagctaatcacccaactgacccagaagctgatgagattttgaagaagaaaggggttgtgatcctcccagacatatttgcaaattcaggaggcgttacagttagctactttgagtgggttcagaacatccaaggtttcatgtgggatgaggagaaagtgaacaatgagctaaagacctacatgaccaaaggtttcaaagatgtgaaggaaatgtgcaaaacccatgaatgtgatcttcgtatgggagccttcaccctggcagttaaccgtgtcgcacgtgctactgtccttaggggctgggaagcttgacatccattgcttctgctttcaataaattaattaaagagctcccactctcagcaacacttcacaaagtttttgttgctttcaactaatgtgttgggtgaatcgtattttcacgccaaattttctttcaataaattagtatagtatataaatctttttgtaactacatgtgtggttctatgccacttcttgtgacagccacgctttttaatataatgtcactttgctttgaaaaaaaaaataaaaacgcctgatttatcgtagaggcaccccaaagccccgcgcaaccaagaactaaggaaattgcaaagattggccagcaggtgtgtggt

SEQ ID NO: 130712 - DNA, 383 bp, Glycine max
  Clone ID: PAT_MRT3847_89040C.1
ttcatattttttgtctttttttgttgggggacttttttttattgtccgttttttttttttttttttttcacattttttttttcgtgtttcccaaaacccccaatttttttttttgggcccggtaaaaaaaaaaaaacccaattctttgggcgggaaaggggttaaacatatgattatactctccccctccccccacaatttaaccttccccaaaataacgcctaaagcggggggggggggacaatttttttttggggggcccccaaaaaaagggcccccatcgtttttaaaaactggggggtatcaaaaaagagcacatttccccagttgggggggacattctaaaacgggccggggaaaaaaatctctagccccgcaggggg

SEQ ID NO: 130713 - DNA, 342 bp, Glycine max
  Clone ID: PAT_MRT3847_89041C.1
cacaagaatatcgattcataaattgctataaatatcactattatacaaagatttttgcacggccaacaaactggtactgtatattacatatcgggcctccacaacatattcggcatgcttcccacatacaaaaaaaggcatgggcatcagcgttctacactaatcactaaggtctgtggtatacattttacttaacacctcatgcacaatttacaaacaaaataaaggtggttcgcacctactaacctaaattagttgtgatgttgcaatcacttatattttttacctatcctattgaatttacctcacttacggatatataaaaggcaatgctcatgaaac

SEQ ID NO: 130714 - DNA, 106 bp, Glycine max
  Clone ID: PAT_MRT3847_89042C.1
gcaagaaaaacagagcgcaagatgcttgggtgatgagcctattagagaaccacgaggacatatgcaacagctatgctatcactacaacggatgaaggttgcagagt

SEQ ID NO: 130715 - DNA, 711 bp, Glycine max
  unsure (1)..(711): unsure at all n locations
  Clone ID: PAT_MRT3847_89043C.1
cncacaagtgacgagagcagnnnnngtaagtcnannnngtcnnatgnctgctgatgatattcagaaagcaaaaatgcgtgctttatntatgcagagtaagtatggnaaannnggttcaaaagagagtagcgaaacaaaaattgatagcccatataaacaacctcagacaaaccccgccagtattgcagcttgctcttctaaagttcctactccacccaaaattgaagaaaacgagaaacctttgttacttgcctctaaagccactaataagctggaagcttcttattcaaaaccaaaaatggatgtgaaggaacctctctgggagaagtgcaagagggttcagatcccatggaaaacaccagcaggtgcggttcctattgtttttgttacttacatcaaatatatgcctataatattaggatagaaaaattggtgaaattctatgacagcccgataaaagaatgaaaggcacgttgagaacagaccatattaacagctttgctgacgttgagttaaaaagaggtatatcttactcaattccccgcacattttcttggaggacaatgtcggacgcttctttgctacctttgacgctaactcttattgaccgcatcccctttcgcagcttttatcaccttattatataattagagcaagagtcttggtataactctatgttctgtaagtaacttgggtatattgggcagttnt

SEQ ID NO: 130716 - DNA, 391 bp, Glycine max
  Clone ID: PAT_MRT3847_89044C.1
aaaaaaaaccaagggtaacgggcaacattaacacattcgttaacatgggttttttataaaaacggggggtaactttcaacattaaaaaaaattttggggggggaattcatattaccaacatgggttttttataaaacgaggggggaaattttacgtaaacatcggtttttgaaaaaccggggttaacgaaaatactatcaacgggggtactttcaacatggggggaaaaaccgagggaaaaagcatattttctaataggggaacatcgccaggggatacaggaacgaaagcctctgcatttttaacctcctcaacacaaaccttgacttggccatgcaacaaagggatggtgggaactggtggggatccctcataaagtcttcctagggca

SEQ ID NO: 130717 - DNA, 232 bp, Glycine max
  Clone ID: PAT_MRT3847_89045C.1
cgagctcgagccgctcgagccggtcaagatgttgaagtgtccagaaaagtgtttgacgaaattcctcacagagaacattgtttcttggaactcaatgatttcggggtatactgtgaatggatatgtggatgatgctattttgcttttctatgatatgttaagagatgaaagtgtggggggtcctgatcatgccacgtttgtaactgttcttccggcgtttgctcaggcagcg

SEQ ID NO: 130718 - DNA, 484 bp, Glycine max
  Clone ID: PAT_MRT3847_89046C.1
aataattcgaatgggctttcattcttacctccacatcgagaatgctctcatttccatgtattctaaatgtggggcaattgatgatgccttgcacatatttgaaaatatggtgagcagggatgttgtcacgtggaacaccatgatcagtggctatgcacagcatgggcttgcacaagaggcaattaatctctttgaagagatgataaagcaaggtgttaatcctgatgctgttacttaccttggtgttttatcctcatgtcggcatggaggtcttgtcaaagaaggtcaagtttactttaattccatggttgagcatggtgtgcagcctgggctagatcattattcttgcattgtagatcttcttggtcgggctggtttacttctggaggctcgtgatttcatccaaaatatgcctatttttcccaatgctgtagtatggggttcactgctttcttcctctaggcttcatggaagtgttccgatt

SEQ ID NO: 130719 - DNA, 580 bp, Glycine max
  Clone ID: PAT_MRT3847_89047C.1
aaaaaaaaaaaaaaaaaaaaaaaaaaaaaaaaaaaaaaaaaaaaaaaaaaaaaaaaaaaaaaaaaaaaaaaaaaaaaaaaaaaaaaaaaaaaaaaaaaaaaaaaaaaaaaaaaaaaaaaataaaaaaaaaaaaaaggggcgccctttttaaaaaatcaaattttatttccccttttttgcaacttaaaattttttttatagggcccccaaatttaaattaatgggccggtttttaaaaatttgggaattggaaaaaccttgggtttcccaaattaaatccctttgaaaaaaatccccttttcccaagttggctaaatacaaaaaaggcccaaacaaatcccctttccaaaaatttgcccaccttaaatggcaattggacccccccttttaccggccatttaaccccggcggtttgggtgtttaccccaaagttaacctttaaatttgcaaggcccttagcccccgttcttttggtttttttcctttcttttttggcaaggttcccgggttttccccgtaaagttttaaatggggggctcctttaagggttccaattaagggttttacggccctttaaccc

SEQ ID NO: 130720 - DNA, 640 bp, Glycine max
  Clone ID: PAT_MRT3847_89048C.1
ctcatttcaatttgcatttgcatttgcgtttcatttggcgttttgtttctttctggaagcttcgttcgggcatcaatggcgtccttcgatgaagctcctcccggaaactccaagaacggcgagaagatcttcaaaaccaagtgcgctcagtgccacaccgtcgacaaaggtgccggccacaaacaaggtatctatcgtcactcatcatcttcgtttccccttttttctttaccctaattaacaatcagatctacgattccgatgctacttttacatcagcttttacttaaatctcgatacttcatgctctaaggttccgggtctagtcgattcgcgcgcgttttaacacttcgttgtcgaatagtaaaaaggattttaattattttttattttaattaatggctatgcgatatattgttgtgattgtttcgttgtttaagttcgagagttactctgtattgatgttgagggaaacattatgcttgttgaggttggaaactcgttgtcaaatctgaggcttattttgatgtggaattggtttttggaaactttaaattgtttactttagcctgatccaagcaccattgtggagtgtcgcccctagttatgtggctcgtgtattagagattgaactagagag

SEQ ID NO: 130721 - DNA, 290 bp, Glycine max
  Clone ID: PAT_MRT3847_89049C.1
cccaacaaagcggctggtataataaatattggaggaaaaaaaatgaattttataattacagagaaaaactctgattacaaaaggaaaaattaaaaattggactattaatataattacactaaattcgaaattacaatgggggtttcggattaccccatgggacctgaactgaaataaatttggggaaagtaagactcctcttaccttttaatttttgatcgtatactccaaggatctctaacaaatttgtaattgacatatataacacttggggggaaaccatgtataag

SEQ ID NO: 130722 - DNA, 906 bp, Glycine max
  unsure (1)..(906): unsure at all n locations
  Clone ID: PAT_MRT3847_8904C.1
tggttttggtgggggcggatttggaggcgcgtctagggctgatgatgtggacaattgggcggttggtaagaagcctgctcctgttagatcttccaatttcggttccagttttcgcgattccggcgtggagcctgatcgttggacgagaggggatccgccgcgtgaggttgagcagcggacggagaggccaaggctggtgttggatccgcctcgaggcgatggtttggtgaatgagtctccggtgaaggcgatggataaggcgaatccgtttggggcggcgaggccgcgggaggaggtgttggctgagaagggtttggattggaaaaagctggattcggagattgagactaagaagacgagccgtcccacgagttcgcactctagcaggccttccagtgctcagtccaatcgttctgagggtcccgggttgcaggggaccgatgctgtggttaaatccaggcccaaggtgaacccctttggggatgccaagcctagggaggctgtgctgggcgagcgaggcatggattggaggaaaattgatcttgaattggagcgtcgctctgttgccaggcctgagacaatggaggaaaaattattaaaagaagaaattgataatttaaagaaggaacttgagaaagagtctacaataaattcaaataaggaatctgtggatgaggctggtggagaccaaaccagtagacatgcaatattaccccagaaagaaaaggagctggancttcttatccatgaaaaaaaaaacaaagttcccccccgccagacagccgttgnnaggccaggttcntcggcagggcngtcttctnctttttctgntcggccnccttctcgntctggttcctttgnggnttctngtagtgtggcttttncngncngccctcgctctcgtgg

SEQ ID NO: 130723 - DNA, 410 bp, Glycine max
  Clone ID: PAT_MRT3847_89050C.1
atcacgacccatgactcatggatattgctcgctagaaaggacgaccttacatgttatggaatattattgaggtgagtgaggtaagctacaagaggattgagaattaggctagcttgcctagacgatgagcactctggccatgacgaggccagctataagcagaaccttcttctttagaatgacctcaaagagtatgacatcttggactgagacacaacgcgcgctgattagagcgaaccttcaaactgatggctgtatagagaacaagcactagtgttctggcgaggaggcacaacagctggaacggcacatcttatagatggtaaccagcttgtagaagctcctgcttgtgactaacaaggtggtatttgcgagaatggaaaggccctgacactatctgtggatcatga

SEQ ID NO: 130724 - DNA, 664 bp, Glycine max
  Clone ID: PAT_MRT3847_89051C.1
gcacgagaaagtcttcattgaaactcttgcaccatctccttccttttggattgtgacattgtttgtttccatctcaacacttatcccatacttctcttactccgcaatacagatgaagttctttcccaggctcgaggaaatggtacagtggataaggcacgagggaaagacaaatgatcctcaatttgtcgctatggtgcggcaaggatcattgcggccaacaactgtcggttcaacagctcgcttagcggccaaggataatgactttagagacagtggcactaaccatagatagtatatcttgacatattcttgtttcaacagtcaatggtgtgtgccagctttattgtgcctatagttatggaattgcttactggctcctctcaaccagaaatatgatgttgcttacatccacttacatggtaatggcatggtgcacacaaccaaaccatcatttggcagtgaagttggacagtcgaataaaaatgtatacctatttttttggctatttgaggctgtatagcgttaatttatagtctgctttttgtatcatagatagtagccgttactgggtatagcttgaattctttgtaggattatatagcatagcttcatattatagaaatcagttccttcctccctaaaatggaatcgtttgagtaag

SEQ ID NO: 130725 - DNA, 147 bp, Glycine max
  unsure (1)..(147): unsure at all n locations
  Clone ID: PAT_MRT3847_89052C.1
gcncccgtgaaactcttcttctcattcacattcagttnccgcgaanaccatcaggtgtgttcagttgctctgnttatgcaactctgttttttttggttccgcctaggctctgcaantgccaatggtggatttggagggcacagaagg

SEQ ID NO: 130726 - DNA, 815 bp, Glycine max
  unsure (1)..(815): unsure at all n locations
  Clone ID: PAT_MRT3847_89053C.1
aaatggctctctctttttgttcctaaccaggctatctcttccttgacccaagctcttctgccactgttgcttttccaattttgccaaactcactttgtatgaggtggttggtattcccctttcttttcttcctttgtttccttatctgattgtcattgttgccatatgtagttgtagttgtactcaatgcagcataagacctcaagattccacatatatctttgatatccatggagatgtgacgttttttaataaactaaactcaactagatgtatatatgtataaaagtgaaaactagagtgaaagggcatgtttggatgtaatggtacaaaagagaaatggttaacttgtcattttgaagtataaaatatgttttaaaaaatacgtaaaagatgataagatggtttaaaagtcttgatgtttcttagatatgcaagtttaaggaaagaagatggaatctgaagcaattagttgggtctggtggaatgccatcatctcattcagcaactgtcactgctcttgcagctgccattggattgcaggaaggctttggaggacctctttttgccactgccttggtttttgcttgtattgtatgacttccctctctagttcaacaataaatcagtagtgaaaatctcttctatgacctaatatttttggttactaattactatgacattctattgatcttattctagctccatatatgcaatggtataaattgtaataaactacctcataagnaagcatttgatttcccaaaacaattaaaatgcacctagtttagacaatcagaaactaaattatggct

SEQ ID NO: 130727 - DNA, 1416 bp, Glycine max
  Clone ID: PAT_MRT3847_89054C.1
gccttcatcttcccacttatctaccccccccccacctctaccaatcactacataaactcatcatactacacaacacaacacattatccacaacatcttcttttcaaggccctttttttccctaactttacaaaatcacaacacacacaaatcttctttttaacatttatcatcgtatctgaaactaccaactatcgatggccccttcattcgacacaagtactcacacggtatgcgtgatggatgcttcgggtcacttgggcttcagccttgtccaaagactcctccaaaggggatacactgttcatgcctccgttcaaaaatatggggaagaaaacctattcactggaatttcatccgatcccgataagcttaaggtttttcgatctgacccatttgattaccatagcataatcgatgctctccgaggttgctctggtttgttctacacattcgaacctccctttgatcaaccaaattatgatgaatacatggcagacgtggaagtaagagcagcgcacaacgtgttggaagcatgtgctcagacagaaactatggataaagtggttttcacatcctcagctaccgcagttgtttggagagaagatcgcaagaccatggaactagatctagacgagagacattggagtgatgttaatttctgtcgcaaattcaagttatggcatggggtgtcaaagacaatggcagagaagagcgcgtgggccttggcaatggacagaggagtgaacatggtgtccatcaacgcaggcttaatgatggcgcatgatctctccatcaaacacccttacctaagaggagccgctgagatgtacgaggatggggttttcgtgaccgtcgatttgggtttcttggtggacgcccacatctgtgtctacgaggatgtctcatcctacggtcgttatttgtgtttcaatcacatcatcaacacccatgaggacgccgttcagctcgcccgcaagttgacgcctggtgcctcttcctccttgcagcaaagtgatgactacgggaagagttttatcgaacagagaattagcaacaagaagttgaacaaattgatggtggacttcgaggcataattgatttccatggtgatctttttggacggtgattagagcaatcaatccttggctgtttttctgcgggaaagtatttgtgtacaaaatgttagcaaaatttgtacctatacccccatatcattattattattattatacattacaaattaatgtattttcaatcaaataagcatttcattatttatttcaacattagatagtgcaaaataattgtctgtttttaaatttgcttttcccctgtatcctactaattttagatccaactatatttacaatgccacatcttcttataactaaataaacatcaaattaatttttct

SEQ ID NO: 130728 - DNA, 317 bp, Glycine max
  Clone ID: PAT_MRT3847_89055C.1
agcaaaaccaaaatgtatatggggacttttactaataaaaaaatgtgtgtaaaaatggcttcaatgagactcgcaattctctagagacaattttctgtaattgcaacactcgcacacatcacatgctcaactggttgacgctaccaagctttgagaactacccctccctcgcaaaaatagggaggaaaaaagtgagcttaaacgaattacttacaaagcaagcctcaaattcaagtaaacattattatcactagatctcaaacaaaaagcccaaacgagatacgccaatagtactacatttgctcgaatacaaaact

SEQ ID NO: 130729 - DNA, 445 bp, Glycine max
  Clone ID: PAT_MRT3847_89056C.1
gctcacatctgtgtctacgaggatgtctcatcctacggtcgttatttgtgcttcaatcacatcataaacacccatgaggacgctgttcagctcgcccgcaagttgacgcctggtgcatcttcctccttgccgcaaaggttggtcagagggcgtttttggtcattttgacttgtgtttttctttgaatgttgactttgactttgacatattcaactctttttttttttttttttatgcagtgatgactatgggaagagttttatcgaacagagaattagcaacaagaagttgaacaaattgatggtggacttcgaggcataatcgacttccatggtcatccttttggacggtgattagagcaatcacattggctgtctttctgcgggaaagtatttgtgtacaaaatgtagaaaaatttgtacctatacccccatattagtattat

SEQ ID NO: 130730 - DNA, 1026 bp, Glycine max
  Clone ID: PAT_MRT3847_89057C.1
tatttgagagtttaataaaaaaaatatgtcaagcattttatttaccatttgaaataaatttctgaaatgaaagttttgtgtcaaagctgatctctggtcttggaaacatacagtcgagccttttcccttgtttccgtctcgaccctcgcgttcgctaactctaccaatcactacataaactcttcatacttcacaacacaacacaacacacacacccaaatcttctttcaaggttttttttttttttttttttaataatttctcatcgtatctgaaacaacgaatgatccatggccccttcattcgacacaagtactcatacggtatgcgtgatggatgcttcgggccacttgggcttcagcctggtccaaagactcctccaaaggggctacaccgttcatgcctccgttcaatcatatggggaagaaaaccttttcaatggaatttcatctgatcccgataagcttagggtttttcgatctgacccatttgattaccatagcataatcgatgctctccgaggttgctctggtttgttctactcattcgaacctccctttgaccaaccaaattatgatgaatacatggcagacgtggaagtaagagcagcacacaacgtgctggaagcatgtgctcagacagaaactatagataaagtgattttcacttcctcagctaccgcagttgtttggagggaagatcgcaagaccatggaactagatctagatgagagacattggagtgatgttaatttctgtcgcaaattcaaggtatggcatgggatagtaatatgtacatactgatatatacagttaattacccatcgagtaatactagtaatttttactttttaatttccacgtctatttggggtatgttgcagaattgataaatagtgcatatatatataaatgtctaaagtgaataataatgaacaaatatatacatgcgcaattccccatcttgagaaagagagagtaaaaagtaaatattatatgataaaaaaaaaaaaaaagggcggccgcc

SEQ ID NO: 130731 - DNA, 131 bp, Glycine max
  Clone ID: PAT_MRT3847_89058C.1
cagaagggggaaaccctaggggtatacaatccatccggttctttgaaatggtatccgaaaactgacaatggtggctcgctgtaggtgcttcgctcgagtctcattccgtttacgcgcactaacgaaggttg

SEQ ID NO: 130732 - DNA, 113 bp, Glycine max
  unsure (1)..(113): unsure at all n locations
  Clone ID: PAT_MRT3847_89059C.1
ggtgaaaanccatgnccgtcctgttcttggagggaatganaccttctccttatcnntcgtagggnganaactggtagacaacnnccncggaaagatgcctaagagtgananta

SEQ ID NO: 130733 - DNA, 360 bp, Glycine max
  Clone ID: PAT_MRT3847_8905C.1
tgattctgtccttgtccttgaacaagatactacatatagttgaataatgatgctgaccgaacagtgacttggtcttaaaaccaacttttttatgcagcgccaccacggccacacactttgctcaacttgcctgacaagggtacacaatcgacgcccaacttgccgggaggaactcggtgacataaggggattggcattagataagatatcccaatacacttgaactgccttgcagatactttctcttgggtgtgcccaatatttgcctattacaacaaaattaaacatgaggctatttgtgactttacaacatacaaatgtccttatgccgggtcaaaatggtatgggggtggggacatt

SEQ ID NO: 130734 - DNA, 314 bp, Glycine max
  unsure (1)..(314): unsure at all n locations
  Clone ID: PAT_MRT3847_89060C.1
tttttccttatggtacaagttggagatcaaaagcgactttccacaacacaagagctttcaaggggtcaacggaccatcgacttttaagccattccttcacgaacccttctttagntggacgtaagtggtggaaagagacttccttactccaccctactcttcctccaccatgacttanggagtttttcttttcctatctccttctttgcttttattacacttgtccgattctctttgatgatttaattcgttttaatcttttacatgtgctacattgangacaatgtgtngttaaaatatgggggggggagtgt

SEQ ID NO: 130735 - DNA, 442 bp, Glycine max
  Clone ID: PAT_MRT3847_89061C.1
tgggacatgccaaaacatggcatagggtgtacaaggggctgggtgtaccttgtagcttttaaccaaccagaattggggtaaccgtaggagaggcacttgtgaacgctggtgaatgtgcatgctaatatgtgatttcttagtgtgggggtagttggcacaggtggtagttgagggactgtagtaacgcattgggtcatggttggtggtaagaacgtaagggtatgtattactgtagcatgggttatgcggtgaggtgcgaatgcacgttgtacaggttgtaacgcagggaggtagacgtgttaacgtagggtggaatagggtgggggcggtgatggctgacacacatagcagagtgttatgggacttgggtaggggtgctggggactaggccagtgtggacacaaagtttgatgaatggcggttgtatgtcgtggtgccgggg

SEQ ID NO: 130736 - DNA, 570 bp, Glycine max
  Clone ID: PAT_MRT3847_89062C.1
ggccaacaactaaaaaatttttttgaatttagggctcccacccagggtttacagtcccccccaatttttgggggaacccaataataccccaagcaaaaaaaaatttcccctaacaaacttggaagggccccacaacatatgcttttttacaaaatggacaaccctgcccccgggggaggggaaaattttccaaaaaaaaaaggggcttacccagggacggggacgggttcataaaaaacaaggaccccgggaagctttttgccttccaaaaaccccaaacgggccccccccccaggaaatatggggctaaagacactaaaaactcctactttttccaaagggggaaaaaaatccccccccccaataatgggggcccccccctttccactgagggaaaccagcttttttgaaaaaacccttggcccaaaagaaaacttggaaaacccaaacccccccatgggccccttccataagaagggtgggggaagaacccaaggcttcccggaaggattaaacaaaatcgggaccaatatccaatcccctccagccattagggatggaaaatgctgg

SEQ ID NO: 130737 - DNA, 499 bp, Glycine max
  Clone ID: PAT_MRT3847_89063C.1
ccccaagaaaaacccttcttggaacgggttttttggccaccgtttctcagcccctcccccaaaaaccccggggaaatttttagtccccccctgttaaaaaaaaaaaaggggggccggtctttttttttcatcccaaacccacttttggcacaaaacagggcggtttaattgggggggccccccccgaaggcccatttttttattttcccccccacgggggggggcggggaacccgcttaaaaggggattggtcctttaaaacaggccccccccatggcccaaattattataagattttcccccccccaaaaaaaggcccggggccaaagaggggaattttttggggggaaccccggcggtttttgggaagagaaggcccccaacccagccggaaaaaaaccccccttggtggctgattggaaaccccccccctatgagggggaaaaagtttccccccccgcccttgaaccccttgcctagggcaaggattttttttttt

SEQ ID NO: 130738 - DNA, 243 bp, Glycine max
  Clone ID: PAT_MRT3847_89064C.1
ttcgaaatggttagaattgtatttgtgttccttcaactagcacttgctaactagttgctcagattttggacagtatctagagtttgccactatattgtaacataggaaataagcttggcaactttattttgtggcaacttgtgtgaacactgttggctttgcagggatacacgcggagcttagaaacttttccatgaaacttatatgtgggattgatttcttcttgggcaaaaggaaacaaaa

SEQ ID NO: 130739 - DNA, 176 bp, Glycine max
  Clone ID: PAT_MRT3847_89065C.1
accaaatcaaaccaatccgtttgtgaaaaaaatcatccaaatacgaagtgaaacacttgattaatatacggtagaagctagcttaggttcagcatcatagctgacatcgagggagttgcaagatttgccagaaggatgcattgccacaatactgtcatacaacagtcctgtggatg

SEQ ID NO: 130740 - DNA, 187 bp, Glycine max
  Clone ID: PAT_MRT3847_89066C.1
tctctctctctcttagaacaaccagaacccttcgaagctaaccaatcctatggtgtctctcatcagatttattatccatatctctctctacacttagattttaaatgtaattcagattcataacacttcggatctcctctctcatcaaactttagagctatgctctatctcttccgcaaaacacact

SEQ ID NO: 130741 - DNA, 248 bp, Glycine max
  unsure (1)..(248): unsure at all n locations
  Clone ID: PAT_MRT3847_89067C.1
tcttacataatctcctaattcttctctatccttatttaattcttcccattatcatccattacattccacntntatccttaaattcccaccnncnacctaaccactctccnccattccctacaccattaatanaccaaatcccataaacatccttctcccaattcctaatccatnactcnctcttctctccacacnctctccaccattctcttcctactactcttattattatctccttccacacaaca

SEQ ID NO: 130742 - DNA, 162 bp, Glycine max
  Clone ID: PAT_MRT3847_89068C.1
tatactcgtaccagctctcatcatcacattcgtgatttactgcaccctttccgggtattggattcttattgaggctacacgatgtgtagttaaatgcgtcaaatacctatagagaaacgaaatgccgttagtcacagtcatgaattgatattaatcccatga

SEQ ID NO: 130743 - DNA, 361 bp, Glycine max
  Clone ID: PAT_MRT3847_89069C.1
cacacacatcattgattctcattcatccatcctatactctctctaaatacactcactctcactcacccacacttacatacattctaacattcacagacaatcttattcataacatttataacaaactgctgatataaacaacaactctttcaatcattacctccatactacacaaacttcttactgctcatcatagaaacatcactcactcatattacttctttgaaataatatacaacaacatattattactcacacattgattcacctccacatacataattacattcattaatattattactactacatacataccttactactctgctcttatcatcatttataccaccactggttt

SEQ ID NO: 130744 - DNA, 591 bp, Glycine max
  unsure (1)..(591): unsure at all n locations
  Clone ID: PAT_MRT3847_8906C.1
cttgctgcctgcagacattgaattttgctccctttgttcactgcaaaaattatgtaacgaacaagtcaaattctttgcttgttgtgaattgaccactagatactaggaataggaatggcaatgggcacgggtagtgtctaactgctacatgctccgcgagttagaaaatccgtccgtgcccgttccgcgaattcaccaacttgtgggattttggcggtgatgttcttgtacatttataccatccatcttttatccattgcaaattttatcttcggttatccatgaatacggatttttttgtcaatctctacttgatactgctgaacaaaaagtagctagtaaagcagctacagatctcctatgcagaaccgattaggactcgagccaaaggttacattcaattcaatacatggatactgagtttcgaaaagttttcaatccaatttattcttataaacttctaaaatacacactagtataaagtttcttccaatctttagctgtcactgctgattatgttctgttctttgcagattgtataattcttgtctatgcaattactttgatgactcacttantgccagctgcaaa

SEQ ID NO: 130745 - DNA, 256 bp, Glycine max
  Clone ID: PAT_MRT3847_89070C.1
ctctgtatagcttcattgctagattatttgcttgctctgcgaaaccataaccatgaggcaaagcagtaacgcagagactcgtttctctggcaccatttcatccccatccctcaaaaaatttcttcccagatcactctcttccatacaacaacccataacaaaccctaacatccgaaattcagatgcagagaacactcctcccaccgatcccaacatcctgatcaaccatgaacaatcgctgttgccttccacacaa

SEQ ID NO: 130746 - DNA, 438 bp, Glycine max
  Clone ID: PAT_MRT3847_89071C.1
gacacatctcctattcatgcggccgccctttttttatgtgttcatattttgtcctttatgaattcaatgtaacaaacgtctattccatgtcttgctgacccatattacgacacgacaaggcatgacctctcaaaaatctactatgtaaaggacattcctgcattttttctcatcggaccagatgactaattggtggaggagaatggaaaattatcgttctcctcatatggtagcataagctatcccattcaccgaatcgcggataatataccatgaaacacctttgataaatgaacgaaaagctttgcccccacatgttgatgatgtgaagcctgaacatgaactgaaaaaggaaatgtccaaagcatatgtatgcaatccctgtccaaagcaacgcatattctagacattctcttaacatgtctatgactatgacct

SEQ ID NO: 130747 - DNA, 416 bp, Glycine max
  Clone ID: PAT_MRT3847_89072C.1
tcgcgagcagcatcgaaccgggttgtatccctgtcgccagatcatcatttgaaagaggcgcaaccggttcgctcttgtcaggttagatatagaagtaattacataaagagattcaaacacttatattataaaatatgtatattaataagttccctatgttaagaagaacattataataatttaaagagaaaatagaaaaaataataatatcttaccttcattattattaatggaatcttaataattatttcacaagagattattaatattaaagaaaatataagagttgtttgatgtaaataaattcataaggaatattataaataaagtagaatcttaatatttaaaaaaaactaaaaaactaattttgaaaaaacaaagcgagtaaaaataaaaataattataaaaaaaaaata

SEQ ID NO: 130748 - DNA, 371 bp, Glycine max
  unsure (1)..(371): unsure at all n locations
  Clone ID: PAT_MRT3847_89073C.1
gnnaaaaccccgccccattaaactttagcttgggggttaaccaaatatggctctcctaaaaagaccgggaaaaacatgggcggggatcctaaagtttttacttttggtaaacccccaaactttggccaaagaaattaaaaaacctagacccaatttttttccctccccttttttaaaggcaaaacaccggggcttttggttaaaaacggttcttttccggggttgggaaaggtcattttattggccgaaaaaagaggccttgagcttgttaaatggttaacctttatgagaattttgttggggggcgggttggacaaaataaaaaacaggatccttatcttttttttaaaagggttgtttttcccttttcc

SEQ ID NO: 130749 - DNA, 271 bp, Glycine max
  Clone ID: PAT_MRT3847_89074C.1
ggggcgccctttttttttttttttttttttgacgcgcattttataatttagtgagatggtgcagaagactctaccaatttcttcttaaggatttaggatggtgcatgaaatctataccgaggttgtgcaagatttaacacaaagcccaggagggtatatgcctcacaatctaaggagaaacataggtattatggcagttacagatccagtggaggtgccactcgatatagaaaattgtaggacccagatactgctgcagattggaaagatc

SEQ ID NO: 130750 - DNA, 196 bp, Glycine max
  Clone ID: PAT_MRT3847_89075C.1
tttttttttttttttttttttttttttggtatgacttgtgacatacaacttctattaaaacaattaattgtataaattcatgcaagtaatgcttatcaaacaccacttaaacttaatatttacttatttagtaaatactacataacaggctgggatacttgtttttttttttttttttctatcagcaggcttggat

SEQ ID NO: 130751 - DNA, 211 bp, Glycine max
  Clone ID: PAT_MRT3847_89076C.1
tttctgtattaaaaatactcttcctatggttataatggatctacctccataggggtgatggctcaagcagtgaggggggctttgactcgttcttatttgctggtgcctggtggattgggatttgctagtggaaaggtaacattggctcagccaattggggctgacacagaattttacccatcttataatgctttgatatgcatgcacaaga

SEQ ID NO: 130752 - DNA, 429 bp, Glycine max
  Clone ID: PAT_MRT3847_89077C.1
attaaattgtttttccttgcaaaaaattgaacctgcaaaacaaaactgaaacggcccaacaagaaaaccaatttgttaaaaaaaaaaaaagcgtcccccccgaaaaaaaaaaccctacaactaacaacgggggccggccccgttacgatgcccccctgcctttttttttccccacaaaaaaaaaaccccaaaaaaacccctaaatttaaatttcccccccctacggtttttgtccgcccccctccttttttttccccccccgaaaacaaacccaaagtttggacaaaaggaaagccccccccccccccccgctttttggggtccgtaaccaaaaagcaaaccaggttggggtaaaaggaggggaataaaaggggggcacaattttggtcatagataattactgggggaaatggtgatgcggtaaaaatt

SEQ ID NO: 130753 - DNA, 411 bp, Glycine max
  unsure (1)..(411): unsure at all n locations
  Clone ID: PAT_MRT3847_89078C.1
cccttttaatantttaaatatacacacacttcacacattatttcgacttttaaaagaggtgtggaaattcccaaataggcagagcatactcaacaagagggtcatgcctaatttcctctattgaatgaaacagacgcacaaaccaatgaaaatacaaaatccacaccatgcacaggattcccaatttctcagaagatctggcaatagcctgtggaacagaaaaagctggcataagagtattaccagcaatttcaaaatcttgggaaattcccaagagaatgtcaaaaactgttgactgtttgggatcgtcagtaaggaaacataaatgccatgaagtttgatttgcccattcggaactgcacattacaaaaccattgtcaggaccacacacctctcttgggaagatcaatc

SEQ ID NO: 130754 - DNA, 474 bp, Glycine max
  Clone ID: PAT_MRT3847_89079C.1
gcatttaacttgctgctggatgcactgtgcaagtgttgcttggttgaggatgctgaaactctgtataagaaaatgaggaaaacagtcaagcctaatgcggaaacgtataatatataccgtttttgggtggtgtagggttagaaacccgactagagggatgaaattactggaagaaatggttgaactgggtcataggcctgacaattttgcgtacaacactgccattgatacatactgcaaagcaggtatggtaacagaggctgtagatctttttgagttcatgagaacaaaaggttcatctatatcttctcccactgccaagacttatgcaattataattgtggctcttgcccaacatgatagaatggaggagtgttttaaacttatagggcatatgattagcagtggctgtcttcctgatgtcacaacatacaaggaaataattgaaggaatgtgtgtgtgtggaaagataga

SEQ ID NO: 130755 - DNA, 166 bp, Glycine max
  Clone ID: PAT_MRT3847_8907C.1
ttggttatgaattatggttactttttatcagcatttataactgcaataatttaccgaagatgaggcactatgaggataactggtgtctggaagtctaggatttgattatgtaaaacacttacatagtgctgctagtttttttcatgctcatggttaataattcctt

SEQ ID NO: 130756 - DNA, 617 bp, Glycine max
  Clone ID: PAT_MRT3847_89080C.1
cttgccttcctcactcagcactaaatcagaaaatagagttgttaagagtgatggaaactgtttatctgggagtgtgcagcatcagcatgcagtatcctactgcacagaaactcatgcgaagaagaaatcatacagagttggaatttttgttggtctcattgtgggaattcttgcaatcattgtggttttggctttgaccattgttataacttgtaaaaggtatttcccttggggggtgtcagagcagcacctattgcataaaacagttcaagatagcagctatgcagcaggaatctcctctgagcttctcacaaatgcaaggtatgtttctgaagccgcaaagttaggcagagaggacctccccacatgtcggtcatattccttggaagagctaaaggaagccacaaataactttgacaactccacttttatgggtgagaatatatatgggaagctttacagaggaaaattggagagtggaatacaggttgtaataaggtccctgcctttgtcaaaaaagtattcaattaggaatttcaaactgaggttggatttgcttgcaaagctgcgtcaccctcatttggtatccctcttagggcactgcatggatggtgctg

SEQ ID NO: 130757 - DNA, 428 bp, Glycine max
  Clone ID: PAT_MRT3847_89081C.1
aaaccggggcggaccaacccgtccgaaaaaataataagggaggtccacaattggtggaggttaaaattttctttaaggaagggagcgttggtcttgtgtttctttaccataataactgaaattttttggtttaaggcttttttaacttttgttaacacccgaaccaaattttcaaacgttaattaaaactaagttaaattaaattcctttaaggaatttgaagagattcgattggccttgttaccgggggaactgttaaaaggggggggggagtttgaccaggaagtttccactgacccagaaactgcccaaaaaaaagacacaaagttgactgttgcatttaatctgtttaaaaggttaagggttttccgttcttggaatgagcctgccagtttgaaggttttgaaggattggctaaggaggaagtt

SEQ ID NO: 130758 - DNA, 411 bp, Glycine max
  unsure (1)..(411): unsure at all n locations
  Clone ID: PAT_MRT3847_89082C.1
attttagtatcacatagactatccaacgtggcaaattgtcccagattgtgacacgtagagtggactttgatacaaaatttaaaaaattgtcaaatattttcttcttcacttgccatagaatcttctattttattttgtctgaaaaaaatcccatattttagttccatacagcaacaaatctggcttgaagtttttcttatttatttcctataaaatattcattgcctttctccatcatcttagccttgatatatccatgaaaaagggaagtataaatatgttgattaagagtccatccagcttttaacaatgccccaaataattcttctgcctctctcattcttccatcttcacanagaccatccagtaatgcagtgtangtgacgatatttaagttaactccaacctact

SEQ ID NO: 130759 - DNA, 245 bp, Glycine max
  Clone ID: PAT_MRT3847_89083C.1
aaaaaaaaaaaaaaaaaaaaacttaaaaaattataaaaaaaaaaaaaaaaaaaaacgcaaaaattgcaaaaataataactcacatatcctaacacctaaatacaatcaatctcaactaataaatacaacttcaaatccttacaaaaccctctctctacccaacttaatctccttccatcacattctcctttcttcttctaaccctcatatctataaaccccacacctatcacccttcctcccatt

SEQ ID NO: 130760 - DNA, 1346 bp, Glycine max
  Clone ID: PAT_MRT3847_89084C.1
tatcgagccgaatcggctcgaggaaaatttgccccaagatggttacctcaagagacttcttagtggggacttggacttgagtgttaggaaggaggctcttgattggatttggaagagaggcaaaagttggagtatgcaactgttagctgtagcatgtttgtcaattgctgccaaaatggaggagattaaagtgcctccttgtgtagatttacaggtattgtagaatcttactacccaagattgtcaaatatacttttgggttggcatctacattttcctctgattttatcacttttgtttgtaattggttggttggagaacctaagtttgcatttgaagctaaagacattcaaagaatggaactactggtgttaagcacattgagatggaaaatgcaagcttcaactccattttccttcctagattacttcctcaggaagatcacttgtgaccaagttatagtaaagtcatccattttaagatcagtaggacccatccttaacataattaaatgtatatattctctttactctgttagtgtgtttacactttagccttatactatgttcttgaggaataatgtggtgcttgttgggaaatcaatataggtatcaatttcttggaattcaggccctctgaaattgctgcagcagtggcaatttctgtatcaagggaaatgcaagcagaagagattgacaagaccttaacatgttttttcattgtagggaaggaaagaattttgaagtgtcttgaattgatcaaagatttgtccttgatccaagattctgctaacttaggcaccaacttagcatcatttgtaccccaaagccctattggggtgctggatgctgcatgcttgagctctataagtgatgaattaacagttggatcatatacagattcatcccttaatactccaaattctaagaggaggaggaaatctgactaaacccttctgatgggacattcaagtcatgaaattttaatttatttccttcactaaagttcatttggtttggtggttgaataagagtttagtgtggtctttcaggcagttggtaacacactcaatgaaggtgtgtgtcttgggtggataagatggaaatttaagcactttcatgcttatagcatgaaaaggaggtgttgctagtaggttatagaaacagctgcggagagatattgtggatgggagaggaaattttgatgaaacaacgtgttgatgaagcaaagcatgtcaagtggtaataattaatatttggacagaatatagctattcttatttatgtcctcacttttcatttttcggcaaagagaatgaaatataatttgagatttttttacaaaaa

SEQ ID NO: 130761 - DNA, 715 bp, Glycine max
  Clone ID: PAT_MRT3847_89085C.1
ccacgccgtccgctacataaacgttgtccccttccccaccctcttctttcatcctccactccacgtttctctcaatcctctaagagtctacattatagattttttcatttttgtgtgcataaagttttcttcttttaatccatctgttgaagaactagttttacaagatgaatctctttcctgggaccacaaacatcttaacttaaacaatcagtgtctgattaaggacaatcatggatcggaacatttttgggatttttctgtacagagcgatgaaactgttatgggtttggttgggagggagagcgagcatttgccccacgttggttacctcaagaggctgcttagtggggacttggacttgagtgttaggaaggaggctcttgattggatttggaaggctcatgcttactttgactttggaccctgtagcttatgtctatctgttaactacttggatcggttcctatcagtatatgaattaccaagaggcaaaagttggagtatgcaactgttagctgtagcatgtttgtcaattgctgccaaaatggaggagattaaagtgcctccttgtgtagatttacagtttgcatttgaagctaaagacattcaaagaatggaactactggtgttaagcacattgagatggaaaatgcaagcttcaactccattttccttcctagattacttcctcaggaagatcacttgtgaccaa

SEQ ID NO: 130762 - DNA, 612 bp, Glycine max
  Clone ID: PAT_MRT3847_89086C.1
ctagttctagatcgcgggcggccgctcgcgatctagaactattttgaacccaaattaaatatgagttaatttagtctggtctgattatgattcaatgtggcttagtctgtaaaaattcgtcaaaagttctaaaaatttgaatttttataagatttgaatttcattttagagattcaaaaccaaaattaaggtttactatccgtatcaagaccagcatgctttaaattgtgttgcgttgttatttctctgtatgagttacacatagttatatctactttaatattgggttctcaaaaaaaaaaaaaaaaaaaaaaaaaaaaaaaaaaaaaaaaaaaggagaaaaaaaaaaaaaaaaaagaaaaaaaaaaaaaaaaaaaacaaaaaaaaaaaagaaaaaaaaaaaaaaagggggccccccaaaaaaaagaatttcaacccccggaaataaattccgaaccggaccctggggggaaacaatttttccttaagaggagctcataaaaagctgggggtaataagggaaaaaattttctccggggaaaaattggtaaccttaaaaaaatacaaaaaaaataagacccgaaacttaaaagtgaaaacccggggggccct

SEQ ID NO: 130763 - DNA, 619 bp, Glycine max
  Clone ID: PAT_MRT3847_89087C.1
ggacaacacaaattctattttcctccagaattcgtacacaacacaaaataaataaaaaattctcaatttatatttcattctctttcccgaaaaatgaaaagttaggacacataatgaatagccattctgtcaaaatgttgattcttgctacttgacatgctttgcgtcagcaacacatagtttcatcaaaatttcctctcccatccatatctccgcagctgtttctataacttgatcataacatactagcaacacctccttttcatgctataagcatgaaattgcttaaattttcatcttatccacccaagacacaccttcattgagtgtgttaccaactgcctacaaggccacactaaactcttattcaaccaaaccaaatgaactcttgtgaaggaaataaattaaaatttcatgacttgaaagtcccctcagaagggtttagtcagatttcctcctcttagaatttggagtatcaagggaagaatctctatatgatccaactgttaattcatcacttatagagctcaagcatgcagcatcaagcaccccaatagggctttggggtacaaatgatgctaagttattgcccaagtttgcagaatcttgcatcaatgac

SEQ ID NO: 130764 - DNA, 411 bp, Glycine max
  Clone ID: PAT_MRT3847_89088C.1
ctatagctcaagattcggctcgagctcgagccgctcgaactgcagggaaattccatcaacggtacgattccttgggacgttggacactgccagaagttgattttactgaatctgagtcgaaactcactcaccggtatcattccctgggaaatctcagctctcccttccatcaccgacgttgatctctctcacaattcactcaccggaaccattccttcgaacttcaacaactgctcaacgctcgagaatttcaacgtcagcttcaactccctcaccggtccaattccgtcgaccggcattttcccgaacctacatccttcctcctactccggcaaccagggcctatgcggcggcgtgttggccaaaccctgcgcagccgacgccctctccgccgccgacaaccaggtcgac

SEQ ID NO: 130765 - DNA, 346 bp, Glycine max
  unsure (1)..(346): unsure at all n locations
  Clone ID: PAT_MRT3847_89089C.1
atacggatttgatattgaatctcagaatncttcaaaagnatctttttctgctctttgaagaaagaagggtctttgcttgattttgtgagaccctctgctctcagatctcatcaaccttaacctctccgataccaccgagaaggtgatcgcagagtacatatggatcggtggatcaggaatggacctgaggagcaaagcaaggactctcccaggaccagtaagcgacccttcagagcttcccaaggggaactatgagggcaccagcacaggacaagctcctggtgaagactgtgaagtgaggcaatgttatcaatacataccacacgtttttttttttccccccccc

SEQ ID NO: 130766 - DNA, 400 bp, Glycine max
  Clone ID: PAT_MRT3847_8908C.1
cggccaaaagacttagggaactccctatcgatttattcaaacccgtgagaaaatattaaaacttgtgagattaaatgaacagttagttggcttgatgaacagctcccctgactgtgcagggcctccacggagcgtggaggggctgcatggtgtggggtggcgtaaccacttctttggctacagagtctcaccactgtgttacggctttgaccactgcgatgctgtattgaacctactgaagctttaggtatcgttcagctacctctgttatggggcgcttgcctgcttcttgaggcgatagtacggtagggtaggcgctaggcccggagggcacatgggaggccggaattgaacgatggttacaggaattgcaggagattgacagctaagcccaaggatt

SEQ ID NO: 130767 - DNA, 253 bp, Glycine max
  unsure (1)..(253): unsure at all n locations
  Clone ID: PAT_MRT3847_89090C.1
gnaagcttcattnttttcccttccttcactcttttccagttttctactttccttcttcttcttccttccttcactcgtatatcacttccttcctcgtttcgttaaccttctaattcaatccattcctcactnccttttaaccggangcttttcccngaaaacngcngagagaaagaaaggggatggggggaacnnanccngggggggtttnaananggcccccggggggggctnnntngcccccccccccccc

SEQ ID NO: 130768 - DNA, 506 bp, Glycine max
  Clone ID: PAT_MRT3847_89091C.1
atgtccgattcaagaaatagtcaattatcttcaaattattatagtacaaatcttgatgcaagaatctaatgataaaaaatacatgacaaccatatatattgtaagcatataaacgccctcaaccccctttcaaaaaatattcaacaaaaacattcctatcctgtattcgcagtttacatattgctgctcatgatggattcattcattcctcatatattttggttcacaccaaattggaaaggccaaatctttgtagtttctaaactataaacaaataagagaccaaaaaatgcttcatgtttgcaaaatactggtgttcaactattgctggaggagctactgtcactgttgttgcagcctttgcagttggtgacactgtcattgatgtttttgctactgcagtgcatgatcacggcgctgctgccgtgccgtagaagattgaatctgtcttcttggtttccatctaacatactctgttagcagcgtattcaagctgattgcaatcc

SEQ ID NO: 130769 - DNA, 243 bp, Glycine max
  Clone ID: PAT_MRT3847_89092C.1
cccacgcgtccgcccacgcgtccgctgggtcacactgcattccgcacggggtgagagtgtggaccggaacacgattgtgtttgttcatcgtttatcaatgatcatcagacggggaatttacatcttggagagaacgacaagtaagacgcactcacgcaaccttcgctgtcaccgggtgtactttcacacccatctattctgattccacattgagcggatctcacagattagactcttcttcta

SEQ ID NO: 130770 - DNA, 374 bp, Glycine max
  Clone ID: PAT_MRT3847_89093C.1
tctcgagccgaatcggctcgagcaacatcataatgatgtgaaaaatgggaatgctttaagaatttcagttatgcatcaatcatggcagctacttcttctgacctcgtaatattttgtggggaaaaatctgttttgaatctttttttgttattcactacatttttcaaccccaagtcaagcctaactcagattcattacagaatgccagaactgagcaagcaacttaaattggagacactcaatatttttcttttgcatctctatacttctctatcagaagggtttaaaaaaaaaactatatatagtttcgctctctctctctctctttttttctctgcaaaattgtctctataagatttggttagtttctaaaa

SEQ ID NO: 130771 - DNA, 375 bp, Glycine max
  Clone ID: PAT_MRT3847_89094C.1
ggaattccgcacgaggcaaaaaccaattaagggttctccatatccaaggaattactataggtgcagcagttccaaaggttgtatggctcgaaaacaagtcgaacggagtaacactgaacccgacatgttcgtcgttacgtacaccggagaccactcgcatccccggccaactcaccggaactcgctcgccggaagtacccggagtaagactctggtaaccaatccgccaccgtcacctgggtcactctcctgcttccaagccacccctttttcttcttcttcttcatcgccaccacactctccaacgtcgccggaggaagatccacggaaaccgccgatttagaacccgacccggatatggaaaccgacgggaac

SEQ ID NO: 130772 - DNA, 594 bp, Glycine max
  unsure (1)..(594): unsure at all n locations
  Clone ID: PAT_MRT3847_89095C.1
catctatatgaatcaaggtctgacaggattnattactgttcagggaaaaagacccaaatnagagctatatcatggttaaaagtgtactaggatcactaatcctcaatgataagtgttcctagtaatangcatgagtatatgagcatttngctcccaattaatattgctagttgcacattattcttgaacttatcagtggtcagccaatcagntacattgattcagccattagctcatcaatttaagttggtgacccagccaatatgacaagttaaacattggtgtgactttttatggttgtcatggagttatctatgggtgggcacaaggttgagggaaaacaatgtccaaacaattcaaatcacccaattctgtttggtttggttttgaaatttttttttatcagcaaaaataaattttttttttttatatatatatatatatatatatcagagtaccagagatacaaaagttgcatatttgggattgtccagtcatttggttccaaaatcagacttaatccagtctcgagaggaaccaaaagctaaatacatagtaatctatactgatatcctataactgctaccctccacc

SEQ ID NO: 130773 - DNA, 372 bp, Glycine max
  Clone ID: PAT_MRT3847_89096C.1
ggataaataacaattatttttatatatgaagactggaagagacaccaaactgatatattatattacatgtatgaaatgaaattagtaatagttagctcaatcaatcttcaccatccatccgttattatcctctaaaagacccgtatggattcctgtaatcatatcaaacaacttctgggtcacagtgtcggctcctgttttgaactcaacccttgtattcttataggttgcacttccaaccgcagagatcccaacagcagttccagtacagaaaacctcatcagcttctagaaattcatcaaccgaaaatttgcgttcctcggcctggtaacccaaatcacgagcaagttgaatgatgctattccttgttat

SEQ ID NO: 130774 - DNA, 271 bp, Glycine max
  Clone ID: PAT_MRT3847_89097C.1
gttgcaccgaacagcttcacttacactctactccaaaatggcggtgtcacgcgttcttcgatcgcgctgtcgatccctaccaaacctgttcaccagaacatttcgcaccaacctgcttaatcgcgcttcaagctggtcaaatctagttacggcccgcgcgcggtcgcctgggccggtgggtcggccgcgcaagacccgactgtcgatcgacacaagttcagaagaaaatactctgacacgaggtcatgaaaggggaggattgttattgtgc

SEQ ID NO: 130775 - DNA, 233 bp, Glycine max
  Clone ID: PAT_MRT3847_89098C.1
cataattttaatatatctctgaacactgaaagatatttttatattctcttctgcaaatctttcataaaagtttattctactaagaaaaaaagaaaaaaaaaatgccttcctcccttttcatttttcacactttatttttacttgtaactttaaacaacaacttttacccattctcgtatcttttctttcatcccctcttcatccaaattaactatttcattacactcttcctc

SEQ ID NO: 130776 - DNA, 752 bp, Glycine max
  unsure (1)..(752): unsure at all n locations
  Clone ID: PAT_MRT3847_89099C.1
cnnnnnnnnggnnnngtgtnccagctaagaaatcacagcactgacaagaaaagtgctccaaatatacctttttgttatcatatcacataattttgttcagattgtttttcaatactgctctaaagttaacaaaacgactttccacaaccaaatattcgtgtaagtcctcgaacttaagtttgcagaacagtcgacagaggagctatcttaggccaatagcatatgcccagaaaatccaacaatgatcaatctgagcatacaccaaagtctggctacccctaccctcaaagtgcttccaatattgaggccaacacggtttcagacttgtgtcttttccacattcacagcacaagcttaaatggatagcttctgagtttcacatctcttatccacattctcccccaatcagatgggaaaccaaactagccaagagtttgactccacagaatttgtgataatgaagatcccggcaaaatggagaccagctctcaatggacagagttctgctttgcatattagtaccttgaaagaagtcatagaacccacatagctaataaaaatcaatgaaaaagtataacacaaagggttctgagggtcagcatggtctgttgaacactccctcacacctttcggagggggccataatgttgggtaatgaattgcataccacatactcacgctnngagaatgnnncannnnnatttatattcttttcatgaaaataggacaccataatacacagggaaaaatgg

SEQ ID NO: 130777 - DNA, 338 bp, Glycine max
  unsure (1)..(338): unsure at all n locations
  Clone ID: PAT_MRT3847_8909C.1
gctttatgcagggtggggctaacattcctctttgtgattttagtgcaagtgcnacggctgggttcccttgaaaagggggggtcgatcgaaacaaaactcacaaagagaaaaaaaagaaagaccgccactttttttttctcttgcactctctcttacaccaatacctctgatacactctttcacttcttctgccctatgaaatgcgtgttggaggtgcttacaatcagtgnnnaacacagcaccatcaacatcatcatcaacaacaacatcaacagcaacatgtctcagacatagaaggatccgggtatcaagctatttgtaaggaagattccggtgcc

SEQ ID NO: 130778 - DNA, 542 bp, Glycine max
  Clone ID: PAT_MRT3847_890C.1
aacaccgaaagtacatgttttattatagggtacactagggagctgttagctcaaaaccactaaaagggcacaagacgaaacaacaaacatgtagtcacagtttggaggacccaacagccataggggacttaccccctggaatatttgttttcaaaaacaaccccaactttttaaaggcaaaggggagggcccacacttggaaccaacagggcgattacccaggttgaaacgcttggggatggggacagcaacttgagggttgacaccaccccttttgggtgggtgggaaaacaaaactgcacaaaggccccttggtttctgcccaatttccctcacccgagcccagcaactgggaaaaacacaagctttcttattttgggccgctgaggcaaaaggtgcaagcttataacccccattatggggggggggaaaattcccacattcacgaggactctccacccctgccatagggctcagaggggccccaaacccaacaggggataggatcttgacacaaaaaaaaacaacccctcaaaatttcc

SEQ ID NO: 130779 - DNA, 141 bp, Glycine max
  Clone ID: PAT_MRT3847_89100C.1
agaagagactcatgagaaagccagaaagaaaatgggagtggagaagcagttactgaggcctggcaccggacccaagccaattcacggtcatgaggtgaccggtcactacactggattcgggacgaacggtgacctgtctca

SEQ ID NO: 130780 - DNA, 361 bp, Glycine max
  Clone ID: PAT_MRT3847_89101C.1
taactcaggattccggtccaaaaaataatttccattaattgaccgaaaacaaaagttttccccaaaggctttctccaaaatggtccaatgcatgagaataatttaatcaacgtttcagaacactataaaattattctcatgaaagtgacacacaagtgttgcctaataccttaagttaccttcctgtgtaaattaatgcaactaaaactgttaatactgttggtttgtgctttgttgaagaacagctctaatgtttcttgtgaaagatcaatctttcgttaaatcatttgcaactggcagtgtatatgttctgaaattggtaagtattttcattaataaaattgttggaattttattaaaa

SEQ ID NO: 130781 - DNA, 452 bp, Glycine max
  Clone ID: PAT_MRT3847_89102C.1
cgcctatcatgataaatcctaaggcttgtttctctaaacattcgcagtggccgcccaagagctttcgccttcgccaggctagagagctaatgctgctattatccttccttggatgtctgaggtcaaattatatcatatgtttgactattttctcatttcgtgttgattgatgctgcaggctcgcatggtacgattttgttacacatggctacatgaagttggtgttttcgtcactcatatttttgtatccactggaattagtctgttcccgcatagttgacaaataaatactatgtatagatggaatggaacctgcatcgtatgccatcatttaggtgttaattagtctgttctccgaattagtttggattgtttttaaaggtagtgttcggaattagatatactaaatgttttgaaagaattatttaacaagtttaatttattgtttgctc

SEQ ID NO: 130782 - DNA, 270 bp, Glycine max
  Clone ID: PAT_MRT3847_89103C.1
gctgctcataccacaaccatgctttatgttattcacacccacctcacacggtcacatcatgtttggagcactcaaaacaacgcttgtgctcctctctcccttctctaccaccacaacagaaacacaaggtgcaccaccttcttcttcgcttcaactcggaccctcaacctatggtttcgcatgtctggtactcgcgttcagaagaacctcacgagtacctcgtactctcgagagcccctaggcattcaattcggctaacttctgacggct

SEQ ID NO: 130783 - DNA, 256 bp, Glycine max
  Clone ID: PAT_MRT3847_89104C.1
actggtaccctgctcgtacggcccagaattcccgagtcgacgcatgcatccgcgcatgcgtccggtaggctgcgaacaagacgacggtacgggatacatccttttatccccgggtctagctccaaaaacatcatctcgtggtcaagattcgaaagctcactagagagtactgaagtgaaacaacgactgaaggctatggtttcgagcttgatacattcgacgccttccatttccaggctcaatgccacggtagtgt

SEQ ID NO: 130784 - DNA, 556 bp, Glycine max
  Clone ID: PAT_MRT3847_89105C.1
agagagagagagagagagagagagagagagagagagagagagagagagagagagagagagagagagagagagagagagagagagagagagagagagagagagagagagagtctcgtgccgcattcggcaccacgcatttctttctgacattttttcatgaaattatgcgatgtctgtgcttatgtgctgggacagacgctcgttgtctctctctgccttgatcttttacatctcaggaactatttttcttttctcttacgggagttcctctcttgtgtcatctgatgacttagtgtgcttttacttcacatacctatatgttcgatggggttttgctctgtcaaagatggtggtgttcgttggagactgcggtgacacacattacgcacgacttcttggtggcctacactcaagtgtcttactgtatggagtgtcacgctgtgctcttcttcctctctctaataactcacgctaccctctttcagatgtctcgcccttggactgtctctactttctttgggccactgaggagattctctgtgctgatttccacgct

SEQ ID NO: 130785 - DNA, 243 bp, Glycine max
  Clone ID: PAT_MRT3847_89106C.1
gggatgttgatcgagataactagaaacagtgtgatgcaaatgaaggtccgtgttttcctcgtttcgattcgtctggggacatggcaatcccatgcctacgatatgttccctctcctcaggaacactgcctctgctgcccgtcctccaaaggtgacgttgccaccttgggtgcttgctgtggcagcatacaacatctttaactttgacatcattcctgacgactttattcccgcttcaatggaa

SEQ ID NO: 130786 - DNA, 583 bp, Glycine max
  Clone ID: PAT_MRT3847_89107C.1
gcacgagcgtacctgactgtggaggctggatcttagtgtaatagagtttgggaaacgctgatttctcattaatcagaaaatgaaaaaggcaagttactaaggatatagtcatctctatgtatagagagagagagacttgaagtctaaccgtaaactatccctatctgttacagactatggttagagctataacaaactgagttaactgacagctcacagataatagaaaacaaaatacacaaagtaaaaacactttatggagtaagtatactctaatatagtgagtttcccaagggaatggtcactccagtattcacaatttggaacccagaggctaggccagggttttaacaatgttggttttacagttgagttaaagatctctgtttagagaattatcttgaaaagtgaaatcttctgcagcagaatgcaaatataatgatggagtttttatgctaattatttcagtgagatattgtatttgtatttgtattgtttagctcttgatgtgaaaaagtttgtgctaaataatctatagttttcctctacagtaatgactacaccagtctattgtctagcttat

SEQ ID NO: 130787 - DNA, 137 bp, Glycine max
  unsure (1)..(137): unsure at all n locations
  Clone ID: PAT_MRT3847_89108C.1
tgcactcacctcacctagggtnttgcatcagttttcaaccantataggagaatggaacaaaatgcgtgngaggaatngtcganaattgnttcggatnncnagtncnaganganggttctcgaancagtcgntnaggc

SEQ ID NO: 130788 - DNA, 310 bp, Glycine max
  Clone ID: PAT_MRT3847_89109C.1
cccactcgtccaaccccttacaaaagaccacacaatttacttacttctaattacacatactccaaacggcttactggaaactacaggtgagcactaaataaactactatctaatcaataattactaactataactaatataatactaattcttaatactcctagaatacatcttcaactctctattcatatacatatccattcaacccaacatatttcattgactggatctcgatcacccaccaccacactaaaactactatcttttaaaacatctattcctattttaaacatacataactgtatccata

SEQ ID NO: 130789 - DNA, 425 bp, Glycine max
  Clone ID: PAT_MRT3847_8910C.1
agtttcgcatgttctgttttttacatagttatttcaatgcgtttggttgatacttatgatggcaaggcttaaaatacatttcataaaatttttgttgcacctttcaaaggcttaaatcccattcattttgttacattttctaataccatttttcagattgaaccatacattaattcaaatttttatctttttattaccactaccaatgtttatttttttcaatgcaaagatctctcaatttttaaaaataatgtattatgtgcttcttttgtctttacatcaagttacactccaactccatttttataatctcgttttcaaaaatacactattttaattgtttagtttttttgaaatatttcttacatttctcattaacttaatcaccccctaaaagaataatttttataataaaaatttttctt

SEQ ID NO: 130790 - DNA, 416 bp, Glycine max
  Clone ID: PAT_MRT3847_89110C.1
aattaacaacaggtaattaacattggttccatcagcccccaaagggggaaaacatttgggttttttcacaaaaaaaaacagggagccaactgtcaactgggaagtttcaaatcatatgggggtttagccatgaaaaattcatataaaaatagtttaactgttttccaaaacaggaggcccaactaaaaggggggggggacccctgttcttaaggtttctaaaaattccatggggggaccgcccttcggctgggtcaaaaaaggggtttgctcggaagttggatattgccttttaattggaaaaacagcctggccttttaaaaaaaaactgttcccaaaaaacatttttcaccctggtggggggagcggggtaaactgggtggttactgggagccccctgggatgaaactaaatggg

SEQ ID NO: 130791 - DNA, 305 bp, Glycine max
  Clone ID: PAT_MRT3847_89111C.1
ggctcgagcgggattgttcacaccaacatttttactgtctgttgaggagcaggcgcgcgcgcggggacgaggaagcagggaaagcaacgaacaaccccagtcgaaagcgacggggatcctggacgtctctggacggctaaggggcaaccagatcggatcaacagcctggtgagtgaactacacacagcacggaatccatcccactgagcagcacggagtaaactggcatccactgctcgtgcgccggcatcgtgtgtacaacgagttttagcacagaatgtcagggcaacgcccgcagctgatag

SEQ ID NO: 130792 - DNA, 212 bp, Glycine max
  Clone ID: PAT_MRT3847_89112C.1
caattttagaaacaagttgacagcaattttcgtcacaaaaaaaaaaaaaagggggggccgccgtctagggacctggtcgcccggggattaattccgggccgggacccggagggggcacaggtttcccctatggggggtcgtttaaggtttgggcgaaactaggggaaaagctgtccccggggaaaattttttaccggcccaaattcccacac

SEQ ID NO: 130793 - DNA, 326 bp, Glycine max
  Clone ID: PAT_MRT3847_89113C.1
gggctataggggggatggttctaacagcaggcttgatgtttataagcaaaaggaaaagccataaccaacgccagaaactagcagctataaagcgaactgcaaggaagcttgaaagcaggatgatggaacaacggccttctaatgctcaagaacatagaagagtttctagataagtgttaccttgtatgtgatgttaagaacataattagttttactaatttgtaggtgaatctcgagttgtacgtactcttgctttcacgatctatcttctttttgccatatgattttagacaaaagtataagttggttataaaggagttttccac

SEQ ID NO: 130794 - DNA, 374 bp, Glycine max
  unsure (1)..(374): unsure at all n locations
  Clone ID: PAT_MRT3847_89114C.1
tcgaggaattgaattataatatatgaaaactgannagaattggtgtagctttggacaattgatttntttaattagatgatttttaatatnttaatagtagaattattttaatgattttaataatataagaaaaataaaacattagtataaagatattgtaatttggatttaatttgattaaggaaacaataattaaaattaaagaaattagtaaagattgatgggttggagctaaattataactactcacttttagatctaatataagtcttgtttttataatttttctgaaatttgcagtattctcacaatttgtcagtgtgacgatttttaaattttcagaaatagtttttaattgtcataaactgcagatt

SEQ ID NO: 130795 - DNA, 2687 bp, Glycine max
  Clone ID: PAT_MRT3847_89115C.1
ggcaaagcgtttcttccacttcagaatcagaggcagtaccagctgtaagtaatgagacttctgatattatattgggagattccaaaactttgaaaacagaaactactgcccctgttgagaaaactgtagaagttgagggagattcaaatgccgaaagggatgatgattatggagattcatgggaaactgaagaaataccaaaagtggtctcactagccccatcttcagcatcagatggcccagcatcattcaggagccttagtgggaaaagtgatgatggagggaatagcattggaagtctttcaagattagcaggtttagggcgcggtgcaagacgtcaactagctgctattcttgatgaattctggggacaactttttcatttccatggtcaatttacccaggaagctaaggccaagaaacttgatgttttactgggagtagaaactaaactcactggaactttggaaataatggatacatgtagtgcaacatcttatgaatacttcaaatctgtaggaagtagagctccagatactttaatgaactctgctccatatgaatctcccaggctgaataggatgcaaagtaatttagaggcttcctttgggcctcaaaggagttcttcctcactgcaggcaaatcctgtccagtttatggatgaatatgttcagacctccagccgcaatctccttgatgctggtgaaaggcgctattttagtgtgcacaatctacctacatctgcagcctgggattatcagccagctaccatacatggttatcaggtttcatcatatattaatcaagttggtaaagacacaaattctgataaattaaatggtctgagggaatccccttccatgggtaatacaaacaactacaggaattctattgcatttgctttgggtaaaaagttgcaaaacggttctggtttaagccaacccccaggattcccgaacattgctgtctctaagaatagccaattgccatctgagaggtcctattatgattctcgcccttccggacctgtggatagtacagtcagttcagtctatgctaagaagttccacagcttgccagacatttcaggatatgccatccctcacagggatgtttacctgtctgataaaagtgctccatgggatgattctgttggtggatatagatcttctgcaagtaggactcattatgaaccgtcattatattcaaattctggatcaagtacaggagctcctttagcctttgatgtactctctccatcaaaagtctacggtggtgtactttcttctcagttgagttctggttttggcactggatccctctggtccagacagccttttgagcagtttggggtggatgataaaattcataatgctgcaacagaagatgttggaaataggcctagtgcaactactcatgaaattacttcagttgtggatattgatggcaagcttcttcaatcttttagacaatgtattttgaaactcttaaaattggaagggtctgattggttgtttaaacagaatgatggggctgatgaagatctgattgaccgtgttgctgcaagggagaaatttgtttatgaaattgaaactacagagatgaaccgcaatcatatgggagaaactcgatatctttcttctgatgggaaggcttgttcttcaatgaagaataatgaggcaaattggtctagtttttctgtaacctcaatccctaactgtggggaaggatgtgtttggagagcagatataataataagctttggagtgtggtgtatcaaacgtgttctggacctctccctaatggagagccgaccagagctgtgggggaagtacacttatgtactcaatcgcctccagggcatcattgatctggctttctccaagcctcgtagtcccatgaccccatgcttttgccttcaagttcccatgacttaccagcagaagtcaagctcgcctccttccaatgggatgctgccccctgcgtcaaaaccgggccgtggaaaatgcacaactgcatcagtggtgtttgagatggtcaaggatgtggagatagcaatctccagccggaaaggtcgcacaggaaccgctgctggtgacgtagccttcccaaagggaaaggagaatttggcatctgttctcaaacggtataagcgtagattatccaacaaaccagttggcactactcaagaagggattcgcaagatatacttgtagcattttgcctttcactatgcattaacataagcagtgttccttgggctgttttgatttgtgaagcagttcatgctgtagatcaaaggattaccataggaagttcctcgccacaagactgctgtctccgtgtaccaatcctcgctgcagattttatttccttgtaatgttatatacacatagggttagagttactatatgtaattgcaacaaaaaatcaaaggaaaaagatggttagatggaaactgacttctaccattttggcttatttttcattacttcactcgctactgcatgctaggtggggaaacaaaatgggaataaaattgtcaacatgttgtcatcttaacagggaaaataattttcgatgtgtttttattgagtgttatttttattaaggcacctgttatggttgccaaattttcgttttcatcaagtctttcaagcgttaaaatgatggaagtggttacgttt

SEQ ID NO: 130796 - DNA, 641 bp, Glycine max
  Clone ID: PAT_MRT3847_89116C.1
gtcaggctcacctccttccaatgggatgctgccccctgcatcaaaaccaggccggggaaaatgcacaactgcgtcagtggtgtttgagatggtcaaggatgtggagatagcaatctctagccggaaaggtcgcacaggaactgctgctggtgatgtagctttcccaaagggaaaggagaatttggcatctgttctcaaacggtataagcgtagattatccaataaaccagttggcactactcaagaagggattcgcaagattcccacatcagcaccatacaacttgtagcattttgcattttgtcttcactacgcattaacataagctgtgttccttgggctgttttgatttgtgaagcagttcatgctgtagatcaaaggattaccaatttcctcgccacaagactgctgtctccatgtaccaatcctcgccgcagattttatttccttgtaatgttatatacacgtagggttagaattactatatgtaattgcaaaaaaatcaaaggaaaacaaatggttagatggaaactgacttttaccattttggcttatttttcattacttcactcgcaactgcatgctaggtggggaaaccaaatgggaataaaattgtcaacatgttgtcatcttaacaaggg

SEQ ID NO: 130797 - DNA, 1558 bp, Glycine max
  Clone ID: PAT_MRT3847_89117C.1
ggctctactaaatgtcaataattccttttaagatgcactcatcacttaattactaagtgcaaaactttcaaagttaacgatggaagtgaaaaaaaaaaatcaaaatatctaaagaattgtcgctcctatattctgttttacatccaagtccttgggcttgctccaagatacatcacaaacatctacatcaaagggaaaggagtgataaggggaaaatcaaaactcatttgtccaagtcatcctttttcctccacaaaataggagagcaacctttgaaatttgaacttctatttgtttttgtaagaggatggtttattttcttcataaggatactcaggtggagcagaccacaaaccccagagaataattaagtgaaggcaaagaagtaacactgaagaaaggctgttcgaaggatagatattccagcacagctccactcccacgaacaaaatcaaacgcagcaatgtagggtaattcgttctccacaacaagtagggtaagctatagaagtaccatgaatagaactgataatgcaacgaccgagcacatacaatgccaatgaagttcccaacaaacatagttgtcacaatatgttctttattaaggatcttgagggatgatgaactgctcttgccgaccttagaaaaagaggaagagaagaaaagtgcaaacttcattctcataaagacatatctggaatgcaggaagttgcaaagccctcattcatgtctacatgccccagctacaattagcaaatgaagcaagtgatatgaggtgagcagccaacaaagtacaataaaagcattgctggttctcattatttattgcatcaaaacagaagataaagaacttgttaaatctataacttggcaagataaattaagttttcttttctaaaatacatataaacccctcctactataggtcaatagctaaaaacccttaaaactcagtaattcacctccttaaatttaataaattgagcaggctcttaaagcaaaaactgcaaataacaccttatgcatgtgcagaaagcccctgtagggagtcaatatgtacagtttggtatgttcaagaagtcttaactcttaaccaagttttaaaccaaggaggggttttcaccaattgacctatggttgaagggggttgctagcattttctgtatagaaaaaataaaaaaaaatgaaacaaaaacttttatacctacttgcaccaactataatgtgcgaatgaagcaagtaatatgaggtgagcagccaacaaaaggattgcaaatcccctggacacaaatactggttcagggatgaatttgaagttaacggaccagaaaatggatgaagacacgaacaaaaatgaaggctcttgatatgtatgcaactggatatgaaaccaggaaaggaagccccaataatatctgaaccagtgctgcgccagataatgccaataacacgccgctgatatccatagccttcagcatgaggagtaacaaaggaggagcataaagaagaacattcatcttcaccgaaacagctccactaaacaaaatcaaccccagcgc

SEQ ID NO: 130798 - DNA, 292 bp, Glycine max
  Clone ID: PAT_MRT3847_89118C.1
gggggggctccttgtcggcatttataaaagacttcgcgcgccaagactcattcaccggcaccgtttgtgtcttctcctgggttagtgtctccccctctggagactctccccatgtctccgaagactgtgagtgtttatgagaaggtggcgtctttaatgaacttgcaactggggaaggtgaaaacttttccttcttcttggaaagtcaaggggccttccgggttcggatcttccagagggcccatgaaccgacccggattctttaaactttcgacaaccccgacccaggcac

SEQ ID NO: 130799 - DNA, 254 bp, Glycine max
  Clone ID: PAT_MRT3847_89119C.1
acggaggcttgttaccatctcacccaacaacaagcccaagatgaacactgggaagatccaggagtccatcggggaagcagtcaatggcattgtgaagcacaaacctattatgagacattagagaagaatgaagtagtccctgaggaaaactggcatacaagagcccggaacttctgccgatttgtcactgcaatcaacaatactccccggaacatcggcaaggatggcaagtttcagatgctggtgtgcttggg

SEQ ID NO: 130800 - DNA, 448 bp, Glycine max
  Clone ID: PAT_MRT3847_8911C.1
gggaggaaatttttcaatttcccttaatttcttttgaaaaattgaaaaggggggccaaaaccccttatttagtttttaataaagcaaaagccaaatgccccccccttccccaaacaaaacatgctttttcaacccaaattggtttcattttacaaaaaccaaccgggtggttttcttcttacccgtcccacccacttgaacaaaaatttttcggaaattaaaaataaaaaaagctaaactttttttaccttaaatttgaaaaggctaaccaccaaaattccaaaaaagggaaattaaaccatccatcccgttcataaaacccattttggctttccctcactttccggtgaaaaacccaattacttaacacccggaatgaaccggcttgtatggacccttaacaggccccctggtgttatcagcctgggccgggctaaacttggggagc

SEQ ID NO: 130801 - DNA, 431 bp, Glycine max
  Clone ID: PAT_MRT3847_89120C.1
gccgttcgtcttttttttttttttttgttttttttttttttttgattggttttcttttttggtttttgtattctgtgttcattgttttttttactattttttttctatttcaattatgcaaaaaaaaaacccgtgggcgggcgctctcaccttctggaggggaaaaagaccagagcacacgggactgggggggggggccccaacccaatgaagaattgggggcaaacggggtttccggcaactcgcagaaccggggaggggaccaaaccccccggggttgttacccctccgggtcccgaaggggggggccaaaccggggggcccccccagaattgcgcccactgcaaagagcggcccggacggcaggaaggaaaagaagccgaggctcgattgaacctctttacgggcacgcaagggggatatacccccaa

SEQ ID NO: 130802 - DNA, 257 bp, Glycine max
  Clone ID: PAT_MRT3847_89121C.1
ggctcgagccttagtggacaagttcatgaactggctatccaaaactacgagaacgaggctaaaggctaaagtcgagacagctggactatggattatataatggacactagtgatgaggagagggtgcacggagagaccgttggtgcagcaagagcacattgagtgactgaatcgacagggttcactatttgggatgcacctggacacaaaagctgtgtatctaagcatgattagtggggcatcttaagctgatattg

SEQ ID NO: 130803 - DNA, 507 bp, Glycine max
  Clone ID: PAT_MRT3847_89122C.1
gatggttgggcaggactatgacttcccaaagcctaatttgaatccacttgtcaagttactagcaactggccttgcaggctatgaaggagaaaagtggagcaagcacagaagaataatcaaccctgctttcaatttagaaaaattgaagatcatgttaccattgttcctgcaaagttgcaatgatctggttagcaaatgggaaggaatgttgtcttcagagggatcatgtgaaatggatgcatggcctttccttcagaatctgactagcgatgttattgctcgatcagcattcggaagtagctatgaagaaggaagaagaatatttcaacttcaaagagaacaaactgaacatttaatgaaagttatattgaaaattcaaatccctggatggaggtttctgcctactaaaacccataggaggatgaaggaaattgacagagaaataaaagcttcgctcaagaatatgattaacaagagggataaggcactaaaatcgggtgaagccac

SEQ ID NO: 130804 - DNA, 294 bp, Glycine max
  Clone ID: PAT_MRT3847_89123C.1
aagaatacgggcatgcttaacaagctgataaatgtgggacccgtacgtaaaagaagtactggctatttcatgcccagagatatgtttggtagcacccatatgaagatgactctagcccagatcccatctttgaattagaaataatcacgttcaagctctggctttcgcttggcctaaaaatgccagatagtgtgatgttggatcttgtgatagaggcggcatggtgggaacgcaacgctgggaacatgcctatcgacataaaaaaccgtgcaaagtgtgggaacacctcctgga

SEQ ID NO: 130805 - DNA, 272 bp, Glycine max
  Clone ID: PAT_MRT3847_89124C.1
caaaccagcaaattttttctccaccattttaccacaaaaaattgattgtaaacccataatataaaaattaataaccccctccaaggaaaaactgtgcactaaaagagacaaccccttcttttataaaacattaaaaaccaagggggggggggagaaaaaagggggggggaaaaaaaaccaggggcacgggggtcccaccgaaaaatactaaccaactcagcgaggagaaacactttattttaatggggaaactaaaaaaacgcggggaaaaa

SEQ ID NO: 130806 - DNA, 1216 bp, Glycine max
  Clone ID: PAT_MRT3847_89125C.1
cgtctgttgagggtaacttatcaagtttgggaacaaataaaactggagagagaagacgtgccaaagcagagaaaactatcactttgcaagttcttagacaatattttgctgaaccaaccatcttttaaattaaacaatttccagtttgtactacaactttgaaaaggatctgccggcaacatgggataaagcgttggccttctcgaaagatcaaaaaggttggtcactctctacaaaaacttcaacttgtcatcaactcagttcaaggggcctctggtgcatttcaaatcggttccttctattcaaacttcccggatctagcttctccaaatttatcaggaactggcttcttctcaactttgaatcaaagtgattatccaaactcaacaagcacacagccagatcatggctcattgagcccagaaggtgcatcaaaatcgccatcttcatcgagcagtcagagttccatttcaagccattcctgctccagcatgtcagagctacaacagcatcgcacagctaacggtgctggtaacaaagtttccaccacggttagtgaatattctgctggtgttgtgttgaagaggatcagtagcgaggcagagcttaaaagccttagtcaagatagagcaaagctcttgccaagatcacaaagccaggaaacacttggtgaacaccctaaaactcagtatcaacagcctttattgaaaaccagtagcagcaaggtggattctcacagagtaaaagtcgcatatggagatgagaaaacccggtttcggatgccgaagagttggggctatgaagatcttctgcaggaaattgcaaggagatttaatgtgagtgacatgagcaaatttgatgtcaaatacttggatgatgactgtgagtgggtactactcacttgtgatgctgatttagaggagtgcattgatgtttgtcaatcttccgagagtggtaccatcaaacttagtctacaaccttctagtcatagtatgagaagttctttagaatttagataacagattgattgtaaattataagatcctttgtcatgtacgtgaatcaatcttagaaaaggaacaattcttttttttttaatttttttttattattttggcagaatgtaaggataaacttttgcttatccttgtgctcccagcaataagcaaattcagcttttgtttgtttggtagtattatataataccctttgtgcg

SEQ ID NO: 130807 - DNA, 438 bp, Glycine max
  unsure (1)..(438): unsure at all n locations
  Clone ID: PAT_MRT3847_89126C.1
ggattttgctttctctagaataactatggaattcggaggctgttctttgatcttttttttctctcttgatatcaatgctatttcttgtgggcttgatattgatcctctgagtccacttanaccatctaattattacagaaatcaacatcaaggcactatctgattagaatggtgctttagtttgttgaatggaggccatgaaggtgaactagatctcacatcggtgggaaagaagaaaaggcacaccagaaaagtgaacacaaccataagtagtacaggaaactagattgtggtagttgtagttggtgctcaatcaaacagaagttgataatcactggataaagttcatatgggagaggaggaccaaacaaaaggagttccaagttttttggaactcagcaacaaagattatgatggaattggtcatgaaggatgata

SEQ ID NO: 130808 - DNA, 508 bp, Glycine max
  Clone ID: PAT_MRT3847_89127C.1
cttatctgggaaacaaacttcaaatttaagctttataaaccagatgaaatgttttttaaacactacaaagtttcagaatcctatttgaggttctttacaaactggaataaccattcttttacttatatagttccaggtgttatggatctagtgcttagtttctttatgttttgctggtggattcttggtattatttaaaacctaacattgtcttgaagtttttcttgcaacatataaatatgatttcctaatagaaaaatgatgaagaatgatggaaatgaataaaaagaaaaaaaatgcccaaattagcatggccacctgattaatgagacaattaagcttgatattttctttttaaatcttctgaataaaaaaatatttagtgcatgtaggctaaataatggtaggttttccatgcctggttctcatgatgcttgcaaagattctctcctgtttttgcccccttggcccttacttatttgacttttactgtgggtaatggtacttt

SEQ ID NO: 130809 - DNA, 283 bp, Glycine max
  Clone ID: PAT_MRT3847_89128C.1
catcgtctagctatctcgatcgaactgtccaaggtcctgtcactactaatagaaaaaaaaaaaagacaaacaaaaagcagctgtccacaatattagtctcccaagttcatccgttgtcgcttattcgccattctttatcatgagttcatcctgcacagcgatgttctcggtggaataaatcatcgtaacgtgccgcacgatgtgttcgattagtggtaacacgtatgaatcctctgctactcggggtgcttcgtaaatgaaatccatctacatgtccatgttg

SEQ ID NO: 130810 - DNA, 668 bp, Glycine max
  unsure (1)..(668): unsure at all n locations
  Clone ID: PAT_MRT3847_89129C.1
tttttgattgcttgaaagcgagaacataaggtggatatatatatagagagagaaaatagttataaccacctgtaatcaattaaattggcaatgtaattgattttctcgagaaggtaattgattatatttcctatttaatcgataaagtgttcttccccaaatctggaaaacattcaagaacaatgtaatttattacaatctttatctaatttaaagtgttcttgatcacttctgggaacactttcaagaataatgtaattgattactacgtccttgtaatcgataaaactagaaacccgagaaaacaaacatggtctcaaaaacaactgtgtaatcgattacaaatatatgataatcgattaaaccaaagctatgaactctttgcaagcttctccaagacgtatataatcgattacacatgagtggtaataagttaaagcaatgagaaaaacaacactgaagacgtttcttatctcaaaaaccatcttcctacttctatacgatgatgcatgatgtaaacacanataaactaagacaagaaagcaacaaacaattcaaatgccactcaataaggagttaggcatgtaaaagtcaaaactctttctgagcttgggcttcatggtgctcctctcatgttctaagcttccattgatcggcctaatcttttt

SEQ ID NO: 130811 - DNA, 491 bp, Glycine max
  Clone ID: PAT_MRT3847_8912C.1
aaacactaaccgatattatgataggttggcatcataccagaggatcacttaatcatccattgcaaagtgttaattgccaaaaagtacaaacacccaagaaaaatatttcgtgtgcttcacttttaccatgctcatagcttcatgaaactctattattaacaatgaaactcttaaaattagtctataggtacatacgatgtcatttcacttgagacacaagaatacttgttaccaaatacataatagaaggtcgaaaagtgctaattactgggtcacacttgctggcagtaccttcactttcagacttcactcttaaagtttcaatttctggcatcaaaataaaccagcttccatacacaattatagcgaactacaaagtcaacttccattccacaagacctcctgcgtgcacggggaggaagattctgcagaatgcataactaataggaagcttctgcagaagaaatttaaaatttcaaatcatattttca

SEQ ID NO: 130812 - DNA, 222 bp, Glycine max
  Clone ID: PAT_MRT3847_89130C.1
tgcaaaatctacatgtttttcgcgacagtttttccaaacaagaggtggatttttaaatgggcctgcgaaaactcacacacaatactattgatgtggagatcttccaaaaggttgctggaacacaacttagtgaaccgtgtttaccctgtaagacaattaccttaagccgctgccagggtcaagtgcacatgcgtgagtggacgggcgggctgggctcatgaa

SEQ ID NO: 130813 - DNA, 768 bp, Glycine max
  Clone ID: PAT_MRT3847_89131C.1
gaagctggttctcatcaatcaatggatgatttcaggaacaagtccagttcccttcggttgaagttaaccagagatcatatcagtcaaaatgtcaatgaagacattgacctcggattaagtacatatctgatggtggtctttcaatgggaaccgaaactgaaggttcaatctgcagtattttcaatgggaccctatccccaggttcaatcagcagtattgtggagtacactcttttccctgaacttgagaaggcagctgaaattacaccagtgaaggacaccacaactgacaaccttccagctgagagcacagaaaagcttattatgccatccaaaattcccaaagctgctcaagtcccacaaaaagtccagtcaagaccttctaggctttcattgaacaaaacctcctcgaaggttctgtcaagtgttagaaaacctgcagccagtagctcttcttcggtgaagccccctaaacgatggcaatagttaggatgccacttgatgctgtagagtgcttatttatagagatagccgttaggaacttttttctatttatgttaggtgatcattctaactattacactgtactcaaggctcaagggtcagctcatttcagcttcaatctgttattaaatgaggcgatttgcaaactctagcttgtaaccagtttgtatgtaagcatcatggccttttatgccatattactgaatctgctgtatttacaactttccattcagtaatgtttatctacgatgttgtatatgtaaaa

SEQ ID NO: 130814 - DNA, 436 bp, Glycine max
  Clone ID: PAT_MRT3847_89132C.1
ccggaaacaaccctccggaagccgttccctggcaaccccaagggcctcctcctccgttgtttccattccaatccgggccattctcttccccgggaacggaaccggccccaaaaccgccaattccgccaaccaaatatcccaagcagtggaggccccataaaaagggaagaacccctatgaaggaccggaaattgccccaaaaccccaaaccttccggactgggaaaagttaaaaaccggaaaggaaaaataaggtgggttggaaaggcccatgggccccccctatggaaaaaggccatcgtccgttaatcctaccccgaagaaaaaaccccatttggaaggccaaggtccaacctggctacagcctcccaggttacaaacctccgaatgaaaaggccaacctaataacaatccgggaaaaaacggaaggggagtac

SEQ ID NO: 130815 - DNA, 366 bp, Glycine max
  Clone ID: PAT_MRT3847_89133C.1
ataaattatactccatgcactctactaactcggaattcgctcgacataaaccttccatcctctatcataacataataggcagtatcaatatccttaactctaccttccgataactaagactatctttcatagcatacaataattatcatctctaatattaacacagattcactaattccattttttaaaaaaaattaaaaataccatcaaatacctaatgatctcatcgatcctaaaattaattctataactctacttaacaacttcctacttttccttatatataatactataaaagctaacattattcatgacctaaggtttttcctattataaatcgtaatccattcacatttccaaacaaaa

SEQ ID NO: 130816 - DNA, 268 bp, Glycine max
  Clone ID: PAT_MRT3847_89134C.1
aagcttctccctcttactcttacactctcatccaaatcttgcaaaaaaaaaaaatcacaatggcagcgagcgctcacactccatccaaagagttcgtgtacatggccatcctggcggatcatgcccatcgctactaggagatggtagagttcatgagaaaggtctccgcctccgccgacaaccatgagcttagcgttgaggaacgcaacctcctctccgttggcgaacataactttatctgagcttgccgctccacctggcgcatcat

SEQ ID NO: 130817 - DNA, 1029 bp, Glycine max
  Clone ID: PAT_MRT3847_89135C.1
ctacccccctctcttaacatttctaaagctccttctcctctcaatatctcatggcaaacgctcttgaagtctctgctctcaatcgcatcaagctgcatcttttaggagaactctctcccctcacccaatttcaggaaccaaacacaacctccctctgttcccaatcttcaacttccgattcattcaccacagttgaccaaatcttctccgaattcctcgatttcccaactactactacttcttccacagaacaaaaccagttttctgcattcgagtttgagccaaaacccgaaataattgagccacaattggaattcagttttccaaccacacgctgcaaatcgagtcgaaggccgtcgctgcaaatctctctcccgaagaagaccgagtggatccaatttggagagcccgaggttaccgaaacggtgtcgcagagtaacccgaacgcggaagagaagaagcactacagaggagtgcgacagagaccgtgggggaagtttgcagcgggagatccgggacccgaacaagcgcggctccagggtgtggcttgggacgttcgacacggctatcgaagccgccaaagcctacgaccgagccgcgttcaggcttcgcggctccaaagccatcctcaacttccccctcgaagccggcgccgatgaccgcaaacgccaaagggaagagaaggtggagccggtgcttgaagtcgtcaagagagaaaagataggggaatccgacgttagtcttattaagaataatcctttaacgccgtctagttggttagggttctggggtagtgatgcaaacggaatattcaccgtgccgcccttgtcaccgttatctccccacccggcgttgggttttccacagcttatggttgtgtgaaatcatttttttttcttctttccttgtcgaatatggagataatttattcatttatttattatattgaaaaaaaaaaaaaaaaaaaaaaaaaaaaaaaaaaaaaaaaaaaaaaaaaaaaaaaaaaaaaaaaaaaaaaaaaaaaaaaaa

SEQ ID NO: 130818 - DNA, 299 bp, Glycine max
  Clone ID: PAT_MRT3847_89136C.1
agggcggaagtcggctcgaggttataaactaataaaacttcactttttttatatagaaccaattcaaaaaccggcggtttttttattaaataagcacgccaatataacttgatcttgaaattttcaaattcactcaacacttttttcactatcataattttacttaaaattaaattatcattttaatgcaaactcaaaaatagatcttattctcaatactcatacattaaataccatttttattttctacataatctctcacataatcatatctaaatcacataaccaaactcatcatc

SEQ ID NO: 130819 - DNA, 363 bp, Glycine max
  Clone ID: PAT_MRT3847_89137C.1
tgaggtacactacttttcgttggtgtcatgtgatcatataaagggctctcaccgtacaaaaaaaaaaaaaaaagggattgaaagtctatttgatagaccttctaatttatatatgtggaattattattagcatgtgttacatctaatttattaagcttgcctttggctattctcaactttttatgtctttttaaatttattattttttattcctactgtgtttacttttttaattcaatatcttttgttttttatttactactataaaataatttaaataaaatcaattttaagttaaaaaatatattattattattatattttattatattctactttatttttattctattttcttattat

SEQ ID NO: 130820 - DNA, 245 bp, Glycine max
  unsure (1)..(245): unsure at all n locations
  Clone ID: PAT_MRT3847_89138C.1
tttgatttttttttttttttttttttttttttggggaanatttttttaacgccaaatgacgggatggaaaacaaaattcaaacacaaaaggccaccaaacgggggagaaaaatagagtagccccagacggaggggacgcagggccacacatgcttgcttacaaaaaagataaaaccgacccaaacttcggtcccgggggctcacggctcgaaaaaagagcacacaacgcccgaaggggggggaaa

SEQ ID NO: 130821 - DNA, 231 bp, Glycine max
  Clone ID: PAT_MRT3847_89139C.1
tcttccacgcttccgtccactctttctctccatatagaataagaaactttattgatcatcactgtactttactaatacattgattcatactatacccatatcaattattattatctttttattttatgtccaagatcttagttttttttactttttttgtataaataatattaatattactagccttattcttattattatgtatctcctcctattttcaaaaatttactt

SEQ ID NO: 130822 - DNA, 485 bp, Glycine max
  Clone ID: PAT_MRT3847_8913C.1
aaaaaaaaaaggggggcccaaactttgtttccataaaaaaatttatgcccaaaatcaatggggaggcccagggtcataaatgggggggggcaaattccccttttttttccaaacaaaaaaaccaaaactccccggaaaggactcgccgttacctcccaaccgtttcgccgaaatccaactttggcggaaaatcagggccccatggggggtttggtttataaccccccaaaatcaaaaaccccctgcagggggaaaaaaaaaaaaaccttttttttaaaaaaaaataaaaaaccctgggctttgaacaaaaaaaaaaaacaactgggcctgggctaaaaccccgttttcctttttttttgatgcaaactggcccaaaaaaaggctgaaaaaacccgtttaacccactccccctccacgccttaaattttaacaagcgagttttttatagcaaatctacccatgttaaccccattcgaggggtataa

SEQ ID NO: 130823 - DNA, 200 bp, Glycine max
  Clone ID: PAT_MRT3847_89140C.1
ccactggaagctatagaacactcagaagctcgatgagtcccatgaccatgatcacgaccacgaccaccatgtgtctttagacatgttacggtgctgtacctgctatggctggctaaatctttgtgaagattctcgcatatgcgtgcttaccctgaatataatgttagcagatggccagtgatgccctgaggctaccagtg

SEQ ID NO: 130824 - DNA, 748 bp, Glycine max
  unsure (1)..(748): unsure at all n locations
  Clone ID: PAT_MRT3847_89141C.1
cggaaaccccgtcgaccacgcgtccgccagttttgaatatatttttattccttctttgtttcttcactttcttccatacacataaccatgtcttctcaggtcctcaacccaattcctccttttattcttgccttttgcacttcactcagttttcttgtgcttgatcattgtcattctgggtgcttttttttattttgttttttttgcttgatatggttctttgttctaggtgtatgtgctgaacttgatgagcttccaagttgattgagatattaggattttcttggtacttttttttttataataattactaatttaacttttaggattgggtaggaaagtgaatttatttctgcatataggtaaagctggaatcttttgtttgaaatatgattgcccataaaatttaattctagaaaaataggatttcatttcaaagctttttgtgttttttggttgagaattctaaaatgaagtattagtaattattgggtttgcaattttgagtttcaattagcttattagagaaagttcaacatctgctcataccaatccttctaagaagttgcagatcagtacatgctttcagttctgaagggttaaagttgaaattggtttcagttcttttgttcatatgcatttattttcatcgatcttcagttactctatcaatggttgctgatcttgtcctgactcctgaacggntgtatataacatatctgatgttttttcccctctactttcatgc

SEQ ID NO: 130825 - DNA, 654 bp, Glycine max
  Clone ID: PAT_MRT3847_89142C.1
acgagacaatgaaaggttcatgtcttcttcccaccccctctttcaccggaataaggtgcaagccttcagctctatgatacatgtttaatctgtgagtgcaaataaccgtttctggttatcctcattgtttttagttgtctactcttgaatcttggacgaagacgaggtttatgtgtagaatgaaaggttcatgtcttcttctcacgtcctctttcaccggaatcaggacaagcaaagagcttcggcatatgctgtcactgtgtgagttgaaaagcataacatgcttctcagtttgtaatcaaaagcaaaaatacaatcaaaagctttacattattcccgttagaactgtttgtgttcggttctgcatctcaagatcctcagttgggtcagtggaattgagtgggacaggcacacacagtgatgcttattcaggattttcagctccaaatgactatcagagaatcgactggttaaaaaaagacttggaagaattatttggtggaagggaaaaaatggataattttgggaaccaaaaaggatgctttaaacctgctacctgcaaataatgaaggggggaaagagcgccttaatgcaggtcctaaaggcatagaaaaagctgcaactttggacatcatagcactaggttacatggct

SEQ ID NO: 130826 - DNA, 565 bp, Glycine max
  Clone ID: PAT_MRT3847_89143C.1
acgttctatgatatagatatttatctatattctatatatagatatattgcttaggttactcagtcttaatctgagacccatcagacttgctgcttctaatactgatattaatcactacaaagtctagtacttactacaaaaggggtatgtgttaaataaaatattttaattaacctatttaccataacactattggatccttagcacaatatcttgttataatacctcgccctgctaatgaaactattttattgaaatttagctgtctcaattcccgttcgattgcacataagattcgagttccttttggatttccttgttgatcaatgacaattgtagcattatgatcctactgaattattataccgacgctacgtctgagctctttacaaggactctcaatgacagctttgaccacttccgatttttctaaggcggtatcagccactgcttgtgagattactgccgctgccgtgtcaccaatatacgcctatcgatatatcactagctgctaggagttagatacacatactgattgagagctctgttattatcagcaacattg

SEQ ID NO: 130827 - DNA, 420 bp, Glycine max
  Clone ID: PAT_MRT3847_89144C.1
actaactgtgttttctttttttttttttttttttttggaggaggggcaaaaagcgccacaataggccttgatgtttttttttttaacaaagaaagcccacgggcgcccccccacagaaagcggggggggagaaaccttgatgaaaaaactttcccctccctctttgtgaactcctcgcttgaaaggggggggaaacattcggccccccaaggggggaggaagaaaaactaatcttaccaccccccagaaaaagaacgggggaaaaaaatatggccaccaacctcaaagagaacgagggcgcccaccatatcaaaaacgggtgtgtaaaggacctgccggaactaaaaaaaaacccctcggagaagacctcgatggagaatagtgtgcgagaacggcccccccagcggggaaataaaacac

SEQ ID NO: 130828 - DNA, 1219 bp, Glycine max
  Clone ID: PAT_MRT3847_89145C.1
tgtcgaatgttgtcccgggggggctctgtagtcttatccccttaaaaaccgaagaaggaagctggcttttaaagtggttgttcaactggctcttgaccttgcaagagggttgagctatctccacacaaagaagattgtccacagagatgttaaaacagaaaatatgcttctggacaagacacgaaccttgaaaatagctgattttggagtagctcgtattgaggcctccaatcctcatgacatgacaggtgaaactggaacccttggttacatggctcctgaggttctaaatggtaatccatacaatagaaagtgtgatgtgtacagttttggcatatgcttatgggagatatactgctgtgacatgccatatcctgaccttagtttctcagaagtgacatcagctgttgtacgacagaatttgaggccagagattccgcgatgttgtcctagcgctctggcaaatgtgatgaaaagatgctgggatgcgaatcctgacaagaggccggagatggatgaagtggtgaccatgttggaagctattgatacttcaaagggtggaggtatgatccctcatgatcagcctcagggttgtttatgttttcgcagttatcgaggaccttgaaagatttttcactgccaaggaaattgattatggagggatgatatacagtgttctggaaatcagtttgtattttatttgattgaaggaatagggaaggaagactcaaggatgaaatgcatacacaaaaagtatgaaagcaatagttaatgaagagctctgcaattacttgttactttgttgggctataatttttgtaaagctaattgtgctatctcctcattgcacccatttttatgatatttctatgtaagttgtacacttgacagtagtagcatggattgttccgacactaatatcaaagtcctgatgggtcatttgatgtcctatgagcctacaagtgatcttttttgggaagatttgctcatgtgcagaaagacatgacttataatatgtggaataaatatacaatttggccattaaaagatgttatataaagtagattgagaaaagcttttgtttatacatttgtcgcttcaaatagtaaacttgatgacaagtatattgcagtgatctccttgttatcaagtttacttcgacggtcaaaaactttaatggtgtggctgctagagtttcctggaattgcgcatccttttt

SEQ ID NO: 130829 - DNA, 721 bp, Glycine max
  unsure (1)..(721): unsure at all n locations
  Clone ID: PAT_MRT3847_89146C.1
gtaaaccaggagtatggtccagtcttaaggattcccataagtacaacattaaatttgcatcatagtttacaaacatttatgtgagaattttcttattcactcctgctgtcaaatccgttttgcagtttattggggcaacaatgggaacatcagagctacagatacaaacagaaaatggtcatataggcatgccgagtaatgtttgttgtgttgttgttgaatattgtcctgggggtgcactgaagtcttatctcattaaaaaccgaagaaggaagctggcttttaaagtggttgttcaactggctcttgaccttgcaagagggtccaatctttatgcctaacctgttctcatataagtttaggtgaataagctttctttctaagcctgagaactttattatttactttataggttgagctatctccacacaaagaagattgtccacagagatgttaaaacagaaaatatgcttctggacaagacacgaaccttgaaaatagctgattttggagtagctcgtattgaggcctccaatcctcatgacatgacaggtgaaactggaacccttggttacatggctcctgaggtacatgcttcaattcctttgaaaatttctctctcctgtgcattgttcttttggggttttgttttcaacaccctttatgtctagtccttacctcagaanaatttgaaatgctggcttaggacttgttacttgcg

SEQ ID NO: 130830 - DNA, 443 bp, Glycine max
  Clone ID: PAT_MRT3847_89147C.1
cttttttttttttttttttttttttttttttttttttttttttttttttttttttttttttttttttttttttttttcaaaaaaaatcaaagggcttaaagcttaaaaaaaaccacatgttaaaatccattacaaaagtctaaataaaactctccaataggtcatagaacaccccccaagggtttttggttacctttttttagggagaatattggggcccccaaacacaaaaaaagaaagggcctggtcttttaaaaaaaaagtttattaaggaaaaaaaagctttaaaaaaagcccgcctaaaaaaaaaaaggttctccctattaagaaccaaaaggtgttgttttgaaaaggggacaaaaggttttctgaattacccaccggttaatgcaaccactgggaaacccatgcccacaatccagggatccaaaatttttcccatt

SEQ ID NO: 130831 - DNA, 541 bp, Glycine max
  unsure (1)..(541): unsure at all n locations
  Clone ID: PAT_MRT3847_89148C.1
attcggctcgagctcactaccaccaaagactgagaagaggggttgaattaactgcttgcaagcatggcgaagagcaaggaagacataacctatgcaacatcacaagcaaggctttcagaagatgaagcagtgagagtggcctacgagcatggctcaccccttgaaggaggaaagattgctgactctcaaccagttgacttgttttcaagtgcacacaatatgccaaagagtggccaaacaacaatggattcaaacactagtgatcaatctcagatgcaacgtgatacacaagaagggggttctaaagaattcaccactggagctcctggatagccccaaaaggggctcctccagcaatgggtcataaattttgaaggcaataatatagacaaccttataaaatatgtttacttttgtgtgttttgttctgccctttgtttcttttttatggcatatcatcaatcatgtatggggatgactccctaagtttttcttcgtctaataaagttgaatattttttgtaaggggttaaaaaatanaa

SEQ ID NO: 130832 - DNA, 387 bp, Glycine max
  Clone ID: PAT_MRT3847_89149C.1
aatttattttttttttttttttaaaaaactttttctttttttttgttggggttttttttttttttattaatttttttttttaacgccccgcgggcggaaaccggggcccaccccaaaaacacacaccggtaccaacaagggccccatttttcacaatacgaagaataataaaaaatggggctaacaatgacaaaacagatcacccggcaaaaaccgaaaaacgacaaacatatcaaaaaaaaagcaaccccggaccaaaaaaagaaaaccctggggtgccaaaagagggaacgaaccaacataaaatgcgttgccaccaaagcccgttatgcaggaggaaaacatgacaggcccatcatcttaaaaaattggcaaacccgcggggaa

SEQ ID NO: 130833 - DNA, 560 bp, Glycine max
  unsure (1)..(560): unsure at all n locations
  Clone ID: PAT_MRT3847_8914C.1
nnnnaagccattttaattttttgaacgaatatggcaaatcggccatggacctaagctttaatctatacctacatcaggggttcaagcccatagaaaaaaacttgttagagaggtcaaaaaaaaaacaaaaggatcggccaagcattccattgacaaatggaactaaagggtagacagttggtttatatacatgcaatttgttacaacaatcatacactattatcgaatgaagggcaagggatatgccctagactcaatctccggtggctacaatgctgcgagcctgattatatgagttgtcacacagcctctcgtcagcgcgagctccattcccaaaacttctcacgatttgttgtagcccataagccaacacgctttgatctggcttgaaagtcccatgtttccagctccggtcgtaagacatatgctacgtagcgccatgctaaacctttattgaacagcatgtcctgttcaaaaatgccattacaagtgagggcacctacagggcgaccctgacgatcctcctcataaacagggacccttaaaggctgggcttgaac

SEQ ID NO: 130834 - DNA, 158 bp, Glycine max
  Clone ID: PAT_MRT3847_89150C.1
ctagatacgagagcaggcacgagcctttttttatttttttctttacaatggccgttcttcagaggatgccaacgcttaaagtatcgtgtgtatgcgtacgctatatttattctatagggcgcctaataaaattcactagccgtatttaactagcgtta

SEQ ID NO: 130835 - DNA, 1076 bp, Glycine max
  Clone ID: PAT_MRT3847_89151C.1
attcccggctcgacccacgcgtccgcaaaaacataacacacaacttctaagctcttcttcttcttctcactcttcaccaatggccaaagagcgagagaagaaactctacgtagccctactcggaaactacgccgccgaactcaaactcctcctcaccactctcctcctcctctgtgccgtcgccactctcctccagttcctcccttcccgcttcaccatctccgcctccgacctccgcgtctgcatttcacgcgtcactcaaactacccaaactatccctaactcaactaatgcgacgtcaccaccagtaacagcaacagcatcagcatcagcatcagcatccccactcgttgcatctttatcttccaccacttcaccctccccaccgccaccctcaccaccgccaccgtcgccgccatcgtcagagcaaatcctccccgacggaacaataaagcgcgtgttcaacccttacggctccgcagcttacaactttgtcaccatgggcgcttacagaggtggcctcgacacgttcgctatcataggcatcgcttcgaagcctcttcatgtctacgccaaacccacctacgagtgcgcgtggttctcactcgccggcgacaagaaaaaactttccaccaccgtcggttacaagatcctccccgactggggctacggccgcgtctacaccgtagttatcgtgaactgcacattcccgattcccgtaaacgccgacaactcaggcgggaagctcgtcctctttgcctccacctccggcggcggtggtggataccgtagccgtgacggtggttatggcggtggctatggtggtggtggtggtggtggttatggcggtggcagagaccgtggttactctcgtggtggtgatggtggtgatggaggctggagaaactaaggcttgatgtcgtcaattagggtttatgattatgccccgtatttttagttgttgtggtttgagttcgagtttctttatggtttcgtgttaccgtggttcttgtttttgaccaatatatctggttgtttatagttgatttagtgaaatgataatcagtaattggagt

SEQ ID NO: 130836 - DNA, 1466 bp, Glycine max
  Clone ID: PAT_MRT3847_89152C.1
tacggccgccgggcggcgcgtacggcggcgggcatatgggggaaacacccattcaacattttctctgtctatttctcgttgtagcgccgcagccagcggttgaatttggaaaaagatgtctcaccggaagttcgagcacccgagacatggttcccttggctttctcccaaggaagcgagcttctcgtcatcgcggaaaggtgaaggctttcccaaaagacaatcctagtcaaccatgcgggttgactgcttttgtgggctacaaggctggaatgacccacattgttagagaggttgagaaacctggatcaaagcttcataagaaagagacatgtgaagctgtcactatcatcgaaactcctccattggttgttgttggagttgtgggatatgtgaagacacctcgtggccttcgcacactgaatactgtttgggctcagcatctaagtgaagaagtcaagagacgattttataagaactggtgtaaatctaaaaagaaggcttttaccaaatattcaaaaaaatatgaaactgaggaaggaaagaaagatattgaatctcagcttgagaaattgaagaagtatgcaactgtcattcgtgttctggctcatactcagataaggaagttgaagggtctaaaacagaagaaagcacatttgatggagatccaagttaatggtgggacagttgaccagaaggtggactatgcatatagcttcttcgagaagcaaatcccagtggatgctgttttccaaaaagatgagatgatagatatcgttggagtgactaagggtaaaggttatgaaggtgtcgtaactcggtggggcgtcactcgccttcctcgaaagactcacaggggtctaaggaaggttgcttgtattggtgcctggcaccctgctcgtgtttctttcactgttgccagggccggtcagaatggatatcatcaccgcactgagctgaataaaaaaatctacaaggttgccaaggcagatcatgagtcccattcagccatcactgaatttgacaggactgagaaggatattactcctatgggtgggttccctcattatggtgtggtgaaggatgattatattatggtgaagggatgctgtgttggaccgaagaagcgggttatcactcttcgtcggtctcttctcaagcagacatcgcgggtggctctggaagagatcaaactcaagttcatcgacacctcgtccaagtttggacatggccgcttccagaccactcaggagaaacaaaagttttatggtcgcttgaaggcataaatttttgttttggagacaacttgtgatgaaaattttgttgcaaaataagacatttagtggtctttttttttatttgagtccgacctattctcagagttgtttcttttagttgctttgaacaacaattgcatttttttcctattttattataatatcagccacatttttatggttagtactt

SEQ ID NO: 130837 - DNA, 2560 bp, Glycine max
  unsure (1)..(2560): unsure at all n locations
  Clone ID: PAT_MRT3847_89153C.1
gtgacgtccgggtcgcgttcctttcttccttccttctttttcccccctacaaacaaaaacaaagccacattcccttttctatctgtttccttcgcgaaccagcaacaacccccggcgcacgatagcgccatcgctttcgttacgcggttggtaaccgtctctctttcatcaccgtttttatttctattcacaaaaccaacaacctcatctgtgatttttctttcacttttctctctcggaacaaaacggaggatccgtcatagtattggtcaaatattggctaatgtgggtgggacattcatctatgtacaagcgcactccttcgagagataattcaaacatggaggacatggaagaaaactcagatcttttagacatcggcctggacaagggaacatcaaatccttcattgatgctttctttaccgcatgtacttgtggcgaccatttcttcattcctttttggataccatctgggggttgttaatgaaccacttgagagcatttctgtggatcttggcttccgtggaaatacattggcagaaggtctggtggtgagcatatgccttggtggtgccttgattggatgtctactaagtggttggattgctgatggggtggggcgtcgtagggctttccagttgtgtgctctgccaatgataattggtgcttctatgagtgcagcaacaaacaacttgtttggcatgcttgtaggaaggttgtttgttgggactggcttgggcctgggccctcctgttgcctctctgtatgtgacagaggtttctcctgcttttgtgcggggcacctttggagctttcatccagattgcaacatgccttggtctaatgggagctttatttattggaatccctgtcaaagaaatatctggatggtggcgggtttgtttttgggtatctaccattccagctgctatacttgccgcagctatggtcttctgcgcagagagtccgcattggttatacaagcaaggaagaactgctgaagcagaagctgagtttgagagacttctgggtgtatcagaagcaaaatttgcaatgtcggagttatccaaggtagatagaggtgatgatactgatactgtaaagctgtcagaattgctgatctatcgtttcaatgggtttgatggataagcttggaaggaaggttctacttttctggagtttctttggcatggcaatagcaatgatccttcaagccacaggagcaacttcacttgtatcaaacatgggagctcagtacttttctgttggtggcatgttcctgtttgtcttaacatttgctctcggagctggcccagttccaggtctccttctaccagaaatctttcctagtcgaataagagccaaagccatggcagtctgtatgtcagtgcattgggtgataaatttctttgttggactactgttcttgcgtttgctggagaaacttggtccacagctgctttactctatgtttgctaccttttgcatcatggcagtaatttttgtaaaaagaaatgtggtggaaaccaaagggaagtcacttcatgaaatcgagatcgcacttctaccccaagactagagcatcttatgaagctctattcattgattgctctaattctgcatacttccagctgagcagattgtgtttcatctattatggttgaccttaacagtacaaggggaagctcaacgcaggaactatgcattgttttgctgcaatatttgtacgaaagaggtttaggtattatggctagctgtgatgtagtaggtggtactattagcggcttacttacgacacgacacccttctagggaagtcacttcatgaaattgagatcgcacttcttcctcaagactagatctctattcatttgattgctctaattttgcatagtttttcggctgagcagattgtgtttcgtctattttggttgaccttaacattacaaggggaagctcaggaactatgcattgttttgctgcaacattagtacgaagaggcttaggtattatggctagctgtgatgtagtaggtggtactattagcggcttacaacacgagacccttctgttgttactcgcggcttgtgattctatgatttggcatccacgtaaagggagacataattcatcaggggggatctatgcatcccataatattccataaatgtactactttatgtaatattatatatgtttctgtacgtgacattatttttaatcgcttcaattttgtcccattttggatacgaagtagtctagcatgtaaattctgttgcagagtatatcgaggaaaatgggaagaagctttgtgtgattaagaaataaatatgattcgtaattcacctcatgaggttgatttatgtgcacccccgtaaagggggccataattcaccaggggggatctatgcatcccaaaaaattccaaaaagggacccctttaggtaaaataaaaaaggtttcgggacgggccattatttttaatcgcttcaattttgtccccccaaaaaaaaaaaaaaaaaaaaaaaaaaaaaaaaaaaaangcccctaccccnnnnnn

SEQ ID NO: 130838 - DNA, 338 bp, Glycine max
  Clone ID: PAT_MRT3847_89154C.1
ctgaagcagaagctgtttttgagaggtttcttggtgtatcagaagcaaaatttgcaatgtcagagtgatgcagtgcagataaaggagaccatagtgatagtgtgaagctgtcggaattgcttcatggtcgtcattctaaagctatctggtataaatgctgtgttttatttctcttcaactgtttttaaaagtgctggagtgccatcagacattgcaaatgtctgcataggaattgccaatttggcaggatctatcgtttcaatgggtttgatggataagcttggaaggaaggttctacttttctggagtttctttggcatggcaatagcaatgatcct

SEQ ID NO: 130839 - DNA, 639 bp, Glycine max
  Clone ID: PAT_MRT3847_89155C.1
cccacgcgtccgtgagtagtaccttcacctctctcaacaatctagctagagtttgctcctatctatatgtaataaggtatgctgatatgcactattcaaataggagcattagctatgtttgttaatgtcactttatgttatgtgggtaagccgcgtaagagacaacaagtaggtacgtggagtgtcttaggtttctttggcatggcaatagcaatgatccttcaagccacaggagcaacttcacttgtatcaaacgtgggagctcagtacttttctgttggtggcatgttactgtttgtcttaacatttgctctgggggctggtccagttccaggtctccttctaccagaaatctttcctagtcgaataagagccaaagccatggcagtctgtatgtcagtgcattgggtgataaatttctttgttggactactgttcttgcgtttgctggagaaacttggtccacagctgctttactccatgtttgctaccttttgcatcatggcagtaacttttgtaaaaagaaatgtggtggaaaccaaagggaagtcacttcatgaaattgagatcgcacttcttcctcaagactagatctctattcatttgattgctctaaattttgcatagtttttcgggctg

SEQ ID NO: 130840 - DNA, 529 bp, Glycine max
  Clone ID: PAT_MRT3847_89156C.1
ggctcgagctttttctttattcccccggcgcacgatagcgccatcgctttcgtttcgcggttggtaaccgtctctctttcatcaccgtatttatttccattcacagaaccaacaaactctctctctctctctgattcttcttcactgttctctctctgagcaaaaccgaggatccctcatagtattggcaggtcaaatattggctaatgtggatggggcattcatctatgtacaagcgcactccttcgagagataattcaaacatggaggacgtggaagaaaactcagatcttttagacatcggcctggacaagggaacctcaaatccttcattgatgctttctttaccgcatgtacttgtggcgaccatttcttcattcctttttggataccatcttggagttgttaatgaaccacttgagagcatttctgtggatcttggtttccgtggaaatacattggcagaaggtctggtggtgagcatatgtcttggtggtgccctgattggatgtctactaagtggttggga

SEQ ID NO: 130841 - DNA, 1494 bp, Glycine max
  Clone ID: PAT_MRT3847_89157C.1
ggctcgagggcttgggcctgggccctcctgttgcctctctgtatgtgacagaggtttctcctgcttttgtgcggggcacctttggagctttcatccagattgccacatgccttggtctaatgggagctttatttattggaatccctgtcaaagaaatatctggatggtggcgggtttgtttttgggtatctaccattccagctgctatacttgccacagctatggtcttctgcgcagagagtccacattggttatacaagcaaggaagaactgctgaagcagaagctgagtttgagaggcttcttggtgtatcagaagcaaaatttgcaatgtcagagttatccaaggcagatagaggagacgatagtgatagtgtgaagctgtcggaattgcttcatggtcgtcattctaaagttgtttttattggatcaaccctatttgctttacaacagctatctggtataaatgctgtgttttatttctcttcaactgtttttaaaagtgctggagtgccatcagacattgcaaatgtctgcataggaattgccaatttggcaggatctatcgtttcaatgggtttgatggataagcttggaaggaaggttctacttttctggagtttctttggcatggcaatagcaatgatccttcaagccacaggagcaacttcacttgtatcaaacatgggagctcagtacttttctgttggtggcatgttcctgtttgtcttaacatttgctctcggagctggcccagttccaggtctccttctaccagaaatctttcctagtcgaataagagccaaagccatggcagtctgtatgtcagtgcattgggtgataaatttctttgttggactactgttcttgcgtttgctggagaaacttggtccacagctgctttactctatgtttgctaccttttgcatcatggcagtaatttttgtaaaaagaaatgtggtggaaaccaaagggaagtcacttcatgaaatcgagatcgcacttctaccccaagactagagcatcttatgaagctctattcattgattgctctaattctgcatacttccagctgagcagattgtgtttcatctattatggttgaccttaacagtacaaggggaagctcaacgcaggaactatgcattgttttgctgcaatatttgtacgaaagaggtttaggtattatggctagctgtgatgtagtaggtggtactattagcggcttacttacgacacgacacccttctgttgttactcgagccttgtgattctctgatttggcatccacttaaagggagacataattcatcaagggggatctatgcatcccataatatttccttaaatgtactactttatgtaatattatatacgcttctgtacgtgacattatttttaatcgcttgaattttgtcccattttggaaacgaagtagtctagcgtgtaaattctgtctgcagagttaaaaaaaaaaaaaagttctagatcgcga

SEQ ID NO: 130842 - DNA, 479 bp, Glycine max
  Clone ID: PAT_MRT3847_89158C.1
tttccttggcgtgctttcggatttgatgtgagcctctagttttactcgttgacgttactagatcaattatgactaattatgttttagtaattcaacgttgtgttgagtattaaaagagccagtctatgcaattgtgatgttgatataacaccagactatggtatttgtttcagtaaatatgatttgcttgtttatttatctatattacagtatagcatgaaagtccttccatgtggaagaattactgatgctctgaatgagtattgatgctgcacaatttactggagtgttttctgtttattagtggttgtttgagatgatattaggatttaggagtatttttttttaatgcagccttttaaaacattttcatttccggttgttgaggaagaatatgatcattattcagatgtcaatctgatcttcttgtgattgttctcacttttcaatgtttctatcattttggtgatgacatcctt

SEQ ID NO: 130843 - DNA, 241 bp, Glycine max
  Clone ID: PAT_MRT3847_89159C.1
ggctattccgcaccttctctgctaccaatggaattcaacccgatcccaatcggttcgtgctcgaacaaacaccagatgatctatacagagtagttcaattccactgaatcagatcacgataggcacattacggggactgatcccaacacgtttttcgccatgtcgaatttgtcccgcgaagatcctaagcaagtgtactctagtgcacattcacagcgacgacgatatctcagattcactg

SEQ ID NO: 130844 - DNA, 248 bp, Glycine max
  Clone ID: PAT_MRT3847_8915C.1
gtgaagaagagcattagcatttagctgcacgacgtcgttctgcggtggtggccgagtatcaaagaaagcgtttcgcatggtcccaataggttcgcatttctttttcacttcaaagcccaattgatgttgttgtactcgatcaggcagaatgtatttgcgaaaactgaggaaataaatcctcaaaatctattctgctggtgaaatcgtctttgaagcagttgcgaacttagctgaggggatcaatggtg

SEQ ID NO: 130845 - DNA, 1561 bp, Glycine max
  unsure (1)..(1561): unsure at all n locations
  Clone ID: PAT_MRT3847_89160C.1
ctttcgcgctccattctgccttggcggacccctgccccattcccttggtcgccgttgcggcgctcatcctagtaatgggttcctgggcctctgagaagggagataaattattggataagtggttacagcgaggttttgttcaaattcatttgctatatcttaatgaagggaatatagggtcataagtgctgttcaaatgctagtcttactgtttacaggagaagacactggctaacttccagaatgtgcttcttttgtcctcacctcaggtaacctttatatgcttatgatgggaattatcatggtttttaagacctatatttgaacttctagttccattgtttcaaaatatcctgtattcaaatgctggatcatttcctaaagggtgaagattgtaacttatgtatcaaccagagtataataaattagatagaagtctacatggtggaaagcttatattgattagtattcaaggtaatatggatatcatgactatttagtgactctctctgcctttctgcaagggtctattatctttttaaattatttttgttgactcatgataaggggtcctgggcaagtgataggatcttcctatattttcttctgcataacctttaatctggctatactttacttttattatttcaagtatatcataatgcttcccttctcattacatcaggatggctatgttccataccattctgcgagaatagaaccatgtccagcagcttctttggatttctctaaaagagggaaaatcttcctggagatgctgaataattgcttggaccaaatccaagctcacactaacgatagggtggtcatgcgctgcgacatcaacttcaacacctcttcctatggcaggaacttaaacacacttattggacgaacagctcatattgacttcttggaatctgacatttttgcaaagttcataatgtggtctttcccagatctgtttagacagtaaagaaggaatctacattcaggcaacattattgatttagatagatagtgagattgggacaagactttaagaacatccgaactaaaaacatggcactgtaatcaaaacagttcagagatgcttccaacattgagttggtaaacttccaacaccatctcctcggctcctcacaggaggaaaaaatggtgaatctcatccctcccaaaaatgtgtcctcatgcgaggcagcaaattagaggaatttgcagagcagaaaacttgcatgggaccttaaccattgtaaatcactttttttttttaatatagttatataaattttcttttctcagttatggatggggatacagccttttggccagtaggcagggtgtaggcatgtatgtataattaaaaattaatattcaaagaatcatgagtttaccatgtctattcaagtttatagaagtcgctagttctttaggcttaggaacctagagaaaatgttgtacactaacagatgatattctaagaactttttagagaactttcatccttttacatcagaaaacactttcatttgtccnaaaaaaaaaaaaaaaaaaaaggacg

SEQ ID NO: 130846 - DNA, 790 bp, Glycine max
  unsure (1)..(790): unsure at all n locations
  Clone ID: PAT_MRT3847_89161C.1
ggaaaatgcgaacctagtctgctgtgacactccaccatgtcctgggtacccactcatttgctgtacaacattcacagattccactaagattgaatttagccattcttgatcctgcgctcattgttgtttccaaaagtgctcttgtgctcattgttggagactcatttgtgttgaaacctccaactcagaaggacttgacaacaagctgagaaatttgtacaaaccattagaactaagcaatttgcttgaggctactgccacacaaggttaaatgcctcattgatgggaatgctattaataagagatgcagaatggctagccattgtttgttttgaaattgaggaagttggattcatagagctttgttgcctagcttctagttgatgaaattgttgctactaataaaaaaattaagctttgatacattccatttgtggttttcccaattccaaagtagtacaaggtcatcgtcagcccttttatagggggtgcattatttatctatctctatcccaatgagccatttatcgaatcgttgcaatcgatgctcgatctcaaagagagggaagagatcttcaaaaattaggtttttatgatccaataaagaatcaaacctatttaaatattcctgttattctatatttccttgaacgaggtgctcaacctacaggaattgttcaggatatttcaaaaagggctggtgtttttaaggaacttagctcanatcatcaaacgaaatttcattaatgaaataaaaaaaaggaggtgtggatgacttgtataaaaaaaa

SEQ ID NO: 130847 - DNA, 525 bp, Glycine max
  Clone ID: PAT_MRT3847_89162C.1
ggttaaaccttccatatctgttctgcttccatcctcccctctcagcgttaaccgttcaatccaaaatctggcatattctcaacgccctctccctctgcatatattgctcccctcactttccctcaatcggtttccccttgacattacacagttatgcgttctgctgagagcttaaccaaatccacgacgaggtagtagggttcttgccggcaagtggcaaccatggccactaccagcttgcagatgagccctcaggtggagcagatccacggcgaaatctgcgatcacttttgagctctcgcgtatgtccatatctctctcagatccagcgcgtagatttttcttaattccagattctctgtttcatgttagatgatgaatttcgcttaggaagaaaaaaacttggtgcgaatgatgttatgttacttttgttggtggttctgtttgtacaatgattttatgattcttcaaaatttaggattctggccaattgtagtggacagtgggtgtaacgtgctgatttta

SEQ ID NO: 130848 - DNA, 470 bp, Glycine max
  Clone ID: PAT_MRT3847_89163C.1
cgcgtccgctttgctagctcaccgtgagcatcttgatttccggtaagttaattgttcatttttcaaattccaccttatataggtagtttattaacaatttaacttattgttctgtacattactttgtgttttccaaactctaccttcctctacttttgcacttttgatacctactatactgtaaatttataacgtaaattttttaaaatgctattttttaaatcacagttatggacaatacaaaagattgcgttatgaaattgacaagcatgaaggcggtctggatacattttcacgtggttatgaaaaatttggcttccaacgcaggtattatttctagagtttaatatcttacatgtgcacatctttgtttcataaattatttatgtcaaattcctaagatgataaatagctaaatcaatccaacatatctattgctgatcaataaacaaaacaatttaaaagaaaac

SEQ ID NO: 130849 - DNA, 5164 bp, Glycine max
  Clone ID: PAT_MRT3847_89164C.1
gacccacgcgtcctctttgctagctcaccgtgagcatcttgatttccggtaagttaattgttcatttttcaaattccaccttatataggtagtttattaacaatttaacttattgttctgtacattactttgtgttttccaaactctaccttcctctacttttgcactttggatacctactatactgtaaatttataacgtaaattttttaaaatgctattttttaaatcacatcccccgggtcgatccgcgtttctctcggcaccgcgcaaatcaacacactcttcgaaactctggatctgttcttctgcttctaagagacaacattctcttcttgaatctcaatctctcggaaactaaaccctaagaacagacaaagatggtttacaccatctcgggaattcgatttccggttcttccttcgctgcacaactcccgcttccgtggcgatcgcagaactgcgtctcttcccgtttttctcagaaacaactccttctctcgtaaaacccttgctctaaaatcttcccatgattctgattccttgtcttctgcgattgccaaatctgataaagtacttattcctcaagatcaagataactctgcatccttgacagatcaacttgaaactcctgatataacctcagaggatacacagaacttagaggatttaaccatggaagatgaggataaatacaacattagtgaagcagctagcagttacagacatattgaagatggacaaggctctgttgtatcatcacttgtagatgtgaacattccggccaagaaagcgtcggtatctgttggtaggaaatcaaagatagtaagtgatgaagttaaacctaagtcattcccccacctggcactggacagaaaatatatgagatagatccatctttgctagctcaccgtgaccatcttgatttccgttatggacaatacaaaagattgtgttatgaaattgacaagcatgaaggcggtctggatacattttctcgtggttatgaaaaatttggcttcatacgcagtgctacaggcattacttacagagagtgggcacctggagctaagtcagcagcattaattggagacttcaacaattggaatccaaatgcagatgtaatgaccaggaatgaatttggtgtgtgggagatcttcttgccaaacaatgtggatggttcaccaccaattccccatggttctcgggtcaagatccgcatggatactccctctggaatcaaggactcaattcctgcttggattaagttttctgtacaggctcctggtgaaattccatacagcggaatatactatgatcccccagaagaggaaaaatatgtcttcaaacatccacagccaaagagaccaaaatcacttagaatatatgagtcacacatcggaatgagcagtccggagccaaaaatcaatacatatgtcaattttagagatgatgtactgcctcgcattaaaaggcttggctataatgctgtccagattatggctatccaagaacattcttattatgccagctttgggtaccatgttacaaatttctttgcacctagcagccgatttggaactccagaggaacttaagtctctgatagacagagcccatgaactgggtctgcttgttctgatggatattgtacacagccatgcatcaaataatacattggatgggctgaacatgtttgatggaactgaaggtcattacttccatcctgggtcacgaggttatcattggatgtgggattctcgcctttttaactacggaagctgggaagttctaaggtatctactttcgaatgcaagatggtggctggatgaatacaagtttgatggatttcgatttgatggtgttacatcaatgatgtacactcatcatggattggaggtagcatttactggaaattacaatgagtattttggttttgcaactgatgttgatgctgtgatttacctgatgctgactaatgatgtcattcatgggctgttccctgaggctgttacaattggtgaagatgtgagtggaatgccaacattctgccttcctacgcaagatggtggggttggctttgattatcgcctgcacatggccattgcagacaagtggattgagattctcaagaagaatgatgaagactggaaaatgggtgatattgtccacacattaacaaacagaaggtggctggaaaaatgtgtagcttatgctgaaagtcatgaccaggccttggttggtgacaagacaattgcattttggttgatggacaaggatatgtatgacttcatggctttagacagaccatccacacctattatagatcgtggtatagcgttgcacaaaatgattaggcttattaccatgggtcttggtggtgaagggtatttaaattttatggggaatgaatttggccatcctgagtggattgattttccaaggggtgatcaacatcttcctactggcgtaatagttccagggaataacaacagttttgataaatgcaggcgtagatttgacttgggtgatgcggactatctaagatatcgagggatgcaagaatttgatcaggccatgcagcatctagaagaaaagtttggtttcatgactgctgagcaccaatatatttcacggaaaaatgaaggtgacaaaattatagtcttcgaaaggggcaacctcatctttgtcttcaattttcattggaacaacagctattcagattacagagttggctgttcaacccctgggaaatataagattgtcttggattcagatgatgccttgttcggtggcttcagtcggctcaatcacactgctgagtacttcacctcagaaggatggtatgatgaccgacctcgatcctttcttatctatgcaccttctagaacagcagtggtttatgcccttgcagatgatgttgaacctaccctagcagatgaagctgaacctgccctagcagatgaagctgaaccagagccagttgatccttgatgacaattttctgggatgctgaaatgttacaagtgcacaacggcatggatgcagtaaatccctaatcaaactagccaaccaacgtctggtggattaaccgacactgaaacaacaaagaagctgaattgaagtggaataaataaagcgctagttcatctttagttgagagcaggagactagcctcgaaatcttgtacatgtgccttgctaggtaataagttgtgatatcacacccatcttcctgtttttactttttaggatttaacgtcttgacatgtataagttgcgtcacgattgacaaatgtgaatcaacaaagctatggtccgcgaacctgagactcaatgtacctatgcacgtatcaatcttcataaagtgcttactctgtttaagagttggaaggattttaccgtgggaaattttgcaggaggcttttatagatgtttcctttagattatttttatttattggttaactgtttcctttatatttaaaagttgagttgtagcaattcaaagtattctatgcagtgtaataaagacaatgtacacggtcataaaaaaaattaaataattgcctactgtagatattcactaagaacgatgaagactggaaaatgggtgatatcatccacacattaacaaacagaaggtggctggaaaaatgtgtagcttatgctgaaagtcatgaccaggccttggttggtgacaagacaattgcattctggttgatggacaaggatatgtatgacttcatggctttagacagaccatccactcctattatagatcgtggtatagcgttgcacaaaatgattaggcttattaccatgggccttggtggtgaagggtatttaaattttatggggaatgaattcggccatcctgagtggattgatttcccaaggggtgatcaacatcttcctaatggcgtagtagttccagggaataacaacagttttgacaagtgcaggcgtagatttgacttgggcgatgcggactatctaagatatcaagggatgcaagaatttgatcaggctatgcagcacctagaagaaaagtttggtttcatgactgctgagcaccagtatatttcacggaaaaatgaaggtgacaaaattatagtcttcgaaaggggcaacctcatctttgtcttcaattttcattggaccaacagctattcagattacagagttggctgctcaacccctgggaaatataagattgtcttggattcagatgatgccttgtttggtggcttcagtaggctcaatcacgctgctgagtacttcacctcagaaggatggtatgatgaccgacctcgatcctttcttatctatgcaccttctagaacagcagtggtttatgccctagcagatgaagctgaacctgccctagcagatgcaactgaaccagagccagttgatcttgatgacaagcttctgggatgaatgttacgagtgcacaaaggcatggatgcagtaaacccctagtcaaactagccaaccagcgtctgatggtttaaccgccactggaacatcaaagaagcagaattttgaagtggaataagtgaagcgctagttcatctttagtgaggcaggagactagcctcgaaatctagtacatgtgccttgctaggtaataagttgtgatagcacacccatcttcctatttttactttttaggatttatcgtcttgacatgttataagttgcgccgcgattgagaaatgtgaatcaacaaagctatggtccgcgaacctgagactcaatgtacctatgcacatatcaatcttcattaagtgcatactctgttaagagttggaagcttccaaggggcttttaccgtgggaaattttgcaggaggcttttaaatatgtttcctttagattttatttttatttattgattaaactgtttcctttatatttcaaagttgagttgtagcacaactcagagtattctatgcagtgtaataaagacattgtacacggtcataaaaaagaaaataaaataatcgcctactgtatatagggtcgctccttcacttcctttcaccatgtattttttttttaatatcttacatgtgcacatctttgcttcataaattatttatgtcaaattcctaagatgataaatagctaaatcaatccaacatatctattgctgatcaataaa

SEQ ID NO: 130850 - DNA, 226 bp, Glycine max
  Clone ID: PAT_MRT3847_89165C.1
taggaagagacttcataggagatcatccacagaaacatgatggtctaagctatgtacggactcacatttcatctagtagagtgtaagctatttactaggatgagatggagcaattggtggacatatatggaactggttagcatttttctcacagtcggagcttaatataataatcctcatatgtggattgcttacaaatttgtttccttgcttaatgagcctttct

SEQ ID NO: 130851 - DNA, 306 bp, Glycine max
  Clone ID: PAT_MRT3847_89166C.1
gcacaaaaaacaaaatctccactctaacaaaaaaaaaaatttcctcccggggaaggccataaaaaaggggtttccccctttatactgaaaaacccccaaaggacctttggtgttaaggcgccgtcttttcaaaggggaaaaattgtttgaatcccctccaacaaaactcgggcggggtaaccccatctaaaaacgcgttctccaaaaaaagcttttaaacccgggttttgggggaaaggaacaaccttcgtgcccctttcacaatatgggggcccgcaccctttcccccaaaaggggggggacgct

SEQ ID NO: 130852 - DNA, 586 bp, Glycine max
  unsure (1)..(586): unsure at all n locations
  Clone ID: PAT_MRT3847_89167C.1
tcgatctgtcgctagcgaatgtgccagagtgccgtgcatgacccaatgaacacagcggcgaaactgagaaaaaacacatgaccaactaaatgtgttaagatgtaatgtgggctgcgtagcggctgccaaagcggcagcaataagaggccacactagaggtagcactaccgcaggcagatgccaaggaggttgaggtgacgaaaaaggcgcaacaaaaacgtgcagggcttgcgcacccactccagagggtgttgatgacagcttatataaatagtttggccgccgctagtgccaaacgggttatacgaggagaagctagaggagcagggccgcacgctgccacgctacgggctgtaaacccagtaacgccgttaagtaaagaagttgacggtataattgacgaccatgacgaagcgattaaatacacactaacttgcattgaaatagcaactacggctgtacttactacacgtttacatgcgtttgcaagtgactaggaggtaaaacctgcctaagctaggacaacgattgaaacaacgtttgcagcggcngcagctgtaaaagttggtaccactagcccagcaag

SEQ ID NO: 130853 - DNA, 328 bp, Glycine max
  Clone ID: PAT_MRT3847_89168C.1
gtcgaagcttcttaaaatttgctggataaacgagactgagaatgcattgcactggatatgaccatggtgaatgctaagggcaataactccaacgccaagactaatggtcttaaacaaaatgccaagaagatagtccgaattcatgtttctaaaaccaataaatctttcttcttctacctcaatcacgcatataaatacttagtccagggcaatgacgtctagctctctgcattgggcatggctagtccaacggttgtaatcatctctgacattttgaaaagcaacggctgggcatttgggaataatattacaacatccactgttgctg

SEQ ID NO: 130854 - DNA, 452 bp, Glycine max
  Clone ID: PAT_MRT3847_89169C.1
agcataattgatcttgaatctattaataactaagattttggggagatactttatggccccatgtcatagttgtataggactcattacatttaaggaaattttaaaggacctcctttgaactagaataatgagttcaagaccaaaaaggtttagggctttcaaaatttaatctgataaatacctgtttggataaatttcttaagaaagtatttttaggagagaaataaataaataaaaatgaaatgaatttcttcataagataaaattagctcaccattaactaatttacaaatatcctttcatctttcaaagaaattatgtgaaaatttctacaaattaattaatggagaattaatttcaacttataaaaaaatttattttattttttcttctcattttcttttcgtaaaagtgcttctagagaagcttatatccaaacagcaagtcgttta

SEQ ID NO: 130855 - DNA, 1022 bp, Glycine max
  Clone ID: PAT_MRT3847_8916C.1
cacgcgtccggacaaacccataagctctctgggatggcggatcacaaagttgcgatttttgtgtgattggactggatacaactcagcattgtgggtattgaagcaatgcatagagcgatctcgttcttcgttcaaccgcgatgcctccttctcataggtgttctctcaaaattcttgattctcgcattatcgggtaccaaatgggttgaagagaaagaagaacaacctgaaattacagacagagtattctttgatgttgatattgatggacaacgtttaggtaggattgtcattggattgtatggccaagttgtaccaaaaactgtggaaaattttagagctttgtgcacaggggagaaagggaagaatgccagtggtgtaaaacttcattacaaaggaatttcataggataatatcaggtttcatgattcagggcggagatattgttcatcatgatggtagaggatacgaatctatttatggtggcacctttcctgatgagaatttcaagataaaacattcacatgctgggtgtagtctctatgggaattcaggtcccgattacatggctcacagttttttattaccacagtgaagaccggttggttagatggagaacatggtgtgtttggcaaggttgtccaaggcatggattctgtgtttgcaattgaaggaggtgctggaacctccaatgggaaacccagaaagaaggtagtgattgcagactttggagagatacccaagagtcagtgggataaggaaaaatgaacttccttggtgaagcggcaataaattattcgccaagttaaaaatttgaattagatctttgttttatagtattaaatttcctctgtaaaaatgtttaggaaatctccccagtcaattccccctgtttccatgaaacagttttatgcattttattttttttaattggtaagtgttttttttttgaagtttttcaaaagtagttatatgttttccatgatggtttgtgcattatattaaattttggaactagaatc

SEQ ID NO: 130856 - DNA, 126 bp, Glycine max
  Clone ID: PAT_MRT3847_89170C.1
caagagccgatgaaagcttgggttcatgaccatgatcgtgatttgcgtgttggacatactgaaggtaagacttcgcgaacagagcttgttggaacctgcggacgatgtacaacttgcactctacag

SEQ ID NO: 130857 - DNA, 681 bp, Glycine max
  Clone ID: PAT_MRT3847_89171C.1
ccacgcgtccggatgaatggttaatttctgcttatgtgattcctcaggatattgttcctgcttccatcagctatagtgaggttgaccaactacctgaactaaatattggttttccttctgttttaacaaaattaaggtctaaaaggggttcaagggatcctgaaagtccatccaagcatgaaacaaaatcttcagtgctaaagaatagtgcatgtagcactaatgataagaataatttcaacaatgaacagcatgtggttgtggatgaccacaacaacactagagtagcatctaatcagggagagaatggatctcaagaagtagatcctcagattaggcaaaatagtacttcacaggatttgccagaaccacattcacaaagagataaaatgtataaagctgtttatagaagatcaagatctcatagggctgtgactaatttagctgacagtagtggccagggagaattcaattcaaatgggagaaacagtaatttcaatgctacagcaaacttcagcaatggcacaaatgaagctattcatacaaatggatccttagagttggaaccaaccacttgtgatccaaattatgagcggaataatctcaaagtgctgcaaggacctggaaattgtatggttaaaagtccacagaatgtttccacaagtggaggacaactcacag

SEQ ID NO: 130858 - DNA, 386 bp, Glycine max
  Clone ID: PAT_MRT3847_89172C.1
ggaagacccacgccgacgcacgcgtgcgagacgactacacaagggggctcaaggcgttttgtctcttggtataatcaaagacactcgtgagtaatataaaaggccctgttttcttaattgatacaatattgcctgtatagtaatgccaagcgttcgatatgtgccctttaccaatgaacactgactattgtgccccacattcggacgtgaaatgcgcaaattggaggcttgctgtggaaacacacaacatctttggctttgagaccattcctgaagagtgcgttctaacaacaaatgaatacattcttggcgaacaatattgattaaacttccaaacagtttagcaacaggcttactttttttccaaagaccttgaaattcattcc

SEQ ID NO: 130859 - DNA, 376 bp, Glycine max
  Clone ID: PAT_MRT3847_89173C.1
tctacagcactgtctcggtactactctgagctctggcgtatatgtcacccaccgctcttataatatcacgtgacacccgtgagcgttatgcaactctcactaccttcataaacggacactccaaagctccaccgccacaacagacccttttgaggcttgtttctttctcctgacatagcaaggtggcatggaatatcaccgagggttaactgttgcgaaggagcttgatggaagaaatcgcattgatcagaggggacctaatgacattgcgtgtctctgcctcttactgaacgccgatacgaatacctgttgcctgagcataacctgaactgcacagctcacctaatgtgctagcgaagccaacttctcaatctac

SEQ ID NO: 130860 - DNA, 415 bp, Glycine max
  Clone ID: PAT_MRT3847_89174C.1
cctacgcgttcggggattacaaggagcacgtaagcttttccaaacaagattgtttttaatgataagcttgtgttggctaacacacaagaattctttgatggaaattttccagtggattcttggttaccaaattttgtgaattgtctttatcctgtaagttaattaccttcagaagctgacgatgtaaatgttacatgtggtagcggacgtggtggattacccaccactgcttggattagttctgaagtttacaatcgatccttagacctcaacaaaaagattcggacagcactggataaaggaaagagaatgtgttttcttactagagttggtcctttttcagacactatactggctgtgctttttggcgttatgaatgatattttgcgatctaacgccactaaccctatgctga

SEQ ID NO: 130861 - DNA, 441 bp, Glycine max
  Clone ID: PAT_MRT3847_89175C.1
taaaaggcagaagttggtcaactgctttaatgatccatccaaggacgaatttgtttttctcttaagcagcaaggctggtggttgtggactcaatttgattggtggaaatcgacttgtcttgttcgatcctgattggaatccagcaaatgataaacaagctgcagcaagagtatggagggatggacagaagaaaagagtttatatttatagatttttgagtgccggaacaatagaagaaaaggtctaccagcgtcagatgtcaaaagaagggctgcaaaaggtcattcagcaggagcaaaccgatagccttgtggcacagggtaacttgctttcaacagagaatcttcgtgatttgtttacttttcatgagaacatcaagtcagagattcatgaaaacatgcaatgcagtcggggtcaaacaattgatggccctcgaagcac

SEQ ID NO: 130862 - DNA, 397 bp, Glycine max
  Clone ID: PAT_MRT3847_89176C.1
ttgttttttttttttttttctttctgtttttttgatatatgcacgttgtctcacacccggggattctttggactctattagggggggaataccacactgcccatatatgacggctcccccctaaattaagcatttcttaggaaaaaactaaaaccgcgctaactgactgtttctttaatgacccaccttatctttgagaattaccagaaaaccaactcaggcgagcgcccaattgtgcgggacatgaaacagaaatttgaacctcctttcttttattatcagcacgaactggaaacaaaataatgcccaccactctcttaaagattctacgagctacctgccctgaatgggggccccatttcctttcaaagaaacccatggcctgaaagtcttttaa

SEQ ID NO: 130863 - DNA, 748 bp, Glycine max
  unsure (1)..(748): unsure at all n locations
  Clone ID: PAT_MRT3847_89177C.1
gtgacaaattgagctggtgctggtatcacatgaagtctggttgccaatagcaacgatgtgtgtcgggtatttgagtttggctccaccaccagcgcaacgcaacgcaacgcaataacggtctcgcctgtgcaccaccactagaccgcgaaacaccggatcagattcatccatcatccagcgtcggtggttaacgccctctccgattccgattcctattcagcatgttcaaattcctgaaagaggtcgttggcggatctggcaccggcgtcaaggatctcccttacaccatcgccgaaccttacccttccgcttggggctcttggactcattctcgcggcacctccaaggatgacggttctcccgtctcggtgttctcactctctggctccaatgctcaggacggtcacttagctgccgcgcgcaacggcgtcaagcgtctccgaactgtcaggcatccgaatatcttgtcgtttcttcacagcgctgagattgagacttacgatgcgggttctcctaaggtcacgatatatattgtgaccgagcctgtgatgccgctatctgagaagatcaaggagttagggcttgaaggtacacaaagggatgaatattatgncttgggtcttcatcaaatagctaaagctgtgagcttcttgaaataatgatgtaaaaactgtcatggcaacatttgcatggctagtactgttgtcacaccaactttggactggaaagctcatgctttgggatgtct

SEQ ID NO: 130864 - DNA, 273 bp, Glycine max
  Clone ID: PAT_MRT3847_89178C.1
tattggtttgacaaaaactaatcacgagagaccacgcgtgggacatttacccgtgaaatacaccttggtgcctaaagcctcttttgcaaactctgaacttaggcacgggcgtcataacccaaaacacagcgatccaaagtgcacatctaccaccaggccgttcgacagccggggaactcaactgccaaaggtttgaacctgtatagggtgtagaaagcgatcggttaccttgaataggccgccgggaaaccggaaacgctaaaatcctatcag

SEQ ID NO: 130865 - DNA, 479 bp, Glycine max
  Clone ID: PAT_MRT3847_89179C.1
ctgcttgggggggggggggggcgtgtaaaacgagaaagaaaacgaagaagaggtgagggttataagggaggcagagtaagagctgaaaataggcatgagcgacaaaataacaagggatatcggcatttaacgtggggcgggatattgctcgtggctagctccaccgtgcgcccgtttatagccttcctaacaccgatggttggttcggtttcctcttcgatcaaggcgactgtctttttcgtcgtggcgttattacaatttcatttccagaattgccagagcttttctgtttcaaaagttttcgctaccttcaaatacttggtaatcctcttcgcccagcatttgcagacaattttgtcggcaatcccggtcgtatccggtttcttaaaactcgcctgatcgggagaattagcttcgtaactttcatcgtcttcggacctctaaggaatcctccgcttgcgcccttcgaactccctgcc

SEQ ID NO: 130866 - DNA, 232 bp, Glycine max
  Clone ID: PAT_MRT3847_8917C.1
taaatttaaaataaaaatctttttttggagggggaaatccttattatcacaagtcctaactatgcacaaagaaaactataaaggcctggaaaaaatgataaaaagaggtcccccgcctcattttttttttttgtgaaaaaggttcccaattaactccacaaacacagttttaggcagtttttttcacacaaaattatacctttttaaaaacaaaaaaatatttttctattgt

SEQ ID NO: 130867 - DNA, 641 bp, Glycine max
  Clone ID: PAT_MRT3847_89180C.1
ccggtccggattcccgggtcgacccacgcgtccgcacacgcctcaccggactcatgaactgacgcgagacctgggtcagaagaccaagcatattacacgagcctgttggcatgcatatatgccttattgcacaaggtcaacataatcttgcaccaagaacggtaaaactctgctaaggacatataactatgtgcctgtggcaccgacctgaataaatgaaacactaatcgaccttatcatacaggacttgattgattggtacaatgaactacattatgcatatccatgtaaccatcatacaccaaaatggacttatggaggatacctccgaaccaaagatattgataaccacacacccaactgaacataaacactgatctatcgctaactacgtctctataagacattatgaaggaatgacacacatagaggggatgcagagtgccacactctcaaagctagagcgtatgggtagcctcatgacacctgctaacgtggcaaagctcccaacactcttggatctatgagtaaatcgtctgcctcatgtagagctccaaactgacttacgctgacccacaacatctacatgttttctgagtgtgaccgaagttgaactactgtgctaagatttacaacacctt

SEQ ID NO: 130868 - DNA, 1181 bp, Glycine max
  Clone ID: PAT_MRT3847_89181C.1
tgtcacttcggacctcaaaacggtgcgttttggttcacaacaaaagccgttgcggcggcgcaggaagtcgtgcggtgcgagctgccgcagagtattcagaacaatccacacaaggctcgcggaataagcgccactgtgagtcacgtgcgggacgaggcaatgatcccttcggtggcgaaaattggcgggtacagagaagaaataaacagaggtaacaagaaaaagaacaagttagaactttgcgcctgtaccatggtgtggaaccaggcacgtgcgatgaaagagtgggttatgtaccacgcgtggctcggcgtggagaaatggtttatatacgataacaacagcgacgatgaaattgatcacgtggttcgcgagcttgaggtaaagggttacaatattaatagagttgcgtggccttggattaagagccaagaagcagggttttcgcattgtagcttgagggctaaggaggaatgtaagtgggttgggttctttgacgtggacgagtttttctacttcaacgaaaggaggcgaaatgctttgatatcaattgttggaaatttatcgaattcgattgcggaaataaggacggggtgtcttaatttcggaccttcgggattgaggactcaccctagaaatggagtgagcgtagggtacacgtgccggcttcggacgccggagaggcacaagtcgattattcggcctgatttgcttcatgttagtcttttgaatgtggtgcaccattttgaattaaaggagggttttagatcgcttaacatgcctcaatctgttgcggttataaaccactataagtaccaaatttgggaaatttttaaggccaagtttttcagaagggttgctacgtatgtggtggattggaaggaggatgcgaacataggatcaaaggacagagcgcctgggctaggaacagaagcaattgaaccgcgtgattggaggttgagattttgtgaggtttgggacactcgcctcagggattttcttctttctagttttgctgatcgcgaaacaggcttgttgccctgggaaaggtcttctgaataaatactcttctcttttttctattaaattatagtttaattgtttcatccaatctctaattctctataagttttggttcctgtccttataaactattaaaaaaaaaaaaaaaaaaaaaaaaa

SEQ ID NO: 130869 - DNA, 199 bp, Glycine max
  Clone ID: PAT_MRT3847_89182C.1
gtcgacccacgcgtccgattaagtagagcagtgttatgactgtaattcttagcaaaaattcgaaatctaagttcatttgggtaaattttctccattaactatgtataggagaaaaaaaatattgaacttctctgcaagttaaaataaacttatgcacctaagtgttttgggcaagttaaatgaaaaagattgctataca

SEQ ID NO: 130870 - DNA, 133 bp, Glycine max
  Clone ID: PAT_MRT3847_89183C.1
gaatcactccgatagggtaggaccacaaacactttctcggacaccgaggaaaaaagtagccattggggctgccagaggactgtctttccttcataacgccaaatcacaagtgatataccgtgatggtaaagca

SEQ ID NO: 130871 - DNA, 305 bp, Glycine max
  unsure (1)..(305): unsure at all n locations
  Clone ID: PAT_MRT3847_89184C.1
aacaaaccaaaangccttaataatgtcggcatttttataaattgtgcgtgggacatacaaaaaaaacattaatattaatgatttatatagttttagctctctcatcataccccacaatgacagtgagcaagtttttttcaaaatggtcacttagattattatctaggttctcaacatgaccttctcctctgacatatgcttgtaagtataaaccaagcatttcaaacatatcaagtcttccattcttaatttcctttacctttatcattgcagcttggtctggatcattattataccctaatttt

SEQ ID NO: 130872 - DNA, 811 bp, Glycine max
  Clone ID: PAT_MRT3847_89185C.1
gggccggaattaccggcgtcgacccacgcgtccgggcaacaagagtcacaagaccaaaaccaaaaaccctttttccttcacagtggtgctggtgggctcaacaggacacacactgaatggcctctcaccaccatcaccaccaccacacccctcctcctcccaccaccactcacaacagctgcagctgccacaacccttcttcttacacctgttgcataccccctccaccccaccacccttcttacacctgttgcacaccctcaccaccccaacaccaccaccttctacaagtcattgcatcactcctctctcaaccccaaccacaccctattcccattcccattccctcccaacaacactacacccaccaaaatctcaaccttcccactcaaaaccatcaccctcaacgccaacctcattccaccatgtcctccctcctccaccgcatcgaaaccctcgaatcctctctcaaccactacacccaccactccctccgccacgccgctgcgcgcctcatccaaacccattttcgctccctcctcgctcgcagatcaagaaccctatcccaactcaaacaccttgcttccatcaaatccacattcaacgctctcaagtcctcattttccagccatacccatgtcgatttcgcagccatttctcttaaagccatgaacttgctcctcgagctcgattccattcagggttgtgatccaatgattgtggatgggaaaaggtcgattagcagagatttggttcagtttttggactcagttgaagaagttgctttgaaaaacatgtactttatgttaaa

SEQ ID NO: 130873 - DNA, 139 bp, Glycine max
  Clone ID: PAT_MRT3847_89186C.1
ggtttttgttgccaaagggttttttggacagaaccaaaaaaaaggggttagtcgggaaaaactgggtccaacaagcgccgatgctaaaacatatatcagtggaacaatctgcacagatcaggaacaacctatagacaca

SEQ ID NO: 130874 - DNA, 840 bp, Glycine max
  unsure (1)..(840): unsure at all n locations
  Clone ID: PAT_MRT3847_89187C.1
aattcggctcgagcaaaaccaaaacccctttttcccctcacactggtgctggttggctctacacacactgaatggcctctcaccaccatcaccagcctcctccacccaccacccacagctgttgcagctgccacaacttttcttcttacacctgttgcacacctcctccaccctaccacccttctcacacctgttgcacacccccaccaccccaacaccaccaccaccttctgcaagccttttcatcactcctctctcaaccccaaccacaccttattcccatcccctcccagcaacactacaccaaatcctacacccatcaaaatctcaaactccccactcaaaaccaccaccttcaacacccacaccaacaccaaactcattccaccatctcctcactcctcgaccgcatcgaatccctcgaatcctctttcaaccactacacccaccactccctccgccacgccgccgcgcgcgtcatccaaactcatttccgctccttcctcgctcgcagatcaagaaccctggcccaactcaaacaccttgcttccatcaaatccacattcaacgctctcaaatcctccttttccaaccatacccatgtcgatttcgcagcgatttctcttaaagccatgaacttgctcctagaactcgattccattcagggttgtgatccgatgattgtggatgggaaaaggtcgattagcagagatttggttcagtttttggactcaatcgaagaggttgctttgaaaaaacatgtacttcatgtaaaagcnagaaagactggtggggtctgtcaagaaagtccaaaagaatagaaattcagatgatgatgag

SEQ ID NO: 130875 - DNA, 1886 bp, Glycine max
  Clone ID: PAT_MRT3847_89188C.1
aattcggctcgaggaaacacacacaaactcttctcctaccctaaatttccatgtattccaacacaagacagacactgatttatgtagatagataaccataaccataccatagcttacaaattaagctccgctcactctctttctctctagaatccatggcagccattggtctgaatggcgtaaaggttgggacgacgtcgtctcaggcgtaccttgaaggcaaggcagtgaaggagacgagagcgttgatggctgaactgtgtcgccatttctacacccttggatgggtgacagggacaggtggcagcatctccatgaaggtccacgatgactccatccccaggcctcaacagctcatactcatggccccttctggtgttcagaaagaaagaatggagccagaggacatgtatgtgttatcacacagtgggtctgtcttgtctgctccatctcctaaaccttggccgcacaagcctcctaagtgtagtgattgtgatccacttttcaagaaggcatatgaaatgcgtgatgctgcggctgttttccacagtcacggaatagagtcttgtctcgtaacaatgatcaatccattatcaaaggagtttcgaatcactcacatggaaatgataaaaggaatcaaggggcatggctattatgatgaacttgttgtccccataattgagaatacggcctacgagtatcagctcacggaatcttttgctaaagctattgaagactacccaaaagcaacagcagtgcttgttcgcaaccatggggtatttgtctggggagactcatggatcagtgctaaaacacagtctgagtgttaccattacctctttgatgctgctctcaaacttcatcaaatgggattggattggtcaactccaaatcacggtccaatacaaagtgcaagaaggggtctaagtattgctggggagtcaaatgtgtcagttaaagcaaggaaatctaatggtgacagtgatccattgccacgttgcgttgttcttgacattgaaggaactactactcccatatcatttgtttccgaggttctcttcccatatgcccgtgataatgttgggaggcatctatctctaacatatgatacccccgagaccaaagctgatatcaagttgcttcgttcccaagttcaaagtgaccttgaacaagggattgcaggtgctgtgcctatccctccagatgatgctgggaaacaggaagtcattgctgcacttgttgccaatgtggatgctatgattaaagctgatagaaagatcactgccttaaaagagttgcagggtcatatatggaaaactggctatgagaataatgaattggagggaatagtttatgatgatgtaccagaagctctagaaaagtggcacgccttgggtataaaggtatacatatattctagtggtagcagattggctcaaaggctaatatttggaaaaaccaaccatggggacctaagaaaatatttatctgggttttttgacactacagtggggaacaaaagagagacacgcagttatgttgaaatttctgagtcactcggtgttgaaaaaccatcagatattttatttgtcactgatgtatatcaagaagccacagctgcaacggctgcaggtttggaggtgataatttctattcgacctggaaatggacccctccctgacaatcatggcttcaagacaatcaaatccttctcggagatctaagaccaattgcagtcttctggaatgacattaaatgtgttatcattactaagaatagtgtaacgttcacttcttaattaaaataatgtaattaaaaaaaattaaaataatgtaatgtaatgtattttgcgttgagtttctccaagtttaagtttatctcctcct

SEQ ID NO: 130876 - DNA, 225 bp, Glycine max
  Clone ID: PAT_MRT3847_89189C.1
cgcctcccagacgacgagagggggagtgccaattttctctttctctttctctccttcaaaatcgtggtcgatttcgcctctttctttctcaactcccttagattctctccatcggggcttcaaaaatgcggatgagctgcaatgggggtccagttctcagaaaagggggcggtgagaattgcggcatcagaccctgtgtacaatggggcaaaagcccagaatctc

SEQ ID NO: 130877 - DNA, 228 bp, Glycine max
  Clone ID: PAT_MRT3847_8918C.1
caccttccatcatcacttacaatctatcgtctgtttaacacaacgaataccgtgtcttgcccaggtcacacgcgggctgatgacgacaacaatctcgtcttacaaggcatattccacattcttacttcacatgggcatagcactcacaaagttagacggccaatgaaaaccactgggtggcacaatctggagagtcttaaactcttctccattgcaccattcaccaaa

SEQ ID NO: 130878 - DNA, 537 bp, Glycine max
  Clone ID: PAT_MRT3847_89190C.1
gtggaagatcccgatctcatttcccagcccgcctttcccgtatcgtatgtcctccatttcacaaacacacaacacaacacaacaacacaaccctccctcagatcccaacgtacctgaaaccaaaatccacactcaccacaccaaaatccatcacattaacacaatcacaatcggacactccaattgaaattgaaaccgatcataagaaaaagaaaaaaaagtaatgtgatggattccccaccttcccaacacacgtggggaaggtcaacaacctccctttcctcttctctttccaaatcgaattctgattcaatccaaagcttgtcttcgattttgaacaaccctcacgctgccgacgccgcctcctgggccggctggtggtcctcctcatcctccgccgtcgccgtcgccgtccccgaattcgccatcatccccgcctccaaggccgcctcagatgtctcccgatccgacttcctcccctacctctcccctatctccgacgccttccaccgcttcgaggacatccgcaaccacgcc

SEQ ID NO: 130879 - DNA, 329 bp, Glycine max
  Clone ID: PAT_MRT3847_89191C.1
acaagaaaagacaatggttgatttgctaagcatattatatgggggaaaagaattacaatccaacccgttaaatgttttggttggggaaaaaaaaaagcgttaacccccacttaatgggttggccgaacaagccacgaaaagttttccggaaagaaaggaaggatcccaaaggggaccgggaacatgtggagtaaaactttttttttctttttccaaataattaaagatctacacagaccgcaatgcaaagccaaacggggatgacaacaacctaaactaagggttctccattttccttcccaaatttggcttaccctcaattttttatt

SEQ ID NO: 130880 - DNA, 298 bp, Glycine max
  unsure (1)..(298): unsure at all n locations
  Clone ID: PAT_MRT3847_89192C.1
atctttcgaagttcgtttgcgtgtgttgtgtggtcagtcaccgatggcagcaccacctggcgagggcacgtgccgattaccgattaacctcatcaagcttcttgcttcattnggcgancagcggtgttnggaaagagttgtgctgncttttgacggattttntggatgggttgacctattcancaaacccagtctcttnatcccaacccaacccatttggggccatgtggaattntnttaaaggatgaaagtaaancccattttggaaaacttttggaattgnggccaaaaancggnc

SEQ ID NO: 130881 - DNA, 236 bp, Glycine max
  Clone ID: PAT_MRT3847_89193C.1
cttgacgtagaggagaatgattacaaaactgcatatagttatctctctgaagcttttgagtctttcaatactcttgatgagcccaaggctgaagttggcctggcatagatgttgttatgcgagattatggtgagtcaagctgatgatgtggcttgaatcatattttctatagctggcgtgcaatatcttgggcctgatttggatgctatgaaagttattgcagatgctgattctaa

SEQ ID NO: 130882 - DNA, 308 bp, Glycine max
  Clone ID: PAT_MRT3847_89194C.1
gagagagaccgaatgtaatgtattaaattatatggattagttttacaacccctgcaagcccatatgggtgaaaactacagagagcttgcttggagttgtacatgatcctgcccagagagcccagagggcttaacaactgagaaaaaactccgaattgcttaaacatgagaaaaaagacgagaaaccgagcctatgattgaaaataagagtttagcattctgtttatgaaagagctaacgcggaaacttggctaccatgtcttccttttcgtgcaactggaaacggtttacatcgatttgtttgaagcc

SEQ ID NO: 130883 - DNA, 491 bp, Glycine max
  Clone ID: PAT_MRT3847_89195C.1
cagaaacttccaccgcaaggagaccccggacggcacctacttgctgcccttccaccaccgccaccagccaccgccgccgccgttcgcgccgtactaccgtgcgccggctggctacctgcacatgacgggaccgcagcacgccacgctggcgcttccctccacgtcaggagggggtgggacccagtcccctagggaggaccagggagacctgtcggacccaccaacgagtggtgccaccactcacggtgggtccagcagcaagaagcgtttcaggacaaaattcacccagcagcagaaggacaagatgctggccttcgcggagaaacttggctggaggattcaaaagcacgacgagggtgtcgtgcaggagttctgctcggaaaccggcgttcagcgtcatgtccttaaggtgtggatgcataacaacaagcacaccttgggtaaaaagccctagaaggacaaaaaattccaccccccttccctctctatat

SEQ ID NO: 130884 - DNA, 1074 bp, Glycine max
  Clone ID: PAT_MRT3847_89196C.1
ccgtcttcggatccggtccggcgacggggtcgacccacgcgtccgccaccaatggacctaagactaacagctttgagcgagaagttagctgaaacttttagcaaggccactggtgctacatgctccccggaagatctgacttgtttagctaaattttctcaacattttggtgccactaatatagagcattctttatgcaagtttatagaacttactcaaaagagccaggatgttgcccccctgagcaaagaaacaaccttgcactcatgtgatgtgaccaaagatgatgcaaacgaggctgttaaaaacctgcaggtttccaaaccattaccttcagatacaccagttaagtatggtgtttcaccagcaaaagcggcccaagttgagagacacagttcaacagaaagtgaggaatcttctaaatctagtgatgaggaccaaagatctgccgagagaagtcgttctctagtaagatctgcaacacccagaaggtcagcatccccaatgcgaagggtccaaataggaagaactggaccccgcaatgctgctgcattaactatcaagagcctcaattattttcctggcagagagaggataactgtacaagatgctgctgaaaatgactttgaatggggaagtatctgaactacccaataaaaagtcagaaagtgatgtaacgctaataacttcgtacaagcccccatcagtctttttgaaagcgcaaagggttcacaaactacagatattcagaagagaagtcattagcaactatttctggcagtaattatttttctgtcagggagaggccaatatcgtttagagatgctgctggaaatcacgttgacggggaagcacaatttcaacaaatgcagcaactactcgataagaggaaagttgaaatgcccaaaagtgtgagtgcaagtaaaaaaagttctccaaggatgccccaaaattctcttagaaaatcaactccacctgcaaattccacaaaggaaacctctagacctttaactacgaaaaaaatatcatctagaacatcacccatgcctgctacacgtaagtcttggtcagcaa

SEQ ID NO: 130885 - DNA, 236 bp, Glycine max
  Clone ID: PAT_MRT3847_89197C.1
ctcgcacttgactttgtgttccctgccatgcccactccatcgaaaggggtggatttcgcaggtggcagagggggtcattacaccacgcatgactcttaatcaccatgccaaggttgccccaggctacgtatgagacaccctaagaagcttatctataaactacgtaaaacgatcgcatcattgtactcttatttatgatcataaaatatatacaggtaccttctaaatctggcaaa

SEQ ID NO: 130886 - DNA, 385 bp, Glycine max
  Clone ID: PAT_MRT3847_89198C.1
ttaaaataaatgattttaatggggttggggatattattacattgtgaatgattatttattaattactatttaaaaatttattttaaaatttacgttactactagatctattatcaaaataaacatctctcccaaatttacacttttttaaaattctactaatttacaaccaaacatcctataaaatataaaaatttttaaatactatttcccaaattttatttcactggtttttccattcattttaaaaatcaaaaaatattccctgcgacaaaataaaaaccaaatcttccccctttttttgggtaaactatttttgaccccccaattttttttttttttccggacaaaaattttaaaaaagtacaatttttctccaaaatatt

SEQ ID NO: 130887 - DNA, 327 bp, Glycine max
  Clone ID: PAT_MRT3847_89199C.1
tctactacctcactattcctctaccgcccttttttttttttttttttacataagccataattattatagggccgtccttcaacaggggacaaactatccatctaacacaatccccaagcatgcataaccttcataacacaaatatattaattagtcaaactcaaacataccaaatacttcccacaattaaagttctctaaacatttttcaaaagcatatttaaaccctacctattcaataccaacctacaattctcctttttagaatttcacaactcttcccataacaatacacaattcccttatatctttaaactcataagtttat

SEQ ID NO: 130888 - DNA, 266 bp, Glycine max
  Clone ID: PAT_MRT3847_8919C.1
ctcgagccgattcggctcgagctcagagagataaagttgaaaatggtccattgaagcttgttgctccttccacgggattaattccactagtaacagctgtggatgctacacacccaaggattcaagtcttgtatagtgcaaaatctggggattccattgtgataaaatctgtttctgaccctgcacctaagaagagggcattccatatgagtgcacatgaggattgactggatctggatgatgatgcttatctaaatagaactttc

SEQ ID NO: 130889 - DNA, 899 bp, Glycine max
  Clone ID: PAT_MRT3847_891C.1
tacggctgcgagaagacgacagaagggggcaattggcaagtgataataatagcaaactaattatacgtttcttttcttccccgtctcaactcaattccattctcttctctgagtctcaacctaattccccattcatccatctttacgtgtttgttggattccatggccaaaagctccttcaagcttgaacatcccttggaaagaagacaggctgagtctgctcgcattagagacaagtatcctgatagaatacctgtgattgttgagaaagcggaaagaagtgacatcccagacatcgataagaagaagtaccttgtcccagcggatttgactgttggtcagtttgtttatgttgtccgtaaaaggattaaggtcagtgcggagaaggctatttttgtttttatctacaacactctacctccaactgccgctttgatgtcttctatttatgaggaaaataaggacgatgatgggtttctttacatgacatacagtggagagaacactttcggttctcgctagggtcaaatttaataatatatgagatcctctgtaaatagatgctgcaagatgtaaactttctgctgtcgatagtcgatgcctatcctgtttattgcttatggtttacgtatctattgagcagatattttgctgctttgattatgtgcattctctttacattatggatttcaatatatgaatttagattttatgctctcagttgaatttttttttttttagtggcgggctgaaatttgtaattttgttttcttttggtagtaagcactctaataaatgagaggggcgctactgatacaaatgataataataaaatggagtaatccccagtgacttactgtgaaagaaaaaattattaaaataataactgaatatttaat

SEQ ID NO: 130890 - DNA, 426 bp, Glycine max
  Clone ID: PAT_MRT3847_89200C.1
gtcggattgaaattttcacaaggaggaaggtgttacagattgttcaactcaggtgcgatcctggaacaactatgatggtctgatgggtggccatactttgaatgcactggagcatgatagtttaaagtgtacaataccaatgtgattctggcattggaagtcaaatcgacaaccataaacaatatgagtacatatgggtctcaatcctgttatttcaggttctggccttttggtcaccattcattactgcatgatcacagcatactgggcggaatcaaatggcaacagtgaaaacaccattgaattttgattctagcaagcaaagcttttgtcatgattctatagaccatgtccgcgaaagaatcttaatggacaaaaatggagattggattacacttatacaaaattctgcaattagaaacttgt

SEQ ID NO: 130891 - DNA, 346 bp, Glycine max
  unsure (1)..(346): unsure at all n locations
  Clone ID: PAT_MRT3847_89201C.1
antctnangcncgcgcacgnaattcggaattcngcntcnagccgncancatncanaatntacgttgatnangatcgacgcnagataanatctngcantggccnagncttgtaanccanctttcancctnnatancaatgaagtcacaccangcngngacgaagnnngtggttagctcttnanccgctgagaacccgggattgcngnggcganggtaggtntcgctnaattgcgnagngggncnncntgtnctcaggngngtggcttgtnggntggnctgcagccccctnangnnantgccagcagttcnagcnttcngnatntcattnacggnncnanatncactn

SEQ ID NO: 130892 - DNA, 296 bp, Glycine max
  Clone ID: PAT_MRT3847_89202C.1
ggacggggcacccaaatttttgggaaaaaaaaaaaaaatatgccccgcccgggggaaaaaaaaagggaaaatacaagggtaaaacacacctccccgggaaggttttgagggggccaaaaaaaaggcccccccccaaaaaaaaaaaaagggaagaatatttaagggcgcgctctccctaaagggaaaataagctttcaaccattggggggggaccaaaagcttttgggggaggtttgtttgtttggggggcggggttaaaaaaaagggccttaaaaacctgggacattaaaccaccc

SEQ ID NO: 130893 - DNA, 539 bp, Glycine max
  Clone ID: PAT_MRT3847_89203C.1
gaagacatagaaaactttggttgtttagagaatacatagaaaaggaatgattctgggtttcttgatatctatcaagacatcgaatattctggtcagagagaagccactgatgatgcatcgtataataaggagccaactgaagtcattagagggactcaagctgatcctagttgtgaggaagtaaaagccgaggaggctggctagtccacagaaaccagctcaagctatgatccagatgaaactgtgaagttgaacaaaactcaggtagctgatacaactattgataatgacgaaactctgaacgtaaatccagaggttcattcatgtgatgtgcacgatgatacgatggtagcgagtaatgctttatttcaacatctagagaagatatgaagaaacagatcctgttcacgagacaaacgatttccatgagaaacataatgcaggtgagacttcttacttattcaaattgcccctgacttaatggggcggtcgatcaaatgcaatattttttgaaacagagaccttcaatgcatgcttca

SEQ ID NO: 130894 - DNA, 686 bp, Glycine max
  Clone ID: PAT_MRT3847_89204C.1
tgtgccaaaaatttccagaagaatgatgatgaaaggtgttgaatctaagaatgacattcttgttgctagttaccacactgaaccggaaactattgcctttagtcgtgatcaggtcaatggaggtgataatagtgatgtgatggttttcaggcctcaaaactcttatattgaagatggaaaaagtttatatgctgcctggtgccgatgcactgataatctagcccttgacaagtcctccgatgaattgaatgagaagctctgggatgatggaagctctgaagatgatgatggcgagggagtaattgacaagccctcagcatatgaaatattagaagtatggaaggaaatgagagaggaggatgggagtttgttacactctgaactgaacttgcatgtggctagtgattgcaagttgttttagtgtttacatatgctaggtgaactgtaaacagggagaggaagatgcaacaattttcggctcgagttagcttgttctgatctagtccagtgacatttggtacgatgttataattggaacaagggaacagttagaacttgtaaatgttagcaaattttcccttgtcacaatttttttgcatgagattgtaataatggtatcgtacagtgattcaaatatatttttagtctcttgattaaatatataataaattttagatttatttctt

SEQ ID NO: 130895 - DNA, 367 bp, Glycine max
  Clone ID: PAT_MRT3847_89205C.1
ggctcgagaatcggcaaacagataaagaaccctcaaccacacaacaacaacaacaaaggaaaagccctcgaaaagattttggcgaaccaatttctcactacagaaaatatcatcctcttcttctttacattagttttggataaaacattccgctgatactgaattgtattctctcttgacttcgctgattttagacctttgtttttttctgcttcgttgttttcagggagaaagggatcggtgtaataaatgagagtgcattcggtttgggtcttggactccggactcgaatcttcgatgcctatctgtttttggttctctggcgcctattttgctattctgaaaataaggtttacgggagcgttcc

SEQ ID NO: 130896 - DNA, 279 bp, Glycine max
  Clone ID: PAT_MRT3847_89206C.1
gtgatatctgtggtctacacgttagaaaggcttacacgactatttctatttcctaacgatgaggggctgagactatcaacagatcggatgcgattgcctatatcagccattaccttggtgtacctttaccgtgggtatgatttttggatctctagaaaccaatccatttgataacagagtcctcacaatgactattgccctaatctggacgaatcatctaccagctcatgacatttacctagcgtccatgatgcagttcaattatactgaatcacctgg

SEQ ID NO: 130897 - DNA, 229 bp, Glycine max
  Clone ID: PAT_MRT3847_89207C.1
gcactagaataatgtgtagagatctattgcgccttgttactaggacagaaactatgacgagcttagaaagccgcggctgatgttaagttcaattgttcactgcagcataagcgccgtagacagtcggacacctagatatgagacatatgcgatacaggcgttattattgggaggacggataaaatgcggagtatcccttgagggaccttttatctccatgagacctagg

SEQ ID NO: 130898 - DNA, 494 bp, Glycine max
  Clone ID: PAT_MRT3847_89208C.1
ccacgcgtccggaagctccaattcttgtttgactactgcacaaacaacacctatggaactatatctaagctttatccttgaagttttatgctatttacaaagaaattccctaattgattgcattggggagttgttagttgttggcttattgctactaccaatgctctgattggaagctgagaagattgggaagtgggggttcatgtttatcattgaagtgttttttgtgtattcaatatgatgatgatgcatctcagaatttttggtagtaatttgcaatattagaactcccctgttgtttgattttattctctctctggaaagaaaggtttggctccggaggatgttcttctgtttgttagctcaggaaattgggaagaagttcgatctatgtatgcttcaaaatgttttgaagatagaaacaatcgaaattgctgatgaaatcattgctaattgtttgggattttagttgtttttttttcccatcacattta

SEQ ID NO: 130899 - DNA, 1795 bp, Glycine max
  unsure (1)..(1795): unsure at all n locations
  Clone ID: PAT_MRT3847_89209C.1
tacggctgcgagaagacgacagaagggaggaacagtaagtgacaggcgactgagccctggtggattgcctcgaaagaaatttttagttcatcgcgaccggattttggaatctgctgcacaaatgatggacctgcatgccagtaataaagtggttcttgaggtggaatatgatgaagaagtgggcactggtcttggaccaactttggaattttataccttggtgtgccaggagttccagaaatctggcttggccatgtggagagaagatgattcttcctttaccctcaagacaaacttgcaggctgaggaaataggagttcattccttttatggactctttcctcgtccatggtcatcaatgcaagatacatctggtggcatacagttctctgaagtaacaaagaattttttccttctaggccaagttgttgctaaagcacttcaagatggaaggatcttagatcttcacttctcaaaagctttctataaacttattcttggaaaggaactttctctctacgacatacaatccntttgatcctgggcttggtaaggtgctacaagagtttcaagcattagttatgaggaagaaatttatggaatctgtcagtggagggaattccgagttgcagtatggactaagctttcgagatatgagcattgaagatctttgtcttgattttactcttcctgggtttcctgatattgttcttgcttcagggaccgatcataccatggtaaatatgagaaacttggaggattatgtttctcttattgtcgatgcaactgtgaggtctggagtttcaagacaagtggaagcttttaaatctggctttaaccaggttttctccattgatcatcttcggattttcaatgaagaagaacttgagcgaatgctttgtggagagtatgactcttgggctgtcaacgagtttggagatcacattaagtttgatcatgggtatactgctagcagtcctcccattgttaatttgttggagattgtccgagagtttgataatggacagcgacgagcatttctgcagtttgtgacgggcgcacctcgccttcctccgggaggattggcatctctcaatccgaagttaactattgtccgaaagcattgtagcaaccgggcagacacagacctacctagcgtgatgacttgtgcaaattatctcaagctgcctccgtactcatcaaaagaaaggatgaaagagaagctcttgtatgccataacagagggtcaaggatctttccacctttcataattgcactctcttaactggtccataattgaagaattatgaagatgtaattattagggtaattgatagttatgtagataagggtgctagtggcttgctggcagtggtctaaatgagtttattgcagtggtggtcacacgagtcactcggcgatgaagcttctatcttcactgactacaaaaaattgttgggggtgtgtacatagcacgctgatagtttagttgattgacttgtatcagctgtacagacacggagggcactttttaagggtcacgcttgatatttgatgtacagtatttgtacaggaaccttaatcattaaaattttagtcgtttacttgcataatgatagtggtttcttatcttttgcttaagttgcatctgagatggttttaaattgtagtatttgattctccttctaaatataaaagctttgtatctagtcataacatcaccatgtgctgaggtgtgttacacaaattttgccactttgcaattttacaaacttagcacattggggttttttta

SEQ ID NO: 130900 - DNA, 393 bp, Glycine max
  unsure (1)..(393): unsure at all n locations
  Clone ID: PAT_MRT3847_8920C.1
agctccgggtggggctcgaggctcatcatctggaatttatttggcagttatggattattcatcatggattaacggttcctttgaacgcaacacgcatctacatananttcacgaagaacttcccgtaagtataaacgtacatatagcgtccaagatcttctgtggaatgtttccctcagaataataattaattctttcttgtgtcctgattaaaaaaaaaatctttctttcttgtgtgttcatttcagaaaaagcaggtggaaaacaatttttttcattggatttggaggtgaagaaatcttctgtaaaacaagaggttagttctgcctgccaattctccttttttcaagcggttcttccaattttgttcttgtatccaaaattatggtccat

SEQ ID NO: 130901 - DNA, 555 bp, Glycine max
  Clone ID: PAT_MRT3847_89210C.1
ggctcgagagagaaatgagcattaatgaaattgctcaaggaacatacaattccgcagaagggtttgggtttttgagtaaattgttaattttaatcagtacagggtccgggctgtaataaaattggaaatttatgctgctcacgtcatcgacacttgggtgatgcttgtaaattttcagtattaagttcaagtccaaagatggtcgaatgtaaaactcttgttaagctatgtcagagttacgttcatttaacggtgaacgtaaaagcttgaattgactccagtcacgtttacagctttggaaagtgggaaattgctttggaaagtgtgaaacggggttcctaattggttcccaaacacactcttacaggttagcttggatggttatattcgagattcaaatgagtcctctgcatatgtgtgtgtcgcggatagccatcacccgcgagggatttttctcctccaaagtgagatgagtgcatatgagagggtacaactgttaatcacaagctgagaggctccgatgggtatacatgtacatatatagcatactatcat

SEQ ID NO: 130902 - DNA, 341 bp, Glycine max
  Clone ID: PAT_MRT3847_89211C.1
cccacgcgtccgggaactcctcagggtacatgaaaagcaaattgcataggaagagttggctagctggtcttggttgcaaatgctattgttctgacaagaattctgttgatattagtgaccatgcaggtgaaatcagtttcagcaaaaattctagtcatggaaaaacaacttcaagaaatatgttcaatgctgatccagaggctaatcattcagttaaagttactaggcctcacgcagccgaaatctcgattaacaaagatgtttacttccaaaggccagagaagttaggggtgggattgagcaaagagaacagtttagcactctcaagtttgaattctaac

SEQ ID NO: 130903 - DNA, 1113 bp, Glycine max
  Clone ID: PAT_MRT3847_89212C.1
accatggctacgctgattgctccttccaaccactctcctgtggaagatgccgaatctctccggaaggctgtcaaaggttggggagctgatggaaaagccatcatagcaatactaggccatagaaatgccacccaaaggaccctaatcagagaagcataccagaatctcttccaagaggatctcatcaaacgccttgagtctgagctctctggtgactttgagagggcaatgtaccgttggatattggaacctgcagaacgtgaggctttgttggccaatatagccattaagagtgctgacaaaaactaccaagtgattgtggaaatttcctgtgtcctttcacctgaagagctttttgctgtgaggcgtgcctaccacaacaaatacaagcgttgcttggaggaagatgtggccgctaataccagtggccatcttcgccagctattggtagggttggttagctcatttctctatgggggcagtgaaaccaatgcaaaattggcacaatctgaagctgatgctcttccttggacgctcaaagacaagaataaaagtaatgacgaaattattaggatccttactactaggagcaagacccaacttgtggctactttcaatcgctacagggatgatcatggcattgccatcactaagaaattgtccgatgaaggatctgatgaatttcataaggcagcaaatttagccattagttgcatcaatgatcataagaagtactacgaaaaggttcttcgcaatgccatggaacatcttggaactgctgaggatgccctcacacgtgtgattgtcaccagggctgagaaggacctgaaggagatcaaagaggtgtattacaagagaaacagtgttcaccttgagcatgcagtggccaaggaaacttctggagactacaagaagttcctcctctctttgatggggaaagaagagtaacctattttcattttaaggatacatgtaattggtttctgccaagtttgtgactgaagctgttatctaagtttgtttctctcaatgactcccttaacaccctgtccagccgttgttatctttgtcgtatgagggaacttgaagatatcaattaatgaagaaagttcc

SEQ ID NO: 130904 - DNA, 490 bp, Glycine max
  Clone ID: PAT_MRT3847_89213C.1
ccacgcgtccgggcgcaggtgaaggcctttcccggccggagtactgcacctaatttggattctttggatgtgtccgggacagaagtcctggctgagcagtccggaggagattcagagaatcttgataaccaagatgctgtgaattcggtgctgagtaaatttcgtgatttgaatcttgatgagaatttggacttagttgccgaagatcacgaagggtgaggggatagtctctttatttcatcagattaaggatcttgagaaacaagtcaaccagcgaaaagattgggctcattagaaggcaatgcacgcggcaagaaagctaaacagtgatttgactgagctcacaatggtgcggatggaaagagaggagactctaaaattgaagaaaggggaaccagaacttggggacaccacccttgaagagactcttagagatggagaaagcctctgagaaagccacggggcaactggaccctgcgaatgcggctgt

SEQ ID NO: 130905 - DNA, 273 bp, Glycine max
  Clone ID: PAT_MRT3847_89214C.1
gggcagcacggcaaccagggcacgtcgttcgaggaagagggcgacggctcgtcccgcctcgtgaccgagggcacgggcgaagaaggcacgtacaagccgtccgagcacggtggcaagcgcgaggacgggcagcccgacaagcgcgtcagctcggagcacggctttggcggcaacaaggatctcgcttccgaggcgggcaagaagggtggttcagcgagctacgacaatgggggcttgacgcagtaacaatgtacatgctattcgtctacagtg

SEQ ID NO: 130906 - DNA, 610 bp, Glycine max
  Clone ID: PAT_MRT3847_89215C.1
ccaaaaggtcatagctttttctccatgacattaggagggtagctgtgcgagctgcagttgcaatgggtgaggagggcgatgtggttgtggttgctggcaaaggccatgaaacatatcaagtagaaggtgataaaaaggaattctttgatgatcgagaagagtgccgagaggcattgcagtatgttgatgagcttcaccaagctggaatagatacaagtgaatttccatggcggttaccagagagtcattgatacaaaaggctgttgtgataaatattggattattctaagtacaattcgagccagtatgaagaaaagggcctttccgtggtggggagggcttttctttgcaggagcttggaaagcgcatgcccggaaaaattaggcttcagattccggccaaaaattggacggtcggcttagtgcagtttatccaaccgtttatttttgtttatacaaatgtagtcataagttttcttctccctttctctgctgtccttttccactgtaattctacgtgtcagcttcctctttctttgctttgtagaactaattcagtctttattcttataatatggataaaaaataacaaattcagtctttattcttag

SEQ ID NO: 130907 - DNA, 2693 bp, Glycine max
  Clone ID: PAT_MRT3847_89216C.1
gccgagcccaaatgtgtatcacgcgtccgaggcgatagcccgtctgagataatctcgacttttgttgaatagaaaaaaaattctaaaacccaaacaaagcccttgactctactccccagtggcagtgtctttgatggcgttatcatttcttggtgttccgcactttggtcacctgcaactacatcatccactgcaaaattgcaacactttcgcaaaccttgtacttgtagttctacacccttcttccgtctcctttcatatccctttcttcacgttcgggctccgcgggccattgggcccgatgggaagttctacccaagcccagccgacgacgacccaccggaagctgacgaggattcctcccacggcttctccaccttccagcaaatccagcgccaagcagaacgcgcgcgccaaatcgaagaagacgactacaagaagaaccagtccacgtacctcgccgccatcgccgacgtcgaagacgcccccgacaacgcccccttcgactcctccgaggatgacctctttggcgaaatcgacaaagctttagctctcaagcgcaaagaattcgtctcccaaggccttctccaacccaatccccccaagcaggatcaactccccgtcgccgccgtcgacgagctccaaccggacgagctcggcgacttggatggaaatcgaacgcctccagggactcaccggtgacggtaacggaagcatcaaccgattctccgtttgaattccattttgacagttatggtaaaagtaaggttaggattgtagaagggaaatttaagattgactttggctgagcttcttgacgagagtaaggtcgtgccggtgtcggtttccggtgatttggagattgaaatcaccggaattcagcacgattcgaggattgttagttctggtgatttgtttgtgtgttgtgtggggagaaaaaccgatgggcatttgtttctgtctgaggctgataagagaggtgccgttgcggttgtggctagtaaagagattgatattgaggacactttggggtgcaaggctttggttattgtggaagatactaatgctgttcttcctgctttggctgcctcgttttttaaacaaccttccaccaaaatggctgtgatcgggataactgggacttatggcaaaacgaccaccacctgcttgattaaaagtttgtatgagtcgatggggctgcgaaccgggatgttaaactcggttgcttcttatgtccatggggacaataagttggagttgggtaatgcagtgccggatgctgttttggttcagaatttgatggccaagatgattcacaatggaactgaggtggtggtcatggaggcgggtgctcatgggttgggggatgggaagtatgatgaggttgactttgatattgcggtcttcactaatttgagtcaggaggaggagggagatatagatgcgcaggctaagttgttctcgagaatggtggatccggagaggcataggaaggttgttaacattgatgatccgaatgcacccttttttgtgtcgcaggggaaccgggaagttcctgttgtgacatttgcgatggagaataaggaggcagatgttcatcccttgaagtttgagctttctttgtttgagacgcaggtgttggttaatactcccacggggatactggagatttcgtccggtttgcttgggaagcataatatttacaacatccttgctgctgtggcagttgggattgctgttggggcacccttggaggacattgttagagggattgaagaggttgatgcatttcctgggaggtgtgagttgattgatgaggagcaagcatttggggtgatagtggactatgccagtactcctgatgcattgtctagattgcttgattctgtaagagagcttggacctcgcagggttataactgtcattggatgctgtggtgagggcgacagggggaagaggcctgtgatgaccaagatagcaacagataaaagtgaagtgaccatgctgacatctgacaatcccaagaatgaagatccattggatatattggatgatatgttagctggggtaggatggacgatgcaggactacctgaaatatggagagaatgactattatccaccacttcctaatggtcatagactttttctccatgacattaggagggtagctgtgcgagctgcagttgcaatgggagaggagggtgatatggttgtggttgctggcaaaggccatgaaacatatcaagtagaaggtgataagaaggaattctttgatgatcgagaagagtgccgagaggcattgcagtatgttgatgagcttcaccaagctggaatagatacaagtgaatttccatggcggttaccagagagccattgatacaaaaggctgttgtgataaatattggattgttatcttcgagcaagtatgaagaaaagggcctttccgtggttagagagcttttctttgcaggagcttggaaagcgcaagccccaaaaattaggcgtcagattccagccaaaaataggacggtcggcttagtacagtttatccaaccatttatttttgtttatacaaatgtagtcataagttttcttctcccattctccgttgtccttttctactgtaattctacgtcttctaactaaattatggagagtaatgcaatagtcagcttcctctttcaaaaaaaa

SEQ ID NO: 130908 - DNA, 490 bp, Glycine max
  Clone ID: PAT_MRT3847_89217C.1
tcgagttttttttttttttttttggaattggaatatatatataattaatattaagattccattccattaatgggaatggcttcctttctagtaacattttgttggtgggtgttgccattcatcaatggcattgcagattccctagggaaggggattttgcaaagtgtgtgtgggtgtgcgtgagagagaggtgggaaattagatacaaagatgcatttaatggtttggtcgtgcaagcgtggaagaaagaagtgtgtagtttggaattcaaagatgcgcttgttattggtgaaagagaagagaatggtggtgggacattgcttcagagcttggaagaagaaaaaaagcatagtctcagagcagatatcaatagggtattgaaagactttgaagtttgagctgtttcttcttattataatggggtctctaagtcaagctactcatcttggccagcatgcctcgcttcttcagtttacacgttacttttggt

SEQ ID NO: 130909 - DNA, 196 bp, Glycine max
  unsure (1)..(196): unsure at all n locations
  Clone ID: PAT_MRT3847_89218C.1
gaagaagaagggagcgagctcgtgatcganttcgcgnanccggttggaaggttaaattatggacaattgcntccncnggangaaantncctcaggngagggntaaggtcgggggnaaggcngggngactcggggatncnttaccgncancnggggncnaangcaaatcccngtaaccccggaagaaatttcctaaa

SEQ ID NO: 130910 - DNA, 817 bp, Glycine max
  Clone ID: PAT_MRT3847_89219C.1
attcctcccacaatacttgcactgtgcgcaacgctactcacccttcagagtaaaccgtagcgtgttagaataggacttgatatctccttgagctcaagttctcactcttcatacacgactccctacatccacatttaaattcctctccgaaacacaatctcaacatgtataaacgtaacacgatcttattggtcgtattagctgctttctgtttgttatcaagctcttacgcttgctccggagacaacgaatgtgggtcagaagaatattgctcggacactggctcctgccaatattctcgaggactgccgctcaagctgttctatccctacggtgacaccaacggcgactctcgtttagatgccgtcgacgacggtaaagaaagcgtttccctttctgttcccgtaatctacaacaaccgcaaatacgacacactctacattggcgtcaatggtctcatttcattcggagattcggccaacgaaatcgaagatgtgccttttgactcgcctgctccttctgctttccctgttcctaatcagaaatttgttgctccctactggctcgacttggatgccagcggtgaaatcagcgacggcaatgctatctacttccgtgagactcaagatggcgacgctatcgcccgcgcttcaaagatcgttcgtgaagcgttttcaagcgaatctgatatgaaagactgggaagctacctccgttactgttgttacttggtaccgcgtcggcactttcccctctcgtgtcgacaattgaacacctttcaagcgatcgttgctaccgatggcacaagtccttcactc

SEQ ID NO: 130911 - DNA, 494 bp, Glycine max
  unsure (1)..(494): unsure at all n locations
  Clone ID: PAT_MRT3847_8921C.1
ctatttcttcacaatccagcgagcccacagncaagaagggcgcttccaactccatcgctccccctactccgcggcacccattttcacgataccaatccatgaaaaatagaaagccaaaaccccaccacatccctagaaacacattcaggggaaaccaaaacaatccaacaccaaaccctaatacccagggagaacccccacaaatggtaggacataggaggaacggtctaacaggcccaagagggccaagaggcgctgttactcttaacaacaacaacccttttgccatagcagccccaaaaacccctccggaccaaaacacgtgcgggccaccagacctacccgcaggggaaaaacccaccaaaggggggcccccagcttccaaaatcacagatctcaagggccccccctcaaaccaaccctggagggaaagacacaccgcacaattgggcaaacgaagagaaactggccaaaaacaaaaaaccccggacccc

SEQ ID NO: 130912 - DNA, 1301 bp, Glycine max
  Clone ID: PAT_MRT3847_89220C.1
aaaaacccttctctcttttctctctctctctctcttttagtaactcccctagtttgttacaaatatttgtccatagtgtgtgcaatgctgaaatcaggcatgggaattcaggagagaaagaaggtgaagaaacctgcacaagccagttccagaaaggggtgtatgagagggaaaggtggccctgagaatgctacttgcacctacaaaggtgtgaggcaaagaacctggggaaaatgggttgctgaaatacgtgaacccaaccgtggtgcaaggctctggcttggaacctttgacaccgctcgtgaggctgctttggcctatgatgctgctgccagaaagctttatggacctgatgcaaaactcaacctcccagaactctctgtgccttatgctgctggagtgatgaatccttctcacatgcaacaacagcaacagcaacagcaacaacctcaggttccccaaatgatgatgcaacaacaacagcctctcgtgcaccctacctttgaccttgtcaatgtcactcctcattctgatttcaacaacaacagcatcaacatcctcaacaacaaccccgtggtctcttccatggcttcttcttttcttgcagatgcagcagcacccgtgtataccagctgcgactctattgtctctcttccgttgtctgcaaccaattacaccaccaacaacacggtgccgatggaaatggacggctactactattcctccatcgctgtggagagcaaggaggacgacatgtttcgccccttctggggtccaacaatggacgacaccatgcctgtgtctgatgagtccatctggactgaagctgctatgtctcttgattatcctattgttggaggaggaggcgggttcgtaacaaccgaaaatctctttggagaagctactgcgtggactccctgcaaactccttctttctgcatgtaaattgtcatcggatgaaagagacagacagtatagcaataaagtattatgtctgtgatagtgaatatcttacatcatcatctggattatcacctttcatcatctcctggacagtctttgatatatacataaaagagatatgtgtatatataaaagtgtgtacaaaactatggggattaattgggggtgtcaagtatatagatttatgattagccagtatatatattacttagatgataatatatatttacatcttatagttaaaaactttgtctggaggacgtcgtggagtagcatggcatggatcatctattgtattgctagaatattattataaaaatatattattagtagtaaaaa

SEQ ID NO: 130913 - DNA, 462 bp, Glycine max
  Clone ID: PAT_MRT3847_89221C.1
ctgcgagaagacgacagaaggggtgcaagcaacttgttaggcaccgcccttgattcagttgacttgtccatactcacaggtctgctactttaatgactcttatagcaaagtccttgagttgagtgatactagttcagcttcccatgatgcaaggagggatcaggaaaatatacctccagaaaaaaatgcacaagaaactacaccaggtaaagcagcagaaaccagagatgttttgagagatagccacataactatccctgagaccccatctccagatcagccaggtgatgcagcatatggggtggttaaaaaggagcttggaatttgcaatgacatgggaccaagaaagagagcgtccagaatagtagggaatagcaaaaattctgacaatgcaagactgcaaaatggtgtcattttatttggaagtggggagagatcaggttcaccttactcagatatctg

SEQ ID NO: 130914 - DNA, 146 bp, Glycine max
  Clone ID: PAT_MRT3847_89222C.1
gtgaacaggtaatttctttttaaataacagttactgaacgttcataaaaaagtgcgaagcgcgatggaaaacaccgatccattttaaaccaaagaaatagcccagccctgaacgctaaaacgggaaatgaggctcaaacccagaaa

SEQ ID NO: 130915 - DNA, 181 bp, Glycine max
  Clone ID: PAT_MRT3847_89223C.1
tcttccagtgtggctaggctttggagcttcatttaaaaaaggcattgacgaaaatgttaacaatctctgtctgcggaatgagacgtgcaaacaatggccttgctgtagggccacactacatttggtggcaatggtgtttgccggaggagattctaaacttgccgctctgaatgatcgactc

SEQ ID NO: 130916 - DNA, 232 bp, Glycine max
  unsure (1)..(232): unsure at all n locations
  Clone ID: PAT_MRT3847_89224C.1
ttctacaccacgcactactacctattttatcaacttctagaaaagttccgaaacacatttaacagtcctgctttttcacatacagaatttcccccatttctggtaatttaatacatctacccccccttatatttaccactttctattctttagggggaatcccttccangtcttagaaaatacccttccacccttgcctacctaaaaagggccctgtccattccactcactc

SEQ ID NO: 130917 - DNA, 527 bp, Glycine max
  unsure (1)..(527): unsure at all n locations
  Clone ID: PAT_MRT3847_89225C.1
cgttgacagctttttagaaggtgttgcgtcaagaggtatgagaggaatatagtgtatttttcagccttgtnaaaaaaaaaaaaaaaaaaaaaaaaaaaaaaaaaaaaaaaaaaaaaaaaaaaaaaagaaaaaaaaaagaaaaaaaaaaaaaaaaaaatttaaaaaaaaaaaaaaaaaggggggccgccaaaaaagaagttgggaaaccggaaaaaaaattggggacgggacccggggggggaaaaaattttccaaaaaggaaggggaaaaaaaagggggggaaaaaagggaaaaaaggggttccgggggaaaatggtaatcgggtaaaaatcccaaaaaaaaaaaaagcgggaagaaaaaatggaaaaacgggggggcccaaaaggggaaccaaaccaaaataaatgggggggggcaaaagggcggttttaaaggggaaaaaccggggggcccacctaataaaaaaaatcgcacaacccgggggaaaagagggtttgcatattggccccaagaggggtttttttttt

SEQ ID NO: 130918 - DNA, 823 bp, Glycine max
  unsure (1)..(823): unsure at all n locations
  Clone ID: PAT_MRT3847_89226C.1
gcaggtgtagcttgagatgacattgagtaaataggaatcaaactcctttttggtttaatttccagatttttaaaaagaaaataggataagcaaatgggcactgtttttagatcacgcccaccactccacatcgtctaggtgctgaacacaaaaccaatatacagaaatttttttctcactaaagccaaataaaagaaacataagatgatgtacaatgctaaaagtatatgtttgtcgttaattagataccctgctaacttaaccatattcaaacggcaaaccaaattgatatttaacataaaaactgaacggaaagtgctttttcatttgatactgaaccagattaccagcccatcagtgttcttctaactttgtcaacaatctgagttcttgcttggcttctggtcaatggaaagtcacggctttcctccaacaaaaatctatacacttcccattgacgttcttgtgttgaatgtctaacaacttcagccgagaaaatgcctactcccaacgcttttaaagtcaacgtaacatcatagaatacacggggtctcccctttccactcagctccacaggattagcaaccagaagttctgtgtctggaccccggttcactatcgtcacccgcaacggatgaagcatctcttcttttaagcatgaacacaaggttttctggctttcaggatctatgatctttttcccatcgttgtgctggacaaacaagtctatattccgaaagcctttcacacttgaagaaaatcgcccaaaagtgggcttaatatcagagtctttaaaaatnctcataatgtcataacacaagcc

SEQ ID NO: 130919 - DNA, 357 bp, Glycine max
  Clone ID: PAT_MRT3847_89227C.1
ggctcgtgctctgatctcggctattgtgtgctccggcactacaccggcccccactaggaccatactgtttgcgactagcggctcatgcttcccagtgcgcttgccgcaatcctcgtaatcatggttctatgacatgcattcgcagccatgctgagggctcgtactaccgttgatggtgatgaacctgtcctgcacgcggaatgggtcagatggcctgatgctatctgcatgggaaggcttcaatggcgtcggatccataaggacagcatctgcacgcactgtgctaagagacacccgtcatgatcacactgctagcaatgaccatatagctgccgaccgtgaagagcttgatctgac

SEQ ID NO: 130920 - DNA, 1554 bp, Glycine max
  unsure (1)..(1554): unsure at all n locations
  Clone ID: PAT_MRT3847_89228C.1
ggtcttgatcactagttttcttctactaattatatacattgaaggatttaattttgataagggttttgtttaattcaatggctattatccattgctcaccttaacttggacataagcacacaactttccaacattttttccttgagcttaagactcaattcaatgttgatgccttacatcacatttctgcctgcagccacacacacttatgggatggttggatttatgttacatttatgttgaacgtaaaagtttgagtttgctttggtcacacatgtttatagctttggaatgggagaaattgtttgccaaagtgtaaatgggaaacgtaaggtgttcacacacttagcattcacccaaaaccatggtagcaagacactcttgtgttggcaatgttacatgaattttatttagagataaaataatgacaggcaataattggatcataagtctcaacaaataacctcaatcaaggacagattgaggaggagacaaacaattttttcatgaattcactactaagaatacaaagttcaatgaaaatatatctgtaaggtgccaaattttcatgaactcgttattcggaggagtaataagttcaagaaattttacatgatgtgtgtgctaaaagatttgtctgaataaaaactcaaggtcttttatcatcctttgtcctaacaactattaatttgctacgcctaactctattattacataggtgcaagctaccccttctgtcgtcttctcgctgtgtatggtatacaaatttttttagccattggattcatcaaagtgcataatattatcatgaaccttcccacatcataacatttattccacagtgccttgtcttctgcatctttcatgatgtcttcagcaatagtgtctctgacgaatgacatagctttgaatgctgtagcagattcatctctgtcactgtcacatatttgtcttcatcgtggctttgccgttgtcgcaactttgcctcagcttatcctggtgccgaattatcaattgttatccactgacatagcttggggaacatgcaaacttcataacaaattattcctagaaagttgaatctgtgagcatttgcaacaaacttattccccaaattaatcaagcctgtgaggaaaaggtggagtgatggcatcctcatcaggcttattaccactcaacccattactttcgtcacgcatattcatgtccacaacaacttcattttctcttatttcgttggctccggtattggtataaatagttttggtgtcactaacgggacaacggctcctggcactccaattccttcgccgccaatctagctctcggtcttcctcttggttacgcacgagccttcaccttcttagttgtcggatccaatgctttctagtcacggccacgcccctgtcgcactccattatgaagctctggcattctctaaacccatgcaatcaattcacaattttggtaacctctttcgtcatacgcactatagaataccgatgcacaattcatgactgaaattcgaagaatgaaacttgacaatcctcggng

SEQ ID NO: 130921 - DNA, 696 bp, Glycine max
  Clone ID: PAT_MRT3847_89229C.1
ccacgcgtccgaattaatagaaaaataaaaaactaaattaaacataaataataaaggagaggataaaaactaatctaacctttttttagtaatgattatattttttaaattcatcccatcttatttgatttcaatactatttactttgaaagttacgtagtatatctgcacaagaatcgcctaacttctgacatcatcaaacaatatattaatgtcatgattgttaaatttttttgaatctattacaaacacaagacacctgcatggtagcataactgaaaccagtccaggttcaatgcacataaatcataatatctctttattgtacgtgtacgtaatcttcaacttcaaaattgtatttgcaccacataaaactttctcttgtttttttttaaataaaagttaaaataaattgcgtcttgagagcacgcactgttaaacattgaactcacttctttataagatgactcttattcttatctactaaactgatatttgttgacatataaaacttttctaacttgtacacttcttagcttataagtttcacactatatttagaaagataaaaaatattttatcatattaaatattgcaaacatctatttagttgtgtagagttttagttttgaaactaacaggcatccactagaggtttcctttcaacttctgttacccacagtacatttcttgggg

SEQ ID NO: 130922 - DNA, 723 bp, Glycine max
  Clone ID: PAT_MRT3847_8922C.1
atctcatatggaaatctcactggtcagattccaagttcagtgggaaacttgtcctctttggtcactttggaccttagcttcaatgctttatcaggaagcattccggaagaaataggaatgctatctaagctgcagttgctgttgctgaattcaaattccttgcagggtggaattccaaccacaattggaaactgttcaaggtttttttttgtggaaattttcgacaaccagctctctggaatgatacctggagaaataggccaattgagggctcttgaaacactaagagcaggaggaaatccaggtattcatggagaaattccaatgcagatatcagactgcaaggcccttgtttttctgggacttgcggttaccggggtttctggggagattccaccaagtataggagagcttaagaatctcaagacactttcagtctacacagcacaactcacaggtcatatcccagcagagattcagaactgctcagccttggaggatttgtttctgtatgaaaatcagctctctggaagtattccttatgaattgcgctccgtgcaaagcctcaggagggtgcttgctgtgggaagaacaatttaactggcaccattccagaaagtcttgggaactgtacaaatctcaaggttatagatttctctttgaattctctggggggtcagatacctgtgagtctcagtagtctactcctgttggaggagtttc

SEQ ID NO: 130923 - DNA, 284 bp, Glycine max
  unsure (1)..(284): unsure at all n locations
  Clone ID: PAT_MRT3847_89230C.1
gaagccnggacccacagagcggcgcacaccaactttatttcaaaccacgcaccaaaggggggacgcttaaacccagggggcaggacacaagcacacaccaggggacagcaacaaggaacagcacgcacaaaagcgacacaagaggaaacacacaagcacaacaagagaaaagcacccggagccacaaagagcgaaccgagcaaacccaaacgaaggcaggccaaagacccccaggacgcaaaggacgcaccaggggaagcaaaggccgccgacgaacccaaaag

SEQ ID NO: 130924 - DNA, 115 bp, Glycine max
  unsure (1)..(115): unsure at all n locations
  Clone ID: PAT_MRT3847_89231C.1
ggaacagctctcttcctcggttaagggantcganagcttggcaacaagcaatgaacgcatcggtttcctgagtggctcctttgcagagaattatctgacagaggagctcaacatt

SEQ ID NO: 130925 - DNA, 524 bp, Glycine max
  unsure (1)..(524): unsure at all n locations
  Clone ID: PAT_MRT3847_89232C.1
acctaatttctctctncaancnncatcctctcgatccgncttttaattttccagtcaagtgccctacactacatcacatcaaattagtagtaatttcaagaaagatcatggaaattgcgtacaactactacttgcctgaacttcaggaaattgaggatccaaccttctttgatcaataccagatggattcatttgcttgtccacttgatgactttgactttgagtctttctccggttcccctgagagcaactcctcatatcatttcaactccgaaagcacaccaaattgtttcccagctgaaagtcatgatcagtcttttacccctgcaagaccaaccaagaggctcaagaacacttgtgccagtgacttcatttcccacaaggtttctgctttttcatcctcccaacttatttcctttgggcacttcaatgccccgtcaccatcacatgcttcccagcaatttcaaaacctggacttcgatgagaaagcgtctagtgagaacatggattttgcagctttcgtt

SEQ ID NO: 130926 - DNA, 470 bp, Glycine max
  Clone ID: PAT_MRT3847_89233C.1
gcgagaagacgacagacgggaagttaattagtattcaacattttttatattaaaaatgcgattaatagatttagtaattaatcgtgtaaattcacttagaagaaaatgtagttaattaagaaaagtgggggtgtaaattatgattaaattaatatggggatgactaatgcacacatgtgtttttcaataacataaatatttaaataaaaaatcaataaacttctatgtgtcagtaaatcaattttgagatagtattatcggcaaagagcaaacacgctccgtgccattggttctcattcatttttttggtaaatagcactagtttatagtcttgctagtgatgtttggtttctttagagtaatacgtacctttttaatactatgtggacactctttctcctctctaataaacattaaattatcaagtagtttttatctatcataacattaaattaatgtatatattttaa

SEQ ID NO: 130927 - DNA, 403 bp, Glycine max
  Clone ID: PAT_MRT3847_89234C.1
gaccattggaggcctaactaaggtgggtttattgttgagcaggctatccaaaccaggaggttgttcattttagatcaccaggactatttaattccttatttggggaaaataaatccaaatcccacaaagccttttgctccaggacccatatttttttggaaggatgatggacctttgccaccattggccatggagtaaagaaggccccatcctaagggtgaagaatatggtcctgttagcgaattttacgtccctgccagcgaaggaggggaagctattatttggttattggcaaaggctatggttgttgtaaatgatgcttgctcccatcaaataattagccattggctaaacacttatgcaattgtggggccatttgtcattccaccaattaggcaactgg

SEQ ID NO: 130928 - DNA, 512 bp, Glycine max
  Clone ID: PAT_MRT3847_89235C.1
cctcgtgcccctcgtgccgaattcggcacgaggcaagatggcaagggtggatctctccaggattagtctccgaccattcaagatgagtgatgttgacgatttcttgatatgggcaggggatgatcaagtgactcgaaacctccgatggaagacgtgtggttcaagggaagaggctctggccttcataagggatgtttgcatacctcacccatggcgtagatcaatctgccttgatgaccgttccatcggctttgtttcggtgtatccttggtcgggcgatgaaaggtgcaaggccgacataggctatgctattgggaccaactactggggccaagggatagctaccaaagcactcatgactgcagtgcctcaagtcttcaaggactttaacgaattgctaaggttgcaggcttttgttgatgttgagaacaaggcttctcagagggtgttggaaaaggctgggttccttagagagggtgtcctcagaaagtacacttatctttaagggggtt

SEQ ID NO: 130929 - DNA, 557 bp, Glycine max
  unsure (1)..(557): unsure at all n locations
  Clone ID: PAT_MRT3847_89236C.1
ttctttctcttacatgcaaggaggctgtttcgagcacaaaacgctatgttcgagtcccttggnatcactggtactcaactatggaacaganacgacgttagtcagatggtacaactttgtctccagnaaagcactacaaaattaaacgggggtagggtatttgatgcctaggcagcgacttggtacaacaggtgcacaggactaatacacctgacgctatcgtgaggctggtcaaacataacctcagagaggaaaagcttaaaacaaaagggtctgggacaaagttggggagccaaactttgtgcctctccgatttaagattaaaaaaaactctaccgggataaaatctataccctcaagaaaattgcttcaagtaggaaactgcctgtggcctgactaccaaaccttgggctggcagagacccaccctccgttaatttgtaggcctgaatgagcctgatgacattggcaacgctacctctcctgtcggacctatggactcggagctcgccatcggtgctgaccaaacgctcttgcaaaaagatgactaacacggcg

SEQ ID NO: 130930 - DNA, 490 bp, Glycine max
  Clone ID: PAT_MRT3847_89237C.1
ctcgagccgaatcggctcacggctgcgagaagacgacagaagggggagtcgaatatccatcactcactcacacattggttttctctctctgactgtcaccctcatccattaacagtctccatcactctcctctccctcctaattacaatttaataaatccacctcactcattcatcccttcttcactcttccaaaaccattgaatcactccaatggatcctcctctcatcagcgactccacattctcccccgcttactccctcgccgagatttggcctggaatgccccattttcccgatcactctcacctcaccgccaccgctcccaccaagggaaaggactccaccgccgccgacgaggtcctctcctccaccaccactgccaacctatccaataatgattctggtagcaacaaacggatgaagggaggagggtccagttttgaaaacgatggtttcatagcggaggcagaagcaagttctgtgggcgg

SEQ ID NO: 130931 - DNA, 1358 bp, Glycine max
  unsure (1)..(1358): unsure at all n locations
  Clone ID: PAT_MRT3847_89238C.1
tccggattacnggtcgaccacgcgtccgcgatttgcactaaaatttgggtggaacacaacttcaaagggtaacctgagcctgaggagattccgtttgtgtgcaagtgcaatggacgcagcagcaacagtaggtagggtttccaatggcggcggcgtagttcgcttcccgttatctgcatcgagcgctttattcatgcagaaaggagacatcaccaaatggtccatcgatggttccaccgacgcaattgtaaatcctgctaacgagagaatgcttggtggtggtggtgctgatggagctatacatagagctgcaggcccacaacttgttgaagcatgccgcactgtacctgaaattaggcctggagttcggtgccccacaggggaagccaggatcacacctggttttatgctgcctgcttctcatgttattcacactgttggcccaatatacagtgctgatattaatcctgctgcctctctggcaagtgcttacaggaatactttgatggttgcgaaagaaaacaacattcagtatatagcattcccagccatatcatgtggtgtctatggatacccttatgatgaagctgctacagtggcaatttctaccatcaaagaatttccaaatgactttaaggaggtccactttgttctattctcccctgatatttatgacatttggtcaaacaaggtggaggagttgttgaaagattaatatgctgacgcattaaggagcttctggtatgggataatgcggtgtggaagtctggtttgtgcagtatatggaatattatgcagcaattttgttttttttcttcagatccgtgtgttgctacggtctaaggataaatgagatctatggtgtgtgtgtggttgggcggggggttatgatgggttgtggactaatttttatgtgtagctgagggtgtatagttgcaatttttttaagggtactgtgctttgaaaatattctgtactcgttgttaaacagagttacgaaattctgtttttcctttaaaaaaaatgttttaaattagggtatagatttattattactttccaaaaaattatagtatgagtagtgtgattatgttttggggggttttaagtcaagacgaggtttgtggaaacaaaattacatggaaaaaaacccaagtcaaggattgatatggaaaccactagcacgacacaaggtttgcgtgaggtcgtagatagcaccacacaaggccgtattttgttttgtaggagtaagaggatttgatgaggaatagaggcttgaataactatattagaataaaaacagaaatgtaatctaataattttatatgcagtcacattgtttaagataaggacaaaaa

SEQ ID NO: 130932 - DNA, 715 bp, Glycine max
  unsure (1)..(715): unsure at all n locations
  Clone ID: PAT_MRT3847_89239C.1
attcccggngtcgacccacgcgtccggttgcttccaccgtcgccgagcatatctccgattgaactaggagatatttctatggtgcctaaacgatcatatttgaagaacatagccgagaaaagtgtggatgatgacgagaccatgactggtggagtctctacttctcaagtacatgtgatctagatgtagatgggagcttcagtgcagatcgagatgttgtacaatcgcatatacctccggctgatttatcgtacgcttgtgtgctgcgacagatctgtgctacccttatttgttgagtctctttcacttgctttgtccgcgaatgcggagccacattacactgtcgtacacatagctacgtgcctggctctaggtcagaacattccaatgggcatgctgcgacaagaaatgatagatgatggcgactgtaaaagctattgaaggcgaggtgaagcctgacctaagttgctcaatgatggagggtctggtgaccagggtctcgtcacatttgcaatctgcgggaccattgcgtgctgcgggagtaaagatcagggaggctgtagcgccgatcgatagagagcaaggtggatgagaatactaggaggagaatggcattactctgcaagcgattattacatcgactgaaatggtgattatgttgcgcaatcacgggaagcttgatgaagagatggtaggaggtgctacgaagttctta

SEQ ID NO: 130933 - DNA, 529 bp, Glycine max
  unsure (1)..(529): unsure at all n locations
  Clone ID: PAT_MRT3847_8923C.1
gtaaggaataccatttttatgtaattttaacctatttaactgaaacaaaaaaaataaaataattaaaaggggggagaaagggaaaaaaaaaaataaaaaaagaatgagtatcaagaggaagaaaaaactttgggatgaagcaacgcgagggaaaccgccaactaaaaaacatgaaagagttacataatttgggggggttagttgaatgaactgtaacattgacaaggagggggggatcgggaaagatgcaatatagcaaacaaagagggcgttcaagaagcagatagaccaaaaaaaggattctacatccgatcaggaatgaccataataagggagaaggcccccatacaacatggcgctgtcatatcaaaggatagggctcatttctgggctgaatacccaaattccccggaagaagaatgctcccatctttggacanaanggtagctggttgcaatgctgtgttacattgcataaagcctcagaacaccccatgtgctatttggaaaggaaaaaaggagctcccccc

SEQ ID NO: 130934 - DNA, 276 bp, Glycine max
  unsure (1)..(276): unsure at all n locations
  Clone ID: PAT_MRT3847_89240C.1
aattctttatctctatataatgacctaatcttatacctcatccaccaantaatggcaagagtcattcaaaccataaccccatactctacactctaactatccccacacatccctaccaccgttcatatcaacttactttaacaaataaaaacctacccactcactctacaccctatcacatatcaacaaatgtggaagagatcataaataactctcataactcatacaccgcacatcctaccatcggtcattacttttctctcttgaacaaaccat

SEQ ID NO: 130935 - DNA, 205 bp, Glycine max
  Clone ID: PAT_MRT3847_89241C.1
ggctcgagcggaggtgttgaaatccaactttttactgtgtgttggggtggatgcgcgctctcagtctaggtgaagcaggatgtgcaccggtccaacacagttgaaaacgagggagatcctggacgtcacgggagggctagggggcgaccagatcggatcaacagcctggtgagtggtcgacgacgagctcgggatacacccgacg

SEQ ID NO: 130936 - DNA, 804 bp, Glycine max
  Clone ID: PAT_MRT3847_89242C.1
ctctatttgatatactcttttaagtgaggcacatgtccaaaccatattgggcacgaatctactatcttttcctcagcaggcattagttctcatcccaacagcactcatgaatcatgatattcttggcccattatcacctcatattcaatgccaccataaaacatcattaatattatgttagtgtatcatagataaactctgaagcactcatccacccagattgaatcttttgaatttacgtctccctttgtttcaccatttctttgtattatagaaccgagatacctaaactttgtgacatggtatcattggtatctccaagcctgtacaagggtcggtcttgctgaactgcaatatcatgtacttctttactctgcttaaaaagaagacttgtgattctgaagcttcctatcaatccttttatcttatataagttccataagatgagtttgtgaagcatgctcttgtcagttccaattactttgttatttctaatgcactgtgattccaaatactttttaattgacagctgtgtctagtcagtaaacggaaaataatttgctattctttctagtttaaagcacagtagtcaatagtgaatagcagtgtggagcagccggcctaaaaaacactatagtggatagcggtcgtcccgctattttaaaccctgaatagatatgatattacacaatgtatatatgctgaaaatgaacagagaagaaaaagatgggttttcactcttcataaatgctggagattggctgggaaactcaccaggaaaaagatgggtcactgatggaaaat

SEQ ID NO: 130937 - DNA, 247 bp, Glycine max
  Clone ID: PAT_MRT3847_89243C.1
tctcgagccgattcggctcgaggagcggtaatatggtgttccacaactgaatctcaactccactgttctgattctgaatgaatctgcttctgctgtctctgcacggaacacaaaaacataaaaagttcattttcacaatcacggtcgcttcctacgactatcgaattcgcgtcagcctcaattctcatggagtttgggattgatgcctccattaatggtgagacagtaggaaatgctactatagtgc

SEQ ID NO: 130938 - DNA, 638 bp, Glycine max
  Clone ID: PAT_MRT3847_89244C.1
gatcatagctgtacactgctacaacttatctctgaaacttgtacatatgaccctgaagcatcccaactgtgtagtcgcctccaacggcttcttagcgacccacttggaaaacaaacccctcactaaattcaggagatcaacaactaaaactgctgtcccaaatgtcagaactctgtattcagctgcacgaacgtttgacaaatactgaatacaagtagatgataagggaagctagtgagttttatcagtaggtgttcaaattgttgggccttgtttaatatattttctgcaatcccgatttttgcatactctagtttttcttcccaccttacacctctatctcttatttttccatcacatctcccttattaatcactttctttcgttatctcctccctcccaaattgcaggtgtgaaaaagtcttcgcattttctttgatgtacttgtagtaaatgtaatttttttaagtcataccatttttcacgggttgacagtttactaggtggcattgtatctatttcctattattgagagtgggttgaaatgtgtagctagtgaatcaatttagtgcaggtcttgtataaatcttgtgaagtgagacttcaaaataaacaaatccatgtgtagattttttttc

SEQ ID NO: 130939 - DNA, 714 bp, Glycine max
  Clone ID: PAT_MRT3847_89245C.1
gtagaatccacagaagaatagaatctctaataaaaagaatatagagggcaagggatagggagagggataacagaagtttaattgctgtacagcatggattctgcagataaagctgtaaagattcgagctgttgctgttggtgttatagtctcagctgagaaaaccagtatttcggtcatgagtacagcatgctatgaaataatgaggaagcggaaggtgcgacctgttgggttcttgccttgggctacatttgcaggcagtattggaacttgtacaagcctgcttttgtatggtgatgggatcgagtgtgctgttgagtctctccctgctgccccctccattgctagtttgggtcgtgggattcagcatctacatgaggcatctcaagcagtgaggcgaatggaaggaagtagaatccaagcatcaatagaatctctaataaaaagaatatagaaggcaagggattgatagagggataatagaaatcttttttgctgtacagttgtgattttcttcataaagtgatgaaaatctgattggtaagagttcaagaaattcttctgtatatatttttctcttatagaaacagtcattataggctgcttataatatttcttagctttatatatatgatgaagcatataatcctgtattccaattagagtagagacatgaatgactaaaaaaaggaagttcctttttcttttcctaaaa

SEQ ID NO: 130940 - DNA, 413 bp, Glycine max
  Clone ID: PAT_MRT3847_89246C.1
ccctcctcctttctcttttggcggggaccgtgtttttcaaaaggatctcatttatttgccaagcattattaaacaataagagttttttttggcccctatttgcccctggtaagaaatttaaaaattggcaccccccaaggttcaaggttataaaccattatcctcgccaaaattctccatctcaaaagctatttttctctcaaatattctttactttaacccaaatagaaattttgccaaaaagattgctggctccctttccaggatcactttgttttacaatagaccttccaacccctatagctttaaccccaccttcctgaacataggccaatatcccccgggggaaaaaaaccaaattcccccaccataattatgcctctctcggggattattttgccctcgctcttcct

SEQ ID NO: 130941 - DNA, 271 bp, Glycine max
  Clone ID: PAT_MRT3847_89247C.1
gaaaagacgatagtgacttatgtacatattcacaatggatcattaacgcaacttacataaggaatggtgagggaatagatactacccatggctctaccggatgctcagacataacagaactaactggaaattctgtaagtgaattaattagtatgcccagaaagataactggtgcacattatgttcaactggtaaccatattgcatgatgtatttgacgctgacttcaatgctggcggagctcagatcataatcgatagcgcatatatatg

SEQ ID NO: 130942 - DNA, 395 bp, Glycine max
  Clone ID: PAT_MRT3847_89248C.1
aaagcaaaggaggagggtttttgaatttataggaaatacaaccccttacgaacgattggaaccccattataggggaaagggtcaacaaacatttttataaaaaatggggtgtttgaagcctttattaaatatgcgtttatacatttcaaaaaaacgaacaaaaatttttggatttttacaaaaaaaaggttttgacattgtttttaaaaaatgtgggccccctctaccatggatcaagaaaactggtctttgtaaaatggttgccaggaaaaccctgggaagacccaatggaaaaattttttttttaaaattttgggctttaaggggggtttataaaaaacaaagggtggaaaatggttttgatacccctaaaaataaaggggggggtttttttt

SEQ ID NO: 130943 - DNA, 1489 bp, Glycine max
  Clone ID: PAT_MRT3847_89249C.1
aagacaattgtaacactcattttaagtccttaaggattgcgttatttggagagaaaattaacttgttcaaattcttaattaccctgtggaattatagggtccaccaagattgagttgaacaactctattatttttttaactattggatatgctattaagatccattttgcacatcaactagagagtttttttattattttcttatataaatttaaattgtgctacaagtgaagagttggaaacaaaagatggcaggtttgggaatatggatgggtttcgttagcctgtgtcttctgtctgtatcagtatcaggtctgctccaacgcctagagcaccctgtcaaagctgatggctcacttagccttatggtcattggagactggggaaggaaaggaacatacaaccaatctcaagttgccactcagatgggaagggttgctgcaaagttaaatatcgactttgtgatatccactggagacaatttctacgatgatggattgactggtatagatgaccctgcatttgaaatttccttctcaaaaatctacactgccaagagcctccaaaagcaatggtatagtgtgttgggcaaccatgactacaggggtgatgttgaagctcaattgaatccaatccttcagaaaattgatcctagatggatctgccaaagatcatttattgttgatactgaaattgctgagttcttcttcattgattcaacaccttttgtggacaagtattttcttaagccaaaggaccacaagtatgactggagaggagtgcttccaagggaaaaatatttatcaaagctcttgaaggatctggaaatagcattgaaggattctactgccaagtggaagattgttgtggggcatcatcctgtaagaagcataggacatcatcggtgacaccaaagagctcataagaccatccttctggaaattcttggggaaaataatgtggatatgtacattaatgggcatgaccattgcttggaacacataagtagcagaagcagccaaatccaattcttaaccagtggtggaggttcaaaggcatggaaaggagacatggataaagataagaaagatgggatcaagttttactatgatggacaaggatttatgtccgtggagctggaagaaaccaatgccaaagttgtttatttcgatatttatgggaaagttttgcatgttgtgaatctgcccaaggggttaggtacttctgtctctgccatatagaagatgttttcgtgtttcagtggttgcaaaaggaaacgatagttatgtttttgcatccattaattattccacaaaacaaaaccaacgctctgtctttaactcctttgttttattccatattaatgaagtgcggagatggctgctattgtattatatatgtctccaattaatttttaatgtgaggactgaatcactttcttaacgcctaaaaaaaaaaaaaaaaaaaaaaaaaaaaaaaaaaaaaaagg

SEQ ID NO: 130944 - DNA, 470 bp, Glycine max
  Clone ID: PAT_MRT3847_8924C.1
ttttatagctcgatagcgcgcgcaacaaaccaaagacctcatcagacatataaactcacactcctatcaccacctctatcacaagtctaatctgatcactactctctgctctcaagaacataacataagacgaacgaaatggcgagacgatcatacgaagaagccatatgcgcgacgaccaagctaatcatcgagaaagccgacctgaggggcgtttccgccgcaaagagcaagcaaacgacggcggagctagaaaccgacaccgcaaacaggtcgacgccgtttaacccacaacagaggactacgaccgggttcggacacttcatgaacgagaaattccagaagaacccccaattatatggataacttgccaaaggccacaatccaaaggttatggcggttgattgctcagactctcgagactgcccatcccacattctggattttaatccaggtgaggcctttgtggt

SEQ ID NO: 130945 - DNA, 928 bp, Glycine max
  Clone ID: PAT_MRT3847_89250C.1
cgaggggaaacaaccacgtgtggactatgtcatacaaagtaggcattacagattgtgaaatgcaactatggagacgtatggagaatggtgacatcaaggctttgctcttgttactccacagcgaatcaacctgctataaactcgatccaaataatcatgtttcggtccttgattttcgtttggacgtaaccactgtagatggaaaagatgatctgttgtttgtcgacagcaaagcaacttaccgtaacaacaaattatgcttccaactaactaagtccatttatggagacggcagcgtcacgcaaaccagtgttttcttgtatgggatgggacacaaagctggccttgttgttctccaaaggcactataatggtagcgctcaggatgaaaatccttgcgccgtaactctgacgcactatcatgctactagtcccggaatcaatgattactctaaatctaaagcagattttgggctctctgtgatagcaaggattgtaccatcgaagcggaatgtggttatagatgtggagggccccaagcaacacccttcttctgccttgttttacttgtttgatcaagtcagaagcactggggtttggaatcctagcatgtgccctcattgtgctgctcaagatcccagaccgcgtagtagagatagtgttgttcccgtggcacgccctcatgcaagattgttcgccaatgagggaaggttcgcggggaccggtaatggtggtaagattagatgtcgtaattttaatgtttattaaggaaacatccgaggcctttagctgaggctgaattgccaataagaagtttataattaagatagcagcatatatatgtactgcatgcatgcagtgacagtctttgaggaagaaaatcaatttaggtgctatgacatgagcaaccccagatgtccaacttgtgt

SEQ ID NO: 130946 - DNA, 167 bp, Glycine max
  unsure (1)..(167): unsure at all n locations
  Clone ID: PAT_MRT3847_89251C.1
cggaatngccggaggcgcgcactcgatcataccaacactattctgtctcaacgattcacattatgctgaaacttcaactgagcgtggatggggatnctggtgattggatatcctgacatacattctcttgaggacgctaatacagattctgaaagtagcatgatgga

SEQ ID NO: 130947 - DNA, 1731 bp, Glycine max
  Clone ID: PAT_MRT3847_89252C.1
gtaaattcttttttctctttatctcccggtgaggatgcgtatattttacggctgcgagaagacgacagaaggggggagatttcaaacacaacttcgcttgttattcttccaattccattcattcgttcattcccaggttgtgatggcagcagcaccagcagctaccttcgctattggaaccaccggttccctcggccaaagaggaagctcgcttcctcaatcaaagtcctttgggttgaaattcaactctctgaatcatttgaagagcttctgtggcctcaaggccatgtcatccgtgagatgtgagtcggaatcctccttcttcggtaacaaaaccggtgctgctctacgggcgtcttttgcatccaaagctcaaaaggaaaacaaccacaactcgcagcctcaggcttcgtacaaagttgcggttcttggtgctgctggagggataggtcagccgctctcgcttctcatcaagatgtcgcctttagtttccaacctgcatctctatgatattgcgaatgtcaagggagttgctgctgatatcagtcactgcaacacaccctcacaggtcagggatttcactggagcttctgagttgccgaattgtttgaaggatgtgaatgttgttgtcatacccgccggtgttccaaggaagcctggcatgactcgtgacgaccttttcaacatcaatgctggcattgtcagggacttggtttctgctgttgcggattactgccctgatgcttttgttcaaattatcagtaaccctgtgaactctaccgtgcctattgccgcagaagttttgaaacagaagggtgtgtatgatcctaagaagctctttggggttaccacactggatgttgtgcgggcaaacacgtttgttgctcagaggaagaacctgaagctgattgacgttgatgtcccagttgttggtggccatgccgggattaccattcttcctctgttgtcaaagacaagaccctcggcgagtttcactgatgaagaaattgatgagttgactgtcaggattcaaaacgctggaactgaagttgttgaagcaaaggcaggcacagggtctgctaccttgtcgatggcatatgctgctgctagatttgttgaatcgtctcttcgcgcacttgatggagatggggatgtgtatgagtgctcatttgtggaatcaaacttgactgaccttccattctttgcttcaagggtgaaacttggtaggacaggagttgaggctttaattccatctgacctccaagggttgactgactatgagcagaaggctttggaagcacttaagcctgaactcaaggccagcatagagaaggggattgcttttgctcagaagcaaactgttgctgcttaaatttccttgtcagcaggtggtttcttgggttatggatttatttgagcataaatactacttagaggacttaggttgcagatttgttgtagcatctttactgcttccagaacttaggattcagactttctatgtatcaattctacttccagttttgttagtagaacgggaggacgcttccatttctgttctctaaaccgagcttaggttttggtcagaaatcttcaaagatgtaagcattataatgtagaattgaaaaaaaatgtaaacgttgctttttgaataatatggccattagaccagtttttggttttttgctggataaaaaaaaaaaaaaaaaaaaaaaaaaaaaaaaaaagaat

SEQ ID NO: 130948 - DNA, 821 bp, Glycine max
  Clone ID: PAT_MRT3847_89253C.1
ccgctcaggcggcgggcggagaaatgcattttggcgtagattcttttttctctttagcgtttggtaagggtgcctatatttattctgcattcgtcctcgatccttaggcggagatttcaaacacaacttcgcttattaaatctcttcttccaattccttctttcattcattcccaggctgagatggcagcggcaccagcagctaccttcactattggaaccaccggttccctaggccaaagaggaaactcgcttcctcaattaaagtcttctgggttgaaattcaactcccagaatcatttgaagagcttctgcggcctcaaggccatgtcatccgtgagatgtgagtcagaatcgtctttcttggttaacaaaactggtgctgctctgcgggcgtcttttgcatccaaggctcaaaaggaaaacgaccaaaacttcaactacaactcgcagcctcaggcttcgtacaaagttgcagttcttggtgctgctggagggataggtcagccactcgcgcttctcatcaagatgtcgcctctagtttccgacctgcatctctatgatattgcgaatgtcaagggagttgctgctgatatcagtcactgcaacaccccctcacaagtcagggatttcactggagcttctgagttggcgaattgtttgaaggatgtgaatgttgttgtcatacccgccggtgttccaaggaagcctggcatgactcgtgatgaccttttcaccatcaatgccggcatagtcagggacttggtttctgctggtgcggataatagccctgatgcttttattcaaatcatcagtaaccct

SEQ ID NO: 130949 - DNA, 614 bp, Glycine max
  unsure (1)..(614): unsure at all n locations
  Clone ID: PAT_MRT3847_89254C.1
agaagttgtctctgaatcttcaggcagtgccattgatgactgtaagttcagtcatggttcaagcaactccctaggtgatgccaagaccaagctttttgatgctggtttgataaggcaggagcaagatagcatcataggaagttatgattcttttgaagagatgaaattggtgctacaaggattcttgaaaaaagcaagttctgatgaattaagtgccatgcataagttattcagctctgatgcacagttcactaagtgcagagcggaatttgtgtcgctgatagaagaaatccagaaagcttgtgcataaagtataacatctcagctctgtctgactttggataagtcatatttcattttagtccttagtgaggtcctttctttcagtgaccaattgaactgaagatgatgctgggtgaaagtcaagataaaattttgctacttgctcggtgtcaataacttagatatggataatgacattgacccattgtaggtgctaatgccattgatccattccaactttccttttgagtttatatttacttctgatgacctagcnnngcagctttgatggtattttaggttttacatctttcatccttagtgatctccat

SEQ ID NO: 130950 - DNA, 159 bp, Glycine max
  Clone ID: PAT_MRT3847_89255C.1
atcaattaatacatcacctcatctctaaattcctctaacatcaccttcaccccgcctttttttaacattcattaattcccatataaaccaatgcatcttccttctcaatacaccatagatccactaactctttaatgagattcaccaacatactttctt

SEQ ID NO: 130951 - DNA, 1247 bp, Glycine max
  unsure (1)..(1247): unsure at all n locations
  Clone ID: PAT_MRT3847_89256C.1
cattggactccaagattggcaagcgaaggatacctatttttttaaatatgctttcttggagtattatattagggaatcacgttccaaaagaaagaaaaaattcttggagaatcacaatttttttttttttttgctttctatagttcttaattaagagctagggaattaagggtcgcttttaaatgaaaggtacttgtcctagtgaatgtagatacgtgcatgttcactaacatatttgtgcaactttgcagtggtcatggcaaaccattcttctgggattcggcttcttggtcttcttgctgacaacaagacacattagcttgaggaaaccaaaactattctgggtttcagcagctgccccattgacatcagttattctgtcgaccattttagtctttcttctgagaaatacgactcatcaaatttcagttattgggcacttaccaaagggagttaatccaccatcagcaaacatgctatacttcaatggtccttacttggctcttgctatcaaaactggcatcattacaggggatcttatctcttactgaaggaattgcagtaggtagaacatttgcttcccttaaaaactaccaggtggatggaaacaaagaaatgatggccattggtctaatgaacatagctggctcttgttcttcatgttatgttacaacaggatccttttctcgatcagctgttaactataatgctggagcacagacaacagtttcaaatataatcatggctgcagctgttctagtgaccctcctgtttctcatgcctctgttctactatacaccaaatgttgtcttagcggccattatcatcactgctgtgattggtctaatagattatcaatctgcatacaaattatggaaggttgacaaacttgatttcttggcctgtttgtgctccttttttggggttctgttcatttcagtgcctttaggccttggtatagcggttatcatatcagtcttcaagatcctgcttcatgtcactcgaccaaacactttggttttggggaatataccaggaacacaaatattccacaacataaaccaatacatagaagctttaagagttccttcatttctcattttggctgntgagtctccaatctattttgctaactcaacttatcttcaagaaaggattctgagatgggttcgagaagaggaagagcatantaaagctaataatggagctccattgaagtgcataattttagacatgacagttgtcac

SEQ ID NO: 130952 - DNA, 505 bp, Glycine max
  Clone ID: PAT_MRT3847_89257C.1
gagaaaaatagctcggcgctaggatgataaaaagcttaacacctctcattcttattactttttcaatattaaaaaagtaataagaatgaaaaataaaaaggtcgtcttatctaaaaccccaaccaattatgaaatcccctatctcccacttcacaccttggaacgcaccattcttatagagagaggcgctttcacatcttcttatttagaagttttctgcctttcctggacacatacaaaaccaagcacaaaactcagtcctaaacttctaaatatgtcaccatataaactacttgagacttatccttgaacattcaagtttagtcctaagggattcaattgtattcttggtttgagccttggtcatagtgcatgccaactggtttccagagctgcaattaactaaactaacttattattctccctcttgggttgcatgaaatataaacaatatatatttaaggattttcagagatggtaataccttatctattgtcataaccac

SEQ ID NO: 130953 - DNA, 201 bp, Glycine max
  Clone ID: PAT_MRT3847_89258C.1
gacttgattggggtgccctgatgaagatagcccttggtgcaagtcatggtctagcatatttgcttgaatattctggttttttatttcatgtaaaggattagcctttaatgcttgtttaaatttatttattataaaccttcagtcttgttgatttttggtgtgaagggggttgcgtggtgtttgttttgatgggagattggt

SEQ ID NO: 130954 - DNA, 323 bp, Glycine max
  Clone ID: PAT_MRT3847_89259C.1
aacacatgaagcccatttaccaaaacatattgttgtgacatggttggtggtcctccattatgcgatgtgatgattctggtctccgtgcgaccatggttggtgacgttgttgcatatctccgtgagccacttctgctcctttctctgttcaaaaggttttttcagcgcaaacaagtgaagcccaattgccaacgttgaacgttcttggtattttttgttggtttcgtgtcactacggtacccttgctcttccctcgttccttccttcgatctcctgctttcgatcccaattgcgtccttcgttatgaagacataagcattatat

SEQ ID NO: 130955 - DNA, 259 bp, Glycine max
  Clone ID: PAT_MRT3847_8925C.1
ctatatctgataaccacgccaccaccgcatccaaggggcaaaggtgcacatgtggaatagaaatcgatcgcgccaaagaggcagatcatgagcgacaagtcggactataacctaggaggttggaatcgaggaagtcccattcctggtggagggatagacacataaccccccacagccgaacagggtattctgaacaacgctatatacaagtggataaggcccacccgaacggcgaagctgagtgaagaagcatccacat

SEQ ID NO: 130956 - DNA, 261 bp, Glycine max
  Clone ID: PAT_MRT3847_89260C.1
gtcagatatagcctgttttccacaagaaggcaaaaacaacaaagaagattgtgctaaagctgcagtgccagagctgcaagcactaatataaacacccgatcaagaggtgcaagcactttgagatcggtggtgacaagaaaggcaagggaacctctctgttctaagcgtatcataaacttgctcagggtctcaagtatctgtcagaatttaccattacaaacaccctgtgcttagcttctgcatatgttcttttgtcacatc

SEQ ID NO: 130957 - DNA, 296 bp, Glycine max
  Clone ID: PAT_MRT3847_89261C.1
ctcttcttctcttgcggctagggctttagcgcagctccttctagatttaaggaagatggggaaggaaaaggttcacatcaatattgtggacattgtccatgtcaactctggaaaatccactaccactgatcacctgatttacaagctcggacgcattcacaagcgtgttattgagaggtcagagaacgaagctgctgacatgaacaagaggtctttcaagtatgcctgggtgctggacaaacttaaggctgagcgtgaaagaggaatcaccattgatattgctttgtggaaatttg

SEQ ID NO: 130958 - DNA, 376 bp, Glycine max
  Clone ID: PAT_MRT3847_89262C.1
gatcttacgaaagattgtgctataatccactcgactctggcaccatggtccagcactaaactcgttcaccaggcacacgagagcgaagttcctcaccacacgtttaagggactagcccataattcatcacctaactacaacggtatattatgacgatggaagaacagctaccaggatttactgggcgtaacttaccagaaaaataatctatgatgttcttacctggcgtcataacctatagcacccttgggggtgtccaattctgtaagacgaccgatggactaatggacacacaaaaagcggtccttatcttgcaagtaggtcctgcgaacctaccactgaatgggattcaccatacttgtgagaggagaatgat

SEQ ID NO: 130959 - DNA, 516 bp, Glycine max
  Clone ID: PAT_MRT3847_89263C.1
ttccaagataggtttcccgtcatcactgtatgacgtcctccttctttgggggggggggggggccgagagttaactgggttgcgtggtgtagggactataaattagtcttggtgttaattaggacgggggctatggggtgggaataaaaagttgctgcggagggtgtttgtaccattaatacgtgggaagttgcagttggtggctttggtgggtgtgcttacattacagggcgttggggttggtgtgggtggcgttgttggtaggcatggtagcgtggttattacggcccctatgacgcctttccggaatgagacaggctgtagtagtgcgtttgggggggcaccagtcccttggtagtgatgttgtgtcatcgccttgggttagttgttgggcgattacctcaagcaacagcgacaccgccccataaaagtatctgttagagtaatgacgctaattattaggggtgggcaggtaggtggaaatttggtgactctcaccggctaagacttataattg

SEQ ID NO: 130960 - DNA, 275 bp, Glycine max
  Clone ID: PAT_MRT3847_89264C.1
gcgtccgaatacaaattcctggcgtcaataccgagcaacgtgcgaaatgcctgacttgaactcacgaacggaggtgatgccgaacccagagtttctaagcctgttttcctcacccgacacactgcagggggtcgtggccctttcagggtcctcctctgtcgcagcttgctcagcagcaatcagcctacgaagcaggtcacacacgtgcatgcactgggactatgatcaaactggcgctcgcggataaaaccccgcatttccgcaggtttcggccc

SEQ ID NO: 130961 - DNA, 252 bp, Glycine max
  unsure (1)..(252): unsure at all n locations
  Clone ID: PAT_MRT3847_89265C.1
cggctcgagcggacatgtcaccgcccagtcagctgtgttcactcaccattgtcgatcagattctgtctagtgaagggcagacaccagaaaaacccagatccagttttacagcgcaccagagttctgtgactactcatgtcccagttccagatcaaaccagcccaagagtccagaccactcctcncagctggaccagtgatgctggcgaacacaaggaagccagacagcagccaaaaccaagagccagcaact

SEQ ID NO: 130962 - DNA, 154 bp, Glycine max
  Clone ID: PAT_MRT3847_89266C.1
cccacgcgtccgtcttattctacatcggtcaatcaccgatgtagaatgtcgttttccaccgatgtaaaaactgcgttttgtattagtgtttattttaattttactacttgggacattttggtgcacttgccaataattcaacagttagttattt

SEQ ID NO: 130963 - DNA, 829 bp, Glycine max
  Clone ID: PAT_MRT3847_89267C.1
gatcaaatttctctcctctatcaaacacttggcgtgcaagttcaacacacccatatctcacaaaaaatccaatcaaactattttgcaaaagcacatcaaacccaaaattcatcttccacaacaacccatgaacctgcattcccttcctcaccaaacccactctagcacaacccttcagaaccaacacaaatgagtacccatccaaacgcaccccattttcgagcatcaagcagagcagcgccaaaaaaatgatggttttggaggacaaaggttaccaaaacctcatcatgccttgccaccctctgcggcggtgatgactccatctttgcaatcttctctggtggaacacgcatctgtggggctgacgcagtgcgtagggacttaacttggagaagatccccgtggcacgaaggtgatggtgtggttgagcaccgcaagacacagcgacaagtttgagagcgtgcaacccttctcgctttcttcgtaaacccttatttcccccctttttctccatcactcaaaaattcggaaattcctcatatggaacaaagatctgaatgtgttagagtcaaatctgctcgtaggtaaggtgccataggttgcggtgatgagtgaaagcccccagtggtggtgccaggtcaagcctttttttaacctagttttttcccttcaaatcaaaaaacctaatggggactttttcttttttcaaattctaattttgaaggttggtgtcttttggtaagaaccctgtaaagaacttggaaaatcaattaaaattttggtccccggtaaaatttttaacaattttaatggaattgggtggtggttt

SEQ ID NO: 130964 - DNA, 1646 bp, Glycine max
  Clone ID: PAT_MRT3847_89268C.1
acgggggacgagacgaaacccaagacaagaatcacagcgcacagtgacacatacataaaaaaaacgaaacacaaacagaaacagagttattggaaaacacgaaacactaattgatttgaattcgattcgattgaggattgctgtttgggtgtcttgatggtgtcggtgaacccaaaccccgctcaaggcttctacttcttcgatccctccaacatgacccttcccggcgtcaacaatcttccaccgccgccgccgccggctccggctgctcctgccgccgtcgaggatccgaataagaagatccggaaaccctacacgattaccaagtccagggagagctggaccgagcaggagcacgacaagtttctagaagctctccaattatttgatcgggactggaaaaagatagaagcatttgttggttcaaaaacagttatccagatacgaagtcatgcacaaaagtattttcttaaagttcagaagaatggaacaagtgaacatgtacctcctcctcggccaaagagaaaagatgctcctccataccctcaaaaagctcctaaaactcctactgcttgtcacgttatgggcccattgctatcttcatctattttcattgattgtgcatacatttatatatatcctgctttctttgtgcttggatggcccgccagtaacatgcctttattacgtcgtctttataatactacaccacaaccaggcattttactacaagtgaccagagatgacatgggattgactggagcttgacaggctgctcctcttaattgttgtgttgctgcagcagaagagagcacccctccgacttggcctcgtagcaaaaggattaatcaaggtgaccagggcaagccaattaaagtaatgccagattttgcacaagtctacagcttcattggcagtgtattcgatccaaattcaactaatcacctacagaaactacaacagatggacccaataaatgtggaaacggtattgttgttgatgacaaatctctccgtcaatttaatgagtcctgaatttgaggatcataagaggctgctttcatcatatgataccgactctgacaagtcgaagtttgttaatatttgcagcaaatccttcaccaataaatccgagagtgctgttttgtctgcttaggatgtagccagtggtttgccctgaagagtgttttcaatatattttctgaatgcacataaagtggtggagcaagaaagggaaaagacaaaggttttgctgaaaggaagtgtagtatctagatgcttgcatgtgtatataactcgtatatataagtatatgtataccttttggattgagtttttatttgttttaggcactgttagatcgtagttatgctgctgttttgtgtatatcttttgaagatgattgtccttggcatgcaggacaatgagagtcctgttaggtcacttttggaggctatactctgtacagtctgttgagtgcttttgtgtgttatgctgtgaagcttagaattagtataaaagagcggtgttaggacttagggggtgccgtctgccttgtatatataaagcaataaaacagtgtagataaagtttcttcttttcatgcgtgtatattatattaataatacttgctacctggtctcaact

SEQ ID NO: 130965 - DNA, 357 bp, Glycine max
  Clone ID: PAT_MRT3847_89269C.1
ctcacgcgcattccaattatctacatcatcttcggatctggttaagatgaggggtactacaggcacctcacgaatttacgttgacaagccaaagtaggcacatagagtttccacatcaatagatcattctatgcactcaatattatgtctcttaacatttatgatctattttctcatctcaggaagtgttacttactttagacgtataaatatatgtatactctgatacaccttgatacattgttttgatttatgataaggacgtaaatcattgtttaaactgtaattttggttgaatctaagttcacttaactttagagattcctttttatagctttatattggccatcgaactga

SEQ ID NO: 130966 - DNA, 441 bp, Glycine max
  Clone ID: PAT_MRT3847_8926C.1
ggctcgaggagcctcaagctgcactttttggaatgtgtgaatggggtcgcccccctgggaccaaatgggtctgatggagggggaagagacccaactgacacatctggccaagaccatgaggatctgggcgaacgatcttcacagacaggatatcgagcatacgtttagtgtcactggattggagctggtcaaagccatggcagagagaatgattgactgcgaagacctgggtagatcgataggcttgactgtgaaggtcatctactgtgcacatggaagcagacaggcattattaggagctacacttatggcgctggtgctgctaatgagtacatcagcttacatactggaacgtacacatccggtacacttacacagtatagagctcaagcacagcagagctcacagcagagcagagaggctttgccgtgtacagctcta

SEQ ID NO: 130967 - DNA, 300 bp, Glycine max
  Clone ID: PAT_MRT3847_89270C.1
agcgaataagaaggaggaccatagagctcggagtcatatgcagtcttcagaggaattaacacgcagtgttttggaacccgttatcccacgtcacattgtagaacataagagcagatcggaggacgacgatgacgtacacagctccgagtgcttacctataatgcctaacacagacacaggcttatacctgcttgccactagcaacttcactagttcacaagccatgaagaccgatctgatgcttcttgacgataacattctgaactaagaaagcagaaacatggtgcctatgatgaccct

SEQ ID NO: 130968 - DNA, 719 bp, Glycine max
  Clone ID: PAT_MRT3847_89271C.1
gagtttccaacatcgctcctaatatcatttctgagaaccaaagaggattcatcaaagggagatcaattttcgattgcatcaacactacttcagaggtcatcaaacttctctcttttatggggagcgtgatgttggtgaaatttgttattcacactatgctagcttactcatttcatgtttacctgtggccatgtgacctcttaggcgtgtggactagtggattagaaactttctctggagtggtgatgtggatattaggaagcatgttattgtcgcttggagttcgatttgtaagccttttgaggaaggggggcttggtttgcgctcgatggctaccattaacaaagcaacaatgctaaagctgggttgggatatgctctcaactgatttgcagtgggctaaaattttaaaagctcatgtttttagaagccgcgagattacttctagccacattgggtcttccatttggtgtggcatcaaaaaacccaattgcataatgtctttgacagcacctcttggactattggttttgttaagatcagtttttggtaagatcggtggttagacaaacctattgctgatatgataaacttaccccctcgagtctatcatttatgatctgcttctgttgctgatttttggcctgataacaactggaacctgccccttttttttggtcaacaacttcccccaagttgctgaagctatcaatagatctg

SEQ ID NO: 130969 - DNA, 250 bp, Glycine max
  Clone ID: PAT_MRT3847_89272C.1
ataagccgcaaccttggttggggctttttttaaaggaaaacgattgaatcccaaacccccccccggaagggaccaaaaaaaacttctttttaaacaaagttgtcaagagaaacaaaaaaaaggtcactcacccaattaaacctcgctgaaagggctttttaaaaaggctttttgtgtcggggcactttttaataaaatttttaacgcaaaaatgttccttgggttttagaaaaaatgttttccaccactt

SEQ ID NO: 130970 - DNA, 211 bp, Glycine max
  Clone ID: PAT_MRT3847_89273C.1
cccctcccatcatgatatacactcctaaacaacatccaactttcttgagcgatcccaagacagctcactccgcttaaatatataaaaagcgcgggcccattctctttccctactttcttttacttttcatgtccccttaagaaaaacccaattccatttcaatcccttttttctttttttgttcttgctgctgattttatcaactaatttt

SEQ ID NO: 130971 - DNA, 490 bp, Glycine max
  Clone ID: PAT_MRT3847_89274C.1
accaaatccatgatgtatctattaagaaagccaccaaaggtaaaattactacttctattctctggttttcctctattgtcactctgcaagtctgcattcagtgatgatatagaaaaatagacaacaattctgagtggcatctcccattagttatatgttgaattgttgaccattggtttaagtaacaagtagtgtaaaacatgtcaaaaatgtgtcttggaacacacagaaagacataagacaatgttagagcataacctagatttggttcatatataaataaaaatatataatttctcacagaaagaggaggttcaaatgatgataaaataggtgaattggtcaaagatatataatttcactatattggaaaggatcagaactagctgttgtgtccatgatttccaatttttcatgcttagtggcatggcgtaaagtttctgtaggtttttaatttccactgttaaatttattctactagattacaccg

SEQ ID NO: 130972 - DNA, 1009 bp, Glycine max
  Clone ID: PAT_MRT3847_89275C.1
tgcccgccgcagtccggccggatcctgggtcgacccagcagtccgtcttctccgacacagcttgaacccaccgcgttttggagagagagacgtcgcaatggggaggaggcctgcaaggtgttaccggcagataaaaaacaagccataccccaaatcacgtttctgccgtggtgttcctgatcctaagatcagaatttatgatgttggtatgaagaagaaaggtgttgatgagtttcccttctgcgttcatctggttagctgggaaaaagaaaatgtttcaagtgaagcattggaagctgctagaattgcatgcaacaaatatatggcgaaatttgctggaaaggatgctttccacttgagagtcagagtacatccattccatgttcttaggatcaacaaaatgctttcatgtgctggagctgataggcttcagactggaatgagaggtgcatttggaaagccacagggaacatgtgctagagtcgccattggtcaggttcttctttctgtccgctgtaaggacagcaacagtcatcatgcacaggaggctcttcgtcgtgctaagtttaagttccctggtcgtcaaaagatcatagttagcaggaaatggggtttcaccaagttcagccgtgctgattatctcaagtacaagtcagagagcaggattgtgcctgatggtgtgaatgctaagcttcttgggtgccatggaccactggcaaaccgtcaacctggacaagcttttttatctagtgctactgctactgcttagatatggcttgttacttggaaatagtgggctttgaccacaatagttgtgttcaactaaattcgagtttcttatttgctctactggtagtattaaactatgttgagtttatctcatcttttgtgagccatcttgaatggaattactgtcatatttggtttgtatttccttgttgttgatggttttgtttggcatttgataattgcttgatgagaaatttaagacccgatcagacagcttacc

SEQ ID NO: 130973 - DNA, 459 bp, Glycine max
  Clone ID: PAT_MRT3847_89276C.1
cggcccggaattactggctggatccatgcgtccgtgtttttttgttggatgtaatataagtgaccaagcgcaaaaaaaaaacgaaaaaacaagttttatttaaatttttttggaaccaatgtcatgatgaataaataaagcataatcaattcgaaaactaacatacgaggcgtcattatcaaaattgattttattagacaaaacttaaaaaagtcttaatttgaaaaaaacagatgttctgaaaaagaaagtcagaattcatttatacatctgaaaagatcttgataatgcatgacattctttgtaaaaatgtatataatagagcatttaagggcttacaactttggaaatctatcggtcaaattatactaacgatcctttgtcttattgagaagaaatgtgttggtcctctatgcttcaaaaaaatgattttggggctttaacttttagctttgaatc

SEQ ID NO: 130974 - DNA, 248 bp, Glycine max
  Clone ID: PAT_MRT3847_89277C.1
ctcttcactttcaatctctttcccttcctttccttgtctttctattcctctagatcaaaattgttatattatcacccatcaaacattccacacttctccccctccctttgaaaacacctcaatcaatctcgatgatcatggcagcactcaattcaagcacttgtgccatacctcaattccctcacgctctctcctccactatctctgctgcttcatcattagcaagagatttgggcttccccacaagg

SEQ ID NO: 130975 - DNA, 1243 bp, Glycine max
  Clone ID: PAT_MRT3847_89278C.1
acggaagacgacagaaggggattagatttaggtcttccctcttccgtgcacagcttgaacacaccgcgtttcggagagagacgtcgcaatggggaggaggcctgcaaggtgttatcggcagataaaaaacaagccataccccaaatcacgcttttgccgtggtgttcctgatcctaagatcagaatttatgatgttggtatgaagaagaaaggtgttgatgagtttcccttctgtgttcatctggttagctgggaaaaagaaaatgtttcaagtgaagcattggaagctgctagaattgcatgcaacaaatatatggcgaaatttgctggaaaagatgctttccacttgagagtccgagtacatccattccatgttcttaggatcaacaaaatgctttcatgtgctggagctgataggcttcagactggaatgagaggtgcatttggaaagccacagggaacatgtgctagagtcgccattggtcaggttcttctttctgtccgctgcaaggacagcaacagtcatcatgcacaggaggctcttcgtcgtgctaagtttaagttccctggtcgtcagaagatcatagttagccggaaatggggtttcaccaagtttagccgtgctgattatctcaagtacaagtcagagagcaggattgtgcctgatggtgtgaatgctaagcttcttgggtgccatggaccactggcaaaccgtcaaccaggacaagcttttctatctagtgctactgctactgcttagatggcttgttacatggaaacagtgggctttgaccacaatagttgtgtttgactcaatttgagtttcttaattgctctatccgtagtattaaactattaaactatgttaagtttatctaatcttttatgaaccatcttaaatggaatgaatgtcatattttgttggtatttcattgttgttgatgattttgtttggcgattgataattgcttaatgagaaagttaagattaagacccgatcagacaagcttaccaccattgtatctccagtgaaaacaagcggttgctcatcctctttgctattaacataatagcgatcattgatgtagtgaccgagcaggttagaaaaaacgaaagtttgtctgggaaagaggatgaaatttgggttcaagtccacagtccacatcaggaatcattcaatgcatccataggtgtttcagacacggttctatgaaacggatgcaaatcatgaaatactagaaga

SEQ ID NO: 130976 - DNA, 780 bp, Glycine max
  unsure (1)..(780): unsure at all n locations
  Clone ID: PAT_MRT3847_89279C.1
cccacgcgtccgcccacgcgtccgtacggctgcgagaagacgacagaagggggcgtacgcagcttcatccctaacgcgtgcatagcagagtcagagacagagacgcagccatggggcggagacctgcgaggtgttataggcaaattaagaacaagccataccccaagtcacgtttctgccgtggtgttcctgatcccaagatcaggatttatgatgttggtatgaagaagaagggtgttgatgagtttcctttctgtgtccatctggttagttgggagaaggaaaatgtttcaagtgaggccctggaagctgctcgcattgcttgcaacaagtacatggccaaatttgctggaaaggatgctttccacttgagagtcagggtgcacccattccatgttcttaggatcaacaagatgctttcgtgtgctggtgctgataggctccaaactggaatgagaggtgcttttggaaagccacagggtacttgtgctagagtggctattggacaggtccttctttctgtccgctgcaaggacagcaacagccatcatgctcaggaggctcttcgtcgtgctaagtttaagttccctggtcgtcagaagatcatagttagccggaaatggggtttcaccaagtttagccgtgctgattatctcaagtacaagtcagagagcaggattgtgcctgatggtgtgaatgctaagcttcttgggtgccatggaccactggncaaccgtcaaccaggacaaagctttctatctagtgctactgctactgctt

SEQ ID NO: 130977 - DNA, 140 bp, Glycine max
  unsure (1)..(140): unsure at all n locations
  Clone ID: PAT_MRT3847_8927C.1
gttatgcgngaacaagagaaaattaacattanccagaattacatcatatattccgatgctgcatggaaattgtaccagatctagacaatttcagaccatggcctttggtaatactatcaaggacctaaaaaaatagaaaa

SEQ ID NO: 130978 - DNA, 979 bp, Glycine max
  Clone ID: PAT_MRT3847_89280C.1
cccacgcgtccgtacggctgcgagaagacgacagaagggggcgtacgcagcttcatccctaacgcgtgcatagcagagtcagagacagagacgcagccatggggcggagacctgcgaggtgttataggcaaattaagaacaagccataccccaagtcacgtttctgccgtggtgttcctgatcccaagatcaggatttatgatgttggtatgaagaagaagggtgttgatgagtttcctttctgtgtccatctggttagttgggagaaggaaaatgtttcaagtgaggccctggaagctgctcgcattgcttgcaacaagtacatggccaaatttgctggaaaggatgctttccacttgagagtcagggtgcacccattccatgttcttaggatcaacaagatgctttcgtgtgctggtgctgataggctccaaactggaatgagaggtgcttttggaaagccacagggtacttgtgctagagtggctattggacaggtccttctttctgtccgctgcaaggacagcaacagccatcatgctcaggaggctcttcgccgtgccaagttcaagttccctggtcgtcaaaagattatagttagcaggaaatggggcttcaccaagtttagccgttctgattatctcaagttcaagtcagagaacagaattgtgcccgatggtgtgaatgcaaagcttcttgggtgccatggaccattggccaatcgtgaacctggaagagcctttttggatactgctactagttcttagtctgtcttttaatttggaaatactagacttttggataacattagttttgcaagagtgaatttgagttattttgtcagcacattccatttacttaaattttgtttgcgaacctcttcgatttggttattttaatgttatattctggtatgatgcacaatttctccttattactattgatattctattttccgtctcttaaaaaaccaacaaga

SEQ ID NO: 130979 - DNA, 682 bp, Glycine max
  unsure (1)..(682): unsure at all n locations
  Clone ID: PAT_MRT3847_89281C.1
gaaatacttggttggggaatttacttctttgaaatgtatttcatgttattgcaaggaaagttctggttgtttcttatagctctggttgatttgatactatgaagtatgataagttcttccgagtttttattttttattttttaatattaagtcatctgtggaattattgtaagtttggtgtatctgataatgcttcaatcgataaaaagagcatgagattggttgtgtaacgggttattttgcaattgaccatttaaactgcttgattacatttttttttttaaagagccatgtcaaattttattaaaaactgcttgattacattatataatgtttgaaggttgttgttcctctagtacccctatatagatttgtaaacttcaaatttttgtgtatacttgagagtgttgggtgtctgagtatagatgtatatattgnagttcttaatccaagtagcagtttggagtggttgaccccaaaatgctatgcatgatagtgggatgactgctattttgaaagttttaagatacacatagcataaatcatgtaagaataaaaatctaaaattaatgacattcataattaatggnccaaacatcagaatttgataactaaacaccacattttctaaaatagcaaggcttgaaatgggnaatgggctggccctgaacaagtggatgaa

SEQ ID NO: 130980 - DNA, 509 bp, Glycine max
  Clone ID: PAT_MRT3847_89282C.1
ctctcttctgcatctcccattcacagaacaataacaagatacaccacattctccttctcgcttcgtcctccaacaactcttcacttcaatccccacagcttcgaccactgaactggacgctgtgtccgccttcagcgagatcgttcccgacaccgtcgttttcgatgatttcgaaaagtttcctccaactgctgctactgttagttcatcgcttctcttgggaatatgtggccttccagacaccatttttaggaatgctgtggaaatggctttagctgattctgagtgttatggacttgaaaatcctaacgcgcgattgtcttgttttgtcaacaaggctttcgcgaatatcggtagtgacatggcaaagcttgtccctggccgtgtttcgacagaagtggatgcgcggcttgcttatgacacacatgccattatcaggaaggtgcatgacctgttgaagttgtacaatgatagcaatgtacctccgcaacgtctgttgtttaaaattc

SEQ ID NO: 130981 - DNA, 952 bp, Glycine max
  Clone ID: PAT_MRT3847_89283C.1
cccacgcgtccgtacggctgcgagaagacgacagaagggggcgtacacagcctcaacaaccctaacgcgtgcagagcagagagagacgcagccatggggcgaagacccgcgaggtgttataggcaaattaagaacaaaccataccccaagtcacggttttgccgtggtgttcctgatcccaagatcaggatttacgatgttggtatgaagaagaagggtgttgatgagtttcctttctgtgtccatctggttagttgggagaaggaaaacgtttctagtgaggccctggaagctgctcgtattgcttgcaacaagtacatggccaaatttgctggaaaggatgctttccacttgagagtcagggtgcacccattccatgttcttaggatcaacaagatgctttcgtgtgccggagctgataggctccaaactggaatgagaggtgcttttggaaagccacagggtacttgtgctagagtggctattggacaggtccttctttctgtccgctgcaaggacagcaacagccatcatgcccaggaggcccttcgccgtgccaagttcaagttccctggtcgtcaaaagattattgttagcaggaaatggggcttcaccaagtttagccgttctgattatctcaagttcaagtcagagaattatgaattgtgcccgatggtgtgaatgctaagcttcttggttgccatggaccattggccaaccgtgaacccggaagggcctttttggatactgctactggttcttagtctgtttgttaatttggaaatactagactttggattactttagttttgcaagagtgaatttgagttattgtcagaacatttccaattacttaaattttgtttgcgaacctcttcaatttggttattttaatgttatattttgttatgatgcacaaaaaaaaaaaaaaaaaaaaaaaaaaaactcgagc

SEQ ID NO: 130982 - DNA, 1810 bp, Glycine max
  Clone ID: PAT_MRT3847_89284C.1
ctcgagccgaatcggctcgaggtgtgattgagtttggctgtcataatctctctctcatccgaaaatgtcactcaccttgcaaactccgccttctacaactctctcttctgcatctcccattcacagaacaataacaagatacaccacattctccttctcgcttcgtcctccaacaactcttcacttcaatccccacaggtccctccctctaattcgcgcttccaattcttctatcaatgccgcttcgaccactgaactggacgctgtgtccgccttcagcgagatcgttcccgacaccgtcgttttcgatgatttcgaaaagtttcctccaactgctgctactgttagttcatcgcttctcttgggaatatgtggccttccagacaccatttttaggaatgctgtggaaatggctttagctgattctgagtgttatggacttgaaaatcctaacgcgcgattgtcttgttttgtcaacaaggctttcgcgaatatcggtagtgacatggcaaagcttgtccctggccgtgtttcgacagaagtggatgcgcggcttgcttatgacacacatgccattatcaggaaggtgcatgacctgttgaagttgtacaatgatagcaatgtacctccgcaacgtctgttgtttaaaattccttccacttggcaaggaatagaggctgcaaggttgctggaatccgaaggcatacagacacatttgacctttgtctacagttttgctcaagctgcagctgcagctcaagctggtgcttctgtcattcaaatttttgttggtcgcataagggattgggcacgtaatcattctggtgacacagagatagaatctgctcagctaagaggagaggatccagggttggcattggtgacaaaagcttacaattatattcacaaatatggacataagtcaaagttgatggcagcagcagttcgcaacaaacaggacctatttagtcttctgggggttgactatatcatagctcctttaaaggtattgcagtctctcaaagaatctgttgcttctcctgatgagaagtactcttttgttaggaggttatcccctcagtctgctgccaagtacacatttagtgatgaagagcttgttagatgggacgaagatagcctctcaaaggccatggggcctgcagctgtgcagcttctggctgctggactggatggccatgctgatcaagcaaagcgggtggaagagttatttgggaaaatttggccaccaccaaatgtatgattcgacgacttctttatgtcgcacgagagtcttttgcctgatggatcaataaacataatacacgactgatgaagggaatatttcgttggttttctttccctcttaaccatgaagtcttgaacaatttccttaatgtgaagcacgcggttcctaaatgcacattttgttatttttctctttcgtttgttgcagttgcatttgtcttattgactgtctatctatggttattctctaagtaaggtcggatactcgtacaaactaaggccgtaggtagggtcggtcaaaacccggcctttccagtgttacctattgaccaggcctggacagcagttaattgggtcacacttgggctggctttgtcgaagcacataaaatgattggcaattgcttcctgcacctccattttgcttcctgtgcctaatctctggaaatgtaaaatcaaacataaaaataattctaggtagtaaaataaaaagggagaagtttaggtaggaaaatcaaaatagacattattacatgtatgaaaaatatatttcaattttttttttt

SEQ ID NO: 130983 - DNA, 847 bp, Glycine max
  Clone ID: PAT_MRT3847_89285C.1
gccaatacaataggcagtacacaattcttctgtcattttattggaacaaggtatattacaggtcctaagaacatgagttacaacagcagaactaggatgacctagtttgttatgccaaagggaaactaaactagaattactagtattgagtgcactagtactgacattattacaatgagaagacaaatcagaaaaggaagacatatgaacagaggcaacaatttttccaacagtggacttgacagaagatttgagaagacatagaggccatcttggctaagagaacctctaagaaggatggaaccatcaacctccatgatcgatagatggcctggagatcatacgttggattccaagaaccatcaactataacaacacgattagctgcatgaagattaatacccaaagagcctgctctggttgaaatcagagtgcactttaccctcttattcaaaggctcattaaatctctcaacaagcttctgcctctcagaactctctgtccttccatccaacctataccaatcttttcctttcttccaaaacttcccttgtttgccacgtcgaggtatccttgagagataaagttcaatgaggtctagggttggtatgctctgactaaaaactaacaccttatcacccacatcagaactcatggttagtatctccatcagcaaaaccattttgccactgtgatcaatctctttataaatttttccatgaagaagatcattccaccaacccttcaggaaaaagccattgtcatctttcctttgcagcaagtcatttccatacctcatcttctctccagcaagtacattataatcagaattctcatcactgtaact

SEQ ID NO: 130984 - DNA, 241 bp, Glycine max
  Clone ID: PAT_MRT3847_89286C.1
tacggctgcgagaagacgacagaagggatgttagtaattttatgttaacatcggtttttaaaaaatcgatgttaataataatactatcaacgttggtactttcaacatcgatttaaaaaccgatgttgaaagtcataaataaccgatgtagaaaatatattttctaatagtgattcagactatgatattacaaatcattgtggtacatatcttaaaaaacaaataatattgtggtacatac

SEQ ID NO: 130985 - DNA, 199 bp, Glycine max
  Clone ID: PAT_MRT3847_89287C.1
taaaggttgacttttatccagatacagtcctgataatatggacggctgtcatctttcatccttggctaaaatgactgagtggcttcttgggcatgctctgaacactccagcggccgaaaaactgctgctcaggatttgacggtattggatacacactcacaggcgccttttaatatacttgatattaatttaccccttt

SEQ ID NO: 130986 - DNA, 298 bp, Glycine max
  Clone ID: PAT_MRT3847_89288C.1
tcggtttaatggacgcgacacgggacacacgggcggacggctctgctgccaaaggcaggcgcgaagtgaaacagaggacacagaacactcttacaggcacaagccaactgtggaatgtgcacccacaaggtctcatgcaatatccttctactaggacaggctcattagacatagatctgaaaaaagacagcgtccgtctaacggtgcaagcgggatgctacacccccttaaccaatccgaatactcgggcgcctcagcagaagactccggaaggagagcttatgaatacaacaagccc

SEQ ID NO: 130987 - DNA, 368 bp, Glycine max
  Clone ID: PAT_MRT3847_89289C.1
cctttgcgtgtgttacacagatctgtgagggttacagacaacacagaggcaaccccgatttgttgggcatttaacaagcatagcaagaggctagcccatgctgaacctgtatgtggagggactctagcgaccgcaactccagatggaaccacacctacacacaagactggcttccttggactggtgggagaaacggtgggtaccatagggtgttgcaatgtgaagattagtgaactctgggccagattggaatctgaggagagagtgactctcatagagacgcatgttgatgctgatgtcgtactgttcataagatgggggggcgcgagatctgcctctcagagttccgctgctcaaagggttgacac

SEQ ID NO: 130988 - DNA, 1077 bp, Glycine max
  Clone ID: PAT_MRT3847_8928C.1
ccacgcgtccgattaattcagagaaaaaggatgtttctgaaggaataatatccaaaggcatttcatcttgcagagttcatgataaagacggtaaggaagtagagtttgaaaatcatggaggtgctggcactggcagtaagttaattaagggcgaaaatttaagcaatcaattgattgaatgtgaagatgaactttctgaatatgaacgggaggaacttgagtctaaaattgactgtgccttagatcagtgctttttctgtttatatggattacatctgagatctgattcatcttatgaggatgatctagtggtgcacaaaaacacaagccgaggagattatcaaaccaaggaacaatgtgctgatgttttcaagtatgttcttccctatgcaaaggcatcttctaggactggactggtcaaacttcgtagagttttaagagctattaggaagcacattctgcagccaccagaggacctcttggcaggaaaccctattgataagttcttagatgatcctaatctatgtgaagataagctctcagaggaggctgggtctgatgggtttcttgaatctattactaagagaatgtttcctgatgtgggtggccttgctcagtataatgcaacattattgaggaggtctgagccatatttggaggtatactgtaacttgtattatttcttggctctgtctgaggaaatgagtgcaacagataagtggcctggatttgtgctgaccaaggaaggggaagaatttgttgaacaaaatgcaaagctcttcaaatatgatctcatgtacaatcctctgcgctttgaaagctggcagagacttggaaatatttatgatgaggaagtagatttgttactaaatgatggtagcaagcacgttaatgtagtagggtggaggaacaatgctactttatccgagagagtggaaacaagccgaaggaggagtagacggtgcctactaatgagtttagctttggcaaatacatctgctcagcagtgtgagatacacgagttattggcattggtgtactacgacagtcttcaaaatgtagtcccattttatgatc

SEQ ID NO: 130989 - DNA, 350 bp, Glycine max
  Clone ID: PAT_MRT3847_89290C.1
aaaaaaaaaaacaattttttttttttttaaaaagcatttggggtttttaaacaattttttggctttccctttttttggttctatcccgggccatttttttattatgggttttggggggaaaaaaatttatgggaaaaaggttttttaacaggggcccccccctttgcacttaaacggggtgccaaaatagcgggtaacccctcctacataatttcctcccttaggggggatcattttttcttttgaaaatggtctgctcccccgcttaggtcccaattgcacaaaaaatgccccattcatgtccccatcgttaattgatctccactgccaatttgcccatcccttttttg

SEQ ID NO: 130990 - DNA, 616 bp, Glycine max
  Clone ID: PAT_MRT3847_89291C.1
agagcggccgacatcggtcttttttttttttaattttttttttgatttttttgtttttaaaggatcatatttgtttttttttagtttttttgttttttaattgaaacccaaaactgggtgttttttttaaatacagagggggaggactaattttttgaaaaaaactgtaccaaaatttttttccaaaaggcccggactcagctgtgttggtctaacctcaaaattgcaaaaggccctaaatcaaaccaccttttttaaaaaaattgtggggctctttaaaatctaaaaaaaccttttgattaaagcactttaggacaaaaagaccctctaccaaaaaccattttttaaaaaaaattgggggatgattccaagggttcaaaaacccctgggaaaataaacatgcctaatccgcgtaggtccggagaacctttttatagcggggtgagagaatgaattaacgaaaccactttgtggagcctgtcccacggttttccaaaatggtttaaagaagaataaaaactccaaatggggaattatttttacccccaaaattacacccatattttttttaaaaaggcccttttttaaaaaaagaatagttttgttgggggaaaaa

SEQ ID NO: 130991 - DNA, 267 bp, Glycine max
  Clone ID: PAT_MRT3847_89292C.1
tcggattcggtcagcaaagagcttgtctttctgcgattgctctccttctttagaggacgttttggaggttgcagaaggtctttctcattcctctgtatctggtgctctgttgaaagtattattgatgggtttgaatggcttaggaaagcattagaggggatttctggacctcgcagttctagaagatgtaagttgactgacatacaagatattcttaccgattatcagactattaatatgacctttacagcagtaaaatgtcaactt

SEQ ID NO: 130992 - DNA, 775 bp, Glycine max
  Clone ID: PAT_MRT3847_89293C.1
ccacgcgtccgcaggaatgtgggcataaatgtgcattttatcatggtagcatggatcctgttcagcgtgcctctgttcaaaagcagtggagcaaagatgagatcaatataatttgtgctactgtagcatttggaatgggtatcaacaaacctgatgtccgctttgtaatccatcattccctcccaaaatctattgaaggctatcatcaggaatgtggacgagctggtagagatggtcaacattcatcctgtgtattatattatacctacagtgattatatacgagttaagcatatgttaagccaaggagcaatagagcaaagttccatgacatctggatacaaccgttcaaatatgataaattcaggaaggatactagaaacaaatactgaaaaccttgtgcgaatggttagttattgtgaaaatgatgttgattgtcggcgccttctgcagcttgctcattttggggagaagttcaattcttcaacttgtctgaaaacatgtgataattgcttgaagatcacaagtttcattgaaaaggatgtcacagagattgcaaagcaattggtttgggagcaatttctatacatatatttttttcatccctccacttattgaatttcttttagtttgtaatattgagtcctctcgttctcagtttcaagtactttttttgttgtcttatgcttaggttgaacttgttaagctaacaggacagaggttctcatcatctcatatattagaagtgtattcgtggttcctttagccaaatggtc

SEQ ID NO: 130993 - DNA, 305 bp, Glycine max
  Clone ID: PAT_MRT3847_89294C.1
cacgcgtacgcagaatccggatccagatcgatccgagctaaccaaatttatttaaatttgactgtttcatatttaattttatcctaaacttaaaccaatccaacttgtgaatacaagtataccggggggagggggagcacatcctgtttttgtatacatgatactaattaataataattaaaaagaaatttattaaaatattttgtatatttattttccactcgtgtatagtcagaaatcaaaagaaaacgctgtttacaagcgatactgaattttaggaacttaaaaaaacatatcttttacta

SEQ ID NO: 130994 - DNA, 350 bp, Glycine max
  Clone ID: PAT_MRT3847_89295C.1
aaaggggaccaaagtttaaggataataaacaaaggggggggaaaaaaaataagggtacatttaaaagaggggctttttttaaaactgcaaaaaaatagccccaaacctggtgggctaaaaatgccaaagaaaactacccccgtacattttcagaaaaaaccttttaaaactgggggtttaaacttaaaaaaataagcttttgggtaaaaaattatgtttaaagcttttgaaaacattttatttgtaaggattgggaagggaataaagcaacaaaaaacataaatttttgtcaacaagggcaattggggacggatgggaagctaccgcttaggtaaaggattgaacggcag

SEQ ID NO: 130995 - DNA, 119 bp, Glycine max
  Clone ID: PAT_MRT3847_89296C.1
gacaacaaaatttgccacatgccaattcacgcctcaatttctttcctcaacgtttccatcacacatagatcccaatcctctcccatgccctatgttcccctcacttccatgggcacaca

SEQ ID NO: 130996 - DNA, 268 bp, Glycine max
  Clone ID: PAT_MRT3847_89297C.1
cacaagcgtccgataagcactatgactctgtctaatatctactactcacaataaccaagtaagagagatagctcgtgcaaggaacataatgcagcaaccaaatgctgttcgagatctggatggtgaactgcgtcaagcactacgtatatcacatgatcgcgttcctcatggtatgcggctatcagatccatctcacatggatcaaggtgtattaccacgatgactgtctctatactgcacgatgcccgcacctaccttatggatgacg

SEQ ID NO: 130997 - DNA, 3395 bp, Glycine max
  Clone ID: PAT_MRT3847_89298C.1
accaaacctcactgcttcctcacccttttctcctaatccgttaacgacggcgccatgaaggtccggtcgatgaagctgaaggaggcccacaccgcgaagagcggcggcgcggccttctgctccgtcctgtgggaccagaaagcgaagcacctgatcactgcgtcctcctccgacgtcgccatctgcatccacgactcccttttcccctccctcgctccgaaaaccctccgccaccaccgcgatggcgtcaccgccctggccctcagccctaattctacttgcctcgcctccggatccgtcgaccactccgtcaagctctacaagtatcccggtggagaattcgagagaaatattacaaggtttacacttccaatacgttccctggcatttaacaaatctggaagcatgctggcagcggctggtgatgatgagggtatcaagcttataaacacatttgatggtaccattgcgagggttctcaaaggacataaagggtctatcactggcttggcttttgaccctaatggcgaatacttagcgtccctggattcaactggaactgttattttgtgggagcttcagtctgggaaaatcattcataacctcaaaggcatagctcctgacactgggctggatgtttcaactatgaatgttctttgctggagtcctgatggtgagaccttagctgttcctgggttgaaaaatgatgtagtaatgtatgatagggacactgccgagaaggtgttatctttgagaggtgatcacatacagccaatatgtttcttgtgttggtcacccaatggaaagtacattgcttcctctggtttagataggcaggttctgatttgggatgttgataggaagcaggatattgatagacagaagtttgatgagagagtgtgttgcatggcgtggaagccgactgggaatgcattggctgttattgatattatggggaagtatggtatttgggacaatgttattccttcgtctatgaagtccccaaccgaggatatacctgtgaagagtaaaagcaatggggttgtttattttgatgaggaggatcctgaaaatagtgcaagtgaaaactcgagtgatgtgggtggaaatagtaaccaggagtctgagccaccaagcaggaaaagatcccgtaaacagtctctgagtgaggaaaattctggtgaggatggaggtgaggaaattgtatcatatccaaaggttgatactaacaagaaacgaaatcgaccaagcaaggaaaatttggatagtgtgaatatgggatttagaggcaccatggtaacatccaaggcaaagatgcaggagccatttcaaccaggatctactcctgtgcagcctgggaaaaggcgtttcttatgctacaatatgcttggatgtataacctctattgagcatgatggatactcccatattgagattgattttcatgatactggaagcactccacgagttccttcaatgactgatcattttggatttacaatggcagcattgaatgagagtgggagcatatttgcaaatccttgtaagggggagaataatatgagcacccttatgtatcgtccatttagtagctgggcaaataatagcgaggttagattatgtgtttaacctagttgaaaaattcattgattttttatagaagaaaatatatatgaaagaagatatgtaattacactaattttagttttgtatggttattaatattaagacatacagcatttcagttcttatgagttacagcactctgcatgatgtgaaatcttaccatattctcactgtttaaaattttggcagtggtctatgcgctttgaaggagaagaagtgaaggttgttgcacttggttctgcttgggttgcagcggtaactagttttaactatcttcgcatcttttctgaaggtggtttgcagagagacgtgttttcactagatgggccagtggtgacagcatccggtttcaaggataagcttgcagttgtcactcatgctactgatggccttctctcaaatgatcagaagctagagtttatggtatttaatattcctcgtgggaccctacttcttcaaggtcgcttgccactatcccctggttcatccctaagttggtttgggtttagtgaagaaggccaattgtgttcatacgattcgaagggtgtgctaagatcatatacaagcaaatttgggggcagatggattccactcttcagtgctactaaagagaagtcagatgaaaactattgggtgactgggttgaatgcaagcaaggtattttgcgtggtatgcaaaaagcccgaagacttccctcaggtgatgcctaagccagttctcaccccgttgaatctttcgtttcctcttgcttcctctgacttggggggatctgaagcccatgaaaaggagtttatgatgaacaacttgcgtctctatgagattcagagaacaatggacgaaatggcttctgttggtctggatactacttcacttgatgatgatgctttcaatttcgaagcagcacaagataaatgcatactgaggctcatagcagcatgctgcaacagtgataagcttgtgcgagctactgaacttgtgaagcttttgactctggaaaaatcaatgagaggtgcagtaaaacttgttactgctatgaagcttccaaacttggccgaaaggttcagcagcatattagaggaaaggctacttgaagaagccaaaaaagctatggaaaccaacatcaaagaaaatagtgttgcacctgttacagctgatgctcttcctaacagaagcaaggccccaactcacactgaagcattaaatgcagttaccatgtcatcatctccaaaattatctgctccgtcattcctaaggaaagacaaaacacaagagagagctaaagctggcacaagcaaaactgcaatggtaaatgaaaatttgaaggtaaagcagacaggggaggaaacaagtgacaaggtggggaaggttgtgcaacaaacttctcatccgtatgatccctctacgaagtcctcaaataagaatggacttaacaagtcagagactagtttgggacaatcaaatcgtccttccaatccatttttgaagtcagaaactagtttggaacaatcaaatcgtccgtccaatccatttttgaaggctattatcaagtgaagaaattcgtctactctaatgatgtggaaaacacgatggaggtttcgggtagtttagttaaaatcaattgtcgaaatagggtgttttactgaaaacaggcttgcttctaatttataatgatcaatttataaagaaaaaagagcctagagaaaatggaaaaccctttgtaaattagcataaaatcttgtcgtaattcacttaaaaaaaaatcttattgt

SEQ ID NO: 130998 - DNA, 337 bp, Glycine max
  Clone ID: PAT_MRT3847_89299C.1
gacagcatatatatcagtaatctatggcatgctatacctacattatgatgatggtctttgtagttgatagccatggctacccggggaaagcttgaggttgacattgatctcaggtccaactcagactggtcctggcatacccttacgaatcttactgggatattcgctaaagccttacgacatgattacaaacgcattgaagttcttgatggtgatggctagtctactggttctatgcggcacataaggtatggtgaagggtcaccacttgtgaaatcatcctttgagaagattgacgctgttgatgatgaaatgaaagtaatgtcgtacactatca

SEQ ID NO: 130999 - DNA, 780 bp, Glycine max
  unsure (1)..(780): unsure at all n locations
  Clone ID: PAT_MRT3847_8929C.1
ctaatttccatcctttcgatcttcccttcttctccttctccttcatctnntttggtcgatgctccatctcaaccacaccgcacagagagtatatatttatgtgtgtgtgtgtgcattgacactctgatcttccacgcctgcccaatttcactgctccaatttcagtctcgtaaatcccccaattgaagagggagaaaaaaaaaacacgaaaagctcttgctcaaccccagacacacgcagagtgacgaaaaagtaaagacccggcaattcattgggacactattttcataatctctctttgaattgcacatgtgactgttgaagaattgcacgcgtggctgttgcagagagtggtaggaaaactatggcagaccatcgaaatggaagtacacaaccccccaatggaaaggccagtgcagcaggatctgcatattctattgatctgaatgcatttcaatcccgattgaaatatttttataagcattgggatgatcacaaaacagatctgtggggctcttctgatgcaatagcaatagcatgtcctccaccttcagaagacctgcgatacctgaaatctaccgctctgaacttatggctgcttggatttgagttccctgagacaattatggttttcatgaagaagcagatccatatcctgtgcagccaaaagaaggcttctattcttgaatctgtcaaaaaatctgccaaagaggcagttggtgcagatcttggtttgcatgtcaaacctaaaaatgatgatgggactgctctaatggatgc

SEQ ID NO: 131000 - DNA, 784 bp, Glycine max
  Clone ID: PAT_MRT3847_892C.1
gctatttcatgccctcttatatgctcgctaacgtttgttagctcgtttccaagtacagaaggcgggtctgggagacttttaagtgagagaagaccgctgataaaacagtagtgctgctcactgataggtagggaggaaggaagcatagcaggggaaggggatagcaagagagacatgcgagttcgactctcgttctatccatccatgttcagcagtccttgtccatgttggaactgttgatggcagtaccgctcaactacgagatgcttgaaagtagttgcttttactgtatttattgatattgggttagtgttccgtgtaccgcaccgagccttaataggttgtttgagattctgtaagtaactactccgtgcttcaattggtcaaagtaaatgaaatgaaacgttgatatcaatcactttttatataagaaatcattagcaaaaatcttaagaaaagaaaggtaggtttcttacttatgaaaaggttattggactcttgtgctagaattgcttttttttggggagaaaaatgaaaattatcgtctaattgaatttctttgaaatagtgttgtatatagagaacatcttctatcatatctcatcgcatctttacagtttatagattgagaaagtgttccgttagtgttgtaagcgaccttgcttggttaacaatttggagagtttgcttttacacggaaacgaagactttcgagaacaaatattaaaccgggaaaaaaaaaaaaaaaaaaaaaaaaaaaaaagcggccgctctagaggatcca

SEQ ID NO: 131001 - DNA, 343 bp, Glycine max
  unsure (1)..(343): unsure at all n locations
  Clone ID: PAT_MRT3847_89300C.1
tttttcctgtgtcgcgagggcggacgcgcggggaaacagatcggagtgccgcaccccaccctaaccgagaacgacnacaccagaaccagaaaaggacgagccgcgggagaaacaggggcagcgggagctccagcaagcgcacaaacaccggccgaggccgcaggaggtacccaggcatgagcaacacaaaggaaaccaccaccgagaccgaggaaaggggaggggcaccggaggaggacaaattcgagggcctttaaaggggagagcccactgagaacaagggcttccaatgtggaccaaacagtgcctgcaccccctgcactcgcaacagagcagttgggag

SEQ ID NO: 131002 - DNA, 445 bp, Glycine max
  Clone ID: PAT_MRT3847_89301C.1
aaccccggtttcggtccggaattcccgcgtcgaccccgcgtccgcggacgcgtgggctactgcaagccctgacgcgagtaacagacacggcttcctgcaccgagcacaccggctgaaacactctgtgcctctttctttgcttagaatgccacatgaatatggtgactgaatttttcaatcactccccacctgagatactccaacaggttgagcaaggaggacgctgactcagcggttgggctagtggatgtatgggggtacatgacatgcttaacggtctccaaactcttgatagcagccttagacctaatcacaacggacatactataccgttatggtgaaccactattcatgtccttactggtggagaacatagaagactcaccctatccagcatgcctatctacttaatagagtcctgaaagagatggtgcacataaagatc

SEQ ID NO: 131003 - DNA, 784 bp, Glycine max
  unsure (1)..(784): unsure at all n locations
  Clone ID: PAT_MRT3847_89302C.1
tcggacgcttggggggcacatgatttcatcgcccaccacaccacaatctaattcgcatgaatgcacgatgttagattaagcgccagaacaaaatctggttctgaagaagaaagcaactattgtttgacacgagggagatatgtgcatattcgaatcctcttcaacccacttgctacttctctctctctttgccttgctaaactctgcaagtgaagcaactcctatttataccgcacatgcctgcacagatggatcctattacttacccaacacaccattccaaaccaacttgaacctcctcctctcatccctcgtctccagcgccaccctccacgacggattccaccgcaccaccatcgacgatgtcaagggactcttcctctgccgcggcgacgccaccccctccgcctgtcacgactgcgtcaccgccgcggccaaaaatatcacagacctctgcaccaaccaaacagagtccataatctggtacgaccactgtatgctgcgttactccaacagctccattctcaacaacatagttccaagttttggcctcggtaacgaaccgagcgtccctgactcggaccacacacggttcaacgatgttcttgcgcccacgttgaacgatgcggcacgggaagccgtgatttcgataagaagtttgctacaaaagaagcgaatttcacgagctccatgaagctctacacactggncgcagtgcacgccccgatttgtccacttnctgagtgcaacacgtgccttcgcaagctccatcggtgcctttccg

SEQ ID NO: 131004 - DNA, 364 bp, Glycine max
  Clone ID: PAT_MRT3847_89303C.1
cccacgcgtccgttcgttttggttatttacttgttacatggatatttcaacatctttgtttttctccggttaccaatattatctttacttcagaatatggttgagatataatctcaattaagaaagtggctcagttgtttattctcgttctttgaaggttgacatgtcactttttacccgtaagggtgccattcataacttcttttcattttttcctatcaagtatgcgttttagctccgcgttaattaaacgctcaaaatcagtctctctctttttgtctttgattatttaaccttcttggtcaagctctaatttcaagcaacgttgttaataaactgaggtccatcctaatttagtctgtgt

SEQ ID NO: 131005 - DNA, 473 bp, Glycine max
  Clone ID: PAT_MRT3847_89304C.1
tcgcttgagtcgcggcacgcgccggagcctggatagcggtcggccgccgcccttttttttttcttttattatcaactagttacccattcttgatcccagatccacatcagtggctgtttcacaaggggcgacccttacggggggccctcgcgtggacactagcgcatctggggcgccgcacccatatagcgcctgcctgctaacgagacccccccatcccacacgtataggtcctcggatgccatcgacacctttcatgcatttttccgagaatacggctggaacttatgaggccctatcgtgcctaaccatgccagcaggtccttgatgactttgagcctagcgcatgtttccctctgatgcaggatccatcccgaggcacctggcctcacgctgtgcttacctggggctgatggagagctcacagtctacctcgacttgtcaggagcaaccgatatgactgctgggactcc

SEQ ID NO: 131006 - DNA, 1058 bp, Glycine max
  Clone ID: PAT_MRT3847_89305C.1
tgaatgcatgtttttaactgtttcgtgagcaacaatggtccctttcattgttttctgtgtgttttctatggcggttttaccaagtagctcctcaagcttggaattgaccatatctgtacctggttttgcttcttcaccaacccttcttccctcatcatctgtgaaagaattggacataaatcaagtacctcttgaagaagattggatggcatcaaacatggaagatgaagaagaaagcagcaatggagaacctcctcgaaagaaactccgtctcacaaaggaacaatctcttctccttgaagaaagctttagacaaaaccacacgttgaacccaaagcagaaagagtctttggcaatgcaactgaagctgcgaccaaggcaagtggaggtgtggtttcagaaccgtagggccaggtatcctaataataataatgaataaagtggagtaggtgtttattatgcaggagcaagctgaagcagacagagatggagtgcgagtacctcaagaggtggttcggttccctcacagagcagaaccggaggctccagagggaagtggaggagctgcgagccattaaggtgggcccacccaccgtgatctcccctcactcctgcgaaccgctcccggcctccacactttccatgtgtccccgctgcgagcgtgtcacctccaccgccgacaaaccgccctccgccgcggccactttgtccgctaaagtgccgccaactcaatcccgccaaccctccgcggcctgttgaccctataactatagtccatcgcctactctgcacgccacctctactacctcatcatctaattaatcagaaacagggcacaaacttaactaaactttacaaaactaaaaagttagtgtgaatgaagatataatatgtgttagaaaaaataatgtttttttttttttttttactaaaagggcgttttcggatagggaaacttttgtagttagtagtagtactttcaatggtcaatgcgtatctgattattgggctttcatattgactttctcctttttcaaatatggatagaacttttattt

SEQ ID NO: 131007 - DNA, 2745 bp, Glycine max
  Clone ID: PAT_MRT3847_89306C.1
gcgcccacgcgtccggccaccctttcacattctaaggtcatattcaatcagaaaagcaggtgcaaatttagttgaagtatgacaggttttgtgatagttgaggggtgggagggtaactttttgtcctacctagatagggatttcgatggaggagatgtcctttgcggttgcagtgccattaagagtaggttcagatgattgtcatgatagtggcaatttggaggatgaagttggtattgcggaagtcataccaccaattcaagatagggaaggagagagtcctatgttggatatgatatcacaaaattccccgatgatggcaacttcacttgtttttggagatgattgaaagcttaatatatgccaatatagtttcgccctctgttggttcaccagggcatttccctttgctcaacgagactcgcacaatgttcgctaatacttatcaatcacccccagtccctcgtaacggctaagaacccatcgcattatcagttgaccttcatcctagccgtgatgttgactatgcaaggattgaggcagctggagcaatggtgattcaatggagcggcgaccgtatatttggggtgcttgcgatgtcaaggcatattggcgattgctattcgattccttggattattccagaaccagaagttacgttcgttccccgtacaaaagacgatgagtgtctcattctggccagcgatggtctgtggggtgttatgacaaacgaggaggtgtgtgacctcgctcggaaacgaataattctctggtacaagaaaaatggcttggaacaaccctcttcagaaaggggagagggaattgatcctgctgcacaagcagcagcagaatacctatcaaaacgtcgactctgatattatgactgatcctcttgctgtggcagtgagccttgtatgaaacctcaaagttagatctggaccaaagtcttctgctgttgatcttcatcagttgcctcaggaaaaaggggtgagtggaacagttggtcggagtgtttttgaattggattataccccactttatggattcatatctttgtgtggaagaagacctgagatggaagatgcaattgcaactgtacctcttcttctgaaaattcctattcatatgctaattggtgatcgggtaattgatggaataaacaagtgttttaatcagcagatgacccatttctttggagtctatgatggtcatggtggctctcaccttgcaaactattggcgtgatcgtaatcattaggccttggctgatgaaataggaggctttcaaggtgggttccactttcacaagttttagtactgttagtcgattctcctctcaattatgcaacaaaatggagcttgttcaagaagtttgtgtcggtagtggattcatatcaatggccatcttttgcccccgaaactgttggctccactgctgttgttgctgttatttgtgcatctcatatcatagttgcaaattgtggtgattcacgagcggttctatgtcgtggcaaagaacccatggcattatcagtggaccataaacctaaccgagacgatgaatatgcaagaattgaggcagctggaggaaaggtgattcaatggaatggccatcgtgtatttggtgttcttgcaatgtcaagtctattgcgatagatatttgaagccatggattttccagaccagaagttacgtttgttccccgtacaaaagatgacgagtgtctcattctggccagcgatggtctgtgggatgttatgacgaatgaggaggtgtgtgaccttgctcggaaacgaataattctctggtacaagaaaaatggcttggaacaaccctcatcaaaaaggggagagggaattgatcctgctgcacaagcagcagcagaatacctatcaaaccgtgcccttcagaaaggaagcaaagataacatcactgtgattgtggttgatttgaaaccctatagaaaatataagagcaagacatgatgatgattgcaacttcacttgttattgaagatgatagaaagcttaatataatccaatatagttttgccctcttatttttcaccagggcatttcccttagctcaacaagattagcacaatgtactataatacatatccaccttccccagaaactcttaactaatcaagagtcgccttgttgtttactatgctgcattggggacttgttgtattcattattatgcctccgagtgcaaaggctctgtgaggtatttttacttaatattattttagcccgtgtgttcataaaggagcagtagctgattggcaagagtggcttttacctgattatcctctcaattatgcagtaaaatggagcttggtcaagaagtttgtgtcggtggtggattcatatcaatggtcgtgatccaagtccattgcttacattattatactctagcaatgatggtgggggacatatagacaagggtgcctaagaagaatcacagttcctttattctttttggggactatgaatgtggtgtacctgtgcataatgttgcgatgctccacgtaattctgaaagtaactagttgtaaatgggcaattggctaatcaattaattggtgtactctgatgatgcattcttctctcaaggaatactttgttttcttttaatgagttttgatgtagtttcgttgacgttgaaggtgtccaaatatttgatagctcgtgctggttgtaatactaattctgatattaattgaacaacagggattagcc

SEQ ID NO: 131008 - DNA, 382 bp, Glycine max
  Clone ID: PAT_MRT3847_89307C.1
tatgggtccactaataaagtttttcctgaaatgggaacacctcaaaacatccgtgttaaactcaatgttgttaatttgatgcagcaatcaaaatagttgacagtggtcttcccgtaatattagctcaaagatttcgattcacagccctaaatttaaaaatttagaagcaagggcttacaacattgatcatttggtatgaatggattttaaggaataacttcactcatgactaaggcctatcaaaaaagttcagcacaagttcaaaattaacagcacaaaagtagaattgtagttacgatataccccttaaagtattatctactcctttctcctatttgaagcaatattttcattgaaactaatggccccttgacaaatcttt

SEQ ID NO: 131009 - DNA, 716 bp, Glycine max
  Clone ID: PAT_MRT3847_89308C.1
aataactaataattataaatattactattattactagagagtgcgcgctcgcctgtgatgcgttgcgttgcctcagattcaggcaactcatggtggatgtttctccctcactagagttgacaaaggtagatgaagttgataatgctagagaagggtgtggtgtggcacttagcttagctatttatgattgcaatttttccaaaaatggaagtttggattcgttgatgttgaccggatctgagtaccccatttcactatcaccaccttttagctatagttcatgccttgcatcgcctgaatttgcttccccttttgtcttataaggttcattaggaatggaaaatgcctccctttcacattcttagatcctattcaatcaaaaaagcacgtgctcatttagttgaagtatgacaggatttgtgttggcagaggggtgggagggtaactttttgtcctacttagatagggatttcaatggaggagatgtcgctttattgttgtggtgccattaacagtaggtaattgagaatgtaattcactctgtgataacccaaccataggtccccacatggatgtatccacatttaagctgatcgccgacacagggttgatatctaattctgtaactaaacgcttcaccgagacagttgcaagtttggatgattgtcatgatagtggcaacttggaggatgaaattggtattgcttgtagtcata

SEQ ID NO: 131010 - DNA, 560 bp, Glycine max
  unsure (1)..(560): unsure at all n locations
  Clone ID: PAT_MRT3847_89309C.1
ccacgcgtccgcaaaattatggctccttaggaatggaaaatgccaccctttcacacttctaaaggtcactacttcaatcagaaaaagcagggatttcgatggaggagatgtcctttgcggttgcagtgccattaagagtaggtaattgtaattgcaattcagtctgtgataacccaaccacagtagttccccacatggatgtatccagatttaagctgatgggggatacaggggttgttatctaattctgtaactaagattttcaccgaaacggtcgcaggttcagatgattgtcatgatagtggcaatttggaggatgaagttggtattgccggaagtcataccaccaattcaagatagggaaggagagagtcctatgttggatatgatatcacaaaatagaagcactttggttgctggtgatgaagagttaaccatggaaattgaggaggattcgntgtcgtttgaaggtgaccagtttgttgatagctcgtgttctctttcggtagtcagtgagaacagtagtgtgtgtggagaggagncattctgttttgaggcta

SEQ ID NO: 131011 - DNA, 536 bp, Glycine max
  Clone ID: PAT_MRT3847_8930C.1
gaaagagaaaacgaatatgccattttctacagcttggaaactcacagaagcattgcttttacagaacagacagagactcctttcccccgctgtcaaaagccacaacttgcacagcacgtaattaaacaaaactccattcccttccccattaccctccagcaagattctcacccctcctgtttctcctacttacatgcaactccaagttcacatgcaaagattccaaacatcacacaaaccctagctacctaactaacgcactcactcactaccataagaacaaactaaacaaatgtaagagaaaataagctatgcaataatcatgtaaaacagttttacactctcattcaatcacaaataattacgtctaataagtttgtttaactttaaaataatactcataataatttttgattgattgagagagtaaaaattgatttatgattagttgagagtgcaaaaatgtttatatttgaactgataatgcatagtccttaaactcatgatctggcttaatttctttttacattacaaaa

SEQ ID NO: 131012 - DNA, 736 bp, Glycine max
  Clone ID: PAT_MRT3847_89310C.1
gtttgccctctaatttttcaccagggcatttcccttagctcaacaagattagcacaatgtactataatacatatcccccttccctagaaactcttaactaatcaagagtctccttgttgtttactaatgctgcattggggacttattgtattcattattatgcctccgagtgcaaaggctctgtgaggcataaagagtctccttaatattatcttagcctgtgtgttcataaagaagcagtagctaattggcaagagtggctttcaaggtgtgatccactttcacaggttttagtactgttacctgattctcctctcaattatgcaacaaaatggagcttgttcaagaagtttgtgtcggtagtggattcatatcaatggccatgatccaaagtccattggttacattattatactcaagcaatgatggtgggggacaaggacaaacaagggtgcctaagaagaatcacagttcctttattctttttgggaactatgaatggtatacctgtgcataatgttgtgatgttccacgtaattcttaaagtaactagttgtaaataggcaattggcttatcagttaattggtgcactctgatgatgcattcttctctcgaggaatattttgttttcttttactaagttttgatgtagtttcatttaatttgctaggtgtccaaatattgaacaaggttgtaatactaattctgatataaattgaacaacagggattagcc

SEQ ID NO: 131013 - DNA, 888 bp, Glycine max
  Clone ID: PAT_MRT3847_89311C.1
gccgctactgtgtttgaagtgagagaccttacaattgcaatctcaaattctcagtttcatctcgatcaccttccagatccatcgcagagcccgattccagattgcgaaattccgatggataaaacggtgaaagacaactcagcgtggaacgacatcgttttgcagggggtcatggttctggtgatggtcctctcctacttcttcatgcacgacgtgcccaagaagctgtgggccaagctccgtctaagcaaccgcgccgacatccaagccaagcgccacttcgtccaaggggcccagctcctggcccgggcccgcgcctccaagtccaaggccctcgccaaggaggcccaggcccaggctcagcgcgccatcgccctcgacccgagcgacgccgcgccgcacctcctcaaggccctcgccttagacttcctgggcctccgctccgctgcgctggactcgctcgacgaggcgctctcccccgccgccgcgaagtccctctcggactcggagcgcggcgacgcgctcctcaagcgcgccgagttgagactcggcacgagccagcgcggccgagtcgactcggcactcgcggacttgaccgagtcggtgaggctcagcccgaataacgctaaggcatttttcgcgctgggggattgctacgagcggaagaagatgaacgatgatgctattagggcgtacgggacggctcttgaattggaaccccaattccatgctgcggaacaagccctaaacaggttggattcttcgcccatgaacaattgagatcttaaaaaagtgttcttggtctcaatttgaaactgttttgatgttagtgtgtgttgtacgagtttgggtcccggtttcatttataaaaataacacgtttgggtcc

SEQ ID NO: 131014 - DNA, 1607 bp, Glycine max
  Clone ID: PAT_MRT3847_89312C.1
gcaaatagtccatagtgaaacttccaacctctcctcacctaacctaccattcatccaattcttcttccatattcccttattcccatgttgttttgatgtatgctttctctctaaacatggtgctgcatcacagaaagcttttattgtttccaccaccaccaccaccactctgtagaagtgcctgtcctgagaaatttaatgaccctctacccccacctaactccccagatgattatttgacccaaagtcccaccaaaaacatcaaaatctccaaatacttgatcataagtttctccattgtagcaaccgctttcattgtcctcagcttctacgccatctacgccaaatttttctctcctcggaacaggtcaatacgaagaacactatcacgcccagaaacagaacaagatttcttggacgaggaagaacaacaacaacatggtcctgtcgttgaccatcccatctggtacatccgcaccaccggtctccaacaagcagtcatcaccgccatcaccgtctgcaattacaaaaaagacgaaggcttgatcgaaggtacagaatgttcagtttgcctcagcgagtttcaagaggacgaaagtctcaggcttttaccaaagtgtaaccacgcttttcacttaccttgcattgacacgtggcttagatcgcacaccaattgccccatgtgtcgtgctcctattgtcactgacccaacaagggttccttcttccatggaccctactgcgtttgaaacaagttcttttgtggaggagatttttgaaaatagtgcggagaatactcaaaatagtagtgatgatttgttgaggggtgaggaagaggaaagagtgcaagaagatgaagcgtgtgaagagaacttggcttctgaacttgtggtgactgtgcagcagccgagaagatcggtgtctctggattcttcttctgctgctaagatcagtcttgctcttgctactgttgtgtcaggggaatctcacggggatcattcaaagagggttggtgggaatgggaatttggctactaaaggtggttctagttcttgttcttcgactagttcagtgaaaaggtcacgatcattcaatgccaaacacttgctatcatggtatagccgtagtcagagaaagccaaatgctcctttgagaagcttctgattgatttcgagttggaacccagccttaggtcggttctatgaaaaattattaggtggtctgacaccattactaagtatctatagtctcgatactccatcaatctctatgtaacatatgtctaagttttttcaatttaccagaaagaattaataaaactcaaatatatgttatacagagataagtgaagattatgatggtcatggaccatcctaataatttctctggttcttgccaattagagtgtcttttgaactctcaacaaaggtgagggtttgaagggtttatgtgtgaattgatgtaataggtcatgtgatgatcaagtgtatataaagtatgatagcaaagcaaaaaggttatgaatgaattgaaggttgatatccttgccattttggctgatcaaaaataaaaaaacaataaaaacggcgcggcccgccgtacctgagt

SEQ ID NO: 131015 - DNA, 1166 bp, Glycine max
  unsure (1)..(1166): unsure at all n locations
  Clone ID: PAT_MRT3847_89313C.1
cccacgcgtccgtgtatttttagtttttgttttaatgtttttcaggatgtttgtgcctcacgtagagttgacaaaggtagatgaagttgataatgctagagaagggtgtggtgtggcacttagcttagctatttatgattgcaatttttccaaaaatggaagtttggattcgttgatgttgaccggatctgaataccccatttcactatcaccaccttttagctataggtcatggcctgcatcggctggatttgctttcccttttggcttagaaaaagaaaagagagagtgagagacaaagagagagaagggaagcaaccaccatacttgacaaaattagggctcattaagaatggaaaatgccaccctttcacattctaaggtcatattcaatcagaaaagcaggtgcaaatttagttgaagtatgacaggttttgtgatagttgaggggtgggagggtaactttttgtcctacctagatagggatttcgatggaagagatgtcctttgcggttgcagtgccattaagagtaggtaccacgcgtccggggatttcaatggaggagatgtcctttattgttgtggtgcttaagagtaggtaattgtaattgtaattcagtctgtgataacccaaccatagttccccacatggatgtatccagatttaagctgatggcggacacggggttgttatctaattctgtaactaaggttttcaccgagacagttgcaagtttggatgattgtcatgatagtggcaatttggaggatgaagttggtattgctgaagtcataccaccaaaacaggatagggagggagagagtcctatgttggatacaatatcccaaaatagaagcactttggctgctggcgatgaagagttaaccacggaaattgaggaggattncattgtcgttggaaggtgacncagtttgttgatagcntcgtgttctctttcagtagtcagtgagaacagtaagtgtgtgtggagaaggagtcctttctgttttgatgcttacttcggatgttgggaacaccgtgttccgccagacgtagagaagagcatcagtgctgtcaatattgtagctgaggctgttgactggggggagtcaaatattgacccagatttatggactgatcctcttgctggggcagtgagccttga

SEQ ID NO: 131016 - DNA, 1351 bp, Glycine max
  Clone ID: PAT_MRT3847_89314C.1
gtgacttataaatttgggcagggttgtttaaataaagaatagcgctatagaattgaatggagagaaaggtggttcattaggattcaaaataattgtgtgtttttggaacaagatcgatcaaaaaactgaagggttattggctttggggcattaatggtgcggtgcctatatagatgcgaaaggaagggacggatttaaaagttaaaacctattcgtgttgtgtgttggggcgtggcacgacacactttgtctgtgggtctcaactcaatgcaagcccttcgccttctcctttcccatttctgatccgattgggtggccattagtgtgttgactggatgagattgatggacatgcttctaaaagttcaataatctttaattccaaacactgttgccttgactctatctcaggggccctgtagcaacatacaacattttttctgaatttgattcaggtgataatgttaatacaaacttctgtccttagttcagttgaagctggtctatgttatgtatctgatgatgggaaagatgttctatgtgaccggatgcctagtggtgaaacttggcaggtgggtctgaaatgcaataagtaccctcttgactggtgtagaaaagctgaaccagtagaagaagataaaaggaatgctgatgatcctcgcgccgcatccgctcgaggtagctttggtcagccgtcaactgctagtataatgacagaaaatactacacctaatatggtatacaggagaaagaagctctgtaaggactcaaatttcgacctagggccaactaatgtgcaggcaagtgcaaactgcccttcagtcataagttccgctgcacatttatcatcagcggaggatcagccaactggttttcaagttaagcatgaaattgaaatggttaaagatcctaccatgccttcagtcttatttgatagagtagccaaagatagcacacataaaaacttaggtattaatagtgtaaatgatagttgctcctcttcaaagccaaatatggaaactgaaatggatgaaactggtgaatgctcctccagtataatagtcatggattgcacaagggaagaagtaacagaaaaggatttctgcattaatattttaagaagccatggacttcttaaagaagattcccctgtagataatgtggcttctggggaagatgctgttaccactggtaataactgctgttccaggtcatgcaaaatatgtggtgatttagacagttcattgaacatgcttttatgtgatcattgtgaagatgcatatcatctgtcttgctacaatccacgtttgaaaaaattaccaattgatgagtggttttgtcattcatgtcgt

SEQ ID NO: 131017 - DNA, 416 bp, Glycine max
  Clone ID: PAT_MRT3847_89315C.1
ccgggaagtcccctcccttcccctttcttattctcaactgccacagagaagctgttgtaagaaggaatttttatgatgttggattcatcctattgaacgaagcacaatctacaagatcagatttggttggcatcaggagtcaggatgacaattgcttccaacgtcaattagtcttcattttgattttaatctcatgattagaggtagtagtagtagaaagtttaagatcagtccgagtgtttaggattttgattattagggctcccaactagcctattagggctcccattgaaaggcaaataagatgctagttttccttttttgcattaaattcaggatcagtttatgattgtaaaattttgttgttagagcctcgaactaaccttcatgaacttatgacagtaaatagacatgtg

SEQ ID NO: 131018 - DNA, 390 bp, Glycine max
  Clone ID: PAT_MRT3847_89316C.1
gttctagatcgcgagcggcccccttttttttttttggggttaaaataacacacacttgacacattattacaacaatgaaatgaggtgtggacattgtcatataggcatatgatactctacaagtgggtcatgcctaattacctttattgaattaaacaaacgaacaagcgacagaaaacactaattccacataatgcacaggatctcgaagtcccaaaaaacctggctgtaacctgtggaacaaaataagctggtacacaaaaggctattatcatgaacttgacaaactctgttctcagcatgcggaaatatcctgttggatataccgtctcttgaggttataccacggcttattactacgtggaaagtacatcctctgttctcatagca

SEQ ID NO: 131019 - DNA, 298 bp, Glycine max
  Clone ID: PAT_MRT3847_89317C.1
atccgggtttttctgtaacttgctccctgccacacaccgaaccctcagccttcatctgatagttggctcagtacatgcgacaaaatagtgtaatatgggttgtgcgcctctaaggagacattagctgatggcatacatgaataaactgtgatctcttttttaccggtgttaaacacccagagcctgatattaatcaaataaaatacttatgctaacgctcttcccctattcgctcaacacattcagcaaggcctagtgcttcttagagccttctatggaaccctttccactgtctgtt

SEQ ID NO: 131020 - DNA, 568 bp, Glycine max
  Clone ID: PAT_MRT3847_89318C.1
gagagagagagagagagagagagagagagagaggagagagtattggcgcttcatcaagatgggtatttctagggattccatgcacaagaggcgtgccactggtggcaagaaaaaggcttggagaaagaagagaaagtattacccatttttctaacacttttcttttaatttcattttttttgtctttttcttgaagttgcttatttttcgtcttgcacatacgatgtggtttgaataagaatgagaatggtttcaattcatctgtgtaaagtggctgttgtgttttatttattttagggcgatgaataagttcgtatctacaagtgtatttgcctgatctaggtttagtcattttcgatttttatatttcataaggcaaatagggatttcaaatggttaccttagtagtaattcgaattaaagtcatgctgaaccaatccaaaaccctctctggttgagatttggactaagatttgaatttatttcatttacaaattagaaatttagaaaggtgtttttcattcttgtttctcctgttcacaaccagagaagcatagaagactctgcc

SEQ ID NO: 131021 - DNA, 390 bp, Glycine max
  unsure (1)..(390): unsure at all n locations
  Clone ID: PAT_MRT3847_89319C.1
gcaccaggttttttttatttcatgactatgggtcatttccattttagttccaagaagttccactgataccattttcttttttaatctctctatggaatcatttctccccctaaagtatatcccttttancttgtaattttaattttctaattcattgttcaattctacttcacaggaatggtanatttaaagtaaagaggttccacattgatcaagtaatcctcaaatctagcttcactttaactcataaacaccaatttcatacactaattcataaaccaagcagtattttatacctactagttcttacttatagcaaatcttataaattaacagattctaagatttaaaaacagaaacacttcgtaaccaaaaaaagacaccttcata

SEQ ID NO: 131022 - DNA, 476 bp, Glycine max
  Clone ID: PAT_MRT3847_8931C.1
ttccttccaggaaggtttcccgtcatcactgtatgacgtcctccttcgttgggggggggggggcgggaacttgcgaaacgggacaatgcgttatgatgggcttaggcagggcgtgtattagagagaataaacgggccagatatacaaagagccatcaggggtaaagccatgaagaaacccacaaagaaccagtaaagcaaagtcggaatggagggaaaacagtgtgagatccaattgggttggtggattgtgattgggggtgtgatgcaagtaaggaactaataaaataagcatcgtgaaattcagtaaaggcccacatcggtgaggggggtagcgtggcagaggagtgatagagatgtagtactccggcaaaatttgcagtgcgggagagaagaaaatgtactggcagagaagagagtgggcagtcttgggaggagccgtatattgcggtagggtttgcacaagaggagatggct

SEQ ID NO: 131023 - DNA, 413 bp, Glycine max
  Clone ID: PAT_MRT3847_89320C.1
ttaattaagagtttttttcccacataattactacgctggttactcctttactctatataagtcatcaggagcttgctagcatcatgttgcttatgttaagcggttaagccttaagctttgatctgatttttgcataatgattaacccttttcctatttggatctcatgatttcaaattcttccctgtaccccggttaagtgttttgatattattttttgctctcctcctgagtatctatagctcccgcttctgatggctaagttttgataaatttttgcctccattatgtgaccaacctttgctcatgcgcaccttcttaattatatttcatattaatttcctttgattccgcatgccatttcgcatcgctattccatgttgacagtgctgtgaacacctactaaccccctaa

SEQ ID NO: 131024 - DNA, 317 bp, Glycine max
  Clone ID: PAT_MRT3847_89321C.1
acattggtgcgaaccaaaaatggacataagaatagtaggccttcttacaaagttttcccttacgaccaaatgatgggcaatcggaaaaactcaatactacacacagagacagggggattccctcttcagagcctttctgtcaagatgctaaattcctaaatcccactttgtacactaaacagacacaactctgtgagcaggtttatgatacgtactcgggaagaggggggaaatcggtcactcccttaaaagatccatcactactctccggattccccggggggggttgccacatacgatctttcttaatggaaaaa

SEQ ID NO: 131025 - DNA, 425 bp, Glycine max
  Clone ID: PAT_MRT3847_89322C.1
acggacattactaacggaggtctttatagatttaataaattaataaccagataactatatatagtgtggcacaaggcttttacttatatatctttagtttgaatgttataattctactccgctactaatgctttcctccagaaattttttggcggaaaaaaaaatttgcccaatttaagaagtgacgttgaataattaatatgttcattgatgccaccaagtacctttttacggattaaaccacctcctggaatatatgattccataattacctaaaaatttaatcatttttaattatatataaatattactctaaaatccaggcatggtattatgggtgaaaaatataaatatttttatagagataaataatatttaagcgagagttatatatatttgtaaataaaagagcacgagattttttc

SEQ ID NO: 131026 - DNA, 570 bp, Glycine max
  Clone ID: PAT_MRT3847_89323C.1
attgacggtgcaatactcctccacttgctgtttttcatgtttaaatatgtaaattatcatgattcattattatataaaataacacgcaggaagtttgtttaaatttatttcttagaaaaaaaaatacttattctaataaaataagtaattttatgtattcttagtgtgattctctaaactcttactacttacaaaagaaaagatatttgctggttattttgagaaacaaatctcatcttttaataaaaccccacttttttaaaacacttattttaaaattatttttttaagtttaaacaaatcattcattgattagatttaaagatttgattggaaatgttatgttatgtaatgtaatgtaattctctggtgtcttgataaatcaattttcatatattttttctttgaaaaagaataacttttttctctctcagcagaactaatgttgatccaatttgaaacacaaacgatttttggacaaaaaaacttaattgacacctattcagataaaagagagaaaagaataaatatgatagatgattggatgtgataggaagataaaatatagaa

SEQ ID NO: 131027 - DNA, 811 bp, Glycine max
  Clone ID: PAT_MRT3847_89324C.1
caagttttaaaatctgataatcttatcaaaagattatgttatggaatattggtgatggcaattctgttagtttttagaatgaccgcgagcgagcttggcaacttaaaccagcataccaacagtttggtccctgttgatcagaatctgaagcttatttctgattttattactgcttttggagtttgggattttcatatgtttcagaatatcatgactcctcaaattctaaatgttgttacagctatgtcacctcttagtacttgtggcactgccagatccaccagatctcattttgagatcctacaggagatcaccttagtctccagcatagtattacttgtaatagtgcctctgtcgtggttttgagcaatccttttattcagatttgtttgcttttgcggatggtatcggttgtttctcagctcttaatgctaagttgtgggcaatttttataggtatttgtgttgcttgggcccgtgattttcatacctctatgttgaatcggattccctcattaatattcagctcctcaaattgaaatatacaacaacgcatccagcttatgggattgttaagatgattccggatttcattgatgatggagtacatatcacgtggtctcgtgcccttagagaggctaatcaagttgttgattgttttgcaaattatgctcactctcttggtgttcaaataagaggtttagattttattcctatttttgcttctaatgtgcttttggcagatctaactgcaaccgcatttccgcgggatttttagtgctttgtgggtttttcccctcttattatagaaa

SEQ ID NO: 131028 - DNA, 321 bp, Glycine max
  Clone ID: PAT_MRT3847_89325C.1
gccacacttgcgcggacgcgtgcgcatgccgggaaaacttgtttctgatgtcatacgatgtctggagctgagactaatctgaaccttcatcactgatgagcatatgacccgcgattgcgctgttaggtagcgaattactgcctgtacccagttcatgctaagtgggcttgatgattagaactgtttaatccgaatcttaatgatgagcgacttaggcagattgtctaaagcaatggaaaaaggcatataccaactgtcgtgtcaaagttcatgatcaggatctaaggacgagacatcactacggtgttgccacatatactg

SEQ ID NO: 131029 - DNA, 367 bp, Glycine max
  Clone ID: PAT_MRT3847_89326C.1
gcttatttactactgaaagatggattccaagaggatgatagcattacttatattcggtctgctggggatgctccttttcatctcatgagaggtgacagccagagaactgaaagaggccactggtgctgacttgactggtggccgtgtcgtaaactttgttggtttaagcggtattgctggtggtctcaccattgcgattcggtttgaatacaaaatgaaaactcacattgcatggattaagcagcttacggggaccgcacgagtcacatggattcttcggagagcctggattccccatcacttgcttacgaagaacacggattccaaatcctctctcttcaatatggacgcggccatcaggagcgac

SEQ ID NO: 131030 - DNA, 743 bp, Glycine max
  unsure (1)..(743): unsure at all n locations
  Clone ID: PAT_MRT3847_89327C.1
ggtcgcccttttttttttttttttttttttcggcgcaataaaaattatcattaaagtaaaatacaatgggtacactatataaaaaaaatattccattaacaagctggccttgaaggtaaaaaaaaatatatttactcaactgatttccacgtccacaatcattttgacagcacactttatgaagggggacccctcaaccttaacaaaaaaactcagctttaactggacaactacacggaacagagcctttaattatttgggactgtttcaatctccaccaattaatcctgacgcttccacatgtgttgcctagcaccttacctcgtatgatcccgcttttgtaatataacgaacccactcaaagtgttgtatccactcttttcccacaccttaagaaaacggactcgtaaaccagatgccgtgaacatgggaacctgtgttaagaaatataagactagtacatcaagctactatacagtaagccacagtttggagagagaatctcgacagtataatgtgatgtactattacactagaagttttgcccgcagcagggggcaaataaacttaccaaaagaaaaagtttaaaaaaaattatcgagagacaaagaaaaggctgtgtcattgccctaaacctacacccaactgaattagataatacaagtcctaactcctaatttccttaaaacacatatatgcaataaagctggattcattagagtaaatnnnnnngnacgcgtggg

SEQ ID NO: 131031 - DNA, 895 bp, Glycine max
  Clone ID: PAT_MRT3847_89328C.1
cccacgcgtccgcccacgccaaacgttaactgatactcctgatatcagaaaaagaaaaaagaaaaaaatgtctctagtgactgcagagatcaaagccaaagcagaggtgtatcatggagatgaactctgccaagagaagtcaaagttgctgctaaaggaggtagggctacctaatgggcttttgccattgaaggacattgaggaatgtgggtatgagagggatagtgggtttgtgtggctgaagcagaagaagagcacaaaccacaagtttgagaagattgggaagctggtttcctatgctcctgagatcactgcctatgttgaggttggtaagatcaaaaagctcactggtgtgaaaaccaaggagctcttggtttggatcacactcagtgagatctttgttgatgatcctcccactggcaagatcactttcaagactccttcggggctcttcaggacattccccgtctcggctttcgagattgaagagccagttaaggaagttaaggaaaaggaggaagaacacaaggaagtgaaacaagttaaggaagaactcaaggaagttaaaccagttgccagtgctgttgaagttcaagaggtttgattctcattttgaaggttggttatgatatgataataagttgattttaattataggcttatctaaatcttgcactaagttgtaatgctttcaatttctttctcttgatctacagctaggctagctagctatgtatcagtatcagtatcggcttcagggatataggcatagcagctccctgcactttgaatgaaagcaaaaattaatccaaatataactttttttaaaacaaaaaaaaaaaatttttagttgtataataatttataaaaaaaaaaaaaaaaaaaaaaaaaaaaa

SEQ ID NO: 131032 - DNA, 280 bp, Glycine max
  Clone ID: PAT_MRT3847_89329C.1
gagggaatctctggcatattttttttgaatggcacgaaattattctttacaacacaagctaaaaagccttggatgagacagatgagcatatgtttgcccaaaaggttttttaatttgaagcttgttgggggaagaaaaaaatttagaaatttaaaggctttcaaaaatacccctttacagccccctccttaaaaatcagaaaaccatggtattttcttgggcttaatctggtcatttcacaaccctgaaaggttgcagggaaaatttcccatcagcccct

SEQ ID NO: 131033 - DNA, 508 bp, Glycine max
  Clone ID: PAT_MRT3847_8932C.1
gtgagatcatttttttttgtttttttatataaaatattatttgttttgaaagaacacaaacaagtccacaaaaaaaggggggaatttcttaaaaaatcccagaaaaaaaaaaacaaaatggggtaagggggaaggaaaaaaaaaaaaaattttagcaaacaaaaaaaaaaaagccagaaaaaggggaaagggcccttgccaaaaggggggaaaccccataaagttaacccgggcccgggcccccccttgaggggctcaaccactccccaggggaagcaagggccatcttggccaaagggcccccaggcaaaagggttaaaaaccccgccattaccacccctctggaaaccaagggggggggggaccaccccagcccggaagaaaaaaccccccttcacaaggggggggattccctggggggggatctacccagggccataagggccaccaaaaacaaaaagggggggaggcacaccatgggcagaggaaacttgcccattggccctcc

SEQ ID NO: 131034 - DNA, 990 bp, Glycine max
  Clone ID: PAT_MRT3847_89330C.1
ggctctagaatatgatcctggctcgagcttgatgtatgaaatgcctctatcagcttctgaaaaagctgagggctcaaaagggaaaacaaagtcaatacgtcaatgtggaaagtatgagagagaaattgtgaagagtggagcaaaaaatgcagaagcacctcttcctatgtctattttccttgttgctagtgtattgaaagataaaagtgcaaaactactccaagaagcacggggcttggatgatgttgtcaagattttgaatgacacaactggtaatatagatgcaaaaaaagcttgcagtggggctatgaaacttcacaagaaatatttgaaaaaggccaagaaaccctagcaccaaatacatcgaaatacccaatgattcttttgtaatgtgttgtatggtagatgtgttgctccctgggagacaataatggagaacataggactttaaagaattgaaaaaaggaattcaaatatccaaccatcaaaatccctgagcaattgttgtatgtgaaatcatttttttccccttttgtatccataaaagaagtaagattgtatattatgaaatatgaaaatagaattgttgtgtatacccatctatttgtactttgttattgcatagaggaaacaagatacaggaaacaaccattcaatttcgagccaataaaattaattttgttttgataaaaaacggctcaaggataagaaagataacgacggtcaagaaaggcaagaaatgtgcgccccatgctcccctctgcttgttcttcttgctgatgcagctggggcctttgggcgcttggtgcgctggctgcgcagacttcgaggcaattttagatgcactgagagctctgttggtgtggcagctcaactaagtaatttggcttcagtcactcaagtaattgatccaaaacttcacaaacatttagagcatcttggtggaggtgactatctgtttgcttttcgaatgctaatggttttgtttcg

SEQ ID NO: 131035 - DNA, 374 bp, Glycine max
  Clone ID: PAT_MRT3847_89331C.1
gtcttacagttacaaacctacagttacacttgtgtgctctaaaacgaactctctgaacttcaccaacgtgattcgcatggcgatttccaattcaatggactttcttcaactcttcattgctgtcttcatcgcgttctcaatcgcattcagagctcaccgaaaaaaatccctcagcacttctggcgcaatcgctgggttcttcgttatggcccttcacatttttgtgggttacaggtttggggcgatgctgcttgcgttcttttactcttcgtccactctcacaaaggtaggagaggatataaagcgaatagttgatcctgaattcaaagaaggtggacaaagaaactggatacaagttctggccaatagtggca

SEQ ID NO: 131036 - DNA, 420 bp, Glycine max
  Clone ID: PAT_MRT3847_89332C.1
cccttcttacacgcacatcattgtcttagtatactcacataattatagtgccatctacctactatgcatgattagaaaaaaacatatatatgcctacttccgaacaattatatgaactttatacacagctacaaactgctgtaggtacataaaaatgaaagtaagaaaaatttgataaaaacatgaacactaagctaccgacctcacagcgatgacaatacatacactaagcatacgcagcttatatctgccatttaaagccaaactacacagtcaagaagcatgactagaggaatcttacattgacgaaagtaagacaaccacttcgaagggtaaatattgatgaagaagacaacataatctgcctgccttgctatctagaacttggcagaccacacaaagcactaacgatgaatacat

SEQ ID NO: 131037 - DNA, 460 bp, Glycine max
  Clone ID: PAT_MRT3847_89333C.1
ttcttactgttgttcccgtttgttgttgcaatcacagagttcgcgactaatgttacgattctcaccttttctcgctactccccctactccttcttccctctctttctcctccaactgccacgtgtcctcttccgctcaagcaacactacaacaacaacatgaacaacagccccttccgcaaagctcacagctggtggcattggaatatgctgacctcaacctctcttacaacttggatctgggtcacgtcaggataaggcagcatgttaatcccctaagctcttctttctcggttcctgcacaagtaccagactggaaccatgcctttgcagacccaacattgccgctcatggtggacattggatgtggcagtggcaggtttctaatgtggcttgctaaaagaactcctaaagagagaaactttttgggattggaaatacggcaaaagatagtcaagcgt

SEQ ID NO: 131038 - DNA, 365 bp, Glycine max
  Clone ID: PAT_MRT3847_89334C.1
cgcaaacgttcgtacacactagtacttctacctctgtctctatgtatcagcaagcagctttagtaatttacagtaacatatccaatggtcgcacgttcacgaaccaatcaacgtatcacaagaaaacgtgctcatcttcagccttcaaatttccaggaggggagtgatgttctctttaagagaggtcagtgcagagcaaaagggctggcacaccggattcaaaggatcctgtcttgcatcgtgcaggaggaaataggcaataccatcctttgctgatgaaaatcaacccattgagtacagaccgtcagctttatgatggcgacaacacatctggtgtgacagcatgatggtagacacatggacac

SEQ ID NO: 131039 - DNA, 570 bp, Glycine max
  Clone ID: PAT_MRT3847_89335C.1
taatttcttttttttagtcgaccaacacatagtaatatattctgattagacccttgataaaagttttgattgacacataataagcaatctggaaccaattaattgtttgactggggatttttgttaggcccatacctacgaaccctctcatcaatccacttcctcatgtcccccaacacaaggttggcggactcattgggctctccctgaatcaaagagtgatacattccatcgtagagcttcaacgacttatcctcactggaacccttttcatacagtaacctcgacgacgaagggcaggtaacgccgtcagaggttccgtgagccagtgaaaaaacggcgccgtcactttagagaaattattctggacatactgggtgaacctggagagctcccgaacggtctcttgttcggtcttgcttacacttgggcggccatgccggataacaaaatggttggaaaggccatttaaaaccgtacaatgaataaaatgtacccctggtggggtttcatggtaatcggggaatcaaccaaaaagggggccccgggaagaaacaataaaggccccgt

SEQ ID NO: 131040 - DNA, 213 bp, Glycine max
  Clone ID: PAT_MRT3847_89336C.1
acggaggagttcaacaccgaaccactatctgtactcatgatgagtgttaataataatactcaagtactgataaattgtgggaacaacacaaagcttctgtgtcatgtaagggcttttgacaggcactgtaacatggttcttgaaaatgtcaggtagatgtggactgacgtgccaaacactgttataggaaagaaaaaggcccagccattcaac

SEQ ID NO: 131041 - DNA, 1654 bp, Glycine max
  Clone ID: PAT_MRT3847_89337C.1
ggctcgagtctctctcggtgtctggaacagagattgcgtttgtttcgcgaattgtgaagccgctggtgaaatagcaccaaatatgaggggaagaagctgcagttacagcccatcaccttcacctccaaggcgttacagccgaagaaggcacagccttagccctaggggccgatatagaggatgtgatagggatttgccaacaagtcttctggttcgaaacctcaacagagattgcaggccagaagatctgcatggtccatttggccaatttggtcctcttaaggatgtttacctgcctcgagattattatactgggtatgtgttttttcattggcctaaacatagttccttgtgtgttgaaagatttcttagccagccactttgataaattgttctagtagtgtttatttaactaagaaatttccaactctgaagttgtgttaagttatctcctgaattgggatttcaaaattttttgtagtggctttttacctaagtattcagttttgtcacttctttctcagtaacaattaatactccaattatttctatggaaattttggctgttttattgaaaagagttgcagacacaaatgaagtaaaataagcgtactgtgttgaagagcagaaagaagtcgtagagtgcaaactgttgacaagtagtgatctctacactgcgcagtcctccccctctctctctcggtgtctggaacagagattgcgtttgtttcgcgaattgtgaagccgctggtgaaatagcaccaaatatgaggggaagaagctgcagttacagcccatcaccttcacctccaaggcgttacagccgaagaaggcacagccttagccctaggggccgatatagaggatgtgatagggatttgccaacaagtcttctggttcgaaacctcaacagagattgcaggccagaagatctgcatggtccatttggccaatttggtcctcttaaggatgtttatacgagggagccaagaggttttgggtttgtccaatatgtggacccagctgatgctgcagatgcaaaatatcacatggacggtcgaattcttcttggtcgtgagataactgtagtgtttgctgaagaaaacagaaagaaacctgctgaaatgagagcaagagaacacaggagggatcgatcgcatgattacaggcgatcttcacgaacctattctcctagtccagactattctccttctccaagacgaaggcgacattacaggtcaatctcaccaagggacagaaagtatagggatcgatcatactctagatcatcttatgcatcaagaagccgcagcagaagtaggagttacaataggagtttgagccgaagtccgggctactctaggtgattaacttgataagcatggtggtgggtgcggtggacaatgctttagtttgcatatgtattttttatggagcttgtgtgttgaaatacttcagaatgttggtattttgttcatctagtagagaggatttggcgtggttttgtttcagctttattactagacaacatttgtacttgatatttaattctagttttattgaactggttgtgttagattaagattttgatttgtgccattctggctacatattcttgtcattgggttatggattttcattatgtatagttttt

SEQ ID NO: 131042 - DNA, 210 bp, Glycine max
  unsure (1)..(210): unsure at all n locations
  Clone ID: PAT_MRT3847_89338C.1
ctangcaacgtacgtnagctcggaattcggctcnagatgtccctctagagntctcattctctctctctctctnntnaanttctctctnnntacantgttgtctntantcnagctgtggtatttctgtccntgccnataccccnacctagtnccctctgctcaggctcaacagtcttttcccttctctncnaagctcacaaacacacacac

SEQ ID NO: 131043 - DNA, 1754 bp, Glycine max
  Clone ID: PAT_MRT3847_89339C.1
aaaaaaatctaaaaattgtcaacgaaggggtaataagattggatccttcaagacggccccccccattattcttaagttttgttcaagtcagtttttctttttttgtagaaagtagatcatcagcatgaatagatcctagtttcatttaatcttggtacctttttttttttttttttaaactaaaagcaaagagataagattaaccatctaatacgcatcctcttttcataatcactcacaaagtgtaactttttgtcctatcattcacatatatttttattatttacaaatcacttatagtggctgcaaaataacgcttcaatacaaagccaagcaacaaaatctactaacaagaaaacttgaaaaactcgccgtgatatatatgaatagtagattataatttatatcatttatatgttgaagttgttagtaagaagatcatgctgagtttaactttaaagtgtggtggaacactgagccccttgctttgaagtgagaggcccagcaggaatagagggtccaaaggcattgatagcaacacaattaacattgaacctgtaacgtccagagacccatgttcccactttccaacgaagctttccattggctttgagattcaagactagtcttccaacaatttgatcacgaccaagttcatagccaagagacggagccacgggtaaagcatttcccaccaaagaagctgttatgagattactctcttcttggccttgataaaagggtggcacaggggtatcaccagtaatttgttggcccttgtaggttgcatagagttgaatctcgtcgtagtaaatgccaactttctggtttgggtttttggagaggagggtgagttggatggaggagttgaggtttgggcctgaaaggttaagttggaagatgtcgacttctttgagggagaattgaggctttgcagggtggaggatgagccatataacaagtattagtagtaggattgtgatgaaaaatgctgagaaagtgaagtagatcttcttgtagttcttgatttttagtccttctttgtcagcacagtgttttggagaggttattgttattttagacatttgtgtgtgagagaaagagggggggagagagagagttgaaagatgaaagaagggatgtttacaacccccttctgtcgtcttctcgcagccgtgatttcgttaatcctttggatgtggaattcagcttcttggactttaaggtggtggagttcagtttcttcacggcaacaacctcggtggtgttggtgagggtgtcgccggcggcggctttggttttggctagcttcagttggtttttggaggaattaaggttattggatttgatggttttggtttggtttttggaggagaggttagtggtgggcttgattaacttggtttggtttttggtggatttcgttttcgggggctgttcaaactcttccttttcagcatcaaactccaacaacattctccttctgctgttgctgccaccactagacaaggctttgctctctggttgatgttctgagcaaacaccactgaagcaaacagaaacaaaaaagaacaaaagaagagagaacaggagcacccttctgaaaccaaggtacaagagtggagccatttggttcctccaagatctaaagggccaggctgctagcttgcttcaatcaaaattaagaccaggatatataatactaatagagattgggtctgagcctaacccgcgaagttatgaatcaatcaggg

SEQ ID NO: 131044 - DNA, 1420 bp, Glycine max
  unsure (1)..(1420): unsure at all n locations
  Clone ID: PAT_MRT3847_8933C.1
cgcgcgtaggctcgagggccactcctttgaaggtcttaccttgtggactctcaatcctaataccagcacaaggatcggatctgcacctgctatgtttcagtttccttctttcttaaccatcttaccaatcttataccttatgtgttagtctgctagattgtatggaagtgttgagcaaaggggtgcatcgtgctatggtaccggtagatgggcaggcggagaacatgtcagctggggtggaacttgtagagtctgcttccagctaccaaatgctgactcagatggatgtgcttaggttcttgcatgatcgtgctggtgaagctgatcgtgaactgcagagcattctctctcgttctgttcaagatttgggggccgacactgaacagatttatgccatcactgaccgcacaaaactcgtggatgccattaagtgcttaaaggccgctatgttaaatgctgttcctattgttagagcctctgatgtcggtcaagatgatcacaagcagcatataaatggcagatgcaggaagcttattggtacattttctgcaactgatttgaggggatgccacgtagccacgctgaaatcatggttgggaataagtgcactagcattcactgaagaagttgcatcgagtcctttgtacacagaatcggacacccagatcaatagaagggagcttgtcacttgctttgccgaatcacccttgtctgaggtgattgaaaaggcagtgactaggcatgttcatcgagtttgggtggtggatcatgaaggtttgctcgtgggggttgtttcacttacagatgtaattagagttacaagacattctatgctatcatcagattctgatgatctgtaacaagctcagtttcatgcccagttggagctttgcttaatctgtcatgagaactgagcattttggaaaattagtaaaataggtctgttgctacatgtatggtgtgatcctaaagaatatctatagatattaatatacactatacagtagtactcctttggactcaatcgatgttagttgcacgttccatgtttcgttggtaacatcttgtttatgaaacattgagaaaattactggctgcataataatgcacaaatgttacatatgaaaagtgtttgactcaagtggaatatgctttacttagtgattctaaattttgannngagtcaagccatttatgggtcaggcacagtcctcgggcaaaactgaaggtcagaaggtggttcatacctattccaccaagtcatgtgcaaactgtgatgatattattgagatgaaaagattgaatatcgatgaaactatgacatattagtattatcgagatgagaaattggatgtccaattaggatgcagtgagggagaatgctcatgcaaaaatcatgggggaggagaaaaagtcttct

SEQ ID NO: 131045 - DNA, 151 bp, Glycine max
  Clone ID: PAT_MRT3847_89340C.1
ccttgaagtgtaatccttggacaccattgatattgttaaggccaaaatacagaacaaagagggtatccctctatatcagcaaacgttgatttttgccggtatacaatttgatgatggaagaacccttgctgattacaacattcaaaaagaa

SEQ ID NO: 131046 - DNA, 129 bp, Glycine max
  Clone ID: PAT_MRT3847_89341C.1
ctctctcgtggggtcgaacataactttagtgaaacgtttctacgttgtgcagacaattatgaggagttgctagatatcagaggctgagaaatcataggagccagattgagtgttatcataatgtcattg

SEQ ID NO: 131047 - DNA, 223 bp, Glycine max
  Clone ID: PAT_MRT3847_89342C.1
ggtagtttcattgctgctatcctctttggtccccaaagtggtggatcctgctgttgatcctgatgcctacaggaatgtcgtctttactgttaccttatttgctggaatctttcaagctgcatttggtattttcaggttggggtttcttgtggattttctttcacatgctggacttgttggatacatggcctgcacaaccatcatgactggtcttcatcaactc

SEQ ID NO: 131048 - DNA, 120 bp, Glycine max
  Clone ID: PAT_MRT3847_89343C.1
gatttgtgtaacaagtaagtcttaataggcaaaaacatatgccatacttctatatgatcctcctttcgtgactatgcaatttagcaagtttgcacattctgttttttctcgtttacaccg

SEQ ID NO: 131049 - DNA, 419 bp, Glycine max
  Clone ID: PAT_MRT3847_89344C.1
ggctcgaggttaatgtttctctgtctcggttacacatgtgttcaacctttcactatcaattcttagggataacacaatgcctgtgtaatgttctttgcaaaaggccaacgctgaggatgcacagcggacaccaccaacagttccagaaattgaatcagccgaggaaagcaagacccactaaacatccccattcactgcggctgctgcagcacaacaaccaacaggtgaggttgctgcaacagaacaacctgccgttgaggctcctgccccagaatcaaccaccgaaacaccaaaggaagaaaccaccgatgcacctacagacacggtggaagaaacacactacagaagtatgcccagaggagcctagataagttccagctgagaccgatgatgtggtggcaaatgacacagatgaagag

SEQ ID NO: 131050 - DNA, 268 bp, Glycine max
  Clone ID: PAT_MRT3847_89345C.1
gccttttcatatataaatccttccaactactttataagttattgcaatgatatcaaaaaccaagcaaatcgggaaagttctgttgccgtcatacatggattcctatttaaattgtgcataaccgtatggataagcaatacactaactctttaattgcggatccaatttggatccttaagatgtatcggcactgaattttttaatataataatatcgatacatactgattctgaattaagcgacctctattgattcaaactctctatct

SEQ ID NO: 131051 - DNA, 202 bp, Glycine max
  Clone ID: PAT_MRT3847_89346C.1
ctcgagccgattcggctcgaggggccgcaccgcagtcaacgtcgctagaatctacgatccaattaccagcacgtctcaagtaagaccgccggtgcactgactcgagatgttacggtctcaaaggaggccatgtggaatcggtacacatcaacagaggtctatgcaagcgtcacttagagctgtaacctctgcggcgaataat

SEQ ID NO: 131052 - DNA, 476 bp, Glycine max
  Clone ID: PAT_MRT3847_89347C.1
tttttttttttaaattaggattgcgatcggactttcacaagggcgaaaacctaaatatcaatggtttgtaattgcgactgacgcaccctcaattactatcgtgaattccagtgaatccaactaccttgattgcgttgtggaacgctgtaaaaacccatgacgttgataataacaatcgttagctatctatgcgacgaggagcaccccgtgtccttgacttgctctctctacacaggccatatttacgaggactggctacaccttaacaagctccgtgacccacccgagatccaggggcgatgcctatgcgtcgagcgcattctccttgctgagcttctcaaacattttagcccttatgccccttccttactccaccctatacataaccggttcctccaaaaaagtatcatcccatacattaaaacactttacttcaaaccgaagcggatgctgagcttagccttgatggaaggctt

SEQ ID NO: 131053 - DNA, 733 bp, Glycine max
  unsure (1)..(733): unsure at all n locations
  Clone ID: PAT_MRT3847_89348C.1
gggtcctatatgtagattgtgtttcatttagttattttaaacaaaattcttataaagagaaaagggacagaatataatttgaaataaaagaattttttaaaaaatgaataaaactcaaaacatagagcttttataaaattaaattataattatttttacgagaaaaaattaagaaaatgtaatcaaatactgcattaggtaattctctcgggaaaaatctcattttaagaaaaatctcttgaaaaaatatattctcgggaataaaaatctgaaacaataatccatcaatcaacttatggaacatttagaatactttcttaaggttgcgaaaatgatttttaatctcattgtaaattcttttagcttattttaggtaattttatagttaaattttcatttgataataatttttcttttgacagaaatctgataataatttattgaatctgctataaataaattgtttatcaaaatgtgccacaatttagcactgtacgatctaaagaagaggtatatacaacaaataattttaagtgagattttgataaaatatacatgctcatattaatataaaatcattaaaaattatttcattaatattcaaatatacaattataagacctaccaaanaaagtattgcaattttaatttctcaccttcgtttgctaaaacacccttaatagggaagcaaaatccaacttaatatgcgctataccanataaactcncatatc

SEQ ID NO: 131054 - DNA, 330 bp, Glycine max
  Clone ID: PAT_MRT3847_89349C.1
accacgccgactcacacaccaagggagagcgctcaaacttaacgtaacacgctctaccttttgccattctgaccgtttgctcaaacaatgcgccaccaatggactcctgctttgtatatataccgaaacgccacatacgctattacgaaaccccaccaaaggtgcgtgggcacgccggccttagcgatcccctccaaaaacacaaactattggctgccaggtaccgaaccctacacagacctacctttaagctgtgctcgaccaaaactcgccttactgatggcagaggctcggagggcgacgaagatggggctgctgctgagagagagg

SEQ ID NO: 131055 - DNA, 500 bp, Glycine max
  unsure (1)..(500): unsure at all n locations
  Clone ID: PAT_MRT3847_8934C.1
tctacattcggtctcgaattagtatcgcatatgctagtctcaaagatcttgtcagctttgggatacgcttgatcctattcatacattgataccgcgattggcttcatttcttcagttatagtttgtctgatggtatcgactactcggataaccgtagtaattctagagctaatacgtgcaacaaaccccgacttctggaagggatgcatttattagataaaaggtctacacaggctctgcctgttgctttgatgattcatgataactcgtcggatcgcacggcctttgtgccggcgacgcatcaatcaaatttctgccctaacaactttccatggtaagataatggcctaacaatgtggtgaccggttaccgagaattaaggttccaatccgggaaaggaacctgaaaaaccgctaacaaattcaaaggaaggaacaagcgcccaaaattaccaatcctgacacggggaagtanntgacataaataacaataccgggctc

SEQ ID NO: 131056 - DNA, 400 bp, Glycine max
  Clone ID: PAT_MRT3847_89350C.1
ccatacaaaagagcgagagccgtggccacatttgactggaagcatggaaactatttgcatcgcgctatacaatggctactattaaataccgcgacatgaaccttaatagaaatgaactagtttgaaaaataaaccaacgtcgaatgtaaaaatatgtaaaaggagtgtagtgacttattaaagtgctttgtaacaatgttatttatcattatgacttgtcaagtacttacttaataatagatccaaacactatagaattgcataatagctcattacctgcagatctatctaagaacataaataactcattaagtatcagacactcatgggatgaactgttggatgtgttacatgacttatttgatgcgatcttgatcaaactgattatcacacatgtgta

SEQ ID NO: 131057 - DNA, 337 bp, Glycine max
  Clone ID: PAT_MRT3847_89351C.1
aggggatatttttttatttagggggttttttttttttgaaaatgtcgtcaaaataacggcggtaggaaatggcactgaaaaacaaagcactggcattttaagaaaattttttaaagccaaggattaaggaggaatttgggataaaaaaaatacctattgatgcacgaacattgtaaaattaaaaaaagaaaattttgggaaaaaagcctccaaaagttcatatgaaaacttcaaaaaactaagagaaaaaattttgggacccctggggaaaccccgggggttaacctttaattattgacacggaccttaaagcgcaccattttgcccgacagggggg

SEQ ID NO: 131058 - DNA, 475 bp, Glycine max
  Clone ID: PAT_MRT3847_89352C.1
ggctcgagattattactactatgccgttcttattattattatttgactgcaatttttttagtgttctgaatttgtgtatttttataaggatgaatccgcccttcgtttgattttgcatatagatgtctcttcttctttggcgcacagtgagtactgagtgtattttactttttcctgctgttgtttttattgttaaattcgctgaatctttatttgtcgtgttttgaacgttgtgtattttataaggatgaatccgctttgcaaatagatgtccttttcgtttttggcgcacagtgagtactgagtgtattatactttttcctgctattcgtcaagctgatgcatgtatgctatgttaggcttatcattggttcatatgcatttgaccttttgcatcatgtggcggtagttatatatgttaatagcaatatgttgtgcactattgcttaagccacagacggcaagtgctgagctt

SEQ ID NO: 131059 - DNA, 564 bp, Glycine max
  Clone ID: PAT_MRT3847_89353C.1
gcaccagttaaaagagaatgcagaatttaatgaggaaaccagtagcagacccaaattaataatgtagcaaagctgaaataatactgtatctcaagagtctacaacttccccaagcccatcacttctctgagggagataaccctgtttcccaatactgcaccgcataaggaaaaagtgctagatgaatccactctctaacccttactctgttgtatattttcctattataacagaatcataacctcatgcttcccgtcacttcataacttcattcccaaattaccctcttctaattaactcatcactccactcatctctcccctacgtgtgtaaactctccaaatcctgggattttgtccttgctcagtatcatcatctcatttccttaatcctggacctcataaatttctcatccaagaattgctttacaaattgcctcttaaatgtttcaaattatgattattactgcttatatgatacccaacaaaccttaggggagtgaatcacaccacaaaaagctacccattgtggtggaaaaaagcccaatgtcatatatatcatatg

SEQ ID NO: 131060 - DNA, 598 bp, Glycine max
  unsure (1)..(598): unsure at all n locations
  Clone ID: PAT_MRT3847_89354C.1
cacnngtannaggcccatacaagatgattcaatggataatgactgcttttttgaggaagaaataagaagcttgtctgaaatggaaaccaactggcttatggaaattattgcagttgttcttcgacagtttgaagtgctttcttggaaatatgttcaaaacaatgatagttttggggatgaacaagtttatacaaatccagtagaggatgctgatttaatagtctccaatgattttgttgaagctttagattcttttaaacgttggcttcacactatgaagataagtctcaataaaaaggattttttggatttgtggaggagcattgctgaggggctagatcattacatttcatgcagcatcgtcagaagtgagaattggttctctaagatgggcgtctctcaatttgaagctgacatgcaagcactaatttttatttttcagccttattgtgctcgcccacaagcattttttccttgtattaatgagattcttaagcttttgaaactgaaaaaagaagaggtaaagctaatgcaagcatttttgtccagcaatcaaaatggatcagagtgtctgcatctttatggaatttctcatcta

SEQ ID NO: 131061 - DNA, 504 bp, Glycine max
  Clone ID: PAT_MRT3847_89355C.1
gttagttaccaaaatagagtcttacttataatcaaaaagagtattttaagaggtacatgcattgttgcatgcggctactaacgcaacagggtgatgttgcgacacagaacctcattcgattacagaattagttcagtgcttgaaacagaagcggagataatctcgcggaaaatgccttaatgggattattaacccgcaggtttgcagatggcaaagataagaaacctactaggccttccactcatcccccatcccgaattccttaggaaaaggaatggatctttggatatcatgagccgcccaaacgggatgaacattctataattgatgactgagctccttctacaatcaatcttccaacatgtgcgaggtttgattcaaaacctgtggggtctgatgcacttccttgaccgattgtttaagaaccgtaatcaacggagcagcatgctccgtacctctatgtgataagaaactgagcaatacaccattgacacttgtgcgagc

SEQ ID NO: 131062 - DNA, 678 bp, Glycine max
  unsure (1)..(678): unsure at all n locations
  Clone ID: PAT_MRT3847_89356C.1
ccacgcgtccgattagaatgacagtgactgttaattttatatttagtttgtattgttgaagaaattccatggttagtgtatttactgatgccaggattaatggtatgtgcaatcacatttaattttgaaattaatctttccatactgaagattgtgtgtggaaccaataatgtttatgctactgttcataggaaaattgttgaagatgtacctcgtggggtgcatgtgaactttttgaaagcagaaagaagcttacatagatgggctcttgaagaccttcagcggatccatgcagctgaagagcttgctgttgaggaaggagggggagttgaaatgcatgtccttgaagatgctggccactgggtatgtactatagtgccatagttattattttagagcatgatctcctcccatacgtttcaccttaggagatctatgctcatgatatctaaaatacttttaagtttcaaatggtgtcctagattttagggaataattttggctagtgacagcttaattgcacttttgtcccaaagtttcacaatgttgtgaattttctcctcaaaagatttttttcatgaattttgccctctaattacanaagatcacanatttcgcccccaagtaaaaaaaaaaaacgccataattagtgaaaaaactttaacanaattgtctttg

SEQ ID NO: 131063 - DNA, 508 bp, Glycine max
  unsure (1)..(508): unsure at all n locations
  Clone ID: PAT_MRT3847_89357C.1
ggagatattatagtcatgaatggttaagtgaagatcgagtttccccacatcaagatgtagaacatacttatgaaaggaagaaatgctttaaaagatactttgatggtgtggatgtaaggagacaagccaatttggagttgcaaatttttttggtggaagagaagactttcatgatgttgactctttaagggatagaggtaaattggatgcaaaatcttgggggcttgttcatggtgctcatgcactaacacttcaaaagatttcccttaagctactaaggcaaccatcttcatcgtcttgccgtgaaaggaattggagcacctacaatttcatacatagtttaaaaagaaataagatggcacctaaaagagcaaaagatcttgtatatgttcatagcaatcttcgcctcattccaagaaattcctcaaactacattgaagaggaaactagaatggtgggatatntgaagagaaaggttttcacttgatgaggatggaatcccttaaat

SEQ ID NO: 131064 - DNA, 545 bp, Glycine max
  Clone ID: PAT_MRT3847_89358C.1
atgctccgggaccaatacaaattaaaaactgtcgagggctagaagattcacttataatctttctttccaaacgacgaaatgatataagatcctttcttctacatttgggaacaattttaaatacattttaactaacaactgtttaaacacttggaacaaaagaaaaatgcatcaccactgtgggtgctcttactctttcctgtactctggattatccttcaatattacaaaaccttcaccatttggtgattggggaatggattttttcgttgggagctacgtcctgtcccctcaagcccttagaacacgtgtggagtgggtctgaaaggcagcgattgattattgacgaactgattgtccaccatcatttaccgcttgggcaacacaaacaggcactggttgacgcttgaagatctcattctccgtcaacaacatccttggctgttttgcctaaacgaggaatgtgagaacttggcgatattttcccagcacaatagctttcatgactacgcacgcgggcaacatgtgaattaatccatcaagtg

SEQ ID NO: 131065 - DNA, 329 bp, Glycine max
  Clone ID: PAT_MRT3847_89359C.1
ttgtcgcgtgcgtgaaactgtgggaaaccgcgatcacagggtgccgcaccttaaaaccgggttcacaagcagtggttacttgatgagaagaatctagcaattgtttcctacttcttggtgggcgactgatgaagggaaagaaaattactctctgcgctggtcacagacttggagaatcattttcttgtacactgttagtttattcgctgaacactctgctattcgagataggacttcgtgcaagatataaacagcttctgaatttatataagaagcttgcttaatttcatgatcaagctggagaaaatcttggattaacactcccactc

SEQ ID NO: 131066 - DNA, 1283 bp, Glycine max
  Clone ID: PAT_MRT3847_8935C.1
gtttggggtaggaataatatcttacacggtgcctgtgtacatagctgagatatcacctccaaacttgagggggggtttggtttcagttaaccagctctctgtcaccattggaattatgctggcatatctgctggggatttttgttgaatggagaatccttgcaattataggaattttaccctgtacaatattgatacctggcctatttttcattcccgagtcccctagatggctggcaaaaatgggaatgacagaagaatttgaaacttccttgcaagtgctccgaggctttgagactgatatttctgttgaagtgaatgaaattaagagggctgttgcttcaacaaacagaagaactacagttcgatttgcagacctcaaacaaagaagatattggcttcccttaatgattggaattggactgcttattttgcaacagctttctggaattaatggtgttcttttttattccagtaccatctttcgaaatgctggaatcagttcaagtgacgcggcaacattcggagttggtgctgttcaggttcttgccaccagtctaactttgtggctggcagacaaatctggtcgccggcttctccttattgtctctgcaactggaatgtcttttagtctcttagttgttgcaatcacattctacataaaggctagtatatcagaaacttcttccttgtatgggatattgagcaccttgtcgctggttggagtcgtggccatggttattgcattctctcttggaatgggagctatgccatggattataatgtctgagattcttccaataaacattaaaggcctcgcgggaagtgtggcaacacttgccaactggttgttttcctggttggttacattgacagcaaatatgcttttggattggagctctggaggaaccttcaccatatatgcagttgtatgtgccttgactgtagtatttgttaccatttgggtccctgagacaaagggaaaaactattgaagaaatccaatggtctttcagatgaatttccttctctagcagttgctttttttttttcctttcacaagctgatttaagaatttcacattttaatgtatctgggattatcgagtgatccaagtattcatttgattccttcacttgaaaatggggatcctgtaccggcgataagttctttgatgtttttttgtatgagttggcttcttgaacattcacttagactagtgctcttgctgtatgcaccttgaattgttcctcatcaatccaattcatttttatgttcttttggt

SEQ ID NO: 131067 - DNA, 1320 bp, Glycine max
  Clone ID: PAT_MRT3847_89360C.1
attcctctcaagctggaggctgctgtcccttttcctttatccacttttttttttccattgcgtttgttatttgcacatatctatcacgtctctctctactcattctctctgcaaattctaatcttcgcaaatcaacaacgtctctctctgttactctgaaaactgacttcaagttagtgtaactagctgccaagttgtgatggcattggtctctggaagaagttctgctctgaacccaaatgcacctatgttcatacctgctgcacttcgtcaggtggaggatttttcacctcaatggtgggatcttgtgaaatcttcaacatggtttcgtgattattggttgagccaacataaggaggaagaatttgaagaagttgccaatgactctactaatgatgatatggagaatatgctctcggaaacttttgatctaggcatggaagaagacttcaatgttctagaaaacgagtttgagcagttggtgatgttctctgaagctctagatcattctgttcaggatgatcctaatactggaaaagggtctcctcagagtcttaacaaggatgttaaagcttttcttattaacttgacaccaaaatcaccgagggaaaggggtcccaagtctccttcagggcttgcaaagcaccttgagaagccagcacagcacgtgaatgtgaagtgtgcctctctccgaattcaccaacctcgttgaggaaaacgtttgaaagctcatagtgatatcttgctagagctgcaagttgctgactagagcttgagatctctgttgtaataatttttgtatatagagggtgcagtagtgtgtttgtatttttcttgtttctggtcttgtatatttgatggagccctcggaactgtaggtaggtgagactttaattctgaccagccaaatccgggaatgtctatggttgatgaacttaaatctcaatttcaaataaattgttacatggcttggaagtgtgtagatgtaagttttaggtgtctttagttcaatgtggcaatgggagtgtacttttcaagccttatgatttgcgtttagagtgataatgatatactagctgctttttgcttgtacaaacacctatccattgtgtggccaagccaaattcagtaacaatttccctacttttaaaaatggaacaatgatattgatattgtaacacatttgtgcgcctcatgccatgccatgccaatttgtgttagatatgtggtttggatgtgcttcatgtaatgaaaagagtatgctgcaacttgttatgtgaaaatgtgatataataaaaagtaagtggatagttgagaacc

SEQ ID NO: 131068 - DNA, 500 bp, Glycine max
  Clone ID: PAT_MRT3847_89361C.1
actcacgcgcccatggtttttcacaaatcaacaacgcctctctgtgttacttttaaagcaggtgaccatggagcatcatcttcatatgtgtgccatgatcattttgatggattgacttcaagttagtataactggctgccaagttgtaatggcattggcctctggaagaagttctgcactgaacccaaatgcacctctattcatacctgctgctcttcggcaggtggaggatttttcacctcaatggcgggatcttgtgaaatcttcaacatggtttcgtgattattggttgagccaacataaggaggaagaatttgaagttgccaatgactctagcaatgatgatattgagaatatgctctcagaaacttctgatctaggcatggaagaagacttcaatgttctataaaacgagtttgagcagctggagatgtcctctgaagctctagatcattctgatcctaatgctggaaaagtgccccctcaaggtcttaacaaag

SEQ ID NO: 131069 - DNA, 501 bp, Glycine max
  Clone ID: PAT_MRT3847_89362C.1
tggaaaaaaaaatattatgatatgctctactttagaaatttaaataagggtcttgttaatagtatccataaaacatattgattaaggaattaaaatgaaaatatatatatattataaaaatcataaaaaatattaaaaaaaagttatgactaacataattttacaaatttaaataaaagtattttttatagttttctaatcaatgtcctaaaaacactgattaatattttcatataaataacactatgtgtttaaacttaacatgatttttataatatctaccaacatgaagacaaacctaaaaacatagtcttccgttctttttcaaaattatagatttttgtaaacatagcaaatgtcttcctactctaaagaatcttcaaattaggaacttacactttgatatacttcttgctcaactataagtatttcaattgtgaagtactctcaaatcaaaccgatttctatattttgtttcaacaggcacatttattgaaagag

SEQ ID NO: 131070 - DNA, 218 bp, Glycine max
  Clone ID: PAT_MRT3847_89363C.1
acacaacttaatcctgaaaaggtaaacagagtgattcttctgtgtccagcattcgatctacctcaaagatggattgattctatgggacaagacaaaatcaactattggaagtctaatggttcactgccattcagagactttaatactggaggtatcgcaaatgttcactatcatttcttcgatgatttttcaaaccatccttcttttcctccaataac

SEQ ID NO: 131071 - DNA, 323 bp, Glycine max
  unsure (1)..(323): unsure at all n locations
  Clone ID: PAT_MRT3847_89364C.1
tcgcgcgnacncgtacgtaagctcggnattncngctcgagcncgcagtcgtggagatgccagatgtttnatggtnttgntnagnagnacacnaaggnttggtgaacgcncatgtgttnatnattannnctnannngnaanttntttcnannnnagcngctagcancgccatntnagagnnaaacgnacggtngcaaanncnanngtttggnggnngcnnctcnnngnntngtcnntgcacntcganaggatgacanngaacnaacnntggnnactntncnnaannnganaccatgnaangcngacannggcaancanctttnn

SEQ ID NO: 131072 - DNA, 300 bp, Glycine max
  Clone ID: PAT_MRT3847_89365C.1
gaaaactacaaacatgcatatgatagattggcatagtcttgtcaaaatacaaacagtgaatgaaactgagttgctcggatggtattattatctgctgcaaatacagagtgttatttgacgatgccaggaatatcaatccgcattgatgatgaacgcaacaattatcaccaaaaatcaaaatctcccatctaggtcctttaatggggtagaaaacctgtcatttaacattgagacaagccttattcatacatcaacaggcctcttaattcacccgggccttgtgcgggaatgattcaacct

SEQ ID NO: 131073 - DNA, 396 bp, Glycine max
  Clone ID: PAT_MRT3847_89366C.1
gcttactagctttttttatatagagagaatgatagtttcatttaatcttaacaaaagccgctgtctgtgtgaaaatgtttggggggcacaatttctctcaacaagccacccgtaccaagaaagcatcatgtctgaatggactaacgacgtgtgcaaaccaacatgtgttgcagtacgcataatgaacacacacaagtgaccccgccaaacgggccaggtggactaaccacttggccaacccacgatgggtcgcggggggcctatggggggccaccatcttccaaggttgtgaccagtaataggggggggcctaacaaggcctggacgccccagcactgacatagtcgagatatgcacaatgcacccatatgaggggcgcggagaaaaaacttgaaa

SEQ ID NO: 131074 - DNA, 324 bp, Glycine max
  Clone ID: PAT_MRT3847_89367C.1
gcgcccttttttttttttttttttttttttttttttttttttttttttttttttttttttttttttttagcgaaaaagcttaaaccttaaaccataatggtctcatgacacaatggggggtaacaaaaaacaaaggctcaagcccacaacacattttactgaaaaaaaaattgaaaaaaacccccctcaaatgtatacaaaaatttatttttggacaatggaaaaaactatcaaaatttctttttaaaaacctgaaaccattaacaatacctaggggggggaatggcccaaccaccagatttttttatgaccaaattccctttt

SEQ ID NO: 131075 - DNA, 318 bp, Glycine max
  Clone ID: PAT_MRT3847_89368C.1
ttcatgcatccgtctacgcgttgggatttgttgcgcgcatcgactgaactaatcattaattcgcactgattggtaaaggtggataaccatacttttgcattattaatatgatatcgagaaatgtctcaagaaaattatctatacacattactataacaaggcaagggtcattcggacacgcatgacgaccagatctgttgctcaggactagatgcgagccttgagcaggaccgtcacaagcaggctggctgctgaacatgcaccaataacaaaaattatatgggacatgactgagatcacaactgacgatcagacgac

SEQ ID NO: 131076 - DNA, 784 bp, Glycine max
  unsure (1)..(784): unsure at all n locations
  Clone ID: PAT_MRT3847_89369C.1
aacaaaatgttgcaagcgtaagggagtgagtttttggcgcttataatgaaagcttcgagcaccagcagcgtggttgtggcagtagcgatgggagaagaagagccagaggtgcttgaatcggaatccaatgtagtcaacgccaacggtaacagcagcaacagcaacgaagaatattccttccccgttcttcgtttcgatgtctctcctcacagaacctaccatttccaccgccagttcatcactccttccaaccctaacaatttcttcaaggccgttaaatggtcacccgatggttcctgtttcctcacctcttccgacgacaacactctccgcctcttcgcgccaccgggaaccgaaagcgacgctcccgttgctgcttccggccacggcgacggtaatcacgagagttctttgtttgttgcagattcctttgctgcaaatgtagtcatgcatgaaggagagtctatacatgatttctgttggtatccttacatgtcttcatcagatctggtgaccaatgtttttgcgactactactcgcgaccatccgattcatttatgggatgctacctcgggccagttacgttgcacatatcgggcatatgatgctatggatgaaattacagctgctttttcaattgcttttaatcctgcagggactaagatatttgctggatacaacanatgtattaggttgtttgatttacatcgccctggtagagattttgaattgtattctacagtaaaagataaaaagaaggccaacaggtattatatctgctatg

SEQ ID NO: 131077 - DNA, 236 bp, Glycine max
  Clone ID: PAT_MRT3847_8936C.1
gcggtcgtcctttttgatagtgaagctctgcagatatatatatggatatatatatatatagatatatattgatatatctatatatgtctatatgtataaatgcgcacaccgaactaaacatctggttggaggcgaatgtgttgctcacaacctcgacgaccctatggatgcgctatcccaataacagtatgcacttaagaggaataagcctggatgagtgagtagaaccaatacca

SEQ ID NO: 131078 - DNA, 315 bp, Glycine max
  Clone ID: PAT_MRT3847_89370C.1
tggggtgcgtgagggagtaaagagacggacgaacgaactggtgctgcatcgagtgcctttgcaggctatagcgccgtggtcagatgttactgggttttctcaaaacgatagccttaagcgtgtcattgcgatcccgtacacggaaaactttactcaattgatggattactttaacgcttgttagctcaacgatctacgctcgattagtgccgtcactctcaccgactaaactgaccaattcaactacagcatcttcactggatgtccagttcggattaaatgctttcgattgcatttattcacgcagatttcgac

SEQ ID NO: 131079 - DNA, 335 bp, Glycine max
  unsure (1)..(335): unsure at all n locations
  Clone ID: PAT_MRT3847_89371C.1
cccacattttacagacattttccaagtttccacctcacattnaccggctctttggaatgtttgcgggccataggaccctacctaataccactaattagtccataatcaagaaaaatttcgacctctatgactggcctattctttaatatttttataccaacatcactataattaagcaagaaatgctacttaaggccaactttcttattcacaacacctacttttcctatatcagcatagaagactttttacatgctcaactcttagcaatatacatattctacacaatgaaaaatacatttcttttacatcaaaattattctttccttataccc

SEQ ID NO: 131080 - DNA, 380 bp, Glycine max
  Clone ID: PAT_MRT3847_89372C.1
gtcacgtcaaggctcggaaattcggcctcgaggcgcaaagactaagggaaagaaatcagtcagtacaaataaaaaactaggattctgagggtcaaatcaccctctttctcccatgataagctacgaccaatgctgagggtcattcgcgcttcttcactctgcactctatcaacacatgctgtgcttatatcacagggtcatggggatgagagaaactactctgattgagatccctcactgtacgggagtgtgagtgttatgcagatcgtcatcatgttgctgaatctgttcgacagaaaaagtatggagggggaggatgcatcacactgcacaggctataagtgatgatgcaaatagactaatatgtagacgttgatata

SEQ ID NO: 131081 - DNA, 452 bp, Glycine max
  Clone ID: PAT_MRT3847_89373C.1
caagcacagacacagaaaaatggctctaacacttcgctcttcaatttcccttgtcaaccagaaagaaaccaaactcccaaaagccaaagacgaggttcccaccaaagtgttttactttggaaaaaccaacccatctttccgtctcagagcaaagagttccatgcaacaaacacacgtcacacgaaacaacagctttaactccgaagtaacgatgataaacgagaaaagggagaaggttcacgctccatcggttgcacatagccacaatgattcaatgagagtgccagtgtttgtgatgctgccattggacactgtaactatgggagggactttgaataagccgagagcaatgaatgctagtttgatggaccttgaaagtgcatgagtggaaggagtgatggtggatgcttggaggggctaggcggaaaaagacgtacccttgaagtataatt

SEQ ID NO: 131082 - DNA, 481 bp, Glycine max
  Clone ID: PAT_MRT3847_89374C.1
cactcacagcttgcaagttacaatttgataccatgccacatatttccaattgactgacaataagtcacaactgctcattgacatgtgttggatcttggtgtgcaaaatctattatttagtctgccattgattcacaactatcagatcctgtcccacatactaaaaaagaatatcttcaggattctcacattcatcgtcattactagaaaaaacctttgtgcttggtagttatgagcttatcatgtatagtcctagtcctcatttgaatgaaagagttttctcccacccttatggaatcaacgtggtacctcacttatccttgcttaacggccaactacaatggtgaatacttataaaatattaatccagatgtactaaaaggtcttttaaaaaaatgctggtcttacccagtacttttagcttatgatgaaagtgcaaacactaagggagccaaattatggagattttctcagctttgcca

SEQ ID NO: 131083 - DNA, 102 bp, Glycine max
  Clone ID: PAT_MRT3847_89375C.1
agggacacatgctatgacgcgtacctcactggcctggagagggccgtacgaaagatgaacagcattagagtagagcgcctctccaggaggctgcaagagcct

SEQ ID NO: 131084 - DNA, 763 bp, Glycine max
  Clone ID: PAT_MRT3847_89376C.1
ccacgcgtcatcgattccatcttttcccccctcaacaccacacaatatcaaattagggttttcagaaaaaccctttcttttcttctcttcaacttcactccaaaaacggggaacaagggttttgggtctcacagttcaattcaattttcttccactgtgagatgttttctttttcttcttctttttcttcctcttcctcttctcatagcagttcagtgatcaaatggaattctctcgcgcaatttctcttcctcgttttcttcctcttcttcgcgtcgcgaaacgacgccgtttcggacaaatccacgctccttcgcctgaaggcctcgttctccgaccccgccggcgtcctctccacgtggacctccgccggcgccgctgactccggccactgttccttctccggcgtcctatgcgacttgaactctcgagtcgtcgccgtcaacgtcaccggcgccggcggcaaaaaccgaacctcgcacccgtgctcaaatttctcccaattccctctctacggcttcggaattcggcgaacctgttccggtagcaaaggttctctcttcggaaatgtttcttctctgagtttgatcgccgagctcacggagcttagggttttgtctctccccttcaacgcgttggagggtgaaatccccgaagcgatttggggcatggagaacctcgaggttctcgatttagagggaattttgattagtggccttccctcttcgagagtcgatggcttgaagaatttgagggttttgaa

SEQ ID NO: 131085 - DNA, 361 bp, Glycine max
  Clone ID: PAT_MRT3847_89377C.1
gccactcgttcgcgttcacgctatcactgggttactgctgacgcaggcggcgaatgtgtactcacatgacacagtacaacgatccgcaagccgtcaacaccttctaagatcaagacagtgatattgaacatcgagtcttatgatgactgctactatggtattatacgtcatagcacacagtgatgtgagagctcatatactttcacaagctgagcacataagcactttgatagggcatgacgcttatcaagttctagcagtatgatccatacattacaatggacgacaagctgaaaacagccttgctgtactagatcgttgaaactgacgtataaccagcttcaaagcgactatatctatg

SEQ ID NO: 131086 - DNA, 248 bp, Glycine max
  Clone ID: PAT_MRT3847_89378C.1
ggtcagtgtaagattgacgctcagacgtgtgtttattgaaaccgactagtattcaaacacacatgatggagagcccaatgcttattgtgagctcaatgactggccgtgataaaaaatttcaaggttaaatgcatatttggggtatgtatccaacatctgaagtcatgatgggttcctttttttgtcttgtatttctcatcgaaacgcaaatccgctctcgctcgtcgctactaacggggtctgggttg

SEQ ID NO: 131087 - DNA, 395 bp, Glycine max
  Clone ID: PAT_MRT3847_89379C.1
agcatccgtgtcaattcgaatttgaatttagtccggcgtggtcgctgctactaggccgcggtcgccctttttttttttttttgcttgttacacatttccttgttacctcaacgtgtgtgtgtagtccaatgtcatacaccatccacagttcccttaacaatcgagcttctaatgggcctaactcatacggattttacgtgggagaacctcacatgttatgtcatggccattatgtgatgcaccactcctcttacctatacctgccatgaactgtacattatacacaaccaacatcctccaacaatagcgctcgtaaaggccggggactaatactggcgggatgactgcctattgtgttcctgtcaaagagatgctggtagcacaagcgcacgtgg

SEQ ID NO: 131088 - DNA, 774 bp, Glycine max
  Clone ID: PAT_MRT3847_8937C.1
cccacgcgtccggcttgccgtgcgagtcggacttggtccgggcccaccaccctgctctgtactactactcggctttcccgtcaagatgcctgaggaagtgcaccatggagaggaggaggtggagacctttgcctttcaggcagaaattgcccagctcatgtccctcatcatcaacactttctattcaaacaaggagattttcctccgcgagttgatctctaatgcttcagatgccctggacaagattcgatatgagagcctgacggacccttctaagttggacagtgggaaagagctgaaaattgacatcatccccaaccctcaggagcgcacgctgactttggtggacacaggcattggcatgaccaaggctgacctcattaataacctgggaaccattgctaagtctggcacgaaggcgttcatggaggctctccaggctggtgcagacatctccatgatcgggcagtttggtgtcggattctactcggcctatctagttgcagagaaagtggttgtgatcacgaagcacaatgatgatgagcagtatgcctgggagtcgtctgcgggtggctccttcaccgtccgggcagaccatggtgagcccattggccggggtaccaaagtgatccttcacctcaaagaagaccagacagagtacttggaggagaggagggtcaaggaagtggtgaagaaacattcgcagttcataggctatcccatcaccctctatttggagaaggaacgggagaaggagatcagtgatgatgaggc

SEQ ID NO: 131089 - DNA, 237 bp, Glycine max
  Clone ID: PAT_MRT3847_89380C.1
gctaacacacgcgcggcgagaacaaccagcagggtgtttttagaagcaaaccaagaacacgcaagcagggcgagctctcaaactcgtgcaaaagtcgaaagaggaatacgacggaagccataggacgaaaccctaaagatcaaaccctaaatccaatagtaacccagaggaactatcatctgaaaaaaaggaccgcatgaaaccctacaaatgagcgccgacagtggcgcactagga

SEQ ID NO: 131090 - DNA, 356 bp, Glycine max
  Clone ID: PAT_MRT3847_89381C.1
tttttggaaaaaaaaattaggcgttggctactttaagccaataatgatgctactgaagcagtcacttaactaacaatacaaagcgcgtttctgaacgtaatgattttgagaattcgagggcataagagtatgcacgtcaataaaggcagatacaagaatcctaattgcgatggaacggttggaaggctactacattgcacagtgtacgaaaagcaccttgtctggagacaagaagttatataagtctaagcctattccaaccaaaaattagactggcacctctgctcaattgtggaaaaacactggcggtattgaaggaaggcagtacttcttggccacatatttggtcttgggct

SEQ ID NO: 131091 - DNA, 154 bp, Glycine max
  Clone ID: PAT_MRT3847_89382C.1
gggtcgggcaaataatggccgtcttatttccttggtggcgagcactgcatccataaagtacctacgccacttgaattggttgaaaaagcttgtcattgattgcagactgcatatcctttgatgtgtgctccgccttcccatcgttacatgcata

SEQ ID NO: 131092 - DNA, 266 bp, Glycine max
  Clone ID: PAT_MRT3847_89383C.1
aaatgaaacttatttggagcgaatacgttgtaccatggacaacaagagaacattctatttgcacattgcaccacccacagtccgaataaacaaaacactatttgaggaacaatctaattaccaaaaagacatgcattatttgaacacaaaacaaaaagagcaagtgatcacaactaatgaactaactagtaaagattgtgtcgaagagcgcacatggttccaaactagttatacactgcatgccattctgcctgagcagggtgcac

SEQ ID NO: 131093 - DNA, 337 bp, Glycine max
  Clone ID: PAT_MRT3847_89384C.1
atttgttctaaattgcaactagtttggcatggcttccaattaatatttaaaaaagaaaaggaaaagaaaatagcatcccattgtgttgagacttttttccccccatatttaattattactcttcctctggtggggttaggtgaaatttgtatatgttaatgcagtgtagtgcggtacgtaacagttggaccgcaccgtgtttaaacaaactacataggagattattagttgtatgttagtcagcctcatgcttttccaagtacgcgatggttactttggaagaacacattttgtttttttaaaataaaatcgtggcctaataaggtaatgtacctaa

SEQ ID NO: 131094 - DNA, 841 bp, Glycine max
  unsure (1)..(841): unsure at all n locations
  Clone ID: PAT_MRT3847_89385C.1
ccacgcgtccgggttggttggcgaaatacgaacgcaagtaagaaatgggggcgagtgaggcttaggttggacttggagtgatccgaatgaatgaatgagtgtcttcgtttttccctcgcttagttgaggtgtctacctctctcttcctttcatcatgtctcttctcaagtctctcacttcaaatccctctgctttcaatttcaaaccaacgcaatcctccatggcgcaaacctctccttacagggtgctgttacgaacagcttgttcttcctccaggagaactaactctattgacttgttttattcctgggggatctcatcagttaaggtggtacctttctcgaacatatcaaactactgtacttattcaagggacaatatttgtgcttcaaagcgaagatcaagagggccagtgatggcaggaaagaaagcttctgaaggaatcaagcaagaagatggcaaatacaagcacactgttgatcttcccaagacagcatttggtatgagagctaattcttcagtaagggagcctgaaattcagaaaatttgggaggagaatcaagtattcaaaaaagttgttgagaaaaatagcggagaaaattttattcttcacgatggtcctccatatgccaatggtgatcttcacatagggcatgccttaaataaaattttgaaggatattataaatcgttataaggtccttcaaattaccaagttaacttcatacctggatgggattgtcatggcctaccaattgacctaaaagttttgcagtcactggatcanaaatgctagaatgagctcacccnattaaagttgaggggcaagggctgctaatttg

SEQ ID NO: 131095 - DNA, 751 bp, Glycine max
  Clone ID: PAT_MRT3847_89386C.1
taagaatgagatgatttcagtaatgaaatagttgtatcgtttagcaagctagcaaatatttttgtagaagcaagcacttacaagcatactatatgtagcacagaaatcttcagaattataatgatatgttggggggtgcttgaaaaaaaaaattggacttgtgagaaagtagttcagaacttttgtaagtttttttttttcaatttattttaacaagatttacagagaaactggttgaagtaagtttttttttaacctatttcagtaattcagttaattttatgaacaaatttttatttggtaggagtttattaaataagtggttaatgaaattctttatttaaatgcatccttagtttatagtaatttttaaggatccttcagctggattggcgttgatgtgtagctttcaggccaaggtatacttaccgcggtgctgacatttgatctttagaatattttaggtgaatgactgtacactggagaagcttgtgcacacgtttgcagtcaaacttttacaaggcgtgccactggttatattttcggctatagaggttctgcaagcatacaaaagaccgctgtaatttttgtagacaagttatgccataagatgcttgtaatatattatggaaagaattttctgtaacaaatctcaggctcagcacctatggctctacatgtttgtaatattaacattcgtattgtatcagtcaaaaaaaacattcgtattggaagattctagttttccctt

SEQ ID NO: 131096 - DNA, 460 bp, Glycine max
  Clone ID: PAT_MRT3847_89387C.1
aaattccaattcctttttttttttgtctttcttgttttttttttcaaacccaggcaaacaaagatgtacaaagcaggaaaaaaaagccccattgggggaaagggggaaaaaaaaatttgtgcttaaaaaaagctgaggcttttggaggaaaaaaaagaatgggaaggaacaggccccaaggggggggaaggaggaaaaaagcccaaaggggcgggaaaacaagagggccaaaagggggccaaacccccacagagggcgggtaaaaaaaaaaaagccgggccccgggccaaaaacttaaccctatgaggaaaccaagccccccctttgggaacaaaaggagccagtgccaaagcccccccacctcccacaggaaaaaagaggggccgaccaacccacaccatgggctttactgggggaaagggatggaccacctgccaccggacggggggttggttcagga

SEQ ID NO: 131097 - DNA, 181 bp, Glycine max
  Clone ID: PAT_MRT3847_89388C.1
ttcattcacagtgaatgcagagggtgtgcacaagaacgctcccgctgagtgccacaacacatagctcatgacacgtatgacctacactctagatgagatcgatggaccctaagaggtgactactgatggcactgagacgtttgaagagatagatggaatagactatgctgtcgtcgcagtc

SEQ ID NO: 131098 - DNA, 449 bp, Glycine max
  Clone ID: PAT_MRT3847_89389C.1
gccgcgaactacctcatcctgggcaagttgatcaacgctaccggcggcaagtactcattcatcacgccacggagcttcagcatcctcttcatcttctccgacttttgctgcctcgtcgtgcagggagctggcggtgggatagccggcacggccaacacggtcgacggcgccaacaccggcgcgtacatcatgactgccggtgtcattttgcagctggtcatcacagtcctgtttgtggtcctcctcgccgacttcatcaggcgataccgctccgaccgacccgccgcgagccagatccaccctctgccaaacaaggggttcttcgctcgggactatgctcgtcgcggatcggcccagacggccgcttcggacccgtacccgatgcaggccatcgagtctggcaacaacaccccgcggaaggtggagaacggctttccagcgtcgcaatc

SEQ ID NO: 131099 - DNA, 508 bp, Glycine max
  unsure (1)..(508): unsure at all n locations
  Clone ID: PAT_MRT3847_8938C.1
gtttgtgactatgaatttttgcgggccccacagcaatttcatcccgcactcgcctctctcttattctacgtcttattcaccaatttcgccccttaaagaacagcaacaagtgaaatgcgctgatccttccgtcgctgacctggggaagacaaacgttggttttgggccgacgaataaatcaattctgaagaatccgacgacacttttcttcaaggaacaacacanaaaatttatgaaaagcaacgaaaatttagtcgactcggtcaaaaaggcaacggaaactacggcggcgcgaaaggaagcgctaaaaacagttgcatttggactgacaacacgccttggagataccgttctggcgaataaatctgtgccgtcttcaagccgactcggcaaaactgtgattttctccatgaagcgcaatctctgcataaaattatattggctcaacaaacagaanattgccgactcagagggaagatcgaagaactgactgcgtcggatgatcgtc

SEQ ID NO: 131100 - DNA, 420 bp, Glycine max
  Clone ID: PAT_MRT3847_89390C.1
cccaaaacacgaatcctagcatggctaacttacctaacaaaaaatcccctcgacgtgctatccatcaatctaaactagcctatgtgattcataactcccacatctataaaaaggagccgacccttaatcactagggggcaaaggggcgggagaggctaccctcctttgctttaacacgacttaaaatcggaaatgaatgctgcttataaggagcaccataacttcttggcactatgtggccagagccaatcctctggccaaaagggggaccacttgctgggaaatccaattttttacaattcaacacaaaactggaaagtggatactgcttaacccgtgcattaaaaatcctgaaatgccaaggagaatcagagaaatcgtacaattttcttcagcaaaaatcttaattactctaaaagc

SEQ ID NO: 131101 - DNA, 1693 bp, Glycine max
  Clone ID: PAT_MRT3847_89391C.1
ggctcgagcacaggggacaatttcaacgccacaccaaaaattccactgcaccaccaccctccccatttgtacttttcttctcattctctttccactcccctgcattctgcacacaatctagctttacgtgcttctgggcaaccgcataaggttaaactgttaagcatatcattgaaatccttttgggattggaacttgatatgatcatttgtattggggagtaagaccttgttacttttgcaaatgctaaattttaataggatcagaagtcagcccaggacaaccagatctatgtctttgggaggcatggattacgtggatccaaaaaggaaaggcaattttgttggaaaagtttttcttgctgcagcattaacggcattatgcattatcatgatcaagagatctccatctttgaatcccccgagtccgttttccatccatgaaccaggtgtcactcatgttttagtgacaggaggtgcaggctatatcggctcacatgctaccctacgacttctgagggaaaattatcgtgtcaccatagtggataacctgtcacgaggaaatttgggtgctgtcagggttcttcaagacttatttccagaacctggaaggcttcaatttatatatgctgacttgggagataaagaatctgtaaataaaatattttcagagaataaatttgatgccgtgatgcactttgctgccgttgcatacgtgggagagagcacacttgaccctcttaagtattatcacaatattacatcgaataccttgttggtattggggcctatggctaaatatggtgtgaagacattaatatattctagtacgtgtgcaacatatggggaacctgaaaagatgcctattatagaaacaacagaacagaaaccaattaatccatacggaaaagccaagaagatggcagaagatatcatccttgatttttccaaaaattctaagatggcagtaatgattctgagatacttcaatgtgattggatcagacccagagggcagattgggtgaggctccaagacctgaacttcgtgaacatggccgaatttctggtgcctgctttgatgcagctcgtggtattacaactggcttaaaggttagaggaactgactacaagacaccggatggaacatgcatacgagactacattgatgtaactgatttggttgatgctcacgtgaaggctcttgagaaggcacaacctgctaaagtagggatctacaatgttggaactggaaagggtagatcagtgaaggagtttgtgaatgcttgcaaaaaggccacaggggtggacatcaaagtagactaccttccacgtcgacccggcgattatgccgaggtgtatagtgacccttctaagatcaacagggaactgaattggaccgcacaatacactgaccttgagaagagtttgcaggttgcatggaaatggcaaaaagctcatcgtaacggttacggtatttcatctgcaatctgagtttctagccattcagccaagcagttggccatcaactgctcttttacatggtgctcaggattttttttttctttttctttttggtcgtccttagggagtttggtagttgattcgttatacttacatgtgtattcaacatacaatgagtcaataataataaataatataatgcccagcctctggttggtatagcttttcttct

SEQ ID NO: 131102 - DNA, 395 bp, Glycine max
  Clone ID: PAT_MRT3847_89392C.1
gacgtcgcattcccccctacctaagccttcgaattccggttcagaattggcccattaaaaacactttttaccttagtggggccaatttgggaccaccaaagggccaattgaattcaggcctttccaaaatggtaactttaaaaattgttgaggaaagtggggggggaggccttggttaaaagtatgattttagccagctggaaagggttaacaattcttgccttaaacccaagcctaatgacaaggggaaaaaatatcctgaggcctattctgatgacttaaaatttgatctgtcatttaaagagtccattaaaaggtaccttggggttattcaccacccttacctgtcgataatgaattttatgagtctggcttgtttgcatctacttattctt

SEQ ID NO: 131103 - DNA, 1666 bp, Glycine max
  unsure (1)..(1666): unsure at all n locations
  Clone ID: PAT_MRT3847_89393C.1
aagccttcctaagagctgtttgtccgaccttggtgtccccttccggggattggttggacggccagaactccggccgacattggggacttggtgggattcgtgcggtagcgcatggggtcaatcgataggtatagatctgtgatttggggttttagatttgtgtgtctttgcttaagtttgcgataaggatttgagcttcagtggttttttttactatggcaacgaattcttctaatggagcaacaaagcaacctcccatgccatctcccttgcggttttccaagttctttcagtccaatatgagaattctggttactggaggagctggatttattggctctcacctagttgacaaattgatggaaaatgaaaaaaatgaggtcattgttgctgacaacttcttcactggatctaaagacaaccttaaaaaatggattggccatccaagattcgagctaattcgtcatgatgtcacagagcaattgttgattgaggttgatcaaatctatcatcttgcatgcccagcttctccaattttctacaaatacanccctgtaaggctcgagctgtcacgaggaaatttgggtgctaatagggttcttcaagagttatttccagaacctggaaggcttcaatttatatatgctgacttgggagataaagaatctgtaaataaaatatttttggagaataaatttgatgctgtgatgcactttgctgctgttgcatatgtgggagagagcacactggaccctcttaagtattatcacaatattacgtcgaataccttgttggtattggagtctatggctaaatatggtgtgaagacattaatatattctagtacatgtgcaacgtatggggaacctgaaaagatgcctattatagaaataacagaacagaaaccaattaatccatacggaaaagccaagaagatggcagaagatatcatctttgatttttccaaaaattctaagatggcagtaatgaggctgagatacttcaatgtgattggatcagacccagagggcatactgggtgaggctccaagacctgaacttcgtgaacatggccgaatttctggtgcctgctttgatgcagctcgtggtattacaactggcttaaaggttagaggaactgactacaagacaccggatggaacatgcatacgagactacattgatgctcacgtgaaggctcttgagaaggcacaacctgctaaagtagggatctacaatgttggaactggaaagggtagatcagtgaaggagtttgtgaatgcttgcaaaaaggccacaggggtggacatcaaagtagactaccttccacgtcgacccggtgattatgccgaggtgtatagtgacccttctaagatcaaccgggaactgaattggactgcacaatacactgaccttgagaagagtttgcaggttgcatggaaatggcaaaaatctcatcgtaatggttatggcattttatctgcaatctgagtttctagccattcagcaaagcagttggccttcaactgctctcttacatggggctcaggatttttttcctttttctttttggtccttagggagtttggtagttgattcgttatacttacatgtgtattcaacatacaatgagtcaataataataaaatgccaagcctgtggttggt

SEQ ID NO: 131104 - DNA, 617 bp, Glycine max
  Clone ID: PAT_MRT3847_89394C.1
ccacgcgtccgcggacgcgtgggtttcaacgccacaccaaaaattccactgcaccaccaccctccccatttgtacttttcttctcattctctttccactcccctgcattctgcacacaatctagtactacttttcttctcttttattttttcagatttcccacttttcttattctcataaaaccgttaaatttacactctttttttttttttttttaccttctaaggctttacgtgcttctgggcaaccgcataaggttaaactgttaagcatatcattgaaatccttttgggattggaacttgatatgatcatttgtattggggagtaagaccttgttacttttgcaaatgctaaattttaataggatcagaagtcagcccaggacaaccagatctatgtctttgggaggcatggattacgtggatccaaaaaggaaaggcaattttgttggaaaagtttttcttgctgcagcattaacggcattatgcattatcatgatcaagagatctccatctttgaatcccccgagtccgttttccatccatgaaccaggtgtcactcatgttttagtgacaggaggtgcaggctatatcggctcacatgctaccctacgac

SEQ ID NO: 131105 - DNA, 190 bp, Glycine max
  Clone ID: PAT_MRT3847_89395C.1
ccacgcgtgcgcaaaaagtctttcctccttccgtggttgactgtgactgtctctgtgcatgtgtgcagggtactgaggctacgttaggtctgatttcggaggctcttgcacttgccatgtacccctgcgtcctattcctgcccaatgcctctgttgtggcggtacgtatcagcttccttgcgcatggttt

SEQ ID NO: 131106 - DNA, 479 bp, Glycine max
  Clone ID: PAT_MRT3847_89396C.1
actgaagaaggtgtagcactgacaggaccctatactgttgatgcatggatgcttcatatcgtgcagcggacagctcgatctacagtagacactgcgtcatttcagtaagaccgagtttgccatctttgccccgtttagaccatcggaacttgcatggtctggctgcgtactgacactactgagatcaacggctgtcaggttacaactatatgaagaatgggttgctgcgcgatagctcgcttgattatagcaatgtgcactatgctacgcaccgttccgaattcgtggaaaatgaagatcaagattgtttcgggatgctccccttggcaatacaatatcctgatattcatgcgactccatctattattcacagggatttgaattctttctatattcttcttgaagtcagctggacacgcagacgatttaattttgaattgtcgccatatctacccagcctgcaatgaataccatgagat

SEQ ID NO: 131107 - DNA, 737 bp, Glycine max
  Clone ID: PAT_MRT3847_89397C.1
aattcggctcgagagttattattggaccgtgcagaaacactactacagctgattaaaatcagatatccaaaccttcctcaaacatttctggatgctaccaaagttcaatatggcaaggatattggacattccattttggaagcatattccagagttcttggaaatttagccttcagcatactgtctagaataggagatatattgcaagaggatgctttaagcaatcccaatacacctatttcagcaagttgctcccctgggataaatctttctgaagcttgggtggttggttcgcgtatcaggcactcattaatcgataagatgaacgaggcagatgggcaatattgtgcttctagttgtggcagcacttctgatatagaactctcatctactcaggccaatgctactagctctgtaccccccacaccaagccgtggtcgattgtggtgcattggtagaggcttgtaaaagagtatctcctcaattcctcacagtgactgagtagttggcttttgtaaatgataagtattgttagtattattaccatattagcagtatgaatagaagcaaactgacaagtttgccttatagattttgggtgcttttgttgcctaggaattttgtgtcttgtgcacaactattccagtcgtagattctgattgtatatcctagtttcttaatggctaagctgacaatttgaatatttaaagaggaatgttggcacaccttttcattgc

SEQ ID NO: 131108 - DNA, 344 bp, Glycine max
  Clone ID: PAT_MRT3847_89398C.1
ataggccctgtctctgtctcgattgataatagtgctgcataattgtttatcattcgcaagcacattttggtccaatatgtaactgctacgtttcatgagggactctgaaatgatccctgtcgttcatggaacatatctactttttaagtgtgatattatatatatgggaaacacgcttcacaatgatctaattaatggcttgtatttttttttatttttttttggaaatctttgtatacttgtcgtgggggaagtttttttgtcaaattttcgtaagtgtaagatgtagtatagccttggattattttactcaacttatgtatagctagagttgcgtttcactg

SEQ ID NO: 131109 - DNA, 504 bp, Glycine max
  Clone ID: PAT_MRT3847_89399C.1
agtttaactaaacgttacatgtgattttttatgggttttttttactatgtgtgcgtgtttgaacaattttgcatttttggcaggtactacaatcacaccctttacacgttttccatggctcctctaaaatgagtatttcacttacagacaaaagtgagacatcaattattaatgcaaaaactacgagtatattaatgacaaatccatgattagttgtcatatatgtatatatactaacatttagtgttaatttttttttttatcaatgactgagattccttacatttttggaaggtttgctgtcacggttctaagcctttctttgaacctataagatcttgttattaactgacctagcgttggacaatgagtatccaaactcatcaacatgttggttggtaagagaagtcagttaacagtacaattataggctagaaaaataaccaaaaaaaaagtgaagaaaaaggagggcccagcaagaaagtgtctagctaggcttttgtc

SEQ ID NO: 131110 - DNA, 135 bp, Glycine max
  Clone ID: PAT_MRT3847_8939C.1
caccgcgtccgatcagtcgcagggggggggcgcaagagaaccattgtcgttaagtgagggaaaggacctaaaccatgacccaaacaaccaccatagacggttactggtgagggcggcgccataccgcgatgctat

SEQ ID NO: 131111 - DNA, 249 bp, Glycine max
  Clone ID: PAT_MRT3847_893C.1
ttctcgcctaggtacacgcttgctggttggtgccagatgatttctgctagataattctggatgccttctcagtcagacacttatggatataaattggcttaatatgcagtttactggtcaggaaaatgctactcgtcgtacataggctgcgactactatagcagaaaaacccaattctcccttggtgccactgggaccaactatgcacgggactcatgtactgagacagaagttgcatcaggagcttat

SEQ ID NO: 131112 - DNA, 361 bp, Glycine max
  Clone ID: PAT_MRT3847_89400C.1
ttagaacacctcagattgggaacataatgtgcatgtataacgtttaaggaatagatagatatttattaggtcacagtgctcaattcattaaatctaatatacttccattcgatattgctgtctaaggattttaattttcaactcattttaatcttatacatataaaccaactctatagcttacacacatcaatttacaaaaggactaacaatatttaatcatactatatatcatttatatatatacactcataaacatttatatctcatatttgattatagcacttatactaatatgacaatgtatataacattaatcacatttgcttttatacttatcatttaaacaactataattaaca

SEQ ID NO: 131113 - DNA, 255 bp, Glycine max
  Clone ID: PAT_MRT3847_89401C.1
ggttaggcaacaaggtgtccgtgggatagtcaatctctccagctcggaggtgtgttgacttctcgattgacagacacatatttcactacaggaagattccaactttattcgcacaaaggtgacagtcatgtcatgctctgcccccttggctggccttctcagattgcgttacgaatcttatcatacaattgatgactctggcaatgcttcacagttagtgttcgataaatcaggggatatctatgtagggacacc

SEQ ID NO: 131114 - DNA, 529 bp, Glycine max
  Clone ID: PAT_MRT3847_89402C.1
tcaatcctggaagcgaagtaatgaagaagctgaacaaagccaagttccttgatgaactgggtcaaaaatggatctatctcacagttgaagaggctgttggtgcatgcaacttcatgctccatacatacaaaccaaacaccatgaaggatgaatcagaaggttggaacaatgcctaataaaataaagcattgtttagatctcgtaaagcttacgaggtttaatattttatctttattacccttccagtatgtggcgtgagagtttgagaatcatgctgcagaagggtttagagtgatagttgcatgagtattttaatttctcaagatactgaattggaagaaagtttccaacataggctgttgaatctttatgtatcatgcatgcttaataatctattcaaatagaaagtggctgcaatggaattgagaagtgttccgttggaaatgttataaagctgatcagtgatcaatggaaattattaataaaatttttaaaaaaaaaaaaaaaaaaaaaaaaaaaaaaccaaaaa

SEQ ID NO: 131115 - DNA, 237 bp, Glycine max
  unsure (1)..(237): unsure at all n locations
  Clone ID: PAT_MRT3847_89403C.1
caagaaatnncagcaaagcatgaagccatgaacagagacatctatgngnaaaccaagtagtttgcttgcattgctatagttgttatagttcttacttnctnnctctttttgattcttttttacccggggggtgcanaacgcncaaaaaaancnnnnnaaagaaaaaaccccnnngngcggaaggaggggggacaatttttatanccnccaggnnanananangaaaaaggcccgagg

SEQ ID NO: 131116 - DNA, 2008 bp, Glycine max
  Clone ID: PAT_MRT3847_89404C.1
cccaaacgcatgagtggaggtgtgaaagcgctgtgttgggttgttgctgtattttcttcctcctcgtcacaagatacttcagcaaacgacagccaaagttcttctgggtgtcagcaatggcaccactgacgtccgttatattgggaagtctgctggtctatgtcacacacgctgagaaacatggagttcaagtgtgataggagaattgaagaagggtttgaatccaccatcactgacaaatctggtatttgtgacgccttacatgaccacagctgtcaaaacaggcattgtcgttggcattatatcgcttgcggaaggaatagcagtgggaagaagctttgcaatgtataaaaattacaatattgatggcaacaaagagatgatagctattgggaccatgaacgtagttggttctttcacctcttgctacctcacaactggaccattttcgcgttcagctgtgaactataacgctggatgcaagacagcagcatccaacatcataatgtcaattgcagtaatgttgacattgttattcctaacaccattgttccattacactcccctggtggtgctatcagccattattgtatctgcaatgcttggcctcatagattatgaagcagccatccatctatttaaggtcgacaaatttgactttgtcgtgtgcatgagtgcatacgttggcgtggtctttggcagtgttgaaattggcttagtcatagctattgcgatatctgtacttcgggtacttctatttattgcaaggccaaggacatttgttttgggaaacattccaaattctgtgatatacagaaatgttgagcactatccaaatgcaaaacatgttcctggaatgctaattctagagattgatgcaccaatttactttgccaatgcaagctatttaagagaaaggatcacaagatggattgatgaggatgaagaaagaatcaaagctacaggggaaactagtttgcagtatgttataattgatatgagtgctgttgctaacattgatacaagtggaataagtatgcttgaagaggtgaagaagattatagagagaagagagttacaacttgttttggtcaatcctgtaagtgaggtgatgaagaaactgaacaaatccaagttccaaaatcatttagggaaaaaatggatctatctgactgttgaagaggccgttggagcatgcaacttcaatctacgtgcaagcaaaacgaacccaaagaaagatgaaacagagggttggaacaatgtgtgactgagtcatatgccaaagagtattctaaataactcaaaaagcttattcgttttcgtcttagtaatgttaccactacaatgtgtggcatgagaatttctgaatcacgccgaagaagttttaaaggcataggaaaatgaaagatgcaagggtcttctaatttctcaactctgcatccttagttagaagaaaatctcctatgtataggctgttgaaataatctttacgtatcatgcttgataatatattcaagagaaatgctagcaacacactctcagacacactcttttgaacacatgtaaagaggtaaagaagtgtgttgctagcactcctccatattcaattgtaaagtaattgccatgagaatttaaaaatcctttggcttaataatctattcaaatagaaagtggctgcaatggaattgagaagtgttcagttggaaattaatgttatagagctgatcagtgatcaatggaaattataaataaaattttagttttgggtttcttccccccccacaacaatgtggggcatgagaatttttgaaacacgccacagaagttttagaggcataggaaaataaaagatgcaagggtcttataatttctcgactctgcttccttagttagaagaaaatctcctacgtataggctgttgaataatctttatgtatcatgcttgataatatattggaatgtaaagtaattgccatgagaattgaaaaatcctttggaaacgtcttaa

SEQ ID NO: 131117 - DNA, 1518 bp, Glycine max
  Clone ID: PAT_MRT3847_89405C.1
ttctcattaagctaatatttttcgctaaatagttttacttgagagacattgttttttcccaaacgcatgagtggaggtgggaaagcgctgtgttgggttgttgctttattttcttcctcctcgtcacaagatacttcagcaaacgacagccaaagttcttctgggtgtcagcaatggcaccactgacgtccgttatattgggaagtctgctggtctatgtcacacacgctgagaaacatggagttcaagtgataggaaatttgaagaaggggctgaatccaccttcggcaacggatttggtgtttgtgtcaccttacatgggcactgccataaaaactggattcgtcactggcattatagcacttgcggaaggaatagcagtgggaagaagctttgcaatgtttaaaaattatcatattgatggcaacaaagagatgatagctattggaaccatgaatattttcggatcgttcacttcttgctatctcaccactggaccattttcgcggtcagcagtgaactacaatgctgggtgcaagacagctgcatccaacatcataatggcaattgcagtaatgttgacattgttattcctaacaccattgttccattacactcccctggtggtgctatcagccattattgtatctgcaatgcttggcctcatagattatgaagcagccatccatctatttaaggtcgacaaatttgactttgtcgtgtgcatgagtgcatacgttggcgtggtctttggcagtgttgaaattggcttagtcatagctattgcgatatctgtacttcgggtacttctatttattgcaaggccagacatttgttttgggaaacattccaaattctgtgatatacagaaatgttgagcactatccaaatgcaaaacatgttcctggaatgctaattctagagattgatgcaccaatttactttgccaatgcaagctatttaagagaaaggatcacgatggattgatgaagaggaagaaagaatcaaagctggtatgtttgatatgagtgctgacgtgtatgcttggggagattccaagaagcgaggtgatgaagaagctgaacaaatccaagttccttgatgaactggggcaaaaatggatctatctgacagttgaagaggctgttggtgcgtgcaacttcatgctccattcctacaaaccgaaccccatgaaggatgaatcagaaggttggaacaatgcctaataaaataaagcattgttaaccttaattacagtatgtgacgtgagagtttgagaatcatgctgcagaaagttttagagtgatagttgcatgagtactttaattcctcaagatactgagttggaggaaagtttccaacgtaggctgttgaatctttatatatcatgcatacttaataatctattcaaatagaaagtggctgcaatggaattgagaagtgttcagttggaaattaatgttatagagctgatcagtgatcaatggaaattataaataaaattttaatttcgttttc

SEQ ID NO: 131118 - DNA, 430 bp, Glycine max
  Clone ID: PAT_MRT3847_89406C.1
cacaacacaacagcgagaaataaaacaaagaaagatacagaagtataatttctgattttattcactgattcctgggtgaactttataggggggtggggcagcaactcctgttccacttcctagtgtcaaagataacactcacttaacttctctcccatacccatttccatctcttctctttgcacctcttttgcttcttatttttccacttctcaaaatggtactcatgcaacttctcacacatctctcatacttagtttattgactccatctctaatgctaatcaaaattgatatgatcaaaatctgtttctcgactacaccattcctgttaattgaaacttcattgtatagtgtgttgtatgtacattctctacaaagagtaataaactatataagtcacatgcaatacgacataatatcgtttcgta

SEQ ID NO: 131119 - DNA, 162 bp, Glycine max
  Clone ID: PAT_MRT3847_89407C.1
gaaaaaacaaagtctgtccctggggctaaagtccaaatagccgagaaaacgcttgacgcgaccctgttattgagtggaccattagagttgggtgttattggctgaaacagagagcttcgggcttaacggggacccactacttaacctaactggagggagaaa

SEQ ID NO: 131120 - DNA, 367 bp, Glycine max
  Clone ID: PAT_MRT3847_89408C.1
tctttttctatcttggcaacagtattttgtttttacgcggcttcctggctatcgaggacgctgagcgtaacctcatcatcagacaatggcgctcaaaaccctatctactttctgtcacctctggctttcccaacaccagattccggacctacaagcctggcctgattatcttcgaattaccgcgctatcagaaaacgtgcttgcccggcgtcgatgctgaatgcaccggctctgctggtgctctgttcggcgagtagtttcttgaacgtcaaccgttcttctatgatgctgagcttattctgatagagaacgacttgattaagagaaaaaataaaaatgggctgcctgttcagaagattctagctta

SEQ ID NO: 131121 - DNA, 280 bp, Glycine max
  unsure (1)..(280): unsure at all n locations
  Clone ID: PAT_MRT3847_89409C.1
aaaaaaacaccacctcccccacctctnaacataactttccaatttgtaaacactccacacccattctgccttttatttttcttcacctcacgttccaacaacttttttttaacacatatctacaatcaccttcctaaatcaccacaactctaatttttttttttctaacaattttatttcatttaacactatccattttacacacaatatcaaatttcataacaccttattttttattttccctaccataataaaaaccaatttttccctcatctttcta

SEQ ID NO: 131122 - DNA, 490 bp, Glycine max
  Clone ID: PAT_MRT3847_8940C.1
agtgctttggaggtggggctatcagtttttggttggtggttcttggagattacaatgataccggcgttggatatacgcgtgatctggacagagtatgaaaagggcttatatctctgctgttaattagataaatcccaaaggtggtatactttaattcacaggtttttaatagaatacacttgcgtgcttctagataattgatctgactctattataatttatgctaattgctatttctagttttcttacgatatttggccactcctggaattgtcattatttaatctaattcttaaaatgcttctctataatctcagtatatggtatcattgattccacctatcgcacccatgaagcattaattgtgtatcaaatgcttagcaaatcaggctctggcatcatttattcctgtatacttctttaaacactcccatgtgctagcattccaaacataattctttaaactcaatcttatttcaaaatccttcga

SEQ ID NO: 131123 - DNA, 376 bp, Glycine max
  Clone ID: PAT_MRT3847_89410C.1
gaagaagaacagatcagaaaaatggcgtccaaagttccaaagaaggccaatctcctggatcaccactccatcaagcacatccttgacgagtctgtctccgaggtcgtaacgagtcgtgggtatgtggaagacgtgagattgagcaatgcgaggcttttcattggggcaatcatcatcgtcattgctttattcgctcaattctacaagaagaagttccccgaaaatagggattttctcatcgcttgcatcgccttatatcctgtccctacattttattttatttatttgtgtttggttgttttaattttggtttgcatgagataattggatgtggaaacatctaaaattaaggttgtttggaaatgggaatttctgg

SEQ ID NO: 131124 - DNA, 690 bp, Glycine max
  Clone ID: PAT_MRT3847_89411C.1
attttccgctgactcctcatgcccaacggcaaataccttggtttcttcgaaggtgggtgactccatgggaacctcctggccacaatgtggtcctcactgtgggagcgcttcatcaagctgattccgctgctcttagggttgcagcttctgcctggcataacgagttagcaactctgccaaagcccttgcttgtggttaatgttgggggacctactggtaattgtccctatgatgtggatcttgtaaagaagttagtggttatgcttcagaatgttctatggagctgtgggagtatcaggatatcttcataatatccatttgtattacagatctccaaaattttggtcaaagaatttgccacaaatccaaaggtccaaatatgggatggtgaaggttcaaatccacatatgggacatctggcctgggctgatgcctttgttatcactgctgattcagttagtatgttgagtgaggcctgcagtactgggaagcctgtgtatgtaattggagcagaacggtgtacatggaagtttgctgacttccaaaattctttgcagaagcaaggggttgctcgaccattcactgggaatgagaatatgactgctgaaagctggagttatcctccactgaatgacaccgcagaagctgccagtcaagtggttgctgctcctgctcagcgacgatggacta

SEQ ID NO: 131125 - DNA, 449 bp, Glycine max
  Clone ID: PAT_MRT3847_89412C.1
ggcaatgtgttggcctaatgtcacccttgtcgacgctctctgccttgcgcaaccatggtcatccctcctccggtgtgcccatgacccttcctattctaatctgatttaacctcgcctaatgccgaaaagctcctttcacagctcaaatcgctcacacaagttcttatcaagccttgtgactttcccttcaatcaactatacccaagccttgcttgaaaggagacacaatctctatcaagatatcagaggatgtataccaagaaagtatcaaccagtgcaaaaacaatctccgcagaaagctcatcctcttgaagggaacaacaccgctcaaagctacagaccttcaaaaaaaaaattagcaaagctgctctagagccccatgggtcctgggaaactaatccctttagggtgtggtttatacatattcaatctcgcatcattggaagatc

SEQ ID NO: 131126 - DNA, 236 bp, Glycine max
  Clone ID: PAT_MRT3847_89413C.1
ggaaaaactcttcaaatatgatatagatgggatgctggttcacatatgttcagaatattttcctgaaaaggaagatcaagataaacccaaatagattgatgcctgatagagacatagaatagatcctcaatacagtgtggttcaggctcatatggaatcaaatttgtttaaatcgtgtcttgatgatgatgcacctcctaaaggttccatgccgtgctcttataattttatcaatc

SEQ ID NO: 131127 - DNA, 272 bp, Glycine max
  Clone ID: PAT_MRT3847_89414C.1
attgccctttctcatcatggcaatggaggaattggcaggcgaaccatgaggagcacgctcaatttcagagatgcttttggaattatagaccatgggtccgattaagttattgtaccttaaataattattacttgatgataaaattttgaacaacgaaaactttggtaactatagacatcaggctactcatgatgtctatagttaccaaagtttgcttttatgaatagacccatggctcaaaaaaaaacaaaaagaaaagaaaataatttaaa

SEQ ID NO: 131128 - DNA, 196 bp, Glycine max
  Clone ID: PAT_MRT3847_89415C.1
cggcgccagctcacgtcagagacaaagggtcgtgcaagacaaagggtcgtgggagacacgagggactacattaaacctataccaaccaagcaactatcttggtaaaaaaggagagttttcatggtttatccatctggtgcaaggcgaactgcccatacccaaagggaagggagcatagaaacgcccacagttctag

SEQ ID NO: 131129 - DNA, 173 bp, Glycine max
  Clone ID: PAT_MRT3847_89416C.1
tcgaagactgcgaagtatggactcctgttcgcccagatgggatgactacggcatttaatacaaacctcagaggtgatgcatggatgcatggaatttctgaaaggcgcacggtcacatggagatatcatttgagtcagtggagggacatggccacaaaagcaggatgtataggc

SEQ ID NO: 131130 - DNA, 346 bp, Glycine max
  Clone ID: PAT_MRT3847_89417C.1
ggccaataggttactcgagcggagggcattcgtatttactgagctgcgattttgctcagccccgacggatcgactaccaagcatgttatgagcatgatggctgaaatgataaacagtctttgtggtggtgatcaaaaattgatgcgtgaaaggaccacacctgctgtttggcttgttgttcaaggatggcaataagtaagaaagatgtttggagatgtgtatgtggtatccctttctggattactgctcacatgtttttcgcaatagcatttttaatgagtcgcctatttgatttagctttgaaaaattaccggccccaggttataagctcctatgattgtttttt

SEQ ID NO: 131131 - DNA, 2051 bp, Glycine max
  unsure (1)..(2051): unsure at all n locations
  Clone ID: PAT_MRT3847_89418C.1
gtgggtgcgggacaagcaaacgaaaagtaaatcaatcaatcgttggaatcactcaaatgaaaggtacttcatggtatcgctattttctcttttcttattactttttcttgttagggatttgttctttagtgcaattgcaaatcacacattagttgtatttagtgaactattaggtgctttccggtttgaatttgggtgtttcccttgaaatcgatgacggcgagctttttttctccaagcatgaagtggtttcgagtcccaacatgggtaagcatccctgcagcggttcaatggacagtttcttcgacgagcttatcaaggacacgcacgcctgcacccacacccacacctgtaaccctcccggccccgatttctcccacactcacacgtgctaccatgtccacaccaaaatcgtccccgcccctgaggaggaccatgtcgccaccgatgacaccgccgagtccgccgagaagaagtcgtcgtcgtcgaagaagcggtctctggggaacaaagaggccgtccggaagtaccgcgagaagaagaaggcgcgtgcggcgtcgctggaggacgaggttgtgaagttgagggctctgaaccagcacttgatgaagaagctgaaggggcaggcggctctcgaggccgaaatcgcgaggctcaagtgtttgttggttgacataagggggaggattgaaggggaaattgggtcgtttccctaccggtggctggttcttatgtgatgaacccttgtaacttgccgtgtgatgatagggtggattgccttcaccctgatgggaggattggggagactgcggctttgaatggggaagagtttgatggttgtgaatttgagaacctgcagtgtctggcaagccagaatttggggctcaaggatcttcgcgcttgtggggttggggttggacacacagggtctaatgtaaattcttctgccttatcaaagaaaagaaaagggggatctcgtgctgcaacagctggttgaagaattgataatttggtggttttcatccttggcatggtaatatctccttccaatatctcgttaccagttgcagcatcagctatccatcaagtcattttttaaaaataattctctctttttgatccactactgcattataatggttcgattggctgctctactatggaagattagtcatagattaatgttttatttaaacaaaatagagtagttgatctgcagccagcatagcttatggccgagacagatttggtgcttctctttgcaattaagtttactggttttttttattatgcatgggacaagttaaactgccatcataaaagtttctatgctctgtcaattttaaatctgtcaagtatgtgagtagtttttactttgtttaataataataggatataaagtggtgatttttctaaattcgctagtttttcattgctggattacagaacttagggaagatggggtgtgtttcatctttcagtacttagtgatgtggacaggtgagacaccaatgtcattttgtgtaatataaaatcttgtgagtgaaataataaagttggcttgtatggttgtcggcgttgttcattgtttttcttaataatatgagaggtttacttctgtctttagcatttttgctggacaagggtagaaggaactgttgtcctctaactgaagattttgcatattggcatgtcttctacaagttaagacagacaagtgaatggttttgtatttgagggcgcaagtagctgtttcaaatcgatgatgggaaaagcatatgtgcctgtctgcacttagagaacaagtcttgaatagatttcgatagttataaatgctcttgttgatcctctcttaggcagggaattaaaaaaaaaaaaaaaaaaaaaaaaagcataaaaatgctcttttttttcctctttnggaatgaaaaataaaacattacattattgtatcttctacttcgaccgccgttttggacaaaatttgtaataattttactttgcgttagagtctctatagtaaataattgcttaaataaattgtttatctt

SEQ ID NO: 131132 - DNA, 297 bp, Glycine max
  Clone ID: PAT_MRT3847_89419C.1
aattcggctcgagctctgtcaattttaaatctgtcaagtatgtgagtagtttttactttgtttaataataataggatataaagtggtgatttttctaaatgcgctagtttttcattgctggattacagaacttaggaaagatgaaacacaccccatcttccagtacttagtgatgtggacaggtgagacaccaatgtcattttgtgtaatataaaatcttgtgagtgaaataataaagttggcttgtatggtaaaaaaaaaaaaaaaaaaaaaaaaaaaaaaaataaaaaataaaaa

SEQ ID NO: 131133 - DNA, 248 bp, Glycine max
  Clone ID: PAT_MRT3847_8941C.1
tcgcggacgcgtgggctaaatataagacatataagatacatacttccttaataggaggtctgataaaattcggaataacaatttagatttggcattgtctgccacgcttatgctgcagtgaagaataaaacttaacatcatttgctgctttctaagttcataataatttctgtacaagtaacaaggcacaataaatctctacagattattcaagtccaattaaaatgtgaaggcaagtgctttttatt

SEQ ID NO: 131134 - DNA, 762 bp, Glycine max
  unsure (1)..(762): unsure at all n locations
  Clone ID: PAT_MRT3847_89420C.1
cacaaaggacgatctatggccactcgaatcttcccaacatggccgactatcactttactctgcccacgcaacaagtgcatccggagccccctaactcagacactggcacatggtcgacaatgtcctacaccccaacctgtgcaaacgttgccaaggacaagctctcgtggcttagctccggtgtagctcgttcaagtgtccatagcaggtacgatgtattacgtgtctcgagtggcaaggacacacttctttgatggcgtgaaaggagcaccgtggttactgctctcatctacgacagcgccgaaggcatgaagaagtgcgagccccgctccacgctattacgctacggcatggccaccaaagtgcaaggaaggccatcaggcttcaacgcaagcagcgcaagaacaggatgaatgagttccagggcacagccaataccaagggtggagccaagaacgacaagagataagcgggtgcacactgtatgatgactacaagggtcatggctggaggcgattggtggtgtttctcaactactggtgcggctggctcttacataatggcggataccgaaatcgcttgtgcgggcatcgtcatgcatatctaccagcgcctgtatacactcttgcggatgggaacgacatgacggatggcgtacgagatctaaggtctgcttaccatcgatgcatatcatggactttactatcctnctactgcaagtattatctattagacataaaattaatttagttagttattggg

SEQ ID NO: 131135 - DNA, 1080 bp, Glycine max
  Clone ID: PAT_MRT3847_89421C.1
gtggacccagaataaggagaagaggtagtggtcttggccctacgcgaattatcatcgtagaacaatcagacattcacacattctcgatcacatgtaagtctgagactagaagaatacgtataaattagaaccgattgaaagtaatcaatccgtggattctctgaacttatcgcttcttcccggtttgaatttgggtgtttccgtttcaatggatgacggcgagcttgatttctccaaccatgaagtgttttcgagtcccaacatgggtgagcttcccagcagcggttcaatggacagtttcttcgacgagcttctcaaggacacgcacgcctgcacccacacccacacctgtaaccctcccggccccgatttctcccacactcacacgtgctaccatgtccacaccaaaatcgtccccgcccctgaggaggaccatgtcgccaccgatgacaccgccgagtccgccgagaagaagtcgtcgtcgtcgaagaagcggtctctggggaacaaagaggccgtccggaagtaccgcgagaagaagaaggcgcgtgcggcgtcgctggaggacgaggttgtgaagttgagggctctgaaccagcacttgatgaagaagctgaaggggcaggcggctctcgaggccgaaatcgcgaggctcaagtgtttgttggttgacataagggggaggattgaaggggaaattgggtcgtttccctatcagaaaccaacgccgaatgcgaaccctccggtggctaacttgcctggttcttatgtgatgaacccttgtaacttgcaatgtgatgatcgggtgtattgccatcaccctgatgggaggattggggagactgcggctttgaatggggaagagtttgatggttgtgaatttgagaacctgcagtgtctggcaagccagaatttggggctcaaggatcttcgcgcttgtggggttggggttggacacacagggtctaatgtaaattcttctgccttatcaaagaaaagaaaaggtgggacgccattcatgccatgaactttctgattatagggggaattgaaatgtttgatttgttactagttagtaaa

SEQ ID NO: 131136 - DNA, 1459 bp, Glycine max
  Clone ID: PAT_MRT3847_89422C.1
aattcggcaccaggccacatcggtgaagaacaacttcctgaaccctgcactggtttcaaatctccaacaagcactgctcagaagaaaggacagtgtgcaggagcagcacaccacaacagggccaatgaacccaccaaagcttcttcaaaacccgtggtgctagtcaccaatggtgatggcatagacccacgcgtccgcacattactagttgaggcacttctttgtgatgcccttcttgatgttcatgtctgtgctccagaaacggatagatcggtttgtggtcactcggttaccacaggggagacactagctgtgtgttcagtacaagttggtggtgccaatgcttatcaagtgtctggaactccagcagattgtgtctctttggctttatctggggcattgttttcttggtcaaaacctgttttggtaattagtggactaaacaaaggaacaacttgtggttatgacacgttgtactccggagctgttgctggagctagagaggcactgatttgtggtgttccctctctttgtatatcattgaactgggaaaagaatgtgagctgtgaaagtgatttgaaggatgcagttacagtatgtttaccattaattcacgcagcaataagagatatacagaaagggattttccccaagaattgcttcctcaacatagggatcccaagctgtcctctgacaaataagggtgtcaaagtgacaaggcaaagtccgcaaagatcttctttaagttggcaagctgtgtcaacaaataagaatccttcagcaggccattacatgtctaaccagcaaagtcttggaatcatgttagcacaactaggaagagatgcctctgctgctgcagcagcgcgccgtctaaactcaaaccgcaagaatgtggaggttgaatcagttggtgttgctggaaaattcagttctcaacaaaccataaagaaatacttccgaatggagttaacagaaaaagagcagcaggacatagaggaggatttagactccagagaacttgaagagggatttgttacagttacccctttgtctttgtatgcaaatgttcacatggaaattcaatcatcagtgtccagctggctagctattgcactcagtggtgatcaatgaaactagctgctaattctgtgtggtattaattgtagagtaatctgcattgtaattgtggcaatctgaaagtgagagtcaatgcttcacaagttttatgttgtgagatcttgagagtagtatgtatcattgggtagctactatcccattagatttaatctatatattgttattcagttatttactgatgacatgacatgaatggatatgcacatgttgccaatgagaagattaagtggctcaaaaaatgtgttccacctcttgctgatgaaaagctagagtatcaatttgggggaatgaagttgggatagtcctttgtgttaggaatttt

SEQ ID NO: 131137 - DNA, 157 bp, Glycine max
  Clone ID: PAT_MRT3847_89423C.1
gcgtacgtgcgctcggcgttcggctcgtgttcggccgacatttcctgactcatttgttgaccacttctaattcctaagtactcgatttctctgcgtctactcagtagtgcgttcaattcacggggttgtgcaactcacatcgtgcaagccttctttc

SEQ ID NO: 131138 - DNA, 225 bp, Glycine max
  Clone ID: PAT_MRT3847_89424C.1
taataaggaatacaataacattcgccttatcatatgttacttaagcatgtacctggacttggtgtgcaaatggttaagatagtagttgattttacaatggaagcatagtgccctttatatttggtttacctatagtataaacaagtatgcatacgtggtgctacgagcaaaatactagaaaattaaaaaaagaaaagaatcagaccacgagactagttctctctg

SEQ ID NO: 131139 - DNA, 497 bp, Glycine max
  Clone ID: PAT_MRT3847_89425C.1
agctaggatcttttcctccaggttcttggatgaaaagatcctagtttcctttgctttgaaaaatttcataaatgatccaattgctcaagaagcacttagagcttatgctaaaagcatctacagaatcatgaggaagctgaagaaatattcaacagtagctgctgatattatgaaaaccttactaaacttaaactccgttgatgtgacagagttgtggagttgtaaagaagttgttgagttagatttgagctcaaatggagaggtgctttgtttgctttatatgaatggtcaggtcttgagtggcactctgatggaactatcaaggtatgggatgcaagaaagagaataccaagagtgattcaagaaactcatgagcacacaaaagctgtaacatctctttgttcttcagatgataggctatacagtggttccttagacaaaaccatccgggtttggacagtcaaaccagatgagattaaatgcatagatgttcatga

SEQ ID NO: 131140 - DNA, 385 bp, Glycine max
  Clone ID: PAT_MRT3847_89426C.1
ggctcgagatcaaaagaccactactatattaaagttttattaaaaaaaagaaaacaccaagcggactgtgaggcgttgtggacacatatagtgctcatgaagctcaatgctaatggtcacatgaataatcgtcttgggacttgtgcaacctgctgaaatatctagcgactattatcctctgagcggttccattggctaaaggagcaattgctaccaaatcacctactacttttgagtgtgagatcatggatacgcgatgctgccgcccttaggactgatccagcgccaggcaattgggctaatccctggtttggacctgaagggtggacacatatagagcgaactggtctatgaccctgtggagacgcctggctaaccacttatc

SEQ ID NO: 131141 - DNA, 265 bp, Glycine max
  unsure (1)..(265): unsure at all n locations
  Clone ID: PAT_MRT3847_89427C.1
ctccatgctccgccgcactttcacctctccaccactcctccgccgagcgccacctaacctcccttccgctcactcctccgacctctgtaccgccctccgcctcctcctctcnnnnnnnnnnnnnnnnnnnnnnncgcctcgccggcctcctctccaatcgccacatcctcacctccctctctgtccacgacgacgtttcggagagaatcagcatcggtgccggcgccatggcagaagcgatcgcgaanaggcgcggcatccccaa

SEQ ID NO: 131142 - DNA, 111 bp, Glycine max
  Clone ID: PAT_MRT3847_89428C.1
tgatcccggccgggaacctgaaggggaacaagtttccccaaaagggagccgttttaaagtttggggaaatcagggcaaaagctgttcccgggggaaatttgtaaccggctc

SEQ ID NO: 131143 - DNA, 361 bp, Glycine max
  Clone ID: PAT_MRT3847_89429C.1
aaaacaccccccccgggtttttttaacaaatcgatcatcaaaatttcccacaaacccccctaagtctacatgccttcctgacacaacaatttttaacaggcccccccccccaaacccccaaacaatgagttaaaatccgcgaaaaaaaatcccccttcccccacaaaaccctttgccatttaaacaaacccttttgccctgtacctaattttccttgccccctctcaaaccattatcctcctcacaaccttttaaaccggtttcttttttaaagggtcccttcccattatcccaaaccacttttgaacccccccaccccccccaattttaattttttccgcgaaaaacttaccttgttaaa

SEQ ID NO: 131144 - DNA, 395 bp, Glycine max
  Clone ID: PAT_MRT3847_8942C.1
gccaaatttggcctaagagtagtgaaggcatagtcaccaacagcaggcttagcccttgatatagccccaagtaaagtgcttttaccagcattagccgacaaagctcacatcagcaatactcttgagttttaatataagaagagtctcagaagcaggtgaacctgcatgcagagaggagagatcactgtcagggtcctgaacagtcacaggcttccttgaatctttggaacaagacacattgcccagaccaccctctcctccatgagcaatgacaatttgttgaccttcttctgttaactcagcaacattgtatagtatctcttgtttctctcctatatcctctgttccaaattcaggagctccattagaagtggaaagttgagaaaatacatctg

SEQ ID NO: 131145 - DNA, 316 bp, Glycine max
  Clone ID: PAT_MRT3847_89430C.1
gcacgaggacatgttgctgctgctgtaataatttttctgtggctcttcaaatattaaaaaaaaagggtgatatggaagtgcccatatgccattcaatgttgctagtccatttttttagtgtttcggttaaattactgattagtttgctaatttttaatgattttcctttagtatatgaattcattgtagtagttatttacgatatgattgctgtgtgtgtgagagtgagagatatccaaaactggtatgctccagcaatgcacacgtacatgaaatgcacgcaataatttcaatccccttattactgacatgaaaa

SEQ ID NO: 131146 - DNA, 552 bp, Glycine max
  Clone ID: PAT_MRT3847_89431C.1
atgattcttccaagacaaataaaaactatggggtttttccatctgcaagctctggggtccaacgtggaccctgtccctgcctcttgtttggccatcttaatcgtaatgagtaatagaagtttttgttttgtgtatataaacataaaatagagttaaaaatagaaaaataaatatttatattaaaagtatgaaagtaatttaatatttttttatgtaacttaaaatatttaataaagtgtattttaattctcttatactaatgctctagaatttcggtttagttcaaatactgcatatgttctatttttgtggctgctggtactgtatttttgtcttttgagaatttttaataaggaatgattaatattatccggtaaaacattagaatttaaaaagttattctgattttatgagtgctttagtactagttattcaatttggtccttggtaattttcatgactattatattggtaatcttcaattttgagttcttacacgaatgatcttcaattatgtcattggactgtgttaccattcccatattgtaatga

SEQ ID NO: 131147 - DNA, 459 bp, Glycine max
  unsure (1)..(459): unsure at all n locations
  Clone ID: PAT_MRT3847_89432C.1
cgacgcacgcgtccgcgggctcttgggtttcaactctctctgtctacattttccatttgcaccaaattctcttcgcgaggggtgttttggatttcaggcttttcgactattaacctgggctacctaaacantgtttgggaaatcagggctctgaataggaaacccgcggctgaagaagccacgatgatgttggaaaagatcgccaaacaagtccaacccatcatgcgcaaacacaaatggaggatcaaacttctctctgaaatgtgcccaagcaatccacgtcttctggggttgaatgttggagctggtatacatgtgaagttgcggctactgacaccgaacaaggatttggacttctacccgtttgatcaggttctggatacgatgcttcatgagctgtgccataatgcccatggccctcataatgccatcttctactagctctgcgatgaacttata

SEQ ID NO: 131148 - DNA, 342 bp, Glycine max
  Clone ID: PAT_MRT3847_89433C.1
gggggggggtttgtgattggaatacgacaatgccaatcaaagaattttgtacaggtccctttgacttattccgggcccctaaaaaaaattttttaagggaacccgcgggggaaaagggtaaaattaaagaaggggaaaaaaagaaatttgggccgagggtttgaagacttgttttaaaccctgagacttaatggatgctttaaggtttccacatgaagaaaatgttgtcccaggggaacttttctggtggcaagctcatgggccacacttaaatccttggaaacatctaccttgaacctaacctggggttttggtttttctgggaagggacttttttaaaac

SEQ ID NO: 131149 - DNA, 365 bp, Glycine max
  Clone ID: PAT_MRT3847_89434C.1
ataaaaaccattgaacataggtacataactttattcacaatgccaattgacacaatagccccaagattcaaccatggcctaagaaaaacaaccggatgaccaacttctgaagaatccatatacaactaggcctctagcgacagaggataccacatatgcagagaaagtacgggcaccacctgagacagaacgacttactcttaaattccttgtgggaatacccagtcaaagggataaagagtattatcaagtataaaatccaatgccgctaatgccacattcataccagggcacaatctaagaccagcaccgaatggaataaacccaaaaatcttgccataaagatctatggcgcaatttaaaaa

SEQ ID NO: 131150 - DNA, 430 bp, Glycine max
  Clone ID: PAT_MRT3847_89435C.1
aatcagtatgcgtgaggataaaattttttacagaatcgacaacctttacggagggctaaagccttaaattcttacgtcagttgtacatactgtagtaacagatgatcttcaaacagacagtataataaacacactccacacgacacattttaccgaacctttcctaacattttagactttacacaaggccacttaacgggactgctcccaccctttaatgctttacacttcattaaatgcaaaaatgagaagacacagaccaaatgagtagaactttcaggaattccaaaagacgttagtgtcactgctttacaatgaggcgttcttgttttttctgggttggccacatgacaatcaacaagaggcgcttgagagattctgaaggaggccagaccatatggaagcatccaccatgcattttcctccatac

SEQ ID NO: 131151 - DNA, 447 bp, Glycine max
  Clone ID: PAT_MRT3847_89436C.1
cggacgcgtgggcggacgcgtgggcggacgcgtgggcggacgcgtgggtggtcatcaacatatgcggtggagatggaaggaggctacggaggcaattggaggttgaagaaatcggcgacacctttaatcgctgccacccacatagtttgccaccaccggggatgaccatcaccactacaccagccctccaccgcacaatgacttaaccagattcatggccttttgcttgcataggtcctcaacgatgtcgattttacagattccatggctctgatttaggtgggaggaaagagtatttggccattaatgaactttgttaattttctgttcgaggtgaactttgtttgaatcattgttgggataaatggaaagcattgttatgtgtggggtggttgaggttataattatagaatgctctacaaacatggtttggaatacaaataccca

SEQ ID NO: 131152 - DNA, 1013 bp, Glycine max
  Clone ID: PAT_MRT3847_89437C.1
ggctgctcctgcaagcgtcagaaagcatcattggttagtggagcagaaactccttcagttggtgcatgcctttcactttttggtgatggttcagctatatcacatcgcatggggtgaaccatgtgaatgtatgactactgcaaagtctctcgctgaaagcatcataatccatgaagcgtacatgttacctatgctgcggcaatgtttcgtggctcctgttaagcaggttttatcattcaaacttaacgtcgggcacttccctcatttggctgatatggtgaccagaatcaactacaatgatttcaacaagtctgataatggttatttgatgactgcctaccgtcctggatttgtggcttctagttagcggaaggctcttgtttagagttgcttgatcttcatgtctgttattacaattgatatttcgagaacagaacagagattaggctgcggtcaagttgtttcatcaattaaagcaaggcgtgagatggtagatcttcggattgagaaacagttggacgattgcattgctttcttactaagggttttatcactgcaactaaacgtgggtcacttccctcatttggctgatttggtgaccagaatcgactacaagtatttctacatgtctgttagtaaaaatatcatgacttcctctggttgtggaagtgttacttcaaggttggggaaggcccctgggtagaattgtttgatctaaaggtggattgttacaactataatctgaatatgagaatagttctgcccctgctttcatgttgtaaaatattttgagaatatcctccatttgcttaatctttgggctttgtgaaggggggaaattaaaggctgttgctacccgtgttgtctgtaactgcagggccacttgcctggcagcttccatgagtgcatagcaagatataaaattgtatcgctgttgtttatatggcagctacgtaagatcaactcctacttttttgtttgattgtttaagcctgacgccactcccttagagg

SEQ ID NO: 131153 - DNA, 346 bp, Glycine max
  unsure (1)..(346): unsure at all n locations
  Clone ID: PAT_MRT3847_89438C.1
tgttgaatttggtgacttcctttgctacaaaaagtgaaaaccaacatatatataaagtgggggatgatgggtttattggggatgaatatgttgttttggattttgatataaattctggtgcanantctgcacctgttattgataattggcacacttncggagatactgtgtnactgttttcggatccatggtgtacaaaagtgttcaaggccaatggatttganttaataattgaacatttgnancaaaactacctanatattaaatttgctcaatcaactgaaaactcaancatcaatgntaatgttaaaccaaacatgaaaaaaaaanatgtggaattatgttc

SEQ ID NO: 131154 - DNA, 317 bp, Glycine max
  unsure (1)..(317): unsure at all n locations
  Clone ID: PAT_MRT3847_89439C.1
ggcggcggagcaaaagaggggggcgtttataaccncnggagacaactttttcactgagaaaacaatgataacttgcagagatttggacaaattggtcgattattatacaatagcaactcaattgtaaaaagtaatgtcgcattacatgaggaggcatctggatacctagatgatcaacaaactcccatcgattgtcactgctggaactaaatgttagcggaatgtgagtaatatccagatttccggattatatgacgacggcagatacaaattctggactaaacacgaggaaaatcttgctttgacagaagaggaaa

SEQ ID NO: 131155 - DNA, 408 bp, Glycine max
  Clone ID: PAT_MRT3847_8943C.1
aaaaaaaaccccccctttccacttttttacgacatttaaaaaaagggggggaaattttcatattggccaagcatactcagcaggagggtaaagcaaaaacccctttatggaattaaacaaacgaaccagggaagggaaaccctatttccaaatcccgcaaaggatcccaaattgggagaaaacccggcatttgcctggggaacaaaaaaagctggcctaaaagtataacccccttttacaaaatctggagagattcccaaaataaaaaaaaaatcggaaaactggtggggatccccaaaaaggaaacaaaaatgccaccaacgttggttcgccccctcaaaaccccccaataaaaaaccattttttggaccccttacctttattggaaaaaaaaaatcccccggagcc

SEQ ID NO: 131156 - DNA, 269 bp, Glycine max
  Clone ID: PAT_MRT3847_89440C.1
attaagttggaccttggtctttctattgtagcttggaatggtcagtactgttgccatatatgattagttaatggagatgaaagaatggctacatacaaattgcaatgacatcagttggaagtcttcaaagtttttattatgtgaaagatgatcaatgttgtatgcatggtgtgtgtgattctcaatgattttgtgatcatttctaatgtcaataatgggatgatcagtttaatggcatttatggggtgttatgtccaggagggagacat

SEQ ID NO: 131157 - DNA, 1580 bp, Glycine max
  unsure (1)..(1580): unsure at all n locations
  Clone ID: PAT_MRT3847_89441C.1
cgtctttatcccttgngnaacaaaaacggctgcgagagtctcatgggagtggagacgctgaccctctttggctccccccaccctatttctcaaaacgctgtcgttccccgccacgccatgtcccgctcctccgaaacctcctttcccaccctcactactatctccatctctttctctcaactccaagataagaacgccgacttgtcattcaagattgaagaaggctttggacccaatggattggggattctatccgtcactgatgttccaggatactcttcattgcgcagaaatctattgcatcttgcaccaagattggcaaatcttcccaaagaagtgaaggaggatcttgaagatcctcatagtaggtataattttggttggagtcatgggaaagagaaacttgaatctgggaagccagatattttaaaaggatctttctatgccaatcccatacttgatacacctacaacagaggcttctttgatacaacggcatccatctgggtgcggctcaaatatatggcctagaaacgctttaccagaacttgaagtggctttcaaagcacttgggaagctgatatttgacattggattgatgttggcatatcactgcgatcaatatgtatccaaagggatgaaaattcacaaggatgaaggtctggaatcaatacttcgttgctcccgctgtcataaaggacgtttgctatattattttccttcacaacagggagtcccagatggcaactctttgtcttcttggtgtggatggcatactgaccacggttcactgacaggtctgacttgtggtatgtttacgagagatggtgtagaaattgcttgccctgatagtgctgctggcctctatattcgaacaagaaataatcaaattatcaaagttgtctatggaaaagatgatatagcataccaaattggtgaaaccactgaaatactttctggaggttatctttgtgcaacacctcattgtgttcaggctcctacgggggaggagtcctctggtattgagcgctcgacatttgcgttattcatgcagcctgactgggatgaaaagctcaattttcccgaggaagttcacattcataaagagcttattccatcaaatgctgcccttacttttggagagtattcagagatgctgctcgacaaatattaccaccaaaaacagaactaacttgttacttctctgccaacaagcataactggttgaagagacttagcttgttaattcatgagactaaaataaaattgtgtgaatgtgtagtcgctattggataatagcaaaagaaaaggataactgggtaaggttacaagtgtaactggttgaagagacttagcctgttaattcacgggtaaatgtgtagtcgctattgggtaatagcaaaagaaaaagaaaatttttatagattacgtggaatagcaaaaaaattccccggggacagaaatatagcccatttaatttagttaacaggatattaactcatgggatggaatgaaagttactgtacaatccaatacttatgttctttttctttaatgggaagtaaagcaatgatatcgcct

SEQ ID NO: 131158 - DNA, 119 bp, Glycine max
  unsure (1)..(119): unsure at all n locations
  Clone ID: PAT_MRT3847_89442C.1
gttgcaggcagtgtcannnctcctttgagcgacaagatgagcatgcccaattccccatcggnagtnatncanngncggagantggaaagnccccgtgcctgcacagaatcggattnccc

SEQ ID NO: 131159 - DNA, 806 bp, Glycine max
  Clone ID: PAT_MRT3847_89443C.1
cggtatttacacgttccctaaaatctgttatcataataagccgctgccttttcacgccacttgtgactcttcaattcccaccagaatcaccttccctatcttttagccactgctaaaacttgtccttttcctttcccccctcaaaaaataaaataaaataaaatccaacacatttaacagatttcacgccaccaacggtgtcttcgtaacggatatagcataaccttttgatcattcggtatgaaaatccaatctccaacctcggatccatcttttacattcttcagatcataggatctaatattgtatgcagttttgaaagaagaaaaaaaaaggagaaaattttgatctttgtgtgattgtgctattagattagattttagtagattcattgtgtcgactagaaccctaatgaattagaatgcaatccaagagtttgagcctggctccagctctcacattctttccaggcctgaaaccccctcacaaaaccctactattccaccaaatctgtgttcttgttatcacattccttgcatatgcttctttccatgcctctaggaagccccccagcattgtcaagagtgttttggggcccacagtgccatccaatggaactcaaagtttccaacatgagttccattgatgcagggtggccccctttcaatggaacccggggcacacaccggctcggagagctcgatctcgctttccttacttcctactccattggcatgtatttggctggccatgttggagataggattgatttaaggttgttccttgtatttgggatgatgggtgtg

SEQ ID NO: 131160 - DNA, 518 bp, Glycine max
  Clone ID: PAT_MRT3847_89444C.1
tgatttacacgttccctaaaatctgttatcataatatgtcactgctttttcacgtcacttgtgtgactcttcaattcccacaagaatcaccttccctgtcttttagccactgctaaaactggtacttttccctttcgccccctcagaaaacaacacatttaacagatttcacgccaccaaccgtgtctttgtacagcataccttttgatcattcggtatgcaattccaatctccaaactcggatccatcttttacattcttcagatcatagaatctaatattgtatgcagttttgaaaaagaaaaaaaaaggagaaaaatttgatctttgtgtgattgtgttagattagattttattagattcattgtgtagcctagaaccctcatgaattagaatgcaatccaagagtttgagcctggctccagctctgacactcttcccaggcttgaaaccccctcacaaaaccctactgttccaccaaatctgtgttcttgttatcacattccttgcatatgctt

SEQ ID NO: 131161 - DNA, 453 bp, Glycine max
  unsure (1)..(453): unsure at all n locations
  Clone ID: PAT_MRT3847_89445C.1
tgaagatcccatagagaaacttaaaagcagggtagctactagggtattactttgttgttgattttgtttgtgtttgtgaaaaagcttggtttgattgttttgccaacccatcctccacccttgaaaatgtgaacttgtctatattgaagtgttcttatcttatctcgccacacactaatttcgttttctccctccctcgtcgctcatacacatacataggcttatgacccaagtgaaagtttcacacacattcgtcccttttttcctcttctcccataaagtcaagcaagtacccagcctctcataagattcatattcattctcttccttctctctcctcacttatctctcatcccttcattcattcaatcctaggatcatctcatctctctttntcaccggagccttacccaacagtacagaattcaattcgttccagccgtgaaatgagag

SEQ ID NO: 131162 - DNA, 388 bp, Glycine max
  Clone ID: PAT_MRT3847_89446C.1
cccacgcgtccgcttttcggtcgaagcttatcctgtgttttctacccgtttttctgtgggtaaacattataatgagccaattctaaggcttcgttaaaaaaaaaaaaaaaaaaaaaaaaaaaaaaaaaaaaaaaaaaaaaaaaaaaaaaaaaaaaaaaaaaaaaaaaaaaaaaaaaaaaaaaaaaaaaaaaaaaaaaaaaaaaaaaaaaaaaaaaaaataaataaaaaaaaacaaaataaaataaaatgacactataaataaaaaaaaaaaaaatgggataaacttttaaattacccaaattaattccccttgtataaaatacccactttcctctgatgttgtaatataaaaaaatcttttaccgatcgatttttaaaacagttgcgt

SEQ ID NO: 131163 - DNA, 777 bp, Glycine max
  unsure (1)..(777): unsure at all n locations
  Clone ID: PAT_MRT3847_89447C.1
acttaagnnngcaaactttaatacaaacatgtatttattaatagggggcctaccattaaccgttactttgattcgttagattaatttaatttcatagatcatatcctacaatcatccacaccatattacctctcacaagtcttttccccagttaaccatatcgttgatcattgttcgttgtcgcatgccaatgatgcttaacactgaaaataagttttttggtgtccagcaaagaccatggtgaaatgggcatcaaagattcaagattcgactagaaaggtgcacctttagagaatggtgtggctgaggagctcgacgttgaccgttctcatgttagtttgaaagttgcaatcggaataagatgcactaacagatttagcaactgaagtcgatggtgtgtgtgaagaaccacttcaaattgagacactgcccaatgatgtactcatgagattggtgcgacaagaagcacttatcagtgctctcaaattagagatgccacacgaaatagtactatggaggagaggccaagtggaagtgcatgtgctgactgcgttctcaggaaaagacaagttgttcgaccacattgcaccatttgagggccataatattgcttggatgaagagttgctacaagggttctttgttgattttgggtttatctatgagagcttttagcgaggtgtcaccggcaacgatgcagggttcatcggggacaacaaggagttcacttacaacaaaagtatagacaaagagggaaagaaggttgagatataataaa

SEQ ID NO: 131164 - DNA, 258 bp, Glycine max
  Clone ID: PAT_MRT3847_89448C.1
ccggaacgacccacgcggctgaggccaccacttttctctctctcctgggggggggggggtctctcctcaccccgaccctgatttcctcttgccgctgtccaagaccctgaatttggggcccaagaagttcacaggcaaaatcaatgcgttctggagctagaaggaattgggggtacttggcctgcgcaacagggaacgcgggggggggattgttttttttgccacccacactgggagaagaaccgccagaggctagcg

SEQ ID NO: 131165 - DNA, 187 bp, Glycine max
  unsure (1)..(187): unsure at all n locations
  Clone ID: PAT_MRT3847_89449C.1
acaatttnttttgcaaatttaatctatctttcattcctcctgcacccannggtgggcctagtattacattttactttcacattcattccaatcntatcttgaatttctcttcccaaaataaaaccactttccacaaaaataaaatcactatcaccaattacaaaggtagattttcaaaagaaaatat

SEQ ID NO: 131166 - DNA, 657 bp, Glycine max
  Clone ID: PAT_MRT3847_8944C.1
gcttgctgtgctctggtccctgtacataacaattacggtatcgatgtggtttttggttggcacatggccttcttgttcaatccttctgggtttgagtggcaaaagattgttgatgattggactgattggaacaaatggattagcatccgaggcggtattggtgtactacctgaaaaaagttgggagtcctggtgggaggaggaacaagagcatctccaatattcaggaatgcgcggaatcattgctgagatattgctgtctttactatcagtatggccttgtttatcacttgaaatttacgaaaaggacaaaaagttttctggtctatggcatatcgaggttggtgatctttctaatattatttgttatgaaggttagtagcaagctattttgtatcttgtggggcctgttaaaattgttcatataatgtattgtatgacttctcaatatgaaaattactctttcctcattggtgggcagtgtggttggttatctgcaatgaagcaaaaggcttgttcacttttttgcccatatatgaaattcatgttagaatcctatatatgtcaaaaggcttgttcttggaataaatttctgctttctttctgaatttcttttccattttgtctcaagacggtgtctgtcgggaggcggaaattc

SEQ ID NO: 131167 - DNA, 1014 bp, Glycine max
  Clone ID: PAT_MRT3847_89450C.1
ggctcgagctcgagccgaatcggctcgcactcattcgcatccaaacctagctacgaagctgatcgattaccgacatgtcgatctccaacactcaactaaagcctctgcttcccaacccatttaatttgagtaatactgagatcgttgaaaaagtttatgtatcccacacttacgacgacgagatgttcgataatgagcccctcttcaacgtcgtgtccaacattatcaagctatcaactcgaattgttggggctcttcttaagatagatgagcccaatggatttttaggaaatcccataaccataagcagtttcaaaccagaattctccactctgaagctgatgtcgtgccagatgatgaccctaccttgggggccagaaaacgcacaccaaacaacccttcggattcttcaacaactgagaaagtactcttgggacgcaaaagcgctgatagctctagcggctttcgctttggagtatggaaatttctggaaccttcagcaggcatcagaccctctgggaaactcgttgagactgctgaatcaaatccaacacagacagcttcccgtgactgatatcaacgcaacagtgaagttggtcatggaggccgttgagaagatcagacggtggggaaccttgtcttctgatgaaacttatgagactgaggatgttcccgctctatcagatgcattgcaactcatccccctccttgtttactgggttgtcgcttccctcgtcgcttgcaacaccaacatccagggtgtttcgaactatgcattatcggacttccgtggcaaactttctaccgctctggatgagttcaagcatcacctggagatatgcgagcaacaaaaagctagtatagaagactaccggagacgtaagaaggcctttaaaaagcctaaagacatcgtcgactttttgaagcttctgatcaatcaaaatggatacaagtctcaaatatatgatggcaacgccaacagaaatgtgaatgttgaggttttaaggagaagta

SEQ ID NO: 131168 - DNA, 526 bp, Glycine max
  unsure (1)..(526): unsure at all n locations
  Clone ID: PAT_MRT3847_89451C.1
gaaaccttccgcagccgatcaaactgggcgataaattaactgcagcttaaaacatcccttaggcgccgacgttatggactacaacgctgtagctggttgtgaaattggaagaataccacactctttttatcatgaaagctctacacagtgctcatgcaggacttaccgcgatgaaagttgaccaccggcgctcaagaacctggttttgaaagttccggttacatgagatcggcggaaacttaatgatctttcttaatcataacaccttagactctgcacggctgatcctactgtgaaggggtacccacgatgaggatcacgtgcgcctgctaaattggccaaatgcattcactttttcttggccgcggtctgtgggaccttggctccggaggggnccaccttcgcacactcttgatgactcctaagccacaagtgtgacgcatgttcctcacagaacaccggccgaggggaggattctctgagaaagctccacccgccatgggcttggtgggaaacatcttaacca

SEQ ID NO: 131169 - DNA, 260 bp, Glycine max
  Clone ID: PAT_MRT3847_89452C.1
ttgcgttttaaccttaagttccggtcttttcgttcttttaaccaatttcaaggtttggaaaaagggcaatttccaacccaggttggaggaacccggggtcaacaaaggtcgatcaggtttcgtccagggatagcgggcacacttaactgtgaagtggtcgtgctagatggtgatcagaaaggcgtctgaggcctaatccgcaatgcaatgtgatgttggtgtatagctggatgtcatatcctgcagaatgacatggttat

SEQ ID NO: 131170 - DNA, 289 bp, Glycine max
  Clone ID: PAT_MRT3847_89453C.1
agctgatcggtggcccatatgccacatatggtatggtgcgctttgggcccatctatcatttaacaaatgttgaataaatggacagtgagacaccatgatttgatttagcagcaagtttgcaatttctatgacctttggggagaattttagggacaaactgaatgatcacactatcaaaatctcaatagtactgtggagtgtgttgaagaaggtgttaaggcaagatggagttggaagcacatcaaagagtgatggcctatggtcagtgtttacaacgacagtcagactt

SEQ ID NO: 131171 - DNA, 502 bp, Glycine max
  Clone ID: PAT_MRT3847_89454C.1
ggatgaggcctttaagttggcttctgaatctgggttttgtattatgttgggatcattttggaattgtgagttcaatatcttctgctatgggtctatattgccgtttcgtaaaggatccattacttcgaaggttaacccagacgtctgtgcttgggagcttccatttgaaatcaatttatctggccctgagtgtcattgtgggagttgtctcctaaggaaagaattctcaaaggatgctcttcctgagtcggttgattggcagctaaacaaagagatagttttgggatttggggttttaagcaatgaccttgctgcgttactgtgtgaaccagatgaaaatgggggttttacacttataaggctaaatgtcatcaggaagggtttgaattgcagagatatcatgcctgttggactaaggctagaaacatgaaagattgccatgatcaagtgttttgtttggacagacacttactgtaccctgagagtgatgagaaatacaaat

SEQ ID NO: 131172 - DNA, 455 bp, Glycine max
  Clone ID: PAT_MRT3847_89455C.1
cctcaattctctgcaatggcggaaaccactcaattgactcgccacattgagtcctacgtcgactcttcttctcccactcatcaggctgcaagtctgaacgcaattgcatctctcgtgaacactgatgccttaactctagaagcactgatcagagagttggagatgtatttgaccacaacagataacgttggaccgggcaagaggaattcttcttctagcagaggtgatgactcatattgaatcaaaacctcttaacagtgcaactatacatagtttggttggattcttcaaggacagactgattggagagcagtgcgaggtgcacttgtgggttgcttggcactgataaggagaaaaagtgttgtgggtatggtaactgatagtgatgccacaaccattgctcagtcttttttacagtacatgcaagttcaatctttaggacagcattatgacag

SEQ ID NO: 131173 - DNA, 860 bp, Glycine max
  Clone ID: PAT_MRT3847_89456C.1
agtgcatgttgggaaatgtgtatcgatcataataaagtttaatattaagttatttaaaggatgtgtctaaattgtttgatcctttgctttaggatgtgaatatgattgaatatcaagcatttaatagattaataggaaaaggtcaatgtggtgtttgagggtataatctcaatcttacagattttgtgtaacccatagcctgtggctgatggattttattttattgccaggcagttcattgttttcatttgtatttaatatcatgtttgtagcatgtagactataaaatgtcaaggatggtaacagttcccatcttctatcagtcatgccctagattccatgcgaaaacaggatccttaacatgaatataatttgggtctctgatcaaattcttttataatcattttgtagactttaagtgttgttaatttctagcaaacttttagagcattttgattgcgttcttcagaacctagaatggaaattattgcatttgatattgtgactggtcttttatattaattatcttcttttctcttttgaaagggaccacaatatgtgtgcacaaacttctggacgtttgtttgcacaaactgcaggtcgactctagaggatccccgggtaccgagctcgaatgtttcaatggctaagtttacttcacaagaagttagtgcacttcaagaaggaggcaatcagcgtgcaaaagaaatttattttaaagaatgggatgcccaacgtcattctttccccgatagcagtaatgttgacaggctccgagactttattaagcatgtttatgtggatagaagattcactggagataagaccaatgacaaaccccccagagcccagccgggtga

SEQ ID NO: 131174 - DNA, 283 bp, Glycine max
  Clone ID: PAT_MRT3847_89457C.1
acggctgcgagaagacgacagaagggaccaaccaaccttgtgatggcaaaataatgactttacttgggactttaaggtcacctgacaagctcatataatcaacttagcttgcactgatattggcctttttaagtccactttcatacgttgagtgccccttatacgtgtcacttactacgcatgattctaacgatttgtcgcataagacatgttcatcgtaatcacctaacaacttttcctaacaaaactacattaagggtctcttgccttaggtatgaatact

SEQ ID NO: 131175 - DNA, 280 bp, Glycine max
  unsure (1)..(280): unsure at all n locations
  Clone ID: PAT_MRT3847_89458C.1
ctcagcctctccaccaaatcncactgctatctnccnaacaccaaacaccggttttcangtcccagaataaagttattctaatcnaagcancngcnccttgtccngtctnagctgctggttgtngcttccagttcaaattgggttcaggctctgcanagtgcgacggngnaggggtggatcccnntagggtgnggntnntgnnatcgcaaaggctnggnggttncnttttggtcatgtgnagtgttgcggttggnntgtgntggggcgggggggaanaagt

SEQ ID NO: 131176 - DNA, 539 bp, Glycine max
  Clone ID: PAT_MRT3847_89459C.1
gatttgttgttgtcgtggtgttaggtcttccgcttatcaaatccatatccaagattttagccagtttttacttttcagttggcttcaagagttacttcctagctacaatgatttgttaatcttgttgccttgtacattagtgcttgacttaaaacctcttatccctccaaagcgtaatttgtagtagcaatctgtcattaaacttgttttaaagcataaccagattaccagagccaaatcatctagtgtttatccttgagctgctgtaagtgtaagggaaaaaaacacaactattctgaaaattcccggctgcctccagaaattatcttataaactctactcaagcaattcggaggaataagaccatcttgctgtgtttcacgctacctcaattcttgacatgcaacttgagtctcatcagttcactgcacgtcctaaacattgatactttcttcactctatctgtatcctcctaaagcccatggagcacaatgcgtctgtaaactacttacatgatgactcagagctcagcattgctt

SEQ ID NO: 131177 - DNA, 1059 bp, Glycine max
  Clone ID: PAT_MRT3847_8945C.1
tggctcgtgggttatgacagggtttggtaatcttacacgatgatgggcaggcctggagatccattagaaaagggcttgatccctcgttcactagaacaaatatttcaaacaaaacagtctcacgcaaccccaaggctggaaagaagaaatgcaggtgtctatgttggaaatatacaatgaaaccattcgtgatctgttagctacaaataagtcatcagcagatggaacaccaacacgtgtggaaaatggtactcctgggaagcaatacatgatcaaacatgatgtcaatggaaatacacacgtttctgatctcacagtagtggatgttcagagtgtaaaagaggttgcatttcttttaaatcaagctgcaagtagcagatctgtgggaaaaactcagatgaatgaacaatcttctagaagtcattttgtattcactcttcgaatatatggtgtaaatgagagcactgaccaacaagtacaaggtattctaaatctcattgatcttgctgggagtgaacgtctttcaaggagtggatcaaccggggaccgattgaaagagactcaagcaataaataaaagtctgtcatcattaagtgatgtaatatttgccttggccaagaaggaggatcatatcccattcaggaactcaaagctcacatacctacttcagccttgtctaggtggggactcaaagacattaatgtttgtgaacatctctcccgaccaagcttcatctggagagtcattatgctcactccggtttgcatcaagagtcaatgcttgtgaaattgggacacctcgccgtcacacaaatggacgccctatagaatctcgcttgacctatttctaatctttccacacctgaatatgattatattgttttaacctatgtgtcaaccaaaataactccgattctaacatcatgcgtatagattgtaatgtatagtgaacaagttaccaagtatgcattagttttaaaaaaaaaaaaatctccctttattatagttccatttattctgcttcgtgttatattcataatttcatattattctactttat

SEQ ID NO: 131178 - DNA, 450 bp, Glycine max
  unsure (1)..(450): unsure at all n locations
  Clone ID: PAT_MRT3847_89460C.1
tggttggaacctttgggctgatttatgtgcttgcagtcgtgagaagatgatagaaggggtcttaatccacgaagataaggacggcgatcggacgtccgccggagacgccttacggaatacgcccgcacttcttcgtaagaggtcgaagacaactaaaggactagaagtaaagggcccgggccgcccgcgattaataaaatccataaaagtaaaagtaagacagctacgagactcctagagataaacatttcccgcgccgcgtaagtaagcatacggcgccccacgagaatctacacacagcccaccacaggaaaacagacgaacacacacacatatgccacccccctcccaccaaccctaatagaggtggtcccgaggctcgtccctcaaaccacacgcaacaccttctctaaaaagaaagaggaaggaaacaccaggaaagccnacctt

SEQ ID NO: 131179 - DNA, 145 bp, Glycine max
  Clone ID: PAT_MRT3847_89461C.1
catagggaagataaatttaattcatgattcaaaaaatagtcaaaaatacagggaatctttcttttccagatgaaaatacagggggatttttgcctctcatcaataagccaccgaatcagataaatagctggactcaatcaaaagt

SEQ ID NO: 131180 - DNA, 286 bp, Glycine max
  unsure (1)..(286): unsure at all n locations
  Clone ID: PAT_MRT3847_89462C.1
ctttttttttttttttttttttttttttttttttttttttttttttttttttttttttttttttttttttttttttttttnaaaaaaaaaaaaagggcaaagtataaccccttattcattaattaaatttaaaacacccctttttccacaaaattttttatttaaaattaagcccgaaccttttgttttaaggggctcccaccagggtaaatgcaagctttggaactttgattttggaatgagagggttgctgattgaaaaaaacacagtttccttgttttttgcc

SEQ ID NO: 131181 - DNA, 314 bp, Glycine max
  Clone ID: PAT_MRT3847_89463C.1
gtggggtcttttttttttttttttttttttttttttttttttttaagggtaaccaaaggtatgaaaaaatacgtcttcttttgcccttcaaaaatgactcgccggggtttatgaaagggggtcactctaccccctatcccccttctcaaaacaggcaattatggtgatcgtgccctgccctttggagaattttacttgaatttaggggcttttttctacgtttattttttcccaaagttgcaatggaaggtagggggagataaaaatttttggcaaaagcgcaaaaccttgggacccccctttagggacagggg

SEQ ID NO: 131182 - DNA, 600 bp, Glycine max
  Clone ID: PAT_MRT3847_89464C.1
ctttcttttcctttcaagatggcttacttgaaggttgtcataaacatgttcgacttgctattcgtgcttatcttatcaatgattctggcaacagcaagggtgcccctgaggatatacgaacctcatcacaatgaagatggacgcctccttgctatggatgatccacgtgaccaccattataaatttacaccataatcaccgaggagtgaagacccaatatgctgccaaaggcaagttgaataccaaaaaataatcaaatcagacagcactgggtttcaaggacaaaacttgctgtggagaagaagatatatttgcaaacatactactaataaattatagtattaaattgttttggaattacgatttcttgtgaatgtcaataattaggttaataaattgagtgcattgtgttaatttcttcttttttttaacaccaataaaatcagattctttccattgataaaatatgttgaatacaatgaggaatcactcagcatcaaataacaaaaaaatttagctaaggaatgcgctaccaaattaacttgtcttctaccatattgaataagaaaagaaggatataatctcaggatctttctaatt

SEQ ID NO: 131183 - DNA, 341 bp, Glycine max
  Clone ID: PAT_MRT3847_89465C.1
atgtcaaaaccaccacctatggccttttgcattttataaaaccaacttaaacaccaactaattttccaaaattggatataaagaatgcaaaacattgtttgaagaagcctataaaacccatttcgagctttgtatttccttttaagtttctttttaaacgattctgatatttttcggatcttgcgaagcagctgatcattttttgtcattttagaagtattccttatcttttgacaacattaccgttatatcatgctccacaccttgcacagtagcttatgggatattcttcaatcttgattgaatctaatcagggtccaaaggggcaggcaacctgtttg

SEQ ID NO: 131184 - DNA, 301 bp, Glycine max
  Clone ID: PAT_MRT3847_89466C.1
gagcctgtatagtggacagcggccgtactttatttattttgtttagacatgaaatctaaaagcatgcggcatttagaacaataatatgctctggagaacacactatagatataaacccagcattaaaaagcggtggatcctagaagattaggcactcacactattactctattaaaagctactaactaagcgtcttaatctgaccgatcctctgaacacatcaaaaagagccatcgaggaaagagccactttctgcatcaatgagagaagcctctgtgtcacttggcacagtaaaatatgg

SEQ ID NO: 131185 - DNA, 165 bp, Glycine max
  Clone ID: PAT_MRT3847_89467C.1
tataatcacctaattacatataatttttaggcgtaaccaatgtacgtaccaaaccgtggcgttgacatttcaattgtgaaaccttcttgcagctctataggctgatgatgcatcccatatttccaaaggtatatgtaacacttactcctaccatttctatggttt

SEQ ID NO: 131186 - DNA, 1107 bp, Glycine max
  Clone ID: PAT_MRT3847_89468C.1
aagaaaaggaaaaatccaaaatgaattcctcctagtccaagccctcgtgctgtgtttctttctctgaactttcctctttctttatctgtttccacccattccttcctttatttttctaattctgcatctctctcataataatcatctccaaaacaaactcttgttcttactccactctgctctgctttcttccaccattgccatggcctcccactcaaaccaaccaggacccggagctgaagggcaaggtgagaaggacccattttgtgagatatcgccgtctccttctccatcgtcggcgacggcgccggcgctggtgctgtcgaactcggggaagcgaatcgaccaggcggggaagaagaagtacgtgaagcaggtgacggggcggcacaacgacactgagctccacctggccgcgcagaggggcgacgtgggcgcggtgaggcagatccttgaggatgtggattctcagattatgcgtactctgagtggcggcgacgacgacgttgatctgaacgcggagattgcggaggtgcgtgcttgtctggtgaacgaagagaacgaaccgggtgagacccctctgttcactgctgctgaaaaggacaccttgatgtggtgaaggagttgctcaactattccaacgctcagacggtttctaagaagaaccgatccggatttgatcctttgcatattgcagctagtcaaggccaccactccattgttcaggttttgctagattataaatccgggattgagcaaaactattggtccctccaattctactccgcttataactgcagcgacaagaggacacacagaagtggtgaatgagcttctgtcgaaggattgtagcttgttggagattgctagatccaatggcaaaaatgcgttgcatttagcagctcgtcagggtcatgtggagattgtcaaagccttgctcagtaaagatcctcagttggctcggaggaccgacaagaaagggcaaactgcattgcatatggctgtaaaagggcaaagttgtgatgtggtgaaattgcttcttgaggcagatgctgctattgttatgcttcctcttggtttgaataaattatatttacttttgttatt

SEQ ID NO: 131187 - DNA, 688 bp, Glycine max
  unsure (1)..(688): unsure at all n locations
  Clone ID: PAT_MRT3847_89469C.1
cccgcgtccgtctctctataataatcatctccaaaacaaactcttgttcttactccactctgctctgctttcttccaccattgccatggcctcccactcaaaccaaccaggttctctctctctctttctatcttcatcgttctaaatttttaatttttcgatgacccttttgcttgcgtgtatcaggacccggagctgaagggcaaggagagaaggacccattttgtgagatatcgccgtctccttctccatcgtcggcgacggcgccggcgctggtgctgtcgaactcggggaagcgaatcgaccaggcggggaagaagaagtacgtgaagcaggtgacggggcggcacaacgacactgagctccacctggccgcgcagnaggggcgacgtgggncgcggtgagngcagatccttngagggatgtggattctcagattatgcggacctctgagtggcggcgacgaacgacgttgatctgaacgcggagattgcggagggtgcgtgccttgtctggtgaacgaagagaacgaaccgggtgagacccctctgttcactgctgctgaaaagggacaccttgatgtggtgaaaggagttgctcaactattccaacgctcagacggtttctaagaagaaaccgatccggatattgatccttttgcatatngcaggctagtcaaggccaccac

SEQ ID NO: 131188 - DNA, 637 bp, Glycine max
  Clone ID: PAT_MRT3847_8946C.1
ggaaaaactcagatgaatgaccaatcttctagaagtcattttgtattcactcttcgattatatggtgtaaatgagagcactgaccaacaagcacaaggtattctaaatctcattgatcttgctgggagtgagcgtctttcaaggagcgggtcaactggggaccgattgaaagaaacccaagcaataaataaaagtctgtcatcattaagtgatgttatatttgccttggccaagaaggaggatcatatcccattcaggaactcaaagcttacataccttcttcagccttgtctaggtggtgactcaaagacattaatgtttgtgaacatctctcctgaccaagcttcagctggagagtcactatgctcactacggtttgcgtcaagagtcaatgcttgtgaaattgggacacctcgctgtcacaccagtggacgccctgtagaatcccgcttgacctatttctaatctttccacacatgaatatggttatattgtttaacctatttgtgccatctctactacaaccaaaataactccaattctaacatcatgcgtatagattgtaatgtatagtaaacaagttaccaagtatgcattagttttaaaaaatatctcccattattatagttccatttac

SEQ ID NO: 131189 - DNA, 407 bp, Glycine max
  Clone ID: PAT_MRT3847_89470C.1
ctcataagctttacttaattagcaaatccaaatatggcactttcttcttcatcatcttcaacatccatatttgctttagctttgttcactcttttgcttataggaagttcttcagctcaactctctgagaacttctatgatagtaaatgtcccaaggttttctatgccgtaaaatccgttcttcaatctgctttggctaaagaacctcgccagggagcatctatcgttcgcctcttctttcatgactgctttgtcaatcttggagggccatattggaaggttaaacttggtagaagggattccacgactggatttttcaaccttgctagcagtggtgtgctcccaggacctggttctttcctcagcgaccttatcaaaagatttgaattttggtaaaattttcccct

SEQ ID NO: 131190 - DNA, 576 bp, Glycine max
  unsure (1)..(576): unsure at all n locations
  Clone ID: PAT_MRT3847_89471C.1
ggctcgaggctctacttagcaaatcaaaatggcactttcttcttcatcttcaacatccatatttgctttagctttgttcactactcttttgcttataggaagttcttcagctcaactctctgagaacttctatgatagtaaatgtcccaaggttttctatgccgtaaaatccgttcttcaatctgctttggctaaagaacctcgccagggagcatctatcgttcgcctcttctttcatgactgctttgtcaatggttgtgatggatcagtgttacttgatggcccttcctcggagaagattgcacttcccaacaagaactctttgagaggttatgaagtcattgatgccatcaagtctaaggtggaggcactatgccctggagtggtgtcatgtgctgatatcgttaccattgctgctcgtgactctgttgcaattcttggagggccaaattggaaggttaaacttggtagaagggattccacgactggctttntcaaccttgcanacagtggtgtgctttcaggaccgaattcttccctcagcagccttatccaaagatttgtgatcagggctct

SEQ ID NO: 131191 - DNA, 1444 bp, Glycine max
  Clone ID: PAT_MRT3847_89472C.1
ccatcttctcataagctctacttagcaaatcaaaatgacactttcttcttcatcttcaacatccatatttgctttagctttgttcactactcctttcctctcataagctttacttaattagcaaatccaaatatggcactttcttcttcatcatcttcaacatccatatttgctttagctttgttcactcttttgcttataggaagttcttcagctcaactctctgagaacttctatgatagtaaatgtcccaaggttttctatgccgtaaaatccgttcttcaatctgctttggctaaagaacctcgccagggagcatctatcgttcgcctcttctttcatgactgctttgtcaatggttgtgatggatcagtactacttgatggcccttcctcagagaagactgcacctcccaacaataactctttgagaggttatgaagtcattgatgccatcaagtctaaggtcgagacagtatgccccggagtggtgtcatgtgctgatattgtaaccattgctgctcgtgactctgttgcaatccttggagggccatattggaaggttaaacttggtagaagggattccacgactggatttttcaaccttgctagcagtggtgtgctcccaggacctggttcttccctcagcgaccttatcaaaagatttgatgatcaagggctctctaccaaggacatggttgcattatctggagcacacacaattggaaaggcaagatgtgcgaagttatagaggtcgcatatacaatgaaaacaacattgacagtttatttgccaaggcaaggcaaaagaactgtccaaagggtagcaatggaacaccaaaggacaacaatgtagcaccactagacttcaaaactcctaaccattttgacaacgagtacttcaagaacctcatcaacaaaaagggtctccttcattctgatcaagagctcttcaatggaggatccacagattcactagtgagagcttacagcaacaatcaaaaggcctttgaggctgactttgtcactgcaatgattaagatgggaaacatcaaacccttaactgggtcaaatgggcagataaggaagcaatgtaggaggcccaattagaagagacacaacaaataaattatatgaattgtgtgtttgtgtgttacatatacaccctaaaagtggggtagttcttttgtgagttgatctgttaaggtgttttcttgttccttcaaaatttgtattgttaagttcaatttcaattttactagagttattgtaaggaattaattgtaaagcatgtttttcttacatgtaatgtcattttaaggatgtgttgttacggttacaacaattgtaactgttgcaaaaaacgtgatataatgaaagtggaatattgttttctttttaaaagaatgactttcagtatgtattagcttactgaattaattattt

SEQ ID NO: 131192 - DNA, 265 bp, Glycine max
  unsure (1)..(265): unsure at all n locations
  Clone ID: PAT_MRT3847_89473C.1
ggaaaaagccggtcacattaaggtgggtggggataccccaaagaaatcaccttttttgaaggccattgtaaaaacataaacttcaccaaacacaaagctaaaaactttaaaaaggccgcaggtcccccttttcttttaagcccacttgccggggacaaaattgggggcgcagccccagacattggtgttgactgggcccccaaggggaacagnaaggtgctccactgggccccaaccgcgggaaaaggggctgaacaaagaaccc

SEQ ID NO: 131193 - DNA, 587 bp, Glycine max
  Clone ID: PAT_MRT3847_89474C.1
tcccacgcgtccgcccacgcgtccgcccacgcgtccgacggctgcgagaagacgacagaaggggaagttcttcagcgaccaagaccagatcgacttcatcgattccttccagaagtgtctcttcgagaacacgcacggcgtcgaggccacggaggccaacaaactcaaaatctacggcaaggatttcgcggcgtgggcaaaacccgaaaccgccgatgattccatgtgggaggacgcagaggaagccttcaccaaaagccccacactggttaggtcaaaccaagacctaaaagaagagttcgaagaagcttccaacggtggaattcagagccttgctttgggtgctttggacaacagtttcttggtgagtgataatgggattcaggttgtgaagaatttcgcacatgggattcatgggaagggtgcttttgtgaatttcagtgatgggtatcaaaaagggggtggtggttctttctattgtacccctaagaagacacttctgatgagggctgagaccaacatgcttctgatgagtccaatgggtggagggaagcttcactccactggcttcatcagcttgatattga

SEQ ID NO: 131194 - DNA, 377 bp, Glycine max
  Clone ID: PAT_MRT3847_89475C.1
gccacgcgtacgctcatgctagcgtgagaaagattttttcggcacccttcatcgcgtggtcttacacatcctcgtatgtcgaggccgttaaattcttcccataaacccgacggagacgataggagaatatatgaggttgaccgaaaccatacatatatactatggaagcccatcgcacggtacataccgcgatgagtctacgggcccattatctggcgaggcccacaactacatcaatgacgagattccaattgactacgattgaagcactagtcagctagctaacgaccgcataaacctatctcagatgccagtcgcacgaatggaatcactcgaagtagtcgcatctttgcttatttgagctgattcttaatacg

SEQ ID NO: 131195 - DNA, 358 bp, Glycine max
  Clone ID: PAT_MRT3847_89476C.1
gccccagggcacttaccgaagtgttaaaagaatgcctctttctatagggggaggagctgatgcaaagaatgctattcttatgaagatgccaaacgctgttctttcaatgtggagagatcacgttggacatctcgactttgaagttgctaacgatgactgctccctacattaaatggacagtcatgtttcttcatagcaatttggcaatgagggtgatgacaccatcaatattgaggcctgtccccacaagctgtggcagattggagagattcaggaaaaaggtgtgttgtaattttcacaagaggaatatcttacagcttgggcaactcaagagcgttctacaacaactatgttggct

SEQ ID NO: 131196 - DNA, 500 bp, Glycine max
  Clone ID: PAT_MRT3847_89477C.1
aattcggctcgaggcctccacaggtcaacgagctggatggtatctcattgggggagtgggagaacgagaaagagattgatgaggtcgctgcacagtgtggacttcagagggttggtgtcatattcacagatctcctggatgcagacaagggtgacggctcggtcatttgcaagcgtcacgccgactcgtatttcctttcgtctctcgagatcaccttcgcagcaaggtaccaagcaaaatacccaagaccgtccaagtggagcgagactggacagttcgggtcgaactttgtgacctgcgttatcagcggagacgctgagggccagattggcatctcttcataccaagcgtcaaactccgctgtggagatggtgcgcgcagacatcatcgagccgtcagccgagccttcagtgatgctggttcaggacgaggcggagagcgataccctgaacaggacacgatatatccccgaggtcttctaccgacgaatcaacgagcac

SEQ ID NO: 131197 - DNA, 1648 bp, Glycine max
  Clone ID: PAT_MRT3847_89478C.1
aagcttacggctgcgagaagacgacagaaggggataattcacaagccacaaattagtactctcgttaatttttttgctaattgctaattgggcacaatggaaaagcttcatgctgtgtgcatcccatacccagcacaaggccacataaacccaatgctcaagctagcaaaactccttcatgttagaggcttccacatcacctttgttaacacagaatacaaccacaaacgccttctcaaatcaagaggttctgattccctcaatagtgtcccatcatttcaatttgaaaccatccctgatggtctctctgataaccctgatgttgatgccacacaagacgtagtttctttaagtgagtctactacaaggacttgtttaactcccttcaaaaatctcctttcaaaactcaatagtgcctcggatactcctcctgtgacttgcatagtttctgacggtggcatgtccttcactttggatgctgcccaagaattaggcatccctgacgtgattttgtcgacagctagtgcatgtgggtacatgtgttacatgaaatatccaagacttgttgatatgggcttaacacatctcaaagactcaagttacttagaaaattccatcgattgggtaccaggcatcaaagaaattcgattaaaggacttgcctagcttcatgagaaccacaaacccacaagatctcatgatgatggatttcatatatagccagtgtgagagagctcaaaaagcttcagcaatcattgtgaacacgtttgatgcattagagcatgacgttttggatgcattctcatccatattgttgcctcctatctattccattggccccttaaacctactcttgaacaatgatgtcaccaacaacgaggagttgaaaacaattgggtccaacctttggaaggaagagccaaagtgtctagaatggcttaactcaaaagaaccaaattcagtggtttatgtgaactttgggagcattatggtcatgactagtgaccaattgacagagttagcttggggacttgcaaatagtaacaaaaactttttgtgggtcattaggcccgatcttgtggcagggggaattaattgtgcgttacccaatgaatttgtgaaagagaccaaagatagaggcatgttggcaagttggtgtccccaagaggaggttttggctcacccagcggttgggggattcttgacacattgtggttggaattcaacgttggagagtgtgtgtgaaggggttccaatgttgtgttggcctttctttgcggagcaacaaaccaattgtcgattttgttgcaaggagtgggggattgggttggagatagaggatgttaagagggagaaagttgaagcacttgtgagggagttgatggaaggggaaaagggtaaggagatgaaggcaagagctttggagtggaagaaattggcacacgaggctgcttcgagtccacatgggtcttcgtttgtgaacatggacaacgtggttcgtcaagttcttatgaacaaaattgctacaaagtagtgtttagattattacaatgctcaatggcatgaattcgttcatgtagtagtgtaatgattttaaaactattctaaatctattgaaataaaggtataatatctttttagtttttaaa

SEQ ID NO: 131198 - DNA, 263 bp, Glycine max
  Clone ID: PAT_MRT3847_89479C.1
ttaaaaaattaaaaaaaaaaaaaaaaaaaaaagaaaaaagtgggcggaacgttttagaggtaccaatttggggggacgttcttgcgaactcaatacatcatgtatcgggtgtccgaaggctaaacgcttgcaaggctgaacagatacgtattaatgggacgactctagatagaccctggtctgagataacgccagagatacccctatgacatgtggtgagaaacacctccatttcagcagctggcgttcttccgaaaaggacc

SEQ ID NO: 131199 - DNA, 2417 bp, Glycine max
  Clone ID: PAT_MRT3847_8947C.1
taaagtagaataatatgaaattatgaatatgacacggagcagaattgcaaatggaactataataaagggagatttttttttttttgtttaaactaatgcaagcttagtaactttcttcactatacaagctatatgccgctgttagaatcaatctcattttcattttcactttattgtggtactcacacaggctcttgattgccacaaatggttaaaaaaaacaaatacacatttctgaagattagaaatagctcaagcgagactctattgaacgtccattggtttgacgccgaggtgttccaatctcacaagcattgactcttgatgcaaacctgagtgagcatagtgactcaccagatgaagctggatcaggtgatatgttcacaaacattaatgtcttggagtctccacctagacaaggctgaagcaggtatgtaagctttgagtttctgaatggcacatgatcctccttcttggccaaggcaaatattacatcacttaatgatgacagacttttatttattgcttgagtctctttcaatcggtccccggttgatccactccttgaaagacgttcactcccagcaagatcaatgagatttagaataccttgtacttgttggtcagtgcgctcatttacaccatatattcgaagagtgaatactaattgaaaccttatagagtgttcattgatttgatttaatcggacagcggttgaacctctctttgaatgccgcacaaatgcagccagttcaacgcggttcagacccccttgtacttgatggacagcgctcgcatttacactgtatactcgaagggtgaagacaagatgccatggagatgcttgttcattcatggggttgaacccacagctcggctatttgcagcaagatttaaaagaaatgcaacctgttgagcactatgacatccactactgtgagatcagaaacttgtgattttacatgagataattgccggtctggctcatctcttactggttgccactctcccctaagagaggaagcttctgtagccaagacatccttctgttttatggcctcctcttgagaagaaacggatacagtaagttgaccccttaacaaggtgatgttctccactaccgaatttgttcattcattgagtttttcccacagatctgctatttgcagcttgatttaaaagaaatgcaacctctttagcactatgaacatccactactgtgagatcagaaacttgtgtatttccatttgcgtcatgtttgattgtatattgttttccaggagtaccattttccacacgtgttgttgtagatatcagatcacggatcgtttcattgtatatttccaacattgacacctgcatttcatatttccagccttgaggttgctgagactgctttgtttgaaatatttgttctaatgaacgaggtatcaagcccttctcctctggatgtccaggccttcccatcattgtataggttttccctgaccctgtctgaccataggcaaaaatgcaaaccttgtaaccatcaagagcactttgcacaagctgtgaaatttcaataaaaacttcttcttgtgatgtatcaggtgcaaaaactttatcatatgtgaaagaatgtttttggccattttgtgtcaattcaatgccccgtccagaagtttccattgatgttggataactgaaaatcctgccttccgtgctagaactttcatcagctaataaaggcctcacacgacaaaatacacgaatgttcccttttaattccaaaatggtattatgtaattttttccgcagcctctccccttctataagtttatattctgcatctgctaagcgtctttgtaactcattcacaaatatctgttgtccctcatattctgtccttgtctcatatgcagatatatcagacacctgcagtttcttctctgcagttgctagctgctcttccaatgcctttatttgattatctttcagagaacatttttcctccagatcattagctttaaacgtcaagctgtccaattcagtggaggaatgttttgtagattctttaactttctctaattcagaacttaaaatttgtacttgagataattgccggtctcgctcatctcttacttgttgcaactctcctctaagagaggaaacttctgtagccaagacatccttctgttttatggcctcctcttgagaagaaacggatacagtaagttgaccccttaacaaggtgatgttctccactaccgaaaccttctccttttctacgcgtttaagttcatcctcaaccgacgaaagctcagagtgaagttttccattgtactgttgtaagcttgtaatgtaatcctgtaaccgcttatacatttcattgagtgatgctatcttctgatttgcactttgcatctctcgttgggctc

SEQ ID NO: 131200 - DNA, 903 bp, Glycine max
  unsure (1)..(903): unsure at all n locations
  Clone ID: PAT_MRT3847_89480C.1
gaatactccactgtcacatgtctcaacctcgcgtctcactgcaaaacccaaagctcagcctattcgctaacgaaaataatgtcgagagacgaaaacgcaaacggttctcacgccggaaagcatttgatcagaatccactccggcacggagatattctaggaaatcgcgagcaagcgtcgacttcacctgtttccgctacttaactcactgcaaaagccaaagctcagccaaacgtaaataaaaaatgtccagagatgcaaacagaaacggtgctatgtcgaaaaacgctgaaaacgacgaagacgaagctccgtcacggagagattccaggaagtcgcgagaaaattcggacgtagactcagaattcgacagaaagcacaacaattcgcggagaggaagctccgattccgaagacggcgataggcggcgccggaggaataggaaatcgaggcgtcgctactgcagcgagtcggaatctggttccgactccgggaaagcacgagaacattctgaaaccgatagaaagcacagcaattcgaggagaaaatcgcggggaggaagttcggattccgacgaaggagatagagcgcaccggaggaagaggaaatcgcggcggcgctacagcagcgagtcggattccgactccggctcggaggagtccgagtcggaacggtccggttcggaatcggagagtgaggaggagcggaagcggagggagaagaggaggaggagagagaaagaggatgagagagagaggaagcggaggaggagagagaaagagaagaagaggcggaggagagagaaggaggaggaggagaggaggaaagaggagaagctgaagaagaagaaaagaaaaggaggaggaggagagagggaagggagcgntgacgaattcttggggga

SEQ ID NO: 131201 - DNA, 438 bp, Glycine max
  Clone ID: PAT_MRT3847_89481C.1
cttgtttttttttgtttttttttttctttttttttttttttttttttttttttttttaaatggccaataatcagtcttcataattttgaactgctttgaatcccggccttcgtggcccccaacaagcttttcaaaaaaaaaaaacccaattgacacagcactttgggttttgtaaaaagggcaaggttaaaaacacaaattctacttgaaagaaaaatgtttacaatagccacatgtttgagccttttgttggacggcacacatgattccttttctgagcatgcttttgactccggggctggggccgacttgctttttcattccagcaatcttctcttggtgattcatctgggggaagaaaatgtttgggttttggggggggaaacccattccggggaaatgacaccaacctgggggtacaatcctgggcttcaaaag

SEQ ID NO: 131202 - DNA, 252 bp, Glycine max
  Clone ID: PAT_MRT3847_89482C.1
gtaatgttaaacccaggaagatggaatctgtggttcagaaaaatatagcccaggttggtgttagatatgtttccccttattttcataatgatagtgaggagaagattaaaggcaaaccattggatatggaaagcaaatctggatccattgctttacccacctttggaaattccattgagaataaactggacggaaataatagtggggagacaattaaacaacacggacttgatagtcatattgattctgttg

SEQ ID NO: 131203 - DNA, 340 bp, Glycine max
  Clone ID: PAT_MRT3847_89483C.1
cgcgaacagcaagctaggaaggcggccgcgacgtcgctgggacgagggagggaggagaagccaacgcagcgcatgcctaggggcaaacccgcgagccgaaggacgaccacgccaagggcgagctccgagacaccgacgcgagcatcgccaacgcgcagcggcgcgggaagaccgcggaggagccgacggtctttttcgaccggggggagaccgaggccaaccacgcggagcaaaaagacgagctaaacggccacaggccgggccacaccccccacacaagcgagcgcgccatgaccatgcgcaaggcacgagacagcgacgcgagcgacggagacggaca

SEQ ID NO: 131204 - DNA, 240 bp, Glycine max
  Clone ID: PAT_MRT3847_89484C.1
tttttcttatttatctttttggggcggagtcttatgggcacaacatcaactccttctttattctttatattttagccattttttttataacccttacattacaagcattcattttttattcctctatataatatactataaccatattctttattccacaagttcttattctgcaaatttattcaaagtcatcaagtttatttatttcctatattcattccttcactattcatttactta

SEQ ID NO: 131205 - DNA, 383 bp, Glycine max
  Clone ID: PAT_MRT3847_89485C.1
tttggttttgggtttttttcttgctgtcatataacgttagttattttgtttattagtcattctgttttccccccttttttatatctttgtttcttctgcttttacctcaaaataaatacggtatatggtatatagtaattatattcctgttttattttttcaaggaaggtatatctctttcaatttttcccttttagtcctagatgttttcatttgttatttcattaaagtaattttctttatttctcttcgaagatacggtgaaaggtcttcctacatggattcatgttttaaggtttttagctaagttcttcattattatttggtgcagataaaaaaatattgttggtaatatgtcttcttttttttacttgatttgcgtt

SEQ ID NO: 131206 - DNA, 671 bp, Glycine max
  unsure (1)..(671): unsure at all n locations
  Clone ID: PAT_MRT3847_89486C.1
caaaaacccnggactgccactgactctgaaagcgatcttggttatctttctcctcttgttcgttctgcaatttccgtgtatcggtagtggattgttcggtgctggattagaattccactattcaagcacatgtacgtgcttgtacatcgttacaagatcgcattcatcctcaagataattagaaagagagacatgcaagccactagaactcctagtaaagaattaaattaaagtcctgaacacatacccagctctactaggaggtctctcgcggtaaggtcgatacctccagcggccgagtcctccctgccaaatgccaggaacagtgtgtcatcaatgtacccatgatacttctggccttggcttttccagctgatgctagtcacgtagagcatctcggagtcttctgacaacaatgttgaagatacatctgaatttttcgcagcagttttgcgaccaaaaatccaaattggttttgacgaaaccgcataaaccttgtattggcatataacgccgagtaagcacgacatatggctcatatacggggtgaagacctcgcagggccttttgttggatgatgaaaagcacaaaggtatttggccgtattcggtttgccaagattggtcggatcgtgcccatagggtgataggtaacgagtttgccccttgatg

SEQ ID NO: 131207 - DNA, 334 bp, Glycine max
  unsure (1)..(334): unsure at all n locations
  Clone ID: PAT_MRT3847_89487C.1
gggngngggnnnggngnggggagggggnacccccttagacagaaaaaaggnaaaagangttaaaaaaggggaatcaaaaacgggggttatttttggctcgaggggggcatttttgggggtccctttgattttgaaaggcccaaaaaaagggggggggttttttccccaaattgtaaaggggggaattaaaggggcggggagttttcaacatataggaaaaaaaaaaattcccctgtttcctttaaaaaacctacctcccctttaaagaacttaaacagcttttccctaaaaaaaccttaaaaacccctcgaaaaatggtgcacctggggccaaa

SEQ ID NO: 131208 - DNA, 298 bp, Glycine max
  Clone ID: PAT_MRT3847_89488C.1
acggctgcgagaagacgacagaagggtctatgcttttggattaggtccaatcattgtcatgtttaattggatctaacacatgtgaagacctgattaaataagattcacacaaccccgatctaaacattaagtatgtgcatgttgtacagtataacattttccttaatttcttagaagacacaagttcattttggacctgtttttcatgaagaggcccgaacgggagaccatgggccgaggaagtagcctaggtcagaagagagtgtttttcctcctgctcacattcaagtttggatag

SEQ ID NO: 131209 - DNA, 321 bp, Glycine max
  Clone ID: PAT_MRT3847_89489C.1
tccggcacatttacctaagctcggcattcggctcgaggcggacaacactaacatgcatttatttaaacaacttctcacatagcctcattttatggctgactattcccagcgtcatatctgccaatgtctgagacacttgctgaccctccaagctacatatttcgaacaatgaatgtcgtaaaccgacgtaggacacttcaagagttgatggaggaagtgttacccttggctcaaagcctgctacatcttggacttacatgaggccaagtttttgccaaggtatgctttcaatagcgataggtgtgtggagtggatacaacc

SEQ ID NO: 131210 - DNA, 114 bp, Glycine max
  unsure (1)..(114): unsure at all n locations
  Clone ID: PAT_MRT3847_8948C.1
taacagcaaactaaaggtgaagttgccaganacaagatgggaaagaacccatttttcagcagcaacactgtgctgtgggagcatgtggatgganagtcaaggtcanccacaaga

SEQ ID NO: 131211 - DNA, 612 bp, Glycine max
  Clone ID: PAT_MRT3847_89490C.1
gcacgagaaaaggtgggttatgaatcaatttcagaaattgattcaaattattgttaagatttaaaatttaaaatttaatttttatgtattagtattatttttagggtagttgtgctaaaagtgactatactatttacccgtaaagtattagaagtcactaatgatctcacttttaaaataagagaaatgatagcaatattctctaatatattcttttcaactcaccctatgttattaactgaaatttattataatttttataggtcttacttcttatttaatgattttttttaattttataatttttaataatttttaatcaataaaaatatcctagaaagaatgtcttgctagccctcctcttaaaataattattgcaaaaaccaaaatttttgaactatgactatatgacaatctacagtttggatgcttatgtaagaaaagtctttacactttcaaatgtattttaattaaattctaatttcatctacagttagtgtaaaattttattgcagtatcatctgcttgccgtgttaataaatttaagatttcttactttaactacttggttttgtaattaaatttcaaatagtatgggaacatgtctttacc

SEQ ID NO: 131212 - DNA, 458 bp, Glycine max
  unsure (1)..(458): unsure at all n locations
  Clone ID: PAT_MRT3847_89491C.1
gtcacaatctactaatatttgttgcattattcttcattgtctgtaacaatactcgttgtaaagttgcattgctttctgtgcactctgcattgaaatcttgtcaataataggaaaaggtctacagccccatttatccgcccaaacctctctgaatgactggcatacaagagtaatgcaaactggacatgggttccattaatgatacagttcgcttgaagatagacaatacatgctccattaactaatatgttttgcaatctttgaatgtattttataaaagcgactgttactctcagatgtagcagttgaaaccttntatgttgtaaatggaaggacattntttcctttttgcaatgcttcatccacttatatcatgatttaactactcttttcaatttcatccattttttcatcattttttcttctttctaaagctttatttcatatgtgagtgatga

SEQ ID NO: 131213 - DNA, 240 bp, Glycine max
  Clone ID: PAT_MRT3847_89492C.1
ggggaataaaaaacttttttatagttcaaggactaaattacagaatataaaactttgggactaaaatcaaaattcaacaaatctaaattacacaatatagagactaaaacatattaccctaattaatctattcaacgaaagttggtcttttataaatatgtaatttgaatcatcaatctctgcttataaatgaatacttttggtgttatatgaataaaaagtttgttgggttatttcatt

SEQ ID NO: 131214 - DNA, 1593 bp, Glycine max
  unsure (1)..(1593): unsure at all n locations
  Clone ID: PAT_MRT3847_89493C.1
aaaggatcagctccgtgtggccacgatcaccgatgggcgatccagtggccgtaaagaggaagttgatcagagcattcttgcctctgttcgttatgacggtgtactagctgtttcagggttctgtttctccatccgatccaaaaccaactccatgtataacggcggtcccttgacgaattgttctgccatgggtcattatggaacacaaagtagcaacaactgaaggacaatccataagatgtaaagcggcattttgtactcaaagcaggtgaaccacagagtattgaggagatcatagtggcgccacgaatttctggtgaagctcgcattcgtataatatgctcctctctctgacaatccgatatcagttttcggaacatgcaggggcctccggccaatttcccaagaattctgggtcatgaggcaataggggttgtggagagcgtaggagaggatgtaactgaagttgcaaaaggagatgtggttgttccaattttcttacctgattgtggggagtgtatcgattgcaaatcaagcaagagcaacctttgttcaaagtttccatttgaggtgtctccctggatgcctagatatgccacttctagattcacagatttaaaaggagagatcatacatcatttcttgtctgtttctagttttagcgagtacactgtggtcgacattgcccatctaatcaagattgatccggcaataccacccaacagggcatgcctcatcagctgtggtatatcagcagggataggtgctgcttggagagcagcaggtgtggagccagggtctacagtagctatttttgggctggggagtattggattagcagttgctgagggagctagactttgtggagcaactaagattataggtgtggatgtcaacccagaaagatatgaaatcggaaaaaggtttggactcacggactttgtccattctggagaatgtgaaaataaatctgtgagccaggttatcatagagatgactggtgggggagcagattattgctttgaatgtgttggtatggcatcattgatgcatgaggcatatgcttcttgtagaaagggttggggaaaaacaatagttttgggagtggacaagccaggatccaagttgaaccttagctgtagtgaggtcctagttagtgggaagagcctcaggggatgtttatttggaggactcaaacccaagtctcatgtacccattctccttaaacgctacatggacaaggaactgaatttggacgagtttgtcacacatgagatggagttcaaggatatcaataaagcttttgatctattgattgaaggacagtgtcttcgatgtgtgatttggatggacaaatgaacctattcctgtacaattaacagttactttaatcccttggattatgatatcaataattaaaatattggatacttttttttttttgtatttggagagaacatattcaatgtaaaagcagttgatgccgcaaagtaattatgtcaaataaattgatggtgaccatcaatgcttcaaagttattgagtagtgtttggaaaaaannnnnnnnnnnnnnnnnnnnnnnnnnnnnnnnnn

SEQ ID NO: 131215 - DNA, 240 bp, Glycine max
  Clone ID: PAT_MRT3847_89494C.1
taaggaacttcaaattttttgtggtgcttgtcacgagtgggagagacagatcactcacagatggcccggcttttgtcgaacctgttgagcaaaagatccttgatgctactcggctcagagaacctttcactattggctacggacgataagtacaataaagctctttttagcactgctaaacggttagcggtttgcatacatgggctatcggatcctggtgatccaacagttaaagacaac

SEQ ID NO: 131216 - DNA, 891 bp, Glycine max
  Clone ID: PAT_MRT3847_89495C.1
gggttgttgcccttggtgactccctcagtgaagaggtgcttaaagagaggattaggagaatgagaattgggctggctaacaagggaaaagtgccttggaacaaaggaaggaaacacagtgcacgggcccgggtccgaatcaggcgaaggccttgaggggccccgaggggcccccaggtaaggaagaaaatggctgaacatccccattctcatagtgatcaaaccaaggcaaagataagtgattcactgagacgtgtttggcatgagcggctgaagtcaaaaagattggtggaacaattttttctttcatgggcacaaagcatagcaaatgcagccaggaaaggagggattggtcaggaagagctagattgggatagctacaataagataaaacaacagttggagctccatcatcttctgcagtctaagaaaaagggaaaagaaaagctgatggcagttgctggagcaaagaatattatccagtcatggaaggaaagcatagccaaagcagcgaagaaaggagggagtggggaacaagaacttgattgggatagctatgaaaagatacaagaagaaatggttcacctccgtcaacttcagcgtactacagaaaaggcaaaggaaaaagagatggcaagggtaaaagcagagaaagaagcacagataaaagcaattaaaagggtaatcctcactcaaaagaaaaaagatcatctagagagggctaaattaaaacggaatataaagagtcatccctgtggaaatgcaaaggaaggcaaaggttccttggaagttactacagttcaaactttgcactgaagtaactaagattcatataagtgagaacttcaatggtgaagtacctagagaacaagacgtctgtaattccattttt

SEQ ID NO: 131217 - DNA, 1436 bp, Glycine max
  unsure (1)..(1436): unsure at all n locations
  Clone ID: PAT_MRT3847_89496C.1
ggagattcaaaaggtgaaagagaaaattgtggaaaagacagatcaagtaccaaatgccacatgcacacctacacaaaaagcttcatcttctgaactcttcaagttcttttatggtcatgtcatatagctgcatcatccacttttaacaacctgtgcaaattctagtacacaccttgaacaactgttgaacaattccaagttttaaactcattcatggcctccactgtggaagtgcaatcatcttatagtgccaggaaacaagatgattcagatttcaatttgacagaatgggcagtgaaagctagaatccgcagagagaagaacaagtctagaaggtactcaggatcttacatgagaagctttagagaagacacaaggtcttaactctcaaacataaccatttctagcactgcttcttcacccggataccccttaaaagatgatatagaccctacaacatattctttcacaacggctaataaagcaaagcatggaaggcaaggctatcacagagagggaagctgatctcgagatagaatggcgtgaaactttacgaacaaagtgggtgcttttcgtatatgagaaacaaaaagggagaaagtgaaaaagaaagacaaagcaggaataacttctgctcgaagatcttttagaaactcaataaacagaattgccatgtctgctcctctagtttattcctcaaagcacattccaacaaagccagcaacttacatacaagaagaagtggctcttcaatttcccaatccagaaaagaagaaagagggaatcacaagagatgttggtactcaaagcacacccccttatcttagttcaaccagtcccagccctgcttcaactccatccatcacagagagatcaaaacctcgaatttctgactcccttaacttaaatgcaaaaacaacaaattccgacgaagaggtatgtgcaacacatttttcactgtatttaatttcctttaatgagtttatcagaaattcaaaatcttataaacgttctaatcaagacctcaaacactttagattcaattcatatttcccttttctttggtcctcaattatgaatgccattaagtgagtaaagataaaaacaccaagacacaagaaattgctagagttttaaactatttgtaatttgtttgtgcctctttttttggattgtacttaatttgttattttcctcttgtttgacaaaatagaaattgtaactagagtaaatagtgtatgaacttaaagtataatccaatctaattacatagtataatngtgtagtaaatttgtttacttttataataattattttaaaaatatacatataatgtattatctaatatcatgtatgatctaaagaagtatccaaaaaatgagatanaaaagccagttgcatttcaattttttcaaattattcaaatcgaaaggaaa

SEQ ID NO: 131218 - DNA, 555 bp, Glycine max
  Clone ID: PAT_MRT3847_89497C.1
ggctcgaggagatgtggatgcttctccctcatcagggcagtgcgcagatgagggtgaagcttccacatctcatctgggcgctgcccgggcgagaggtggcagcctcaccctgatattgtcagggcagtgcgcatagcaggtcaaattgtcagctgggtgggtgatcctatgcatggaatcaccattgaggctccatgtggtgtaaaaactcgccccttcgatttcatcaagtgtgacaatagaacagccatccgccggcaccactcagaaggaagccacccaggaggggttcatctagagatgacgggtcagaatgtgaccgagtgcattggtgggtcaaggacggtcacatttgatgacttgagctgacgttaccacacacactgtgacccaaggctcaatgcttcacaacctctagagcttgcttacatcatcgccgagcgtttgagaaagagcatgatcagatcgcagcaacctctagcccgtttagagggtaaagtgccttcaaaccacaagagaaagaattcttgtccttttttttttggcctcatattg

SEQ ID NO: 131219 - DNA, 687 bp, Glycine max
  Clone ID: PAT_MRT3847_89498C.1
tctttttttttttttttttttttttttttttttttttttgcacctccaacttcttcatcttttattatacacaaaatgcaagtcgaaatccccgaaagacttacacaggaggagcttcctctaattggaattttatgttacaacagatatcccttccactgtgcaatgttgacaacctacacaatcaattaatcacaaaaagtcataaaagaatggtaatttctttctctgcagcaacaaccatgcatggccttgattaaaaacatgtggctagatcagctgttactagtagtaatttcttcttcttcacacatacacatgcatgcatgcaatttcaattttctcaaggagtgtgcatccggcctcctcctgtggtcctcctggcatattcagcagatgattgttcactgcttgagctggaagggttaaggccatactcactggttccaccatactcactgcttcccacgccactatctaatgctagtttcctgaatctcatcatgtcagcaccgtatgcctccgcaccatactccctgctcgcgctgctgaacattgaactttgtccaggtttcactccctcatgattaagggcatctagtgacacatcaccctccagtactcgtacaatctgactcattcttgggcgcctttttgctgagtgcctaacgctaaaagcagcacaag

SEQ ID NO: 131220 - DNA, 258 bp, Glycine max
  Clone ID: PAT_MRT3847_89499C.1
acacgcttgttttttccctgtttattttcggaccggcacttgtatgcgtaccattttttccttatatcgttttgttttagagccggggggacacccccaatatttcggacccggactcaaaagggaaaccatttttactttaaagaagttactaaaaaggtagggaaaatgtagagccgggggtgccccgggagaaaactatattccattaaaaaatccacacaaactaaacccgaaaaaaaaagaaaaacagccggg

SEQ ID NO: 131221 - DNA, 266 bp, Glycine max
  Clone ID: PAT_MRT3847_8949C.1
gagcgatacgtgctcacgcgcgcgtccaggaaccgcgagctcaacaagcacgcgcgcctgggctgccaggtcgtcctcgcgccggagctgcaggggatggtcgtcgccatccccgagcctaagccgtgggacatcccataatggcctgccgacgaaaggtaaggtgcggcttttgacgctgtgagccttccttaattccgctggctcggtcaagctgtgcgcctgtgccatccccttttatatgttacggatttagtgaagaataa

SEQ ID NO: 131222 - DNA, 411 bp, Glycine max
  Clone ID: PAT_MRT3847_894C.1
cgacgggtcactctttggagaggttcactctgaggatgcccgaggaagtaatgaagaagattctggaagatagtgaacgcgggaatgtgacgaggatgatgaagcgttccgcgagctacgacgtcgttttgcggagcatggaagaagggggtgaaggtagtagtaatagtggtagtaatagtaaagagaagagtagtactaataataataaccggtgggttttatcgatgacgcctccctttgtttctcgcgccgttcggggattccgagagtgtcaagagagaacggttttccattgtgaagtttgatttgttgttagagtttcattgcttgtacagtgaggaaaaaattgagttgtaaaaagtgtagtaggaaatttgaggatttatgacattactcattattttgttt

SEQ ID NO: 131223 - DNA, 255 bp, Glycine max
  Clone ID: PAT_MRT3847_89500C.1
actccgtctccagagagagaaagtccgagatctgatcggaaccgaggtaacgctagctccaaacctactctatgctccctcgcgaacctcactttcttcttcttcgtcgattcgtttctattttctggatttaactcggtggaagttctaggttattattgttctttctccgtgcgcgagtcgttgttttccgtaaaaccttaggtttcggattctagggtttggtgaaggttttaggttgagggaaaacgaatt

SEQ ID NO: 131224 - DNA, 317 bp, Glycine max
  Clone ID: PAT_MRT3847_89501C.1
tcctctagagcggccgctttttttttttttttttttttttttttttggctcagcctccattctacaaaatttaatgcttgttgttatactttagcccatgttaatatatacaagtttttagggatatttttcttttcttagttgggattctcatcatcattggtagctagttttgaacttctattgtcaactttggaatttcagaggatgaaatgaagatcttgagcgaaattccaaagctgaaacctggtagtaaggatggttaaaatttcatttcatttttaatggcccaaaaatcaataataagggtttcaaaa

SEQ ID NO: 131225 - DNA, 448 bp, Glycine max
  Clone ID: PAT_MRT3847_89502C.1
ttgttttttttttttttttttttttgtttttttttcttttttttttttttttattctggttttgggtatactgaccagcggcgaccaaactttttccccacaaggcggtatttgctacaggaaaaaaaaaacaacatagctataattgttaattatgagggcacacaaactattgagccataagtcaacccctacccctatggatatgtttctttttcccctcccccttggcctttaatgattgagggaaccctccatgtgaactaccgtttttccaagacttttataagacctttagattcttaaaggtgctcatctttgtgatcatatgaagcaaaaccctgccatcttctttaccttataaatgatagacgaaatcatttgtgacggggatgtcccaatgccaaatcttgcctatgaactaccacgtctttttctggcatgaacg

SEQ ID NO: 131226 - DNA, 230 bp, Glycine max
  unsure (1)..(230): unsure at all n locations
  Clone ID: PAT_MRT3847_89503C.1
aggggtttttttttaaaanaaaaaaanggacctttcctggacgnanacatttttaacggagagaagggggaacccagggcggggccctggggtcttcccggttttttgggggaggttcctttggggtaacaagtttttatttagtaggggtgtgataaatggggggtgaaacctggggcacattattcccgggggaaaaaactttaactgtaaaaatttcaccccccaag

SEQ ID NO: 131227 - DNA, 427 bp, Glycine max
  Clone ID: PAT_MRT3847_89504C.1
taaaatcttgtttttttcaccctattgcatttttttttctttttttttttctttttccttttctgagacccatgaacccccccaaggacactgggccccgagaaaaaatttttggttgtttttgctcctgttttccaatccccccctgttgaaggggaacaggaaaaaaaaaagatgaaaaacacggtttttttctcccccaaaccttgaaagctccttcatgaccgtggtgttttttacatagagccttttcacatggcccctcctctgcctcttttttgtccctctcttttctggaaccaaaagcggagtgagaatgtctaatttttggttaaaaccaaaatttcccctttttgggggggtgcccccctttgctcgcgccgtacctcggggggggggggccgcgttcccgccgggcccccccccc

SEQ ID NO: 131228 - DNA, 1535 bp, Glycine max
  Clone ID: PAT_MRT3847_89505C.1
ggttgaatgcacatgctggtctccggtccggttagggccttgtctgggaccttaattcacaaatttatgacacaatccataacaaaataagctgaaagtgttttcagtccaatttattttggattctcagaagcagaaatggactgctgaagaggaacaagcacttaacgccggaaatgttacgaatagtgatggtatatggcgcaccatagtgaagggtacacagttaagtactgtcttgtacttgagtgcaaatgtggcttttatgcagaagttctaacatcttggttgaccatcaattctaagaagatgtcgctagagttatatgaaatagctcagaaggcaaaaccaggttctcagacagcatggtgcctcatttgcactcaccgaattggatcatatagaacaccaaattgatgctctcaagttgcgtctagtttctcgaaattgggttagttctaatgcaattaccacccctcattccacattccataaacaaattgagatggagctaatgtccgtaaaaaacactggcactttttaagttgaagaatctattggtttctctaaatacagttcctaaaagttctttctgtagccatagtacatggttaagtcaggaacattttctaagaggcaatagtggcatccaacaatttttttgtttctcatagaacaccattgaccttgtaaaccaatgtcctccattgagaatgacatggtcaaaatcttcaatttgggttatccatttctcatctggctcatcaaggtaaaggttgcaaaggcctgttgggcctggaccctttgcatctgcttctttggatttcactaagtgagttgtccaaaaagcagccatggtgaagttgtaacttgggtacttccaccgcataaagtagtcatctcttttgtatgatacatctatgggccattccacccttgataagaggcaaatcatggactgcatttgatttctgccaactgagtctccaacaaatgccatggattttcccctcattatctcaagaaactggaaggggttgaacacaggaaggtcacatccatttggcttccacttccacttcatgaactcagagtctgttctaccatacttcatgcagttttggtgctcatgaatagcccagcatgttttgtttgtgtagtatggagcctttgggtttgggacccattccccagtgaaaatgtcacacttctttatggaagttgaaggcaagcttgctgactcattcagatcatcaaatgctgatgatggtttctttgataattgcttattgctcttcaaagatgatgatgttgaagaagatgtatctaaacaaagggtaggaaagtggtgtgacagtgaataacagtacggcaaacactgcaagcaaagtcacttttgggatcatttgttttggggtgcttttaccaaagagaagctctataacttggaacttcattttggaaggagctgagggagaaagaagaaaggggtagggaggaaatggaggagttttgcttatataaatactcgagcc

SEQ ID NO: 131229 - DNA, 495 bp, Glycine max
  Clone ID: PAT_MRT3847_89507C.1
ggctcgagcttatcagctcctcgcccgcaagtattattctgatgttagcaaggatccacaggctgctgaattattcaagagcatccatgatgcatataaagtactatctaatgaagcagcaagagttcagtatgaccaagaacttcaattcggtcacaagccttacagagaaaaatggagttacggcactgaatttgaagatcaggctagattctataggtgggaccatctgaggaaaaaaaatggatagtgaaagatagtgggagaattacaatgtcaatgaggactactacaccagtgaaacagatgaggaagaagacgaagtagtagatttagatgaagagaggggttcttttgttgaagtgcttagatcagcattcgtgccattatttttgcttcagacacctggatcccgcttttcactcacattcagcagtctgacagcattgtttgataagaaggtagacaccggctttaaaatgggctatataataa

SEQ ID NO: 131230 - DNA, 281 bp, Glycine max
  unsure (1)..(281): unsure at all n locations
  Clone ID: PAT_MRT3847_89508C.1
aacagctataaaaaaacaaaataanttgatttttattaaacataaaaaatatcatcattcacgacgcgttttttcattaaaactctcacacccaacactataaccctcgaagtagataccaacaacacaatactcaatgtcaatgccaacattcaatacaaagaagacattcctcctcatcaccatcacatgatttttaccaaaaaacagattaactatataattaccctggccgattacaacattcacattcaatcaaccattcatatactcctataact

SEQ ID NO: 131231 - DNA, 661 bp, Glycine max
  unsure (1)..(661): unsure at all n locations
  Clone ID: PAT_MRT3847_89509C.1
attcgagctcggtacccggggatcctctagagtcgacctgcagttcttggaccgaacagcccaactctcccttcaattgctacatcacccttaagcccacaaggtataactaatgtgcccaaagggttttttcttttctttaaaaaaatggacttcaatccacaaatggatacaaataaaaatttaatttgcatgcactgtatttttttttacttttttagcaaatcaaaaattactttttggtgtgaattttaaaatatttattataaaatttaacaaatattttatatatgaaaatttgttattaaatgataatgtaaaaatattttataccaacagtatattttaatcaaattctataatataaaaataatatttataataacaatacataaaacaactcaggaaatgatttgataagtttccaaatataaatcatctatttaaaacttgaaaattagttttgttgctcatagaataattctatttaactcaacataattgtttttagtaaaaaatgcatgtaatctataaaaaaaaacttaaatttaatgaaagaaatattttatcctcttaagttcctaactctctctttatacattaatattttatcttcctaaagttctaactctntatacattaataaaatcaaatgagggca

SEQ ID NO: 131232 - DNA, 332 bp, Glycine max
  Clone ID: PAT_MRT3847_8950C.1
ttcgacgcacgacccacgcgtacgattgagcttgctgtagtgaggtgttcgaatctgaaattaacttaaccaaattcatggcgggacatatacgtcctcgcttgttcacttactctaattgcaggaaccatgtatcactccatgatgatataatttacaaggcttctaatggaagatacggccaaacctttatgctttgccatgcaatgaatattgtcacagggccaaaataagacagacatctgttgactggcctgcacactaatactgatgatcattgcggggattgccgtgaacagttgcgaagtgagtctgaaagatcttacgaagca

SEQ ID NO: 131233 - DNA, 565 bp, Glycine max
  Clone ID: PAT_MRT3847_89510C.1
gctgttctttgctgaataatacatcttcactatagtaaggcgttagaacactgaaagccatcattttctcaacttggggagcatgaggcatgttcataaaaagtgagttactgaagaaggcaattctccgtctagcttccaaatttactgggatgttttgcattgaatcattggatgtaagaattgtatacaatcgccgaacctgccgatagaagttctcattgttggcatcaggcaactgaatggcagtctcaaaaagtagacctgcagcaggattctgttgagccaaaccatcctcctttagctgttccggatttctttgctccttgaacaagtctctggtagcaatctcataaagagcttgaagggtattcaccacttggttaggatctttaacaggcttgtttaataactgaacaagttttatcaacttgttgtggagcttaggcagtgcagttgttttgaacattttagtgaatttctcaatctcaagagagtgatcaatttcctgaaacagaacagtcacaatagaatgctcttcagtgtgggggttgataatctcaag

SEQ ID NO: 131234 - DNA, 427 bp, Glycine max
  Clone ID: PAT_MRT3847_89511C.1
taggtagcaaatcaaagcccagccacgttgatgtgagtggccgagtctgttgcattcaggatactatctcaaaaggtcgtgtaaaccgcaacttcgccacgccgggcaactgtcgctttcccataaacatgaaatcaagtcgtgacatcgcagcctgctttctgcatgatgttgtcgtgtcgcttactggccaccgcggagacggagcaccaggtgaagggtcgactccttctggatgttgtagtctgacaaagtcctgccgtcctcgagctgcttaccagcaaagataagacgctgctggtctgggggaataccctccttgtcttggatcttcgacttgacattgtcgatagtgtcggatgactccacctccagtgtgattgtcttgccggtgagtgtcttgacgaagatttgcataccaccgcga

SEQ ID NO: 131235 - DNA, 221 bp, Glycine max
  Clone ID: PAT_MRT3847_89512C.1
atcacatatttcttcatgaaggcacgtcgtggttcttggcctccaggtttcttttgcgcatgccccgacctctcacatgtggtacaggggcgcgttttcttgggttccttttcctacttatgggagggctccctggtttcgcccatggcagtctccttcttggctgcttctgctaggcctggcgggccctcttttgcctgctggctattcctggtcttcct

SEQ ID NO: 131236 - DNA, 183 bp, Glycine max
  Clone ID: PAT_MRT3847_89513C.1
gtaagtcggaattaggctcgtatgtttcttaatgacgtttacgacgatgatcacggcaacttcaacaagattgttgacgtcatgcagaaaatgcaagaatgtgggcagcaaccagatgatatcgtccaggatgttgatcacgattgcgatttagctagtcttggccggctatctacagtgatg

SEQ ID NO: 131237 - DNA, 323 bp, Glycine max
  Clone ID: PAT_MRT3847_89514C.1
tttgttggttccaaggatgagaaactggctagccgcaaaacttttgacaaacctactaggcgctgcttcactattatccccaaagagattgatctcgtggcccgcaataagaattcaaattgatgtaagggaaatgataaaaaaaggggacgaggatagctggtaaggtatgatcaacccatactccatggaatggacacgttaggccgacccatgactgactgaggatgaccagattttgggttgagacgatggtagttacgatggaaacgacaccaaacacgctatctgccagagaggagcaatgactaattgaaccttgc

SEQ ID NO: 131238 - DNA, 444 bp, Glycine max
  Clone ID: PAT_MRT3847_89515C.1
tcatcaagacatcaattgaccctccatacatgagcaatttgtagttataattgtataggcaaaattaaaatttataaaacaccccaaaattaaccctaatttgatcctctaaggatccctatacatgttcactataacgcaaattgcgataaacttattccttacctctaagagggctcacgtgtgtagtctgacaatgataacggtgtatctagcaattccctaagattgctcaagcttttcctctagttgctctgctaaggtttccaagcgttagagagaaggagaagggattggagcctcaatttcactgtctctgtgtgagggacatttctctctctacagatattatgttgcaaatcctcagagtggaaatttgcgaaaatgagttccaaaggtggtgtctaaatttcagaacgatctaacggttaatgtgttcgaaat

SEQ ID NO: 131239 - DNA, 178 bp, Glycine max
  unsure (1)..(178): unsure at all n locations
  Clone ID: PAT_MRT3847_89516C.1
taccgctgcgagaagaccacagataggggaatcacagtggtgccttatcgctgtgggtgggcatcggcgtccttctcttatatggctttttttttttttggcttcnccccaccccgaaacaatggccggaaaaggagaaggtccctctattcgaatccatctccgaaccacctactct

SEQ ID NO: 131240 - DNA, 368 bp, Glycine max
  Clone ID: PAT_MRT3847_89517C.1
tgtttttttttttaaatttttttgggtttttttaatttttttttttttaaaaaataaacaggaaggggggccccaataattttattttttaaaatttaaggggcaaatgtaaatttttacttcatttttcaaaccaactttttcctcaccttgcaatttttaaatggcaggataagggaggaaaaacttgtccaaacaaactaatttaaaaaataaagggattgattcactcctaaaaaccaagttttcaatggagttttggttactggggaccttttttgaacatgtccaaactcactcgggtcaccaaaggggataaaacaaaataattgggaatgtttaaaattataaatgttcttgggtatttt

SEQ ID NO: 131241 - DNA, 283 bp, Glycine max
  Clone ID: PAT_MRT3847_89518C.1
ggaagacagacttagattctttgtttgctaccttctctcggaaaaatggttaccttcagcgtgcggcagtaccagttggctgggatgtctcttcccacgtaagcacatcagcaccccaagatctaccgaatgaatctctggcccaccaacaaggttcgagccaagtccaacttctggtattttctgaggaaactgagaaaggtgaagaatatcattggtcaattgcttgccatcaacgagatttttgagaataacccaacccctattaagaaccatggtatat

SEQ ID NO: 131242 - DNA, 375 bp, Glycine max
  Clone ID: PAT_MRT3847_89519C.1
gatgcaactatctagatagttgaaagtctatagcataagcggtggcggatacaggaacaataattttttatccgttacgtgaatgctaccgaaccaagggcagatgttgtcatcttacatatagtttatactcaaaattccctcaagcatggaataaatagactgtggacaccttgcataaaatgtatatatatatgaaataaataaatccccgggaaatgccaaggatacttggataacaaaataatacattatgtatccttatcctgactagaaactacaaaagagttactgttccataagaactgatttaacgggattcgacacctataccgaaaaaagactgaacttacctatctaggtatacaaatcctc

SEQ ID NO: 131243 - DNA, 586 bp, Glycine max
  unsure (1)..(586): unsure at all n locations
  Clone ID: PAT_MRT3847_8951C.1
ggaactataaaacacanagagaaacaaaacatttcttctttgaacttgatgcctnnttcaagggatgggaccatccaggggggcgtggggagagacaaatctaatctnacataccacctattcctttntcttantcctncattgctanttgaaaatggaaagtttcttctttctgcaaaacggaccagaagaactacatgcacagagtatattatatcaatggatgctgataacatatcaagatctaatagcacttacattggaaaactgtggtcaaattttctttgcaccaagtttataatttatgatacacagcctccctataacaatgctcagctgtctcctccaggccgaagccgtaagttttattcaaaaaaagtttctccaaaggtccctagtggcagctacaatattgcccagatcacctatgagttgaatgtccttggtactaggggcccgcgcagaatgaactgcaccatgcactcgatccctatgtcaacccttgagcctggctgcactgtcccggtccagccagagctccttccccgctcccttcaatattccttccggagcatatcctttgcta

SEQ ID NO: 131244 - DNA, 436 bp, Glycine max
  Clone ID: PAT_MRT3847_89520C.1
aattaaaaaggtcataacttttcactcgaatgaacgattcaggggcataatatattgagatgctcgaaattgaacaacggaagctctccagatatgcaaatggaccaaacttttaactcggaggtccgattcaggcgcataatatatcgagacgcttgaaattaaactgtgaaagctgtcaagaaattcagatggtcataacttttcagtcggaggttcgattcaggcgcataatatattgagacactcgaaattgaacaacggaagttctcgagaaattctaatagacataacttttcattcggttgtccgattgaggtacataatataacgagacactcgaaattgacaaccggaagctctcgagaaattcaaatggatataacttttaactcggatgtgcgatttaggcgcatcacatatatgagacgctcga

SEQ ID NO: 131245 - DNA, 464 bp, Glycine max
  Clone ID: PAT_MRT3847_89521C.1
ttatttattttttttttttttttttattttttctttttttagcttttgattatcatacttttttacaggaaaacagggttttatattttgaaattccaaacccaaacaaaaagtgggggaagatcccaaaacctaacccttttatttaccccttgcttttatagcaaaggaattttacccggggaccccccttttttttttaaattttaattacctaatcttaaggggaaaaaaaaagggaaacctttttttgttttcccggggaaaaaggaaaaaaaaaagaaattttgtctaaaacacacccggcccccttaaaattaaaggggggggttactaaaattgcccttttttgatccaaaattttaatgaaccttttttttccgctgaccttttttttttttttaaaaggggaaatcattaggaaattgtcctcttcaaggataattttcaccctcccggggggg

SEQ ID NO: 131246 - DNA, 535 bp, Glycine max
  Clone ID: PAT_MRT3847_89522C.1
atccttactatcaccctcaacaaataacgtgtctaatactcgaaggaattaggatcacattcgacggcacagatggcgttggtaccgtcacactctacgtctcgaattcaacaacatcgatttctcactaccggattctcaacattagcagctatacccgtcccccatttcatccgcgcccaatcccaatctctctctaccctcggtccacaccgttagagccgcatactctctacgtacgaacgcccatgatggcctcatcactcctgatgcatcattagattgtcatctacccgatgcagcaggaagttgatggcaatcactgggcgctcactttcaagcgctaagtttctcatcgcaagcatctcatcactggagcctgagttggtcacagcatcttagagttaggcccctaccgacaggttctccaattcatgcacaatgaagccccttctgtgtacagcctcaattcgaatgtggcgcgagagtctaagcggcgagatgcgactctacgaacccgtgattctcaagatgc

SEQ ID NO: 131247 - DNA, 481 bp, Glycine max
  unsure (1)..(481): unsure at all n locations
  Clone ID: PAT_MRT3847_89523C.1
gtggggggtgggtttttttttaagaaaatgatttttcttggtatgaaattttgctttacaggtaaaacacggggccccgggatagctttccccaccaacctaaaccttccaaaccctttttacccttgcttgtttttaataacggacattgtcatgacggggggggctcttagtacatttcaggacccgacgaagatagggaagcgaaaactttggttcttaggaacggtttattggttaccataatacctgagcaaaaaagagaaggcctgcatatgtatctacctcatctaacattaacggtctatataggatacgggggtgctacccttcgtatgtcctaagtccaagcgttcggaagatcatggtgggaaatgtttaagtttcttaccctcgctggtccccagccgccatgttgaccggcctcgggaatcccgccatcttttaggattttttaataaanttccccagataggactca

SEQ ID NO: 131248 - DNA, 1591 bp, Glycine max
  unsure (1)..(1591): unsure at all n locations
  Clone ID: PAT_MRT3847_89524C.1
cacaagcatgtgcacaatgatgatgtattactattacaaataataatacatcatacatacaaaaaaaagacagaacgatatatcatcaatcaacttattatcacatgattccatttcatttgacaccttctcccattccaccaacccaactcaatataaaaattttccatattggtggtacttacaaacaactttgaaacctttttctcattcctatgatgatcgttcatgtaatgcagcatgcattaggattttcatcactgaagagttgtggaggtggtattctttcaatgacataaagtggactcttcttttttggcttctcctcgctttcttctcttcgggtttattctcttcttctgcaggtttgctctttgctctcttctttcttttctggttcaggttctggctggggaactatcttggcttgctttttggtgcgtctatatacataatccactagcttgtttgcatccatggttcctgtcacaagaaccttccctgtgctaaactctgtcattgctgtttgaactcctctcatttgtagtatcttcctcttgagttgctcagcacaggcctcacagtgcatgtttacattcagttccacagtaactggtccactaacctgagaattgacaacttctggtataggttctccttctgcttcaggcaatggagatataacacttgctcttctctttgttttctttgtgattgtgttgcagattgcttgaggctccactataccctttatggtcacttcatttttagccatgtcaattaccactccttcaactcctctcattttcataatgtatctctcaattttcttggcacatccctcacaatgcaagtccacaaacagcacacatggtgaaggtggtttaggctcttccttcttctcttcttctgtcttttcttctggtttttcttccttcttttcctctgctggcttttcctctgccttctcttctttcttctcctcaggcttggcttcagccactggttgtacttgctcctgttatgcgattcctcacatttgtcctatgaatcgagactgatgaaatgtcaaattgttattctgaatttggaaaaaaagttcttagacatgcaaaagatggagagggtttaacaagtgttgagaaatcagtgatgttataaggagggaaggagaaggggtatatgataggtgactgaggagtgatatgcatatataaagttaaactgagtgattccttaccacatgcagtgccactaactgcgaaagggaacctcttagtttaatttttttttcagaattcttttcaatcttcaaggtagttatgcttcctcacccatttgtcctatgaatggagactgatgaaatgccgaattgttattctgaatttggaaaaaagttctaggacatgcaaaagatggagagggatttagcaagtgctgagaaatcagtgatgttataaggagggaaggagaaggggtatatgatagatgaccgaggggtgatatgcatatataaagttaaactgagtgattccttgtgggatacagggcggctatcttctattngcccccctcttagtttaatatttca

SEQ ID NO: 131249 - DNA, 169 bp, Glycine max
  Clone ID: PAT_MRT3847_89525C.1
cccacgcgtccgcccaatctatgcctttcatatgttaaagagatgcactgaaaccagaggggatgatgcatgaaactcatcaaacatcaaagaagatagaaaaactcctaatgcggattaacaaagtcatctaaataccaaaaagtcttctttaaactctgcaccaaaa

SEQ ID NO: 131250 - DNA, 1724 bp, Glycine max
  Clone ID: PAT_MRT3847_89526C.1
gggctaacaatatgattccatgccatttcatttgacaccttctcccattccaccagcccaactcaataaaaaaatttcccatattggtggtgcttacaaacaactttgaaacctttttctcattcctatgatgatcgtttatacaatgcagcatgcattaggattttcatcactgaagagttgtggaggtggtattctttcaatgacagagagtggagggtactgataatagtacatcatcctctttaagccttcatcatcaatgttattgtaaggcaccaccaccacattattctcttcttttttggcttcttctttgctttcttcaccacccttttcttctttgttctcaccaccctcttctttctttgcttcctctggtggcttctcctcttctttcttctctctggtttattctcttcttctgcaggtttttcagcttctttgctctcttctttcttttctggttcaggctctggctggggaactatcttggcttgctttttggatatacatatctaccacgcgtacgtacacaatccggagttagtgttggttccatcaaaaccaaggcaaatgtccttgcgttcagttccccctggattctgctcgtttccttgcttttgtttcggcagatcaccgaatatattactatgatcttcgcaaccttaaaatgccactttgtactttagttggacataacaagactgtgagctacatcaagtttgtagacactgtgaaccttgtctctgcttccacagataacactttgaagctttgggatttgtctacatgtgcatctcgagttatagactcaccgattcaatcattcactggtcacgcgaatgttaagaactttgtggggttatcagtatctgatggttacattgccactggttcagagacaaatgaggtgttcatataccacaaggccttccccatgccagcattgtcattcaagtttcagaacacagaccctctttctggcaacgaagtggacgatgctgtgcagttcgtgtcctcagtctgttggcgcggccagtcatcgtccaccttgctcgctgcaaattccacagggaatgtcaaaattctggagatggtttaagttgttggcctctacacagcaatctactacaaaatgatacattgtttgctgagcatgaggtgacagaacctatgcttaagattagcttctgttgccactgaatgctttacaaaggggtatatagattccttgattattatttgtaagttgtaacataacaaatttttgcattagtagttcatagcggaagcagttaaagagaagagtgagattgatcacgtggaaaaccaaaaaaggtcctgtagatagtgtcacatggaaaaaagtgaaggtcacaacaatctatatcagattattatcacggttatgatccatattcaatttgatagttacattcacctagtggaagctactatttttgtgtagaattcaataatatctacagataaaaatctattgcattttctaaagtatctattgtttttaatgtgctaagtcggtgcaagctttgatgaattgaatgtcctgtatcatgtggattgtggaacgtgacacattaaatgccttttattatgctcgattgtggcatatcaaatatgactatgtaaatcttggccaaagattatggatggctaaattttttagtttaaatattattgaataaattgttagtgtttaa

SEQ ID NO: 131251 - DNA, 532 bp, Glycine max
  Clone ID: PAT_MRT3847_89527C.1
tcgatctatggctagctaatgtgccagagtgccgtgcatgctgattggtcgctccacgcgcgtagccgcttctgagcgcgcatgcctcagacagctcactcccctgagtgattactggggctagacccccacaatgactctcatcttccacatattcccccttgaaactgatgtaagctgccagcgtcagaaccgattaacctggtaactgacgcttgaaacactattatctatgctgcctggacatgtgctatgcagcaccggagagcgttccgtctgaatccgatagcagtactgcccacgaatgcaggcgaattgcaacttctcaggctagtggttggagatatggttattaagcctatattgcgctacttacggcatatagtttgcgattacggtgcatcataggtagtgctcggttcatctatgcagctagagcagctagccctgctgatgatagagtcgctgagtgtgacgaacagttaactgtagttgagcagcgcgaatatgggcgtggtgaatagccggccag

SEQ ID NO: 131252 - DNA, 459 bp, Glycine max
  Clone ID: PAT_MRT3847_89528C.1
ctcagacttacgatcacacttacgataggatgcaccattatacatataagatgtcgatcaagaagatatgtacgatgcataccaggaggtcacggactatgcccgctgatcagatcagggatctcagcctacgatcagatccatgatcttgcatacatgctgcatcagctctttgacaaggttccagattggcactctgaccaggagacatgctactatgtgatacgcgaaccctgcgactatgttgacctcttacacgcggaatctgatcacctgactgcgcctgactctgaactctctgctacaactgacacactactagcgccattaatcagagctctacttaagcaatcgaatggtgcataagttgctctatcgcactagtgataccgagcactcaagtacttgcgaaccgatacactcagtatgcgcgactttcttattctggttttggtccac

SEQ ID NO: 131253 - DNA, 241 bp, Glycine max
  Clone ID: PAT_MRT3847_89529C.1
aatcgcgtacataatgccgccagccaggaataacaccatttgtaacatgaacatcacattgtatgctgttggaatccatcacaagctatctgtgaattgctatccttatataaacggctccattgccaataaagcacttagagggccctatttgcatgcctacataaagaggaactaacgccatgaatatacctatttacccaactctaacctactcatttaggctcttctgaaatcacta

SEQ ID NO: 131254 - DNA, 736 bp, Glycine max
  unsure (1)..(736): unsure at all n locations
  Clone ID: PAT_MRT3847_8952C.1
attcgagctcggtacccggggaatcctctagaagtcgacctgagaggggacctgcttttatatagagttgctttcagttataccaaatgcacattacttcaagagaggaacatatgatctgaaaaaggtgctgtgattctcactttctcttctccatgtgagggaaaaacatataaaactttagaacttgtttgagcatttctttctaattcaattttaaattacagattgtagaatatgcaaagaagaagacttcacttctattatagttgttcacaccaatcgtagggaaccaggtttgctgctttcctgtgaagattcaatctatgcagatttcatataaaagattgtttttaagatacatttatgcctttttcttctagatattaagggaagatgcccctacaagtgcttaaattttttctcctatgtattgtagatgctcttttaatataggtgtacctgatgggcctactgctcatttcaagctctcgaaacttgttttgcgcaaggatatcaaggtatgaaataatctgcataatttgaattttgaagtagataaataaaataagaaatctcttttgaaaggaaataatgtcgtgacatgttaattgtctagtctacaggtgctcaccgntgaaacttatttttttgtcccttcacttttgcttagtgggcactataaaaaaaactcttataaggtctgcattgcaaccttgtgttactaatatcaaat

SEQ ID NO: 131255 - DNA, 252 bp, Glycine max
  Clone ID: PAT_MRT3847_89530C.1
ggtgtgaacatgaatattattttgattgcagttatcctaattcataaatcacattgacatattgttctttttgtcttagatgtgtatttaactcaaataacaagattttctcaggatattctcaaatggaaagggaatctctgatttcagtttattctttcagacctctaagaacaggaagtcatatgcttggattctgctttaactccagaagaactagtgcatcttgcgatagagtgcttacctacatct

SEQ ID NO: 131256 - DNA, 243 bp, Glycine max
  unsure (1)..(243): unsure at all n locations
  Clone ID: PAT_MRT3847_89531C.1
gatnncaantcgattnctctattatgancaagtaatcatgactacgctcanttgtncatccnnaatgaganagttagcaatattcgatgaacnggtaaaanaagacnaaaaaatctgttatgattnaattaagaaaattcaaatagatgatccacattgaangtgatgcatnatttcaggancngaagattnntatacccttgataacntgtanctgnatnaccagnngaatgatgnnaatgg

SEQ ID NO: 131257 - DNA, 1603 bp, Glycine max
  Clone ID: PAT_MRT3847_89532C.1
attatttttaaaaaaatactgcgcatttatccgataaggcgtcaggcaattttgaaaaacatgagtgtccattttctcgcttcaggttttaaagcccgttgtggttcttgttttggtgagacaacaactgaaactcgacagtgtatgctgcggatagaagagattcaatctgaatctgaatggaagctatcagaaagcaagcctccaaacttcgagaacaggtcgctcgtcaacaacaggctgtgcttaaacagtttggggctgggggatatggaggttcagataatatggttactgatgaggtggagcttcagctacatcagaaacttgagaagctttacatatcgacacgtgctgagaaagcattatcaaagggatattgttcgcggtgtagaaggttatattgtaactggatccaagcaagtggaaataggaacaaagttgtcagaagatagcaggaaatatggtgcagataatacatgtaccagtggtaatacattatcgagagctgcgctaaattatgcgcgtgcccatgctcaaatggagaaagagcggtggaaacttactaaaagctcttggcacacaggttgcagagcccttaagggcaatggtgatgggagctccattggaggatgcccggcatcttgctcaacgttatgacagaatgcgacaggaagcagaagcccaggctattgaagtttctaaacgccaggcaaaagtaagagaaacgccacccaatgcagagaatgctatgaaactagaagcagctgaaacaaagctgcaagacctgaagacaaacatggccatattgggaaaggaagcagctgcagctatggctgctgttgaagcacagcaacagaggttaaccctccagcgtcttatagctatggttgaagcagagcgtgcctatcatcaaagagtcctacaaatacttgatcagcttgagggagaggtgacatcagaacgacaacgaattgaaacccctcctactcctagtctggataacagcatgccaccacctccgtcatatgaagaagtgaatggtgtctatgcttctcaggcacacaatggatcaacagatagcatgggttacttcttaggagaggttttatttccatattctgctgtatctgaagtggagctaaatctatcagttggcgattatgttgttgttcgaaaggtgacaaacagtggatgggccgagggtgaatgcaaaggcagggcaggttggtttccgtttagttacattgaacggagggagcgggttcttgcgagcaaggtgactgaagttttttaacttttaagtttttcctgttgggttggtttcttaacctgcgaattttgtatgtatgttttgattttgtaaaacagattgatttgagatatagatggcaattttcccttgtgattatcttgtagaatttataaatcatttttttgttatccatttttattttattgcactcgttaaaaaaaaattaaaatgtgaagctaagctgcaagatctgaagacaaacatgaccatactggggaaggaagcagctgcagctttggctgctgttgaagcacagcaacagaggttaactcttcagcgtattatagc

SEQ ID NO: 131258 - DNA, 144 bp, Glycine max
  Clone ID: PAT_MRT3847_89533C.1
ggctcgaggcgccggagaagttaattttaatatggcaaattttacgtcagcccatcattttgacctactggacggcttgcctatcgtctataaaggggacgagaggcccaaccgaccgatcatttctagctgcatagcgatgac

SEQ ID NO: 131259 - DNA, 845 bp, Glycine max
  unsure (1)..(845): unsure at all n locations
  Clone ID: PAT_MRT3847_89534C.1
aatttttgaaaaacctctgtctctgttgtttctgatgcaaatctccgttgtcgttggtgtttcggtctgaaatcaaatcaaaatcaacactgtgcgctgcggttagaagagattcaatctgaatctgaatggaagctatcagaaagcaagcctccaaacttcgagaacaggtcgctcgtcaacaacaggctgtgcttaaacagtttggggctgggggatatggaggatcagataatatggttactgatgaggtagagcttcagcaacatcagaaacttgagaagctttacatatcaacacgtgctggaaagcattatcaaagggatattgtccgtggtgtggaaggttatattgtaactggatccaagcaagttgaaataggagaagaaaaaggagggtggtatgaaaattaagtgtttatgataagagaaataggagtgctgctaggaggactgaggaaacaatgatgggaaagtgtaacagaatatacacttataggagaggaatggaaatgtgaataaacagtagtggggaatagtggcaagacagaacggaattttgggaatgagttggtagcttaggcctgggagggcataatctgtgtatcagctatgattgttgttatctgttatttctacattttttttctggtatatgtattttcatttatggagctgttatcggtattgttctggtatctgtatttccatttatgcagctgntatctggtatttctacatttgttttctggtatatgtatttccatttccacgagtttgatcttagnttaatcttaataccagctctttttcggtattgttattgaattaccatgttatttaaca

SEQ ID NO: 131260 - DNA, 1383 bp, Glycine max
  Clone ID: PAT_MRT3847_89535C.1
gataacagtcacgtgttcaaatttactgctgcgtcacctggggcctcatttgccctattcagattcagttccccttcgcgtctctctccaaacaaaacagaactgaactcgctgactgaaactcgcaaaaattagggttttgcagtgatggcactgtccaaccgcgtccgatcgggaatctctctcttcaccaaatccacgttcctcacttccgagcgatccactctccaacgattcctcgttgccccttccatttccttcgcctccagaaattacgccaacgtgccggggcaaaaggaaaacaaagttaaggtccctctggctttgtttggaggttcaggaaactatgcctctgctttgtatattgcatctgtgaaagctaatgcagtggcaaaggttgagtctgagcttctgcaatttgttgaggctgtaaagaatagtcccatattttcacagtttataagggacttgtctgtggctaaggatgttagagtaaaagtcatccaggatatttgtggtgaagctaagttttcagacgttacaaagaacttccttgttattgttgctgagaatggaaggcttaaaaacatagacaccattgcaaagaggtttgcgcagttgtcaatggcatataaaggagaagtgcaagcaactgtgaccactgttgttcctcttccccctgaagaggaaaaggcattgaaggagactcttcaggaaataataggttctggagcaaaggttcatcttgaacagaagattgatccaagcatacttggtggtcttgtgcttgaatttagccagaaggtctttgacatgtcaattaagaccagggcacaacagatggagaggatcctccgtgagcctgtatcgattgccaacatctagaagacaacagttgctcctgacaatctgtgttatcatggtttaaagaaagaagtattacattcttgttcattataaattgtgtggatctagatttttatgggatggaatgccatcattttgcaaataaaagctacctcttcccaacttcttgttatgcttcattgccatttcagtgtatctgaatatattttgatttggtattttgagattttaattagtgggcttctctcgtaatctggatacctaataatgatgcttcgtactacaaagtaaaggaagatgaagttgttgtggatgggtactattaatcagtatcaaattaacaagctagtttttgctatcgtaagcttttgcaatgtgatattggtcgactcattctttaaagttagtttgcataaattgagaaattatgtatccatcgtcaatttaaagcttgttaagtactcaagtttgtaaggtactataattttaaagaatgatgaatatatcttcactctt

SEQ ID NO: 131261 - DNA, 699 bp, Glycine max
  Clone ID: PAT_MRT3847_89536C.1
tgcatctttcgcgtccggcaaaaaaaaaagtcagtgaagtaaataagctgaaacaagaaacgttgggttcagtttgcatcaatggcggatctgaagaacggtaatttcctcacctacgcgtacattcttctctacattgctctctccagcggccaaatcttcttcaacaagtgggttttgtcctctaaggaaattaacttcccttatcctttgggcttgactctacttcacatggtcttctcctctgttctgtgttttgtgttaaccaagattctgaaggttatgaaggttgaggagggaatgactcctgaaatatacgctacttcagtagtgccaattggggccatgtttgcaatgactctttggctgggaaatactgcctacctgtatatttctgttgcttttgcacaaatgctgaaggcaattatgcctgtagctgtttttgtgcttggagtagctgcaggacttgaggtaatgagctacaaaatgctattaatcatgtctgtgattagttttggtgttctagtagcttcttatggagagataaatataaactggattggagtagtttaccaaatgggaggtgttgttggtgaagctctgagacttatcttcatggagatttttgttaagaggaaaggtcttaagttgaaccctttatccgtgatgtattatgttagtccctgcaatgcaatttgt

SEQ ID NO: 131262 - DNA, 237 bp, Glycine max
  Clone ID: PAT_MRT3847_89537C.1
tcgcgatcttagaactaggttattttgtctattgttattaggctgttctgcatcataattaatgaaaaaaacacatatgtatgtatgtatgtacttatccgagaaaaaaaatgatgattgtgatgcaaacatatggattctgactgcataattcggtcgatatgtatatatattattatggcaggctcaattcaattgctaagcttttgcatccactgtagtatcagccttgctggc

SEQ ID NO: 131263 - DNA, 361 bp, Glycine max
  Clone ID: PAT_MRT3847_89538C.1
cgagaagtactaatgtacaacgaagggatgctagacacaattttttgttccttccatgtatgtggggggtgatagcattgttacttcttatcatagacattggcaaacggcagtagcagcttggggacaactacgcgaccattattattacgaggataattacaggcgcacgcgatattatggggtgaaacaacctttgtggaactagtaaggccaatgcaagataaatacgtacttatctccttctttatgcaatgagccgaagcatatctagggctgacactgtcacagccagggcactgcgtatcaagtcatatgaaacagtaccagcgcgtacgtggaacatactcatactaggtgc

SEQ ID NO: 131264 - DNA, 598 bp, Glycine max
  Clone ID: PAT_MRT3847_89539C.1
gagcatatacacatttgatgaatgaagaagatattgagaatttgaagtggctcaaaatatttagcaaatatgacctctacagcaagagtaaagttctagtagacatagaaaaagttaagccatactatatgtcgctcatcgagaagtatttcccagcaaagcttaggtggtgaaactcaaagacatacacatcgatatggaatcaaagtcatgggcaagctaaggatttaagtttatacttatgaattatgatcgttatgccgaacgtttaaggaattgtttttttcttttatcagattgaagttgttgcctaactttaaattattcttattaagctgtaccgaacgtttaccgtactagaagttgatgtatttacggtttggttgttctacatttattagcatcttcatgcccgtaatcttacttgggtagggacatgtattttagctttctactgttttggccattcctgaatgaatgttatgtgcccattttaaaaaaatcaacaaaaaaaaacccgtggaaagtcctccgctcgtggagcccccgcggctgctcccgccggtgctccccccacccaggccaccgacgccgtcgc

SEQ ID NO: 131265 - DNA, 282 bp, Glycine max
  Clone ID: PAT_MRT3847_8953C.1
ggctcgagctttggttcaagcctaagaaacccaaacaaccagctatgcaaatgggtccacagcagaggaaaagtgttgaaggctgaatagtttttaggatttcggaatgttatcatggttttattgctttgtagataggctgttatgtgtatgcatacgaagaatgggttgattttgggttttttttcgtgtgatattataataatgtttgggttggcttctttgtacgcataagcatgtaacatagtttctggtctttcaagtctgttacacttttctcaa

SEQ ID NO: 131266 - DNA, 291 bp, Glycine max
  Clone ID: PAT_MRT3847_89540C.1
ctatgtccataatagctggaaacgcatacctgtgtagcccgcccctctgtcatatgctgtctacgatctcatatgtgatggtggagatccttgacgctgtctcgcttgtgagacatgctcagacttttacagacggcaacccgcatggcctgccgaaacattgagcttattctacaactggcatggggtcaatggatccatgtggggctgagagtgacctggagatcgttccatcagtttgacatcccgcagctcgactgatacatcttgtcaacatgagccaaccatgct

SEQ ID NO: 131267 - DNA, 228 bp, Glycine max
  Clone ID: PAT_MRT3847_89541C.1
taccgatgcgcatggtggagctaaaggtgctgttgttacatcatttccatgggtacggttgagatgcacgcatcgaacggtacttcttcaaaaataatacttcatgatattgctgatgatgatcgatattcagagccatgcttttatctctgcatttgcacacgctcaatgcctcctcaatgcacctgtcaggatactacgctgaattcacgccacttagattcttac

SEQ ID NO: 131268 - DNA, 341 bp, Glycine max
  Clone ID: PAT_MRT3847_89542C.1
tttttgtatccacaaaaataccttgggatatacattctatatgagcagataaatacattcatatttcaaagtgccattcccacattccctcccttttgggcaaatacatgtcaaagtatacaaagattctttgttgcgaacccaaaaaaaaaaaaaagcactggacaatgtcccacacatggtgaacaatccactccacatggagggcatggttatcaacttcgatgcttttaaaaagctttgtctagcggaaaacttacacttgcatgggtacctacctgacacaacttctggagcaaaaggtgttttcatatttcaacccgacgcggcaaattaaaatg

SEQ ID NO: 131269 - DNA, 1003 bp, Glycine max
  Clone ID: PAT_MRT3847_89543C.1
actcaatctttaaaaacaaattgacttagtgataacacgaatcctgttaaagcagtgacatggattggtttttatgagctgtgatacaacatagaccaacatgattattctgtgcgtttgaaagctgcccagaaatttttgaaagatggtgacaaggttaaagtcatagtgaacctcaaaggccgtgaaactgaattcaggaatattgctattgagcttattaaacgtttccagagtgatgttggggagcttgcaacagaagagactaaaagctttcgtgacagaaacatgtccatagttatggttccaaagaaagccgctctacagaaagctcaagaaccaccgaagagaaaagacatgtcagcagcagatgaagtctccgctggtgtccaacataactgaaagctttcgtttcatagatggactcaggtcagggtggcttacattcttttcaagggatcccgcttgcttaaccaatcatttatggaagttcttcttaaattgttattgaatggttgaagttgacagtaatattaatgctattcaattggtgactactagtatgagatcgacttaaatcaagaagtactatcccaactcacaacaatatacgcatttgctaggaaaacatcaatttcagatcaataatattatggtttagtggaggacgattacctattttagggggctgcttaatggctatatattctggtcgaggctactctatcgcaagatgtagaagctgcaacatacgtacctaacgatttgaaggttgcttaactttcaagttcttaccttccaagaatgctgacatgttttttacttgcacagaacgtagtctcctgaaagcaaccccttttgtgtacaatagtattttttgttttcattgaaagttaaacaatttcttttctgtttccctctggattctacgattgtttaagaatcgaccagtcaaattccctgtatttttctagctgtgatggtagtaagccttttctttttt

SEQ ID NO: 131270 - DNA, 859 bp, Glycine max
  Clone ID: PAT_MRT3847_89544C.1
aagcttattgatgaggaacccccagctataatgcttctttttgaacccaaaggtcgcccggaggatgaaggcaatgatttttatatccagagtaagaaaaatatgtgttgggtgtggtgaaggaaaccactacttacggtatcaataatcccatcgtgttacagaacacatttccctgagcatctgaaaagccatcgttctcatgacattgtcctactttgtgtggatttccatgaagttgcacatgctgctgcagaaaagtataagagaaaagtagctgttgaatttggttcttctttctaccttcagagggtagttcatccaggtcaaaagactgaaaaacaaattggagagagctgtatatcctttacaattacaaacagctgctatggctcttctacgccatgggccaagaatgcctctcaatcgccatgaagaactgactgagattataaatagatattatggaggaagggagatatccgatgaagatctagaaagagctttgcaagttggcatgactcctcatgagagaagacgattcaagaagaagagagggttttcttttaaacattctatagggagtactgctacagtgccaaaacaggataatcatgctggttgcacaaccagaatgaatgatttggacgtggacacattgaaagttgatgctcatgatggctcatatggaaatgaagaaacaagtgaagtagatagagaactttttatgagaaaagacgattttgaaaactccactttagcttctgatattaaagttatgggagttgtctctgcaactccgaacagaaatatgatcacagttgaaactacatactacaatggaagcagtgactctgct

SEQ ID NO: 131271 - DNA, 246 bp, Glycine max
  Clone ID: PAT_MRT3847_89545C.1
ctgatagtattcattgatatcttttacactgtgtatggtgcatttgaattggaatgtagttgcagtaagactttttaccgctgcatgtaatgtcaatgtgcaatctctaattgcttaaaattgaatcagtgctgtaactttttcttttatggccaggggataaggtggttggattgttataaattgctctttttaaggtttaggaagacattttgtgcaaggttctgaaaggtcatagtcaaataa

SEQ ID NO: 131272 - DNA, 116 bp, Glycine max
  Clone ID: PAT_MRT3847_89546C.1
tcgattcggctcttcagggacaaacgcatccatgctaggtctcaagccatgaccctggcatccaaaccaagcgtcagttgattgaacaagatctccgaaattttttatactttctg

SEQ ID NO: 131273 - DNA, 452 bp, Glycine max
  Clone ID: PAT_MRT3847_89547C.1
gaggattaatagagtattaaaaataaatgataatatatgattatcctaagtttaatagtcactattatggttatcaaactctcgagttaattcgttaattcttacaggtttacgagctcatttgtagtctgtgagttgactcttgagtaaactctttttttagtagactctgggtaaactctataaattctgaggtaactcaataaactctcgagtttaccacctagtcaacgagttagcaagttaaacaaattagatcaaaatgtaagttattttttattgttttctatctgtttagcattcaacatacttttatttagtgtgttattctcaaatacaaattttcacctttaataatgtcaaatccttgttttctaataacatcaaaccctcgatgagaatgatctaccactactataacctcgtagtgatgtattattactagacttgtt

SEQ ID NO: 131274 - DNA, 1245 bp, Glycine max
  Clone ID: PAT_MRT3847_89548C.1
cccacgcgtccgtacgggtgcgagaagacgacagaaggggacgtctctgcggattcatccttttcttctgcagagcaaagaaccaaccaacacttgtttcttcagccatggccagtcaacctgaatcatctgacgcaaagggcacaaaaagggattttagcaccgccatattagagcgtaagaaggctccgaatcggctcgtggttgatgaagctgtcaacgacgacaactctgttgtcgcgcttcatcctgataccatggagaaacttcaactttttcgtggtgacaccatcttgatcaaggggaaaaaaagaaaggatacaatatgtatcgcacttgctgatgagacatgcgaggaaccaaaaataagaatgaacaaggttgtaagaaacaaccttagggttaggcttggagatgttgtttcagtgcatcagtgtcctgatgtcaaatatggaaagcgagtccacattcttcctgtggatgatactattgaaggagtaacaggaaacctctttgatgcctacttaaaaccttatttcctagaggcatatcgaccagtgaggaagggtgacctcttccttgtgagaggggggatgaggagtgttgagttcaaggttattgaaactgacccttctgagtactgtgttgtcgccccagacacagagatcttctgtgaaggagagcctgttaaaagggaagatgagaatagattagacgaggttggatatgatgatgttggtggtgtaagacagcaaatggcacagattcgggaatttggaactgccactgaggcacccacagttattcaagtctattggtgttaagccaccaaaaggaattctgctgtacggacccccagggtctggtaagactttaattgctcgagcagttgcaaatgaaactggtgccttctttttctgcatcaatggacctgagatcatgtcaaagctggctggtgaaagtgaaagcaatctgaggaaggcatttgaggaagcagagaaaaatgcgccatccattatcttcattgatgagatagattcaatagctccaaagagggagaagactcatggtgaagtggagcggaggattgtttcccagctcttgaccctcatggatggtcttaaatcacgtgctcatgtaattgttattggagccacaaatcgccccaacagcattgaccctgctcttaggaggttcggaagatttgaccgggagatagatattggtgttcctgatgaagttggg

SEQ ID NO: 131275 - DNA, 388 bp, Glycine max
  Clone ID: PAT_MRT3847_89549C.1
gggactcaattttgaaactttcatgccgcctattttcctcccatacaactactacgggtaaacacattatttttgacgaacaaatcatattacaacccccaaattctaccatgaatttgggctatgctgagaaatactatgggattccaacttcattggttctactctaaattattatactatgcggccataagggggaaggataaggtaacatcaaaggcaagctctttcatagtatcattgaaattttaatgatatggcagtaacataatcttggaacttgggatttcaaaggcactactcttgctttaaatttttttcccattaaaactattaaaacaattactttctccagccatgtttatatcttcagcatatttcatttaaa

SEQ ID NO: 131276 - DNA, 580 bp, Glycine max
  Clone ID: PAT_MRT3847_8954C.1
acgagcataattgtggttatattgtacactggaagaaatggagaggatcttgacccccttgttaaaaccttggttggacatcatggatttggtactgccattttattttccttaatctagtcatgaaattgtaagtcggctctgaattaccgtttctttatcattagagggtgttcaacatttgaattcccattgctttaccattggttcaacgtttgaattaccattgcttttacctattagaggatgttcaatgtttgaattacctttgttttaccgttagggttagagggttttcaatgtaccatagaagaaggaacacttttgtatctattattctgaatgtacttttggaagatttgcaccgacaatccaatatgttaaacacttaaaattcttaacatgagatgggtgggaagctctactgtcccaaactgatgcttaaatgcccatttgtgatttagattttgatagagttgattttggattactgattgagttgttgaatgtaacatgcatgtgtccgaattagtctgaagtgattttgactttgctctgtaatgtgtgtggcggcttgtga

SEQ ID NO: 131277 - DNA, 304 bp, Glycine max
  Clone ID: PAT_MRT3847_89550C.1
ctacgtgctcactcacccacttactcacgtgcgaggacctgcgggctggcccttcatctctctttcttgccccaccggaaagatattcatagctcgctatttccttctctttatctatgtctcaccgacccactctgtggttgctgtggacatatgtgtatacaacccctgctagacaccctggggtgctaacttgttcactccactgaaggaccccctcaatctctctagagggcagacctacgttctatcctactaccctgctcactgcgcgtctgtgatgaatgttgccattcatgcgctc

SEQ ID NO: 131278 - DNA, 469 bp, Glycine max
  unsure (1)..(469): unsure at all n locations
  Clone ID: PAT_MRT3847_89551C.1
gnagtatttacatggtatcacccacactaatgagacaacttaaaaaattacctgtctttcacttaaatatataatcaattaatgagtgtcacgtgataataaagataactctataaaaaaatgacaataaagattaaaaaaaacaatttcagatttatgaaagataaaacaaaaaaaaaacgacgtcttaattcccaaataggtgatcttaattatgaataacacccactcaaaagaaaattataaataacatccgattatatcgtaaagttaagtcgatcttaattttgaaggataatgttttaaaaactatttccattcccattaagttctgtgtacttaacaaataatatatttttaaatataactaaacattggttatagaaatgttaaatttatactatatgtataaaaggataaataaggaggatagttatttttttgtggatgagtagaaaaaggagaatag

SEQ ID NO: 131279 - DNA, 454 bp, Glycine max
  Clone ID: PAT_MRT3847_89552C.1
ggctcgagattttcctcccttgacaacatggtggtgcaagtgcaacacaatctcctcttagtcataactttcttgatgttgttgtggtcatggtggagccttttgggtgcactaggagaccctcaaacccatttaatcaacaaggggtgtagccaatacaacgcaaccgacttgtccaacttcaaccaaaacctaaacgcaactttggatgaccttagagcacaggttagcaaccaaagcaagcactttgccacggctcaagaagctagaggagcagaccctgtctatgccatgtttcagtgtaggaactacctctccaccgccgactgcgccgcctgcttcgtggttgccaccgcccaaatccgcaattgctcagccggagccaacggtgcccgggtcatctatgatggctgcttccttaggtatgagagcaatggcttctttgaccagacca

SEQ ID NO: 131280 - DNA, 305 bp, Glycine max
  Clone ID: PAT_MRT3847_89553C.1
ttggatttctactgtactactggtcctcaggccatccacttctacccagacaatcattgtttcttcgctcgagggtatagtgtaccttagtacttctctcagatgttatttccagtctgtgtggtttggtcaacaccagctccgggctaatactcttggtctaaagcctgaccggactatattgctgcctcactcacacagaacgaagggtaggcgtatcatctagttaggcgtaattcaaaatcgaattcgtgcagatcaacatagacatgcatagaggctaagtaggtgctgcgcagattgct

SEQ ID NO: 131281 - DNA, 181 bp, Glycine max
  Clone ID: PAT_MRT3847_89554C.1
attgtgaaagctagccttgtgcaccatggccacccaccggttagctttacaaggatcccactacaccaagttcccatccaagctcacactctttcccaacccaatgccctaaaaactgagggacaatcttggctaatcactctggtgacatatgctaacgatgctaaaatttcttttgatc

SEQ ID NO: 131282 - DNA, 428 bp, Glycine max
  Clone ID: PAT_MRT3847_89555C.1
gcggccatctttcccaaaactgggcatagaagttttatctcacaaggctcaaaatcttcaacaataatttatcaggcagtatttcaccagagctaagtcaggcaaccaagttacatgtacttcacctgtcttcaaaccatctgacaggaggcattccagaagattttggtaatttgacctacttggtccatctttcttttaataacaataatctttctggaaaaggtcctattccaatagcatcattgcaagaacttgaaccttagaccttggagcaaattattttgctagcttaattccaaatcaacttggcaatttggtcaagttattgcatttgaatttgagccaaaataattttagggaaggtattccatccgagtttggtaaattaaagcatcttcaaagtcttgatcttagcagaaactttt

SEQ ID NO: 131283 - DNA, 272 bp, Glycine max
  unsure (1)..(272): unsure at all n locations
  Clone ID: PAT_MRT3847_89556C.1
cctcantnctgtcagntgcatctgcancaananaggagggacgaacaangcccttcaananggtctatgnctttggagantctttcacagncantggcancaccacaaatgccgaangtccaagtggctttngtcangtntcanactctncctacggcaccactttcttcanccantccanaaantngtactcagnatggnaggcttgtgattgattttntagctgaagcacttcactgccttacttgccaccctaacgtcacagaaaaggc

SEQ ID NO: 131284 - DNA, 812 bp, Glycine max
  unsure (1)..(812): unsure at all n locations
  Clone ID: PAT_MRT3847_89557C.1
attcgcgtccggtgtcaaccgtccgcccttctttgtcttcctctgactctctctctctctctctctctatttatgttcccccactcttcactttactgaatttctagtcttcactcttcagtagttcagtttcagtctctcttcatttaagaaatccaatgagaatggaggcgttagtgtttgcgcttgtggccattctgttgtgtggttgtgatgctgctaaagaatgcacaaacattcctacacaatctcatacattcaggtatgagctattgatgtccactaatgcaacgtggaaagcagaggtgatggatcactaccatttgacgccaacggatgaaacggcttgggcggatttgctgccgaggaagttattgtcagaacagaaccaacatgactggggggtgatgtataggaagattaagaacatgggtgtgttcaagtcaggtgaaggatttctcaaagaagtgcctcttcaggatgtgaggttgcataaggattccatccatggtagagcacagcaaacaaatttggagtatctgttgatgttggatgtggacagcttgatttggagcttcaggaagacagctgctctatccacacctgggactccttatggagggtgggaaggtccagaaagttgagctcagaggtcatttttgttgggcattacttgagcgcatcagctctaatgtgggccagcacacagaatgataccctgaagcagnaaaagtcatctcttgttgctgggctgtctgcctgtcaggagaaaattgaaaccggtatctatctgctttccatctgagtttttg

SEQ ID NO: 131285 - DNA, 261 bp, Glycine max
  unsure (1)..(261): unsure at all n locations
  Clone ID: PAT_MRT3847_89558C.1
ggccgaccgacgcgtccggctcttaatctctccctcttaccctttaccttcttccattctaacccngtcctcaaaccctgagccacccattttctgctccggcttcttgatccccaaaccccattcacgcttcttcaaaaccccaccaaggtgcgttttcactcctgcctttccaatcccctccaaaaacactaactttgggtcccagtttctgaaccctactagcctcaccttttagctcttcttcctccatactttttc

SEQ ID NO: 131286 - DNA, 401 bp, Glycine max
  Clone ID: PAT_MRT3847_89559C.1
atttcccttctttgtcttcctctgactctctctctctctctctctctatttatgttcccccactcttcactttactgaatttctagtcttcactcttcagtagttcagtttcagtctctcttcatttaagaaatccaatgtaacttccctttttatttgttttttttaattcaatttgttcaactcattaattattaacttctggggtgtttatttcacccaaaaaaaaaaaaacttctggggtgtttccaagtcctattggttttagactcatagcacgaattgaggagaatggaggcgttagtgtatgcgcttgtggccattctgttgcgtgggtgggacgctgctaaagaatgcacaaacattcctacactttctcatacattcaggtatgagctatt

SEQ ID NO: 131287 - DNA, 241 bp, Glycine max
  Clone ID: PAT_MRT3847_8955C.1
gtcccagcgaacccgcgtgcaacctgtcccgactctagccgcctcttcagctcatggatcccaactgctcctgcgccgccggtaagaggctggggatgcccagtgtagactgtagcgctagagaagcaatttctgacccctctttctttctctggtcactcaatttcaggacaggagttgctccttcccaaagagttttggggtatctttctctccatcctgggttattcggagccccttt

SEQ ID NO: 131288 - DNA, 1291 bp, Glycine max
  Clone ID: PAT_MRT3847_89560C.1
ggtattcattccacgcgtccactttccagttggtttctcttccatttaaactctcgccacttccctcttttcctcattctctttctttcattcgtcttcttcttcttcctgagctgttcgttcgttgcatcttcctttctcgcttttgctctaagctaacagtctaagaaattcaggtcaaaatggaagacgggcataagttccaggaagtttcaaagccaaaatatgattgccttttatttgatcttgatgacaccctttatccttatagttctggagtttcagtgcaaatagcaaaaaatattgatgagtatatgattcaaaagcttggggtggaggctgccaaagttgctgaattgaactattcattatataagacttatgggacaacgatggctggtctaagggcaattggctatgactttggctatgatgactttaacagttttgttcatgggagattgccatatgatgtgctgctgaaaccagaccctgttctcaggggcattttgcaaagcctgcctgttaggaaacttatttttactaatgcagactcgaaacatgcaattcgagcgcttaaaacccttggactggaggactgctttgaaagtattataagctttgacactctgaatccctccaacaccaccaatccttctcataataaagatggcagtgaatcccgatcaaccactgcagaaatttttgacttttgtgagcacatacgccgggcggaatctgatatggtgcttccaaggaccccagttgtctgcaaaccctttgatgatgcatttggaaatgctttcaagttagcagatattgaccctcaaagagcattgttttttgatgacagcatccgcaatttattgacagccaaacgcttgggcctccacacagttgcgattggtacatctgttcgtaccactggagtggatcatgcattagagagtattcataatatcaaggaggcatttcctgagctttgggatgctgaagtgaagcatgaatttgtgcaatacaatgttggaattgaaacatcggtaaaagcttagttttagaagtttaccccagggaattggtgctgccttgtactgttatttaaatttattctatttactgtttgttataaatagccctagttggacatgcgtttatcatatgtttctgttactgtctcaagcttggtggataagttcaatttcatcatgttggatctgttcctgttatttttatccacaaaatgtgactcatgcgacatgatatataaagtatatgaatctttattcaaaaa

SEQ ID NO: 131289 - DNA, 494 bp, Glycine max
  Clone ID: PAT_MRT3847_89561C.1
gctaccgattccgttccaaggaaggtttcccgtcatcactgtatgacgtcctccttctttggggggggggggggggggggggggacaccgcgtaaggagccagaaagggatatgcaaaatgtgattacagcgatataaaccaagttaataactagtataatataaaattaaacagggggtggtacagcgaacatttgaatagggagacgatgggataataagaatgaatgaagtagatggtgtttgttatagggatataacaaacaaaacttaccaacccgttaacgtaacggttttaatagtaggttgacgttacgtaggggtaacagttgtacctgggttggtaaacgacaagtgttatatagttagacacaggcgaacaagtatatatttgggcgtaaacaaatgtgccaatgtttacgttggaatatacgtaattaggaatataaccaacttgaggcgcaataatactaacttacaaaacaagtgcaacg

SEQ ID NO: 131290 - DNA, 345 bp, Glycine max
  unsure (1)..(345): unsure at all n locations
  Clone ID: PAT_MRT3847_89562C.1
aaattttnaactcattgttctatatcaattcgatcatccaggcattttccccttatatagcacatttcaaaactcgaggttctctatacattccctcttaatcctcttaatatgtacaacttttttatcaaataaccaataaagctcgcctatcaaaagatgattcactattctattcatcttaaatttttgattctctctaatacttacataatttcgtattcattacatcatgattttaatcccataaaacttattacttacacctaaacgacatactaaaataccctatttttctaccgttatacctatccatcatttccaaaatacctttcccttcaaatt

SEQ ID NO: 131291 - DNA, 357 bp, Glycine max
  Clone ID: PAT_MRT3847_89563C.1
cggctgccaaaagaccacacataggggagatcaaaattcttggtttaagttttgcaacgaattcaaagggaacctggttaaataaaatctgggccaagttaatacaaattacctacatcatattcagatataactgtaggcaccactcaagaatattatgtcaacaaagactcaattcatgcttcaccatctttctgaacttcaccaccgatacacattgtttattgaaactaataacttattaaggattaagttgtaataaactcatcactcacaatgtcaagtaattttagctttggaaactgataaggcctatcatgcaatacaccaactctccaccttaattatagagttttt

SEQ ID NO: 131292 - DNA, 243 bp, Glycine max
  Clone ID: PAT_MRT3847_89564C.1
tttttaaagctcaattcatatagggtaataagggaacatgggacagagaatcatcttttcttctacttgcctaagattatattaaaccatacatgcaactatctcaattaaaaacaaatggttttacaaataattccatatcaaacaacttctgtttcaattataattgaatacagatattgtggctccgcttctcttttatttcggtattgaccatattattcctaattcattccacttttt

SEQ ID NO: 131293 - DNA, 488 bp, Glycine max
  Clone ID: PAT_MRT3847_89566C.1
tacggctgcgagaagacgacagaagggcctctatgttgatgatttactcatcacaggaaacaacaaggtagagattgacaagattaagcaactgctgaagaatcaatttgaaatgactgacttaggatctctctcatacttccttggaattgagttcaaggaaactgaagctgcaattgtgatgcatcaaagcaaatatgctacagacctgttgaagaagtttcgaatgactaactgtaatgcagcagccaccccagctgaaacaggattagcattgagtttgagagatgaaggagaacctgttgatgaaactcagtacagacagattgtgggttcattaaggtacttgtgcaatacaagacctgatttagcattcagtgttggactgatcagtaggtttatgcaaactccaaaaacttaatattttttcctatacgtctaacttaatatgaacttgctaaatatttttttccctaatttattttttc

SEQ ID NO: 131294 - DNA, 611 bp, Glycine max
  Clone ID: PAT_MRT3847_89567C.1
gggggccgaaagaacactatcattatcggggaacaagggtttttaacaaaaggttcacccccaaataaaaacaacaacccaacttcccaagggggggggcggccagcaaaatacattcaaaagctttttaaaatttggggaacccacattggcattaaaaacccgggccctacaattttttaaaaaaatattatgggccccatgccttttaaaaaatcccctaaacggtggttagggataaacaaacccaagcttggaaaggttttggggggccccagcggaatcagcaaaaaagggattttcccccgctggatatttatcaacgaggggggggaatacaggggcaaacaaaaaaaccttgtcaaaagggagctgaaggaaaccttttttttaaccactaaaaaactccgggaaggatgaggtggcaaaaataaaaggattaaagggccagggaccctcaaatccaaaacgctccttgggggcagctccaatagggggacccccaaatagagcaaccatattttgggcagaaagccccatagctttgccaaacacatctctaaaatgggcaaaacccttaggggcatcgggcaagccaccctctggggggg

SEQ ID NO: 131295 - DNA, 529 bp, Glycine max
  Clone ID: PAT_MRT3847_89568C.1
ccttaaggtcccctcatatgtcgctggcgaaggggaacaagaggcattactaaagatgcttgaggggacggccgtcaatgttactgagaagggagccagaaagcatcctagaggagacagtatacagagtgacaccagaaatatactaggaattcgggaaggagcctatgatgacgtagacaaaacaatcacagaaaggcaggatgataattctattggataaggggctcctatacctgcaaacatgacgacagcgaaagccacataagctgcggcggcatcgtaatcatcggaaactgtggaaagtagagaagcaattgcataaggtatcaaacctgaatgtgctgagaagacgactatcctgatcagagtggcagatcgaggtgacaatcaagatacgcaggtacactaataaccacaaacggcgctgagggaagcaaccagacagatgaagcaaatgcaatggataaagatacgatgtacgagaaaggctgagcgatcactcgccgaggacgcacgatcgaacaat

SEQ ID NO: 131296 - DNA, 110 bp, Glycine max
  unsure (1)..(110): unsure at all n locations
  Clone ID: PAT_MRT3847_89569C.1
tctccttctccgcagagtgagcgagcaagcgaatatncccaattcccacaccaatggcatgcnccagctcacctgctggcttccctcttctccggcaaacccaaacaacc

SEQ ID NO: 131297 - DNA, 483 bp, Glycine max
  Clone ID: PAT_MRT3847_8956C.1
atggggacatgttggagagttgggattggggattggggagacaatactcatccccgtcctaccccattgccatgtctggatgatgttagagataccggtggtggtctcgatggtaatgacagtggcagtggtggttgtgatggaggtgacattggtggtggcggcaatgcaaatggtgatggcagtggcgatgtgatggtggtaacaacattgatggtgacaaccaataatgatgacattagtggtgatggtaacaatggtggtggcgacgatgatagagatagtactagtggtggttgtagcaatgtcagtgtggcggtgacaaaggtgctattattggtagtggtagtggtgataacaataatgatgacaatggcattggtggtggtggtaacaatgtcattggtgataatgacattgatggtgatgaaagtggtggtggtgatatgtagcggtgcttggagtcatggtagtagcagttaa

SEQ ID NO: 131298 - DNA, 255 bp, Glycine max
  Clone ID: PAT_MRT3847_89570C.1
ctctctctctgagatagagcctcgcgtttccatcattaggagccttctcctcatagtctctttcttctctcctcaaatcaaaggagaagcttctggttccgtcttcttcatcaatagctccagtaatcaattcattcgcgccagatcatgcaactctgcgctcccttcactggtgctagaagaagctggagctgttgagtcagtctagctagattttgctcctgcttccacccttgcagctgccagctcatccaa

SEQ ID NO: 131299 - DNA, 222 bp, Glycine max
  Clone ID: PAT_MRT3847_89571C.1
gcaaattaaattacacaattacagtcgtacttaacacaggagcagggccttttccaacttaaaagcataggataacaggggcccatgcctcgacacatgcaccaactaataatcatagtggtacatttttacctacaaaatacaaagactgtaaacattaaaacgatgaaaagagacaaacaaatcatcttaaggggatgataccaaaacccacaaacattg

SEQ ID NO: 131300 - DNA, 459 bp, Glycine max
  Clone ID: PAT_MRT3847_89572C.1
atctgaactgagtaatgacactcttaaccctttatcttcttggaaccataattcatccccgggcaactggactggtgtcctctgtgacaagcatggccaaagagtgacaggccttgatctttcaggcttgggactctcaggtcacttaagcccttatattggtaacctctcctctcttcagtccctccaattgcagaataaccaactcacaggagtgattcctgaccaaattggcaacctattcaatctgagacttctaaatatgagcactaacatgttagaaagaaagcttccttcaaacaccacccacctgaaacagctccagattcttgatttatcctcaaacaagattgccagcaagattcctgaggacatcagcagcttgcaaaagcttcaggctttgaaactgggaaggaatagcctctatggtgcaataccagcatccatagggaacatttc

SEQ ID NO: 131301 - DNA, 580 bp, Glycine max
  Clone ID: PAT_MRT3847_89573C.1
aaaaaaaaaaaaaaaaaaaaaaaaaaaaaaaaaaaaaaaaaaaaaaaaaaaaaaaaaaaaaaaaaaaaaaaaaaaaaaaaaaaaaaagaaaaaacgatataaagaaaacaaaaattaagtccacagagcagcaaaaataaaaggggcttgttctgttgtaaggtacccaagttttctttgcccgccggttcgacggcgaaactttttttttttctttccctaaacccattttagggccctggtttttcaccccctttccgggggaaaccctgggcgcaaccaggcttacccccttgggctttacccccctttgccccgcttgggggattactgaaaggccccctccagctgccctttcccccgggggcccgccttgtttgcgcactggacccccccctttttggcccctccctgccggcggggtggggggttttcccccattcgttcctcaccattttcgggggctttccccccgaggctttaactttggtgccctcttttgggggcccttttagggcttttcccccctgagccctaaaaaggggggttctttttgggggtccacttaagggtctttggc

SEQ ID NO: 131302 - DNA, 400 bp, Glycine max
  Clone ID: PAT_MRT3847_89574C.1
gtaatcctatacgtacttcttgctggtttattacccttccaggatgacaacctggtggccttggacaagaagaatttaccgtggagacttcaaacggccgtcgaggatctccttcaaggcgcgcaggctaatgaccaagctggtaaacgtcaaactgacctgcccaataacaattacagtgctcatggactcatcggggatcaagatacccgtgccaaataactggatgcgtaagaaaagcgaggaataggatccggaagagaagatataactgcatgatccggatgggactactgctaggaatgcatctgacatgattaccctctccgaggggctcgagctggaggcgatgcacaaggaaaagaacatagaagagagccatttactgcatgttaccaca

SEQ ID NO: 131303 - DNA, 205 bp, Glycine max
  Clone ID: PAT_MRT3847_89575C.1
ctattaacgaaaagaacatctattgtttgactagattggatcacaacatggcattacgccaaatctctgaaagactgacgcgccatgaatctgatgtaaagaatgtcattatctagggcaatcactcaataaccaagaatactgatgttaatgatgcaactgttgcaacctcagctggggagaagcccgtccgagagctcatagc

SEQ ID NO: 131304 - DNA, 328 bp, Glycine max
  unsure (1)..(328): unsure at all n locations
  Clone ID: PAT_MRT3847_89576C.1
caaagcacccgctgctganaaagtagcgcctataacagcttctctaggaccatcatcatatgatggcatcccatcatcatcagcctcagacaggatcacagctcctttcattcacttcaagatcgagaaatatgacgagaatccttctatctgtggagaacttgcctaacgccagacccccaagtctatggtgatagcttgctcagacatcacggtgtgcccatctcatgtgctagattcccagcctggataggcctctgaggtctaaattgtggctaacattgtgccaccatatgaccatgcgagataccctggaactggcgcacct

SEQ ID NO: 131305 - DNA, 389 bp, Glycine max
  Clone ID: PAT_MRT3847_89577C.1
cttttagttcagctcttatacaccaggagatgatggagtcaacgatcataaaccaagtctttttcttcttctgcttctttctatgctctctcttagtctcagattcttcaccatctgcttcaaaaccaactccttcattccccaaagaagccctccccactaagcatggttaccttcctatcagtcccacttccacttcttccattttctatgccttctatgaagcacagaactcaactttaccactctcccaaaccccacttctcatttggctccaaggtggccctggctgctcctccatgattggaaacttgtacgaactcggaccctggcgcatcaccgaatcactcacccttcaacgcaaccttggtgcttggaatagagtcttt

SEQ ID NO: 131306 - DNA, 445 bp, Glycine max
  Clone ID: PAT_MRT3847_89578C.1
gccagagcctggtctgcaatccctatgtggtgtcatgtcacctggtggtccttgatcaatgactaacattgaaacccctggatctgccagtcaacctgatgaagaatttaaaccaaatgctgcaatggaggaaatgattattaattttcttatcagagttgcgctagtcatagagccaaaggacaaagaagcaagtgccatgtacaaacaagctttggagctactttcacaagctttggaagtgtggccgaatgcaaatgtaaaatttaattatttggaaaaacttctgagcagtatacagccatctcaagcaaaggatccatccactgcactggcacagggtttagatgtcatgaacaaagttttagagaaacaacctcacttgtttataagaaataacattaaccagatttctcaaattcttgaaccatgtttcaagcataaa

SEQ ID NO: 131307 - DNA, 444 bp, Glycine max
  Clone ID: PAT_MRT3847_89579C.1
tcgacccacgcgtccgtacggctgcgagaatttaccggaggggtggaggggtggcgtcacttcgaactgccctgccaatacaggcgtctcgatgtgctacgggactcaatacgacatacgaggtaagccttatggtcggttgaatgtacatcagagctgcgatgttcaagtaccagcgtatgcatccctccgtggacggaggcggacatccgagtcaaaaattcttatgaccatgatctcctcagagagggcgtactcgaggacaatcgtttctatatctgatgaggacataaccaagggcaaggaccatgaagcactcgaaggacccatgaccacaggcggacttaaacaagcccctctcgtaatagagacaaggctggacatttgtatagctgccattgatgatcattgaaggcccagaggcacaggcactcccaagactac

SEQ ID NO: 131308 - DNA, 512 bp, Glycine max
  Clone ID: PAT_MRT3847_8957C.1
gggctcgagcaaccatgtctgacgccaaggagaagaggaagcaaagcgtagacgacgacgccgttccggagagccaacagcagaaaaaggcgcgtgaggaggaggtggtgacggatgaggaggtggaggagttctacgccattctccgccgaataaacacggcggtcaagtacttcaagagctacggcgatgacgtggcagcgttggagaaagatatcatgcagcatgtgaaggagggcatgaagaatgagaaagagggtcacgtccaaggcaacttgagtttggatctaaatgccactccccaaaaccctacctgatctataaataaataaaatgcatccgcaactccttgagttttagactttgtgttcaattattcttattttaaaagcatatcccttccccaaggagagatcatgctaatttgttttcaattcctttgtggaagataagtgtaatgataattggatgataaaaatatttaataacatatacttaatgtttttttttac

SEQ ID NO: 131309 - DNA, 445 bp, Glycine max
  Clone ID: PAT_MRT3847_89580C.1
aaagtgtagtaaaacttttcaagatttactgcagagtgttgtttgtgtaattgttgtactatccatacccaatgtttgaaacagtagttcattataaaactactacccggaaagctacatgattcaccattaaacaacaataatcatgttcataatctcctaaagacaatttgcatgccatattgaggtgtcacagtcatcaacaacattggtccgtgagcatatgttggtgatacaacaaaagaatacctctgtaagaccatgacaagtacaattttcatttcaaacaaagctaaattttgacccacacaatagttagggcctaatccgaagggaaaatatggagctaaatgcttccgaggctcgacaaatctcataggattgaattcaagagcatcttctccccataactttggatcatgatgagctgttgtgatagataaat

SEQ ID NO: 131310 - DNA, 636 bp, Glycine max
  Clone ID: PAT_MRT3847_89581C.1
ccacgcgtccgctccccccgcacacccccaaaagcttcttctgttccgtgcaggtgaatcctcatctgggtttcattcgttatggttttgctcttgtgggtttttcattttttttttcattcaatttttctctttgggttaaaaaatctgttcaattggaggtttcgatgatacaccagattttgttttcgaagtgtcttatcgtgtcctgtgactgatgctttaccaatcaaagaaatgattgtttttgtggggtgattttgtttcgtgttagattaggattattgagattcttggggtttcattttgcccagtagggttttgcttggctctcttttcagtcttttttttttcaaaaatgagatttttcaattttaagtcttttttttttgtaaaaaaaaactggttggctgaaaattgttttttatttatttaaatcttgtatatatgtagggttttgtggtaaatgagataattcaggctcaggagctctatttgagttgttgttatgtttttgaagacaaaatctatgtgggttttttttttctccccttgcaattgggtgtacaaattttctaactttctgttctttttggtgtagaagtgtctgaaaaggtgttaaccttagatgtctcg

SEQ ID NO: 131311 - DNA, 573 bp, Glycine max
  Clone ID: PAT_MRT3847_89582C.1
gaaaaaagagaaagcttagtgcgaaggacattttttccaccatagacattatttttaaattccatggtgggtgtgtacagaaataacctcccaatcacatgttcaaatttcataatgatccaactattagaaagtctgagatcgtcattttactgagacaaatttgagtgtatacaggaaaagaaaggattttagagaatgaagaatggatttgagaggaagagatggcatagaataatgttgtaaaagtaaaaagtgacatattacgtctaccttgagtactttaggcccattattttctctattttttctttattttatcattctatataaagaaaatttattttactccctattgaatgaataaataaaatatttttaaaaaaaacacacatttattttatttaccttaaaattattattttaattaataaaattatttctcttatttatttaattacaaaaggcctattattttcctaaaattttatttattttaagtacacttaaaatgtggatttctttaagtgatagactataaaaaaatatatatatatcttattgggataaaaa

SEQ ID NO: 131312 - DNA, 984 bp, Glycine max
  Clone ID: PAT_MRT3847_89583C.1
cccaactactctgcttgatggctttttgataaggctgtatgtcgcttgatggaatggtttagagccaaggctttgtttgaggtggttgattttcccataatccctagccagtatatctagcattcccttgatgtttgtgtttcatataatctgcacaaacaacatatatgcctttgagatggtttatacatatgtttctttttcttgtcacattcatgcatttagaactcttgacactcatttttgtttttcttatgagatatagctagaagaggagaatattgctggtgttcctatgagaaaatactctaccggtgctggaagtgtgttcctgacgtggtatctcctttgactcgacaacctttttgtcccatctcttcaacagtatcgtcgaaagcgaatgttgcatttgctgcaaatgatacacataatgagaagttgcagaaaacattagtagttagcaattttccatccatcactacttcaaagacaaccacagtggtggataagagaacaaaactccaaaggtcaggaatggaaagaacaaaaaaaaagcaaaattttgcaatctaatgtgattttatttttttcacaaatagaagtttcatctcaaaactgttttacctttacctggcctatatttcccagctgtactcttcttgctggtttgacactttaagtttaaatatagaaaaaaaattatgttatgagtaataattacgtgtgactctgcagtacctacatacaaccaaatctgagtttgcttaggttgctcaccagtagattgtgggagatctcatgcaccttaatcctaccgaaaagaaagtcaacttgttttagttagcaaaagtaaaattctatatttgctatgtagctactgacaactgtctacagcttatagtgccaagtcaacaactagcataaaaaataagtttattttttgatacacgatttagttgtggtacattgctctatttggactaa

SEQ ID NO: 131313 - DNA, 810 bp, Glycine max
  Clone ID: PAT_MRT3847_89584C.1
ctagcttgctgcctgagattgcatattgtaacatgtaagtggttgtatgaaatttagaaacaggtgtttgttccatgttctgtccccatttaagttttggtacgggatagatttcttagatgtttgtaactctttaccccttttgtagtacatgaaaaaacaatgtctgatgccagcaggcagctaccagaataaactccaagaagctttcaggcttcttcaatgagggagggacacattctgaaaatatttttcactgatttctagtacactggaagagtaagtagatgagaggaagtaagaagctgagctgactttcaattctgttacacaagcttttttgttctgttagtagaaaattagacatggaagttaattggagtgaaaaaaaaggggggaaagaaaacatattctgttgcattagttgagtataaaattgtaagatatgattgttaggggattgaacaaaattatcaatgtgaaatttggatttcattccttggttagttttctaaaggtaatatttctaatatttgaacataacattgtcctatatctgctgatagtgtttgccactaacaattccatcattttttgctgtgttttatttggtataagatttgcaacttaagcttttaggtaagggtccaaatccaataatgttttttataacttttcctttcttataaacactgaccatgtatgacccataattcatgatttttataacatccttatactgtggatgtcaatgattaaacttcagaccacttagtcagcaattataaacatcaattcaaggatccaatt

SEQ ID NO: 131314 - DNA, 209 bp, Glycine max
  unsure (1)..(209): unsure at all n locations
  Clone ID: PAT_MRT3847_89585C.1
ttggnaaanagaaggagggtgccggtgagggaattgtcttggagggagaangtgcggagttgagagagggaattgagatccgaggggagtgttccgaccagcccgagggcggtggagtgagggatttgagaaaattcgacatcaccgcggcgtcatcggcggttactagggggatctgttatggagaagagagggaagaaggtttgtag

SEQ ID NO: 131315 - DNA, 890 bp, Glycine max
  Clone ID: PAT_MRT3847_89586C.1
agaattatcaactagctcttatcatcattaataaatccttagcaacaggttactcacacagccatacatacatagaacctaatggaaggccacccttgcttggtaatactgactttgagggaaatcgtgttaaacacttgtcaacttaaaatgccgatcatagatacaacgtatgccgagatcaagtgattaacaccagcacagaatcctttggataaaccatatcttacaagcaaaaaaggaagccaaataatttttgtctactgaagacaaccgtagattaatgattgatacacaactctagacaccagatacaccaagtgcctcttatatcttcaacagatacccgataagaatatggtaacagcatgcgtcttaaatcatggtctttgcttttaagagggtaaaaagtaagaaatggacgcgagattaacgtccattgttctctttctcaagtgttcttttttgtttcaccggagttctagcttctatgacttcagactccttattgacaggctcatctggcttactagcattcatgtcccccagaggaaggccaccgccatttggtgatactgactttcgcatagctcgtggtaatttcatccaacgatctgtctcaattacacttttctctacttttggagcaagcggcgcattttcaggtctagatgattgaattttctgtggtatgttcatagatacattcgcttcactaatgctattattttctttcttgggaacttcagaattatctgactgtgagaaaggtggagtatcaggaacaacaacgcttgtggtgagcactgggactgggactgtggacttatttctcttcttcgcccatttccttctttgattagcattctgagcatttgatttagcctcgt

SEQ ID NO: 131316 - DNA, 2245 bp, Glycine max
  unsure (1)..(2245): unsure at all n locations
  Clone ID: PAT_MRT3847_89587C.1
cccgaacactggtaccgtattcatcaccttatacgacctcgacctcgccaccgtatccctcaccggtcccttgccggacattttcgacaaattcccttcccttcaacaccttcgcctctcttacaacaacctcaccggcaatttaccctcctctttctccgccgccaacaatctcgaaacgctctggctcaacaaccaggccgccggcttgtccggtaccctcctcgtcctctccaacatgtctgcattaaaccagtcctggctcaataagaaccagttcaccggttccattccggatttatcgcaatgcacggctttgtctgacttgcagctcagggataaccagttaactggtgtggttcccgcttcattgacaagtcttcctagtttgaagaaagtttctctggataataatgagcttcaggggcctgtgcccgtgtttgggaaaggtgtgaatgttactctcgatgggattaatagtttttgtcttgatactcctgggaattgtgatcccagggtgatggttttgctgcagattgccgaggcattcgggtatccgattcggttggcagagtcgtggaaggggaatgatccgtgtgatggttggaactatgttgtgtgtgctgccggaaagattattactgtcaatttcgagaaacagggtttgcaggactttgtttctcaatggcaatatttgatcggttctatacntgatagtttgatcactntgcntcagcttcagactcttgatgtgtctgacaacaacctctctggattggttcctaagttcccaccaaaggtgaagttggtgactgcgggaaatgctttgcttgggaaacnccttagtcctggaggtggaccaagtggaactactccttctgggtcttcgaccggtggaagtggtggtgaatcctcaaagggtaattcttcggtgtcgccaggttggattgctgtggtgttgtttgtgtcttggaagtgttttgtcaacaagctgcaggggaagttcagtagggttaaaggtcatgaaaatgggaaaggaggctttaaacttgatgctgtccatgtttctaatggatatggtggtgttccagttgagttgcaaagccagagcagtggtgatcgcagtgaccttcatgctttagatggtccaacattttctatccaagttcttcgacaagtgacgaataatttcagcgaggagaacattttaggcaggggagggtttggagtagtttataagggggtgttgcatgatggaacaaaaattgctgttaagaggatggaatctgttgcaatggggaacaaaggtcagaaagagttcgaagcagagattgcacttcttagtaaagttaggcatagacatttggttgctcttctagggtattgcatcaatggcaatgaaaggcttttggtgtatgagtatatgcctcaaggtacattaacacagcacctgtttgagtggcaggagcatgggtatgctcctttgacttggaagcaaagggtagtaatagctttggatgtagcgcggggggtggaatacttgcacagtttagctcagcaaagcttcattcatagagacttaaaaccctcaaacatactactaggcgatgacatgagagcaaaggttgctgattttgggttggttaaaaatgcaccagatgggaagtattctgttgagacacggttggctggaacatttggatatcttgcacctgagtatgcagctactggaagagtgacaaccaaagtggatgtttatgcatttggagtagttctgatggaacttatcaccggtagaaaggcattggatgatactgtgccagatgaaaggtctcacttggtgacatggttccgtagggtactaattaacaaggaaaacattccaaaggcaattgatcaaattctcaatccagatgaggaaaccatgggaagcatatatacagtggccgagctggcaggccattgcactgctcgcgaaccataccaaaggccggatatgggtcatgcagtgaacgtcttggttcctcttgtggagcaatggaaacctactagccatgatgaagaagaggaagacggctctggcggtgaccttcatatgagccttcctcaagctctacgaaggtggcaagccaacgaaggcacttcctcaatatttaatgacatttccatctcacaaacccaatcaagcatctcctctaaacctgcagggtttgcagactcctttgattcaacggattgccgttaa

SEQ ID NO: 131317 - DNA, 942 bp, Glycine max
  Clone ID: PAT_MRT3847_89588C.1
attctgttcttctgctcattcatcaaggccttcatgacagcttttctgcgcacataaagattctgaatttcatctccagcctcctatttggaatccacttcaagtatggaaagaaatctcgccaatccacctcaattgcaccctccattatatcaaccactagaatcttatatatgtcctcttttgataatgtactcccaagctcctccacataaatggtctctacattacttcccagagcttgcttcagtgctaatccaaaaagttgagttacgaatattttcctaaaattaactgccaaatcagagaaggtcttgacatgttcactaaactggctcaaaatattttccatcatggcttctcggtggatatggtgtcgcttctgtgcattggcacccaagaagttagtaagaatatgtcttttgacagttttatgaaattcattgtagtcactagtggcaaccatacatttatcagaagtgagaatcttgagggcattggatagcttccttgttgaaattgatgaaaatctagtgaccatggcctccttagcaaggaggggagagttgagaacaatgagagtggaagcaccggttcggatggaatagatgggcccatgtttgtgagccatctgggtgaaggtcttgtaaggtttcttctccttcaattggagcagattcccaatcactggtaatcctggaacagctggtactggggggagtgatcctgctccggctcccgcatgtcgcaggaagaagaagaggatagaaaaagcagctgcggccacagtaactgaaagggtgaggaactccatagcatgcatctcgaatctgtatactattaagatggacaaggtgtggtgcgctcgcagccggaatttgtaagttatagtgaaggcatctttcccttaaagattcccagccggctcctgccaccaatcac

SEQ ID NO: 131318 - DNA, 2952 bp, Glycine max
  Clone ID: PAT_MRT3847_89589C.1
atgtcgaattttctcaaatccctcactccaccgccctcgggctggtctgaaacaaccccattctgccaatggaagggtatccaatgcgattcatccagccacgtgaccagcataagcctcgcttcgcattccctcaccggaacactcccctcggatctcaattccctctctcaactccgcactctctccctccaagacaattccctcaccggcaccctcccttctctctccaacctttctttcctccaaaccgtctacttaaaccgcaacaacttctcctccgtgtcccccaccgctttcgcctccctaacctccctccaaaccctcagcctcggctccaaccctgctctccaaccctggtccttccccaccgacctcacttcctcctctaacctaatcgacctcgacctcgccaccgtatccctcaccggtcccttgccggacattttcgacaaattcccttcccttcaacaccttcgcctctcttacaacaacctcaccggcaatttaccctcctctttctccgccgccaacaatctcgaaacgctctggctcaacaaccaggccgccggcttgtccggtaccctcctcgtcctctccaacatgtctgcattaaaccagtcctggctcaataagaaccagttcaccggttccataccggatttatcgcaatgcacggctttgtctgacttgcagctcagggataaccagttaactggtgtggttcccgcttcattgacaagtcttcctagtttgaagaaagtttctctggataataatgagcttcaggggcctgtgcccgtgtttgggaaaggtgtgaatgttactctcgatgggattaatagtttttgtcttgatactcctgggaattgtgatcccagggtgatggttttgctgcagattgccgaggcattcgggtatccaattcggttggcagagtcgtggaaggggaatgatccgtgtgatggttggaactatgttgtgtgtgctgccggaaagattattactgtcaatttcgagaaacagggtttgcagggtaccatctcccctgcatttgccaatttgactgacttgaggactttgtttctcaatggcaataatttgatcggttctatacctgatagtttgatcactttgcctcagcttcagactcttgatgtgtctgacaacaacctctctggattggttcctaagttcccaccaaaggtgaagttggtgactgcgggaaatgctttgcttgggaaaccccttagtcctggaggtggaccaagtggaactactccttctgggtcttcgaccggtggaagtggtggtgaatcctcaaagggtaattcttcggtgtcgccaggttggattgctggtatagttgttattgtgttgttttttattgcagtggtgttgtttgtgtcttggaagtgttttgtcaacaagctgcaggggaagttcagtagggttaaaggtcatgaaaatgggaaaggaggctttaaacttgatgctgtccatgtttctaatggatatggtggtgttccagttgagttgcaaagccagagcagtggtgatcgcagtgaccttcatgctttagatggtccaacattttctatccaagttcttcgacaagtgacgaataatttcagcgaggagaacattttaggcaggggagggtttggagtagtttataagggggtgttgcatgatggaacaaaaattgctgttaagaggatggaatctgttgcaatggggaacaaaggtcagaaagagttcgaagcagagattgcacttcttagtaaagttaggcatagacatttggttgctcttctagggtattgcatcaatggcaatgaaaggcttttggtgtatgagtatatgcctcaaggtacattaacacagcacctgtttgagtggcaggagcatgggtatgctcctttgacttggaagcaaagggtagtaatagctttggatgtagcgcggggggtggaatacttgcacagtttagctcagcaaagcttcattcatagagacttaaaaccctcaaacatactactaggcgatgacatgagagcaaaggttgctgattttgggttggttaaaaatgcaccagatgggaagtattctgttgagacacggttggctggaacatttggatatcttgcacctgagtatgcagctactggaagagtgacaaccaaagtggatgtttatgcatttggagtagttctgatggaacttatcaccggtagaaaggcattggatgatactgtgccagatgaaaggtctcacttggtgacatggttccgtagggtactaattaacaaggaaaacattccaaaggcaattgatcaaattctcaatccagatgaggaaaccatgggaagcatatatacagtggccgagctggcaggccattgcactgctcgcgaaccataccaaaggccggatatgggtcatgcagtgaacgtcttggttcctcttgtggagcaatggaaacctactagccatgatgaagaagaggaagacggctctggcggtgaccttcatatgagccttcctcaagctctacgaaggtggcaagccaacgaaggcacttcctcaatatttaatgacatttccatctcacaaacccaatcaagcatctcctctaaacctgcagggtttgcagactcctttgattcaatggattgccgttaaccgaattgataaacgagacaactatccaagggcatcttagtccatatgatagtggaaggtttagttgagaatacccaagaaaaccagaggttgtaaagctgttttgatctattagcatcgccaatttctttgtaattatttattattgttcaaaatgtcatttttatggtgttcttaaaatctcctcatctgaactaaacctggatcttttagtttggcgttctttattgattctttaagacgatggatgggttttaaagcatggtt

SEQ ID NO: 131319 - DNA, 242 bp, Glycine max
  Clone ID: PAT_MRT3847_8958C.1
tgtttttggtagatagatatatactgagagtcgagtagcttatattatcatatcttgaactatatcgtgggatcaaaagagaatttatatatataattaggtcaaagccattagtaagaatgggtatgatagctacggctacagagggtgataaatagaaactctataaaactgactgggagtcccggattactctcattcaataaatcgacttgaccaaacaagaagttaacatatatcat

SEQ ID NO: 131320 - DNA, 1812 bp, Glycine max
  Clone ID: PAT_MRT3847_89590C.1
gcttgtcaaggctaaataagtgttgtattcatataaaaggtcatgatgacaaacttcagtgaaagttagtggccccaaatagttacacaatcacataagcaaatgactaataagacccaataagctcaaaaacagagaatgatcatgttaatgaagtaattaacagatcccaacccagaaaagatcaagaaaacacacctattcatataccactcgctactatttgttacagacaaatataaactgcaaaaagttaaacatgcaatcccttcaccacattaaaaaatctgcaaccaagatgtcttttgaacctttagatcaaatcagacatccttcttctgtgacgacccaatgaaactctaaagttttggtctgatgatgtaaccatcttgcttcgaggagttgtgacttttggttccaaatcattgttgcatttaggcttttctgtgagaacagtctttggaattggaacactatctgcttcagcgtaccgagattttccatttgaacttcgcagtattgctttgatgcggatatctgaataactcaatgattgggaatatgaaaaattgatggaacttttagaggcaattgatctaaaacttttcaatctcacagtaccaatgtctcgttctgcagcactttgcctttggcgacttgcaacagttgaagtcatgaatcgaggcattgaattggtgaaatttcttttaatggacttcttggatgctttaggggtttcaatgacctctttgacatcatctttggggctaattgaggttgcaatgtgatcactttccacaagactatatgtggtaaataagagctttttactctcatttaacttcaactcaatctgctgtatttgttcccttaaattctggctctgtttttcggcttccttgatgtcttcctctagctccataatcttcttctctttttgcttcttcacttccactggcacttctttgttggactctattgctctcgctctctttgcaaaatttaaggaacaaactgtttcgcaaacatcctcttcagaagggcttatatgcaccaacatcaacacctttgagccatacccaagagaatctttcagtatttgagtcagcttgctattcctgtaaggcacatgaggccccgttctccggcaagctggaagaccaccagctagagccgaaagggcaagattcatggctctgcccccacccagcgataggcctttggctccagttttaagcaaccgttcgctccgtccaagatcaaccatccacaatttacttactacactcctgtccagaaggggtttcccgccgccgaaatatgcttatcctcgtcaagctagatatatgaagcagtgtgaccggcttgatgcctcattcacattagtccaagaggtcgatctaaaccgtttgcccttgttgtaccaccatttggctttagcataatcacttatttgcacttctgagagaccctcaatttcaatcaatccctttggatctgtttgaatattgagattgcactttgtcatatattgttcatgtggtctaccggattgtcttggagataacaaatccctgagattgcccatataaacttccaacatgctcattgtaaaggtaaaagaagatgaattatccaaagaggcttgacgaaagagctcttcaagagcacgcggaattattcctggctccttgtttgttccatccatggtgaatgtcttgcctgtgcctgtttgaccgtaagcaaaaacacacacattgtgcccgtccattgcagatcttagaaaaggcgcaagggccacccagacctcgc

SEQ ID NO: 131321 - DNA, 969 bp, Glycine max
  unsure (1)..(969): unsure at all n locations
  Clone ID: PAT_MRT3847_89591C.1
cattcatcaaggcccttcatgacagcttttctgcgcacatgcagattctgaattttcatctccatcctcctattggaatccacttcagggatggaaagaaatctcgccaatccacctcaattgcaccctccgatatatcgaccactagaatcttatatatgtcctcttttgataatgtactcccaagttcctccacatanatggtctctacattacttcccagagcttgcttcagtgctaatccaaatagttgagtagcgaatattttcctaaaattagctgccaaatcagagaaggtcttgatatgttcactaaactggctcaaaatattttccatcatggcttctctgcggatacggtgtcgcttctgtgcattggctcctgagaggttagtaagaatatgtcttttgaccgttttgtgaaattcattgtagtcactagtggcaaccatacatttatcagaagagagaatcttgagtgcattggatagcttccttgttgaaattgatgaaaatctggtgaccattgcctccttagcaaggtggggagagttgagaacaatgagagtggaagcaccggttcggatggaatagatgggcccatgtttgtgagtcatatgtgtgaaggtcttgtaaggtttcttctccttcaattgcagaagattccctatcactggtaatcctggaaccgctggtactgggggaagtgatccggctccggctccggctccgactcccgcatgtcttctagtgagtagcaggaggaacaagaggatagaaaaagcaactacggctacagtaactgaaagggtgagggactccatagcatctaacttctgatggaatgaagatgatgaaggtgtggtgtggccgacgcgtggaatttggaagctatagtcattagtgaaagcatctttctcttccagactcacagtcgcggacgcgtgggtcgacgcgggaatccggaccg

SEQ ID NO: 131322 - DNA, 233 bp, Glycine max
  Clone ID: PAT_MRT3847_89592C.1
tgttccacacgtgcttactccgctgagacaacacaagggggagagggagtttttacgcgcaaactctcgaattaacaagaattctccaaagtgcgattcgcatggtcaccaacattcgttgagcaaccgtataagatttctacctgacatgggcacggagtgtttctccgatttgaccttcaaatcacactaattcgttctctacaagtccgtgcgcgctaactctgccaaac

SEQ ID NO: 131323 - DNA, 3561 bp, Glycine max
  Clone ID: PAT_MRT3847_89593C.1
taaagattctgaattttcatctccagcctcctatttgatatccacttcaagtatggaaagaaatctcgtcaatacacttcagttgcaccctccattatatcaacctctagaatcttatatatgtcctcttttgataatgtactcgcaagctcctacacataaatggtctatccataacttcacagagcttgcttcagtgctaatccaaaaagttgagttacgaatattttcataaaattaactgccaaatcagagaaggtcttgacatgttcactaaattggctcaaaatattttccatcatggtttctcggtggatatggtgtcgcttctgtgcattggcacccaagaagttagtaagaatatgtctctccccaaaaccctactttctctcttccttctcctcacgatcaccgtagtaaccgccgatgacgccgcggtgatgtcgaattttctcaaatccctcactccaccgccctcgggctggtctgaaacaaccccattctgccaatggaagggtatccaatgcgattcatccagccacgtgaccagcataagcctcgcttcgcagtccctcaccggaacactcccctcggatctcaattccctctctcaactccgcacactctccctccaagacaattctctcaccgtcaccctccttcttttcaccaactgagctttctttgctccaaactaaacgtttgaatagtaaacccttcagccatggattaagttggcaaacaagacgccctgatcacaacactccctaacctccctccataccctcagcctcggcttgtcctttacaaccagtggatgacctttgtcatctaataaggcctcgaccatcgacactgtattccttcccttgacatttttgacaatttcacttcccttcctatcttccaacaacctcacttgctatcgacatagcttaccctcccaattttgtatctttctgacaatatcgaaatggctccatcatgtctgcattaaaccaggttaaagttcctggcaagaatcctcccaggtatccatacctaaggatttggtcatcgattacattttcatgtccacatacatattggagctcctgatatcgcaatgcacggcaagattttgtctgacctggtgcttacggatcccaaccagttattactggtgtggtaccagttgacacagtcttcctgttcgaagaaagtatttctggttaatattgagctagctcagtggattcctgtgccaggaaatgaaaatgtcaattttactatggttttactgatttctgtcttgacaaattgtgattcatcacgccacccatatggttttgcttcggattgccgaggcgttcggttatccaattcggttggctgagtcgtggaaagggaatgatccgtgtgatggttggaactatgttgtgtgtgctgccggaaagattattactgtcaatttcgagaaacagggtttgcaggggtaccatctcccctgcatttgccaatttgactgacttgaggaccttgcttctgaatggctataatttgattgcatctatacctgatagttagattactttgacacagcatcacactcttgatgaagctgtcgacaacctcactggattggtttctaagttctcaccaaaaatgctgctcggtggaggtggtattgcttctgtgtattcgccccgtagaagttagtaaggataagtcttttgccagttttatgaaattcattgtagtcactagtggcaaccatacatttatcagaagtgagaatcttgagggcattggatagcttccttgttgaaattgatgaaaatctggtgaccatggcctccttagcaaggtggggagagttgagaacaatgagagtggaagcaccggttcggatggaatagatgggcccatgtttgtgagccatctgcgtgaaggtttggtactggggggagtgcggcttgacgcagcgaggagaacattttaggcaggggagggtggagagtttataagaagcagttgcatgatggaacaaaaattgctgtaaagaggatggaatctgttgcaatggggaacaaaggtcagaaagagttcgaagcagagattgcagttcttagtaaagttaggcatagacatttggtggctcttttagggtattgcattaacggcaatgaaaggcttttggtgtatgagtatatgcctcaagggacattaacgcaacacctgtttgattgggaggaaaatggctatgctcctttgacttggaaacaaagggtagtaatagctttggatgtagcgcggggggtggaatacttgcacagtttagctcagcaaagcttcattcatagagacttaaaaccctcaaacatactactaggtgatgacatgagagcaaaggttgctgattttgggttggttaaaaatgcaccagatgggaagtattctgttgagacacggttggctggaacatttggatatcttgcacctgagtatgcagctactggaagagtgacaaccaaagtggatgtttatgcatttggagtagttctgatggaacttatcaccggtagaaaggcattggatgatactgtgccagatgaaaggtctcacttggtgacatggttccgtagggtactaattaacaaggaaaacattccaaaggcaattgatcaaattctcaatccagatgaggaaaccatggagagcatatataaagtggctgagctggcaggccattgcactgctcgtgaaccataccaaaggccggatatgggtcatgcagtgaacgtcttggttcctcttgtggagcaatggaaacctactagccatgatgaagaagaggacggctctggcggtgaccttcatatgagccttcctcaagctctacgaaggtggcaagccaatgaaggcacttcctcaatatttaatgacatttccatctcacaaacccaatcaagcatctcctctaaacctgcagggtttgcagactcctttgattcaatggattgccgttaaccaacatccaatgttttttcagttggaaggaccagagagaatgttgttattaagtaagctgttttgatctcgcaacatcacctaattgtatcccaatttttatttaattttttaaatgatgattcttttatgttcttgcgatctctatttgtacaagtctgatgtcctttatctagttttttcaaagctaacggattggttttagttggttgggttcttggatgagaagtattatagaaatgttaattgtatgatatttttcaacatttaatttgtaaggtttcttctccttcaattggagcagattcccaatcactggtaatcctggaacagctggtactggggggagtgatcctgctccggctcccgcatgtcgcagtaagaagaagaggatagaaaaagcagctgcggccacagtaactgaaagggtgaggaactccatagcatgcatctcgaatctgtatactattaagatgaacaaggtgtggtgcgttcaatcttggaatttgcaagttatagtggaagcatctttcccttcgaaattcccagccg

SEQ ID NO: 131324 - DNA, 430 bp, Glycine max
  unsure (1)..(430): unsure at all n locations
  Clone ID: PAT_MRT3847_89594C.1
accagagcgggcggttttttttttttttttttttttttttttggggaaatatcacccatccaaacctaaanaaacacgggcgcgcataatcacaaactcatgttaccctgccaataaaataaaccctcatacctaaactccagcaccagcaacagcttgctcactataatacacaactcctaaaatttctcatgttaccacgtgctaagcacgctgatgcggagccaattgttgtgctcacacttaggcataccctccataatacaaccaaagacttaaccatcatataataatacccttttaatactcacgtgaactaacccattaattaaaaaaaaaagcttttcaacatgacatgcaaactggtaaacctaatgatccccacaactaagaccatttttaaacttgtttttctcactcacactgtcca

SEQ ID NO: 131325 - DNA, 475 bp, Glycine max
  Clone ID: PAT_MRT3847_89595C.1
ctgttactggacgccaagttcggaagcctcttcgaatccatcggaaacttcttcaccggcggtgaacagatcccgtggtgtgaccgtgacgtcatcgctggctgtgagagagaagttgcagaggctgctaatggtgactctgaggagcggaagaatgagagtataatgaggctgtcatgggctcttgttcattcaaggcaaaaggaagatattcagcgcgggatagccatgcttgaaacttccttgggcaatgataaaagtcctttgcatcaaagagagaagctttatcttctggctgttgcttactatataattaatgactatggaaggagccggcagcttgaggagcaatgtttggagattgcaccctgattgtacgcaggcactatcccttaagaaaatagctgaagatcgaattgctacagatggtgtaatacgaattggcatcactgcaacagctgtgccacctatactt

SEQ ID NO: 131326 - DNA, 142 bp, Glycine max
  Clone ID: PAT_MRT3847_89596C.1
gagacacgcacggctcagctcgcgcatgaactaccaacccaacaagcgatcaacaggaccggacaacacgcatctaggcggaccaaacaccctcagccagccaccagaaaaaaagctcccagtaaggctcaaaccacccaca

SEQ ID NO: 131327 - DNA, 205 bp, Glycine max
  unsure (1)..(205): unsure at all n locations
  Clone ID: PAT_MRT3847_89597C.1
gntctattctcttctgcatcacaatttcancactgagagaacaacacnatanatcaaacgagnctctcggtttccnatgtgaagagagccaacatggctacaatcncngnnaggattctcggttccantcaaggncaatggtggagtnccnnngcattgcngtggncggcgtantcctcgngtccngaggtnttgtngtngcgga

SEQ ID NO: 131328 - DNA, 276 bp, Glycine max
  unsure (1)..(276): unsure at all n locations
  Clone ID: PAT_MRT3847_89598C.1
gnggcnnnacagaagnccanacagagnggagaancccnccaagccgnggccaagcanncncnggcgncagggaggaccaggcncnncaggagnngggnnnggaaannnnggagaggnnggnccnnnggangcnaannngaagccacgaaannncacanggnngagaaaagcagancncnngnnngnggacaacccagnnggaaccgggnacagnnacgnggaggannccaancncnangccaaaacagacgaagaggcaaccacagacccgacaac

SEQ ID NO: 131329 - DNA, 554 bp, Glycine max
  Clone ID: PAT_MRT3847_89599C.1
aattcggctcgagaaatcgagcttcgctttctcttccctgcactttgcactttgcactttgcactctgcacagcgcaatggcgtgtttgttgagagcgagaaacccctgttactctctgatgaggcgcattcgaatccggtgcatgagcaacgttcccgagaacacggtgtattcggggcccacctcgcagagctcgaccaagcgcgtcacgctgagccagttgcgccagaagcaccgctcctcccagcccatcaccatggtcaccgcctacgactaccccgccgcggtgcacctcgacaccgccggcgtcgacatctgtctcgtcggcgactccgcggcgatggtggtccacggccatgacaccactctccccatcacgctcgaggagatgctcgtccactgccgcgccgtggcgcgtggagccaagacgccgcttctcgttggggacttggcttttgggacctacgagtccagctccaatcaggcggtggatactgcggttcgtatgttgaaagaagggggaatggatgccataaaactggagggagggtcg

SEQ ID NO: 131330 - DNA, 351 bp, Glycine max
  Clone ID: PAT_MRT3847_8959C.1
ttaaagaacatttatttctttattatattgaatggcaaatattttgggattacggtgtacatatttattggctaaaagctactacttataaccatcaaattacattctctagatctgaataggcctaagagttttaagcatttcatgcctaacataatctatatatagttttttcacttgtcctattatttctaaaagatagttctgacaatttactgcagccatgaccccatctgatttagctccatgcacataaccttgtattgtccaagcttacaaattttcccccaaagaattgattggccaaaggtgcactatactttgtcatacacattcaagtgtgtttccaac

SEQ ID NO: 131331 - DNA, 361 bp, Glycine max
  Clone ID: PAT_MRT3847_895C.1
ggctcgagaagaatgcccatcttctctgcaacattgggctcgtgcactagagacatggctaccttgctctcacagggacacctttctcctttcgcgaagacaccttgccaatggcagcatcactatcacactgatgatgcttggacgacgcctataactatacccgattggcggagttggtggttattactggattgggaacaatggactgcctaccggaggagctggtgccggaatacgtggtggatatggcggaagtggtggacttggtggaggtctcagcagacctaccggagggatcaggggagttggcgggctcggtaaccgggtgcctggcggtattggtggaggctgtggaact

SEQ ID NO: 131332 - DNA, 207 bp, Glycine max
  unsure (1)..(207): unsure at all n locations
  Clone ID: PAT_MRT3847_89600C.1
aattaagacaatgattatcaatcttcatttaaagctgctttttgagaagattgagatgagctcattggctgtccacgtcactagggagagccaatgagctcatctcaatcttctcaaaaagcagctttaaanttaagacaagctgattatcaatcttcattttgtntgaatctttcagtgtcctttctttttcacataagtgagatt

SEQ ID NO: 131333 - DNA, 1068 bp, Glycine max
  Clone ID: PAT_MRT3847_89601C.1
gcaaaaggatagatgtggctaatgtcaagattacatcaaagaaatggcttaaggaatctcactgagaggtgtatctaggagcttatttgaattagcccattggcagctggttgttttgtgtcctacaaacaattattgttggtggttttgttcattgcgtaaaaagccagttgttcatataaaagctgcaattaacaatgcatttaagacattaaagaccacttgtgacgggaaaattgatcaaagtacaccctagtggattgaagtgaagagtcacgttcaaagcggaggctatgagtgtggctattatgtcatgcattggatgtggaacataatcagaggggagttgaagactgattggaccatgtggtttggtgatggcacgccactagacatcgagaccatgacaacattacagaaaaaatgggcagcatgctttttaagagttagaagcatcgaatgtagaaagctttagatgacatgccaacaaccactttggtgtttttcatgcatttgtttaagttttagaaacaatttttactgctgtaatgactattatttgcagggaaaatagatatttgttcatttcattttggtatgcactcaaacattgagacaatgcattgtatttgctcattgaaggtgttcttgctgcaaacatttttgattggggatctcatgcatgtgtggatctctatcataaaggaactattcttgaaatttacagaattagtcacaacaaaatgcagagaccttggcgagtggatgattttcatgcctttaagcaaagaatgctaggaactggggacaagaaaccacccctacatagaagagctttactttttgtggacaatgcaggtgctgacacaatttggattttgtttaaaaagaagcaatatttaaggataaaaattattatgaccaattaacttaacctttcttcaggttgtgagacaaaagttacctgttaaatataattatgttaattgttaatataaataagttacctgttaaatctaattatgtttattgttaattgttaatataattaagttacaatattttaac

SEQ ID NO: 131334 - DNA, 515 bp, Glycine max
  Clone ID: PAT_MRT3847_89602C.1
gcaccagcgcacgtgttcccctttatacagagagagaacaaaaaagtgatctaaatgcttttgttattatcattataattattgcttactttaatcttaatccttgttaaacagggaaaataacgggactagggaatgcttataatcttttttttcccactaatatactttacttttaattttatatttttaaattatataatttaatcatatacaatgttaaaatcaataaatttggttgagttaatcttaatgaatatattattaatattcttaaattggaatcaaataattaatttaatcaaaatttaagatgagaaagataaacctgccagaataagtcaagttgcggttacctttctctttaaacaggataaataaaaagaaatatttcattgtaaataaataaaaacattgttttcgtgagctatcatatatatatatatattgtaattggaaacatattgaatgatattaatgagaagaggcaagagcctgtacatcagtatcatcaa

SEQ ID NO: 131335 - DNA, 341 bp, Glycine max
  Clone ID: PAT_MRT3847_89603C.1
ggctcgagggatctcttccccgaattcccggatcatggaatccattaggatcggggatttgtatcctactcaccttgttgacctgtaattagcacctgccgacccttccgtattatatcacctacacagtgggctccagatgcaccttagcgcgtacaaccacctccgtgccagttatgcatgcaacgtaccttactctagtgtgtggaacccctcatcttgtgggtttgactcatcctctggtgtggccactggaatgccgaattacaggtccgccgcgttggcaaagcgtagccacagtttcatcggtcgtggagctgctagcacccaccagcatcttg

SEQ ID NO: 131336 - DNA, 519 bp, Glycine max
  Clone ID: PAT_MRT3847_89604C.1
atcacagttgaaactacagactacaatgaaagcagtgactctgccataaatgttgatgatagctgtctgagcagtaggcaagaaaatggacttagtgaacataattcaaaactatcactcttgggacatggaccacatgggaaacgagttgtagaatatttactgaaggagtatggtgaagatggcatccgggcgttttgtcaaagatggagacaagtatttgtggatgctgtaaatccacgttttcttcccggtggttgggatgtaaaacacagtggaagaagggacttcgggaagttcagtgtatacaatcctgacaagagaggagctgctgctagtacgtagagactagagtgaccgtacaggaattacaagaaacctgcatattttggtacttcaacgccatcaaaatactcaacttcctcctctcacggcaaagaaactacataaacgttatcttcattttttttgttaattttttgttaaaactatttagaattttagtatttgtctttttgg

SEQ ID NO: 131337 - DNA, 378 bp, Glycine max
  Clone ID: PAT_MRT3847_89605C.1
accgacgcatgggtcgatctacaactcctgattcttgttagatgcaaaacaaaggaaatgggaatttgcaagactttagtactgataaaataaacataaacacaaataccaaaaaaaacctaaacaaataaaaaccaaacaaaaaaaaacaacatacattacaaaagtataaaacaaaaaaaaaaaaactaaaaaaaaaaacacacaacgtttattaactgcaaaactattcctcaagatttcaaagatatatatgaaactacatgctacgaaaccaaaatagattagactccataaaaaaacgccctaaaagctaaaacctatgctaaacccatcaaaatcactttcaaaaccacatgcttttttcaagttgatgaa

SEQ ID NO: 131338 - DNA, 123 bp, Glycine max
  Clone ID: PAT_MRT3847_89606C.1
gctgagatgaacattaggtcattcaagcatgcctgggttgctgacaagctcaaggctaatcgcgaatgatgaattaccattgatatggcttcgtggaattttgaatccaccattattctactg

SEQ ID NO: 131339 - DNA, 159 bp, Glycine max
  unsure (1)..(159): unsure at all n locations
  Clone ID: PAT_MRT3847_89607C.1
ttccaaacactctccaccctccactctctccactcttgtgngcttgagggaggctgaaatccagccctttatttggagaatctcctaagaggggggtccagagcaacactaaaggggtcaaanacaaanaatacttcactcctgaccagatgtgaaatt

SEQ ID NO: 131340 - DNA, 270 bp, Glycine max
  unsure (1)..(270): unsure at all n locations
  Clone ID: PAT_MRT3847_89608C.1
ctgaagcgatataagcctaatcatgaaatggatagatgtacatgggactttaatagaagtgactgaagcacaaaatcgtcttcttggagaaaagacatgtgggtcgttattaaaaaacgttcaggaaatatgggatgaggttagggcgagngacgagcaacgagacaagatgcttcttcagttagagcaggagctgttggatgtgtacaagagaaaggttgagcaggctgccaagtcaaggtgcgcaggtacttcaagctctgtctgatg

SEQ ID NO: 131341 - DNA, 676 bp, Glycine max
  Clone ID: PAT_MRT3847_89609C.1
ggtagatcatgcacccttgaccagagagttagttaatagtaattagcttggtcatctaatctttgtgaggactaaggaggcttcatatagtggcagggagaaatgcatcatcagcttggcttgtgatatggaacaaagaggcagaggtagagtgtgtgtcaccggggcttcaggctttctcgcctcttggctcattaagcgacttcttttgtctggctaccatgtcattggaactgtcagagatttaggtttctctcttccatatgtcatttaattacaaatatacaacatttatgtattatgtacatacagggaagcagaagaagtatgaatacttatggtgtctagaaggggcaacagagaggctccaactagtccaagccgatttgatggaagaaagcagcttcgacaacgcaatcatgggatgcaaaggagtcttccatgtggcctctcccgtactcaatactatatctgatcccaaggttcttaattagtgtgtgacatggcacatggtagcatttaattagctttttaatttctctgttaatctacaacctctcaaattaaattatccaaactttcacataactgctagtatctctcaccatggtattttaatttggttatcaaatttgacaaaaaatagtcagaaatattggaacggcagttaaaggca

SEQ ID NO: 131342 - DNA, 253 bp, Glycine max
  Clone ID: PAT_MRT3847_8960C.1
atttttatgttctaaaagagaagttgtctgcattaatgtcaatgaaagacaggaacaaaggtgtacagtttattaactgcaaaagatatacagattttcctacttcctagcaaactcaattttgtgtgcagctatattcgaatggatgtcctttaactatacttacattggtcgcttttgattacctttttacagattcgtacaagtctaaacactccaaaaattcagcttcaaactgagaccattatgttct

SEQ ID NO: 131343 - DNA, 439 bp, Glycine max
  Clone ID: PAT_MRT3847_89610C.1
actataagactatctatgacgcctgcacgcctcctacgtcagctacggaattctggcatagagagaaaagcgagcaccgcgacaaatgctgaatctgccaatgagtatttcgagcgaggacagacgggtcttctcgaccagatcatgtggatgaaggctggcgactgctaatgaccagtaacatctaccgtcagtggcggtcacatctcatcgtaccactcaggctgcgacgacatggagtcaacatcaacgggacccacggacgcgtgaactgcacagggcgctaatatatctcgcgacaacgataaattgaatacagacaaccacaaattgagcgctaagttagcgctgacgaagaaccaacgctaggaattgatggagattcttacagactcgatcatcgcagcccccatgtgctagaactcatcattccgctagg

SEQ ID NO: 131344 - DNA, 246 bp, Glycine max
  Clone ID: PAT_MRT3847_89611C.1
actccggcagcagattccgtgcgacgcattccaacatggctctaccattagatattccagacttcgatgatctatgcacagagtctctagtttaaggccatatctaagtattagtgacctgattcaggataatcacacagccttgccctgccctggacaactactagatagaagagcaccatctcctctatcagagaaccttgaaccgagagaagagatcagcctgagcctcttgatgaagccagt

SEQ ID NO: 131345 - DNA, 245 bp, Glycine max
  Clone ID: PAT_MRT3847_89612C.1
cttacgcgttcgttttgacgaagaagggcacattgtgccttgcagtggcacgtaccaaacaaactgctctcaaatgcacgggagggttggcagctcgcaatgaggccaggtacaataccctactgaaagttgtttctgttgcacgcatgcaagagtaagccaaatacgttgcagcctgtaatgggggcaatgatggagatgctaaggtactcgggagggggcggggctaccaatactgaagctcc

SEQ ID NO: 131346 - DNA, 469 bp, Glycine max
  Clone ID: PAT_MRT3847_89613C.1
aacagcaagagatttgcttatatttaaaaccggcgttcaaggcatatttttgcttatatcgaaactggagggagtactaaatattcaggcaacaaggggggaacctacacaggatcattaaagagaactccatgttaattgggaatacaaaatgatatacttcacatgctgtatctgatcctgcatatgctgtatgcatatacaggatcattgaaaataactccatatttatgctgtatgcacactactgcattagtaacacatttgatgtttggaaccccaaataaaaaatttaagaaaggaaataaagattgaatctgttgattgtaaaagaacagaaaataggaaagataactctcctccaagggtttccccttcgcaaaagatttctcctttcacaaaatgctaaagctgaatatctacaaatgataagaaccccctctttgcaatccttctttccctatttata

SEQ ID NO: 131347 - DNA, 1863 bp, Glycine max
  unsure (1)..(1863): unsure at all n locations
  Clone ID: PAT_MRT3847_89614C.1
ggctcgagtcttttcttcagtgtccgctgctgcaaattgcaaagtgcaaaacctgagagagaaaatggagaagatgaaaatagaagaggttcaatcaaccacgaagaaacagcgtgttgctacacacactcacattaaaggcctaggtctcgaggcgagtggaaaagcattgagttttgctgctgggttcgttggacaagttgaggcaagagaagcatcaggtcttgtggtggacatgatacggcagaagaagatggccggccgggcacttcttctcgccggaccgcccgggaccggcaagacggcattggcacttggaataagccaggagcttggcaccaaggtaccgttctgccctatggttggctccgaagtttactcctcggaagtaaagaagactgaggttctcatggaaaattttcgacgggccattggtctgcgtatcaaggaaaacaaggaagtatacgaaggggaggtcaccgagctctctccagaagaaactgagagcgtaacaggtggttatggtaaaagtattagccatgtcatcattggattgaagacagtgaaaggaacaaagcaactcaagttggatcctaccatatatgatgccttgattaaggaaaagatagctgttggcgatgttatatacattgaggcaaatagcggggctgtaaaaagggtgggtcgaagtgatgctttcgctacagagtttgaccttgaagctgaagagtatgttccactgcctaagggagaggttcacaaaaaaaaggagattgttcaggatgttaccctacatgatctggatgctgccaatgcacgacctcaagggggacaagatattctgtctctgatgggtcagatgatgaagcccaggaaaacagaaatcactgacaagttgaggcaagagattaacaaggttgttaaccgatatattgatgaaggtgtagcagagcttgttcctggagttctattcattgatgaggttcatatgctagatatggagtgtttttcgtatttgaatcgtgctttagagagctccctatctccaatagtaatctttgctactaatagaggaatatgcaatgtaagaggaactgatatgacaagtcctcatggcatacctgttgacctgttggatcggttggtgatcattcgaacgcaaacatatggtcctgctgaaatgatacagattctagctatccgtgctcaagtagaggaactggttgtggatgaagaaagtttagctttccttggggagattggacaacaaacatctttaaggcatgcagttcaactgttatcacctgccagcattgttgcaaaaatgaatggccgagacaacatctgcaaggcggatcttgaggaagtttgtacgctatatttggatgccaaatcatcggccaggttacttcaagagcagcaggagaaatacatttcataatattgttttccaactgttgcgatgactgttggttgggtttgaattacaaccagtttttgctttcgcttctatactgtctcttgcatgattgagataatcggttcaagggctgtaattttgttactgaattcattttaggattatttttcatgatgcttttgatgactgaaaatgaaaaacagcgtggaaatgtaatgaggcagttagtttcccatatttttcgtttctctgtattatcttttgcttttctaaatttagttctgttgataatggactttaatgtctttggtttatcccttgtacaactttctaatggcatttggaatattttacgatgtgcttaacatgtatgaaaaaaaaaaaaaaaaaaaaataaaaaaaaaaaaaaaaaaggnaaaaaatataaaaaaatacaaaataaa

SEQ ID NO: 131348 - DNA, 512 bp, Glycine max
  unsure (1)..(512): unsure at all n locations
  Clone ID: PAT_MRT3847_89615C.1
ggctcgagcaagagattaacaaggttgttaaccgatatattgatgaaggtgtagcagagcttgttcctggagttctattcattgatgaggttcatatgctagatatggagtgtttttcgtatttgaatcgtgctttagagagctccctatctccaatagtaatctttgctactaatagaggaatatgcaatgtaagaggaactgatatgacaagtcctcatggcatacctgttgacctgttggatcggttggtgatcattcgaacgcaaacatatggtcctgctgaaatgatacaggtagtatggccttcatctttctttcaaatagatttcaaaatgttaagcattatgtgtttggatatacaaacatacatgcttcttaattgtgggacagattctagctatccgtgctcaagtagaggaactggttgtggatgaagaaagtttagctttccttggngagattgggacacanacatctntaaggcatgcagntcaaactgtatcacctgc

SEQ ID NO: 131349 - DNA, 1538 bp, Glycine max
  Clone ID: PAT_MRT3847_89616C.1
ccacgcgtccgcctgcctaaaaaagaagctttaaaagctcctttgatcttcttccttttgagaaggtgtttatctcttcaccagctatagtttttctgaactaactgcactgccactgaacacacagcaatggcagcttcttcttctcttttctcctcttcaatgcatatggagatgtttgctccaaagacatcaaagtgtccccaaaattttgtatgctgtcatagcaaaatctcctatatagaacctaattatttaaaaccagtatgctgtcctaattcaagatctttaagtatgaatatgtcatcaaaatgggaacaaacggatcgaagagatgcattgcattgccgcgctttgaaaattgagcctgcaccttccttttcggtggggcagaaatttcaatttgatgatattatagaagctcaacagtttgatagagatattctcagtgccatttttgaagttgcacggaatatggagaacgttgaaaaggattctcctggtagccagattttaaagggttttcttatggccaccctattttatgagccttctactagaactagactttcatttgagtctgccatgagaagactaggcggagaggttttaactactgaaaatgcgagagaattttcgtctgcggctaaaggagagacacttgaagatacaatcagaacaattgagggttactctgatataattgtgatgcgacattttgaaagtggtgctgccagaagagctgcagctatagctgacattccaataatcaatgcaggggatggtcctggacaacatccaactcaggcacttttagatgtctatacaattcaaagagagattggaaagattgacgacataaaagttgggcttgtgggagaccttgctaatggcaggactgttcgttcattggcatacttgcttgctaagttcaaggatgtgaagatttattttgtttctcctgatgtggtaaaaatgaaggatgatataaaagactatttgacatcaaagggagtggaatgggaagaatgtgctgatttagtagaagtggcctcagagtgtgatgtggtttatcaaactcgtattcaaaaagaaagatttggagaaaaaattgacctttatgaaaaggctagaggcaagtacattgtgaatcagggtattctcaatgtgatgcagagacatgctgtggttatgcaccctcttccaagacttgatgaaatcaccttggaagttgatgctgatccaagggcagcttactttagacaagccaaatatggtctatatattcggatggcacttttgaaactcttgcttgttgggtggtagaactgcattcatcttcaaaacgtatggaagatgctgcacatcaaaacttcttttgcttttctttgtcttttcatgctgaacatcaaaacttctttttgcttttggtttccctttcctctcttttaaattttctctttttgttttttattgcactctctaatcttataaaagattgtcttcaacttactaattaattcaactctgccttacat

SEQ ID NO: 131350 - DNA, 530 bp, Glycine max
  Clone ID: PAT_MRT3847_89617C.1
tcccgggctcagacgagctcaccctagtcggcaggcccagccctctttcttctttgtggtttttgttattatttgtttatattttatttttctttcttttattttttatctttttttttacttttttgttttcttttttgatattattttttcaggaaaggggaaacggccacgccttttttttcccaaaattcaaaaatgaggggcttttaaaaaaaaaaataaaaagggggcgggggacccgggggaaactttaatcccaaaccctaaaaaaaaaatcccctaaaatatccaaaaaaaaagggctcccctggttttttgggcccctggtttttaaaccttcaatgcaagcccctgttgttataaagggggtcctctccttttggtgcacaaaacccaacccctattaaaattccaacagggcggaactgtttgaaaaaagggcacttctcggggggggggcgcctaaaaaaaccggaaagcctataaaaaaacgggggatctataggggggagactcccttttttttt

SEQ ID NO: 131351 - DNA, 310 bp, Glycine max
  unsure (1)..(310): unsure at all n locations
  Clone ID: PAT_MRT3847_89618C.1
gantngtnanagtnngcnnggacattcntncngctcgaannnatcnantagacacaacgcncctcnnncgtccnttaaaaccctacttcnccagtnacagaaggcccgaagcnnnncacaannccacaactacnttcattgnnngcanncanctcnctnaannnaacaatnctagnatcagatntnctanaannctcaatgtgttancatctggagntacntcttttgaggggcatnagcagattccatnccatgagtcacaagctggatatgncatcctngtgnccncattctgatanctgtntgcntg

SEQ ID NO: 131352 - DNA, 418 bp, Glycine max
  Clone ID: PAT_MRT3847_89619C.1
gccgcccttttttttttttggggttttttattttttttttgcctttttttcccccgttttttttttttttttttttttttttgggggggtaataatcttgaatttttcgaaacaacctgaaaaaacattttgggtggcaatttgccccttgagataggggttgctgttaagctttcacccgcccttaggggaaccctttggtttcccccttaagggggatgcatacctgcatggatgctttttttgggccccaggtgtccatgaacaaaatggtttgacccaagggacattttttcttgggggatgggaaatggcctacaagcagggggggccaaaaaaatgaaaactctttattatgggcaactttttgccttgccattgggttttggggaaggttggggaaaccgatggggatttg

SEQ ID NO: 131353 - DNA, 128 bp, Glycine max
  Clone ID: PAT_MRT3847_8961C.1
atctcatgatccagaaatgagatatgcaccatggatcatggcacaagacttgatcttgatcaactatattgcaaatcacgggggaagtgtttgaaattctttaaccaatgcttccggtcttaatccac

SEQ ID NO: 131354 - DNA, 510 bp, Glycine max
  unsure (1)..(510): unsure at all n locations
  Clone ID: PAT_MRT3847_89620C.1
aaccaaaaaaaccgnattgagtctatctattagagtagaccacaccaccaacaaacgaatagaggtgcctgagaacattgtgacgccgttcactaatctgttcatatggatgttaggcaataacgctacgtggctactgctggtagatcttgctgctattggtaagacaacctttacgcccaagcttattctctgacaatttactgccacgcatccccaccatctgatataatgtctttactgaggcagaacaagaacatcacttccactgtggagcatggggtgggaaaggacaacatccgttctatcgtgtaggcattatttccacaacactgaatggctaaaagaccacgcgcagacatcgaatgatagggagcgagtggttaacccaagagactagtggcacatgatgctgaatgaaggataccccacagatcctcgctctgcttaggtttgccgacattacagatccttctaatgcaaagaatgctaaacaaataactgacaagc

SEQ ID NO: 131355 - DNA, 351 bp, Glycine max
  Clone ID: PAT_MRT3847_89621C.1
cctcaattcaactattttctctactccccctctcaatcttttcccactggataatataacacagggtagggaaagaatcaaaattaaaacaaaaacacatgccctacattttttagcttccctttccaacaatctttaatcctagccatgacatacccttatcacttaatttctattactcaacagaaaaaccctaactagtcctcacaaaaacaacttgaaataatttctatctatatatatatatataattttcagggtaacgatggatccttttacttgaacctatcatcatcatgaccatcacaagatctaatttaaatacagtcaagaatctttaaatatcaacaa

SEQ ID NO: 131356 - DNA, 234 bp, Glycine max
  Clone ID: PAT_MRT3847_89622C.1
ccctcccggagtcatttcgttggagacctcgcctttgaagggggtatttttacattctccctgcggttaatacacagcctcttccttcatagcatctggaaacccggctgatgacaccatcaaccctgaggctttaccccacacgctggtgcaccctgcagagatccaggaaaacgccgcatcgaaaccctcaccaagaggaacccctcacagcccgtccaacacaggtgcccc

SEQ ID NO: 131357 - DNA, 433 bp, Glycine max
  Clone ID: PAT_MRT3847_89623C.1
ctgcgaatgggacatcactcactggaagaagatagaactgatgtatttacatctgatgatcaaacggaaaggaggaagacacgttctggagagggtactgctgataacttagccctagagaaacttttgggaactggacatggttaaggatagtcccatttctatgtttaaggtggatgcgatgcaatggcttactcccatctcttaaaatatagagtagacttttgtgatttgggcagatttttcttaattggtaacttctgaagacttgaatctccttctgcttataattcattccttaacaattctgtgaacatcttggaggatctttattgtgtatcgtgaactgattaattataatggaaatgtatcgatcatcgtattctactgatgtaatgattcgactttatgtatggtgagtactcaagctttt

SEQ ID NO: 131358 - DNA, 1906 bp, Glycine max
  unsure (1)..(1906): unsure at all n locations
  Clone ID: PAT_MRT3847_89624C.1
acgaggttgtcttctcccaacccggttgaatattcaattcatactctgcttctcaactctcttcacttgcttagtcccattcgcaaaccctaacgctaacggccaaagcagcaagtgaaattttcagaatcgattaatccaagtttgattcgaagcgaaattgaagttttagggaaagaaagaaaaaaaaaatggcgtatggtggttcgggttcggcatcgacaattaagcaagtcaaattggagagagaaagcgaactgagaatagaagttggtaacgacgcacctcttcgccttcgactccttaacggcactgctgagatttttggcaccgagcttccacccgaaatctggctcaatttccctcccagactcaagtttgctgtgtttacttggtatggtgcaaccattgaaatggatggcgctactgaaactgattatactgcagatgagactccaatggttagttatgtaaatgtacatgctgtgctggatggaagaagaagtcgtgctaaagcctcatcaccagatgattctggttcttctcagggccctagggtcattgttgtaggacctactgattctggaaagagtaccttgtcgaggatgcttcttagttgggcagctaaacaaggttggaagcctacctttgttgatctggatattggccaagggtctataacaattcctggatgcattgccgccactccaattgaaatgcccattgatcctgtggaaggcattccacttgaaatgcctcttgtttactattatgggcacgcgactcctagtaacaatgtagaattgtataaagtgcttgttaaggagcttgcagggatgattgagaggcaatttactggaaatgctgaatctagagcttcaggcatggtgataaatactatgggatggatagagggtgtaggctatgatttgctcttgcatgcaattcgtacattcaaggccaatgttgtcttggttttgggtcaggaaaaactgtgcagcatgctcaaagatgtgctcaagagtgagcccaaagtagacgtagttaaacttcagaggtcaggtggagttgtatctaggaatgcaaaagtccgtcagaaggccagaagttataggataagggaatacttctatggcctttcaaatgatctttctccacattctaatattgcaaattttagtgatttgtttgtttatcgagttggtggtgggccacaggccccacgctcagccttgcccattggagcagaacctgctgcagatccaacaagagttgtacctgtaaatataaatcgtgatttgctccatttagtccttgctgtttcatttgccaaggaacctgatgagatcatttccagcaatgttgctgggtttatttatgtaacagacgttgacattcagagaaagaagataacatatcttgctccatctgctggagaacttccaagcaaatatttgataatgggatccttaacatggcttgaaacatgagctaatgaacagttttgtactggaaaatctggctaaatttgttgctctggtttgccagtttttgtgtcgtgatcaaatgtaaatactaaatgtagtttacaaccctgttgtgagggattgtttgtcgtagtgagagggtgacctttgtcacggaatatctaatttataaaatcttattatactcgttcagtagcaagttccttatgcttcttgaagttgaactacaattgtatcatgtatatcttaacagcagaagtgggcaacacatgctgcataaaactgtgactcagggaatggagcatttgtttacgttgggagtggattatctcacaaatatgacaaggccaactttaaatccaaaaaaaaaaacggaaaaaaaagggcggccgctccaccagntccaagcttccgtacgc

SEQ ID NO: 131359 - DNA, 162 bp, Glycine max
  unsure (1)..(162): unsure at all n locations
  Clone ID: PAT_MRT3847_89625C.1
cttnnnnnntttggtggtttttttataatgcataacttttatcattccataaattagtatttagtaaagcaacaaaaagagtctttcagtggataacgggacccttcctgtgacaaattaaccattgaggcaaattcagtaaaggaaatttggacaaaattt

SEQ ID NO: 131360 - DNA, 143 bp, Glycine max
  unsure (1)..(143): unsure at all n locations
  Clone ID: PAT_MRT3847_89626C.1
cactaaagggaggccggccgggcgtnnnannncntnnncctncgnattntaagggccgncgnnggccccggncgagcctcttttctgttttcagcctgcccccctgtnttcttcccagccgggggtgcctcccttcggggggg

SEQ ID NO: 131361 - DNA, 197 bp, Glycine max
  Clone ID: PAT_MRT3847_89627C.1
gaacaatgaaattagcttggggaataaaaaataagaggggttatgcacaaacccaaaacaaatcccaaggttttaattaatgtgcaaccattcaaacatttatgtgtacgaaatatttggtaaaccccgatgcttcgggcctatttataacgaaaaaaaaaaaaaaaatctttttttgtccgcgtttttctcaccaa

SEQ ID NO: 131362 - DNA, 236 bp, Glycine max
  Clone ID: PAT_MRT3847_89628C.1
aactctcttctacctgggggttatttacttaactttgtctctcttatctgatctcacaacaatatactgtaacaacacgcgaatatgcctgtcttcttgtaatatttccttcacctctcaaaacccattgtgagaaccctaaattctacagagaggttccatttggcccgatgcgattctaccaccacattatgcaatacattaaaattgtactttacactttcttgaacatagac

SEQ ID NO: 131363 - DNA, 487 bp, Glycine max
  Clone ID: PAT_MRT3847_89629C.1
ccacgcgtccgcgctgccacatttttctacatccgatcctatcattctaccgccctgacctttactgctctacttactttgcgtggtgagctctcgccatgtttcttatttctcccttggaagaggatcacgtcaaactacacctttttgaataggaacaccacgcagcgacgctcgacggcgaggggttgcgcccatggcaggccctatgacaacaaatttatcggcatatattcctcagactttgactatcatacgaaggccggagaagggcacgttggggggaaagaagcttacccccatagcagacgagagaacacatcatcatcagaaggcagcaatagatcaaacgcagaatctaccacagactgggagcacggaatgcgctcataggagccaacatcagcaatagaggaacggcctgtcaggggcttatattgcacaacactgagcaggagagacaactggcagagagggatcaaacttc

SEQ ID NO: 131364 - DNA, 367 bp, Glycine max
  unsure (1)..(367): unsure at all n locations
  Clone ID: PAT_MRT3847_8962C.1
ttttccttttttttttaaattatcttttttttttttttcctcttctcataatagaaggcggggtcaaggggcacaggatcatccccgcccgaaataaaagaaaaataaaagactgtgtttttttcggggcaaagccatggaaaattttacaataaatttcgctggccaaaaaccaaaagttgtatggtataaccctaaatacttggcttaaaaaccatagaccccccaactaatgaaaggccggcccctttggatactaacctacccacaannnnaaagcgaaacaggcggccattggcgaagacaaccgatcctaaataaagaccccccccccccccggcgttgtaccgctgcctgggggtttagg

SEQ ID NO: 131365 - DNA, 264 bp, Glycine max
  Clone ID: PAT_MRT3847_89630C.1
gaaaaaaggcaagattaataataataataataataataaaaaggaaagggaggggaacaattaccagaatgggccattccccatgccccatttaacgaaccaaccccttacattaaaaatcccaacttgttttaaggatccaaatcattaataaaaataatccttaacaacaatattatggaaggaataacaattcttgaacgaattcaaccccgaaaaaaaaaaagaaaaaattcctaataaaatttaaaaaataaacctttt

SEQ ID NO: 131366 - DNA, 131 bp, Glycine max
  Clone ID: PAT_MRT3847_89631C.1
cggatgcgagccaaagcaggatgacagcgaacggggacgtttaaaagaaaacaaaggttatcaccaccggagaacaagaaccgaatgaagccccgctacacgaatgtgaacgatacccaaaggcaaagaaa

SEQ ID NO: 131367 - DNA, 538 bp, Glycine max
  Clone ID: PAT_MRT3847_89632C.1
ttttcccccactaggcactcactttttatcttccgggatcaactttcttttttggcttctggaatgaccaatcaagaaaggagaaaaacattcctgaaagagtgcagtaagcaacttgggaagtgcaggaagcaacaatcattgtttagttaactcaacctttacgggtttggggccgaataaggttagccatgggtccatgttttttgttttttgaaattcacttgttaatttcttaacaacataaatgatattgtttatgtacaatgatcattttttaaatacattatactattttaataactaacgataacattatcatacttttaaattaatccattaaatatagttattcaatacgtaatatattcacaggtcgcaacttgatgaatttcattaaaaaaatcagagctcaatataataaaaaattagaaactcattacaaaataacgtaggagtttatgatatcacaaaaagtatagaacatcacaaataaataaaagctcaatttttatttttaatttttctaatcagtgtc

SEQ ID NO: 131368 - DNA, 504 bp, Glycine max
  Clone ID: PAT_MRT3847_89633C.1
gggttgtactcgtagctcagcttcggaagagttctatcataacttttcaaattagagacaaacatctctatgaccttctgcagaacgaaagttgtgaagctttcagatacaattatactattcctcccttctttcactttgctgctttacgtatccaataccacacaactctgttcaggtgcaaccgcagcctccatgtcagccctcccacgggcatgcttaattatacaaaatgccccgactacgatctctactacaagcacatcatcacggctgatgatgtgtctcggagttctttggtggcatgtacagaggtccagcttccaattaaagacgtgcctgacgctataaacccatttacctttgtaactgcagatatcatcattcgagtagacttaactgatgaatgtgcagattgcaactatcgccatggagggcagtgcaaacttgacagcacagagaaattttgttgtgccaatgctataaaacagcaaggggtggggt

SEQ ID NO: 131369 - DNA, 336 bp, Glycine max
  Clone ID: PAT_MRT3847_89634C.1
ggggttgcttctacctttgctaagagccgccaaattgacgaacaaccctactccttactacgaaaccccttgtttgggctgctccccctattgaggatctgctgccaggacaccgaagaccacgatgaacggggttcaaacgttattcccgcccccgacagccatggctggatcgtgcacgacgatagccgtatggttgatgaagcaggggaaaagcgccccttggctgaggctgtggaacactcctgtaagcagaaccgtaggaccaggacgtttgcctctggcgcgagcctctctttaaaggtgaccggacggtcgtcacactaatgtagttgg

SEQ ID NO: 131370 - DNA, 288 bp, Glycine max
  Clone ID: PAT_MRT3847_89635C.1
tgccgccggaaggggaccacagcagggctgggagaagaagctccttcagtgccacctgctccgccgggagtggccatgctggcattccctggcatggaccagctaatcccaatgatcgagttcgccaagcgagcggggcactgccataacctggactgtaccttgcgaatacgcactgacggaccaccttactaaagcccaaaaggtcgtcttccaggccatccaggactccatttcccacaccaagagttctggggtacatatgtactactttagaccgggcaccaa

SEQ ID NO: 131371 - DNA, 438 bp, Glycine max
  Clone ID: PAT_MRT3847_89636C.1
catccttggctggggataacggcccccccttttactcttctttctttttgagtttggtcttcttcaaaccaagcactactaccctttgactctctgctcccaatattcattcaatcctttcctcactacacatccacgccctccatgattaattatcactcactatatcaaagctttatttttatcttttggagaaccaaatcactctttatttgttgccctccaccgaaacgcacaaacacaatatgagactattactgtacatatgaacctcacaacaattatcactaccccaaagaaacacaaacatccacgtttcattcttatcatgtgggacaaacacaactctttcttgaaatataaccaaggctacaattgctgttaccatgatcgctgcccaactagttaatcttaatattcccaagatcaatgatttat

SEQ ID NO: 131372 - DNA, 182 bp, Glycine max
  Clone ID: PAT_MRT3847_89637C.1
gagcaatatttttctattccattacctttcaaaagatataccatcaatttttgaaatcaacgaataaagaatgggctaaatgtgcccccaccaatgtgtgctctccctatacaaatgtgcccctacaaaaaaaataaaaaatggggagattttcatctttaactcattaaaatacatgcgcc

SEQ ID NO: 131373 - DNA, 527 bp, Glycine max
  Clone ID: PAT_MRT3847_89638C.1
gggttgtggaaggatgacgactacgatgatggtgttaagtcatcattttccccctttttcctctcttttttttttgtgcttttggcccttttcttttctttgcttttttctgcagtaattgatgggttgtctctttttatttatgttgtggtttggttagtaatagtactgcaatttatttgtgtggttggctcggtcaaacttctatgtactcatggttggcttgtctgacgatcaaatcatgatctctacaatctatcctttgtgattcttacaaattggttttatgatggtgtccttttgtgttctcttgcactttttttcaatgttgcatgacaagcattggctttttttttcatgttgcatgttgctagggagccatgggattgccatagggaggattattgtctcacaaggagtttcgattatgaaaattcacaagggctatggcatggagttcctcataatgaaaatctttccaatgtgttcaatgatgaaacaaccccagcgaaagcttgtggggactt

SEQ ID NO: 131374 - DNA, 384 bp, Glycine max
  Clone ID: PAT_MRT3847_89639C.1
aaacaaataatgattggtgacagggggagaactttattctttcattttatgttctttttaagaaaaaaaaacaagatgtctaatgacctggaaaattgggggcccacaaaccaacaaaaaagtctttttttggccaaaaccccctgtatttccatcacaaaaaggctaaaagacataacaggccaaaggaccctaggggggatctccctgagagggacaaacttggtggggcccagttttgcccaataagtccccaaaaaaagcggattaaaaaaggtataaccctcgggggggaggttgtttaacactttttaaaacgcgccaatacccattttcctgccagctattccaacacccaggggcttccgacccaaaggcaaagga

SEQ ID NO: 131375 - DNA, 515 bp, Glycine max
  Clone ID: PAT_MRT3847_8963C.1
cggctgaagacgacagaagggtacggctgcgagaaggacaacaaaagggtacgggtgctaaaagcctacataaggggacaccatgcacatcatgaaagtgtcttcctttatctgctctttgtcttctctgacacatactgggccttgttgagtgagcccttgcaagaaggtatgagaaacgacgttgaggttgctgatccacgctccttctctgggaaggactaccaggaccattcaccaacacacactcattgatgctgatgagctcacaaagtggtacttttacagggctcttattgatgtactaattacacactttgctcttactatacattactgtgctcacagggataaggtacaagcaccagactgatcatgctgatgcaccaggtgatgttgacattctttgcattgcatgggcctttggaggcatgatcttcatccttgactactgcactgctgggatttcgggaggggacattaacccaacaaagacatttgggctgattttggct

SEQ ID NO: 131376 - DNA, 379 bp, Glycine max
  Clone ID: PAT_MRT3847_89640C.1
gccaacgagggaggagataaaggcagcaaagcgagaattgagcagcctgcttgaggaacttgaagcttgccgccgagcggccgggcatgcccggaacttgccggagagacaagatctgatggatcaggtcgtcaaagcaggcgcaacagttctggcgtactacgccagtctgccacccgatttggcgcgccgaattctgccaaacgatcgggctcgccggctccgcgatgacactgtgagggaggctgacgaatgtaatgaagtggcgacccagattatctacgagctggaggagagcagaaagaaagcacaaggcgtgctcgacagcctcaaagacatcgcctcgcctgcacagctgagccgcctgtttacaagcgtt

SEQ ID NO: 131377 - DNA, 234 bp, Glycine max
  Clone ID: PAT_MRT3847_89641C.1
atcctttttattatatccctatagaaaaacataggggatgggggaatttgttaattactctcttgccaatagccataataggttaacaaacgtgtagtacttattaatatttaataatccgctactaatctatattttatatacacaggaaaggtacttggtagaatagaccttgggggggcaggagaacaatgatgtttgttctgttacccctgcatttattgcaaccagctt

SEQ ID NO: 131378 - DNA, 461 bp, Glycine max
  Clone ID: PAT_MRT3847_89642C.1
gtgagttaatttagttcatagttaattaataaaatatgatttacttaattaatgacatatttaattaagatttaattaaataggacatagtctagtaagatagctaattatatatgatttaattaattatctatagatctaatcaaataagataagtatgtatgtatctaatcgaataagatttgataagatcaaataggatttggtaggataagatatgattgggatttgaatcagatcattctcttatacctggttattaggatcacactacaactcgtagtgttattcaattttacaattgacagcctcttcaccatgctggctcgtgcacaagattgtcaagatattgaatcatcctaaaatcacaagcttactaatgtaagcgtgggatctttgatccctttcgatatcaaattatgagtcactcccaaatatctctctgtgtggcccgtttttag

SEQ ID NO: 131379 - DNA, 1094 bp, Glycine max
  Clone ID: PAT_MRT3847_89643C.1
caaagtctcagatcgagcaagtggtgggcgcggccacggctgttgcgatacaaagcttgaagaatagatattttggcttcctaatttcacggaaaaagtatgttgtctgcattgatgatgattgtgttcctgcaaaagataattcagggattttggtggatgctgtggctcagcatattgtgaacctgcagactcctgccacccccttcttctttaatacactgtatgatccattctgtaagggtgcagattttgttcgtgggtacccattcagcctgcgaagtggggttgattgtgctctgtcatgtgggttatggctcaatctggctgaccttgatgctccaacacaagctctcaagccagggcagaggaatttgcgatatgtagatgcagttctgactgttccttcgagagccatggtgcccgtgagtggaatcaacattgcctttaaccgtgaagctgttggtccagcattggtcccggctttgaggctggcaggggaagggaaattgaggtgggaaactatggaagatatatggtgtggaatgtgtgtgaaagttatatgtgatcacctaggccttggtgtgaaaagtgggttaccttatgtttggagaacagaaaggggtgatgcaatacagagcttgaagaaagagtgggaaggggtgaaattgatggaggatgttgttcctttctttcagtcattaaggttgccacaatcagcaactacagcagaggcttgcgtggtcgaggtggccaaaacagtgaaggagcacctggggaaggttgatcctatgttttcagaggctgctcaagccatggaagagtgggtcaagctctggaagtcagttagatctggttaaagctcctgaacttgaggactcttgtaggagtgaaggttattgccttattggcttctatatttctttatgttatttaactaatttatagctgccttttttttccagtttgtagtgaactaagcttacattttacctgacacagactaaaggctgaataaaatgatgataatacttattggttttgtgacaattgaataaattctgtcttgctttgtcaataattggtctttgaac

SEQ ID NO: 131380 - DNA, 1779 bp, Glycine max
  Clone ID: PAT_MRT3847_89644C.1
acatcattggtggtgtgtccgctcaaaaccagcatagttatttttgttcttttggggacattagaggattagcttcgtagtttggtccaagcggttgcttttggtttttcttgcacttcacatgtttttttttgtaacggttttgggtgtgagagtgaagagcacacttcaactattgagaaccgttgacctccatggctgtgacatcacctcttgtcgtagcaggttctcaacttcggtgtcacaattttagaagaaccagacactgggctcttacactgagttgggaaaaacagcagctgaagagagcacagaagtgtggtggggatgagaatccatggaagccagtgaagatagtgatgcgtgtggttgatcatcatccaagggatggtgatgtctcctatggactgcacaaggatttggtctcccttccaaagccattatccatatctgatattgtggctgcttctgatgatcatgctaaagtacggatatcatataaggggataccgggatcatacagtgaggatgctgcactcaaagcttaccctaattgtgaaacagtttcatgcaatgactttgaagaagcttttaaggctgttgagatatggtgggctgacaaagttatccttccaatagaaaatacatctgggggaagcattcatcggaactatgatttacttcttcgccataggcttcacattgttggtgaggtgcaattggctactaacctcgcccttctcgctctgcctggcgtcagaactgagtacctaaaacgggttctaagtcattcgcaggcatttgaattgagtgatgatttcctgactaaattaggtgttgccagagagaacgttgatgacacagctggtgctgctcagattatagcttcaaatggtctgtatgatgccggtgcgattgctagcattcgagctgcagaaatctatgggcttaatgtactcgcagaacgaatccaagatgattctgaaatcatcagtcgttatctcgtgcttgcaagggatccaataattccaaaggctgataagccctttaagacaagtattgtgtttacgctggatgaaggacctggagtactgtttaaggctttggcagtatttgcattgagggacataaatttaaacaagattgaaagccgaccacaaagaaatcggccattaagagttgttgatgactctaacactggaactgccaagtatttcgattaccttttctatattgattttgatgcgtctatgactgagccccgagcacaaactgctttaggacatctgcaggaattcgccacatttcttcgggtgctgggctgctatcccatagatacaaccatatagtctatagatagctatctgctttttattggtcaattttcaatgaatgtcattatattcaagcctgaaactttgaagagaatttgcagctaccttcatgtccaaataaaacaagagctgtcagatggtcaaaaatgtatttacattacataatagttagcctttattcattttgttagtcagttttatagattgacacgtgtgattatactaactctcttatacacatatataagagaagcagagacaagtattgtaatttttcattcaatcaatattcagaactttctcctttcttccaaaaaaaagaaaattttatacggttccatacatgttgcagggagctgttacccaccaatattttgatggacataatggaacaatttgagtctgtgacttgcaatggattactgcagggagagggttagttcac

SEQ ID NO: 131381 - DNA, 157 bp, Glycine max
  Clone ID: PAT_MRT3847_89645C.1
ggaacaaaacaagtgtttcgaatagattatcctgagtctgggggaatagtgctgcggtggcttcaagtcaggaggaggtgacccttttgggagctgctggaagcccatgtaggtgcatggttcatagggccctcaagttgaatggagttcaatacaa

SEQ ID NO: 131382 - DNA, 372 bp, Glycine max
  Clone ID: PAT_MRT3847_89646C.1
agggcaaaatttttattaaaaaaatacaggaaaggggggggacaaattaccagaatgggccatgcccaatttacaaaaccatccccccccaatcccctccgttttacacaacccattcattatttttattccttatccccctatgggagtgatttccatttctcaaacaacttcaaccttaaagaaaaaaaaaaaaatctcatgaaaatttatacctaaaaaccatggattctaataccccaaaaattcccgggaacccttaatggggggggtgaaatcccccattttcaacgggttgaaaaaaccttttttcttaattggcccaaccaaggggccaaatttttttgccgtaccaaaaccccccacaggggg

SEQ ID NO: 131383 - DNA, 527 bp, Glycine max
  Clone ID: PAT_MRT3847_89647C.1
taagcggcgccttttttttttttgaagcaggtgctggaatggaagcctagacttccaaataaatctgacaagttattaaattgtcgcatctacgaataccaagacaaagagtataaaactactgttgcaaaaacaagagaagatttggggtaatgattataatttgtaattgaaagcctcaaaatttactcagataataaactaattaatgctggatcagaacagaacatgacacaaagctatcttgatgttagggacatgtgttttgtggtcacaagagaggaaatggaaaatgaacgcatccactccaataaagtcaaaaactttgggatgcaagaagaagaacaattaaacaagaacccagtacatacctttgaattaaatgctttacaacagggaaaacaaaaaacaaaaaagataagctgtacaggccaaaaacaaccatggaaaaaaaggggccaaaggaggaaaagaggtgagagatctggatggaagatgaggaaatggcggagcgtgggtcgacccgg

SEQ ID NO: 131384 - DNA, 228 bp, Glycine max
  Clone ID: PAT_MRT3847_89648C.1
atttaaactggaaaggttaacttttaaaccccttaaccgggaagggcgacctccaaattttaaaaatttttcacttccggtaaaatcaaggggcaacccccttgttaccataatgaaaacatccaaaaaattaaattccttaacttaaaaaaaataacccccgaacccaaaaagggcccccaaacaattccaaattcccaaaaaaatttttcgggtcagggattgttg

SEQ ID NO: 131385 - DNA, 316 bp, Glycine max
  Clone ID: PAT_MRT3847_89649C.1
attggatccatcccttttgtttggaactttcttgaggggcataacagaattgttggtaatgatcccactacttcgcctaaggccatccattatactcgtggagggccatggtttgaagcttggaaaaactgtgaatttgctgatctgtggcttaacgaaatggaagattacatgaagcaagctaaaaaagaacaatcagcttaggcttttgtcatccgtggccatgtattattattctttatgtcaaattcgttgtgaaaaatccgcatctgccgatgcatgttatgagagtaggagtatgaggcactgctagtct

SEQ ID NO: 131386 - DNA, 524 bp, Glycine max
  Clone ID: PAT_MRT3847_8964C.1
tcctctagagtggccgccctttgtgtgtgcttttttagacctgaaactggcttatactgtaccagtgcctcttcagattcagcaatctgcgatattggaaaatactggtaaatacgcatagtacagtcttgtttcaaaaacgaattcttctaataaatcggggagtacaaacagtataaattatttctaccagattttctggtaattttctgcgacggcactacatcttctaagtggtagctacagctatgctgatcagatcaataccggcggcgccggcctttgtggcggctactgctgttggcatctcctctctgccgttttgcaccgggcctgctactgccggagctgccaccaccaccgccatagcgggtgccactgccagcatgacgtcctccactgtcgctaccatggccagcttgctgcggcggcgtctaattcaggggcatctgtacaccaggctgttttaccacatatgccataccaccgttcgggaacataattggaaccattgctgtccctgg

SEQ ID NO: 131387 - DNA, 449 bp, Glycine max
  Clone ID: PAT_MRT3847_89650C.1
cggtcctgctttccttgggtctacccacgttttcttccacgcgttcgaccacccgtccgcggacgcgtggggataactcctaacggttccatgttggatcttaaaatctctcaatgtagaatcgcacttcccaaacacacatgatggaggaaccattctgcgtcgcgatctattgtcccattatatgacagagggcaattttagagcacgtgttgatttgcatcgctctcatcgaccaaaggaatgattcaaatggtggccacagtgggcattcctgagaatacaggtatatcattggcctgtgctatgaatagttctttttgggggcgtgccagttctgatatttacaccatctgctctcaagactgtgaatcatggaatccttgtttgcacacacaccattgccttttgtcatcttattccaacaagcggtactccttttgccctgg

SEQ ID NO: 131388 - DNA, 236 bp, Glycine max
  Clone ID: PAT_MRT3847_89651C.1
tagttctagatcgcgggcggccgccctttttttttttttttacaccaacaaaagtacagaatataacatacatcaaataaaatagaaagtatttcatcaatctttaaaaagctgtaaaaggtagctttgatataaatttacagtggataaaatacacgagaactttaccaatgtagccgcaaatattaaacaactcaaagcgcagctcaaaggcgtcatgtcattctagatcgcga

SEQ ID NO: 131389 - DNA, 787 bp, Glycine max
  Clone ID: PAT_MRT3847_89652C.1
ccacgcgtccggtccagttaaactttaaaccccttcacagttttcctttttttttcttttaagaattaattttggaatccctcacaatctgttggaatcaagcaagcaagcaattgattcccttgcgttcccaattcgcttctccacgtcttcctcttctcgttctatctgttcgcttttcagtttctagggcttattattattaacgtttcatcttccgccatgtttctcgcgccctaacagtttctccccgaaatctcgcgccgacgcccgataaactcgccaatcgatggcggcggaggagatggctcctctcgttggcggcggcgattcctcgtcggcgacggcgagggctcagtcgtcgttcgtgaagaaaggcgaccggcaaatgttcacggtggagctccggccgggagagaccaccatagtgtcgtggaagaagctcatgaaggacgccaacaaggtcaacaatggatctgcttccgcaccggagcaccgcgctcccaatgcgaaccctgcgctcgagtccagaatcgctccgggacaacctaaggagattgaagaagagggcgcacctcacacataccgtttcagtgctgtaatagagaagcgcgaacgcctttacatgggtaaggacagcagtgatgaggaggatgcacttgatgttcctgatgatcactatgatactatttaacctttcattgatgatgctgaattggatgagtattttgaggttgataattctgcaatcaaacatgatggattctttgtaaataggggggaaatt

SEQ ID NO: 131390 - DNA, 581 bp, Glycine max
  Clone ID: PAT_MRT3847_89653C.1
ctttttttttttttttttttttttttttttttttgggggaagggaaaaaagagctagttttttggatcataataaaatggcaatagaattatttacaagcttaaaattattattaaatgaaagagcaaatttgagtgaagggccgaagacagcaaatttgaaataaatgaaagataactagtaattactaggcgtgtataatatagcatctccttcaaggtaacaatcaatgtctcggagaaacattgtcagcataaattcccaccacgactcatctctggaaaactttcccgacaaacccttgaaaggagtttcccagcccggtactgacagcttctgccaaatactgtgcctcttgaatggttttctttaaatcaaaggcatctttaactcgagcatccaagaaagcccatgtatcacggaaatctgccaaaaaaaaaacaaaccacggaagcatttaaaaaagtcctcacaagctatggctttaccacattgagccacaagcagcagggtctcttcccaaaatgtcattttattcactatacagataacacacgtactggagtattccatgggacggg

SEQ ID NO: 131391 - DNA, 317 bp, Glycine max
  Clone ID: PAT_MRT3847_89654C.1
tcggctcgtgccattattgaattccaaaaaacttttttttttttcgagagctcgatattggattttgggggctcaaaatgatgtggcgcgccatgacctgcagaatgaattataaaaatagatccatataggtgggagttggcaaatgaaggattccttagtgcagaaagtccacaacgctcttctgcaatccgatgagctcttaaagttacacaaaaccttcatgaaaagcactaaagctggttatttgcctgccatattcttttcaaagagtcatacttataatttcaatgttcaaaatcctttttctgcacttt

SEQ ID NO: 131392 - DNA, 1284 bp, Glycine max
  Clone ID: PAT_MRT3847_89655C.1
gcacgaatatcctgttgtctgaattcctccctgacgcagccagtcccatttcccactcgcccaaaacctcagcaaccaaacaaacgccgccgccgtcgccatggccgcgatcgcgcgactgaggactgccgctctcgggctccggcccaaccgcgggttcggatcggcggctgcggtccagtgctactacgacgacgacgactacgacgacgaggaggagatggaagaggagcgcgcgccacgtggcgcactggacgcgcagggttgcgcgccggagaacggagtgcagtgggtgatgataggggagcccggcgccaagaggcaccagttcgctcagagactctcgaagcttctagaagtcccgcacatttccatggccacgctcctcagccaggacctcaaccctcgctcctctctctaccagcagatatcacataccctggatcatggaaaacttgtccctgaggatattatttttggtctactatcgaagagattggaggatggatactcgagaggcgaaactgggttcattcttgatggattcccacgaacaaggatccaagctgagattcttgatcacattgctcgtgttgatctggtggtgaatttcaaatgttcagaagaggagttaaggaaaaagaatctaggaactcgaaaatttaatgcttaccaagaatatattcttatgaccagctccaggacaacaaaacaattgcaggatgatcatgaccaaagtcatgcagacaagtgcaagctcttggaagattactacaggaagcagaagaaacttcttaactttgaagtagcaggtgggcatggagaaacctggaagggacttcttgcagcactacatcttcggcatattaatgctcttaggtcttcacagaagttaactgcgtgaagaatggcaaccgatcttctatggcatcaatccattgtcggcattctagtatatttgaatacgagaggctacaatttcctagaaattgtgtcggtgtctaaatcggtgattgtttttcaaaattttgagaatgcttagttttttctgtagtgcaaccgtccaagtttgaatgaatcaatacgtattgtgtggtcctaaatcctgatagtcagtacgtgttgtctttttttgttcaatggctcctatgtaatctctttttctagttaatttttcctggtccccagtcccagaatcactttatcatgtgatgttgtaaaatattagaagttacctaaaattttctgcctggtttctgtgactgtctcaaatatcatatagta

SEQ ID NO: 131393 - DNA, 486 bp, Glycine max
  Clone ID: PAT_MRT3847_89656C.1
tccacgcgtccgcaagtttgagaaatgctttgcaatttccgcaacttcaattgttcgtcctcgcggcatttttcgctcgcttctgttttacttcagcagcaaaaattctctgctgttgcatcatcgcccaataaaaatttgaatgctgtgcttatcgatgctgtacgtactccctttctccaatcgaatacaactttccgtgagctgttggctgttgatcttcaaagacacgctcttaaagcattggttgagcgaacaaaaataccttttgatgaaatcggacacattatctgtggacaagccgttcaggaatgcataacgagcaatatcgcccgtgaggctgagagcaccgccggtttccctgattcgatcccttgcaatacggacactctcgcgtgtatttcttgcgccgttcaattcataatattagcctgatgattttcactggctatttaaaggcgggcatcgctggaggagtcgagttac

SEQ ID NO: 131394 - DNA, 403 bp, Glycine max
  Clone ID: PAT_MRT3847_89657C.1
ggctcgagaaaaaaaaaaaaaaaaaaaaaaaaaaaaaaaaaaaaaaaaaaaaaaaaagaaaaaggaaaacgtaagacacaaccaaaccggggaatgagtaccggactggaatctggagccgggccctatagccctacctggtgtcggtttagagtgtggccttagtgtgggcgttgctcgttcactgtttccgattgctatccgataccgattcctcatgacatacgcccgcggcgcctaaggcgtaagctcagtggcgtctgttgcgtgagcctaactgccttatttgcaatcagcaaactggccgcgctccatgccggaatcctgtcgcgaagctggttgagagacttggtcaacgtaacggggccagggtgtttgcgttttgggcccgagggacgggcgc

SEQ ID NO: 131395 - DNA, 202 bp, Glycine max
  Clone ID: PAT_MRT3847_89658C.1
attctctggcctccgaagctttccggcttcgtcccttttctatacgtctttgaggatttccatgctgtcattgccttgcagacctatgcaatgtggaatcagtggaggattcaacaagggtgtgacagaagcactactgaaggttgccataaacgggtttggaaggattggaaggaacttcttgacgtactggctcggacgc

SEQ ID NO: 131396 - DNA, 460 bp, Glycine max
  unsure (1)..(460): unsure at all n locations
  Clone ID: PAT_MRT3847_89659C.1
gtgcagtgggcgttggggaaggctggtgaggatcgcgtccacgtggtggtgtcggaggagcttggatggttgttcgtcgggatttacgacggtttcaacggcggcgacgcgccggagtttctgatggggaacctctaccgcgccgttcataacgagcttcagggtttgttctgggaacttgaagaagaagaacaaccgttaccgcaagagagcaatccagtggtggaaggaacggagagtaaacggcgtaagctgtgggagcttcttgccgaggatggactcgacctttcgggttcggataggtttcgcgtntttccgtggacgaaatgcgttgagcgttaacaacgccaatgctgggtctgctgtgagtagaaggtgggttgttgctgtcgaagctgaagcagggggttgacgaagcagagggagggtgaagggaggagggtggaattgggggaatgag

SEQ ID NO: 131397 - DNA, 280 bp, Glycine max
  Clone ID: PAT_MRT3847_8965C.1
ctcgagccggctcgagactcatgtcagtgtgacatcttttggctgcatcttctgttaggaacgaacctggaaccaggcgattctgacgggtctgggggtgcatgtatggtctggcccatttttgttttctcttgtcaaattgtaaaaatccttgtaaaaggtttgagttataaatatattatagattatatatagagtagaagattttctttggggaaataagcttcgccttatatgaattggagctttccacgttaaggtttgttgtgtacaaagctat

SEQ ID NO: 131398 - DNA, 518 bp, Glycine max
  Clone ID: PAT_MRT3847_89660C.1
tgagcgcgctgctgccgagcgcaagtggtatcgcaacgtgttgatgtacgggttccatttcgccgtctctttcatcggcggcatttggaatatcaaggacactcagtgtggcttcaagctcttcactcgacgcaccgctcagtttctcttcttcaaccagcggctgcgtcgttggtgcttcgatgtcgagctcctccagctcttttttcagacacggcaagatccccatggtcgaggttggagtccgctggagagaaatccctggctccaagctgaaccttcttgagtcatccttcctgatggctcgcgatcttgtcgtcattcgtctcgcctacttcctccacatctggaccgccgaccagcctccctccaatgtaaccgaactcaaacaaactgccgcttcactcgcggctcgcgcgaaggcagcgtaatactctctctgaccggttctttctttctttcgatcaaataatcaatcagtctgtgaacggtgccttcttatcgttgtaatcgttttc

SEQ ID NO: 131399 - DNA, 501 bp, Glycine max
  Clone ID: PAT_MRT3847_89661C.1
ggtgtgttgttttttggaagtggaagtgaaaccttctcagaggcacttttgaagagctacatttattcatagctattcatcattccagtccatcccaaccgaagagagaacaccttaggaaatcataacgctaatcaacaaccatctagttctcgtggaggaggtcgaggaaggtgtcagcagcaggctcgggcttgctagcctcgagcttcttctggcccaacttctccttggagaaggtagcagcgtatgggttgaggcggagctgcacctggaagttcttgagcgggttcttcttttgtacgacaccacgcttggagacggctccaccacggacggggcggaggaccttctggacgtcgctggagttgatgatcttgctgaggtcgggctggctcatcatgcttgatgggaggaggtagtccttcttgagcgcggaaggctcggcggtggatccgtagaccttgtcaagggcgctgaaagcagatgaggtccagacga

SEQ ID NO: 131400 - DNA, 218 bp, Glycine max
  Clone ID: PAT_MRT3847_89662C.1
ccttctttggggtttgttttttgtataactttttttatttttttttgagagcatgaatgcggacctcaccattctcctgtcatttccttgggacactctcacttattgaaacaccaactttttttttgaatttccaagctgatctccgacaccaggcattttctaaaggtgtgtagtagcctaaactgtgcgggaggccacattcaaattttaccccc

SEQ ID NO: 131401 - DNA, 265 bp, Glycine max
  Clone ID: PAT_MRT3847_89663C.1
acgcggacgcgtgggcggacgcgtgggcggacgcgtgggtgtcaatgtgggggacattttgggggtttggaaaaactgcataatcttattgcacaatgcttctatgtattgtttccatcgtattgtaaaatcatctatagcttgtgatccattgaatagtattgtttaaatattaaaaatttaaattgtactgtatatatctttataagttctatcttatatatatttggttgggtattattattaatttgatcgttttttattt

SEQ ID NO: 131402 - DNA, 221 bp, Glycine max
  unsure (1)..(221): unsure at all n locations
  Clone ID: PAT_MRT3847_89664C.1
tgggacgattactagaggtganaaacaattatctaagcatgtatagcgtgtattacattgagaaaaaaaaattgttgggtaaagagaaatggctaggtggtgcatcttggaggttcttgcccttgtcgtggttgacagtgcaaaaaccatgccaaatgacccaggtttggaggacaagaaaaccttccccgggtaggggtcccctggatttggaaaaattg

SEQ ID NO: 131403 - DNA, 200 bp, Glycine max
  Clone ID: PAT_MRT3847_89665C.1
aaaacacaaaaattctttcttggaattggacctttccaaaccctgggttgattttacaaactttagaccccacataataggacttactttttggaggacaccgattctagtaaagcgcccaaaaaggttaaataccttttttttttgggtctaaaaaaaaccacttttttttaaatttccccacattttttggggaaagg

SEQ ID NO: 131404 - DNA, 366 bp, Glycine max
  Clone ID: PAT_MRT3847_89666C.1
ctcatcacttggcataacatttcaaagagcgtcgggttctccacaacgtcttcaatgcacctctaacccattctcttctctcctccaaaattcgtaacctctaaaagatatccctacagtaagcttctgcgcatattccaccacctatttccaccgtaactaaactgtcgccttcacctactcttaactatgcaccactcacatcaatcaattgctaccatcatattgacacacttaagatatatccgttaatgcatgcaatcgattaaaataaatctgaatccgagtttaactcgacatcattcgatgctaagtaccatcatgttcaaaggaagaactaccgatcttcaatatcaaaattccaca

SEQ ID NO: 131405 - DNA, 247 bp, Glycine max
  Clone ID: PAT_MRT3847_89667C.1
tacacttctattcttcttaagcttgctactgagtttcgacactgcgtaccttaagtcttccgaattcgaagttaatttgcaagatggctaaaggaaaggctcaaaatcaccattgggggggtgggcaatttgacccttgaggggccaccaacatttaacaacctaaaaaaccttttttggaaaaaggaacttctaggcattccattatgagggcattcacttacggcctcggaggggaacaagaaaa

SEQ ID NO: 131406 - DNA, 374 bp, Glycine max
  Clone ID: PAT_MRT3847_89668C.1
cgggctcactcgtacgggaaaccaaaccataactcgctgatgtttaggttggagtgctgacaatctgactcgagccgctaaacaatgagcaaacagcaacagagttttgccgcgacggcggcggcgaaacggggtccttctccaccgagtagcgaccagattaaaaaaaaacgacgggaaactccgacaaccatactgtccctggaccccgacatcgtcaccaccatcttcgctttcctcgacatgttcgatctcgttcgctgctccctcgtttgtaaactctggaatgccatcgttgagtcccggtcgctgcgagaattctgtgagaggaagatgcacaagtcttttgctgaatttaccaaaaagcccctgag

SEQ ID NO: 131407 - DNA, 285 bp, Glycine max
  Clone ID: PAT_MRT3847_89669C.1
gatcctcccgcaacgccaagtggacggtggagctcattccggagttcgacaacatcatcagactcaagagctgtactatatactaccatgttgcagaagatacgggggatgccggtcggcggcctgcccgccgctgctcctcggcgtcacgggccgcatggtggtgcagcgcgtgcctcggcggcgcgacgccgccgccgggtcgtgagggagttattgggcccgctcgcgacggcgcgcaggtcaagctcaagacccgttacgggaactttctcagagccaacg

SEQ ID NO: 131408 - DNA, 371 bp, Glycine max
  unsure (1)..(371): unsure at all n locations
  Clone ID: PAT_MRT3847_8966C.1
attcgtccctttcctcccccccaaaaaaaaaagaaaaaaggaaaagctattctagcaatttttttataattgtcagtgcccataaacttttccactgtcttcttgttgaatctcggtggctgctttgatagctgttgtgactacactcaaagctccagatatagtacctcantaatcaaccagtaaagctacaagtaaaggtggaaccaacactcaagaagaatagaagattcacacgttaaagcaaagatcttctcaaagactaaaatataaaagcatatagtacctaaaaaagtcatagagttaattaaagcttaaagagcttattatattactataataaaacttaccaccctttacccttatattta

SEQ ID NO: 131409 - DNA, 181 bp, Glycine max
  Clone ID: PAT_MRT3847_89670C.1
ggacatgaggaaattatgtggcttcttcttctcgctcctcctccttgcctttgcttcccaggtggaggtgcagactgacggaagagtgtataagtgacacagccacgggttccatggcttgtgtgatagataccacaactgtgctttggtctgcctgaactaaggtatctccggtggcagg

SEQ ID NO: 131410 - DNA, 635 bp, Glycine max
  unsure (1)..(635): unsure at all n locations
  Clone ID: PAT_MRT3847_89671C.1
attaccgggtcgaccgacgcgtccgaccgcgagaagacgatctaattgggcagcataaagtagcaaagtcttgcaggccacaatgcaaaactttgcagaatctcatcaactttcagttatgtgttcttcttattcatctaatgttgatgtctttgacactggcaagtacaccgccaagctgctaagggttgaatctgaatcagaatcatatacacacaacaacaattttccaccaccaccaaagtctctcttgattgccactcctcttgaaggtggagatttccctcttctgctgtttctgcatggctatcttctttacaattcattttactcccagctaatacaacatgttgcttctcatggtttcattgtcattgcccctcagttgtacacagtggctggacctgatacaagtgatgagattcattctgcagctgcaataacaaactggctctctgaaggactctgcaagtttcttccaccaaatgtaagaccaaatttgagcaagttagcacttgctggccatagtcgcggaggaaaaacagcgtttgctcttgctctaagaaactaaacatccaactaatctcaagttttcagccttaatangagtggatccagttgatggaatggacaaa

SEQ ID NO: 131411 - DNA, 252 bp, Glycine max
  Clone ID: PAT_MRT3847_89672C.1
aaaaaaggggagttgtttgggggagggaaagggcaatattaactaacaaaaacacgcgcacctcctatcgtgtcaactagtttttatacatgaccaagggagcttgcattttcaaacttggggcattgttcaaggcaactcatacatagaaacattcttgatgtttttggacaagaagctaatttgtgaggggataattatttttttgcttggggccgtttaattacacccccacctctggaaaggaacaaa

SEQ ID NO: 131412 - DNA, 514 bp, Glycine max
  unsure (1)..(514): unsure at all n locations
  Clone ID: PAT_MRT3847_89673C.1
gacgagctcactaatcggagggcgaagcttgttaatattatttaaaggagagataaatgattgttttgaaagtgtacatgtatgtttttgagtttttatgtaaaaaaaaaataatgtatatcatgtaaaagggaacaataattttaaagatgaaaaaaaaaatacgaggggttaaataaatgaaactagaattaaatagagaaaggagatagttgattngctagagggaagggcacgagcataacaaatggaaaaggaaaaacatcaggcttaagggcacaaaaaaaaaaaatggaaaaaggaaggtaaggggaaaaaagaacaacagtgttttttttaaagagggggagaggaccttttgaaaaaagagaaagggccgccttaaaaaaaaggcaatgtatttttgaaaagaagaaaaaattgagggagctattattgtaaagggctacaggagaataaggaatttattttttaataacttgaagaaaagagatatgatcctggtggggattgg

SEQ ID NO: 131413 - DNA, 152 bp, Glycine max
  unsure (1)..(152): unsure at all n locations
  Clone ID: PAT_MRT3847_89674C.1
gaaccgcntgcggagacccacgctcgacccacgcgtgcgacaacacatcacgagggaacacgacagattgatatgaagaagatcactgaggcttaccggctcaagacataagattatccttctgaagctaccaacatttttaacatctatgc

SEQ ID NO: 131414 - DNA, 538 bp, Glycine max
  Clone ID: PAT_MRT3847_89675C.1
atttgagttccaaatttgagtacctaagaaggaaagcgcacgaaaagttaaagtactcaaaggattcgctgctttattcatgcacgtagtgtagtatttatagactattacaatagctaatatcctttctgttatgacagaaagatcaaggtttggtgcttgtctcgtacacttatacgtaatcttctagatacttgggcttatatagtgacgacacgtgtgggtttgttgcatggcgctgggtcacgtactgatgcatggtgctgagtcgatgggtcctttgttgctatcacaatccgaccttgtcatctgagagaagcatatatatagacgactaaagcttgaaggaaaagtctttaagagatcagcctcgaggctcttccggtagatggaccaaatatgaatcttgtgtgcatcactagtttgcaggtaggttaaattttgttgtcagcaccttcttgttttcaacatcttgatgttcatttaactggagctagctagtgaatgtgaaccgatatttgaggtgaatgggaaaatt

SEQ ID NO: 131415 - DNA, 486 bp, Glycine max
  Clone ID: PAT_MRT3847_89676C.1
ctttttttttttttttttttttttttttttttttttttttttttttttttttttttttttttttttttttttgggggcccaacccaaaaattcaaaccctatgaaaaggggggaggggaccaaagggaaaaaaaaaaaaaaaaaaaggaaagtatctggaatcggaaacaaacaaaaacaactttaattaaaacaacccccaaaaaaacaattggcaaaaacccctaaaagggcattgaagaattacccccttgcccattgaacttgaaccccactgaattccaagctgaaattgaaacaaaccccttgcataaaatggcgcgtcggaaatttttttaacaacaggctttttcagggaagctaaaaatttcaccttcagggcttggaaagtttaaaaccaaaaactctgggaacaaaactctgggagggtttcgggggctttagttgcccataagccctcaaaaacagaggaggaaacgtggtccc

SEQ ID NO: 131416 - DNA, 1351 bp, Glycine max
  Clone ID: PAT_MRT3847_89677C.1
ggccgtgtcggacgcgtggcattcaggcaaaacctaaccacagagaataacgttggtgaaagaacgacgatgacggacgcagcgtccgattcacgaaacgatgcagccgtgcaagccaccaacgacgacgcttccgccagtaaattgtcatgtgtaaaaaagggatacatgaaagatgattatattcatttatttgtgagaaggcctgtgaggagatctccaatcattaatcgtggttactttgctcgttgggctgcatttcggaaacttctctatcagtttcttgatgttgagaaaaagacagatggagatgccccaattaagaagcagatattatcacttggagcaggctttgacacaacatattttcagttgcaggatgaggggaaaacaccatatatgtatgtggaagtggattttaaggaggtaactagtaaaaaggcagctcttattgagaattacagtcaattgaggaataaacttggtgaaattgcaaccatatcaagagagaaaggagaagtggtcagtgctcactataagctagtccctgcagatttgcgtgatatacaacaattaaataatattatatctgttgctggtatggacccaagtctgccgacttttataatttcagaatgtgttctgatctacttggatccagattcaagtcgtgcggttgttggttgggcttcacaagcattttcgacagcaatattttttctttatgagcagatcctcccagatgatgcttttgggcagcagatgataagaaatttggagtctcgaggttgtgctctgttgggtatttatgatacaccaactttacatgaaaaggaaaagttatttctggaccaaggatggcagaaatctgttgcatgggacatgctgagaatttataacgattttattgatgctccggaaagacacaggattgaacgcctggaattgtttgatgaatttgaagagtggtacatgatgcaggagcactactgtgtggcttatgcaatcaatgatggcatgggtctttttggtgattttggttttgttaatgacaacaatgtgcttccttcatgatgaagcactaggatacactcccatagcatatatttatgttatatttatcttcccaattactatctgtggttgtaagtggtaactgttaatacagaaagcacgtgccagctcactcttgttgaggatgcctggtaaaaaaaggttttcggaaacttgttagatattgtatccgaatttagccaaatgattgtagatgttgtattaagagattactttaattattgattatagattattttttatatcagaaaaacccacgcgtccgcccacgcgtccg

SEQ ID NO: 131417 - DNA, 292 bp, Glycine max
  Clone ID: PAT_MRT3847_89678C.1
gaacgaaagacgggatttaaattatggcggtgataacataaggagggatgggtgttacaaactccaattccctttactttgtcaatttacatatactcccagatgtggaatgttattgtgtgtgggataactcttatagccatctaaacttttttcatgacaacctattttttttggtccaactatgatttttggtttttcggagttacaaaaaacaatgttttaataaagaatttctttatccttattaatcggttatgaatattttatatttttaaaaaatatttaaacc

SEQ ID NO: 131418 - DNA, 295 bp, Glycine max
  Clone ID: PAT_MRT3847_89679C.1
acggctgcgagaagacgacagaagggagtatagatagattgattgacataacatgctcattagtaccactacaacaaataaataaattagtaacgaaatttaatagtaaaaattacacttttttctttattaatactaggtcacaaaaaatttaatgacgatttttaaaaaattatatataaattatttagtgataactaattaatgttattttgtgttgtagtgatatcaatcttacatgaaacgttttggtgctgcaagaataatatgttacgcaccatttgacatacaattt

SEQ ID NO: 131419 - DNA, 440 bp, Glycine max
  Clone ID: PAT_MRT3847_8967C.1
taaagttaagaggtagaatggcccccctcctaagcttgtattctttatagggggcgcgcttttttttttttttttttttttttgtgatgggaagtagtgtctggtagtgggaggtgacggggtaggatttagagtcgctgaggttggagggcaaggtgtcggccgcggaggagaatgtatgcatgacttgcgaagccagcgagtaaaaagctaacaagtacctagggcaggcagaagatcagctatgatcagatggtaaaggttgaccgagacgctaccttgtcgatcgcaaatattgcttccacaactgctcaacgatcggcctttgaaactctataaatttcatcctttgtgttgatagcatacctgtcggatgaccattctgctgccttaataagttcatcagtcaagcattctgcgattgcgcttaaaatttcaga

SEQ ID NO: 131420 - DNA, 527 bp, Glycine max
  Clone ID: PAT_MRT3847_89680C.1
acggctgcgagaagacgacagaagggagtatagatagattgattgacataacatgctcattagtaccactacagcaaatagagtaaattagtaacgaggtttagtagtaaaaattacacttttttctttattaatactaggtcacaaaaaatttaatgacgatttttaaaaaattatatataaattatttagtgataactaattaatgttattttttgttgtagtgatatttactttaaatgtaactttattttggtctaacaataatatgttacgcaccatgagacatacaatccataggacacaagccatctctagtagtagactgagctaattataattccagtcagtatatatattgccttgtcggagaaatgcagaaaaatcttgaaagagatatggttggtggttggaacaaagaatgtctttgatatcttcagttcttcactaatatattgaacttttcactcaataagttaaggagtggcagcctagcttacatccttgtacattcaatttcttacaga

SEQ ID NO: 131421 - DNA, 391 bp, Glycine max
  Clone ID: PAT_MRT3847_89681C.1
gactgacagagtcaaagtctctggttgtgttcacttgttatgtttaacgcttactggcgtcgtggcacgctctaagcgttacaatcgtgggtctcttcgacgaagggtgccatgcaacatgttgccacgatggtgcaggtttgtctgcaacaacttctggtggtgtgcattatgccgaccgttattgtcgtgtttgcgttgctcctctttacattaggatgatgccacaacagttccgtccttttgatcaggtagctccccttctagaagctggttcgtgaaagtgctcatgacttcaacactgatctgcgtttccagagccacgccgtgcttgcattgctagaacctgctgaggcataccttgttgggctctttgagggacactaactgt

SEQ ID NO: 131422 - DNA, 285 bp, Glycine max
  Clone ID: PAT_MRT3847_89682C.1
acacaccttgtaagaatttttctctcactccgattcaggttccaattccttgaattgacggagaagcaatctagaaaaatttaacatggaagtaaagacgaatgagtttgggcacttcgacgtcgtttcggatgactcagatcaccactttctgggttcaaataatggaaaatgcttctatgattcaaatagtaaagtctacagaaccattatgaaagagtggaaaatcctggagcaaagcttacccgaatcaatctacgtgcgtgtctacgagcgacgcattga

SEQ ID NO: 131423 - DNA, 105 bp, Glycine max
  Clone ID: PAT_MRT3847_89683C.1
tgatgattgatttaacacgggctacatgtatgaacactaccatacttgtacctgatgaaccaaccaatcgccttgattaggaaggtagtgtgtggctacgtgaga

SEQ ID NO: 131424 - DNA, 410 bp, Glycine max
  Clone ID: PAT_MRT3847_89684C.1
gctgcaaaaggacaacaaaggtcctatgagtcaaggaacctcattagggttaacaattcgcccaacgtgtttctcttccttttcctcctcatgtgagatagagataaaaaaccctaacacatcgacataagagaaagaagaaatattaacatcgatttttataaaaaaaatcaatattaacatataaatacaacatcagttttcaaacaataccagttattatgaaaattgatgttaatatcgacacacaacattagttttcaaaagaatcgatatcaacgaactcaacttatttataattatgtcaccgtattttgtaacattgatttttattaaattgatgttaaaatatcgacattaaatgtatattttttagtattatataaagggttgtatcaagctagatcgag

SEQ ID NO: 131425 - DNA, 223 bp, Glycine max
  unsure (1)..(223): unsure at all n locations
  Clone ID: PAT_MRT3847_89685C.1
gcgcgttttgggtttttttttttttttttttttacgggaagaggggctacaacataagattattttgcggaatgggcatgcgtaaacaattttattgggcacacagtgacacaaagagagccataactaaaatttctaattatagaacataatctgcggggggaanggagttagcctgataccacaacacctatttcccttctgggggcttctcgcaaccgga

SEQ ID NO: 131426 - DNA, 442 bp, Glycine max
  Clone ID: PAT_MRT3847_89686C.1
gaacaaatggaatttgaaaacaaagagagaagtaaccctgatttaaatccaaagggagacagagaagatcaggacagaattcaaagcggtgaaaatgagaacttcaacagaaacaagtttgaaaagaatagagacattcatggcccaacaaaggtcgacttgaataagaagagtggtgaccctgaaccaatggactctggtgcaaagtttcacaaggtaactggtgaaggtgctgaaagcagctttggaggcggcttgggcaaagtagatatcagtggtgacttgggcggcgcaggtgcgctcaagggaggataatagtatttgctgtggattgctaggtcggtcctttatatatgcacttgcagctcattgcccgtgcaccctttttgtaaataataacatgtacataatacactgagagctgatgcaaaaaaaaaaaaaa

SEQ ID NO: 131427 - DNA, 334 bp, Glycine max
  Clone ID: PAT_MRT3847_89687C.1
ggatcaggtgaggtaggcaaaaatgaatcttgaccatcctcgaattatagatgtgcagaattatagctaataatggcactggcattgtgtcatgaagacaaaaaatgactgggaactgcacttcaagcacaacaacaaaccgaatacacatacatatttccttggaagtttagattgctggaggagcttgaacgtggtgaacaactcattggagatggcacaattagctatggaggacatattgacccaactgaagaaggaaatggtcgcaccttggaggacataccttggatcgaattgcatatttgttgtatgcaatataagagttaatgct

SEQ ID NO: 131428 - DNA, 272 bp, Glycine max
  Clone ID: PAT_MRT3847_89688C.1
gccacgcgtacgggccacccaaccaaaccaaacggcgataagataagcccttgctatatgtaaccagagtttctgccttaacactgcataggaggaagtgattatcatcaccgatcatgactgctacagcttactagtttccctgacctgccagagcgctcacttcactcgcactctttagaccatacataagcaagagactggtgaacaggaacagactcgttggacgatgttggggaggctagcgaccctggtgcccgaagatggaggaa

SEQ ID NO: 131429 - DNA, 689 bp, Glycine max
  Clone ID: PAT_MRT3847_89689C.1
caccgttctgatgtttcgttcccaacgcttcaaaccccttctctatctgaagggactcacaacaccaccatcacttcaaaccccgaaacccaattctccttttccctcaacactctttccgaaacacatctcactcacttcacagcaacactcatttgcggcttcctacctcgtaaacaccttcggcctctccccggaaaccgctctcaaggtctccgagcgcgttcgcttcgacacccctcagaagcctgactcagtgatcgcgttcttcacaagcaatggattcaccgttccccagataaaaagcatcgtcaaaagggtacccgacgtgctcaattgcaacccccacaagaggctctggccaaagttccaatttttactctcaaaaggtgcttcttatccctctgacatcgttcacctcgtgaataggtgccccagaatcatcaattccagcctcgagaaaaacgtgatccccaccttcgaattggtaaaaaggttccttcaatctgataagaaaactattgattgtgttttcgctaataggcatttccttaattacaacactgcctctgagaatgtgaatttattgcttgatgttggagtcaaggactccagcatcacctatttgttccgtaggagggcttctatactcttgtctaaggacttgaggaagaacattgatgaagtta

SEQ ID NO: 131430 - DNA, 441 bp, Glycine max
  unsure (1)..(441): unsure at all n locations
  Clone ID: PAT_MRT3847_8968C.1
atattatntttttttttttttttaaatgcttcagaatcttatcaacattctttcattaaccttgaagtttatcattatattttcttatcgtttcagtcaatgattggtcatggtcttggggctgctggtggtttggaagccatagcaactatcaaagccataacaactggctggttgcatccaagcattaacctagatgtaacctcctgaaccagaaattcatcctatcctattaatcatatgttacattgtgtaacttttgttgattcccacaagatcttaatattaagtgtctaattttctcacttttccgcagaacttggaggctagtgttacaattgacactgtccctaacgttaagaagaagcatgaagttaatgttggtatgtattttctcttcaattgaatagaggtacccttctgtcgtcttctcgctcgcac

SEQ ID NO: 131431 - DNA, 570 bp, Glycine max
  unsure (1)..(570): unsure at all n locations
  Clone ID: PAT_MRT3847_89690C.1
gtctcaacaatactagtataaaaatttagaacaaaaaaaacaaaaacaaatgatagctgcaaatgctaaccaccaaacactagaccgctatgatcaacatcatcatgataacgatcttaattcattgcagtatatgaaattccacgctgcaatgattcacaagttgagtatactgtttactctctcacaccccacgcgagatcctattgctcagaggaacaaatccacgcctccacggcaccttccctaggggaatttccattaccaacattctccaagttcttctcatggttcaagctgctcgacgcagaaaccgacatattgagcttgcagccaccataactattattattcccaagatctaagcacctaaacggatcttttctccctcctgcatcaccgtcactcctcagaaacatgccctcagaaacatgttcatgagcacccagcagatcatgcgcatcnnntgtgggcatggtggataaagactttgcagcaagccctgcagggacaagagagtgaagagaaggagaagggtggaatgagggaatggagtgaatatcttgtatg

SEQ ID NO: 131432 - DNA, 138 bp, Glycine max
  Clone ID: PAT_MRT3847_89691C.1
tcttatggggatctttattcaagttcgcaccagattttcctcccggaatgttaggccgtggaaaaggtgggaagggttcgggaaagggaggagctaataggcacagattggttcttagtgacatcattcaaggaatca

SEQ ID NO: 131433 - DNA, 274 bp, Glycine max
  unsure (1)..(274): unsure at all n locations
  Clone ID: PAT_MRT3847_89692C.1
aaacagttcctgccttcattttacangacatgatatcatgagatcaggtantatgggtttatagctttgattgtngaagangcatggcttgtntttctcnaccttgcaatactgggtcatttgctaccccaactntgactcngagaagatatttgggtgtgtgtggaggtntgtgcactaggtcattcgtcgttanttctctagggtgtaaccngtgctncaaatttcnnnatgagttngtgtggaacangnagctagggnattntggtagtat

SEQ ID NO: 131434 - DNA, 683 bp, Glycine max
  Clone ID: PAT_MRT3847_89693C.1
ggctcgagcaactcccctcttttattgccgagtccaattgcatcatttactatgacttgtatctctctctccctccctagtctccatatctttctctctctctcattccattgaaattgatggcaagagggggtggactctccattgattcagatccaattgggagcttcctcccccacgagccaatagtcttaaactccttccctgaagacaacaaagacaacaacaacagtcgccaacaacacaagtggaaacttggtacaaacatggatgccactgttagcagaaagagttctccatcatccacttctaacactaacaccaccatccccttccaagaccaccttacctctgatgacaagatgcctcacctcgacgagatgaacttcttccccaacaaaagcaacaaggatgatgacgatgacaacaaccttgcctctgcctccacctctgcacctccctcccttgaccaccttcatcacacacatgatcattcctccgctatcttgggattgaaagtaaacactggtttgaatcttcttactaccaatgcaagcagtgatcaatctatggtggtggacgatgacatatcccctaattcaggagacaaacgagctaagagtgagatggttgttcttcaagttgagcttgagagaatgaaggtggagaatcataggctgaag

SEQ ID NO: 131435 - DNA, 371 bp, Glycine max
  Clone ID: PAT_MRT3847_89694C.1
atgaagtaccacgtactatgcctggttatttcagttgagatgcttcttctagcatgaatattcaggatcacggtaaatactacactgaatcatcctttaccattgatcaaatatctgcctggaatgcacatgcagaatcagattccgtctgtctacaatcacaccacatacttattaggcaagatcagggctaaagaaacataattgagtacatgaactgtacattgatgtctacatgtagaactcgggagcatgtctagagggcagagttgctggcttgcctagtcggaaagttcacggcagagatttcactaatgaagcatggggatatcatgttgggttgctaggagaaatattgcaaatctacacag

SEQ ID NO: 131436 - DNA, 754 bp, Glycine max
  unsure (1)..(754): unsure at all n locations
  Clone ID: PAT_MRT3847_89695C.1
ccggaattcccgggtcgaccacgcgtccgaccaaacaaatgagggctctttatctgttccattttatccattgctctctgatctctccatttctcatactacttattgtactttctgtgttcattggtactatatgttttgttgcttcacacactctatagttccatgttagcaaaatggttcacttcatattttgttatccaacatgccaattgtgtttcttgttataaaaaaattgaatagcttcaataaatctatgtatgattatgccacccttttggaaattttagagaaaaaagtgaaatttggcaccccatttgtgttgtctgacaataatggagcccaggattaagtattttcttcttctaagagtctttcaaattgattgaagggacttttgtgaattttgccagaagacatggctactgcaaatggtggaactggagctgagaagcacaagaggaaaactaatgatccttttcttaagcaagggggacaccaactcatgccaagatcacctagattgtgcacacctattcggaaggaatggccggagagttttccgaatgacaatgtgattggtaatgaggataatggtttgaatagatatattacttccttagctggatctggacctcctggtactagtttttgctcctcaatagattctgaacacattgttgaagagttgcctgttangaattataagaacccgaattanttgactattgagtctaagtataatagattgagt

SEQ ID NO: 131437 - DNA, 246 bp, Glycine max
  Clone ID: PAT_MRT3847_89696C.1
tagaaaaataaacgtatggtatgaaatcatacgacgtatatgtaataattatgtgttgccattttgagtatatatatatatatatgtgtgtgaaagagaaaaatgtaataaataacttgataagagagaaaaatagagataaaagaaatgaaataaaaataaatgagtgtatggttatgattatgtttgcacaccatatttcaggggggagtacacgtgattgcatagtttctttctgtcactata

SEQ ID NO: 131438 - DNA, 457 bp, Glycine max
  unsure (1)..(457): unsure at all n locations
  Clone ID: PAT_MRT3847_89697C.1
nagatatnaacaaaaggattcgcacagtacttgcgaatggtttgaaaattgggnaacacactagagcggaccctagggcagcccttttactggctgaaaaaaataggggcacccatgaaccagtgggaaaagacccttctaatcctaatgttgcgcgacttttagagtactagaagagtctgaatatatggttgatgcgtgtcctcacccaaaaattaactattatcccccaaaaaagccactaaaataccccgcagaacaatgaacaatctttgtaaaaaaacctagaaaatccttttccccagttgtggggagaatctttttcgttttttttggggacgcccgaggccatttcccgattttacggccctttggtggcaactaaaaacctttttttggggggcactaaaaaaaaaaaaaagggcggaagttttacaagtttacaactgaaaaacct

SEQ ID NO: 131439 - DNA, 731 bp, Glycine max
  Clone ID: PAT_MRT3847_89698C.1
gcaacacaacacgcgtccgattcaaagaccatgccgtttcattctggatttccttcctccttcccttgtttactttgactttctctctgcaacttcgcaggtcactgaagccaccttagttctcaatccaagacacaatctcaacatctaagtaccacttcttcctcttccaaatcaaagcttgagttgaagcaataagtttctgaagagtatcacaatttttcctcaattgggcatcaatcttcatatgtagctatttctgctcttgggggaaggaatcagaatgaatgccaccaacttagtctgaatcttcagctgaatctcaggtaaccaaccataaaaattgcaactttcatttgggtgttcttagtttatagtcaatacagctggatctaaccaaagtcaacgcatctttcttcctcgttcgtctagctagccgtagattcagttgagcccggaattctgaaactttactaattttgggcacagtagctgtggcttaggactatttgtgattgattggtgttgattgatgaaaaggaggaaaggaaaaagtgacctttttttttaatatttcggatcctaaattttagaagctggatttgatctttctgtttctgagctatcaagatgggagggcaatcaagcaagatggttagtgttgaatccccgacacccattaaaatgggtacccattctctgtatgctgctgatttgagctcctatgaagc

SEQ ID NO: 131440 - DNA, 238 bp, Glycine max
  Clone ID: PAT_MRT3847_89699C.1
ctcacagcacactcagatctctcttctctttcttacaattccattgttgtttggttcccttcactctcacaatgcgaatactcgtcctactctctctcgacaaccttctcctcttctcctccatctctcccaccttctacgaccacctcgctgacgacgaagacctcagcttcctcgtcgaaccctccgccgcgccggagcacgactatcactacggcgccgatgactccaatttcgg

SEQ ID NO: 131441 - DNA, 157 bp, Glycine max
  Clone ID: PAT_MRT3847_8969C.1
cacttattttaaagatggtgggagtcattcctggaaggaggtgctgaatgagtcattccctaaccctgttgtgactgttaacatcgatccggtgccgaatgtggtgcatcaggattttgttgattttgtcttgaaatgctatcattaattttacccg

SEQ ID NO: 131442 - DNA, 445 bp, Glycine max
  Clone ID: PAT_MRT3847_896C.1
gttgctaatactttgccagggaaaaactggattgctaagggtgcacatcatccccggaaaaaatgcgtctttaaacttccaaagggtttttggaccttaaaaaaattatccgccccttgattgccaaaagatacttgcgtggtccggggccactaccacctaaaattttgcacttaacaaacccattttgggcctcttttttttaaagaggaacacaacgtgtttttccttttttagcggccctggggtataaaatcaaaaaaccaccccgcagtaaaagaagggggcctttaccaggggcgctaatcgatgggagaggcccccccacccggctaaaaggcactggttagaccacttgcgatgaacagttcgcattattttttgaaggagtaatttccaacggcgcttgcccactttgatttgggtttgacccaaatggggaccc

SEQ ID NO: 131443 - DNA, 434 bp, Glycine max
  Clone ID: PAT_MRT3847_89700C.1
gatatataaagtgttcagcccaccctatctctatttttggtggattggtgacatgcaagccgaaacaagttaaataagttggtctagtatgtttcttcatccttaatactaataacatcctaatgcaaaagctcaatttaaatttttaactctctgttcgtctcttttaatcacatatgatttaagaatactcactaatttttactccaaatgtaaaaacttgagttttaacttacttttaaagggtacaccattttatctctctgttcacataagaactttcattttaacttaaaaatatttttttgacagttaaataaccttggtttttagttatttatataaacaatgtctaacagaatttactgatttgctccaatgatctttttaaatttcttaattttaagaagtaacttaagcaacttcaatggagt

SEQ ID NO: 131444 - DNA, 266 bp, Glycine max
  Clone ID: PAT_MRT3847_89701C.1
aattcggctcgagctcgagccgcatatgccaacacatgttaacatgcatagcaaacaagaaacttacgtcgaaaagaatgacaattatgtctcaaaaccttggacaagaagtcccaaaatatcatattatcttattccaatgcattgttttagtttcttgttttgtataaaagatcgcttggtctagattagagttgagaagaattataaggatgacaacatccttcctatctagttttttaatacaaatgcatccttgaagaccc

SEQ ID NO: 131445 - DNA, 402 bp, Glycine max
  Clone ID: PAT_MRT3847_89702C.1
ggcgccgaaagcgtttgctttatattaattgggtcaatctattttaaaacaggacttgggaagaatcattaacttacagaaaattattacaataccatggaattctaacttacagaaaattttattttggaacttgctataaggggttgatgctataagggggtgaaaagctcgtgaccatccaatccataaagaggtttacttctgcaggcgtacttattcaagaatgtgagcgcacgggtttcaacttaaatgccgaatatacatgtgctctggaacatctgaaccaagactatttgcacctaagggtaattgaagctatcacttacactggaatgaaactagaacttgttgatgaatctgtttgtcaccggcggccacaacattaaaacatgttgggat

SEQ ID NO: 131446 - DNA, 178 bp, Glycine max
  unsure (1)..(178): unsure at all n locations
  Clone ID: PAT_MRT3847_89703C.1
ctttctgatacgagtnaccttgtccttcnaacatgcacacncctgggcaccacaaattcctgcaangctncctgcgcagcacctggtgaaaatttgggcatatctgtttcattagatttattgtnattatttntactaaagtgtttaaaagaatttccctaaacgttgtttttatttt

SEQ ID NO: 131447 - DNA, 234 bp, Glycine max
  unsure (1)..(234): unsure at all n locations
  Clone ID: PAT_MRT3847_89704C.1
tacggctgcgagaagacgacagaaggggatagtagtcagcggagcactatcagtgccagtacatgaaggaaacgcaacaatcatcgatgtgaacataaataagagtggtctgcatctgctgtcagcagctactaccttggtccattggaaacagcccattactcaaatcttaggatggatcaangatggaagagttcagatgcaaatcgtacggtgacggaaggatgcagattg

SEQ ID NO: 131448 - DNA, 411 bp, Glycine max
  Clone ID: PAT_MRT3847_89705C.1
agcgaatgatatactatgtaacgtggatgattattacatactatgaacacttgaacggtgactttaatgaacaagtctaaagcaattatcaaaaatatgcttcttaacttaccatagactcttatatatcatattgtcacatgaacatcccatatcataattccatacatcaacaaatctcgcttgaactttatcttatgaatcatctatgaaatattcattgcatttatgcatcatcttacactcgatatatccacgaaaacggtaagtataaatgagtcgattcagagtacatccatctactaacaatgctccaaataattcttctgcctctctcattcttacatcttcacaaagaccattcagtaatgcagtgtaagcgacgatatttaagttaactgcaacctactg

SEQ ID NO: 131449 - DNA, 321 bp, Glycine max
  Clone ID: PAT_MRT3847_89706C.1
actcttgcgtatgtacctcacattgtgttcatatctttacgtcgactcctaaccacccagaacaggatccattcgttctgcaccatattcaaaaagttattaagccaaatcgatatataccgttacgagactatccaactgcagaccttcctcatgaaaggttctataacaactaacaaacgatcagtcataacttttatcacagaagttatggaactcttgcttactatacatcaactgagacctcgacatatatattcaaacaacttacttactatgttcacacacatcatgtatactgcaaacaagttgataaccctt

SEQ ID NO: 131450 - DNA, 1706 bp, Glycine max
  Clone ID: PAT_MRT3847_89707C.1
atttcattgccttcttatgcttatgttgtgtctgctttcactgctttttctggacatcagtgatctgaatgatttctggtgttggaacagacgatagttcacttgtagcacaacctggtacggctcgaggttactggttgtattatcagaatgttgaaattatgatagatttaacggctgcgagaagacgacagaagggggatgttactttttatattatcagatactatttgtgaactacgtgtccaaaaccgaacaacacagtgttaattcagcaatgcttagctattagcacactacctgcaagaaacatcgccaagagctgataagaaaatgcagttatatcatcatccgttggatttggacagccagagggtgagatttgcattggaggaggagggtgtagattatacatcccaccatgtcaatccgataactggcaagaacttggattcctctttcttcaagatgaatcgccatggaagggttccggttttccaaaatggctctcacatcatttacaatactattgatataatccagtacatagaaagaattgctgtggtttcctcaggggttgagagtatcagtgccagtagcagggaagtggttgaatggatgcagaagatacaagactgggaccccaaaattttcacactttcacacatacccgagaaatacccactttaatgttccaaaattcataaagcaggtgggcgattgctcgaatgtcgagtcgcccgaattagcaagtgattaccataggaagttgaaagaagcctatgagactgaagagaaattgaaagaaggcagatgttttgagaaggagcaaggagcatttggttatactgcttgatgaggtggagaggcagctgagtgaaacaccttatttggcaggtcaagagtttaccatggcagatgtgatgctcattccagtattagttcgtttgaaactcttggatttagagaatgagtacataactggaaggccaaacattgctgagtactggattttggttcagcaaaggcctagtacaaaaaggtgaattggtaggtacttcaatggttggagaaagcacaaaacacttctaaaaacatggttcttagttcgtattagaagtttgctgaaaaggtactagtgcagtacttgtatatttccaaaaggaggttgaataaatgaatataggaaacaaactttctgtgtatggtaaaattaggagaacttaatattatacaacgttctttgtttctgttgggaggaatggtggtgatgctaggtgctggtaaaagatgggtaaatttctttggattctatgcaggggaagggatgcttgtcaaagtggccaggctgcaaaagattttgtggctgagtattgaaacaattcatgcattgcaatcttcatctatcaaaagaattaaggaaaggatagtatgttcatactgacattggaagtacagggttactgctgcttatatgtacattatttctgatacttgtaaatgcaatcaaagaaacagtctaatgatatacactttcatgctttgttctacgaacagattgataaattccaagtttcagtttgaacaatgactagagaccatatatcattcactctcactgatctgtctctatgtaacattaaattgtagtgatgtatggttattgacccggtcaaaatattgagtctttgatttactctgccaaa

SEQ ID NO: 131451 - DNA, 1186 bp, Glycine max
  Clone ID: PAT_MRT3847_89708C.1
ccacgcgtccgtttcaatcctgttgtcagtcgaagttttaccatgtccttaacaagggattgcatatgtcctatggtgcttacccgtggcagtgatcagcttccagtcagtacgaaatttgatatgagaagtgatctgggtgtggtaaggaattatggaagactcttattggaaatggcttcagttgttccagatgggattgtatgtttctttgttagttactcatatatggatggaatagtcaatacttggaatgaaaatggaattttaaaggaaataatgcaacataaacttgtctttattgagactcaggatgtggtagagactacattggctcttgataactaccgcaaggcttgtgattgtggaagaggtgctatctttttttctgttgctaggggaaaggttgctgaaggtatagattttgatcgacattatggccgactagtaatcatgtttggtgttccttttcaatacacattaagcaagattttgcttgcacgtctggaatatctacgggatacatttcaaattaaggaaggagattttctgacttttgatgcattgagacaagctgctcaatgtgtgggtcgtgtaatccgttcaaaggctgattatggaatgatgatttttgcagacaaaaggtatagtcgccatgacaaacgttcaaaattgcctagttggatactatctcatttacatgatgcccacctgaacttgagcacagacatggctttgcatatagcacgtgagttcctcaggaaaatggcccagccttatgataaaaccggtggcactggcaggaaaaccttgttgtcccaggaagacttggagaagatggctgtcagtggcttggatgatatgatgtattgaggcatgcctacaaaattttcagaaccggggttgctttcatctgaatattaattccatatgcagttctcattttcacatagatatagaggaagtgtcattttgatgagaatatgatttcacggagcaattcataatgatgagaccccttgtttttagcattgaaatctagttgaggcttcgatcttaagttattttgttttttttttggctcagcattaagttattttgtattacttattgaaatctagttgggtactattgcatgcttatcctgggttccattatttatcgtatttatcattttagtttgttt

SEQ ID NO: 131452 - DNA, 535 bp, Glycine max
  Clone ID: PAT_MRT3847_89709C.1
gtagaattattatgttagattcagatcaccattatattctaaatagataatgaatacaatgaacacaatctaattttaatcatactaataaatataatttagaagattacttaaagataaaataaaagcatttatccttaatttttatgcagctaatcttctaattttgtaattaaggacatcgaagacacctttttgagatacaaaccaagctttccattcatcataagttaaggattctggatcatgtgcataattatccattatatccccaattagatcatcaaaagcgttatcaacttcgtcttcatcgatttgactgattttatcatttagattattcatagcaggatgttcaaatctggtggctctaaaaacttggaaaagacttcctagaactgtattgagatcctctctgtcaacttgcccatcatcgctttgatcgaataaactatagatgaactctaatctttcattattatctcctcttgctaatatagccatagcctgcatatatccttcgtaatcaatcata

SEQ ID NO: 131453 - DNA, 370 bp, Glycine max
  Clone ID: PAT_MRT3847_8970C.1
caggaattataatggcttgtctgcctttacccaaccatggggggtctgcaaccttgcaaactatatggccttttctttgacaaaaaattctgctctgctcttcctaaccacgtggtgctggttggtctacacttaccttcagcatgtaaggtgcatatactattttactaaatattgtaccaatgtcctgtattgcaccctactgcttgtgaattgttctacataatcctattcttttccatatacttgaatgctatgattgtgcttattacttgttaatgataaaacttttatttttctactctctcttacaagtcaaaaaaaaacattatatttttgcgcccgccttcttttgttttttttttccccg

SEQ ID NO: 131454 - DNA, 282 bp, Glycine max
  Clone ID: PAT_MRT3847_89710C.1
gatcgaatacatagttattttcatgattgagtttttacccactgacacaaataatgatcataatactacaatcattgcaagtggcaattgcttctggaacacgcttctaacataatattaatttataatctttagaatatgtggccatcgcggtgcgttccattgatccattctaacctgcattttattaattttaactaatcctcttattcctatattttggttaaacaaaattttttttctgcaggttaattttccattaatgcacaactttttgtcggt

SEQ ID NO: 131455 - DNA, 374 bp, Glycine max
  Clone ID: PAT_MRT3847_89711C.1
gggttgaaactttaaaactcatcttaagttaaaaaagattgacacagtgactatctttacacaaattaagatcctcccaatcccattatccgtagagacatgcccaggaaatcaaacaagccaggccctagtagtatgtgaaagtaatttttcagaagtaggctgtgtagcagctgcaaccagggcagatctagcacgtgttaaagaagcaataaccgatccaagctggagcttattgttgcgcccaaaacttaatctgtgctctatatatgccaaatcatttattaactgttcctcgacagctgaagggatcttaatctttaaaacaaacattggaccttctttggcaatattaatcaggggggaccccttcc

SEQ ID NO: 131456 - DNA, 388 bp, Glycine max
  unsure (1)..(388): unsure at all n locations
  Clone ID: PAT_MRT3847_89712C.1
gggaggggggaaagcagcgaagggcattttnnngntncgcggggaacaggaatcgcggcgcgtgaatgtcgccggcaattaaacgctctttctactcttctggccttgtcaatgcgcatataacataggaaaagaaaaagaaaaatgcccacagagagagagaaaagaaaagaacgaaaaaccaagaagcggcgaaacgatcgtgagagatgaacaagggcgaactgagcaaaggcccggggaggatcctacgcgaggcggaccaggcgagcttatgctgggaccgcgacgctaaggcgcacagggccaacttcgtgggcgcgagacacgcgcgaaccttactgcggcggacgtgccgctcgcccacgccgcggaaggccgccggcgc

SEQ ID NO: 131457 - DNA, 205 bp, Glycine max
  Clone ID: PAT_MRT3847_89713C.1
atcgaatgctaaattggactactttttggggacatagactggtgtatcatgtataactatgtggtcgcagacctcacccaatgtttttaactgggtgaaaccataatcgggcgtattatggtgacacacactggtgctgtctttattccatccaaacaaattactgcatttcgttgagaaacacatgtgagactttcttctggga

SEQ ID NO: 131458 - DNA, 462 bp, Glycine max
  Clone ID: PAT_MRT3847_89714C.1
ctttcttttttttttttttttttttttttttttttttttttttttttttttttttttttttgttttttttttccccaacaaaggcctaaaataaactttttcacaggttttatttggcaattttgggaaaaaccccccagggacccaaaattccccgggcatttaaattcctaggggttgcccatatttaaaaaaacccccaaagcataacagggtaaaaaagaaaaagggcttgggacccctgggaaatgggggtttaaataaaaaaaacctccccccccttcgggatttgaaaacccaaggttttaaaggggcccacccggttgagaaaatgcccccttgggaaaactcccccctaaggggcccgaaaagtggggggcccttaaggcccccgaaggaacgggtcctggttaaccggggcattcaatgaccccggggggaacccatctctatggggcaaaa

SEQ ID NO: 131459 - DNA, 656 bp, Glycine max
  Clone ID: PAT_MRT3847_89715C.1
agaaaaaataagcaaactgaagagcctgaaaaaaacatctccgtcagcttgcattgtttttcctcctaagatcttccggttgttggagaaaccattgcatgagtttcgggggcacagaggtgaagttttggatctctcttggtcaagcaataattatcttctgtcatttgaactcttatccaataatttgtttttatcattacaaactgtctcagagtttgtttgtatttgttaatgtattgtagtgacgtgcatacaattcaatcccgtggatgataattatttcattagtggatctatagatggaaaagtacgcatctgggcaattcctgattgccatgttgttgattggattgatatcaaagatatagtaactgcggtatgctatcggcctgatgggcagggagggatcattggctccttggctggcaattgccggttttataatgtatcagagaatcgcttgcaattagattcccaactatgcttaattggtaaaaagaaacttccaggcagagggataactgggtttcagtttcttccacaagattctaacaaagttatggtctcctgtgctgattcacaagtcagaatccttgatgggtttaatgtgattggcatgtacaaaaaccttatcacagggagcccaatgtgtg

SEQ ID NO: 131460 - DNA, 201 bp, Glycine max
  unsure (1)..(201): unsure at all n locations
  Clone ID: PAT_MRT3847_89716C.1
gtggaaaactccggaggtcaactcaagagtaagagagagtaatgagcattttattgtgtctcacacactctttgaattcatcctcctaatgaagacgactcttcagcctgattcttttcattgcgatccctgtgaagagaagattattagcataaaccctgatctatgtttttcttgtgcagggcctntggttaaccttcc

SEQ ID NO: 131461 - DNA, 799 bp, Glycine max
  Clone ID: PAT_MRT3847_89717C.1
gtccgaggctgggaccttagagcgccgtcctttttaatcaagaaacaaactagataaattgttatttaaattgctatactttaaccctttatgcataaaatgtcattgggatgtagctatttgtaattgataaaaaggaaaatcaaatcattcatacaaaaataaaagaaatgggaatataaaaattaagggctattctatagcaccccaaaggtttggtatccctgctaagttgaaggcatccttattggctgttggctgactcttggatgaattttgatacacagtccaaaatgcagaggcaccaaatttttgggtacatgttcaggttatatggcagccacactattaatgcttagtcccaaagctccaccactttttcttctttcttgactcacttgaaggtatatctccttgaggatagatggagttgtaatgcacctctgcccaaaaactaaggaaaatcactccttttggcttctcaaaatgaggaagtatctctatgcaacaggtgtccttgaaagaagttatcacaaatattctcacaccatacgaatctgcagctgcttgaagagtgacatgatccccccattcaccactcttagacatcttctgcaaatattcgtcatattccatgggaacatatccctcataaatctctggatgtattccatgctggtacaccacttataaacttccatatgagacttcatcttgttcgcaatataattgatcagacaacgcacgaaactgacaattaccatcaccttgtaccatatgctccacaaagtcatataac

SEQ ID NO: 131462 - DNA, 465 bp, Glycine max
  Clone ID: PAT_MRT3847_89718C.1
agaaaaaataagcaaactgaagagcctgaaaaaaacatcagattcagcttgcattgtttttcctcctaagatcttccggttgttggagaaaccattgcatgagtttcgggggcacagaggtgaagttttggatctctcttggtcaagcaataattatcttctgtcatcttcagttgacaaaactgttcgtctatggcaagtgaatcatgaccgttgcttgaaagttttctcacacagtaattatgtgacgtgcatacaattcaatcccgtggatgataattatttcattagtggatctatagatggaaaagtacgcatctgggcaattcctgattgccatgttgttgattggattgatatcaaagatatagtaactgcggtatgctatcggcctgatgggcagggagggatcattggctccttggctggcaattgccggttttataatgtatcagagaatcgctt

SEQ ID NO: 131463 - DNA, 392 bp, Glycine max
  Clone ID: PAT_MRT3847_89719C.1
ttcggtggccgcccttttttttttttttttccaatttccatttttgatcatcggcatcatacatccatgtgattggttagggataatcgttttggcctactattgaacaccctactaaccgtacgtcaatgacgttcaacccaccatgttgttgacggggcccaccaccgtaacacccagactctgctttacatgactaagatactgtcaccccaccctgggaacttttgattttggtccacgctaggacgacgcccacaccctaagggactgtatgaaggcattaacaccccgaccatgggcgaaaatgcattaccgaccattccttccgagctagcttatggtgaagtttggactcctactactattgctcctaatgctacactacaatt

SEQ ID NO: 131464 - DNA, 288 bp, Glycine max
  Clone ID: PAT_MRT3847_8971C.1
ttcgccatgtccggcgatgatgcaaaacggaatgtttccatttgaaaggttaccgcaaacattcgggcatcatggctcacatagatgctggaaagactactacaacggaacgcttttgtactatactggaaggaactacaaaattggagaggtgcatgagggaacagcaactatggactggatggaacaagaacaagagagggggattaccatacttctgctgcaaccatacttctggaacaagcaccggattcaacattattgatactcctggtcacgttgacttca

SEQ ID NO: 131465 - DNA, 756 bp, Glycine max
  Clone ID: PAT_MRT3847_89720C.1
acgtccacgcgtacgctaaacgcttgacacggtagcagcatgacaaaatgtctctttcgattaattgaattgaaacaaatacatattttttatttgcctctgtcttctgtttttattcactggcaaaggaaaaagcaaataatgtgaccgcactctctgccgatgcatccacaaacctgagaagcgtgcttcccaattcccatacaatacaattcatcttcgtttggggattgacaaccctgattctccttttctgataatcaaccaggtcatggctgccatgaagataattgcaatatgtcagtcgggaggcaagtttgtgactgggaaagatggttctttgtcatataaaggtggtgatgctcatgctatagacattgatgatctaatgaagtttaatgagttcaaggaagaagtggcagaaatgtttagtattagagctgatagcatatctatcaagtattttcttcccgggaataagaagattcttattactatttctaatgacaaggatctacaacgaatgatcaaatttcatggaagttattctactgttgatatctatatccttattgaagaggtagctgcccctgagctcaaacatgccagccagtaggtcaagcagaacaaccttgtctgaaacagtagtagctgtagcaccagcgccactcaatgcttttcacactcatgttgctgatgacgtgcttgatgtcgttcatgataccaatcaaattgatacaaatatggatatagaca

SEQ ID NO: 131466 - DNA, 462 bp, Glycine max
  Clone ID: PAT_MRT3847_89721C.1
ctgctttatggttgctgctgtattacatgtgtacctgcccttgtttgagtaattgtcatgttttgggtggttcgaatttgcggactttgtgtttatttactgttattctttctgatttcatttgggtgttgactgatttatatgcttgttatgaatatggatgggtttgaccattttgatctgtttaaacttaattagtcttttaacttgaagtctcagagaggcaccgattttcagattctgttttatttgttcactgcccttttgaactttgtgtatgatttgttcgagtgaatgtacaaaacccaaaatatcaaaatctgtaactggttttgtgaaaattgaagtcgaccatcccctccccatctttttgtacaaggaacgtttacattgtcaaatcatatagtcttatgcatcataagtttgatgattttcactttgaagcatgttctatccataata

SEQ ID NO: 131467 - DNA, 371 bp, Glycine max
  Clone ID: PAT_MRT3847_89722C.1
gcccaaaataaagggggacccaaccccaaaaaaagggtccaaattttgggcctaaaaaaaaacagggggggaaaaaaattttaaaaaaaaagattcggtagaggccaaaaaaaaaagtttctactagggggcccctgagaaggggtttgaaaagaaccttcacccaaaattttcatcattatcagcaggaaaggggaaagcggccccaccggaaaaaaacttaaccttcctttcctcaaaagggaacttttttaaaggggaccccttgggccccttgggggggcgcgtatcaaattttttgaaaggaggagcaaccccgggggggacataaaaatttttatacaggggctcaaaaccataaggttttatcc

SEQ ID NO: 131468 - DNA, 514 bp, Glycine max
  Clone ID: PAT_MRT3847_89723C.1
ttgccgtgctacactgttgtagtaccaccttgcttgggggggggggggggggtgctgtggcaaaatgtaggtggtgttggttagcgcaaagaaggtaaatgacagataaaggcggctgtaataataataaaggagggcaggcgggacggggcggagccggcgtattgaagatgaaggaaccaccggggcagaatagcaaggtgaagggaggcttgagagtaccgactgaaagggaaagcggtaagagggggtaccaatagtagaaataggcggtataatagtacactagcaataaagatagggggaggttggcacttatgttataaatggcggaaaaggtgtagaccaggcgtttttggtgctaagcggatggacaattagggttggtacgggggcacattgggtttggagcggtgtagtgttaaccagggccgtgatgggtggtgggagtgtttaatcgcagagtactttgggcgtaggtaaagtcaagtttaaattaatggctatagagtat

SEQ ID NO: 131469 - DNA, 257 bp, Glycine max
  Clone ID: PAT_MRT3847_89724C.1
ctgcgagaagacgacagaagggctccagggttatttttaaattgaattgtcaacaacttttctcaacttggagcatgaggccttctaaaggtcttagctatgagttagttagaattgaggatgttcctcctagatttggttcttatgaatgatgatgtaaggccgttggccaaaccattttcttgctaatattgcatcctttacctaagaaaaaaaaaaccgacaaaatttataattctaacagcgatgtctcaatt

SEQ ID NO: 131470 - DNA, 382 bp, Glycine max
  Clone ID: PAT_MRT3847_89725C.1
ctacctgctaccctacgcaagtcccggagaacacacaggttgctggcaacctaacagaatagcagatcatctccttttccccgacttgcaactatggaaaccgaagccaccgaacgggcagaggttccggacagggtagtgtacgacgtagctggtcgccctatcacggtagccggctacaaggaaccggtgcggagcacgggaggcgctcaaaatcgagacagcgccggcggatttctatgggtgcgcaacaccggcgaaagagacgaggtgttctactccttcttgagtgccgaccgaccagctgtcaccaccatgtccctctcaaacgacgtggggaggatgaactcaactatggaaaggttgatggcacaagtggagg

SEQ ID NO: 131471 - DNA, 126 bp, Glycine max
  Clone ID: PAT_MRT3847_89726C.1
ctaatacttctgcaaaaaatgctaacagcccttcaacgaacatgacccatcaactggcaccagaagcaaacaagaatatcatctgccctgcaaaattgaatggccacaaaaaaacccgggggccca

SEQ ID NO: 131472 - DNA, 244 bp, Glycine max
  Clone ID: PAT_MRT3847_89727C.1
attcccagttccctttgtcaagtatggctcttaatcttctaaatctttcaatcttgttctttttactctttattgtgaatccatttccctttgtcgagccaagagccttacaattacctgtgttcaccaaaactctccaaaacctcaggggcgttcacaagggacaaaaggcgaacggtgtgggagaactcagaagctacctccaacattttggctacctaacaaacggtgattcttcgaacga

SEQ ID NO: 131473 - DNA, 368 bp, Glycine max
  Clone ID: PAT_MRT3847_89728C.1
gttctcttattttatgtgactagcgtaagtgagaatacaaaaaatacttgtgatgaccaccgaattcatcataaaattgcgaccaaaattgggtgtagttctcagaataagcagagagactcccctagcaacaatttacactcatgttagataattgactagacaaaccagatccaccaccatccaaatcccttttctttggcttcagtgatggaggtacccagttaccaataatatcagcatcagcatgttcatgatcatcataaccaatgacatcatggctaggctctttacgactcacagagagccacttggcttgcatgtatgaagcggttctccatggtggcacgtggagacccttctctctt

SEQ ID NO: 131474 - DNA, 481 bp, Glycine max
  unsure (1)..(481): unsure at all n locations
  Clone ID: PAT_MRT3847_89729C.1
gcataattaaattgcttgaaaggagaatagagaagaatctaatcttaaccactgttagtcattgttgttatttcaattatgatctaagtaatttattgtgttttgcgttctgtttgtgaattcttattatgctttttttttttaaaatcattcaatataatatgtctcttccacctaattatcagttcaaatagtgataatttggtattacttaatgatttagtacttggacccaatcctcgtccgcacaacacttaatgtatttctactatgtaatattactagataacgcctaatgcactttggaaggcttccttatcaaggatattgactnttatttgttgtatcgtgggaaatctcaattggaacattagggcagaggggatgcaggggcgccgctaacaaggtcctagatcttggacattagaatgtatatactctcaagtcattgccatcgatccaaatcgggaacagggctgta

SEQ ID NO: 131475 - DNA, 267 bp, Glycine max
  Clone ID: PAT_MRT3847_8972C.1
ccgcgctatgatcatccgacgctgcttttattcacaccgcatacatgagagccatgggcgttcagacagaacattctcatctacaacgagatgaatggagccacgaagaatgcatctgacccctttgccaatatggagagccatgactttatggctccttctgttattgaggcgaaaactgatgacgcaaccctctactctcgtactcagggcacccagattgcttctgaaggactgaagcgtccagcgcttgaggtctccttggct

SEQ ID NO: 131476 - DNA, 450 bp, Glycine max
  Clone ID: PAT_MRT3847_89730C.1
ccacgcgtccgaaaaaatttttttttttaaaaattatttaaaaaaattattaaaaaaaaaaatggttttaccctttaaaaggatccaaccgtaccctccagggttaccactttttactttttcgatggggccaccaaattggaataaactggccgaaattttacaccctggggaaaggaaaaacccggcagaacccaactaaattcccttgagaaaattcccttttcaccacgggggggcataaggaggaggcccccacaaattgaccttgccaacaattgcgcccccttaacggcaaataaaactccccctgaaccggcctaaaaaactcggccaacgcgggggaaacgcccagttggacctgggcacccgccggggccctatttcccccccttaaccttctacccttgctttctctcccgttctgcgcctttccccgttaagctttaa

SEQ ID NO: 131477 - DNA, 318 bp, Glycine max
  Clone ID: PAT_MRT3847_89731C.1
ctgtagtaataaactgacattttgaatggtttttcacacagagcacctaaaagggccagggggggcaacacaaaaccgggcaaggggggtgaacgcaaaacggccagaggactacgaaagggaagaccaggacccccccaatagggtgacatgacccccgaccagaaggtgacctgctcacaagcaacattacccgactacaaaagaaaaggtagcagcgctcccagaaaaaaaaagggcccgaactgacacgaaaaagagggcagacaaaccgagggacgggcgccaaacaccgcgccgaccggagaaccccacagg

SEQ ID NO: 131478 - DNA, 446 bp, Glycine max
  Clone ID: PAT_MRT3847_89732C.1
agtcggcggccgccctttttttttttttttttttttttttttttttttttttttttttttttttttttttttttgtttttggaaaaaaataggctcatccacataacaaaccaaccttgttactggggaaagattatccctgggggtggcaagagggcccacttaatttaaccatttcacaacaattggcacagcagaaatttttccacataacaaaccaaaagggtcgccttagttacccacagcctggacccccttggaattaatcaaatttggacatccggggattcaacctaggaaattgaaatcgattcaaacctaaatttggcctgccaataacctttgggttttgcaaatcggcttgggtccttgctttccggcacaaattgtgattccacaattttctttggtaaagattcagatttcgcaataagcatttaccggga

SEQ ID NO: 131479 - DNA, 354 bp, Glycine max
  Clone ID: PAT_MRT3847_89733C.1
ggcgaagtacatcatgctcgactgcgacaacacgctcgtccagtctgagcgttttgcgttcgaggcctgcgccgacctcaccaaccaggtcatggagaggcacaacatcgatgcccgctacacagccgagtcattgctcgaggacttcgtcggccacaacttccgcggcatgctcaagggcctgcaggagaagcacaagttcaagatgcccgacgacgagatggaggactttgtcgcacaagaactcggcgccgtcactctcaagctcagccagaaggctgtcgagtgccctggcgtgactgagcagctcaccaagctcaaggaggagggctaccctatgtctgttgtctctac

SEQ ID NO: 131480 - DNA, 607 bp, Glycine max
  unsure (1)..(607): unsure at all n locations
  Clone ID: PAT_MRT3847_89734C.1
gcccaaaaaaggggggggacgggtattaaagggcaacccaaatagactgtnaccagatgggggaaaaagggctgctaaactagaaataggagagaatatggatcagaatttccttcagtttgatccagcgcccaggcaaattgagcctgacaccacacgcaagactccagattattttttataatttcatttatctgcctgtttgtagttactgctctctgccattactgtagatgtgtctttaaggaaaggagttttgctgtttaagtggagggtggtcatcaacataattctttcttttggagtttacctcctgctgctgccgctgccgctgccttatttgtacaagaaaccaatagaactgacacaagccaccaattggggttgtatatttttgggaggaagcggtaataacatggtatatcttgttctgtaatcctttttctttaaattgaatctcaagttagagagcagatttttgagtcctgacaatgatgtccatttgagacttttgatgattccaaatgaaagtgcaggtgttcatttttcgtggaaaaaaaaaaaaaaaaaaaaaaaaaaaccccccggccgctctagaggattcagc

SEQ ID NO: 131481 - DNA, 147 bp, Glycine max
  Clone ID: PAT_MRT3847_89735C.1
ttagaaacttatccacacgacatcgcaattactgtggtgtcctttctatagctgagggatctcaataatacaccgcaaacgatttttctttcccctctttttctattaccaattaatttatcatccaattattctttacatcataaa

SEQ ID NO: 131482 - DNA, 1074 bp, Glycine max
  Clone ID: PAT_MRT3847_89736C.1
acccgtcacgcgtaccgcgctggtcactcgtgcgcccacgcgggacgaaactttgagtaaataaaaaaaataagatttgtcaggggtgaaacttgaaacttgaaaagcggcgtttgctccgaccgagtgcttcagaggagaagtaatgactgcgatcgcgggaacgcacgtttttggtgttgtgagttttcagctcaaacaagctgaaatgccttttgcatgttcttgcttaatccgcaagcgtattggagattctcctcagcgcaatgtggctctaagacgcagagtaaatggaacaattcttccccaaatcagagcccagaatcttccagattatgttccaaaatccgagttttacaaagtagaagcgattctcaggccatggcgagttccccaggtttctgcggctttgttgaaaatgggaattcgtggtgtcactgtatctgatgtcaggggctttggtgctcagggtggttcaaaagagaggcagggaggctccgaattttcagaagacaattttgttgccaaagttaaaatggaagtagtggtgagaaaggaccaggttgaggcagttattgacaaaattattgaggaggcaagaactggggagattggtgatggcaaaattttcttgatccccatctcagatgttataagaattcggacaggtgaacgtggggagcaggcagctaggatgactgggggccgaagtgacatgttatctgctgtatgactggttggaatgaaagataagcatttgtcatctgcttctcttacccttgtggaatattgaatttactatgctgtatgctttatatgtcttgcacttaattgtgggaagatgtatatgacagacagtattggaagggcactgtagttatgtggtgaagaaaactgagagaaaataataaacaaatgctgagttgcttcatatgccatatgacaccaagatgtgcaataaagttaatgacataatttagatatagtgccataagtgtgagcgtaatttcactaattaaaatttatatttaatctcagttgttgttatgttaatatttgtcctttcgtctgtca

SEQ ID NO: 131483 - DNA, 1014 bp, Glycine max
  Clone ID: PAT_MRT3847_89737C.1
tacggctgcgagaagacgacagaaggggaaaagcggcgtttgctaattgcttcgaccgagtgattcagaggaggagaagtaatggctgcgatcgcgggagcgcacgtgtttggtgttgtgagttttcagctcaagcaagctgaaatgccctttgcatgttccagcttaatccgcaagcatattggagattctcctcagcgcaatgtggctctaagacgcagagcaaatggaacaattcttccccaaatcagagcccagaacgttcttccagactatgttccaaaatcggagttttataaagtagaagccattctcaggccctggcgagtccctcaggtttcttcggctatgttgaaaatgggaattcgcggtgtcactgtatctgatgtcaagggctttggttctcagggtggttcaaaagagagacagggaggctctgaattttctgaagacaattttgttgccaaagttaaaatggaaatagtagtgagaaaggaccaggttgaggcagtaattgacaaaattatcgaggaggcaaggactggggagattggtgatggcaaaattttcttgatccccgtctcagatgttataagaattcgaacaggtgagcgtggggagcaggcagagaggatgactgggggccgaagtgatatgctatctgctgtatgactgattggaacgaaagatcagcatttgtaatctggttctcttaccctttctcctttttcccttgtggaatattgaatgcattacgatgctgtatgcttcatatgttttgcacttatatgtcggaagatgtatatgacagacagtattgaaagggcactgtagttatgtggtgaagaaaaattgtgaaaaaataataaacaaaagctgagttgattcatatgttatcgtgaaaaagccaatttgggggggatttaaaaaatcattttttcgccatgtcatgaccccaagatggcaaaatgtatgacttgccatcaaattaaggataagctgtaattttcgtcc

SEQ ID NO: 131484 - DNA, 226 bp, Glycine max
  Clone ID: PAT_MRT3847_89738C.1
agcgtataatgtttgtcacctactgagtgaaattggaggtttctacatcactcacgccgccatcatccgtctagatggaagcgtttgggctcataccaccaactctcctcattacatacctgacgaaattactgtcatcactaatgactttaatgatcctggatcactcgcttcaactggatcgtatatcggaggcaccaaatacattgttattcactgcgagcct

SEQ ID NO: 131485 - DNA, 342 bp, Glycine max
  Clone ID: PAT_MRT3847_89739C.1
taggtcgaggtttatcactataggtaggatcatcatgaagcgggcatgggtatatatgaatcggggctatggctatccttattaagtctatcctgaagccaaacgacatcagatctgaattcctcgtcgaataccaattccacataattatcaaatattgacacttactatgttaacatatcaactttaattattacattacttattaggcctatcctgaatccaaatgaaattatatcatattccctaaattaattccatatacacattttcatcaccatactcctcaaattcatacatatctccaatgtttatatatccactcttattatccacttcttt

SEQ ID NO: 131486 - DNA, 461 bp, Glycine max
  Clone ID: PAT_MRT3847_8973C.1
ctcgatttttaattactttattaattttcacttgtcactctgaatgaattcgtgcctttaatttactcttgactcggtggtgacctccgaagtttgtcgcaagctccgtcatgcccttcattctgcttcaatctgcactgctttgtttcactctcgtcccacataccgtcacagctagcccattccctccattgcttccaactgcctccatcgtgcaggtgcagtaagaccacagatttggacagtgaagagctattggagcatttgcctgcattgtagcagctgttgtatcgactttttgccagagtcttgtatcacttggcatgaaaatgtaattcttaagctagtttataggttcggttggggattatatcaataacaccagccaatttaacatatttgtatgttttttcaataatttttgcatactttctttaatcccaagatatatgatccaattt

SEQ ID NO: 131487 - DNA, 301 bp, Glycine max
  Clone ID: PAT_MRT3847_89740C.1
ggcgggaagcaatagcctttaagttgttgattcaaagaatttgataatgccatagcccaattacaagtttcaagggttgaaaagaaaagaaactcaccagcccaatcaatcattcgagtgagtgattaccaactcgttgcaaaagaccaagcccaatttatggaaagaaaccattttggtaatgactgagattaatctcttggtgacttcactattttaattgaaatccatctgaattttggtttttaatattccttttttttatatagaattttagaattatttttttttatgaaatgag

SEQ ID NO: 131488 - DNA, 416 bp, Glycine max
  Clone ID: PAT_MRT3847_89741C.1
ttatcaaaggcaatggatagttatttaacactcaccaggatgatgttaaaaattacaacgccacgaataatattaatgagaaactaggatcatgtaattgtagcccattcaaaatgaatacatcaacagatatcaactagcaaaagaaccttctatgtatttctttaactataagaggggagcttcatcaaaaggaagcccttctctccctaccaaactacacataggaacaagttgagtagtcctgcaaaccccttagacagacaaccttcaactgcaaatggggacatagatgaacacaatggactattttgtctactggtttccatacaatcatatgctgtattccctggtggattgtcctccaaatcctctgcatcgggagctcgacttcttttacagtttgaaaaaatcat

SEQ ID NO: 131489 - DNA, 626 bp, Glycine max
  Clone ID: PAT_MRT3847_89742C.1
tttttttttttttttttttttttttttttttgttttttattttgttgtttttttgttttctttttggttttgggtgtggcaaaaaaaaaaaaacgggggggcaaacccagggggggggggggccttccaacataaaacgcaggggaaactgggggcccagacggaaaaaacgccccgccaaaaaaaacaaagttggcaagtttccccaccaagacccagggctgttactataaataaaaaaaaaaaacgaaacccgagcctccgggggaaaaaaaacccgcaccccaaaacgggggctgggattttttgggggcccccaccccgaaaaaaccggaccgggttaatgaaaccccggggactagaggggaagggcccctataaccacccggggggaaagggtttaaaagaccaacccaaagaaggggccccccccaaaaaccccgggaaccccccacccaggggccttgtggggaaataaccccccccacgaccccgcggggggggcacaccccgcccggggaatgggggggcctcctatggaaccaaaaaccccgccaacccaaaagggaaaggggcccaaaaggggacgcgaaaacctccgggggtcaccggggggctgggggggg

SEQ ID NO: 131490 - DNA, 297 bp, Glycine max
  unsure (1)..(297): unsure at all n locations
  Clone ID: PAT_MRT3847_89743C.1
aaaatgcacgtcatatcggctcacacatcgttccgggatcggacacaggaattcctcagcgtcgcaaagagtatgaagatatccggatcagggcccattgggccctgaagtagcatctcttcttgcataccggatgaacatcgatccgtgatcgcaaatcaatcggagttcattatgatggcctacaagatctgctaatggattcaccaaactnctcataagctaggctaactcaccactattgcgaaaaggacttaggttctctatgaccctactatggaagttcaacaccttacg

SEQ ID NO: 131491 - DNA, 270 bp, Glycine max
  Clone ID: PAT_MRT3847_89744C.1
ttttcgtttttgcatagaccaaccccagaagaagaaggagaataataaaaaaaaataaaaatcagccctttctgtaaatccccaccttttgttctgctcaagatcatatactcacatttttagtgtctgaaataaatctttttggatcttaatagggattgatctttctttttcaatttgttggtgacaaagatgttgagattatggaatggaattttcccaaaaaaattcatgaacttttatggagattgaaattcgtttaaggtttgg

SEQ ID NO: 131492 - DNA, 254 bp, Glycine max
  Clone ID: PAT_MRT3847_89745C.1
tcgatcacttggggtgttaagaaatttaagtgaggagctagagaatgatgatgaagtctgatatgtgtgcagtggtggttgtagcagttcttcttctggcggaggtggggctcatggctgaggctgtgatatgcactccaacagagttgagatatagtcttccagcaatcacttccggtgctaaaccttccaatgcttgttgcacgaagctgaagcagcaagaaccatgcttatgtggctacctcaaaaacggt

SEQ ID NO: 131493 - DNA, 636 bp, Glycine max
  Clone ID: PAT_MRT3847_89746C.1
ctcgagccgaatcggctcgagatcaacctctttcttcttctctctccctcatgcagcctcttcgaagaaaaactcctctattcacctcagaaatggggacaatgaagggtcgcaagaacaacaacctctccatcttcgtggtggtgttctccatcttcctctttgggctcttcatgtacaacgaggatgttaagtccattgctgaattcccattctcgagtcccaaagcgcatgagacacaagaaggaggagaacctaataaacatgttgattctgttcaagacagtgttgttgttcaaagggagagtgagaagaaggatgtggaagacactgtcacagtaaaaatttcttctaagaggagtacttcaagggctcagctagagaagagtggtgctgaggatgaggattctgatgagcgtgttgatttgaaaactgttgtggagaaagagaagaagattgaaatgccacgtgcggaggaagaggaagaggtggaagaagaagaagaagatgagaaagttgagttgccaccagaagattgtgacttgttcactggggagtgggttttggattacgtgacacaccctttgtacaaaagagacaagtgtgagtttctcacttcgcaagtgacatgcatga

SEQ ID NO: 131494 - DNA, 248 bp, Glycine max
  Clone ID: PAT_MRT3847_89747C.1
ggggtggggttttttttttttttttggggagaggagtgataccgatggttctcttcgggggatcaaaggggagagcaccataccgggggagaaaagctgataaagcacattgaatgaaaaaggggcgggaaggttaatggtgtaaaccccttggcggggaagggaggatggggaatgaggcagaaataacaaagcgggggcatcgatcgattgacacagataaagagaccttgtagaagcccgacaat

SEQ ID NO: 131495 - DNA, 253 bp, Glycine max
  Clone ID: PAT_MRT3847_89748C.1
atcacactttaaaaaaatatgtttctattactttattaattacctttaaacgagggtttttgctctgtgtaacttaaaacacatctttttacctttatgctattcaatcaacaaacatatatctctctgcatcatcacatacattcccttccacttctaactctaaaactctttcaacgataaatacctacccactgatttaaactattcaattcatctttacactttttccaaaattacaacattactctaa

SEQ ID NO: 131496 - DNA, 293 bp, Glycine max
  Clone ID: PAT_MRT3847_89749C.1
aaaatatcaataatcttatttattaagttataattatcttatttataaaataattaaaaatatgaaagtgtgttgagactgaagctgtgatttatcaacaaatgaatggattaactaatgatacacgtagattttgttaacacaactattcgtataggtataggaacttcttggcacctttgttacatcatgtcctcctattagtatgggaatctcctacaaaactctggtcacttgaaaaagagatccctccgttatatggacgcgatgtgaaggctgcctcaataaatact

SEQ ID NO: 131497 - DNA, 1202 bp, Glycine max
  Clone ID: PAT_MRT3847_8974C.1
ctcaaaccaaaccggtaccggctcggcaagagaatacaccaaaacccaacatgaaaacccttaacaaagcctcacttattttattccctctcttgttcctttccctattcaagcattcccatgctgcaggaatcgctatctactggggccaaaacggtggagaaggcaccttagcagaagcttgcaacactagaaactaccaatatgtgaacatagccttcttgtccacttttggcaacggccaaactccacaactcaaccttgcaggtcattgtgaccccaacaacaatggctgcactgggttgagcagtgacatcaaaacttgccaagaccttggcatcaaagtgttgctctcccttggtggtggtgctggaagctactccctcagttcagctgatgatgccactcaacttgcaaactacctctggcagaatttccttggaggtcaaaccggatcagggccattaggtaatgttatattggatggcattgactttgacattgaatctggtgggagtgaccattatgatgacctagccagggcattaaatagcttcagctcacaaaggaaggtgtacttgtctgcagccccacagtgcataatccctgatgctcacttggatagagccatccaaactgggctttttgactatgtgtgggttcaattctacaacaacccttcatgccaatactccagtggaaacaccaacaatttgatcaattcatggaaccaatggatcacagtgccagcttctcaaatcttcatggggcttcctgcatctgaggcagctgctccaagtggtggctttgtgccctctgatgtgttgacttctcaggttcttcctgtgattaaacagtcttcaaagtatggtggagtcatgctctggaacagattcaatgatgtccaaaatggttatagtaatgctattattggaagtgtttaatcatgttatagacttatagaaaaactatgtcattaattccattatttaaataatactaatcaccgctcgtgattggtttttctactatatatatattcaatgtgctttgaacgctacatatgtttattgtaatatgtcacctacaagttacatatagtataattaccaaaataattaaaatttcattgcgaaatatgtcattttcaaccctaccatagtctgaaatttttgcgcttcttctaaaaaaaaaaaggacga

SEQ ID NO: 131498 - DNA, 388 bp, Glycine max
  Clone ID: PAT_MRT3847_89750C.1
gtagcagggtggacaccactgagagacttttatcatctgaccggagatcatcaagtgtcgctaacccattagggtaagagtcgtattctttctcaccactaccacgagccatcgccttccatgctcattcacaagatgacactcagtataccatcacgtgccaaattctgtcactttcaatgtgtaactcactccgcacagacttacctgcaacagcctagaagttccaagcatcacgtactacttttctaacgacaaaggccagactcatgcgtattcggaggatgttatcgaatgccggcttgtgtccaatccctggatagatacagttaatagtggacctggatgatcacatgtttgctacaccctgtcctacatagctgaccac

SEQ ID NO: 131499 - DNA, 156 bp, Glycine max
  Clone ID: PAT_MRT3847_89751C.1
tcgtggaaattcaagcacgggcggtgttcttaagacaacccggccggtgtacggacatgaggaaacagataatcattcagtttcggaaaagtcggggacgatacatctactatggataattagtctgtccttatcagtttcccaggcttttttgta

SEQ ID NO: 131500 - DNA, 278 bp, Glycine max
  Clone ID: PAT_MRT3847_89752C.1
tctacatccgttctcatcatttgcatacgcatcgagagcatagttacaatatcggttccccttaccttcccataatcaatattatatttactattcattacaattatcattttctctaatatataaacaacctaatcactactctctctaaaacaaattatatataccttccactccataatgatctcatccacccaataattaatacattaactctacctgacaactttccacctttccatctatttcatactattatatcctacattattcatcta

SEQ ID NO: 131501 - DNA, 261 bp, Glycine max
  Clone ID: PAT_MRT3847_89753C.1
gacccttccatttttatttctttatttaacccaaaggtgatttcaaaaagaacatgcgagcggacactctaactggtttcgccaaacccctggtaagaaccattggcctaagggaccctcattttaactagatcatctcaaactaaaaacaaaatgggagggcttgcatgatcgccaggcctttctgtagaactgaagatggagtgacggttccaaaaaaaaagatctggggccctaaagattacaagcgcactgatgttt

SEQ ID NO: 131502 - DNA, 758 bp, Glycine max
  Clone ID: PAT_MRT3847_89754C.1
ttaaagaagcgcttactgggtaagctcggaattcggctcaccgcgagaagacgacagaaggggcagttgtttttttagggtagttgtgttatttcttttctttacttatgattttatgcattttaatttcagtagtttaaattcagttattgaataaaaattgcatgatatttgtgaagtcactatttaggctttttctgaagaattcaacacttgaaatgctacatgacaattgtgaaaatactggtttcctggaagcaagagtcagtcaaacagtgagacatgaatcacaaagagagaaaaggttagcttgatggaaatagatcatgttccggtaagccaataactttatcttgtcccggagagctgtgtgaacttaattatgagagaacgtctgtttttaaattcctaattttgcatcattcttagactgttagattatttacataaggtggatatgatcaaggccatgttttttattttagccacatagccaaaaagccaacctgtgatgaaatttatcccttgcacccttgttgagccaaattagtaattattttttttaaaaaaacccctgagcctaattgtgatatctctaaccttattttagggttctaagagagcataaaagttttagtcataataaacccctaatttgggggatgggtagaatgaagatggtctagggaatgtaaaagtagcacataataaggccccaaaaaaaaaaaaaaaactcgtaagcccaaagtctttttcct

SEQ ID NO: 131503 - DNA, 647 bp, Glycine max
  Clone ID: PAT_MRT3847_89755C.1
tatccaggatgaacattttgtgttgagaagctcagaattaagaatgccaaatggtgctagttcatctccaaacttggatttcaaagaagttctgaagaatcctaaagttccaaatgactgctttattgtgtctcagagagatggaggaaatgaaggtggctctaagctggatgagtatgtagacaactgtggtccagttacaaagagcagggataatattggtgaagaaatgctgttatcacatagatcaaaggaaccaggaagaaatgaactcggtgatccattatctacttttgctgctgattcattacaaacaaagggaagagcagcagatgattggtttattgtagataattgggaaaagatgaggagccctgacccaaccattgggcctgcagggttggatggtgattacacttcatcagtggatggatcgctcccattctgagaaaagaagggagccaactcttattggtgattccttcatgattcaggggcaattacgagattatgatccgtctgaccccccatgggaaaccggccttacgtatggttgcaaatctaactgctgccaacaagcttgaaagtgatgcagctgcttcaaatgagaagcatgcattatcaaagaaccaggagccaagtgacct

SEQ ID NO: 131504 - DNA, 275 bp, Glycine max
  unsure (1)..(275): unsure at all n locations
  Clone ID: PAT_MRT3847_89756C.1
cgaactggccggacctgagtttgtatgaagtggccagtgggtttacaaaagtgttgcanatagcggctatcgtggcactatcacgctatagcatagtgggttttaaggaaaatgcaatcgcgatggtgtcgcattgcggactccacgaaaatcgcaatcgtgggcgccttacgcatcatngaatctcattgtgccgtggctgttgcatcgtcggtttccgaaaaggttgaatctggagaganattgcattaacagcatttagggttcatggttca

SEQ ID NO: 131505 - DNA, 319 bp, Glycine max
  Clone ID: PAT_MRT3847_89757C.1
gaatttgcctaatgcctgtccttcaatgtggagggattgggttatagatctcgggtttgaagtttctaagatgacttctccctacattaaatgtacagtctctttcttcatagcatttggaaatttggctgatgacaccatcaattttgaggcttttccccacaagctggtgcagtttggagagattcaggaaaaagttgtattgaaattttcacaagaagaattttcttacaacttggtcaactcatgtgcgttcttccacaacctctgtggctgatgggtgtccataattggtatgctattggtgcattgatagttc

SEQ ID NO: 131506 - DNA, 301 bp, Glycine max
  Clone ID: PAT_MRT3847_89758C.1
gcgcgggagggagaaaaagagggaaagaaaccccaaaaggtgccaagttataaaaaagaaaaggaaagcttgaataagaggaaacacaattaaggtcttgatagaataaaagaaaaacaaggtgaggtagtataagtctaaaaaaggaaaaagacgccaataaaccaagaggggggcggaccattcctacatctaagagggtccttcaagaccgccgttattaaaatacctaaaagctaaaagaagcataaacaaaaactgaaaatttctaacgaagactaaaatctagtacttgggccgc

SEQ ID NO: 131507 - DNA, 411 bp, Glycine max
  Clone ID: PAT_MRT3847_89759C.1
tcgacccacgcgtccgaaaaaaaaaaaaaaaaaaaaaaaaaaaaaaaaaaaaaaaaaaaaaaaaaaaaaaaaaaaaaaaaaaaaaaaaaaaaaaaaaaaaaaaaaaaaaaaaaaagggggggcacgttttaaaggatccggggtttcggttctcggggcttgccggctttttgactttttttttggggggccctaattttttttcttgggccggcgtttttcattgtcgggggcggggatttccctggggttacccagtttaatcccttgggagcccacccctttttggctgggtggattctttttttttgggccctgcccgttggccttttccgccggttgggctccctttttggaaaatgggccgcccccttgtgggggctctttatcccccgtggggtggggtttttt

SEQ ID NO: 131508 - DNA, 678 bp, Glycine max
  Clone ID: PAT_MRT3847_8975C.1
ttttgattatgtatttgattggaccattttgaagtaccagcaatctcaaaagaatccagttccaggagcaagtaacagtcgtgcaactccaatcgatgttgacatccatcaaggtcttaatgcatattcagggcatgttaaagagcgtattagagctggtgatgctactggttctggtgttaaaattcagtttaaatcaccagtgggtaaaaatttgagttatgagaatccacttgacaaaaatatttttggagaagcaaatataccctctacttcattttctcctgctagtacttcaaaaaggaactccttaaagcaatccttgtctgctgaagcttccaaccctggacatgcacaaggcagtaaaatgggcccttcaagtagctggatgtcatctctgcagcgcatgtcttctgctaaatgattgccaaatatgctatgaagctttgaagaagattctgtgcatcttttcccaaagtgtttggtcaagaatattcaagtcatttattcatggagactgcaaatgtgctagaaaattaacagattgcatagctcctattttgaggccatttagtggtgcttctttcctgagtgactacaaatgattgtgcgggtattatcgaaagtgtaagctatactgatactgaagcatgctgaccaaaaaaaaactgatactga

SEQ ID NO: 131509 - DNA, 499 bp, Glycine max
  Clone ID: PAT_MRT3847_89760C.1
cccgagtgggcggagtcggcacgaaccagcagctgcgccggttcgaccgctccaacctgtgggagttcctcggagccatctatcttgtacgaagaaactttgactgcactgcctgtaactggatggacggtgccttgccgtgtctgtcgggacgtgccgtggcgtatcgctccgagattctgcaagaccccaattttacctatggcttcacgcacgagacctggggcagcgaccatttcctcaatgccgacgacgacaacttcattacgcgctggctattttcgcacgactggaagatccagatgcaaaaccaccgcgagtgcgaggtggatacgacgctggagaacgactccaaatacctgcgtcaatgcctgcgctgggtacggtccaactggagaagcaacctgaccagcctgagcgagctgcacatgtgggtgaagtacccttggtctctatatgccgtcttccaaaccaccctcacgcagtgggctttcctcta

SEQ ID NO: 131510 - DNA, 326 bp, Glycine max
  Clone ID: PAT_MRT3847_89761C.1
tttttgtggcgccaaatgcaactggaatggtgcaaagggcgcattaaccatattacaaccgagcggaccatcatcgtacgtgcggacgcgcgaacaaaacaatgggtgcttcttgcatggatctctacactctctttgactaatttgatagcccaacgattgatcgcttcggctaaataatgaccatcactgatccacattgtgcgctcgagcggggatacaggctgtcactacaatggctgccgaatcttgcaaacaatcatgtctaccagaacacatgtagaagcatacagaacacttatccttgttggtaacagacgaaccac

SEQ ID NO: 131511 - DNA, 439 bp, Glycine max
  Clone ID: PAT_MRT3847_89762C.1
aaattacattgaaaacaagaaattagctcctcaaaattgagacacgatcaactcagcagtcctgtatcaatgaataatcgccttttctaagctttattctattcgaactattccatggttcatgtatctcaaccggcaaatctcatcaaaaaaatcatcagcgctgctatgggagctcttcatctgaagaatcttgataaccatagtccttagatttttgccatacttcaacaaggattcaagagtactcattttttgttcggcatttagtggtgatctcactgtgatcacaacctcctccaaacatggaattaaaaatcctggatccacatgtttcaggctgttcctctggcaaagtgctgcaaacatggctccatgaatgtcaaacttgcgcagtttgggatggttgttgaaaaaatcaacaaaatcaatctctgga

SEQ ID NO: 131512 - DNA, 244 bp, Glycine max
  unsure (1)..(244): unsure at all n locations
  Clone ID: PAT_MRT3847_89763C.1
acaaacactacgagtctggnataaatccttggaatcagcatcgcggtttacttgctgtttaaaacgacaacaagatctagaggaatcgaaagagaatacgcagccatgctatacacctccctcgccgtcctcgctaccagcgcgctcattggccaccggcgcggctctgcccgtcgcgaagggcagacctcgtcttcggccaacccgccgaccaccttgaactcggcaagccctccaccgtcgt

SEQ ID NO: 131513 - DNA, 409 bp, Glycine max
  Clone ID: PAT_MRT3847_89764C.1
tattcggctcgagctcaaaaactcccgatttctctctctgttcttccatggccatctgatcaaacttttctagattctctctctcagtacttgctattctgagagaagggtatgccctgccgctaggcccacacctcccacatgactgaaatcatcatcaccagctccttccggcacaagtctgaaactacaacaattgacctcaactactcatcaaccaaccaccttaatagccttctgcagaggatactcatagatccaactgagagctgtgcaaacatggcggcttgaggaagttcctttgccaacatcactagcttccttcgcgaccaacaaccctcttaccaacctctcgattcttctatcttgctctatgctccttcaatgttgggttcaagttcgagatcca

SEQ ID NO: 131514 - DNA, 683 bp, Glycine max
  Clone ID: PAT_MRT3847_89765C.1
atgtaacaacgtaacatggtatgggtcaaaagaaaaaatgaattaacagcacacacacgttttcctgtcgtgtatgttttttttttttttctctcactttcaactatactttttttttactatttacttggtgaatattttttttcttctcttccgtctgaagcagcttcccttcgggctgcgcgcagcccacccccaaagtccaaaggcagaggtaaaagggttagtcttctctccagcaaaaacggcaacgttttggtcaaacaccaaaagccatgaagcagaagagcaaagcaaaaacagcaaaagcgatcaacatggcaaccatgtccattgccctgtctctcctcatcttcctctctctaatctctctcttcacaatggagaatttctcgaacctctctttcgctttctccgcgtcaagtttttctctcttcccattctccatcgcgtcttgtaaaattacgacgccgtccctgcccatcacgtgcctcccctcggtgtcctccatggtgaggctcacctcgcgcacgtgcatcgcgccgccgaccttcccgcagcacgtgacctttacgacgcactggactgtctccatgggcacggcgtagagcacctcgagctccgccgtgagccagtggccgccgcgccgcgaccgggcggcggctggagaggttcgcgctggt

SEQ ID NO: 131515 - DNA, 488 bp, Glycine max
  Clone ID: PAT_MRT3847_89766C.1
tgagaaagttgatgaactgtgtgatcggtactgcctagacaggtttttggacatcaaagtacctgaaacaagtaatctgcaagggcgttatttacatcttgatgaattattggttgatagcatcatttgggttgatgaagttgaaggtttgcttgatgcaacaaggcatattaagggttttaaagttataggtcttgattgtgatggaaacccaattacgtaaaaggcagcaaacccaacaaggtttctatcatgcaaattgcttctgaaaagatggtttttatctttgatctgataaagttacacaaagaagtgcctgacattttagatgattgtctatcttgcattttgctgtcacctagaattctaaaacttggtatgaaaattctcaattcgtttgactttgaatatattggcaaaccaaatttttggtggtcaagattgatccctaacttctgtaatatgattattttgacctgaatgagaat

SEQ ID NO: 131516 - DNA, 550 bp, Glycine max
  Clone ID: PAT_MRT3847_89767C.1
gaatttgatggccatatatttgctttcaaatagggtgttcgtcagcccatgtacctcaatgacctctggacatcaggattctgtttttccttcgcccagttatggttttgattttgtagtgtctgttgtttctctctccatctctaatccactgtcctctagtattctggagcttgtatattactacctaattatgaatttgacccagatatttgtagcctttggatcagtatatgaagtttgaatattgaaacaaatagttggaggttaccttttaatttttttcatgccattaactgcagtactttgctcaagatgatttgacatgggccttcaagctaaagttcccatgttcgagtatggacatggaacaattattaaatttagtcatctctcttgacaacatgataatttagagctgatgcttctgtgatcgtacttttgttcttccttggaattaatgaactttcaattttagaaactttggccaagaagcaaatgattgtgtgttggatgacgacaagtttggatagttctaggtatgagttgg

SEQ ID NO: 131517 - DNA, 311 bp, Glycine max
  Clone ID: PAT_MRT3847_89768C.1
ctattgatgactgctacgaagctccattatttttgctgtctaataagaaatagctggaggaccaatgcttagggtctgttggggaacaccatttacaacttctcattaaacacaaactgacgagtgggagaaataaagcttggcattcccattggtggaaggaccttagaagactgtataatcaggctttttttcacaggatgcaatacaatatggtatggaaggttggttgtggggacataatcaaattatgggaggattcttgactgagtgagggctgtatgcatttataaaaaaaaattttggcattc

SEQ ID NO: 131518 - DNA, 390 bp, Glycine max
  unsure (1)..(390): unsure at all n locations
  Clone ID: PAT_MRT3847_89769C.1
tttggctaaaatcaagtgtattatctgttcttatcantttaatatctggtatgtttgccattggtgccacgggatattaaatttattttttgagggggatggttcacctcattatcttgctactgtaatcattaattgttctctaagcgtttcactatttcttgtgcctgtcacttctcactaaaacatatttcattactttgcttttattgttcactgcatcttgattatatatcttaatgtttttttcttaaagtttttttttcaaaattttattttatttataaaattttatatttcgtgctttaatcatataatttccaactattttattatttattcatattttaatattattatattcttaataaatattatttattcttataa

SEQ ID NO: 131519 - DNA, 1343 bp, Glycine max
  Clone ID: PAT_MRT3847_8976C.1
cacgcgtccgctaatttataacctgtctgacaataagaaataaacagccagcgtcttctactgcgtgacgtctgtgccggggacccatgtacgtagcgagacgcgtgatcggtgcgcaaccacacactaggtcacaagatcggcggcggatccttcggggatatctatctcggcactcattttgataccttcgagatcgtcgcgggcagggtagaaaacggtaaaacgaagcatcactaattgcttcatgaggccaaactctacaatattcttcaaggaagaagaggactccctaccctcaaatggggaggtgtagactgcagaggatactgtgcttggtatggacttgctgggacctattattgaggatctttccgtgtactgaggaagaaagttctcttttaaatccgtgttgatgctggccgatcaaatgatgactagaatagaatatgtgcattctaaaggattcctacacagggatataaaacctgacaactttctcatgggacttggtcggaaggcaaaccaggtttatataattgattttgggcttgcaaaacgatatagtgaagccttccttggcaaggtctacgggctgctacaaagaaacaaaagtatgataaaatatgccagaagaaattatcaactcctattgaggtactatgcaaatctcatcctgtagagtttgcctcgtacttccattactgccactctttgacatttgatcagcgacctgattatggattcttgaagcgcctatttcgggacctatttgctcgagaaggttatgattttgattatgtatttgattggaccattttgaagtaccagcaatctcaaaagaatgtaatgctccctccattatctccagttccaggagcaagtaacagtcgtgcaactccaatcgatgttgacagccatcaaggtcttaatgcatattcagggcatgttaaagagcgtattagagctggtgatgctactggttctggtgttaaaattcagtttaaatcaccagtgggtaaaaatttgagttatgagaatccacttgacaaaaatatttttggagaagcaaatataccctctacttcattttctcctgctagtacttcaaaaaggaactccttaaagcaatccttgtctgctgaagcttccaaccctggacatgcacaaggcagtaaaatgggcccttcaagtagctggatgtcatctctgcagcgcatgtcttctgctaaatgattgccaaatatgctatgaagctttgaagaagattctgtgcatcttttcccaaagtgtttgggtcaagaatattcaagtcatttattcatggagactgcaaatgtgct

SEQ ID NO: 131520 - DNA, 323 bp, Glycine max
  Clone ID: PAT_MRT3847_89770C.1
ggtcagcctttatcattcataaccttgcatctattattactatagaaagaaggagctaataatatatcaaacgaatcttaacgaagacagaattacaccactctaacaggttgcactcctaaaacgcgggtaatgaaccaagaaaagggggtagaccagttatgcccacggtaccagctaacctaaactacaaagaaacgggaccctagccattcaatgaggaccaccaaacactaaatcatactgaactgactgccgcttatcctccagggggcgccaaccacaggtagtcatacaccatcctacatgatgcggcccatctt

SEQ ID NO: 131521 - DNA, 399 bp, Glycine max
  unsure (1)..(399): unsure at all n locations
  Clone ID: PAT_MRT3847_89771C.1
gggtttcgttttcggtcgcgtgggcgtgaatcattttcttttccactcttagtttatttgctgaacactctcctatttgatgtaggatttcgggtcagattgaaacgtcttctgtacattttgcagttctctgattaagttcaagttcaggctggtgaaatcttggtttagtgctcccactctcctctctggtgtaggacttggngggtagacttttctatttctcttttctccttgactctcttcttctcactgatccgcattgccgatcaaagtggtctcatttgaaaaacacttgggcgttggtgcaaatgtttgcttcggtaactttctctggagacaacaggctcactgtgaaaacaatttttactcgcagagatgtggacatcttggttgttt

SEQ ID NO: 131522 - DNA, 238 bp, Glycine max
  Clone ID: PAT_MRT3847_89772C.1
tcctctagagcggccgcttttttttttttttttttttttttttttttgtgattattatatcagattgtgcagtatttgatcatcttgtttgctaatgacaggactgagaaggatattactcctatgggtgggttccctcattatggggtggtgaaggatgattacattatggtgaacccttctgtcgtcttctcgcacccgtacggacgcgtgggcggacgcgtgggcggacgcgtgg

SEQ ID NO: 131523 - DNA, 382 bp, Glycine max
  Clone ID: PAT_MRT3847_89773C.1
ggatcgtgttgttgtgtttgctttggagaaacgaggtggtgttcgttgttggcgaatactcactcacgcgtttgtagttgcaggctctaatcagatcccaaatggtaatccgtgagctcagtggaatgattctttcccgtgcgctcaagcaatgtaattttgtggaatggcgaggacataaagttgtttataaaaggtatgctagtctctatttctgcatgtgcattgatcaagatgacaatgaattagaagtccttgaaatgattcatcattttgtggagattcttgaccggtattttggcagtgtctgtgaactggacttaatattcaactttcacaaggcctactatatactagatgaaattctaattgcccgtgagct

SEQ ID NO: 131524 - DNA, 1063 bp, Glycine max
  Clone ID: PAT_MRT3847_89774C.1
cccacgcgtccgcccacgcgtccgacggctgcgagatgacgacagaaggggcgggatctttttgttcgtgttgtgtttgctttgaagaagtgaggggtgttctttgttggtgaatacacccactcacgcgttcgtggttgcaggctctaatcagatcccaaatgatcaactttgtgcttctcattagtcgccaagggaaggtgagactgacaaaatggtactcaccttattctcagaaagaaaggagtaaggtaatccgtgagctcagtggaatgattctttcccgtgctcccaagcaatgtaattttgtagaatggcgaggacataaagttgtttataaaaggtatgctagtctctatttctgcatgtgcattgatcaagatgacaatgaattagaagtccttgaaataattcatcattttgtggagattcttgaccggtattttggcagtgtctgtgaactggacttaatattcaactttcacaaggcctactatatactagatgaaattctaattgccggtgagcttcaagagtccagcaagaaaacagttgctcgattgatagcagcacaggattcgttggtggagaatgcgaaggaagaagtcagttcattaagtaatataattgcacaagccactaagtgaggagaacaaatgtttcagtttcctgctcctcatatagtatgtcgaattgtcaatgtccgattttactgttattaagttgtatttcttgatgttgtctttctcaatatcatgtttgtgtatgcctgaactgtattacttgttgtggtgagattgagcccccagggttacttttactttgtatgttgttttgagattgaaattgaatagattccttgttaatatcctttttctttttcccattttgtaatatattgtttgctataaagagtttgtaagaatgattagaaattattttaataggtagagtattattttcatggataagaaattatcgtaaataacgcctccggtcttggtggtcttacttgtaaagcactgacaatttggctaatccagtaaatatgttatagctcaaa

SEQ ID NO: 131525 - DNA, 484 bp, Glycine max
  unsure (1)..(484): unsure at all n locations
  Clone ID: PAT_MRT3847_89775C.1
tgggcatttcacatactagagttcatcccagtgaaaagaaagtgggaggctgatgaatcaatcatgcgccatatgctttctacattcaaggatccacaagatcctctctggcttgcgcttttcccagaaggcactgatttcactgagcaaaagtgccttcggagtcaaaaatatgctgctgaacataagttaccggttctgaaaaatgttttacttccaaggacaaagggcttctgtgcctgcttgcaagagttgaggagctctctcactgcagtttatgatgtaaccattggctacaaataccgctgcccatctttcttggataatgtctttggggtggatccttctgaagttcatattcatatccatcgcttcccccttgacagtatcccatatcaaattgatcgaattttgatgtggttgataaatagattccagacaaaggaatcagttanctttccaattttcaaaacctcaaggtcag

SEQ ID NO: 131526 - DNA, 713 bp, Glycine max
  unsure (1)..(713): unsure at all n locations
  Clone ID: PAT_MRT3847_89777C.1
cccacgcgtccggttttccatcaaactcaaacataacagggaaatcatttggatttacggcttgttcggaaccaatggctcttaatagaccccaagatacagtttctaatgtcacaggcaaatgaagataaaacatctggagacttcagagaaatgggatttcggcttgcccaggaagtgatcttgttcctgaaaaagaagatggataaagcttcaagaaatggaaacttgaaagatatcaagcttagctttgttggtcattctattgggaatctcattatcaggacagccttgacagagagcgtcatggagccatatctaagatacttacatacatatgtctccatatcgggtccacacttgggttatatgtatagttcaaactctctattcaattcagggttgtggatattgaagaagctcaagggcacacaatgcattcaccaacttaccttcacagatgaccctgatcttgagaatactttcatctacaatctttccaaggagaagacactggctaacttccagaatgtgcttcttttgtcctcacctcaggatggctatgttccataccattctgcgagaatagaaccatgtccagcagcttctttggatttctctaaagagggaaaatcttcctggagatgctgaataattgcttggaccaaatccaagctcacactaacgatnagggtggtcatgcgctgcgacat

SEQ ID NO: 131527 - DNA, 884 bp, Glycine max
  Clone ID: PAT_MRT3847_89778C.1
tacggctgcgagaagacgacagaagggtgtgttttaatctacatggatgaaaacaatttatttaacgataaaatttatgttcaattctgattatatacaaaaattctttaagccaataattgaacccattttatgataaactttccttccatttttgttcctctagtaggcctaatatttccggcaattgcaatgacttctttatttcttcatgttcaaaaaaacaagattttttagatacagaaaacaaagtaaaattctggggttttttattccccaattataatactaaattcaaataataatcatatatcgtaaataaaattagtcttcgaccactaaaaaaaaatagcaaaagctttatctaaataaacatgcatcacacgtcattagctcctatgttttgtttaatgtagctctagtctttgtgatgcctgtgagtgtaactaccttaagttgctctgaacatattataccctttcattatttgctttatctcaatactttcatcatattttaagatttaaagttttaggatatattataaaaattctctttagataattagaccgatttaataaactctatcatttaagagagatgaattagcactcaataagaaaataataaaagtcattatttagattaaaaaataatttccattgccaaaggtttacatagaaattttttggtaattatcatatatcgaaccgttcaaaattcaaataaataaaagttttggtgacttcttgagttcttatcggtcttttataatttaattatattttcttatttattttttaatagataattttttctattttttatttcattctcccattagataaattttttcattcattaagtcatacaaaacctttccc

SEQ ID NO: 131528 - DNA, 476 bp, Glycine max
  Clone ID: PAT_MRT3847_89779C.1
ccaactccaataattttacctttgttgttgcctccatagatcacatgttcactattctttgggagaaatatgaataaactttgatgcatctcgctgccctgtgtttggagcaactcggtatcaatgtgccaactttgattcaaggagtccatcattcatataatcatattttgactttgatacccaaattttcttgggtccttgtatgttagttttgtgtaaggatccttttggaacccatactgtttttccaatggtactaccattctttctaataaaacatgttgatacactataatcattcttaccataataaaagcatgttaacaagggagaacaaccttttgagtggaggcaaatgaatctttatgcatcttttgttgattttcaggattatatactactccagcttactcaaaaatacatgtttgcttgccaaatatagtatctaaattatcattaccaagagtaaattt

SEQ ID NO: 131529 - DNA, 419 bp, Glycine max
  Clone ID: PAT_MRT3847_8977C.1
gaaaatgacaacacttactactatttttattttcagaaaggtttactcactactatttacatcatgcttgtttacagtaaaaataaactgaactataactcatattaatcttttaagaaagagaagtgtaattgttttttattcaccaaaagagagagggtgtattgactgtattctactctaacttttacagtgataaagtggaccagcaactacatacacaagaaagtaatttttacttcggcatgaattgttctgaggttacatcttcacaatcttgtcaattaccggttcaacaaaggcttctaaatcatccaggtcattcttgagttcttcaaccttgtgtaagaattcttcagttaactgagcatcatgtgctgcctcttttgatgcacgttctaccaccaaagctgcttttc

SEQ ID NO: 131530 - DNA, 220 bp, Glycine max
  Clone ID: PAT_MRT3847_89780C.1
ggtgttgaaaagttaaacaatccaggggtgagtgaacaacgcaatgattaagcctaaacacctagcgccttttttgctaagacaagcaatacacatgttgaaaaaaaatccgtgaatcacaagacctagctcaaattacgttcaccccacgggctcaaattctaaacaacggtattggattatcaaaaaaccgattcttcttttgaatgaaatacacaaa

SEQ ID NO: 131531 - DNA, 256 bp, Glycine max
  Clone ID: PAT_MRT3847_89781C.1
aacaattcaaaacaatttacaatccgaaacaaaaaaaaaaaaataattataaaaaaaaaaagggccaaatcaaaaaaaatatctaactccacttactgctttgtttttaataaacctttaacaacaaaaaaaacaatctatctaactacaataaaaaataggaaaatacccaacttttcgccaaacgagtaattttctccacagtgggaatagtttaaaccttttatacattcaacaactgattttactttaggga

SEQ ID NO: 131532 - DNA, 131 bp, Glycine max
  Clone ID: PAT_MRT3847_89782C.1
caagaaatgaaacaatttaattaagaaggaagtgatcgatacaatacaggcaaaacacagagttcagcagtacagaccgaacctaaccaacggggattaaatgggtgatatttaattgtacaaatctaaag

SEQ ID NO: 131533 - DNA, 227 bp, Glycine max
  Clone ID: PAT_MRT3847_89783C.1
gcagaaatgattaactgtctttgcggtggtgataaaaaagtcgacggtactatgaatttctgtgctcattccacccacctaatgcacacagaatagattccacaaaatgctgaattgcatttttcacaacaggaattttttacaactatcacaactcaggtacttcctgcaccaactctatttgatgatgcatgtccatatatcaattccaagcaacatgatacttc

SEQ ID NO: 131534 - DNA, 410 bp, Glycine max
  Clone ID: PAT_MRT3847_89784C.1
aactttggtctgatttagtgcttgcatggtcgtgagaagatgatagaccgggatctacaatacaatatacctctccctcgccgggactttatctaaactaggatttacttgctagtactcgagagagaattttataaatataaagagaacactcgctctaagctctaatcaaatctagtctagcgaagaacgtgaaagagtaacgaggaactcctgaactcgagctcgaggaagttatttccgaagaggagtaagataaccttgaacttaaaatatatagttctcgttttttaccctctcgctctcgctctcgatcttgatgagtaacggaatcatttcctcccttccggtattattattaagaaaaaaaaattactccctaaattttataattctaattcccttaaaca

SEQ ID NO: 131535 - DNA, 247 bp, Glycine max
  unsure (1)..(247): unsure at all n locations
  Clone ID: PAT_MRT3847_89785C.1
ctcttgtcnattcgganctagattcttcagtttctcctcgttgtnctncgctttcctgttttcaatttcgantctttcgttaatttaataagatgtttgggagngcaccgaagangagcgataatacgangtactacgaaatcctcggcgtctccaagaacgcttcgcaggatgatctgaagaaggcttacaagaaagccgccattaagnatcaccccgacaaggncggtgatcccgagaagtttaa

SEQ ID NO: 131536 - DNA, 793 bp, Glycine max
  Clone ID: PAT_MRT3847_89786C.1
ccacgcgtccgctgaaacgtagagaaattgttttctcttgagcccggtgtttttgatacgcagtcacggaagcaataatattatggataatatgcaaccccaaattcgattggggtgatccaaaactaactcttgaagcaatcccaccccacccgctacctgactctgttgtcgaaacaatcttgtttctgctgctgataatctcttggccaaagccagagaatagaatcacaccaacatggatttgaccctttctctttctccttcttcttcttctttagttacctcgagacttggttactcttcctccttggccaccaactctaacgctaactcgaggaaagctagaatcagcacccgaagaagtaaggctctaacttgcaacgctttgttcggattgggcttgcccgaactcgccgttattgccggtgttgctgccctcgctttcggacccaagaatttgccccaagtgggtcgctccctcggcaaaactattaagagcttccaacaggcagcaaaggagtttgagtccgagattaaaaaggaacctgattctacagaagagaaccctactgctgctgagaaaccaattgctgcgagtaaacaggaggagcaagagactaaggtgtctactaaagataatgtatgagatgtagtagagcagacatattttggtaaaaaccctggtggacttatacatttaaaagaaacattattctaaaattgacatttaatagttttgcttttccagagtggaatcaaacaaaaaaaaaaaaaaaaccaaaaagggcgg

SEQ ID NO: 131537 - DNA, 165 bp, Glycine max
  Clone ID: PAT_MRT3847_89787C.1
acagacatccttctcacttatacatctccctacactctctgaatagaatctgttcagactgccttcttaaactccatactcagaatcactgcactacttccacaaaattctcatgtatacaccatctatcagacaccacatgacttcattcttcattcaattcat

SEQ ID NO: 131538 - DNA, 175 bp, Glycine max
  Clone ID: PAT_MRT3847_89788C.1
ttttggttttttctttttttttttttttttgcccccaccgaagtccgaaggatgggattatccatatgctgaaatggctgttatgccatcttagatgcaacaaagttaacataatgttacttgtacaattggatcttatcgcttcaaaaacaatagagcctgagactacaaaacc

SEQ ID NO: 131539 - DNA, 444 bp, Glycine max
  Clone ID: PAT_MRT3847_89789C.1
caagacacaaacataacaacataagaagagagagaaagagaaaacagagaaaaagaatgaatgaataaaataatcattcactctgtttctattcttctgtctaccatagcataactatgatatgaacaccatataataattaacaacaataatttaataatactctcttcattgtaaattccatcttcacttcacttctcttctctgttctgtggagtatttaatcatttcgtaacaacatacttttcttttcattctctcaaattttttttttttttgcttttcgtttgttttctttggtttttaattctccgttttccaaatccatgattgcttcttgctgccgagaaaccgttccgccgccgtccattcccgatctccggtaaccggaaaatgatccctttcgcgcatccgaatcccggcatggcaagccgcaacaactac

SEQ ID NO: 131540 - DNA, 679 bp, Glycine max
  unsure (1)..(679): unsure at all n locations
  Clone ID: PAT_MRT3847_8978C.1
aaaggcgtctaacaaaactaatctgcattaacccctgtaattgagacacatctcaaccctgtaattgatacaaatgaaatttaaaaggtctcttcggcatacacagcgaagaatctttaaccatacatttcaacatgcattttttcagaattataaattacattggaattatttgaataacatttagcattccactgattccagcaaagcactccctactaatcaaattctgaaaagtgcacctcacagatgtggttttcctcatggaaaagcaggatgccttggaataatcttcacaatccctgcaatcctttctaatgctgggtaatctaatcaagtagagagataaagctggcatatgaaatacctccagagagcctgcaagttccgactttccattcacccaatcaatgtactctatttgacacggttagtatgtggatagagaatagtggaaaacctttgataactcataagagaccattatttcagtgatctttcagccctaatggttgcttcagtatcagatttttttttggtcagcatgcttcagtatcagnatagcttacactttcgataataaccgcacaatcatttgtagtcacctcaggaaagaagcaacactaaatggcctcaaaataggagctatgcaatctgttaattttctagcacatttgca

SEQ ID NO: 131541 - DNA, 295 bp, Glycine max
  unsure (1)..(295): unsure at all n locations
  Clone ID: PAT_MRT3847_89790C.1
tttnntttttttttttanccacanannaaccnaagcaacagcaagtttatttgaaagcaaaccaacccaccccannccgggcggggcagagaaccaaaagagagagcggcagagaatcgccgcttagcagcacatagcatctacattattcctcaaaataacatgtttgtcagtcccaaagagcagaccaacaccgaatggcccgcaataatgatattcatatatagagaatcagggggacatgggtgatccaactttgtaacaaaataaaacattacatttcgagaaacaccct

SEQ ID NO: 131542 - DNA, 311 bp, Glycine max
  Clone ID: PAT_MRT3847_89791C.1
gccaggaattaaaattgttctccgtttattgaccataaaaaaatagtctttaaatggttttatttaaacgttgccttttcccacaacggaaagttccaagaattccaaactttgcggtgccagacaggggctgaaactttttctttttatattccacgcaaagcatgtttaatggacactacacgaaatttcctatgccccaaagggacttgcctatctttatgctaatttcccgcactcgatttctagcaaacatgttgcttcccccttacctgtgcggcaaatttggctgtggttttcactcttttttt

SEQ ID NO: 131543 - DNA, 289 bp, Glycine max
  Clone ID: PAT_MRT3847_89792C.1
gggggaaaaccctgggaacttcaatcacaaggatactcctcagccagaagggaaaaaaaatggccgagggaggggattcatggccgctcgcaacaagtttctatgtgcaaactatcccttaacccctcgcgcgctgcgattcctttgaggaaataaactttaacctccatggaaatttctaatgggggtataaagccaaactttttttggattctgcgctgaggctctaacccgggggaacctgaagccccctgcggcgacagagtttagtaattctttttttaggggg

SEQ ID NO: 131544 - DNA, 418 bp, Glycine max
  Clone ID: PAT_MRT3847_89793C.1
ccgaccataactaggtttaaaaggaaaatcctcactatacaggcctgaatggcccgcccacaactcttttcggagtcttttttttcttaccgctcataattctctaaattatttcgctgccgcccaaggaagagtataccacccttttctttaggtcggcacgctacaatcaaaggagcacataccgcctataaactcttttacacataaagatgctaatgcttccttttccgataactaccatcgattataaatgcgtatattatctacagctgtccacattatgggagctttacagaatatatatagggtcatccacagcaaccgtgtacatagtggcggcttcagccacatgtctacaatcattaaatgcctctacatcatgcctacccatgcaagaacaaaagcgtgaacctaa

SEQ ID NO: 131545 - DNA, 509 bp, Glycine max
  Clone ID: PAT_MRT3847_89794C.1
ggaaagctcttgaccaatgcttggttctgccaatcttgctaatgaattgttttgttttgctgggtcaatgtgctaggccactgaacacagaaggaggagaggatttggtcacagcaacctgcaagcacaccctccatttcgaactatgcatttctaccttgagatcagtccctgctagcaagacatcagatctaaaagtgcttgctgagattgcattgaatctgagcacaacatatgctgcagacactttgtcctatgttcatgagctgcagtccaattcttctgctgccaattatggctccaacaacatcatttacgcgtcacgttgcttaagtgactgtgcagaggaatactcagaagccatagagaacttgaaggactccaaagaagcacttgctgatggagattgcgaccaaatggacacgttggtttctgctgctatgtctgatgctgagacatgtgacgatggcttcaaggacatgcaaaccgggattagtgattctacctcc

SEQ ID NO: 131546 - DNA, 236 bp, Glycine max
  Clone ID: PAT_MRT3847_89795C.1
tgggatttcaatggcaactcaaggtcgggtcattacctgcagagctgcggtggcctgttaagcgatcaagtccttacatgtccaacacgttcatgtggttccgcctcacgctgtcgaagtccgtgtcgacctcctcttgagcgcgctccgccacaccgatgcttacacttggggcggcgaggatcccaagggtcccttcacctgtattctcggccatgaagctgcagggattgtgg

SEQ ID NO: 131547 - DNA, 199 bp, Glycine max
  Clone ID: PAT_MRT3847_89796C.1
actatacttcaaaccaatttgaggttacacccatatattcataccagaatggttacaaatcacataggaagcatttacaacattcttcagacaaaagcaaaaaatagacgatgtagctatacacataacggcgaatgacgatctctatgttacccaccagcatcaggacacttagattgccaataacgggggaaaggcc

SEQ ID NO: 131548 - DNA, 488 bp, Glycine max
  Clone ID: PAT_MRT3847_89797C.1
gggggaaaaaactgccccggggccccccccttttttttcccttcaaaaaagttttttttttttttttcccccttccattggacaaaattttttttttgttcccttttaaaaagggttccttaaaacccttttccccaagggggggccccccaatttttttgcccaaggtttttttttttttccccccgggccccccctgtgaatttgcctcctttggacctttttgtgaaaaaatttttttataaaaaaaaacccccgttattacccttcctggtgggccccccggggtgcccattttagcttctcctggtttgtttggcccccaagaactttttttttaggggaacctcttttggttttccccccttgttttaaaaacataaaaaatttttttttgccggtttttttttggggtaaacccccctgggtttgggggtcccagacccattttggcggcccccgttaatgttggccggggaatttttttt

SEQ ID NO: 131549 - DNA, 307 bp, Glycine max
  unsure (1)..(307): unsure at all n locations
  Clone ID: PAT_MRT3847_89798C.1
tcatctcaaccactctcgatctcttctgttcttctcaaatcccacaatctcatcagattgaattgtttgttgagaattggcgctcgattcaatctgattgattcacaatggcttccccaaacaaccacaacccttctncacccccattcccttcgacatgcactccttctttaacccccaaccaccaccaccaccttgctctaaccctaaccctaaccctaaccctaaccataaccctttcttcttctacccttccccctttcacttncccaaactttgaccttcccttttccttccccacacccca

SEQ ID NO: 131550 - DNA, 226 bp, Glycine max
  Clone ID: PAT_MRT3847_89799C.1
tcttactcttaattttctcttcattaaactcaacgtttccctctattccctctgcgttttttaacttggtgttttcccttaacaaatccgaatttttctttccattacccaaacccaaacttttgaagattccaaataacttgttgttcttcaagaaaaataattcccctaaaaaaatgtattccatttgtgattcccttcccgaaccttctccgaaaaattttcc

SEQ ID NO: 131551 - DNA, 1136 bp, Glycine max
  unsure (1)..(1136): unsure at all n locations
  Clone ID: PAT_MRT3847_8979C.1
ggagatcgctcaatcccacacgcttcttactcctctcataacttttctgctccccgttgagaaagatttgccacacgcttcctactcctccctttcaccacttttctgctcccccttgagaaagaatttgaatcatcaaaattaaaaactcgcaccaacaatggccccaagagacagccgagccaccgcgttcgccggaccaggcccaggcccatcaccggcccacaaagagatccgctaccgaggcgtccggaaacgcccctggggccgctacgccgccgagatccgcgaccccggcaagaaaacgcgcgtctggctcggcaccttcgacacagccgaggaagccgctcgagcgtacgacaccgcagcgcgtgagtttcgcggtgccaaggccaagaccaattttccgacaccctcggaactcatccttaacaacaacattcgcagtcccagccagagcagcaccctcgactcttcctctcccccgtcaccgccaccgccgcttgaccttaccctaacccctctctccgtggccgtcaccgtcttcccggtggctcgtccggttctattctttgacgcgttcgcgcgtgcggacgccatgatcgccgtctcccgccgcgagatgtgtggctttgaacgccccgccgctgatttccgccgtaacgactccgattccgattacaaccgccgcgtgctccttgatcttgacctgaacgtgcctcctctcccggaggttgcctgattcatgcagggagatctggttttccgcaatttttttcgtactacttttttaagcatctgggaacactactacgcatttttttgtgacgaaattgccctcgagaaattatagtgttacggagagggagcagcagctaagtgtgagtagtggatgacatgatgctcggaattgttgttgaccattttgtgatgaagatataatcggcacgttatgtaaatacacgttataaccgaaaagcaaacgcgctttttcttgcttttttttgcaactgagaacttaacagagtatctcatggttgtttctgtaatttctcaaaatatataaatatttccatttccatccttttattattaatatttatgttatccctggngaggcaaacatgaaaaaaata

SEQ ID NO: 131552 - DNA, 250 bp, Glycine max
  Clone ID: PAT_MRT3847_897C.1
ttcccttgaccaatggctgagctacaacacatcaatttgctcacattttatgcatctcaaatgaagttcattatgacgattatcctaattgcgtcatctatttggccccagctgcatagaagaatttgtcataaaaacatgcatatatcacgaggatgtatctattagctagcttattagtcactgtaaagcttcattcctgtcgccttagcttaccttaccatttatgcttacatctctgtatatttat

SEQ ID NO: 131553 - DNA, 433 bp, Glycine max
  Clone ID: PAT_MRT3847_89800C.1
attaagaaaagtgctacaactcaagaatcagctccagctatggcatggccacgcattgttaggggttctccattcccttctgctaggttttccagacatccctttccaagaggtattcctggtgcttttagagcccgacccccaattaaactgggtgccaggagcatgcagtggaagcgggatgctcagggatctgacagtatttcatctgtgaatactggcagtgttactgctcctgtagctcgtgggttcacctacatcagaacagaatctaagccagaaggcagcttgagtacgacatagtttatttcctaaaatggtgttagactgcagttgcatcagattgctttcatctctgatggcgtaaaaattggtaaacaaaaaaaagttatgtaagaggatgcctgccctaaattttggattttttcatatg

SEQ ID NO: 131554 - DNA, 1198 bp, Glycine max
  Clone ID: PAT_MRT3847_89801C.1
ggcctatttgaggtagttggttttagagatgcttggcatggtcttgttttgcttgcaccaaagggacacggaactcgtttggcacagacaagcagaatccgttttgagtttcacaagggtgcagctgactgcacattcatgagaattgatggagagccatggaaacaacccctcccaaaagatgatgacgcagttgtagttgagatatcacaccatgatcaagttagcatgcttgcaaccccattgtgccgttctaaaagtatttatgatccctcctcaccttccgatgaccgcgaagaagatgatagcagtgaagaagaaccatcagaagattgggaagaacggcgcaaatttggcgcagctgagacattcaaatatcctgatggaattgatatagctcaagtaagttagtgtacagagaggagtagcattgctcagtgtttggtggtacaaaggcaagtagtagggtataaaatgaaagggtaggagtaaaattcttttcttgtttggtgcaaataattttccttactcgtacgtgtaatgtacagaggacttccgaggaaattaaccaagattaatgactagtgattaatgtaatgaaccttggatagggttattgtttgttgtcttacttctagttgcaaaatttattctttcatttcaatgtcaagcgtctatgatggagagttggagctggatatattgcatgcgtaacactcttccaatttctctgatgggaaaactgtcccccaattctgattttaatcgggaaattttgggcagttttaatttcaagctttgcgaatgatccttcctccccttccgttgaccgcgaagaagatgatagcagtgaagaagaactatcaaaagattgggaagaacggcgcaaatttggggcagccgaaacattcaaatatccagagggaattgatatagctcaggtaagttagtgtacagaaaaggagtagcattgctcagtagtagggtataaatgaaagggtaggagtaaaattcttttcttattttgtgctgcatataattctccttgcttgtacttgtaatgtacagaggactttcgaggaaattaaccaagattaatgactagtgattaatgtaatgaacctcggatagggttattgttgccatacttcgtgtacagaccttgtaggtttgtttacattgcaaaatctattatttc

SEQ ID NO: 131555 - DNA, 303 bp, Glycine max
  Clone ID: PAT_MRT3847_89802C.1
tcacgaagaagaaacccttacattctcattggaataggggcttgctttgaaaagtaaaaaaaaatatatatttgtgtgtatacaaggctggtatataaaacatttcacagacctacaaaaaaattctacttctgtagcaatgactcaagaattttctactgggggtccgtgatgcttacatgtcgacacacttcctaacatagctaatggatcttcgttcttcacccagttgagatgatttttctgatttttaggtacctatgatctggttttttcctagggctcaagggcagtgcaaattca

SEQ ID NO: 131556 - DNA, 654 bp, Glycine max
  Clone ID: PAT_MRT3847_89803C.1
gaaataatagattttgcaatgtaaacaaacctacaaggtctgtacacgaagtatggcaacaataaccctatccgaggttcattacattaatcactagtcattaatcttggttaatttcctcgaaaggcctctgtacattacaagtccaagcaaggagaattatatgcagcacaaaataagaaaagaattttactcctaccctttcatttataccctactactgagcaatgctactccttttctgtacactaacttacctgagctatatcaattccctctggatatttgaatgtttcggctgccccaaatttgcgccgttcttcccaatcttctgatagttcttcttcactgctatcatcttcttcccggccaacggaaggggaggaaggatcattcacactcttaaaacggcacaatggggtgggcagcatgctaacttggccatggggtgatatctcaacaacaactgtgtcatcatcttttggaaggggttgcttccatggctctccatcaattctcatgaatgtgcaatcagctgcacccttatgaaactcaaaacggattctgcttgtctgtgccaaacgagtcccgtgtccctttggtgcccgcaaaacaagaccatgccaagcatctctaaaaccaactacctcaaat

SEQ ID NO: 131557 - DNA, 1709 bp, Glycine max
  Clone ID: PAT_MRT3847_89804C.1
cgatttgtccatcatgatgaatgaaggcgagatctaggttaagcgataaaagtatgaggaatgacaaattaaggatataaaaatggcgatttcgcgcaaaccttgtaaaagttcatataatcctaagtaaaaccatttatttattgattgtgttgtgtgtgtgtgcacggtctcaggtcaggttaattacactcacatctacatccactctctctttctctcttcttcttcttcttcctcctctaagacgaataataatggagcagcttcaaacccccaccatcacccataataacacgaacccagaaaccaacaatggcgaatcccttttcttccaagacttcgacagcacctgctccaccccttacgtcagcgccccttccagccccggccgtgggcccctccccggcttcttctacagcgctccggcgagtccaatgcacttcgccatcacagccgcatcgtcttacgagaaaactccttcttccgcaccaatgggtttcgagttcgaattctccgcccggttcgggtgctccggttcggccgggtccggttcgatgagctcggccgacgagctgttcctcaacggtcagatccggcccatgaagctctccagccacctcgaacggccgcaggtcctggctcccctattggatctggaaggaaatgaagacgaggaggacgaggaagtagtagaagaaggcgttaacgttaacgttagcgttgtccgaggaagagatctgaggctgagggacaagtcggttcgcaggagaaccagatagtagaggactctttggatttgggtttggagacaacaccttcggtttcaggttcggcctcgtcctctcggtcttcctccaattcgactcgcgatgattagttcctccgaagcagagaaagtagaggatggttttggtttggagacaacaccttcggcctcgtcctcacgctcttcctccgccgggagaagctcgaagcggtgggttttcttgaaggactttctccgaagcaaaagcgaagggaggagtaacaacaagttctggtccaccatttccttctcaccaaccaaagacaagaaaaaccaaaatccaccaaacaccaacaaaaacgtggcttcttctgaaaccacgcagaaacccaagggaacgagtagttctcagacttgggccaggagaataagtgggaagcccacgaacggtgttgggaagaggcgcgtgccagcctcgccgcacgagttgcactataaagcaaaccgggcccaagcagaggagttgaggaaaaagaccttcctcccttacaggcagggtctacttggatgcttgggatttagttctaagggttatggggccatcaatggctttgctagagccttaaaccccgtttcctccaggtaaatttcttcgctttccctttaattgtacagatcattattattatttttatttctttcttcattttggaatcctttagcttagtcttagccttaagaattaagatcaccccatgttcaaggggttcgttttacgagggttctggttctggttcttgttcttccctctccatccttcttgttgaggatgcggaactgataaaagtattattatgtacaatataccaagtcatgtactcgtactcgcagcattttgctatttacacagttgctgtgcagtgactggagtttattactaatatatatattttccacactt

SEQ ID NO: 131558 - DNA, 1648 bp, Glycine max
  Clone ID: PAT_MRT3847_89805C.1
gaagacgacagaagggggtgtgtgtgcacggcgtcaggtaaggtattacggggtcactcacacatccacatccactctctcttcttcttcttcttcttcttcctctccacgacgattaataataataatggagcagcttcaaacacccaccaccacccataataacacgaatccagaaacctccaactccaacaatggcgatcttttcttcgaagacttcgacagcacttgttccaccccttacgttagcgccccttccagccccggccgtgggcccctcccaggcttcttctacagcgctccggccagtccaatgcacttcgcaatcactgccgcatcgtcttacgagaacaccccttcttccgcaccaatgggctacgagttcgaattctccgcccggttcgggtgctctggttcggccgggtccggttcgatgagctcggccgacgaactcttcctgaacggtcagatccgccccatgaagctctctacccacctcgaacgcccgcaggtcctcgctcccctgttggatctggaaggagaggaagacgaggacgaggaagtagtggaatccgttaacgttaacgttagcgttgtccgaggaagagatctgaggctgagagacaagtcggttcgcagaagaaccagatccatgtcccctcttaggagcaacacgccgttagagtgggccgagaacgaggacgaggaggatcacgttcacgacaaaaacgtgaccaagcccaaccaaaccaacattattagttcctccgaagcagagaaagtagaggatggtttgggtttgggtttggagacaacaccttcggtttcaggttcggcctcgtcctctcggtcttcctccgctgggagaagctcgaagcggtgggttttcttgaaggactttctccgaagcaaaagcgaagggaggagtaacaacaagttctggtccaccatttccttctccccaaccaaagacaagaaaaatcaaaacccaccaaacgccaaaagcgaaaccacgcagaaaacgaaaggtagtagtagttctagttctcagacttgggccaggagaatgagtgggaagcccacaaacggtgttgggaagaggcgcgtgccaccatcgccgcacgagttgcactataaagcgaaccgggcccaagcagaggagttgaggaaaaagaccttcctcccttacaggcagggtctacttgggtgcttgggctttagttcaaagggatatggggccatgaatggctttgctagagccctaaaccctgtttcctccaggtaaatttcttgggatttcccttaaattgtacagatcattattaattattattattatcactatcactactcctcctattattataatttctttgttcattttggaatcatttagctttgtcttagctttaagaattaagatcaccatatgttcaaagggaaagcttatcctaggttggtgagaagtaagattaaaatacgagggttctggttcttgttcttccctctccatcatccttgttgaggatgcagaactgataaaagtatttatgtacaatataccaagtcatgtactcgtactcgcagcattttgctatttacacagttgctgtggagtgactggagtttattaatatatattttccac

SEQ ID NO: 131559 - DNA, 684 bp, Glycine max
  Clone ID: PAT_MRT3847_89806C.1
ctatgatgctcacttgcttgacgtcgaccgccaatagcggccctctgcatcagaggccctgaagcttccatgctagtagtcaccatatgaaccaatatcatcgcatctgatttagaggagcatcaatggttgtcatacccatatgaacccatatcatctggaaatatatggcgggttctttatggtgataatgtcacctccctaagttgggttatgttcatgtttcaaccccactgacacatcctcgctgcttttcatgatctattttaaagataaaatggaaagagttgtgctgtgcccttccacatttatgcatactgcattggaaggtgttttggttttgtggaaaatgtctgtctccttcccctaaccatacgatcaaatgatgtaattttgcacggaaggtgtaatgttaggtttctgctttctttgttctgctggacagggaaatcgtagaatcttcttgtacatggtgtgtgataattcttttaggctatctggtaatatttttgtgatacagatactaaagccaattttgcatggcgtgtgacaccatacttgggaggaacatgaaactcaaattgcctgtacttactgtttggagcaatcaaattgtatcttgatagtgttaagtaaggaacagtgttaggttttaataacagtgtttggaatttgccctttttt

SEQ ID NO: 131560 - DNA, 241 bp, Glycine max
  Clone ID: PAT_MRT3847_89807C.1
gggaaaggaaaaagggctaaaaaaatgctgaatgaaggggcttttacataacccgtttttcccactttcaagtcctcccttttcaaggtttattcaccccctttacttaaatggggggaaccccccaggttttgctcaaggcttttccaatccttaaaaacccctttttttacaaaaggcccaactcatcaaagaaagggccggttttactattttgccccctttttttgccccccccttt

SEQ ID NO: 131561 - DNA, 661 bp, Glycine max
  Clone ID: PAT_MRT3847_89808C.1
atctcctctaattgattcctcagttctgttctatttttcgtaaactcttcttcttcttcttcatcgtcccgaggctcagcgatgttctttcatagggttttgtcccgtgtctccaccaacatttgccgaacttcgctcctctctgcttcgcaaacaccccaacacttgtcctccttcgcaaatatcaacttacattcccttcttccccattcacccaacaaggtgattcctgttcaactcaatttgttgctgccaccaataaattcattatcagctccaagatttgggttttcttcatcagcttcaactgaaaataatgacaagaaaaacagaaataatgtgcataatggagattctacaaatgctgaccctgcaaaagcaaatgaagaggcaaaaaataatgatcaggctaggcaagacaaacctgcagataaaacagaggaatcagattcagaaagtgaatgtgacctatccagggatgatttaattaaacttgtggctgaaaaggaagaacttgtgatgttaaagcacaagggagattgaaaaaatgcaggataaagttctgcgtacttacgcagagatggagaatgtcatggaaaggactagacgtgaagcagataattcaaaaaaatttgctttacagaattttgcaaagagttac

SEQ ID NO: 131562 - DNA, 272 bp, Glycine max
  Clone ID: PAT_MRT3847_89809C.1
cggctcgagtacggctgcgagaagacgacagaagggcccctttttgtctacagttgaaataggtcgtgcctttatcagcacaatttgagatgtgccctggcttaccacacttgtaacaagtgatctaagttaagaaagtagtgggtttgctaccattaccaccagcaaactccatagcaatagtcctttgattgttggggtgattaccaaattgcttacttttggttgagtacggtttcccccgatgttgaggtctattattgtttttttta

SEQ ID NO: 131563 - DNA, 253 bp, Glycine max
  Clone ID: PAT_MRT3847_8980C.1
ggttttttatcataataattctgtatcctcagaaaaaagaaaaatgtttatatgttctttgtggctctgaaacaaaacgcacatagtcgcaaagaatgacttcctagctgaaaatgactatcatctacttatttacgaaacggggctatgtgtttatataaggggggatgcctggcccccgcctgagagaatgatgtaagttgccacctgctgtaatggaggccaagccatctccttatcatttgaagagccg

SEQ ID NO: 131564 - DNA, 250 bp, Glycine max
  Clone ID: PAT_MRT3847_89810C.1
cacacactattaattggggccctgaattttaaacattggaataggaggtctcatataatatacaaccattacaatactttcaataatgctaaaaaagttgggccaagggataatgcaacaacaccattccagaaattactaacaaaatctgatccaacaaacaaaacagaaaacaaaacactttatgactcaagctgagcataccatatgccctggatttttacattctttgtagcctttgctcccaaat

SEQ ID NO: 131565 - DNA, 556 bp, Glycine max
  Clone ID: PAT_MRT3847_89811C.1
accccgtccattgcaaagacgcgggcccaaattccatggctctggaaagagaggatacgctagaacaatcacgtgttattgcatctggtcatcgtggatacagaccagcacactcaacagcgacagaaccaacaacagcatgtgatggtagtagacggagggactagccaagtggcctattcttctcactaccccactgcttgcatggcggcttctgccacgcccgctgtagctgctccttccccatctgacgctccagctggcttatgtacttctgcacaccagcttgactaccatcaggcacagaatgtacaccaccaacagctaaaacaccaacaacagcatgttcaaatgttcatcggccaaccatactgcactaaattgaccgaacaatagactatggaaaccatacgcttcctcttgctcgtataaaaaagataatgaaaactgatgaagatgttcggatgatactagcacactctccgtgcatatgagcgaacgctagagagatgtacatactatagttagacgagcgatcttggatccacacagtact

SEQ ID NO: 131566 - DNA, 273 bp, Glycine max
  Clone ID: PAT_MRT3847_89812C.1
gagccacacagaatgctaaataccttgcctggtgcttatggaacaaatccctatattgctgtatcgttgacactgctattacaacacctgaatgactatgaatgttaagatatgtagggcatttgaaatatgaatacaattgcagaccttgtctaggatgcccggtctttcaacgccatggtctgaccgatactagatccttggctggggaccctcctgatgctagtatattggttgaggtttatactgtccggacccatttatctactaaat

SEQ ID NO: 131567 - DNA, 306 bp, Glycine max
  Clone ID: PAT_MRT3847_89813C.1
gcgggccgccctttttttttttttttttagcttttccccttcttagaaccttttttctgaacactgcacagagaaaggtgacatttcataaaccaaagcagcacatcgcagcaaggtcctgaaactcgctgtgcttaacaaaaatgtaatcaggggttcccacaaacacaacacatttaaacacagttaaataaaagcaattttgccaccgtcgatcaaaaacccaattttgggaacaacacttgccagatgatgggggagacttcaaactttgtctcgaaaacaagttacctagaaaggaagaca

SEQ ID NO: 131568 - DNA, 465 bp, Glycine max
  Clone ID: PAT_MRT3847_89814C.1
ggggatgcaaagtctcatttggatttctatttcaattgagtacttgtgtgacatatatacattgaacggttaaaagtaaaaaagatcacagcgtgttagagccaagagattttctacatcaccattgtgactgggaacagcctatctaagaaagtatatacaccaccacctaacagcattgctccgctgtgggacaagaaaattgtaacatgcataagaaaccatggaaactatgaaattcaacaagtggatactctagtctttaaaaactagaaaataatcataccataaattgtgtatggggaacatgagtgtgcactctttattaaaagttcaaaaattaccttataggattgatccatgctgagaacttgcgaaatgagagcaagctcttatcaatcagaattcaatcagaaatattgttctccctagacatttgaatgttaaaattagaaagttatttta

SEQ ID NO: 131569 - DNA, 286 bp, Glycine max
  Clone ID: PAT_MRT3847_89815C.1
cttgggggggggggggggggcactaacaaagaggtaaaggacgagtatgcgtagggaaaggcggtggcgttgcctataacgaggtacaaagggacaaggccaaaaccgtcaacgtttaacaagggactacagccgtacaggttataatagtagttcagcggaaagggtaagcacgcaaaaggataaccatagggcatagtgacaaattacacataactgcgagatgtttaggtgtagaggttaaagagactttaaaggtacaagatgcaaggatgtgggggtttta

SEQ ID NO: 131570 - DNA, 397 bp, Glycine max
  Clone ID: PAT_MRT3847_89816C.1
gaagaacagcatattgtagatgctgcgacagaggatgatcacgtggttaaagataacagagacattgtttgcatctatgaaattatgcatcaaaggaagctgcaagaaggttcacttaaagttcttgatgaggaaggtaaaccaagactcatatgctgaaaaactccattcagacaatgctggattggtggaaaccgtatctgatggcaatgcaactgtggttaataatctatgtgacagattgatagatacaaacgatggccaatcaaactatctggagactgcaagccatacaactgaagctgttgatgtttcatatgcccatgatgatgatagcgaccacagctggatggttaagtcttagtctgactcaagggatgcctgcataactggtgac

SEQ ID NO: 131571 - DNA, 592 bp, Glycine max
  Clone ID: PAT_MRT3847_89817C.1
gggtttttaaaactttttttttttttttttaataaaacctttttaaaagtgtttcttttctaaaaaaactaaacaattatataatgttttttttttttggaagttcttaaccgggtattcccacaaacataacatgggggaactaaccctcaaattagaacaatgaataagtgaaaggataaaatcatctacaaatacttgccagtagtggaactagaaacattaacaatttaacatatttgcttttaaaaaaaaaacaatttaacagtatacttgataaatggcaggtaatataaagcaactaaagctcaaaattttaaacttagcatcaataaaaaatatttattattaatttttttaaaataaaaaaaatgttatatacgtaagcaaaaagattcgacatatcattttttatttaaggtaaaacaaaaatttctttcggattttacttatagcctcatttactgttgttggccgtgataaacggtgaagttgaaattagatgggattacattttttttaaagctagaaaatcatcttttagtaaaatctcttctttcgattatattttttgttattcttaaaaattaag

SEQ ID NO: 131572 - DNA, 184 bp, Glycine max
  Clone ID: PAT_MRT3847_89818C.1
ccctacctaagctccgaatttcgcttttgggccagggagtgcccactcaccaccacacctttactcagtcacactagccctttctgctcttcttctaactttcaagtgttaaaaaggtaaagagaggggcagacattcctatataccctcacagaaccgcgaacccagggacacccccgtcaag

SEQ ID NO: 131573 - DNA, 393 bp, Glycine max
  Clone ID: PAT_MRT3847_89819C.1
cctattcaattttccaccaaaatacatccaatactgaccgagaatggtgttccaaaaattccaaaatctaatcccaacacagaattataaagtatcaattaaagcaagacccaaactcattcgaataacaaaactcgataagatgaccgctcaaaacctgatcttggagaaaaaccaccgtttcttcccggttttgaacctattcccgaggcgattcttggtttccttgagagcagcgaccttcttattcttggcgtggaaaacgttggggtcaaccggggcctttaagtcaacatcaagcgtaaatcgcgtgggcatgacgggctaggtgattgactagttttacaatcactttcacgcgcgaattcttggtcgatttcttagccgagtcct

SEQ ID NO: 131574 - DNA, 264 bp, Glycine max
  Clone ID: PAT_MRT3847_8981C.1
cgcgagggccccctttttttttttttcctcaagggaaattgttgcttgcatggtgatactagtagttgccctcaaatgggtcaaaggatgatgttccaagttaggtagggtttgtgtttgatttccaaaatgggttgtattccggtatgtaaaggatcagaaatatgccaaactggttaaaattaattaaattggtgggggatttcaaaaaaaaaaaaaaaaaaaaaaaaaaagaaaaaaaaaaaaaaaaaaaaaagaaaaagg

SEQ ID NO: 131575 - DNA, 243 bp, Glycine max
  Clone ID: PAT_MRT3847_89820C.1
ctggtgaacaatgcctctgagattacaaggcttggaatgaaagggtacatgtaacggtccgaggccctcacacggtagtccaaatgtcttttccaaggttaagatcggttcactaattaccgctgactactagactaccctctaagtcatcactcaccgctgctcttcttcaatgcttcatctctgggacgcaatcatacagttagcgtcagctgaggcaagggccatgtacaacggtgcaac

SEQ ID NO: 131576 - DNA, 338 bp, Glycine max
  Clone ID: PAT_MRT3847_89821C.1
attcgagcggccggtcgacttaaggttacttatttctttgctaagcaatattcggaagacatatttatgtatgtataggtgaacattatcttgttgctttgagatatccatcattcaaaggtgccttatgactttacagaaatacaccatatcattctcaatattttagattggctccacatttcaaatccatgatgaaatagttaattttcatcactctaggtcaagacgagttattggcagaacttttggcgtttgtaaaacaagacgggcaatattacaatgcctgattagttttaaacatgaaactcaaatttttatcatatggacatatattg

SEQ ID NO: 131577 - DNA, 387 bp, Glycine max
  Clone ID: PAT_MRT3847_89822C.1
ttggttggagagttaagtcacttataatcagggggccgtgtagattcttttgaagatgatccctttcaaaatggcagaccaacatatactcctcaaaatgggggactaaatatacctaatacagtggtcaatcaaaccctgtctatcatacctatttcctcatgtggcgtttttggagctgatcctggccccacgacaaacttaaatatgggactggtttattgggggacaccaagttcatccaacattcctgcactaggcatacaggttacatctactgcagttgctggagggatggcccactgtggatcacgggatagtgctaactcacacctatagctacaggatgaatgagagcttaaaaggcaaaggcttgtagccgtctga

SEQ ID NO: 131578 - DNA, 270 bp, Glycine max
  Clone ID: PAT_MRT3847_89823C.1
ccacgcgtccgttcagttctggtttctgaactcctctgtattccttagtgaggctaatggtgaaaatgatactagcactagcaatgggcatgatgatgatgatgccatggtattcacttgctgtggacattgagcgagtgagggaagtagcagctaagcataacgtgtcttgcatcctagtttttggagaactaagtgttgatgcagggaacaacaatgcccttcacaccactatgaaaagcaactttcctccttatggaaagaattttt

SEQ ID NO: 131579 - DNA, 296 bp, Glycine max
  unsure (1)..(296): unsure at all n locations
  Clone ID: PAT_MRT3847_89824C.1
ccacgcgtccgcccatcgtgtacccattgattgagcgaaagcgctgtcttttctcctgatcagttttccattgggtgagaacatagtctcaaccttcantgcaacagagcgagggtccgagcgagtgagcgagtcagtgagtgtcggcgccattatctccgacttcacccccgcgggtcccccccgcgggacccagcgcgggcggggccacatttttttttttcatttcccgcaacgcccctcccccgcggctgctcgcccccccccccgccccctccctccgcccgttccccccc

SEQ ID NO: 131580 - DNA, 247 bp, Glycine max
  Clone ID: PAT_MRT3847_89825C.1
ggcttcagctactctctgtgtagccaaaccagcccttcaggcaaatgggaaaggcttctctaaattctctggcctccgcagctcatcaggcttccttcccttttctacaaaatcttcagaagatttccattctagccttgccttgctaacctataccacttgaaacattgcatgatacctgaagggtgtgacaaaatcgaaactgaaagttaccataaaccgatcttccatgattggaaagaacttc

SEQ ID NO: 131581 - DNA, 284 bp, Glycine max
  Clone ID: PAT_MRT3847_89826C.1
cgcgtccatacaggcgtcagaacacgagtcagtggcgctgctataacacgacagaaagggattccaagtttcagtgcaaaaaaaaaaaaaagaaaaaaaaaagcggcagctgctagacgatcaagatttaagtatacgtacatgtgaattcaaagttctaccacagtgtcaccgaaatccaattcaatggcagtcgtcttagaacgtcatgatcgggaaagacaaaacgttacccataattaaactcattgcaccatgaaccacatttcgccattcggagtaat

SEQ ID NO: 131582 - DNA, 431 bp, Glycine max
  Clone ID: PAT_MRT3847_89827C.1
aaacaaaaacggggaaacaaaaactcattggaaaaaaatattaatatcacttttcccccattaaacataaaaaaaagggtcaaaacgggcaaaagaatcatcggaaatttggtcaagtcccagggatataacatcggcttcctggccaagggggggaacaaaaaacatgggggaaggcttttaaaacctaaaatgggggtttatggcggaaattcgttcaggttccagggatattacacccgcatcctggcggagtgggggaccaacgggctttgaagtcttttaaaacaaacaaaaacccttgttaaaggcggagttgggttaaacattcccaggcctttttatggatggggggacctgactagacggaacttccattttgacttttacacgctttccttggatggatcggtatccccatgggggggggg

SEQ ID NO: 131583 - DNA, 412 bp, Glycine max
  Clone ID: PAT_MRT3847_89828C.1
accatatgtaaatatttctagcatacaattgggtaacattggcatcatctttctttgaacaaattctcttgtcagcttcatttcacatgatctgataaaattgcaacaaaaatactgatggacataactgggcaaaaatgaatgaatgcgctttgggcaggaaccataaccgtatgtatgtcattgatgggaggacattgcaccagttaattacaaattgccaacgcaagatgtgttccaatcctttgagacaatagctcctgtatctccaattcaaatttttaactcttttgatcagggcggaatgggcgtataaatgcataattgatctgccaaacttttacagaggctgtcacagtggcctctgcagcattgtgtgagcaagatcaacctatcacctccatatattgtc

SEQ ID NO: 131584 - DNA, 514 bp, Glycine max
  Clone ID: PAT_MRT3847_89829C.1
aggataataagatcaattatttgcaaattttacagaataaaagctacatctaggatatttaatcagacccatataaactttatcttatctaataacaaaagttgcacttaaaataatatcaaaatcaaaatatgttactttgttgttaaaagaaacgtagccggcagcacatcaaattgggtctggtaatttgcaaatgcatcattgcaaagagggatgaccaatgaaaatatgatccaagggaactcccctgccactttttgtaatcatgaccaaaaaaaccaaaaacgttttgtaatcacacgccaaggaaagaaatttgttggtcctttgacatccgattcctaaaagtcaaaaatgtatgaggaaggggtaattttcaattttcattgatcatacatgcatgaacctttgcacttcagtgtacaacaagcatgttctataagaaactctatgctgccaacacattttcactatcaccacaaaaaatagcaacactacttcagtcttgatc

SEQ ID NO: 131585 - DNA, 2781 bp, Glycine max
  Clone ID: PAT_MRT3847_8982C.1
ctcgagccgattcggctctagctttgatttcgcttccgaagcgacaagcagcacccactctctcttctcggaccttccaaacatggaacgcatctttggcggcaggggaaacaacaccgggggttgggccgttggccgttggagtgagacaaaattgaaaggacaaaaataccccccggatgcatatttgtgttgttctgttctactggttttgtgttctgagtgttattttagaagcacctaatacatagatagatatacgtagggatagggttaaggccatgcgcatcatcggcgccaagtacaagctaggtcgcaagatcggaagcggatccttcggcgaaatctacctcgcgacgcatattgataccttcgagatcgtcgccgtcaagatcgaaaacggtaaaacgaagcatccccaattgctttacgaggccaagctctacaatattcttcaaggaggaagtggcatcccgaacataaaatggtgcggcgtagacggggaggataatgtgcttgttatggacttgctgggacctagtcttgaggatctttttgtctactgtggaattcactttgatttcggttccgaagggacatcaaaccactaccctatctactgacacaatcctcgaaccttccatacatggaacgaatcgttgaccgcatctacaagctcgagtacaagctcggacgcaagttcgttcgtcgaaatttccttcacatcgaatactagtaccatcattgatatcgtcgacatcatcgtcgataataaaaaaaaatagtaacaacaactcatccacgccggcctttacaacgctatacctcgagaatgttgtattatgaggaagagatagtccggcgaaaaagaggtcgagaataaaatggttatttatttggttggtcattgtcttgttgatgacgttatttcttgttgtcggaatttgttatagaaggcagttttcttttaggttgatcaaatggtaagtagaataaatgatgtttaatatagaggatttgaatactgaggtatttatccttatgatgtacttatatggaatggattgtttcggtatccttttttgaattgttgaatttattttgaagtaccaacaatgtcaaaagaaatgtaatggctacctccattatctccagatccagaagcaaatagcaatcgtgcaattccaatggatatttgacaatcatcaaggtcttaattcatattcagggcatgttaaagagcgtattagagctggtgatgctactggttctggtgttaaaattcagtttaaatcaccagtgggtaaaaatttgagttatgagaaaccacttgacaaaaatatttttggagaagcaaatattccctctacttcattttctcctgctagtacttcacaaaggaactccttaaagcaatccttgtctgctgaagcttccaaccctggacatgcacaaggcagtaaaattggcccttcaagtagctggatgtcatctctgcagcacatgtcttctgctaaatgattgccaaatatgctatgaagctttgaagaagattctgtgcatcttttcccaaagtgtttggtcaagaatattcaagtcatttattcatggagactgcaaatgtgctagaaaattaacagattgcatagctcctattttgaggccatttagtgttgcttctttcctgaggtgactacaaatgattgtgcggtataaaacagacttcccaagcttggctcctgtgctgtacatagatgtcaaatttggcacacagcaatattttgtattcatgttttcatgtaacattaatgtgtgaagtagccttgttactccgatatgttacttgatgataattatcattgtgccatacaataaatggtgacagagtttgttttaaaacttctaaattattttgtcaatattataaagaaggaacataatgaaggctgccttgtccactgaagctcctaaacctggacatgggcaaggaagtaataaaattggcccttcaagtagctggatttcatctgtgcagcgcatatcttctgccaaatgaataaccaatatggtttgattctgatcaagaagattccctgtatgcattccgcaaatccgtggtatttgcttgcttcaactgtacaggtcaagaattttcaaatgatctatccagggagactgccaattgctgcaaggttgataaatttcaaagctcatcttctgagaccttcttgtgttgcttttttcctaaggtgactgcaaacgattgtttggtataaattacagactacccaggcttggctgctttgctgtatatagatttcaaatgtgacacgcagcaatcttgtgtatccatgtttttatgtaaaattaatgcgtgaatgtagccctgtttcccctttttgttacttgatgataattatcattgggccatatgttatatggtgactcagtttcatttaaattgattgacgatattatgaattgtaggtgtattttcagttggttctgttaaggtatatttgattttagttttttactttgataagtaaattatttttattcggttatgcttttttcactgcctaaataatcatccatgtaattatatacatgatctatgatcattgattttgttgctggttacaagtaggtctctcgaggaaagttatagtagagaaaacaatgcatctgaaggaagctcagtttcatatattgagaaacatttgttcttaacagtgtcaagatgaatattgaattccttttttggatagactatatact

SEQ ID NO: 131586 - DNA, 1350 bp, Glycine max
  Clone ID: PAT_MRT3847_89830C.1
ctctgttggagtttgtccaaggttgaagatcaccgtgttgtttcagttccttatcactcagtgcaggttgacataaacatcaatcctcatctcccttctgactacattaattatctggagaaccctttgaaaataataaatgacgctgagagagttgctgagaaagacatctggagtctgatgcaatttacagagaatttgcgccgccaatatggaaaagagcctcgctccatggagattttactgaagaagctttacttgaggagaatggctgctgatttagggataaccagtatttactcttcagggaagatgatctatatgaaaacaaacatgagtaaaaaggtattcaagatgatgacagagtccatggcatcagatttacatagaaattcattggttcttgagggggaccaaattaaggctgaactactactagagctaccaaaagaacaacttcttaattggatctttcaatgcttggctgaacttcatgcttcactaccctccttcataaagtactaggttcaaatcctggtcatttctgccaataagcaagttggaaactcaacttactgcttacatcacaaatatgtaagatttggtggatttagtgtgttgaaaggccagaaactaaccacggcgaatgcaaaacaagattgttttgcttgactgacttggcagtacaggacatcagaacagactggggactatcagttgataatggtgaatatgtgcttcctttcaagatgtataatcagagccacatcaatgaggttagttacaacttacaagcaccttggagttggggttatctaaattgtactcctgatttgcatgccttatgcgtagcaggtagtgacctaatcaccttcaatacttgcaatcataaaacaacattcctttgagaagctgcctatgatgacctagagttttcatgcagtaaacctttaatcaaattatccagaattcgtcgttttttttatacgtgacattgtaaagtattctccgaccatattttcctcaattgtcccatctctaagatttcgttgaagttacctgatatgaagaaattcaatgctaagattcagtctcaggctagctaatacattctaaagaaactagaaatcggtctggtgaatagtgcatttttgttactgataagtcagaaatatactgttgtttatagttgttgttgtcatgtatctgtgttattttcctcatggaaacttgtattctctatagaaagaaattcttgtaaccacaagtttttacaattagttccattatttaatattaatactgtggtggacattttatataattatttctatttctcagtttttaaaa

SEQ ID NO: 131587 - DNA, 155 bp, Glycine max
  Clone ID: PAT_MRT3847_89831C.1
tcaacttcatgctacacactatcgttcttccaagtgccaaccacgcttatctctgaagtcatcggcaaggtcgagatcggaatcaacggatttggaagaattggccgtttggttgccagactcgctctgcaaagagacgatgtggagctcgttgc

SEQ ID NO: 131588 - DNA, 503 bp, Glycine max
  Clone ID: PAT_MRT3847_89832C.1
gcttttcttacgcctagactgacggaaataccattaactgcgaccgaggtaataactttgactacggctaccaccagtaaccgtaccactaaatacctgcaccgtatgggcaactacctgtcaggcatcatcgaacacgactggaacatgccaacctcgtgcggttacaaccccgacctcaggtaccacgaggaccatgactggcccgctcgacccgagatctccaacatgactgacgtcaagctctacaccgatgaggatggaaagatgatcgggacgcacatgaatgacgccatcgactgcggatacgtgattggcattgacggaggcgtcttctaacgtcatggaaccacatctcgagaataagcgtacttgagaaactcaatttaggggaacgaccacgctccaaactgcatttactactgatgctacaccaccatgctccacaacctaatagaccgtatcctccatcctaccaacgagcacggtgtttaccgctgcct

SEQ ID NO: 131589 - DNA, 1588 bp, Glycine max
  unsure (1)..(1588): unsure at all n locations
  Clone ID: PAT_MRT3847_89833C.1
atgaagaaataataataataacaccccaatagaatagaagataggataagtcagtagggaagagccctttgtggttgtggttgtgggtaggtgctgctgctgcttccattcctattcttacagtgaaggttcaatggaagggacaatgcagcttgcatacgagactgttgtgaagctcatgctggctgcactcgaacgcaacgtgctccctgacgtcatcaccaggagactcacgcgcttgctgttggctactcgccttcgctctgcttacaaaccctcctcccaacttcaactctccgatctcctctacttcgcgcattcattacaagagatgcccatagcaatcaacactgacaagcctaagtctcaacattatgaattaccaaccgctttcttcaagctcgtcctcggaaacaatctcaaatacagctgttgttatttctcttctgcctcaatgacgctggatgatgctgaagaagcaatgttgaaactgtactgtgagagatcaaacctgaaagatggtcatacagtgcttgatgtgggatgcggttggggatcgttggctctatacattgccaagaattacactaactgtagggttacaggaatctgcaattccacaactcaaaaggcttatattgaggagaagtgtagggatcttcagctgcaaaatttgaatattatagttgctgatattagcacatttgaaatggagacttcttatgacagaatattttccatagaaatgtttgagcatatgaagaactataaagatcttctgaagaagatatccaaatggatgaaagaggatagccttttatttgttcattacttctgccacaaagcatttgcctaccactttgaggacaaaaatgaagatgactggattacaagatacttctttactggaggaactatgccttcggcaaatctacttctttatttccaagatgatgttactgtcaccaaccattggctagtaaatgggaaacactacgcacagaccagtgaagaatggctcaaaagaatggaccagagaatgactttcatcaagccaattatgcaatcaacatacggcaaggactcagctaccaagtggactgcttattggagaacattcttcatagctgtagcagaactttttggatacaataacggtgaagaatggatggttgcacacttccttttcaaaaagaaataaataagccgaaacctagtctttttatttgactatttgagaacggccttaggacaaaaaagctgctacacgaggttgcacccttcaataatgttgtatacttttattagttaacttgttttagttggttgcttgtctttatttttccctgttgtaatggtgttgccactccaaccttattttatcttaaattttgggaaagtccaattcaaccctcggaacttagggtcatgcacgattgcatgtgttccctagtccataaattttaaaatgtgcacttaagagcctttgtaacgaaaatggttatgctcaaggtagatgaccatatatttgtgacgctccaaacacatggtgtnnnnccttccctnnngactacaattttatcttgct

SEQ ID NO: 131590 - DNA, 1569 bp, Glycine max
  Clone ID: PAT_MRT3847_89834C.1
ccacgcgtccgggtaggtgctgctgctgcttccattcctattcttacagtgaaggttcaatggaagggacaatgcagcttgcatacgagactgttgtgaagctcatgctggctgcactcgaacgcaacgtgctccctgacgtcatcaccaggagactcacgcgcttgctgttggctactcgccttcgctctgcttacaaaccctcctcccaacttcaactctccgatctcctctacttcgcgcattgtactctctctctctctctctctgttaccttctcattctcacttcttaacccaacatcaattcttgtaataaccattgcagttgcacacatgaaaaagataagaactagataatttaatttgcagcgataatcatatcattcatatgttaccggaatcaattatatgtgattttttaggtaattaaaattaaaatttgtctcctacacggtttgaagatgaatttcatgtctggtactctttcagcattacaagagatgcccatagcaatcaacactgacaagcctaagtctcaacattatgaattaccaaccgctttcttcaagctcgtcctcggaaacaatctcaaatacaggtacttgtaaaagttttgcagccattcataaattagtcttaccatgtgtcttttctttatgacgattatgaaacgtgttgtaatttgtaaaactacactcagatcccttaaacaaggttttgtttttgagcctatgaatgaaaaaaaaaaattggttggcatgagaaatcctactataggtggccggccaaattcactggcaaagcgggtgaatactttgcatttacactattgtcagattaagtttcaaaaaaaaaaataaacgcataggctatgtttagttcaaagtctttttattttattttggcttaatactactttaaaattaaactcaataaaagatttaaaaataaagcagtagtagttttagcttaaaagttcctttgatttctttgctgaatgaagatagtggcactgtttttctatttctattttcaaaattgaatttagcttttaaaaagaaaacagacacacactatgctcatgtctcacatgtagctccactacagtgaactatcgccctaaagaatggaccagagaatgactttcatcaagccaattatgcaatcaacgtatggcaaggattcagctaccaagtggactgcctattggagagcattcttcatagctgtagcagaactttttggatacaataacggtgaagaatggatggttgcacacttccttttcaaaaagaaataaataagccgaaacctagtctttttatttgactatttgagaacggccttaggacaaaaaagctgctaaacgaggttgcacccttcaataatgttgtatacttttattagttaacttgttttagttggttgcttgtctttatttttccctgttgtaatggtgttgccactccaaccttattttatcttaaattttgggaaagcccaattcaaccctcggaaaaaaaaaaaaaaaaaaaaaaaaaaaaaaaaaaaagcggacgcgtggaaa

SEQ ID NO: 131591 - DNA, 518 bp, Glycine max
  Clone ID: PAT_MRT3847_89835C.1
ccacgccgtccgaaacacaccaattagcatttgcattaccaatacacaatggcaaatctactacacttacaactacctcattcccaccaaatctctaaataaccccaatacccacaccccatcaattccacaacaaccaggacccagacctggcggggccaggtcctaaagccatccacctttcatcttcggcgttcacgccgtcaaacccttctaaaaccgcgcctaaatcgacatgcccaggccccaagtttaacaacctcccccgggctaaacccgggcaataacccggttcatggactttgtggaagtcccccttttcctgcaggtgcccaaataccaaaggccccaggagctggactcttccctcaaaaccctcaacgctattgctacaagcgacctccccggtgaggccactacattgcaggagcatgtggccgatgccgccatgggaaatgccttccttctccaggccggagaccgcgctgatagctttaatgaccttaatgttaacaaca

SEQ ID NO: 131592 - DNA, 440 bp, Glycine max
  Clone ID: PAT_MRT3847_89836C.1
ggcgagggaacaatggccatttttatatacaaactggaccattttactcggagggaactttagcaaacttatttatttttacaccagcccccattttttaaagcccccccaaaagaaaccccaggaaaacggtttttttcctcaaaggaacctacttaaaagggtccttcttaaaaaaccccttgaaactaaatgggtaaaacgccccaccattaccaaagaaaagcttactcattggcttcacccaggggaatcgaaaactgggcaaaatggggcttgaacccttcataacacacaaaaccgccccagtcaacgggaaccaaaagtaaaagaccaaccccttgatgaaagccccgggtacgcctttaaaagggaacgcatttttaataggcatttcccccaagacaagggacaaacctttatgggcgaatgacaagggc

SEQ ID NO: 131593 - DNA, 951 bp, Glycine max
  Clone ID: PAT_MRT3847_89837C.1
aattcggctcgagcagttcgataagggttacatgtctcctcactttattacaaaccaggagaagtccattgtagagtttgactgggttaaagttttggtaactgatcaaaagatttcaaatgtcaaagaaatagtcctttgctggaaaaggctatgcagttgagtgttccactcttaattattgcagaggatatcacaaggcaagtgttggagaccttagtggtgaacaaaatgcaaggattactaagagttgctgttgtaaaatgtccaggatttggaggtgcaaagaaagctttgttacaagatattgcccttatgactggagctgattttctttctggagacttgggtctcacacttgatggtgccacatcggaccagcttggcactggactgaaagtgacaataaccagtaatgcgacaactatcattgctgatcctagttcgttggctcaatttctggctgcaattcctcggacagagagggacctctctcttacagtttttccacacctggctacattgctctcagtctcatgtgcttatcgctctgggcgtttacctgttgcgtaggtaggtgcacatactgagctagaactcgaagataggaaacttagaattgaggatgcaaagaatgcgacatttgctgccataagcgagggaattgttcctggagggggtgccacatttgtccacctattggacttgataccagcgataaggaactccatggaagatctagatgagcaaattggtgctgatattgtagcaaaggcactccttgaacctgcaaaatcaattgcaactaatgccggagttgatggagaacatgttggccggaagactagaacacatgattggagaactggatattatgccatgacagggcccgtatgaaaatcttgggatgctgggatagccgattcctatcgtgttgcaagagtggctctc

SEQ ID NO: 131594 - DNA, 430 bp, Glycine max
  Clone ID: PAT_MRT3847_89838C.1
tccgggcattcctagaagagagaagtatggcacatatgagaagacaaattttcgtgtatcttctctttgcatggcttctgcttgccgcttctgcactcaatcacgtcactgctagtgttcaggctatgcagtcagttcatttcaagctcagaaccttagaggctaacccaaagcagcaaaatggacatgtcataccttcttgggttgaagaaaagaagaatcgtaaaagcccatcagggcctaatccaatagggaatcaacacccaccatctaaaccatagaggtggaaacactcattcggcatcagctttcagtagagaaatcaatagctgttggatatcagtggattggtgtagactctcaattccgcttttaggagcattgtgtttgtacaaaatggtatttaattgaatattcgtactttacatgc

SEQ ID NO: 131595 - DNA, 305 bp, Glycine max
  Clone ID: PAT_MRT3847_89839C.1
ggctcgaggggaacaaggcttctattattacctctgtcaccggcgctcaagccatgggcgccggagggcgcggaaagtgcctacggtacctgtatagccgaaaacggtgactaggtggaaagtggctggggctcgataatgggtcggcagagagggaaaagcatgttccctctggtgggaggggtggtacacaatgttcccaacaatcagcgagacattctcaactaacaaggatgcattggtggagaaaatgatccgctggaccagactcagaagcagagagcactagccatggcttattacag

SEQ ID NO: 131596 - DNA, 160 bp, Glycine max
  unsure (1)..(160): unsure at all n locations
  Clone ID: PAT_MRT3847_8983C.1
ccacagcggggcgcttaccgggggggaagaccggcnccnganccccgaccgccccagccgcagaagcacagaaagaaccacggccaaggggagaaagcagcggagcacgaagcaacaaacgaaagagcacagccacggaaacanaccggngcaaacgaag

SEQ ID NO: 131597 - DNA, 763 bp, Glycine max
  Clone ID: PAT_MRT3847_89840C.1
ccacgcgtccggttattgtttctaatttttatttctccccctcctctcttgtttctcactctccctttcctctctcgtttcccactttcccactttccctctcactctctgactccccctctaccttaatcgagatccccttagacacgtctgccaccactaggaagccttccacatcgtggccgaggaggttgacattattttcatagagggtgatgtggtcgccgcaagcaaggacgcaacctagggtttcagtggcggagaagcatagggacactgctttcgtcctccgctccctgctctacgtcactatggcgaccctcatttccagggtttcggggccactctccaatgggtttctaaggttggccttgatggacgtgattgtgaatcccgtggtgagattcaattacttcaacaacctcgttgacatggagcgatgggcgaatgggacgaggaagatagtggagatcttggggagcagggctttgagggatttcaagtttagcaactggttcggggagcgagactttaggttcattggccttgctttgccacttcaccagaccgacttccctagtatgtcgtatttctattgctggacagtgagctccatatggcactaccatggaggctgccactatgatgagcatttttacttcagggtcgaggatggagaggacgacagtagcgatgccagggtcaaaacaattttgattagcacaatcccttttttttatcgagtgctttcttgacttgtcag

SEQ ID NO: 131598 - DNA, 259 bp, Glycine max
  unsure (1)..(259): unsure at all n locations
  Clone ID: PAT_MRT3847_89841C.1
tgtttcttcagtttggnataaccttagccgaggtcnngaggcgcnctagcnantttcaaatttccaantgggtangggttgaagaagctntcaagagggttcattgtctaaagcattggngcttgaccaaatngggtggtggcttngngccnaaaccttcannnggacnannanaantctaggnantgcttccctaataanncatcctaggaaaacnggttaaagtatgcnntnacttaacgtgaagtcatcggtattc

SEQ ID NO: 131599 - DNA, 291 bp, Glycine max
  Clone ID: PAT_MRT3847_89842C.1
gcgccgccggtgccgtcgacccacctcatgcatcatattggtgctgcaagggctgactcttacctctctctgggtgaccaaagacgaaacactttcattactttgcttcaaagctgaggaggattttactaactcgtactgaaaagtgaaagtgcggggagggcatgatgtcggtgggacgggaagataaaagacggaattttgacggggaatgttgatgcaagttggctaagagctgccagtgcgaagaggtaacaccgacagggtgaagatggctaagtcaacttgcct

SEQ ID NO: 131600 - DNA, 241 bp, Glycine max
  Clone ID: PAT_MRT3847_89843C.1
ataaaagccaccctctgatctgggacaatgcagcaacttgaatcctgcaatctgcaggcctttttatgatgcaattggtaagagttgatcggcacattgcttaatgaatccattttttccgaaccctcacaacaggtgctaactcgaccagcttatgcactttatctttttaacaagctaattaaatgaaacctaactcattagggtcccacgatggaatggcactttattaggctaatac

SEQ ID NO: 131601 - DNA, 401 bp, Glycine max
  unsure (1)..(401): unsure at all n locations
  Clone ID: PAT_MRT3847_89844C.1
tcggtccaaggaagaaattgtataaccggaataaccttacaatttgaggaataccaaggttccggaataccgaaatggaaagctagttatatcagccaatagtttgtcccatggattgagtctgttcaaggaaggcaagagtattgggaatctgaagactaatgaatctaacaaggaaaatgctggaaaagatattactggtgcaaagaatgaattgaattgtgacaaccaagcacctgaaaacaagagtgagacagagaaatccataccagtaacgaagaaagatggcgaaaatcctacacctgcaaaagctgaagttcctgacaacgagtttgagaagcgcataagacaagaggttatccctgcaaatgagatangggttacatttgcagatattggtg

SEQ ID NO: 131602 - DNA, 369 bp, Glycine max
  Clone ID: PAT_MRT3847_89845C.1
cacacccacagcatgtcttaccgtcaaggcaaaaccgcccttgcgctgactcgcgtctggcacaggacatcatgcgaagaccgcatcctcggtcgtctggcaacgcggatagcgcacgtcttgatcggcaagcacaagccgacgtacgatccgtctgtcgatgcgggagactatgtcatcgtcgagcacgcctcgaaagtgaaattgtccggaaatcaatggcaggacaagacctacttcaagcacacgggttacgcgggatcggagaaattcatccccatctcgcgcttcaaggagaaggacccaggagagatcatccgccgcgctgaatctggaatgttgcccgagaattcgcaccgcaaaacccgc

SEQ ID NO: 131603 - DNA, 473 bp, Glycine max
  Clone ID: PAT_MRT3847_89846C.1
attattcaattttcattgtctagttattacttgtattctattttttttttttcaacttttgaaattactccatcattttgtcaaaatcgcaagacgaaagccaccgatccccagaaattccatgactggcaactacaaaccccccaccagaactcaatggcatggtgtactgacatggacacccccaaatccacccacaaaggacccgggccccatcacaatggccacccccctcaacaaagtgttgacactgcgctgaaaagatcaatgaatggcccaacaccccgatttggaatccgccgcctactaacaatcaatggttacacgggccacgaacttcatgtgcgaacaaaaaacccggcagttgtaacaatccgcaagaagacaaaaagctcgactaccatgacagcacccatgtttccaaaaacccgcccccccccacgagggaccactacctcagggatttgaagcaa

SEQ ID NO: 131604 - DNA, 504 bp, Glycine max
  Clone ID: PAT_MRT3847_89847C.1
cgggggaaacgggtccaaccccttttttaaaaacaaaaaaaacggcggcccttaacccaggaggggcaaagcccaggttggggggggccccggaccaaccggataaaactttggaaacccctttaaaaggggggtcccccttacccccccccccgagggggagggacaagaggcaagggggttcccttcggaatttggaaaccggccaggggcccacctttttccaatggctccccaaaaaaaaagacccttgggtgatcgggggggaacccttcctgggccggaatcttagctttcacaggggaaaaagaaccagagcttcccccccccaggggaggggcccccccgggaagagcctccaaaaatattgggatccccccacgaagccccaaccccaaagggaggggggaccccttgggggttttttaaccgggagggggccgacctttttcacggggtttcccaaaaaaaaaaaccccgggggggggggggggaacccccttt

SEQ ID NO: 131605 - DNA, 533 bp, Glycine max
  Clone ID: PAT_MRT3847_89848C.1
gaccccaagctcggcgagaacatctccggcgtgatcctgttccacgagaccctgtaccagaagaccgacgacggcacccccttcgtcgagctgctggccaagcgcaacatcatccccggcatcaaggtcgacaagggtgtcgttgacctcatgggctctgagaacgagtgcaccacccagggtctcgacgacctggcccagaggtgcgcccagtacaagaaggacggctgccacttcgccaagtggcgttgcgttctcaagatcggcaagaacaccccctcctaccaggccatcctggagaacgccaacgttctcgcccgttatgcctccatctgccaggccaaccgcatcgtccccatcgttgagcccgaggttctccccgatggtgaccacgacctggaccgcgcccagaaggtcaccgagacggtcctggccgccgtgtacaaggccctgaacgaccaccacgtctaccttgagggaaccctcctgaagcccaacatggtcacccctggccagtcctgccccaagaaggc

SEQ ID NO: 131606 - DNA, 368 bp, Glycine max
  Clone ID: PAT_MRT3847_89849C.1
gaagcgtagaatgaatggcaatggttgtattttaaaaaattaaaattaaggaacgaataaaaattctttaattttggattggaaaaaaaaaaaaaaaaaaaaaaaaaaaaaaaaaaaaaaaaggggggggcggttttaaaggatcaaagttaactaacgctggcatgcaacgcaatagttttttatatggggaaccaaaattaaattaatgggccgtggtttaaaaacgtatggacgggaaaaaccttggtgtaaccaaattaaatggcttggaagaaaattcacttttttaaggtggcgttataagcaaaagggcccgaacataattgctttttcaaaatattggtaaactctaaatggaaaatggg

SEQ ID NO: 131607 - DNA, 208 bp, Glycine max
  unsure (1)..(208): unsure at all n locations
  Clone ID: PAT_MRT3847_8984C.1
atatgcaccactcttatttacacacttgatgcacatgatgannactacctaccgaccgaccaacacaaataaggacacacttaaaacgacaagcctgacccacttaactttcattccataattcgccacaaatcttcacccatnnnncgcgcaaaggcacctcaccccaaccccccatttcaccctttcccaacaaccactttcnntc

SEQ ID NO: 131608 - DNA, 406 bp, Glycine max
  Clone ID: PAT_MRT3847_89850C.1
ctaccatacctgcacgcctactgtagatgatcctctcgctcaataccatattccacattttcaagaaatactgatgcaggaatgttcatatatgaattggaattattccttttcttattaggcctatcctgaagccaaacgaaatgatatcgtaattcctctctgaattccaattccacattttcaagaaataaagaagcaaaaatgttcatatatgaattgtaattatttgttttcttattaagcctatcctgaatccaaaggaaatgagatcggaattcctcggggaattccaattccacattttcaagaaataatgatgcaaaaatgtacatatatgaatcggaattatttgacttcttattatgcctatcctgaaacccaatgaaatgacatccgaattcct

SEQ ID NO: 131609 - DNA, 343 bp, Glycine max
  Clone ID: PAT_MRT3847_89851C.1
atccgtttaacaaacaaacgaaaggcaaatttatgttcaagaaactccatgatccactcaacctgtaccacaacatcggtgaaaccatgtctcctatctttttttctatctatgcatcctgtattcatgaaacacaatcgtaccgactttgggagaacatcaaactgcacttattttcatcatcatcttctgtacaggccacctgcttgacagcatttcaagatgacttatcaagcacgtgagttatcaaaccgggaacctcctggtcattggaacaccactgccggatacttttaaggatgcaaacagaccagattatcttgccatcctgggcttaatcctc

SEQ ID NO: 131610 - DNA, 1019 bp, Glycine max
  Clone ID: PAT_MRT3847_89852C.1
tcaatgttattaatgaagatagtgaccaaaactcagataacacaattgagataggatcagtgtcagaaaagaatataaatccaattaattccaaacactggaaaacaccctccaaattatattatcaacgtccaactgcccccgaccttctattagaagaaagaggtgaaaacaattttaagagttttagtgcaaacaacatctatgaatggaacatagatgcacaaacggagtataacatcatgaatacactccaacatatgaccatggtggctacggcttaccaaacctcccatgaatgttcagaagagaccattatagatatcttagtggcaggattttctggacaactgaaaggatggtgggataattatctacggctgcgagaagagacagaagggtacggcgcagttaagatggatctcaatcgaaaagtcattactaatgacaataataaagaaattccttacgttgttaatacattaatatttacaatagcccaacatttcattggagacccatctctctggaaagataggtctgcagaattattgtcaaatcttaagtgtagaactttagctgattttaggtggtacagagataccttcctaaccagggtctacactagagaagacaatcaacaacctttttggaaagataaatttctacccggtcttccaagatcattaggagataagcttagagataaaatccgcagccagtctgctaatggagacattccatatgaaagcttaagttacggtcaattaatttcttatgttcaaaaggtagccctaaaaatttgtcaagatgaaaaaatccaaatacaattagccaaagaaaaagctcaaacgaaaagggacttaggttctttctgcgaacaatttggcctactagcttgtccaaaacaaaagagaaaacaaacccctaggaaagaaatccatgagaataaaacagtccacaaaaagagatttccaagaagaaaatactcggacaaaccttcaacaagtcacagtaag

SEQ ID NO: 131611 - DNA, 975 bp, Glycine max
  Clone ID: PAT_MRT3847_89853C.1
ggaatccggctcgagcgcagaagaacttaaccgggttagttgaatggtatggcaagaacaagagactgagaaatttggtgaaccttgtcatagtaggaggcttctttgacccttcaaaatcaaaagatagggaggaaatggcagaaataaaaaatatgcatgacttaattgataagtaccaactcaagggtcaatttagatggattgctgctcagactaataggtatcgcaatggagagctctaccgttgcatcgctgacacgaggggagcctttgttcagcctgctttgtatgaagcatttggattaactgtcattgaagcaatgaactgtggcttgcccacttttgctaccaatcaaggaggtccagcagaaattattgttgatggggtctccggcttccacattgaccccctcaatggagatgaatcaagcaataaaattgctgatttctttgaaaaatgcaaaatgaatcaatcacaatggaacgtgatttctgcagctggattgcagcgcataaacgaatgctatacctggaagatttatgcaaacaagatggtaaacatggggaacatttataccttttggagacaagtgaataaggaacaaaaggaggcaaagcagagatacattcagatgttctataatcttatattcaagaatttggttaagactgtacctgttcctagtgatgaacctcaacaaccagtgggcaagcagccgagtctcaaatcacgtagcacgggacgttcacattccagattgcaaaggttatttggaaattaatgtctcaaccatgaagcaggtcaattagtacgatgcatcttgtcactctggatattgatatttctctgatgtatacccctaatattttattttttttgttattattaaacggagcagctctgctgttgtggaataataacaattattttatgtgatcattaaaatgccctatgtgaggaaatttaaaacg

SEQ ID NO: 131612 - DNA, 202 bp, Glycine max
  Clone ID: PAT_MRT3847_89854C.1
ctattacctacgaattttttgtattggtggttttgatcaaatacttatttgtacaaatgttatcgaatgtttggtatgattttaaatattcatgcatagatgttcatacacttcatctttcttaaactgacctacgttaacgtggtggtccaagactatacgagcgatgactcagttaaaaaagagtttgcttcaaactttc

SEQ ID NO: 131613 - DNA, 617 bp, Glycine max
  unsure (1)..(617): unsure at all n locations
  Clone ID: PAT_MRT3847_89855C.1
tctttttttttttttttaatgttagataaaatatgctaaatcatgaatccagttatcacctaaatggagaaaataaaatttccttgacataatttgaacttgaaaatcaccaagaggccatcatgcaaacaggctcttgttttcaacttagtaaaatcgacaaactgaaaccagccaagagatcatataaattgtgtatctgtttgaatgtattttgcactgaaatactgaattcaagaaagcagggacagtacactttttttagagaaatggctagcaacgcactcttttcaacacacttttcactttttactatttgttgaaatttattagaaatcacaaaaaaaaaaatttcacaggtcccagttattatttaacttgtctctcctgattttgtagttttcaataaatattaaccaaatgataatgtgttttagaaggagtgtgttcctagcactcaaatttttattataaatgcagcctgacctgagaacatgcttcttgatatcttccaactgcacatagaagatgcatgccagagagtgacctgtcagccctcaccatgttggctgcaacaacctaaaaaaatattntgatgttataaaatactgaataca

SEQ ID NO: 131614 - DNA, 638 bp, Glycine max
  Clone ID: PAT_MRT3847_89856C.1
ctcccaccatcgagagccatgtcgacctttattccatcgctgacatcgattctgacgcgatgaaattggcttcgttcaacctcaaaattggggtcaatcattgcccgctagagattgaaggggggtctcctattgtttgaacccttttgttctcaagatggtaaatgggtataatcaaatatatatttaagccagaatacagattcaatttagatatcgtgagtgtagaagtcaataatctccttcaaattgagctggatcaaagaagaagcatcgttgtgcatgagccacagcatgtgttcgaacaaaatgtcatccacatccacaaagatcactctcctctcactctgactatgattcgacgtgaagtgcccggctgggtccttcttcatagagatatccatcaaaatctgaaacgggttctcttgcaatatgaaaggctccaccagaaacaccctcttctcttttcccaccaccacctttacgggctcctccttaggaagtgccatgtaacccatccgtgaacccgtggaacgacgacggatcaatgaaactggcatcaccaaacaatccatggatgcaacaaaaggcaggaagaagaacaagatcgatgaatttatggttgtggctcttgaacc

SEQ ID NO: 131615 - DNA, 418 bp, Glycine max
  Clone ID: PAT_MRT3847_89857C.1
ggctcgagcctcacccgtaacgccaatgcactgcttctcgtttctcaatgtcccagtcggactgtgtgctactaaccaccttccgaggctgaatggtccgaaccatctctgtcttgcaatagtggacgctgcctgcgatgacaacacccctgctcaaccacacccttccagggagtgagaccccatcgtactagatccactacatggcactgaggacgctctcgcctataagggctccatcgccagtgacccgcccaaacccgacgccgacgccataactgtttggactgccgagacccgccacgacgctccgatgtccgatgttcagatgacgaagcgccgtgccaagcgacgcctgatttacgaccataagagccagacagagaagcactatgcccgagccgatagagcaggcact

SEQ ID NO: 131616 - DNA, 455 bp, Glycine max
  Clone ID: PAT_MRT3847_89858C.1
aaattgcctgtttcatagatgagacccacacggctttattgttctgtacataatcatgtgccttgtactatacatgaatattataaggcaaagaacctttacaacatggtgccaaacacgaacctagtttcatcccatactcgaatgtcatgcgcttcgatatcgcctggcactctgttgacattcaccatcagagactaacctatttcgctacaaagagctaccataaattcaaggtccccaaggttccctgatgcgttcatcacgtggaacacattcaatgcttgctaccctgttgcagaaacacctggcctacaaactgacaacccaatctctcataaaatgcttgtaacttctgacagcaaacccactgtatccttggcacacagctcaaggctcacaccctcgctgactctaactccaatagcagatacaatgcattggaagacccttac

SEQ ID NO: 131617 - DNA, 455 bp, Glycine max
  Clone ID: PAT_MRT3847_89859C.1
ttgttgcaacttctatttaaatgcatgatttttaatgcagattaactatccttttgagaaaggccctttgagcccccgtttctatggtgaacatgcactccgatgacatccaataggggaggaacgttgcattgcttgcaaactttgtgaagctgtaagtctttgattgtttatcctatagttttggtttaacgatcattgagaccatgcattctacccagcattgtctatccaacaggggaggaatgttgcattgtttatttactttgaatttttttctttattattgtacactagtattgctgcaacattatacctgtaatgtgggacaaacatattaagctagtagagagtaaggatagaagctcatgtacatattaatttataggaggccaaagcatctagtagtccctaaacaatgaaattacaatatttttttaaaatgcctaaaccac

SEQ ID NO: 131618 - DNA, 380 bp, Glycine max
  Clone ID: PAT_MRT3847_8985C.1
cagcaactatctataatccttattaattgtgtatacgaaacactaggcacacacatggctacggataccaagactttcatataggaaccaccaatgtgtgatcactcaaagtagcttttttattgataccgttcttttatacgctatctaaccaaatttaaaaccttgtacagagcgaattctcggcgggtggtttcaaaagccacagcagctctcggtgacaagaagacagaaaagccgtacgagagagttcatacgagtccacaccgtggaagagtgaaagtcggtcctcgaatgccccaaagactggctagcgggggtggaatactctgccaaccacagcgcggagagcagcctaatataccgtttcatggaggagc

SEQ ID NO: 131619 - DNA, 1251 bp, Glycine max
  Clone ID: PAT_MRT3847_89860C.1
ccacgcgtccggagaatggctcaagcaatggcatcaatgactagcttacgtggttcctctcaggctgtgttggaaggtagccttggctccacacgcttgaatgtggggagtggaagcagggtggcctcagtcacacgtgcagggttcacagttagagcacagcaacaacaagtgaatggtggtgaggtacaaagtagccgtagggcagtgctttcacttgttgctgctggtttgaccactggctcttttgttcaagctgtgcttgctgatgccaaacctatcaaagttggaccacctcccccaccttctggcggattacgtatgtctctctctctctcccccctctccttctcctcttataattcaattcattctgaagaaattaagattttttgtttctgatttaattagaatgctctggaaatataattgtcttgtaatcagaaattgtcatctggataggaagtttgttgacttttataataattacgttttaacttacctaagacgatttctgattagttgagagtctaacaataaaaatctttacagaacttagaaacaattgtttatttaaaactgaactttttcaaatttgtatttaattttgatttgattattcatgtaaaatgaatagtttagattaactcctttttgcctcttatctcttacttgatgcacaccatctatgtgtgtgcaatgatcatcataacttgtcaagtggaaatcattgataagccatggatgttgcattgaatgatgaaccttgaaggatgaaaaatggaaattggggcagagaagttgaagtagatttggggttggttttagtaagtttcattaaagtaaacagggttagaagcaaagacaggaaatcaaacaaaaatcagaaatggggttctgtgacatagtagtgtattgtaccacagcacagcaaagttttgaacagaaaataggtcatgcatgttgcattaaatgatgacagaagaaaaatagaaatggggtagaaaagtttgagctagaattcagtttgattttggtagtagatttcatttatgatatagggttagaggcaaagacaatgaaaacaaaagaagaaaagaaagaattattgaaatgggggttgttattagggacatgattagagaatggagtttgaagatattataattataaccatggtggggtgtgttatggaatatggcagctggaacattgaactcagatgaaccaagagaccttaagctgccattg

SEQ ID NO: 131620 - DNA, 344 bp, Glycine max
  Clone ID: PAT_MRT3847_89861C.1
gggtttattttttctttttttttttttttcttttttttttaaaaaggcttgagaatagataagaatcagcccaaggcattgtttccacttgttaagaagaaccactacttcctatgaattactcccaacccaagtaaaaatagaaatcatagtgaaaatgttaaatctcatggtacacaaatatagttcatcttaaattaagatgatagaactgatagtgaattttctattttggactgttactgatcttggggatcacacttatgtatcaaacacttaaggacctcacaaaatcaactgtccaactattctaaacaacaataaattttattgggtatccattt

SEQ ID NO: 131621 - DNA, 284 bp, Glycine max
  Clone ID: PAT_MRT3847_89862C.1
gtacgagaagacgacaggatgggacacaactacataagggcatcgtccatagcatgtcactaacaactagcatgaccttcgttgactctctctctctgtgtagagcctttatggggtcaggtcatatcttcagccatcgcagaatttcgtgctcgataatgaaggtgaacctcttgatccatggtggcatatactagcacgtgacatccatacccttctatggtggcacataaattaacttcactggacgtcgttttatacccttccagatgtgggaaaatcct

SEQ ID NO: 131622 - DNA, 2224 bp, Glycine max
  Clone ID: PAT_MRT3847_89863C.1
tgggagacgaggttctgatgtgaaggtaattttattgggcctgttagttaatcgacaactaattaattgggcctgttatttgaccgacccttaacctaaacaacaaaagcccagtcacaaaacccattagggttttccacgatataatagaaactgaaagcctcttacggttgcagcaacagcagcattcactgaaagcactcagtagggtttgcggtttcagagtttgtgacgcacgcatccatggccaccaccaccaacgccgccgcagccccgccgcgccagctctcccagaaggaagccgacatccagatgatgttagccgccgacgtccacctcggcaccaaaaactgcgacttccaaatggaacgttacatcttcaagcgccgcaacgacgggatttacattattaaccttgggaagacatgggagaagcttcagttagcagctagggttattgttgcaattgagaaccctcaggatatcattgttcaatccgcaaggccttatggtcaaagagcggttctgaagtttgctcagtacactggtgctcatgctattgctggaaggcacactcccggtaccttcaccaatcagcttcagacttcgttcagtgagcctcgtctccttatcctcactgatccaagaacagatcaccagcctattaaggaagctgctcttgggaatattcccaccattgctttctgtgacactgattcgcctatgaggtatgtggacattggaattcctgccaacaacaagggaaaacacagcattggttgtctcttttggctccttgcaaggatggtattgcagatgaggggtacaattcgccctggcctcaaatgggatgtcatggttgatttgtttttctatagagaaccagaggaggctaagcaacaagaggaggaggaagctccggcaggtgattatgccatcacagatttcaatgcaggtgctattgctgctgatggccagtggcctggtacaattgatcaatcatggagtgatgcagttccacaacctattccagcagcacctggtgtcaactggggggcacctgcagaagcacctgctgctgttgcagaaggagattggggtgaagctgttccaccaccacaacaaatccctgttcctccctctggaattgactctgtccaaccaactggctgggaataaactagtgttttttgatgctatgattttgccctgtccttcaatttagttgtctttcttagaagtaaaatatggatcagtttttttgtagcaaagcaacttggttttttttttttttctagtttgttatgagtggcaaaatattatttttaacatggtatattcggtaagattttattttgttttgatgcagtcatgattcatgaatgtttggtaatgatattttggccccctcttttgtttacccatcactggtacattgaaatatacttgaatgcctcgcgattgtagaaaacagcatttcgataatcaattaagataatcaattaagcagcggctaagaaaaaatcgtttagaacacaaaaaaaaggctttatttttaattttagaaaacccatatgccaagaaaatcaatcaaattttggaaggtcgaagcacatgcttgattaaaaattgctacgttatttgttttggtttattctatattcggggtggcttccgttcattcttttgggtttaattttgttggcaataacaaaatagagttttcttatacacattgttgtatttttttcaatgcttactgtaataactgttgcaaggttaggacttgaagacatgtagatggagagtgggattttgaagcaccttaatcatatctctgaaacttttcaatactacaccctttacggatacacgtctgttacgcttgttcataaaacatagtcaggtaatgcagaagtaacctgttactatgggttgaaagtggggatacgtgatgccgatttggtcactaccgacaaagatgcaattttcattattgagaaattgagttcagcctctctagcatgtctttaaagattttccccgttgatatatgtaatggttttaacagatcatgatttgaatattgttataatttaaatatactaatatgcacaagtgtaacttgtattgtaaattgactaatacatgagaaatgagtaggtgtctcaattctcatcaatggatttcacaaaatgaagaataaaaaagaaaacttataatt

SEQ ID NO: 131623 - DNA, 252 bp, Glycine max
  Clone ID: PAT_MRT3847_89864C.1
attcattaaattgagacggtccggattcttgctaacattgacagggttataatcaattcacacactaaacccatttttccacctaatgtccacgggagcacaggtcagccatgaaaaatcttttagaactcactgcgcgcacactactgtaaatatatacatagaagtgttatacaaaagactggttattactcatttcttcccactgccgatacaattaaaaactatcatgcattcgacctccaccttatt

SEQ ID NO: 131624 - DNA, 811 bp, Glycine max
  Clone ID: PAT_MRT3847_89865C.1
cggacgcgtggattgttaacgctttcgaccacgcgtacatctcttccccttgaaatggtaccgtaaacccaagcttgactctgcaccactccacccatgaaagacaaaaccaccctcaccacaccactctacatcactccacccatgtttttctgaacccacttatttctttcatgatggccgttcgagcagtgacctcctgctccctcttccgcccttcctctccgcccctcttttcctccgccctccgtttcttcccctatcgctcccgcggccccccttccctctctctccgctatggggcccacacccagacgcgctccgtccaaagcctcttcaacagcctcatggaggagcttcgagccgcgcgcaaacgccgccagaagcgcgtctccgccgccgcttccaaccgcatgggattgttgaatgaagagcttgctgaagatagacttgtgaaccattcattgcaaaaagggttgcttttggaattcaagaaggattctgatagagtattgctagcagttgctcagagacctgatggcaagaagaactggatggtttctgatcagaatggtttcacttcttccatcaaaccgcagcaagtgacatatattgttcctggtattgacaattttgaccaagcagatattgcagattttgctcagaaggctcaggataatatggacccatcactacttgaatttgcttgggtagagctccttgaaaaaataagtctgttacagttgaagagttggctgagataatttttggcagtactgaagcccttgagagctattctgcgcatctcttg

SEQ ID NO: 131625 - DNA, 1285 bp, Glycine max
  Clone ID: PAT_MRT3847_89866C.1
tatggattgagaagacgacagaagggggtttcttgtagcattcagtgaaacactagctagggtattgggagctctcgttgtttcggagttagggaccttacgcagccatggccactgctacgaatgccgccgccgccccaccacgccagctctcccagaaggaagccgacatccagatgatgttggccgccgacgtccacctcggcaccaagaactgcgacttccaaatggaacgttacatcttcaagcgccgcaacgacgggatttacattattaaccttgggaagacgtgggagaagcttcagctagcagctagggttatagttgcaattgagaacccccaggatatcattgttcaatctgcaaggccttatgggcaaagagcggttctgaagtttgctcagtacactggtgctcatgctattgctggaaggcacactcctggtaccttcaccaatcagcttcaaacttccttcagcgagcctcgtctccttattcttaccgatccaagaacagatcaccagcctattaaggaagctgctcttgggaatattcccaccattgctttctgtgacaccgattcacctatgaggtacgtggacattggaattcctgccaacaacaagggcaaacacagcattggttgtctcttctggctccttgcaaggatggtgttgcagatgaggggtaccattcggcctggcctcaaatgggatgtcatggttgatctgttcttctatagagaaccagaggaggctaaacaacaagaggaggaggaagctccggcggttgattatgccatcacggatttcaatgcaggtgctattgctgctgatggccagtggcctggtacaattgatcaatcatggagtgatgcagttcctcaacctattccagcagtacctggtgtcaactggggggcacctgcagaagcacctgctgctgcaggaggagattggggggaagctgttccaccaccacaacaaatccctgtacctccctctggaattgatactgtccaaccatctggctgggattaaactagtgttttttgatgctatgattttgccccgtccctcaattttagtttacctgtctttctttgaagtaaaatatggattttttttttgtagcaaaggaacttgtttttctattttgttatgagtggcagaaatattattattaacatggtatattcgggtaagattttattatgttttgatgcagtcatgattcatgtgtttggtaatatgatattttggcccccttttgtttacaattactg

SEQ ID NO: 131626 - DNA, 203 bp, Glycine max
  unsure (1)..(203): unsure at all n locations
  Clone ID: PAT_MRT3847_89867C.1
cgacaaacaaaancataggangacacggggggcggactaagaaacaaaactgggggtgcccccccccacttcagagcgacacgagaagacgattacaaaacccagcaagccacacaactcataaaagggaatccatggactacatgaggctgctaacaaaagaagcgcctgagtaaatcccaaatagtgatatgccgctcaac

SEQ ID NO: 131627 - DNA, 922 bp, Glycine max
  Clone ID: PAT_MRT3847_89868C.1
cggaattccaggatcgacccacgcgtccggaatcaatcaaaactgtccactcctaccaacccattaccatcatcgaccaaccaatccacctaccaactaaccccattttgcaattcaatcctcaccaaccacccccattttgctcttattcaaatcctctctcctctcttccttttcgctggcagttaactcacgagggctgcacagcaatgggtggggagcgcaacaaggtcttcactttggccgaggtctctcagcacaacaatgccaaagactgttggcttgtcattcatggcaaggtttataatgtaacaaagtttttggaagatcaccctggtggggatgaggtcctgttgtcttccacagggaaagatgcaaccaatgattttgaggatattggtcacagcaccagtgccgtagccatgatggatgagttctatgttggagacattgatacatcaaccatccccagcaaggttaagtacactcctccaaaacaacctcactataaccaggacaagactccggagttcatcataaggatcctccagtttctagttccgttgtttatcttgggtttggcagttggcattcgtttctacaccaaatcaacatgatcatttaactgctagagcacatgaatactggcatttgcaataatatgttggtgttgaaaaccgccccccccccctgcattttgttttatcttttttgtgctgcaatgatgaggggttgctaggatatgccatatgaattgtgcttgtttcccttttcggtgtaatttggtgttaaatatcagattgcctttctctgtcactgatttgctaaaggagcaattttctgcagtttaaacttataaaattttggtgattctaaataaactaataagctaccctttgaaagcagcaaaaaataataatgg

SEQ ID NO: 131628 - DNA, 296 bp, Glycine max
  unsure (1)..(296): unsure at all n locations
  Clone ID: PAT_MRT3847_89869C.1
acgnaagcggggggtggggctcgaggacttcttccacgtttttttccacttctttttcttcctccgtggcttcncataagaagttatactccaagcggacgctcattgaatccgcatctgcaattgttgtaggtaaacacgatgttgcgtcggagatcctgaaccggttgaacggtgtgaacccgattgataggatgactgattgcatggtttctgccttgaaatcgaagatgaatccggtggagtatcctccgccagtagcggagcttttcatgaaggagcacacccattcgact

SEQ ID NO: 131629 - DNA, 296 bp, Glycine max
  Clone ID: PAT_MRT3847_8986C.1
cgcccacgcgtcgggttattaactgccaaaggccgtgggcttgaggcttgatcatcgagggccacaaagtagtgccggctgattctcaacaagaaactgatttctgttcttcaacactcaatggactttccctaaactgcgactagaaagttcgcggaataagctacagactcgggagattatatcattcattaagagaataacatgtggaactcagaaactgacatgagtctgggcatgaagctgaagaagacaggtgatcttggaagcaatatctgcttgctttactgcacgtg

SEQ ID NO: 131630 - DNA, 179 bp, Glycine max
  Clone ID: PAT_MRT3847_89870C.1
ctttgggccatgcttatattagaccatagggttcaaattgtgtgcataaaccccccgttaggggaatatcatgtgactgaccctacattaaaatatgtctcaacctgataataccattattaattacacaatccatatttagatgaaaaaactaagataatctaagtttctcacaaaat

SEQ ID NO: 131631 - DNA, 160 bp, Glycine max
  Clone ID: PAT_MRT3847_89871C.1
cattaaccataaccctaatgtcagagcgcggaggtggcgaccgtgtcagcgatcgtggcggtgtcggacgcggcttttgtgctcctgggctcggtggtgacagttgctcgaggccggctccgctgtccccgccgcgatgttgaggtgttttgggtcccag

SEQ ID NO: 131632 - DNA, 394 bp, Glycine max
  Clone ID: PAT_MRT3847_89872C.1
gatggacaatctttgtatgtgcctccatcaacactgctttcatcatacttcactttgtaacgtgacgctccacatgtagggcagctgcgcatttcagcaaattgatgtctatacaaaatacaatcattagggcaagcatgtattttgtggtattccatacccacagggcataatatcttttttgcctcataatggttcttgggtaatgtgttatctacaggaagcatattcttcaataacaaaagtaattcgttgaagcttttgtcactccacccaaatcttgctttcaaattcaccaaacctaagaccgctgataaccgtgtgtactttgtgcatcccatatacaatggagtcgtagaatcaatatctaagctttcatagtaaggtgaatgtg

SEQ ID NO: 131633 - DNA, 175 bp, Glycine max
  Clone ID: PAT_MRT3847_89873C.1
ggctgaaaaaagcatgcgtagggagctcaaggacttgcagaaagacccaccaacttcgtgcagcgctgggccaagagctgaggacgtgtagcattggcaaggaacaatagatggtcctggtgatgatggttatgcaggtggagaatatatgagcactatttggaagcctacggat

SEQ ID NO: 131634 - DNA, 283 bp, Glycine max
  unsure (1)..(283): unsure at all n locations
  Clone ID: PAT_MRT3847_89874C.1
ccggnactccatctttctatcagagcactgattaatgagacatttattnntaagtntcccatattcataatnccagtaaaaaccggnttgtcgaagaaaaggaaagatttgctctggaatttgttcntccccttgntacgtgggnaccaactcgtntgatatgnnatttccgatctnctnccccattccaaacatgttctgaggcaggttaggttgcgtnnagaatacatcannntcaatggggccagacttaattttaatatgtganggacatgaggtgaag

SEQ ID NO: 131635 - DNA, 496 bp, Glycine max
  Clone ID: PAT_MRT3847_89875C.1
tggagttattttctgttcattggttcgcagttttgtttttgggacttttgatggttgaggtgcagtggcatcttggggtcttagtatagttgcagaagtcatattttagagaaagaaaaacagaagaattgaacaaatggtttcctactttatcatttgtaaaatctgtacctggaaatatattttctctccaatgcccacaattttgcctgatatatgtagcattaaacttgtaagttttgataatgagaacttgcacttacgttcagagtaaattatttatttatgatatttatccaattgagcatatcaacagtactattgattttgaccgacttgacgttcagttagaattagaatctcttcttgaaaaatgatctaccttgtggagcagtcagcagacactattattgacttccttcatgatttgatttgccaactagctttcaaaattttgattgtttgggacaatttcttattttcaacatttattttg

SEQ ID NO: 131636 - DNA, 229 bp, Glycine max
  Clone ID: PAT_MRT3847_89876C.1
accacgcgtccgcaataacttcgatgctaaccacttagcatggccactaccattcgaagcctgataggcactaatgggctcatgtgccaagtcatcaccatacggacatgcgtcgtgcacggactcattctaatcatggccggctcctccgccacctacatgttacgcctctactccggagacctctgattcgacccggcctacgaccaaaccgcctcaaacctcctta

SEQ ID NO: 131637 - DNA, 640 bp, Glycine max
  unsure (1)..(640): unsure at all n locations
  Clone ID: PAT_MRT3847_89877C.1
tcgcccacgcgtccgcccacgcgtccgtacggctgcgagaagacgacagaagggttcttgagttaattcgttcagtaagtcgactcttgagtaaattcttttttttagtagacttttggtaaactttataaattctaagtaaattcggtagaatttggagtttacaattgagtcaataagttaaaaaaataagacaaaaatataaattattttgggttattttttgtttgtttagtgttaaacataactttatttggtgtgttatttttaaatacaaaaattttcacttttaataacattaaactcttgttctctaataacatcaaatcctccatgagaatcatctatcattattataacatttaaaagttattatccagtgatgcattaatagacttgattatttaagtattgtaaaatttatgattaaccattttattttattatatttttaaattttttaattgatattttatttatagatattttattattatttttatatgaaataaattcttacaagtttagtcaaatttttcatgaatttatgtaaaacttttgagattgatacattatattatattaaaaagntaaaagtgataatttttttctcttataattataataatataaatttttt

SEQ ID NO: 131638 - DNA, 687 bp, Glycine max
  unsure (1)..(687): unsure at all n locations
  Clone ID: PAT_MRT3847_89878C.1
caccctcctccgtcgccgtggccaactccctcgtcaacatgtacggcaagtgcggtgacctaaccgccgcgcgccaagtgttcgacgaaatcccggaccgagaccacgtgtcgtggaactccatgatcgcgacgctgtgtcgcttcgaggagtgggaactgtcactacatttgttccggttaatgctgtcggaaaatgtggaccccacttcgttcacgctggtcagcgtggcacacgcgtgctcgcacgtgcgtggtggggtgcggctcgggaagcaagtgcatgcttatactctgaggaatggcgatttgagaacttacacgaacaatgcgttggtaacgatgtatgcgagattgggcagagttaatgatgctaaagcattggttggtgtttttgatggtaaagacttggtgtcatggaacactgttattagttcgctttctcagaatgataggtttgaggaagcgttgatgtatgtgtaccttatgattgttgatggngttaggccggatggggtacattggcgagtgttttgccggcttgttcgcaacttgagagggtgagaattgggagggaaattcattgctatgcgtttgagaatggggatttgattgaggattcatttgttgggactgcactggttgacatgttttgaattgcaagcaacctaagaaaggtaggttggtg

SEQ ID NO: 131639 - DNA, 160 bp, Glycine max
  Clone ID: PAT_MRT3847_89879C.1
ggaaaatgcccaagggccatgatttatttatttaaaaagaacaacctaactttaagagtatgaagaagataagcatggggactgccatcaaaacaggactcacacccatacgtggggtgagtaacaccaagaacacgcccttggacccaactttaagcta

SEQ ID NO: 131640 - DNA, 454 bp, Glycine max
  Clone ID: PAT_MRT3847_8987C.1
aaaaaaaaaaagggccccttttttttatttataaaagagggaaatataagggtttcatagaggagcccctttgttaataaaaaattggcaactgaacacaaaacatgatttccccccaaggggtaaattttaagacgtccaaaagcccaagggggggggctttttttaatttagggcccttaaaaaaaactaaaaacaccgggggggggggcgaaagaaccatatgggattttttttaattaagcaaaaatttcctttaaagggtgggcccaaaggtttgccttttgaaaaaatttttggaaaggcttttaatttttaagggcccggaaatgctttttcttaaccaggttttttatccttggaatttaaagggccctggtaaatttcccccgggacaataaaagaaaagggattgggttcttcaaaaagggtttttttttttttttattttaaa

SEQ ID NO: 131641 - DNA, 145 bp, Glycine max
  Clone ID: PAT_MRT3847_89880C.1
gtttgttgtgagctataagctattttggcgatattagaatattaggttgcttgttttctttttttctgcagtatttttggtatcatgaccatgccatttctcatgctaccataagttccctcttttaattaaaactgtctatttt

SEQ ID NO: 131642 - DNA, 488 bp, Glycine max
  Clone ID: PAT_MRT3847_89881C.1
tttatgagggaatttttttttaaaacacactagaataccattctcagtacatagggaatttctttttacttgaaagaaggaaacctacacaaacttttttttttgaaaatggaagagataaatacacaataataaagtaaattaagaatgcatcaagaaacaccaaagaaacccacacggctgccatatgatgaaatgaaaacaaagcacaccacaatcatgcatctccaaccaacaaaaaagccttgtctcaatcttaaatatcaaagagcaccactctcctttaccatatacttatcctcctctgtcttggagagataaccaggaagcttctcttgtattatatcaaaaataccttacttctccttggcctgtacatcatgatgagcacctgtaccatgctccaaggatgcaacaggtggcggtggaggaggagaagaagctggggcctcctctgtcttcttgagcccccggagctacaccttaat

SEQ ID NO: 131643 - DNA, 558 bp, Glycine max
  Clone ID: PAT_MRT3847_89882C.1
gatggcttgagggcctgtgtgacaattatcatgagtttttaaattagggtcatagttgtaattttatcgcaatccttgatgttgagggaaattgcagacaaatgcagccgctgtggctgcaattacagtcacggagatctcaaaagccttgtcattggggctgaaattgtggtcaccaactgttctttaaaagcttgattaatcttatgcaatgcagggtgctactatcagctttggattacagttagcaaatcacagagtcatagtttctcaaattgctagcagacttggaagttcggacttggctctacaataccttgaaaaatgcttgtattatgtgaacataggcagcaatgattacatgaacaattactttctttcccagctctacccagcaagccgcatttatagccttgagcagtatgcacaaactctgattgaagagttatctctgaatttactgggatccaatgaaattttctgtttcacaaattattagaatatatataatttctaattctgctaaagcattctcataatattaatcataccttgttt

SEQ ID NO: 131644 - DNA, 358 bp, Glycine max
  Clone ID: PAT_MRT3847_89883C.1
gggtgtttttttttttttttttttttttttcccccagttcccaataagattgacataaaaaatgttcaacagggcagccgtttcataaactgcggtggttggggactttcccaggaactgggttcaatgttcttagtcttttcaaaatcacacaattttgaagagcttaaaaagtgcaccaatcacttcatagttcgggttaaacaaataaatgggttccaaccctaggcaagggggttttcgtttttattttttaattcatttggaaacaaaatttttcttttaaaaaagaaattaggccgccttaaaaaagggaggttgcttattcaataggggggggatttacctgaaaaaatag

SEQ ID NO: 131645 - DNA, 324 bp, Glycine max
  Clone ID: PAT_MRT3847_89884C.1
caaagtcagggattcgaagtagtgttgctagacaaagcaaccgaagaacatgtattggttcctgcaatggaggcattgtacagaaaggacatagaaggggcaaggaatttattgaggattgcaatccatgttcttttggttagggcagtgaacttggtgcttctggcatctgatgatttgctaggggttctccctcacaatgatcctcttctaaggaaatgtatagaccccatggatgctttggccaggtcaactatacactgggcagaaacaatggtaaaggtacacgagaagctttagtattcctttcttccaaaaacctgg

SEQ ID NO: 131646 - DNA, 586 bp, Glycine max
  unsure (1)..(586): unsure at all n locations
  Clone ID: PAT_MRT3847_89885C.1
gtggtcggcattcgattcctccttcgttcagtcccaacctttctccattccaatcacaaactaggccccatccaataagcacaaataaacaaaaacacaaaaagaagcaattttttgtgtttggttctgtttgtctcagccactagaatgaattctggtgctgtcttggcattgcctccagtaagcaatgtattcaggacaagggaacctcatgattttgaggatgactttgtggagaaagatccaactggccggtacataaggtacaatgaaatcttgggtagaggtgccttcaaaaccgtttataggggttttgatgaagttgatggaatagaagttgcttggaaccaagttaagattgatggcctcatgcattcagtagatgatcttgcgaaattgtattctgaagttaatctattgaagtctttgaaacatgaaaatatattaagttctatgattcttggattgatgataagcagaaaactgttaacatgattactgaactttttacatcangaaaattaaggctatatcgtaagaagcataaatatgttgaaatgaaagctataaaggttgggccaggcag

SEQ ID NO: 131647 - DNA, 235 bp, Glycine max
  Clone ID: PAT_MRT3847_89887C.1
cccactcatacgtatcttaccactttctattctaaattcactctcagaaattataatcgcgcggctatctaacactgaatcagctcactattttacagataaagatgccacccgaaatgatgttaatctctccgattacaaaagaaaagtccttcttcttgtcaatgttaccttacaatgcagcttgactaattcaaactacacatagcttaatcaattgtattgaaaatacaaa

SEQ ID NO: 131648 - DNA, 1901 bp, Glycine max
  Clone ID: PAT_MRT3847_89888C.1
cacgcgtccgaagcccattcgtgttaaccttctctctccttctctccctcccaatcctcttcttccttgccccacggatcctccctccaaagccccattccttcccccccatctccccctccgacgagctcgatgacatcaacctcttcaaccgcgccatttcccattccagcaattcccattccaacccttccaaattcttccacctctcctccaaaaacccctctctcaaaatcgccttcctcttcctcaccaacaccgatctccacttctcccccttatgggacctcttcttctcttcctccccttcccacctcttcaacatttacatccactctgacccctccttcaacctcactctccctctttcccctcttttccgtaacaaattcatctcctccaaacccaccttccgctcctcccctacccttatctccgccactcgccgcctcctcgcctccgctctcctcgacgacccttccaacgcctacttcgccctcctctcccagcactgcatccctctccactccttcaaatacacctacaactccctcttcctctccccaaccttcgattccgaaaaccccgaatcctcgtcccgcttcggcctccgcctcaaatacaaatccttcgtcgagatcctctcccacgcgcccaagctctggaggcgctactcctcccgcggacgctacgccatgatgccggagatccccttcgaagatttccgcgtgggctctcagttcttcacgctcacgcgccgccacgcgctcgtcgtcgttaaggacaggacactttggaggaaattcaagatcccgtgttaccgtgacgatgagtgttaccccgaggagcattattttcctaccctgttgtccatggcggatcctgatggatgcaccaaatacacgctcacgagtgttaactggaccggcaccgtcaacggccatccttacacttaccggccgacggaaatctcgccggaactcattctccggctccggaagtccaatcattccgagtcttacctcttcgccaggaaattcaccccggattgcttggagcccttgatgcgcattgctaaatcggtcatcttcagggattgaaattcaaattgtaagtgaaaacatggtggaaaaggtctgtgaagagatttatggtgtgagatgatattttgcttgctgttgctgtgactgtaggttgatggtggtgtatagtttgaagaggcacgaacagcccacatcctatatgcatacctggaactctcaaattgagagacttgggatcttacacgaacgagggaatcaaatcaaatcatatacaaagcaaagaaataggtaaacacctgcgtgagttgaaaaggaaatgcgggtggtgctctaggcaagtgtatttagttgggatgcaagtgctaaagtaattgctaatttggcatagaagattgtgtaggtagttcttccttttgtgggatggttttgtacataagagttgtgtaaacattgtttaaaagctctacagtgttactacttttgaacaaaaaaaaaaaaagatttgtctaaacgtgaggcaacagtgactgcaattataaaaaggaaaaaaaaaacactctttccacatttggctttttcgaattgatccctttgtcatcctgctattgctgtatccacctcccgcttaccttttttcttttgttctttttgggtctttgtattaattagtctacgatccttttcttctgtggaaagtatcagatggtgctttaatttcactccattagatataaatatataataaaagaaaataaataaatattcttgtagaacttgtgtgagtagttatgggatgagttgcttgttatgttgaaatattattagttatatatgatcatgttggacttgttcatttaa

SEQ ID NO: 131649 - DNA, 205 bp, Glycine max
  Clone ID: PAT_MRT3847_89889C.1
ttttattaataaaacctccaaaaattttcaatttcacataaacttcaatcaataatataatactacaaaatattcaaaaaaatatattacaaaatattattaccaattcctaaatcattttaaaatattacactacactaattaaaacacttattatcaattttataccataactcctattctctaatacataccaattacctcc

SEQ ID NO: 131650 - DNA, 438 bp, Glycine max
  Clone ID: PAT_MRT3847_8988C.1
cggggacaacgcgctcacttgtcgacgggcgtcctttatttttttttttaaaataataataatgtttcccatactgagtccttaaaatgggttggggttccttatacactgcaacttggaaatcctccgactttttaccatttctaacacactgaatttgcaaaaaaccaaccctttaacaaaaaatacaaactcctatggctatacataatcgctggttataaaaggaataaaaaaatgggcaagagtagcatccaattgcacattattacattacactgtattgaagacataaacaaaacaaaacatgtgagaggtagtaccttcatggacctattaaatatataatcatagatcgacctcgcaaggtgtaacttccatgagaggaacttgacccaccaaccctttctgtaaacccattaaaacattgcacttaaa

SEQ ID NO: 131651 - DNA, 264 bp, Glycine max
  Clone ID: PAT_MRT3847_89890C.1
atcatttctcgcagaattcgagttccagtttcaggtttagtttgttgatggctaaatttggtaagttgcggagaaggttcgaggtcataggccaagcgtacatcttgtgtcttgtgaaagaaaaaatctgaaagatggtaatgtaatgaagagttcttctaaagcattggagaagaaagattgggaagattcaacctgctcagtctgtatggaggtcgcccacaatggtatgcttgtcctttgttcatcttatgataaggggtg

SEQ ID NO: 131652 - DNA, 491 bp, Glycine max
  Clone ID: PAT_MRT3847_89891C.1
tattattaacagaaccatacaatattattgcagattaaagaaatggaggtgcagcggatgagggagttattgaaactttggtcaacgttgcaaattaaccgcgttgccctagtgggtggaaaccacaccgccgccagattttgcactcgttaagtccccgtttgcctcttcccctctctttgtccctcccacaatatcttttttcttcttctacctacacagaaaccaaacaagtcattacttataatataatccacaatcacaaaacaaatttctttctattctctttctaattatccaacatgatgaaaacacgttatcgcttgccgcttttggcattcttcgcattcgcttccttcatattcataacgagatcatccctgcttgaaaaaatctcttccaccatgcctgaatattccttcaacaccgaccaggttctgtcaattctatttcgcgaatgaccaacaaccaagagaaaatgttttcctcgc

SEQ ID NO: 131653 - DNA, 1501 bp, Glycine max
  unsure (1)..(1501): unsure at all n locations
  Clone ID: PAT_MRT3847_89892C.1
cgtattcttttttctcttacgcgtccgaatangcttccgagcaaangaatcaactcttcggtaaaaaaaaggggaacctatctctgtgctagatggagttcctgttgctatcaaggatgaaatggattgtttgccatatccaactacaggaggtacaaagtggttgcacagagaaaggccttgtacagatgatgcttgctgtgttaagcgtctgagattatgtggcgccatacttgttgggaagactaatatgcatgaacttggggttggaattagtggtatcaatccacattatggggctgctagaaacccatatgataccaataagatttcaggaggttcttctagtggatctgctactgtggtgtctgcaggattgtgccctgttgcccttggtgttgacgggggaggttctgtgagggtgcctgcatctctttgtggtgtagttggtctaaaaccaacttttggccgtgtacctcattccggagtccttcctctaaactggacagttgggatggttggaatactagccggcactgttgaggatgcattgatcacttatgcagccattagtggagaaatttcatcccatcagccctctaatatgcttaccaagataaatcttccactgctgcccttgacgaagtccatatgtgacatcaagttggcaaaatatgggaagtggtttgatgattgatgatgatgtcatattatgctgctcccgtgccttgaggaagcttcaggatcattatggttggaagacaattgatgtcactatcccagacatagaagcaatgcgcctagcacattacttaacaattggatcagagtgttccacttggtttgattcttttggagaaaaacattttgcagaatttggatgggacgcaagggtagcactaagcatctatggtgctttcagcggcttggagtatcttaaagctcagaaaatgaggaatcgccaattgcaatttcacaagaaaatatttgctgaggcagatgtcattgtctcaccaacaacgggtgtgactgcatatcaaattcaagatgatgccctgcagaccggtgaacttgactacgtgaatggagctgcacttgttcgttattccatagcaggaaactttcttggacttcctgctgtcactgttccggttggattcgatagattgggtttgcctattgggcttcagtttattggaaggccttggtctgaggccacactaatccatttggcatttgcaatgcaggctatctgcatgtcagagtacagaaagcccgagctttactatgatctgctgagaaggaagaatagtagcaatggcatgtcgtttgacgctaaatagtcttgtctcaccaattaggtttctttttcttttcatttctgtttgtggatttgtattattattactattaaactttttatgcatttgtttgatggcaagtttcagtttgtgcctttattattcaatcccatcagcttcgagataagtttttactgcct

SEQ ID NO: 131654 - DNA, 2942 bp, Glycine max
  Clone ID: PAT_MRT3847_89893C.1
cggtccggattcccgggtcgacccacgcgtccggagacttttgttttactttatttatcagtgtaaaattctacccttttcacgcaaaccactttggttacttgttttcataccagattctatccatcaacatgtgtcagttaagaatgcatggttaaaagcatatcgaacttctacctcattcctctagctatctccgccaaatcttcctatacattagtttatctttatctacccttctgaaaaatctcttcctacaacattctttcttggctataatggaattcttaaatggtaagggtgtagtttacactcccttgaaggatgtggacttaggcccctatagcaccgaattctacctccaagccaatgtcaaagctccccgcatgactggacttttggtcaagattttcactcatttgttggagtgtccaatacttggaaccttgttactgttcatattgaagggaaacaatcttattcaccggcttatcacaaatgcagagttcaaagaatcgcctctctttgttcccctacatgattttgaaggcttaaaagaaaaagaagtcaaatgcttagattcttctttatctccaccagagaaagttcaacttgctctagattgcttgcctaaatcttcagaaaaaacacttgatggaacaaactcttcattctgtcgctggacaataatggattatgccaaagcttacagctctggggacataacaccaagcttggttgcagaacgatttattgctgctattgatgaatccacaaaacccccactccaaatgggattctttattcactatagtgctgatgatatattaaaacaagcaactgaatcaactcttcgatatcagaaagggacaccaatctctgtgctagatggagttccagtggcatcaaggtctaaatatggagtcctctaggaggtacaaagtggttgcacagagaaaggccttgtacagatgatgcttgctgtgttaagcgtctgagattatgtggcgccatacttgttgggaagactaatatgcatgaacttggggttggaattagtggtatcaatccacattatgggaggttcttctagtggatctgctactgtggtgtctgcaggattgtgccctgttgcccttggtgttgacgggggagcatgcttgttcaggttctgtgagggtgcctgcatctctttgtggtgtagttggtctaaaaccaacttttggccgtgtacctcattccggagtccttcctctaaactggacagttgggatggttggaatactagccggcactgttgaggatgcattgatcacttatgcagccattagtggagaaatttcatcccatcagccctctaatatgcttaccaagataaatcttccactgctgcccttgacgaagtccatatgtgacatcaagttggcaaaatatgggaagtggtttgatgattgcagtgatgatgtcatattatgctgctcccgtgccttgaggaagcttcaggatcattatggttggaaggtaatgcaaatttaacccaaaaaagaacagttttaaatgctaactttgttatcttgcttaacaaatttttagaagcaacctgttaagggtagaaaatccaaatagagcttttccaatacaactattgagcctttcattaagaaatagaaacgtaattacttactggctaaccttcgaaccttattctaaacatacaagacaattgatgtcactatcccagacatagaagcaatgcgcctagcacattacttaacaattggatcagagtgttccacttggtttgattcttttggagaaaaaatttggatgggacgcaagggttgcacaaagcatttatggtgctttcagcggcttggagtatcttaaagctcagaaaatgaggaatcgccaattgcaatttcacaagaaaatatttgctgaggcagatgtcattgtctcaccaacaacgggtgtgactgcatatcaaattcaagatgatgccctgcagaccggtgaacttgactacgtgaatggagctgcacttgttcggtattccatatcaggaaacttcctaggacttcctgctgtgactgtaccggttggatacgataaattgggtttgcctattgggcttcagtttataggaaggccttgggctgaagcaacactgatccacttggcatttgcaacgcaggccatatgcttagaatacagaaagccaaagatattttatgatctgttaagaaaaaattaaatggggtgaagcatgtcagaaggaagtatgcacaagcagtgtgtcatgtcttttcaagcgaaagcatagccatgttatggcaagtttcagtcatatcattcaaaagcaatagtgctgtagcagggtaggcttatacatggattgaactaacgaaatttaggttcggaaacattttgtcccaattgtgtacaaatttattcgtccgggcaggcttacctatgtataatgaaggtgaacaagaagaatgagaatgaacataaaaaattctagttttatatcataagatcctctggtaatatatgacatgacatgtctttatgggccttttttttgtgatgggatcctatatctttttagtttttatgatataatgagttattatgtaataagtttcgaaattttactatactgaggtcatttgtttcttttgtatgaatttatcccgtcgccgtgggagacctagtagccccttctacaaggttcgccgaaaaccaaggccaagaagcacgtctttaggatgccatctaacggcgacgctcccttcactaacgccaacgacatcttggccttcagggatttcgcctacgaacccaccaccgatctctccaccggtctcagcaagttccggaaggggcccctcgggtattacggcctccaggccggcctggaaaaggataatgacccttcg

SEQ ID NO: 131655 - DNA, 363 bp, Glycine max
  Clone ID: PAT_MRT3847_89894C.1
gctttctgatcttcgtttctctccgctcacactcagtcacagggatttctccccaaggtttccatctatctcatgccctaacttccctccacttcacgtctttttctatgtttatgtctcaattgtcgattcttattcttttttaactgcattagaattgagggctttacttcaatcacttgggaagggggaaattgaaaatataattcaatgttaaatgatgttcaattgcaatgttacgctctttgttttggatggttaggttaggttaggttatgtgcatgcgtgtatttgacatgcacacgaccttggagaggggtgtttttaaaaacgattagggttgctcatgatctttattgcgtg

SEQ ID NO: 131656 - DNA, 143 bp, Glycine max
  Clone ID: PAT_MRT3847_89895C.1
ctcacgcgtctctatagatgatctcaacctttatctaatatccgtgaagactactcgcaacggggaccaactacagatcaattgcaaactcaaaaaacacttacaacaggacgatagtgaaatgcacgaccaaaaacatatct

SEQ ID NO: 131657 - DNA, 364 bp, Glycine max
  Clone ID: PAT_MRT3847_89896C.1
ggtctgtttaagtgtgaatccctttccctctctacttttttgtggactttccatttccattctcattttttctggttcactttctcgatggcctccgataaccccaccgtctacgacgccgtctacgtgcttcaagcggccggtaatgttctcggaaaacctagccgtcgccgtctacgcctacgtccgccacgtgttcctttgcttcaatagaaacctgctctggtccccgatcatcgtgaccttcgactcctatcccttttccttgtgcgttttcaccatcttcatagcccgttagatctactttgcccttatgtcgtatattacctttatctaagttcattatggaggctgtcttcctctt

SEQ ID NO: 131658 - DNA, 273 bp, Glycine max
  Clone ID: PAT_MRT3847_89897C.1
gttacacggtcgtaacaagcgcaagcgacctggattaccacggtttgacaggaacacgatccttaacgtcatagtgttctctaagacaccagggtcccatgtgctcaacatcgttgaagttacacataccctaacccgataactctagcttctcatgggagtctaggtcgattcccttaatagagtcaatacttttcacatgaaagactcctactctacttctaagggcgccagtgcttacctgtgcatcgaatatcgcgaaactagtcttta

SEQ ID NO: 131659 - DNA, 492 bp, Glycine max
  Clone ID: PAT_MRT3847_89898C.1
aaaacaaaaaaaaaaaacccggccttaactttcaaggaaagcaaaacaacaaaaggggtctgttttttaaaaccctcatcccaaaaaacggaacccaagcaaagctagcttaaacccccccccggggaagaccccgaaacattagggccccaaaaaattttggaaacaaaattttcggggccccccccgaggccctcaaaggtcccatttgaaaattggccaccaccaccaaaaactgcaccgaaaaccgctccccccgggctcgccccctgggttttggaaagaccccccccccctccaactaatgggggcttggcccctgcccccacggccgggtaaaggcccccccccttacccccccccattttcggggctagttgattccgcaggggaggtgttaccccccccctaacggatttcgacttccaagaccaccggcccggggttttaaaacaccaaccccccttgggggggctaggttaccccccaatt

SEQ ID NO: 131660 - DNA, 484 bp, Glycine max
  Clone ID: PAT_MRT3847_89899C.1
gaaatatcattggaaaacaaggttcctttgctttttgggttattgaattttacactgatgatatgattcaattaggcacgtgtagttatgttatgctttctaacaaattcactttgcattcttattgtgctggacatgtttgcttccagggcacttttacgaggtatttactacttattactcgaccaaaatattgtcaaatagtatcaattaagtcttgttatccatcacttcctcttcatcaggttcttaaagtagatcactctcatgaaggaagaggaaaagccacaatcaagaacttcgtgacattgaccagggaaacaaggtaacacaaagaatgggtaccgatgacggatgtgaaagggtctacgttcaggaaaagactttcatgtttatgtgcatggatagtgatggaactgttgtattgatggaccttgacacattgaatcaaattgaagtttccaaggactggttcaacaaggat

SEQ ID NO: 131661 - DNA, 217 bp, Glycine max
  Clone ID: PAT_MRT3847_8989C.1
aaaaaaaaaaaaaaaaaaaaaaaggggaaaataaaaaagggaggacgccaactaaaataaaaaaataacccggtaattaattcctgacccacacctgcaggaaggaccagatttccctttcgcgagtgaaattagagcttgacttaatggggggcgtcacctgtttcctgggtgatatcgagttactgtttcactcccccactactgtgggccctga

SEQ ID NO: 131662 - DNA, 333 bp, Glycine max
  unsure (1)..(333): unsure at all n locations
  Clone ID: PAT_MRT3847_898C.1
caagatctcaaggttcgaaaccgaaactgcgtcgtcgtcagtcgtaatagtagtaatagtaacagtaacaacaacaacaacagttcgaaaagtgtcaaaacaagtaacaggaacaacaagaagggcagcaacaattacattaatgttttgaaacagttagtgggcaaaggcggtggtctattgagtggttgtgattgttcctttgaaacagtgcaacccaacaacattgtcatgataaaaggtggtaatggtaatagtggtggtggtaccgntaaaagcacgaacatgacagaaagtacaacgcacgccgcgaaagaaaaagtggtcgagttt

SEQ ID NO: 131663 - DNA, 122 bp, Glycine max
  Clone ID: PAT_MRT3847_89900C.1
caccagcgaagtacacgacttggccgttctagttcagttgttaacactcatatcctgttacaaatcacttctgctcttatcgttgtttgttcctcacttgttgctttcattcagtttcagtg

SEQ ID NO: 131664 - DNA, 219 bp, Glycine max
  Clone ID: PAT_MRT3847_89901C.1
tccaaaattccctctctctctctatttcttaacacttcatcagcaaatgcattcacactgcagtgtatagcttgcatacgctattccagagagacatatatctccctctcagaccagttagctgagtaacggtttctccgtaccattcctctcattctcttcccaatttacccttatctccgctcctcataatcgctcttatgccatccaactagctag

SEQ ID NO: 131665 - DNA, 530 bp, Glycine max
  Clone ID: PAT_MRT3847_89902C.1
aaactaacatgggaaaaagttccattccaaactcaaatccaaccagggtaccacgagcaacttaccattggaggggattaagtaaagttaacaaaatccttataaatcatccttcataaaagggcccccacctaacctaaaacttaaaacttggacctggaggccgaagggaacatttaataatgggggtattaaaaaagaaaggggaacataaccagggtggaaaccgaacaagaagggaaccttggcttttttggcagcctggtcaaacttgggagggcgaagttggtcaagcaaaaatttggcatttttcccctggacaatcaaaatgggggaagaaacattgggaaacttcggtaccaaacaaggagcatcggaatccttcccatcagaattattggcaccaagataatttgagaatggcttctggccccaaggaccatttataggatttgctattggagcaaaggcagaaacttatatttatcctgattttttaagggagattggtagagcaccctgcccacccc

SEQ ID NO: 131666 - DNA, 926 bp, Glycine max
  Clone ID: PAT_MRT3847_89903C.1
aaataaaaaaaaccccacaagctgctggttgtaggtgatatataattgagaatctgagattccctatgtaattggcaatctacaatattagagagcaaaaaggctcccttcaacaggctatttacaacaaaacagactaaagatcccaaaatagccaataaccattcgtagcaaatatgacactgactatgaacaataagtcaaccgtctttgctgcatatttaacaaatttatgagcaagactcctattccttaaagaacatttgtaattctttgtcaagactaaagagaaactacttataatcccccaaaagataaaagtaccaaagttagcaggaagcatcttcaatcagattgttttgcactcttttgaaccttcccattcatggaaatcaaatgcaggagatccactaaataagtaggccatgacattaggaggtataacaaaggaggaggaaggtctatccatgtttaactcgaaagtatgcactctagagaaaggggaagcccgaccatccagtagatcaggaatcatagctagagcttgaatgatagcaggtgataaggatacaaaccgggcacttcccatcatttcaaacaattgaatcagcaaaagcagtgaatcagtgtcgttggtcaaacaacccacatcaatatccacttgttctataaaaggaaggttgccctcaatagaaaaatcatacagatcagagtcatggtatctaaaatattgaagctttggcgtgaaaagctcaacaacacaatcagaatcaaacatttcattcattcccatccaggaaatgctcaagtgggtaagttgggggacgaagatttgaaacctgtggattccaccataatactgacaacgatgaagatacaagtgtttcaaattaacgcaacccctaaaagggtcgagaagctcttct

SEQ ID NO: 131667 - DNA, 465 bp, Glycine max
  unsure (1)..(465): unsure at all n locations
  Clone ID: PAT_MRT3847_89904C.1
ctcgagccgtgatttgaataaattttccattttcttattatttctgatccagatctttattattggtggaattgggaatttgtttggtacgctggcattgttttgggctctataatcaatgtacaatctcagtccttttttttttctgaccagtattactgggctagagtaggaattgatgcttggtctaataattttagcattcaacattgaattcataatatgggtaccttagggtcggacattagtaatccaggctccctctttcgatataatgcgacgatcatgtcttctctttggtggcagccctcggcgttctcagaaaacctcttaaaaagtagatgtgaaacctcttctagttttgggtgtacaatatgctctttgtcctgtattgttgtcagtagatcatctccttcattntgcaggatgttatacttatagatagttnttaaagatgctactgag

SEQ ID NO: 131668 - DNA, 766 bp, Glycine max
  unsure (1)..(766): unsure at all n locations
  Clone ID: PAT_MRT3847_89905C.1
attcccgnnggtcgacnccacngcgnntccggtctcaaacaacaaagagcagtttatttatatttacatacgcgtccaacatccccgtaagttttaaactgatggattgcacgcactcaagctgcatagcgactaacagtcactgtagaagccattaattaacgaagaaagtaaaacgccgtgaaatggcgccaaagaagaaacccgagtctgatcctcatggaatgttcagtggcatggtcgtgtttttggtccccaaaggagttcaagcccgtcgattccagatttggaaggaaaggttggtgcaaatgggggctgtgatagaggagcgcttctccaaacgggtcactcatgtttttgctacgcactcagatgcccttcttcagcaactggatagggagcgtttgtcacgttttaaagggagagttctcctttatcaatggttggaggactgcttgaaatcaggggagatactatcagaggatatgtatttactgaagttggattctcaaggtgaacatatacctgagaagtctttggaccctggactgactaatcaaaggacttcaagcgatcttcaacaattgcttaataaaaagagcaaattatctactgaggatacaaaaattgtaaaaaatgaaagccatgatgatgatggaaaagaaaagcggtattttcatcaacaagcacaataagcagtcatggtgaagttgacagtttaagttatggaaacacaagacaaacacaccttgatgctgaaaatgag

SEQ ID NO: 131669 - DNA, 1169 bp, Glycine max
  Clone ID: PAT_MRT3847_89906C.1
ctctctctctctcctccataaccaaaatatcaaacacccttcaaccccttctcttctctgttggatttcaatctctccctctcactctgatttttcctttttcaattttccatggagggtcatcatctccatcaccatcaccggcaacaacaacaacaacaacatcatcatcaacaacaacatcaacaacaacagcatcatcaccaccctcatcacaacatcacaactagtaacgtggatgccacggataggttcccccaatggagcatccaggagacaaaagagttcctcatgatccgtgccgagctggatcagactttcatggatacaaagaggaacaaacagctttgggaagtcatctccacccggatgaaggaaaagggtttccataaaagtgcagaacagtgcaagtgcaagtggaaaaacctcgttacccgctataagatttaaagggatgtgaaacgatggagccagaagcgacgaggcagcaattcccgttttacaacgagcttcaagcgattttcgcggcgagaatgcagagaatgttgtgggcggaagcagaaggagggtccaacaagaagaaggtgcacctttcctccgaggacgaggaagagggcaatgaagagacaagcgagggggatcacaagggtaacatcaccagcaagaaaaagaagaagggcaagatggtaattggtggaggagggagtggtaacaacaacttggagagtttgaaggagatcatggatgagttcatgaggcagcagatgcaaatggaggcacagtggatggaagcctttgaggcaagagagaatgagaggaggctgaaggagatggagtggaggcaaaccatggaggctttggagaatgagaggttaatgatggaccaaagatggagggagagggaagaacaaagaaggattagagaagaagttagggctgataagagagatgctctaatcactgctcttctaaacaagctcagaagagaagagatgtagttgctagtttgtttggctagatagattcatagctacctagctagcttgcttttatgtgtctttcttcttctcatgaagcaaagcttgatttaagaggtttgttctaacttcaaagaactcccccaatttatatatcttggtcaatattaatatatatatacatacatacat

SEQ ID NO: 131670 - DNA, 298 bp, Glycine max
  Clone ID: PAT_MRT3847_89907C.1
ggtgaacgatgtcacctctgttgacggacctctcatgaacctgaatgatcctggagctggagcttgaactatcaagtaagtcttctttgggaccagtttgaagaaggttattgactcaagggttccctacaactacgtttccggtggacactctttgattgtggctgttaaagagaacattgagattgaagagaccctacagaccgacagggacagattgacgggtattgaatatgatatctgacaagagcatcataacatctcacaaggaaatggttaggttgactccctattgcag

SEQ ID NO: 131671 - DNA, 416 bp, Glycine max
  Clone ID: PAT_MRT3847_89908C.1
ctcactcgtccgtacacatatgcatacgcgctctcactccatgccatttccgcgattagcattagcatacgtgcacttacctatctggtatctagctatggcacatgatatgggtagcagtgactttggagaacctaacttaggaaatgaaagagcaagttgtacttctacgcccagaatgaggaagaagagctcacagctagacaagccacagcaaccacagagaggtcttggagctgctcaatcggagaaaattagattacatggatatcacccttatgtgcaagctacttacacttctaatatttccaacgaggatccaagagtgcagatagcgtattcatcggtgccatcatgtgctgtatcttactcatcatcatacgcagcttactatggattccaacgcagcatcatga

SEQ ID NO: 131672 - DNA, 1010 bp, Glycine max
  Clone ID: PAT_MRT3847_89909C.1
actaacggctgccagaagacgacagaaggggggggtttgtttctgtctctctccaccataaccaaaacatcaaaaacacccttcaataacttctttctcttctctattggatttcaatctctccctctcactctgattttttttttctttttcaattttcatggagggtcatcatctccatcaccggcaacaacaattacaacaacatcaccaccctcatcacaacatcacaactagtaacgtggatgccacggataggttcccccaatggagcatccaagagaccaaagagttcctcgtgatccgtgccgagctggatcagactttcatggagacaaagaggaacaaacagctttgggaagtcatctccaaccggatgaaggaaaagggtttccatagaagtgcagaacagtgcaagtgcaagtggaaaaacctcgttacccgctacaagggatgtgaaacgatggagccggaagcgatgaggcagcaattcccgttctacaacgagcttcaagcgattttcgcggcgagaatgcagagaatgttgtgggcggaagcagaaggagggtccaataataagaagaaggggatgcacctttcttccgacgacgaggaagaaggcaatgaagagatgatgagcgagggggatcacaagggtaacatcatcatcagcaagaagaacaagaagaagggaaagatggtaattggcgtcggagggagtggtaacaacaacaataatagtagtagtagtagtaacaacttggagagggaagaacaaagaaggattagggaagaagttagggctgataagagagatgctctaatcactgctcttcttaacaagctcagaagagaagagatgtagtagtttcttttggctggatagatagctagcttttatgtgtctttcttcttctcatgaagcaaagcttaatttaagaggtttgttctaacttctaagaactctcaatttatataccttggtcaatattaatatatatacatacttt

SEQ ID NO: 131673 - DNA, 467 bp, Glycine max
  Clone ID: PAT_MRT3847_8990C.1
cgtggttgaaaatcatggcttccttttggtttcgaatgagttgattagcgctaatgcttagagttgaactaaaagaaaccccgacggggccccaaaaaggcgttttaaaagaacggggcaaccccacaaaaaagggcccggacacgtttccccccgggcgaggcaccggggtattcaaaaaacccccccccccatctaaaaaaggagggggggggccccgcccccaggggcggaaataggacgcgccccttacagccatccattttatgggcccacggccccccgggggtaccagaaaaattcggggcgagcccgggcggcccccccacttccccaaaagggggcgaaaaacaagaggggggaaaataagggaaaaaagcgggggaccctaaaaagtttatcgggtcaaaaatccaaaaaaaaaccggcccgggaaaaaaaaggggaaaacccgggggggccaaggg

SEQ ID NO: 131674 - DNA, 304 bp, Glycine max
  Clone ID: PAT_MRT3847_89910C.1
gataccaaccagattttgctaaattaccatccgtggctacattaattcttacttagacgtcaaggaacatatcatgtcccgaaaatacacaggtgcaccttggaagcaatccccctgacgacattttcactccattcactcacacctgagaagggttgtacggccctctatctgaggagtcgccttgtagaagagccacccgtttcacacacaaccaaggccgccctgactgagccgcgcagcaccgcgaatcgacccagcttcccaacctagatacttccatgcagacaatgcaacagtacac

SEQ ID NO: 131675 - DNA, 505 bp, Glycine max
  Clone ID: PAT_MRT3847_89911C.1
acgagatggatggaagcgccctaatccattttacgagtcaaatgggaaccaagggcaagcaaagagaagattttaagactacaaccatacgtgaaaacaagaagtggatgcatagagagactgaaaaacaaagaaggcaagaaatgaccaggctttgcaccaactttagatctctccttcctcttgaatacatcaagggaaagcgctcaatttctgatcacatgcatgagggtacaaattacatcaagtaccttcagaataaggtaaaacagttgcaagccacgagggacaaacttatgaagttgtccaatttgagtcccgttggttctgagagtggaagcttgagtactacccatcttccagtatgcgtcattgttcatccttgtccaggaggtgttcagattaagtgtagttatagcttcgggaaatatgcctgtcctttgtcaagagtgctagacatagtgcttaaggaagggcttgatgtggtaaactgtacttccaccaa

SEQ ID NO: 131676 - DNA, 2256 bp, Glycine max
  unsure (1)..(2256): unsure at all n locations
  Clone ID: PAT_MRT3847_89912C.1
gtgttgtggttcaatctagcatagatcgatcgatcattcatctgtgaataaaaaggtgtaactgtgactgtaatgtttctgaatcgaagctgaaaatgatgacgccgttcaaacgcttacacttagttcggacactctatcgttcatctcagattggagaatcttcgtcgtatctgctcggcagctgcaagagttattcctctgctctatcaaacggttctgagggtaatttcaggagcttccattcncatttgttaaagggccaagatggttttatcttatgaagacagtgactcctaaatttcttgtctttttctatatgtttcttgtccatttcttaggctgctgagttgtccattttcatgaacgataggaggataagtactcaagtcaaagcctcagcacaagcgcgacaagtgggacgacaaatatccatatcaagtcctggatttatctatgaaccctatgaacctcgtgagaaaatcccattttggaagagatggttcactagaagtggttggagaagaacaaaaaatgacataattcttgagcttaaaagtgcctatgctattgcaaagttaagaaaaaagggttattcaaaaaatcagttctacaatgaggctgccaatatgtacaaggagaatgtaggtgcatgattgttataagttaatagattaagagagtgcattgtgaaagaaattgaagggaagccgttttgtagtgatatagtcacttcagatagcgttcaggagaatcgatttaaagaaatgcctcgaagaaattaagaaaagaacagaagacattgatgtttggccttttggatgtgttttgaattttcacctgctacaaccatttatcatcactattttcctggcagcttctttcttttgcattgtaacaatcacactaatagctaaagatgaaaaattaacaaaagcagttaatgagaatatgttttctgcaataaagaatgttatcaaacaaatagacacagcttggagcaaggtatactggaaaatggttgatcctgatgttatgaagtgaattgtgagtacacgtatggttagtgtacttctgctctgtgtttaaatttaggtcatgattatgtgacatatcaaaatgtagcacaagtttttgattaaacaaagaaaatctgcctatacttgcattgggtcacatcaaagagctgacatatcaacttgctaacattgaggcatcactgatcaaaatgtgatctctttgttttatgtattgctttcttagtatgtattgcggcggatatcaccaccagtataaaaggttaactccttagaaaaaagagaccaaagtttatggttgtttttttttattagccaaagtttatgattgttagatgttccgatgtcgtggagctgaaatcttacatttgtttgtcactggagccttgtcctctgaataaaatcaaatataggtgtaaacctatgcaaattttgttgttcgaatttgtattaacctgatattttcacccttcaagcacggtgacaattctagaagtgttaatcaaccaggtcctgttagtatgcacgtccttttaacctactagccttatgcagatgacagattatgtatgatgttgaattgtactgtcactctctcacagacgtgcgcacatattttgaaatcagtattttgcttttcaatataatgatttttatgatgaccttttcaattacagattggagttgatcggaaagacctaaataaaacatttattcagcttactcttgagatttttggctaaacagaaatttgaagcatatgactcaaaaggttctgtagtagctggagataaaagcaaggaggttcttgtccgtgatatatgggtattggagaagtctatgtttcatcctggtgcaacctggcatctgtgtggacggatatcaccaaaagcatcacagttatttccttgaaagaagagacctaagtttatgatagttagctgttcctttgttaagctaaattctcacatttgtttgtcactggagctttgtcctctgaataaaatcaaatataggtgtaaacctatgtaagttttgttgttcgaatgaaattcatttggagaggattttttttttttttttatcagtttctttccttgctggcaaactggaaaataatgtatcgatcaatggaaaccatgcgggaaaggaaatctgcaacataaaatattaataaaatagtaaacgtggaagaatgggcaaagtgattctattctcc

SEQ ID NO: 131677 - DNA, 1441 bp, Glycine max
  Clone ID: PAT_MRT3847_89913C.1
cgtccggttcattcctgatagatcgttcgatcattcatctgtgaataaaaaggtgtaactgtgactgtaatgtttctgaatcgaagctgaaaatgatgacgccgttcaaacgcttacacttagttcggacactctatcgttcatctcagattggagaatcttcgtcgtatctgctcggcagctgcaagagttattcctctgctctatcaaacggttctgagggtaatttcaggagcttccattcccatttgttaaagggccaagatggttttccctttgctggtgtaaaatctttgacgcttcgatctacaatggctgctgagttgtccattttcatgaacaataggaggatgttaagtactcaagtcaaagcctcagcacaagcgcgacaagtgggacaacaaatatccctatcaagtcctggatttatctatgaaccttatgaacctcgtgataaaatcccattttggaagagatggttcactagaagtgggttgagaagaacaaaattcggcttcaggcatgatctcaaaagtgcctatgctattgcaaagttaagaaaaacgggatattcaaaaaatcagttctacaatgaggctgccaatatgtacaaggagataaacactctaatagctaaaggtgacaaaagaacattaaggaaagcagttactgagaatatgttttctgcacttaagaatgaaattaaacaaagagaaactgcatggagcagggtatattgggaaatggttgagcctgctgttaagattcggactttgcgtgcacgtctgattggagttgatcggaaagacctaaataaaacatttattcaacttacactagagattttggctaaacagaaatttgaagcatatgactcaaaaggttctgtggtagctggagataaaagcaaggaggttcttgtccgtgatatatgggtatttgagaagtctatgtttcatgctggtgcaacctggcgtctgtgtggacggatatcaccaaaagcatcacagttatctccttgaaaaaagagaccaaagtttatggttgtttttttttattagccaaagtttatgattgttagatgttccgatgttgttgagctgaaatcttacatttgtttgtcactggagccttgtcctctgaataaaatcaaatataggtgtaaacctatgcaaattttgttgttcgaatgaaactcattaaaaaaaaaaaaaaaaaaaaaaaaaaaaaaaaatttataaaaaaaaaaataaatgatgaataaagagggagaatttatgtacaaaatttggggggggcccgggcttattaagcctaaataccgggaatttaattccgaccccgtccctgggggggtcccttttttctttttagggggccctttaaaattttggcccaaaaatggtaaaaattgttcctggggggaaagactatccccccc

SEQ ID NO: 131678 - DNA, 417 bp, Glycine max
  Clone ID: PAT_MRT3847_89914C.1
ttatctctgtttgctatgttatattttttctatagtgtatctaaagaaaccggggggggcacccaggacaaccccgtggctgaaccaaaaaattccgacccgaccccggcggggggcaccacattccctaaaggggagctgataaaacagcgaagaaacccggaccaaacgcccttcccgagaaaaaaggaaaccgaatgacaaatgcaacacacaaaggagcggaacacaaaaagcgaaaaccggggggggcccaaggagggagaccactccacttattggcgccgcacccacggcccctttaaaaaggaaaaaaccggttctcccaacgtaattaaaaaaaccccaaaacgccgggaaaagggggttcgcttaagggcccccagggagggctttttttcccccaggaagaggggc

SEQ ID NO: 131679 - DNA, 286 bp, Glycine max
  Clone ID: PAT_MRT3847_89915C.1
gtcttgtttccattgatggcccaaggccacatgatccccatgatggacatcgcaaagatattggtgcaccgcaatgttattgtgactgtggtcacaacgccacataacgcagctcgtttcacaccaatctttgatcgttatattgagtctggctttcctgtaagattggttcaacttcaattcccatgtgaagaagctggagtaccaaaaggatgcgagaatctcgatatgataccttcacttgccacggccacaagtttcttcaaagcagcaaaccttctacaac

SEQ ID NO: 131680 - DNA, 349 bp, Glycine max
  Clone ID: PAT_MRT3847_89916C.1
aattcggctcgatgttgtatacatatccttataatatagtctgaatgcttcaccaaaaatgttaggagacattattttttaatattttacattttattttaagatgattgaggtgtctgtgttggaaatatacctgacagtctgacacctcaagtggaagacttgtatgtgctttataggcaatgatgcttatatatatggttctgtttcatcatatatctatatatatatggcttttcatggagacgtacagaaagaatgttgcttatagaaaattcaattttggtaatcaaggtacacctctctacttctaccacatagcaattaaaagaaaagaaaatgtgaaggc

SEQ ID NO: 131681 - DNA, 323 bp, Glycine max
  Clone ID: PAT_MRT3847_89917C.1
atgtcgagtatcattttattcgattactctgcggggtgtttttctgtgcgactccatgtgatagagacgacttgcgaagcgtaacgctgaaaaatgtgccaatccctgcgttgctgtttgtggtgctaatctcttcaagttgttgtggtggtggctcaggataactaggacgtgatgacgctggtgaagcacactgctcaggaagaacttctgtgactaaggacggtaatgtaagggctggtgaatacactgttgtggcctcactattactgattatttgccgacctaccagttgtggaatctcttatgaaagcggtactctt

SEQ ID NO: 131682 - DNA, 418 bp, Glycine max
  unsure (1)..(418): unsure at all n locations
  Clone ID: PAT_MRT3847_89918C.1
ttcctaacttagggtgctagacccaccactgattttgaactgcacttttatcatgtaggaggttcaagcaacaagaagggagccattataggcggtgttgttggaggtgtcagtcttgttgtcatcctccttgcactatttggcttgcttagacggtataagaaacccaagagggttcctagaggtgagacaatttggaaagtcttgaatctgatgatttttcaccaaagaaaataccgtggcacacatcaattcacgctgtgaactaccatttgcaggggacttctatctcatgtttacaagactttntaaacccttaatttacaatatgatgatttggaattgaattataatttaaaaacggtttaaattattagtgcatttaaattaaaggtgtactaataggggttaatttgaa

SEQ ID NO: 131683 - DNA, 293 bp, Glycine max
  Clone ID: PAT_MRT3847_89919C.1
aaagtacgtttctggaaatggattctacataattttctctcacacggatagtccttatctcaaaggcaagtttatcaccaaggctgttaatacttgaatttttgtagttggtgtccaaacctatttaggaaccctgacggcacacgttgtttgatcgaaacttgactgtgacgctgagggtcattgtgcaacaatagaatgctccttctttttcatactcacataaaatcgttcaaattgcttaacctataacacgaataccgactttggcaattcacttgcacaagactgtt

SEQ ID NO: 131684 - DNA, 386 bp, Glycine max
  Clone ID: PAT_MRT3847_8991C.1
tgcggaggcactgactgactcatgctacaaagagtcacttggtgaccgttgaggtgttcctagctaccatacgagagaggatattggatgtcgctgagatccatagagaatgcttctcatactaaggaaggataattcgaggttcgcttcgcctgcgggtgatagatttcactgcatctgatccatatctcatagatcaatacctcacaaagcagggctgggactgctgtgtgcagcgctctatccattggcgaggtctgatttggccagtgctagccatgcgataccctgggattcctaattgggagaatctgagttcctatctcttctctgtgagggactggatattcccagcaggtctaaggacttatagagacctctgatca

SEQ ID NO: 131685 - DNA, 497 bp, Glycine max
  Clone ID: PAT_MRT3847_89920C.1
gcgaagtgctaaatgacaactttcttacgacattaatatgtaataatagtaaaaatttcggaaaattacaaagagaatagaatatattgtttccttcttcttcttctttttttctgggaaagaatgtgacctcgagctggggtcatttaacttgtagtttaaatcatacatgtccatcggagcatagcataaataactgaaagcaccgaaacaaataaattcaaaaatcagaagcacataagttaactgctcgaaggcgcttgcttgagtgtgtctcccacttgccctaccacaaagtagtgcattcttcggaacaggatattcatctctgattgaggtcgatgttgtataaacgcgcatgtaaaactgttggccaaggtattgccgtgcccaaaattcagacctcaagttccacattcccacgttgtcaagcgcaatatatatagcagtccatgacttgggatatacctgagttgtggaccgcgaaactgcatctc

SEQ ID NO: 131686 - DNA, 110 bp, Glycine max
  unsure (1)..(110): unsure at all n locations
  Clone ID: PAT_MRT3847_89921C.1
tatataananaatgaagaagtttgtactcaagtnagatttgcatganngacaaggataagcagaagggccntgaanacagtttcaactctttcaggnttgatgccatcgc

SEQ ID NO: 131687 - DNA, 1269 bp, Glycine max
  Clone ID: PAT_MRT3847_89922C.1
caacgcgtccgacgtggggctgcaacactcctcaacttagaaccagaacacaaatgaagctggtagagtggaggaacgacacccttagacactgtaccctctctttgacgttcatgtagggcaatcttcccaggcgtccgtaacctgcggaccaacctgctcaagactattacattgtggtctcctctcgattctcctccaaggtcctcaccaccaccggaattctgcgctatagcaactccgcaggcccagtatcaggcccaccccctggtggacctacaatccaaattgattggtctttgaaccaggcccgctcaattcggaccaacctcacagcaagtgggcctaggcccaacccgcaaggctcctaccattacggtctcataaacacaaccaggaccatcatactgtcgggttcaccaggtatagtgaatggcaaacaaagatacgcaattaatagcgtgtcttacgttgctccggacactcctcttaagctcgccgactacttcaaaatccctggcgttttccgtgtgggaagcatttctgacaggcccactggcggtggcatataccttgacacatctgtgctgcaaactgactacagaacatttgtggagtttgtcttccaaaatgacgaagatatcattcagagctatcatctcgatggctactctttctttgtggttggtatggatggaggacagtggacacctgctagcaggaacacgtacaatcttcgagatgcagtttcgcggtccacaactcaggtatatcccaagtcatggactgctatatatattgcgcttgacaacgtgggaatgtggaacttgaggtctgaattttgggcacggcaataccttggccaacagttttacatgcgcgtttatacaacatcgacctcaatcagagatgaatatcctgttccgaagaatgcactactttgtggtagggcaagtgggagacacactcgacccctttgagctagcaagcaagcgccttcgagtatgaaaactaaagcagttaacttatctgcttctgatttttgaatttatttgtttcggtgctttcagttatttatgctatgctccgatggacatgtatgatttaaactacaagttaaatgaccccagctcgaggtcacattctttcccagaaaaaaagaagaagaagaaggaaacaatatattctattctctttgtaattttccgaaatttttactattattacatattaatgtcgtaagaaagttgtcatttagcccacaacaag

SEQ ID NO: 131688 - DNA, 2164 bp, Glycine max
  Clone ID: PAT_MRT3847_89923C.1
acccgcacgcgtccacagagtgtggtgttggtaattaagaaagagaggaaaaatgccgctcaagttggcgggaggagccactgtcggttcccttcttctatgagttgctatttctctctttcacatggctggggccggagatcagagaatgttctgcgtgtgtgtgtctctctctttctctgcttttgagtaatttattgagagcaaaaatgaacgctcaaaacagcggcggtggctgtggctatagtgtgcatttctgcctttagcatcactgtggtggctgaagatccatacaggttcttcaactggaatgttacatacggagacatttatccacttggtgttcgccaacagggaatacttatcaacggtcaattcccaggtccagacattcattctgttaccaacgacaacctcatcatcaatgtcttcaacagcttggaccagccatttctcctctcctggaacggggtacagcagagaaggaactcattcgaagatggggtattaggaacaacatgccccatcccaccaggagggaacttcacatacattcttcaagtgaaggatcaaattggaagcttctactacttcccatctcttgcatttcacaaagctgctggtggttttggaggcattaggattttgagcagacctagaattccagtccctttcgatgatcctgccggtgattacactgtcctcattggagattggtacaagctcaaccacacggatttgatgtctctgcttgatagcggtaggaagctgcctttccccaatggaatcctaatcaatggtcgtggttctaatggtgcatatttcaatgtggaaacaaggaaagaccctacaggcttaggatatcaaatgtgggcgttggaaatttcgcttaattttcgcttacaaaaccactaattgaaactgcatggaatttgaaagaacacacacctttcaaactacgtactcaccccctgaagtccgagtcgaccaaccttattcagtgctggttaatccggatcaacctgctcaggaccaccctcacggcaagcgggcctaggcccaacccgcaaggctcctcccctaacggtctcattatcacaaccagaaccacaatactatctggttcaccaggtctagtgaatggcaaacaaagattcgcaattaatagcatgtcttacgttgctccggacactcctcttaagcccgccgactacttcacaatccctggcgttttccgtgtgggaagcatttctgacaggcccactggcggtggcatataccttgacacatctagtgctacaaactgactacagtaccatatgagtagtttgtcttccaaaatgacggacacaccacttagactcgccgtctcctttacaatccttggcgttttccttgtctggagcttgtccggcaggcccactggcggtggaacatatattaacacctaggtgcagctacgtgattcaagaacatgttgtagcgcatgtcttccacaactatgaagactatcattcagaactatcatctcgatggctactatgtcttagttgtgggtatggatgtaggacagtggacacctgctagcaggaacacgtacaatcttcgagacgcagtttcgcggtgcactactcaggtatatcccaagtcatggactgctatatatattgcgcttgacaacgtgggaatgtggaacttgaggtctgaattttgggcacggcagtaccttggccaacagttttacatgcgcgtttatacaacatcgacatcaatccgagatgaatatcctgttccaaagaatgcactactttgtggtagggcaagtgggagacacactcgacccctttgagctagctagcaagaaccttgttgagtatgaaaattaaagcagttaacttatctgcttctgattttgaatttatttcttttctgtttcagtaattatgctatgctccgatggacatgtgtgatttaaactacaaatgaccccagctcgaggtcacattcttttccagaaaaaaagaagaaagaaatttactattattacatattaatgaagtaagaaggttagcatttagcactccgcttcacaatgtgtcattcatagtttcttttcttctctaattaaaatagttggataaatgctagtccatagattttggtg

SEQ ID NO: 131689 - DNA, 301 bp, Glycine max
  Clone ID: PAT_MRT3847_89924C.1
aaacatactcaattatggtctaaatataacttaaactctccaactggttaattacaaacctcatattatatggacaaccttatgtacacagcaacctttgcagaagcagagtaaagtattaaaaaaagaggaaattatttattttctctctacatattttgaaaaaatggggttggaagcctatatgaggattatcatataaactatatggacatgacatgacccttaggcaaaggttgtgacttgtgaagaaagaaaaagaagaagaaggacaagaagaagaaggagcatggacatgacc

SEQ ID NO: 131690 - DNA, 1226 bp, Glycine max
  Clone ID: PAT_MRT3847_89925C.1
ccacgcgtccggacagattcttatgtcttccggttctactacattcacaaaaattgtcaataagtggaatacagctttaataggactcatgacttatttccgggaggcaactgtgcatacccaagagttgttggatttgctagtcaaatgtgaaaataaaattcagactcgtattaagattggactcaactcaaagatgcctagcaggtttccacctgtcattttctacacccctaaagaaattggagggcttggaatgttgtccatgggtcacattttgattccacaaagtgatctccgatacagtcagcagacagatgttggagtaacccacttcaggagtgggatgagtcatgaggaggaccaactgattcccaacctttatcgttatatacagccttgggagagcgagttcattgattcacagcgtgtctgggctgaatatgctttgaagaggcgggaagcacaggctcaaaacagacgttttacccttgaagatctggaagattcatgggatagagatgaaccacgtataaacactttgtgaccaaaggacagacacaccttggcttatgataaaggatggagggtgcggactgatttcaagcagtaccaagttctaaaacaaaatcccttctggtggacacatcagaggcatgatgggaaattgtggaacctgaacaattaccgtactgatgttattcaagcccttggaggagttgaaggaattcttgaacatactttattcaaaggaacatattttccaacctgggaaggtcttttctgggaaaaggcatctggttttgaggaatctatgaagtataagaagctcaccaatgctcagaggtctggtctaaaccagatacccaaccgaagatttacactatggtggtcgccaaccattaaccgagccaatgtttatgtgggtttccaagtgcagctagatctgactggtattttcatgcatggaaaaataccaactttgaagatatcccttattcagatattcagagctcacttgtggcagaagatccacgagagtgttgttatggatctctgtcaggttgtggatcaagagttggatgcttgggagattgaaactgtgcagaatgtaacaatccatccgaggagaagcttcaaaataacagttcttgtgcgcggtcttctgcctacttgctgtccctactggggcatggtcttgggctttctcttcaggccgatgttgc

SEQ ID NO: 131691 - DNA, 1135 bp, Glycine max
  Clone ID: PAT_MRT3847_89926C.1
gaagagctgatggaagtcggtcctgaaaggttaaaggaggcactggctgcgttggggctgaagactggtggtactgttcagcaacgtgcagagaggctcttcctcacaaagcacacacctcttgaaaagttggacaggaagcattttgctaagggtgcatgtggtgtagaaaagaatggggttgctgcagttccacaagaagatggaaattctaaagaaattgcattgatggaagccaaaatgacaaaactttgtcatttgttagaggagacaattgctcgaacaaaagacaatgttgtaaagaagcaagccctaacatatgaggaaatggaagcagaacgtgaggaggaagagacacaagaggactctgaaagcgaagatgaggagcagcagatatataatcccctaaaattaccaatgggatgggatgggaagcctataccttactggctgtataagctacatggtctgggtcaggaatttaagtgtgagatatgcgggaactacagttattgggggcgtcgggctttcgaacgacattttaaagaatggcgccatcaacatgggatgcggtgtcttggtataccaaatactaagaatttcaacgaaatcacatcaattgaggaagcaaaggaactttggaagaagatacagcaaagacaaggagtgaacaagtggcgcccagatcttgaggaagagtatgaagacaaagaaggcaacatctataataagaagacatacactgacttacagcgccagggactgatatgagaaaacacaattttgaatgttcctcttttcaagtagtctcttcccctggtgtgtgtgtgtgtgaagtggaagtagaagcagtttgctttctacagagttgatgggggaaatcgttgttatctataagcaaatattgtgcactaccagggagaagagcaggggataataggacaatgagcaatattttgtagcttatgttgtacttaatgatcgatactctaaccaggagaagaaacaaatattgccaatgatgttgcatagtattaaaaagattttgggtgtcagtggcctactaatgtctattttaattggagattgagtgagatcttggcattagtatatacatgtttggaatctgctttaa

SEQ ID NO: 131692 - DNA, 138 bp, Glycine max
  Clone ID: PAT_MRT3847_89927C.1
cacatgtttgttgttttcggtagtaatgatctggtacatagatacaagagatcgttattaattggaggccaaaatcctcttaatatacaaaatatgccattggcttgcacaatggaaaaaccattttaaggattaccc

SEQ ID NO: 131693 - DNA, 216 bp, Glycine max
  Clone ID: PAT_MRT3847_89928C.1
cttaaacgaatgaaagattcgggcataatggccaacttgtgtacatgataagtcctatttattaccatatacaatattacacaatgacaataacactgcaccaaatcatgcgctcatccttacggccactctctaaaggagctctggttatcttcacattcaacaccaaccaactattgacactctacaggtgaatgcagctcaactgatctcaac

SEQ ID NO: 131694 - DNA, 1068 bp, Glycine max
  Clone ID: PAT_MRT3847_89929C.1
agccaagtgaaatggaactttgaaaggaaacatcgagaacgacagatcgcagaagatgatagaggtgagcgtgtcacagatggataacatcttctgaagtcacaaccagtttagggagaggttatgtcttctttgacatcaaaaaaggatgttattccttatgaaaactcgatgctaacaaaactatttgcagattcacttggtgggagttcaaaaaccctgatgattgtaaatgtgtgtccaaattcttcaaatttatctgagacattactgtccctcaatttctctgccagagctcgaaattctgtattaagcctcggaaaccgagatacaattaagaagtggagagatgctgcaaatgatgcacgtaaggagttatatgagaaggaaaaagaaatccaatatctgaaacaagacggtctgagacttaagcaagcacttaaagatgcaaatgatcagtgtgttctactcttcaatgaagtacagaaggcatggaaagtttcttctgtattgcagaccgatttaaagtcggaacatgttttgctgtcagataaacacaagatagagaaagaacaaaataatcagcttagaaatcaagttgctcaacttttacggttagagcaagatcgaaaattgcagatacaagagcaagattcaaccatccaaagtttgcaggctaaaattagaactcttgaaactcaattcaatgaagctattaaatctagtgaatctaggtcaacatttgtctatgagacagagtctgctgatcaatccaattccggaccaactggtgatggcatagactcttctgcagtaaccaaaaaactagatgaggaactcaagaaacgtgatgcactgattgagaggttgcatgaagagaatgagaaattgtttgacagattaactcagaaagcatctacagctggatcacctaagttgtcaagtccattagctcgtggatcagctaatgttcagcctcgggatattggaaggaatggcaccaacaacaatacaagttctcgttctattgggggttctttctttacctttggccactgataaaatgat

SEQ ID NO: 131695 - DNA, 244 bp, Glycine max
  Clone ID: PAT_MRT3847_8992C.1
aggttattagtggaatgaattactatggttgtttatctatgttgtcccttgtaattctcacaccatttgcgattgctgtggagggaccacagatgtgggcagctggatggcaaacagcactctctcaaattggaccccaaattatatggtaattacaaattgtctactctatctgatgttatccatgctatgtttctgctattttgacatgaaattgtgataaattcataatattttttttccg

SEQ ID NO: 131696 - DNA, 583 bp, Glycine max
  Clone ID: PAT_MRT3847_89930C.1
aaagcatgaggacattcttcttttgcttggccttattgacgtgaaaatcctggcaagggttctgaggatgacgagaatgactagagagcacctgttttggtgtgaagaaaagatgaaaaaactggatttatcaaatagtaggttagaaagggatccatgtcccatcctcttcccttgctagggatcagtgttgtatatctgatagatagctgctaattatgtagcatcaactttagttctttgtccttgggggtcgataattgttgctaatacaactgctggttttgaagacgtcatcaaatgggcttctagtatcatcgccctacagctgtttagttttcttggggaagaattcgggctgctgtatgacaatgagaggacaagaatgtttttctgttatctaaaatgtattcttgttctgtcaaaattgtgagtttccaagttgctttgtgaaacctccaatataacattgttgtcgcgaattattcttgttggttcctagactcgatctaatgtttacatcaatgcatcttatttgtcttaaatgctttgatactaagataaataaactaagaatattatc

SEQ ID NO: 131697 - DNA, 280 bp, Glycine max
  Clone ID: PAT_MRT3847_89931C.1
gctcagtgctcctgtcaacatcctcaatcacgagcagaacgcccaatccatgaaattagggaagtgtgagaataagggtttgaaacaattggagttgaattctttaacctcaagtaatcagaataataatggtctggttgcaaagtttacaagtaatgcttctacagctaatgctcctgcagtagagtccaagcccagagagatggtgccaaagaacatgttcaaacatgccgatactaatggagttattagtggaaaagttgctaatggaaaagtcacg

SEQ ID NO: 131698 - DNA, 929 bp, Glycine max
  unsure (1)..(929): unsure at all n locations
  Clone ID: PAT_MRT3847_89932C.1
acatttcatcaaaacactgaggtatgatgtaaagattgttgaaagcattccagagaatcagaaaaatggcgaaaagaagaaaataaagccatttcagcnttcccctcctagagatgctcctataagttggtatactactgatgctctgaagaaaatgaaagcgtatggtgccatctatcttactcccttttcacatcgcttagctgaagaaattgacaatcctgagtaccaaaggttgaggtgtagagtcaactatcatgctttaagatttaagccacatatcgtgaagttaagtcaatcaatagttgaaaagctacgcgaacaaggtcccttcatgtccatacatcttcggtttgagatggacatgttgtcatttgctggatgcttcgatatatttacacctgggcagcaaaagattttgaagaagtaccgaaaagaaaattttgcacctaaaagacttgtctatgatgaaagaagggctattgggaaatgcccgttgactcctgaggaggttggtcttattttgcgtgcattgggttttgacaattctaccaggatatatcttgcagctggtgaattgtttggtggggatcgatttatgatgccatttcgaagtttgttccctcgacttgaaaatcattcttctgttgaaaactctgaagagcttgccgaaaacactaagggattggcaggttctgctgtggattacatggtctgtcttctttctgacattttcatgccaacttatgatggcccaagcaactttgccaacaatctccttggacatcgcctttattatggcttccggactactatcagacctgataggaaatctcttgcccctatcttcatcgatagggagaatgggcgaacggctggtttttaggaagctattangaaagtcatgctcaaaacaaacttttgagaac

SEQ ID NO: 131699 - DNA, 366 bp, Glycine max
  Clone ID: PAT_MRT3847_89933C.1
cggacgcgtccgcccacgcgtccggttcactgtaaaatattcttccttccctggtccagtcggaggttggcaaatgggtgttccccatggcatgggtatctcaatgcaatacaataatgtggtgcctgtgccaagttttccacagccatcaaagtcaaatataaaaaattaaaaaaaaaaaaacaaaaataaaaaaaaaaaaaaaaaaaaaaaaaaaaaatacaggacaaacgatctactggattagatgtatacatgacctgactgcaaatttaaagattgactattatataatcaaatctaactagactgtccgcatagtacaacggaaggactgtgaaaaccctggcgaatcgcaacttaatc

SEQ ID NO: 131700 - DNA, 212 bp, Glycine max
  Clone ID: PAT_MRT3847_89934C.1
caactatttataacgctcatgaggccatccaggagggccaagactttcttcggatcactatctggctctgcattggggactttggccctcaaaattgggggggaagacccatttggtttcacccacttatcacctttcttgaatctttttaaaggggaggtggtacctaaccccccatagatgagggctattcttttttaagggaggaggct

SEQ ID NO: 131701 - DNA, 378 bp, Glycine max
  Clone ID: PAT_MRT3847_89935C.1
aaaaaaaaaaaaaaaaaaaaaaaaaaaaaaaaaaaaaaaaaaaaaaaaaaaaaaacaaaaaaaaaagaacaagtataacaatcgcgagcaaggcatatcaaagctcttaaaatgggggcgctcgttataagggaccaaacttttcttcccggcgtagggatcggaaaaatttctttatggggccaccaaaataaaattgcagggcattctatttaaaccagtgggtgggaaaaaacccgggggtccccaaataaaactggttaaaagaaatctcccccttttataggagggcgaaatcacaaaaagggccccccacaaaaccccctcgcaaaaaggtggccacccctaaagggacaagaggcactcgccccttttacc

SEQ ID NO: 131702 - DNA, 490 bp, Glycine max
  Clone ID: PAT_MRT3847_89936C.1
aattcggctcgagcaaatcaaaagaaaaatacatatatgttcatcactgtctctcactctcttatgctccaacctccctttattatctttctttagcaccgtgctttctcttcaatcatattgctaaaaggaggagacttgagcacaaaacataagcatagaataaagagtgcaagggcaactgctctttcaagctgagaaacaaacaacacaacacgggcgttggttagtattatcaatcatcggctgttgcagactgctaacccttgctcatattgcggaatgtgcaagtactcatggtgggtatggtgagcaatgctgagtatagatatcaagatgtgatttttgcagctttgggcttaaacgagtgatcttagtgggactttgttgtgtttttctgccttgatggcttcaagaaaccaaactcttatatttatgatattgctcttgattggactggtaaaattgctcttgtagatatctttctcat

SEQ ID NO: 131703 - DNA, 113 bp, Glycine max
  unsure (1)..(113): unsure at all n locations
  Clone ID: PAT_MRT3847_89937C.1
ggaccggcccggaaaacctgggttgatccaccgcgcgcgtagaaccccaggcccacagagaaaacaacgggggagcttttaagagcagggcggcgnggacccccaggacacaa

SEQ ID NO: 131704 - DNA, 407 bp, Glycine max
  Clone ID: PAT_MRT3847_89938C.1
aagttcaaaaaattgctgtgcttgtaattaaggctcagtaaaatgtcaatcaataatgttcaagggctataatcattacaacacatacctaggggtttgagggagatattttcaaatggcaatttagtaaccaagtagggttttatatccctggctgagttgctcattaaactattttcaaactttgtagattacaaattatgggcatcaaattaaatcatgtcctctaattggatttgggccagaacacttcgtcaagctttagtggagaaaaaacgagtaacatgttcatccactagtcattcattctatatactgaatctccctgcaatcagtcgaactgctattgtgccaatctagccatagcacccatattaagcaaagtcagtcaaccttgcccgaaattt

SEQ ID NO: 131705 - DNA, 506 bp, Glycine max
  Clone ID: PAT_MRT3847_89939C.1
aacttaaaaaaccttttttattaaacagggaaaaaaatttgggggaaaattaaaaatttttcccttaaaaaaaaactggggcccccggcaaacattttaaaaggcccgaggggggaaccccgaaaaaccttttttgtttttcaaggggaagaggaacccccccaacccccggggggggttttaaaacaagaacaaattgggggggctgggaaatgttaggcggggatggaaaccttggggggaacaaatttttccccccacaacccccccttttgttttgggaagggggggcccccaaaggggccggaaaaaaaaggcctttaaacctggaaaagttgatgcaaaaaccctttggatttggggcaaaaaaaaatttaaaacccctgggaaagaaaaaaaagggaacggggggtttcctttctaaaaaaaaaaaagggccttggtcaatatttaaaaaaaaaggggtaggggaccacgggtccccctggggggatgggccatttggg

SEQ ID NO: 131706 - DNA, 418 bp, Glycine max
  Clone ID: PAT_MRT3847_8993C.1
ttttctcgcccgaagacgacagacggggctgatgggtgatttcagcgtgggaaacagtaacctacttgtcaggtttattccaagtccagttgaagatctctgcctcaccactggtgccgattctaagaccaaaacgcccacagcgggcggcaagagattgaaattgaccattcgtgatactgctgggcatgacaggataaggactttaaacacctcttactttagaaatacacaaggaaccattctcttttctgatgtcacaaggagagaaacctctacatacttaccaaaagtgtggtctaaggtagcggaactcttctcatctcattatgactgtgtaaagacactaactgggacaacagttgatagtcaccctgaacagggccctgagcacgaaagagggtttagcacttactaa

SEQ ID NO: 131707 - DNA, 318 bp, Glycine max
  Clone ID: PAT_MRT3847_89940C.1
ctcacgcgtacgcagaaagcaagctcatactaaaggttcaaaaatggccggggcctcctgagggctctctcttacccatccttggctggcaaggccgcgaagctgggcccatcagcccccgaaatcgctagggtcagtatgaggaagacccgtaccaagcacgccttctccggaagcccatggtactgcccagaccccgtcaagtacttgtgcccactttgtggcgagcccccgtactacctcactggccagtgcccacgtgactacggctgggacacctgtgggctttacgccgacccagaaaccttagccagaaac

SEQ ID NO: 131708 - DNA, 247 bp, Glycine max
  unsure (1)..(247): unsure at all n locations
  Clone ID: PAT_MRT3847_89941C.1
cagctcgagggaaacgccaagcctacctggactgccttgcatcggtccgaggtgtgctggagcacctgaaagatcaagatagagagtatctaggtatcaaagncaaggagttacatgaaggaaaggggatagtagacacatacacatacatgacgcatgttaggaacatgagtcgaactcctaatagcattacgtcgatacagacccttagccctcatatgaaacagcacatggtaagaggccctta

SEQ ID NO: 131709 - DNA, 402 bp, Glycine max
  Clone ID: PAT_MRT3847_89942C.1
aactgattgaagtgataacagcatcatgtctttcagaaaatggggctcatgtgaatagtaaatcaatagatcgtggcctagttaagtatcagagtgggacaaagccagagatactatcaaacatatgtgacttgctatgcttttgtatcttacaccacccatacaggataaagtgcaactttcttcctaataaagtaattgataaaattttgttactgacacggagaagagagaaatacctcgttgttggcgctgttcgatttgttcgtactattctatcacgtcatgatgagcatctggtagatcattttgttagaagtgacctttttaaaccaatagtagacgcctttgttgctaatggtaatcgctacaatctgctccattctgttgttcttggacttt

SEQ ID NO: 131710 - DNA, 256 bp, Glycine max
  Clone ID: PAT_MRT3847_89943C.1
cagtatgtagcacattcagatgatgggagctgctgttcaggtttctattgaacttgtcatctacatacatattttgagtcatagatccatgctttaatagcatgtcattggtttgaaaatcaaaaaaaaaaaaaaaaaaaaaaaaaaaaaaaaaaaaaaaaaaaaaaaaaaaaaaaaaaaacaaaaaaaaaaaaaaaacaaaaaagcaaaaaaaaaaaaaaaaaaaaaaaaaaaaaaaaaaaaaggggggggcccc

SEQ ID NO: 131711 - DNA, 909 bp, Glycine max
  Clone ID: PAT_MRT3847_89944C.1
tcactaccatgattgcaaccttattttaaggaataataatgggtgccgcaaacacaatactttaagaaagttatgcagtatcagacatgatgttaaacaaactttgcctgtgaaatgatgactgatcctgtgctggcagggctcggtgcctccttgtttgtgttctctagttgttggcgactccttctatgtgctctctttcggcagcgcctgttctgcacctttgcttccctcgcccttgtagagttatcgccacctcctttttgcaatatatgtttttggagttggggtcccattgttcaatcacaatgttagaagtactcatacgatcaagtggagtttgtggataatacataaattattgcttgctgcagcatatggcttcattttatttgcaaatttctccaaatggagagagaagctgcctccaaggccatctttccacaactatgttgctgtaatgtttgtcttcagtgtgattaccctgtttgcttgtggactagcagcaattgacgctggacttggcaattggttgtatgatctcactgtgctttgttatcactctttgtatcttccatttctttacgtaacttttcttgcagattttttccaggaggaggatttccttttggacaacgcatattactccgagatgaaagatgccggattctttgatgctgactgggaataattcctcaaaaaattatacatggaactgaccggctttttgtgtctgtgcactgtaaatattagactttctaactaaatcaagttgaactctgctccgtcaacatctcaatgatatgttggatttgtatgaccctagctgcatgtgaaatgcagctataggaatagtgcttttgaaattgatcatatttttattaaccaaggacatacttactaaccaag

SEQ ID NO: 131712 - DNA, 473 bp, Glycine max
  Clone ID: PAT_MRT3847_89945C.1
aaaaccaaaaacggttaaaaaaacttggttaaaaaaaaaaggcaattaaaaacccccctcagcagaaagggaaagggcctaaacccctttggggggtggggaaattcaaaaaatctaaaactttttttaccataaaaaaaaaaaacggtcctcataaaaaacaaacaggaaggaaaatggccccccgccgaaaaaaaacctattttggaaaggtccggctccaggaaacggggaaaaccttaaaaatataccttaaacaaaacccctaaaacttggggggggtaaacctcctataagggggcacccccgggggggaccccgggggctaaaaaaatggcccaaaggcaatctttttttttgggaaggggccttggggaccttggctccgggggggttttttttctcaccctttggaggaccccgacagccacagttggacgcatgcccctcaagaaaaacgccgggggggggat

SEQ ID NO: 131713 - DNA, 367 bp, Glycine max
  Clone ID: PAT_MRT3847_89946C.1
cattgaaaagcatccaattttaaaaaaacataggggaaataaacgataagatctgggaaccaaccacttgacttatggttcctctatataaaccgaacgcataaaagcattagacagtgttatcaatctgacgcaaccggtgtgtgtgagcttacgaggtaaattgttataaagaatatttattctcgcaaacacaggagctccaatctcggttgccacaatccataagatgatagtactttatcgccacatggttgtaaaaacctgcttactttaggcggtggaatcatatatcccgtgagggcttatatgggagtataggagaaaattgttttgactgagcaaactatggaggatgatgacacct

SEQ ID NO: 131714 - DNA, 501 bp, Glycine max
  Clone ID: PAT_MRT3847_89947C.1
ggctctggacctttgggctgatttatgtgcttgtttatgtgcttgcatggtcgtgagaagatgctagaagggcatggtttgggcaagtttatgtgcttgcatggtcgtgagaagatgatagaaggggacttacaattacggtgctcaatctcgtccttgtctcccatccttccccacgttcactgtttactatcccgtcttccctcgtgtcctgcgcctaagtctaactctacgtcttagtctttatccctaagcatcgcgaaaagaacgtagatcacgtcgcgaaggcgagcggagcggaaacaccgttcgattttgcggagagaggagcgttacctattcccaagactttagtccacatcttcgaattaacctaaagtggcgatccgccacacgaaaccctccacgtcggaacagaagtataattcgtcataccctcttacgactctcgcgaggaagtattacgtttagcattcgtaggtaatcccgcgtctgcctata

SEQ ID NO: 131715 - DNA, 2632 bp, Glycine max
  Clone ID: PAT_MRT3847_89948C.1
tttagttaggtttaagtctgacgagaataatattctacaactagtaattcatttattttcaaacccaacccatttattatctattatttgattgattaatccttatatttggaatgggtgaagagtcaaatgatttggcaatttctcacggggggctgaatcaagataattttgaatcagagttttcgatttttgttcatccttcgctgtacggctgcgagaagacgacagaagggaacttggtatatccactatatgaccattaactaaaacatgtctatggttaattaattggcgtgcttgaggaatagtcgcagccatacccaaccgaaaaagtatgttatccaagcgcatttcaagtagttgtaataaaacctgaccagttgatcctttagcttttccggcgatacgaacgtatttaagcaattgtcgttctgtaagaccataatgaaaacgcaatttttgtttttcttctaaacgaatacgatattgagattttttactggagcgcgattgatttctaagttcgcttttgactgttggccttttactagttagtcctggtaaagaccccagacgacgtatttttttgaaacgaggtcctctgtaacgtgacataaagactccttttttaatggaaaatcttataaatcaaaattaaaactaaactaaatgaaaaatattctattataaatgaagcaaaatctactaaagtattatactacaaagaagaattagacgaattctatcaatatccgaactttattctattgtatagaaaaaaaaagaaaagaagtaggttcttttcttgatttgttccacaacgatcgaattctcccaatttttttatttataaaaaagatattctcaattatgtaaaaaattgaaaacaaattgagaaaagccggctatcggattcgaaccgatgaccatcgcattacaaatgcgatgctctaacctctgagctaagcgggctaacataaccaaaatatgcgtatgcataggaatttaataaaagggatcttaattataaattgttagttatttataacataattcaaattaatacaaacatagaaaatatagaatatccaatccaatatttcttatttatattatttttttgatattttagtgcataacataaagtacaaaatagggattaataattcatattaatataataaatttcgatcgatttatcaaatagatatctatttgattatttcaaaaatattattattgtaaattttagtaaagtaactaataataataattaggaatttcatatttctaaattaatgtctaattctacattaaaagaatggttacttatagccattcgattcgttttagttctatcaattctatatgaataaatggattgtttatttcaacaaaaacaaaaaaatgaaaattttcatttttttgttttgttatagatagtctgtatctgtttgctttaaggaaaaaagaaaaaaatgaaagaaagagaaaagcccaacctagatcataataaaagactcccaagttttcagtcggaaagagaagataaaaaactaagatgaaaaaaaaaaaagaatcgaccattcgagtattcaaaatttaatgaaaaaataatagaagtaggggcatagaatcgaaatagatatgtggtatatatctgtgtatattgaattgtgaatagatagataatagaatcatttctaattcaagcaaataatggtatcgagtatagatgaaagagggggatatggcgaaattggtagacgctacggacttaattggattgagtcttggtatggaaacttaccaagtgagaactttcaaattcagagaaaccctggaattcacaaagggcaatcctgagccaaatcctgttttccgaaaacaaagaaaagttcataaagtgataataaaaaagggataggtgcagagactcaatggaagctgttctaacaaaaggagttgacgatttttcctttttgcattaggaaaataatagaatccttccgtcaaaattccaggaatggatcaaagataaacatatatatactgaaatagtatttcaattgattaatgaagatccatttgtgataaaaatattcacaaatgaaagatgtgaatcaaatcaattccaagttgaagaaaagatggaatattcattgatcaaattattcactccatcataatctgatagatcccttgaagaactgatccatcagacgagaataaagatagagtcctattctacatgtcaataccgacaacaatgaaatttatagtaagaggaaaatccgtcgacttaagaaatcgtgagggttcaagtccctctatccccaaaaggcctgtttaactttctaattttttcccataccctccctctctatctttaagtcgttacttatgtgctttattcagtttatattcagtttattctttcacaactaaattggaatttgtctttttattttcaaaaatttcttatcataattacaagtcacaagttttgaaatatatatgtgaaacacatagaattttttttatgataaacgtacaaatgaatattttatttttgagcacgtaaaagtaaaaaaaagaaagagaaatataaagaggaaaatatcataat

SEQ ID NO: 131716 - DNA, 268 bp, Glycine max
  Clone ID: PAT_MRT3847_89949C.1
ttacaaccatattctggcattttaaggatctcgtgtatcatagggggcaactcacacattatcattattactacttaacatcattcatatcaattgtaacaattatatttttaaaaacatatctatttttattctttaatcttatggcgacttaatcatttttctgtcccataataacaacatattccatttactttcatacctttattaatcaatagtgtttttaccacctcttttttctctccattttctcttctttttgaaattt

SEQ ID NO: 131717 - DNA, 942 bp, Glycine max
  unsure (1)..(942): unsure at all n locations
  Clone ID: PAT_MRT3847_8994C.1
ccacgcgtccgcgtgcgccgaagctgaaatcggcgaaaaccgaactttgatttctctcataaacacaatccattctattgctattgcttgctgccgacacataacatcacaaaatgtcgtttccaacaaggttaaggttttccgtctctctttccactctcaagtttccctcttttcttccaaacccctcactcccaaaactccattctcactttcactctcgacccccctcctttgaaaatgttgatgatgctcttttccaattccatcgcatgctgtgtatgcgtcatacccctcccatcatccaatttaacaagattttagattcctttgcgaagatgaagcactatcccactgccgtttccctctctcaccgattggaactcaagggaattgttccagacttctttactttgaacatcctcattaactgtttctgtcgtatgggtcaaatcaacttcggcttctctgtactatggcctaagatcctcaaatggagttacgagccagacaccataaccttgaacacactcatcaaaggtttctgtcttaagggacgcgtcaagaaagcactgttgataaacaaggattcttagttatggtattttgatcaatgggatatgcaagacaggagacacaagagctctcgtccagttgctgggaaagattgatgactctaatgcggacttgcttgatgaagcattggccatgctgtcaaaaatggaaggcaacggttgcatccctaatgcttttacttttgaaatactcatttgtgctctctttgaaaaagatggaaatgataaggcagagaaacttcttcgtgaaatgattgctagaggcttgttgtaagactanattaggtgagttgctttctagtttgacattaagttatttcttacgactgtattgtccatctggttcatctgctttttatgagtttta

SEQ ID NO: 131718 - DNA, 157 bp, Glycine max
  Clone ID: PAT_MRT3847_89950C.1
gttgggaacttaagatattcttgctgcataatacatgacatcattgattatgcataacatacagttcttgtatttctgtcccctatactgtaaatctgtaatctagatatgattttcattcaatttgaagaatttgaagttgttaagttgggatttc

SEQ ID NO: 131719 - DNA, 568 bp, Glycine max
  Clone ID: PAT_MRT3847_89951C.1
gttttctgcattcataatcaattacaaggaaacgagggttgaaaaaatcaaactgatttggataaaaagaagaagaaaaaattgaaccaatccctttatgaaaatggtgcatatgttaacggaatcatttttaaagaggtttgattttgtttggttctttagaaaaacctatcaatatatgaataataaatagataattaaattgaatcaaatccaaactatttgaaaatgaattagttcggaattaaaaaaaaaacaacttttgtaccatcttaaaaattatagtcaattatcattggagtgatgatatttaaatatctctatattttaaacatctctcatcttttttatctgttctttctatcacataatatgacttttcatatttatattttttttaagtgtcaagaaacatttggtcatatttaaatattttttccttgtcatccttgtttgttgaaacgtaattaaaatcaattacagaataaaataatatttttaattataaactcattctccggtctcttttcatccaagtcaaacattatagtattatatctttttaatt

SEQ ID NO: 131720 - DNA, 468 bp, Glycine max
  Clone ID: PAT_MRT3847_89952C.1
ctcgagccggcatcatgtatagtaacaggtggagaatcctggcatgtgcatcaacctggaaaatctgacatatgcaccagaatgtcccttacgcaccaccaccttcatcatcttcttattcttcttcatcgccatcatgacagagccgctgggctaattggccacccctagtggctattaaacataatccagagtgctggaatcctgcgaaacttcttggtctgcacgtatagcacttgtggcatgtgcctcagtttgtaagttgtggagagagataacaaaggatgtggtcaagacaccataacagtgtggttctatcactttccccatatcactacagcagcctgttccaagagactctccaatccagtgttttattaggagagatagaatgacttcaacatattgtttatatctcggtctgagccctgctctttctggtgatatgagcaaacttttactggcagc

SEQ ID NO: 131721 - DNA, 514 bp, Glycine max
  Clone ID: PAT_MRT3847_89953C.1
aaaatggatttgtatgtttcttttttaaactctgtaatactcataaaaaagcttaattttgttcaggagggggaaacaaaaaaaaaaaaaagggaggagaaaatcggtggggtaaacgggaaaaagaaaaaaaaaatttatagggaaggggggggagaaaaccggccccaaaaaagtttataaaaagacggccatttaaaaggggggccaacaggaaaaagttttgggggaaaggaaaaacccccccccacctggattttggagggggggggaccaaaaaggggcggggaaaaaaaaggcaggggcccaaaaagggggcggtgaggggccaaaaacggggggggggccccacaggaaaacccaggggcccccccgggaatgtaaagcgcccccagggccccgcaaagagcggccacccggggcaaaaaaaaaaccccccgggcccaagccgtgggagggccccgaaaaacccacaccgggcgccaagggggagacgcccccccccccaaggaaa

SEQ ID NO: 131722 - DNA, 252 bp, Glycine max
  Clone ID: PAT_MRT3847_89954C.1
agattccggtccgaggcgatctgtcattagggtacagttgacaacatacacaatatgtgtgcctatagggtcaatcctggtattgcaggtactcggtcgcttgggcagcatcctcaatccgattcgacaggaactgtttagaattaaatggcaacagtgacgaaaccattgagattttgattctagcaagcagagcttttgtcaattttctattgaccttctcggtggaggaattttagtggacaacctgga

SEQ ID NO: 131723 - DNA, 680 bp, Glycine max
  Clone ID: PAT_MRT3847_89955C.1
tcttttttttttttttttttactgctgctgggttaaataagttggatcattatatttaaaaataataattaggcctttgaaatttatagtctacacatatttgaaattataagccataactctctaaggtcatctaatagtataagttggatcattatatttagtaataagtgattgataattgaataacattataaaatgattttaacataattttttttattatcatttaattacaaatcattacatatatcatttttctttttagtaattgagtcgaaggtgataacttttgaattcactgttaccttgaaatatacaaaagtaaataaacaatcaattttcgttttattttttttttatctattcgaatttaaattttaatgtagtaaattcttacgagcaagagcgtgatcggaataaggcaaaacataactattttttttcctggcgattggtgaataagaaaaaagtagacttcattatcaaaacgtaaaataacttgacttttttataaattaaaattaacttatgcacctgaatttttcgacaaactaaatttttattaaggtcaaaatacttaagttcttaatttataaaaaaagggtatttatggtatcttatttattgtcgcctacgagtctgagaagtttatgtaaataaccactgggcttttattt

SEQ ID NO: 131724 - DNA, 490 bp, Glycine max
  Clone ID: PAT_MRT3847_89956C.1
ggaacccatacaatttaggattataaattttccatcttggggcttcctcaaaaaaacgatttcaccaaccgcagtacaaagtaaagacttctcatgtatccttaattaacacaatactaagatgtttaggtacaccgcacaccagatgtaacaattaagacaatgttgaatgcttttatacgaatgggggcactaacttaatttagagaaatcaattgaccaaaccacatgacaaatactaggtttgaccaataaaagccaagcaaatcaatatcatatcacctaattgtttgatcagtaacccaatccatctcctacaaaaatcgaccatgttaaggtcgacttcaagcaagcagtaaagtactcacaaaacactgaagcaaaacaaattatttcgttccatttaaaataatccacataaatcatccattaaactttaaattccctgccattaagctatctaaaaagctcaccaacagaaaacctgaac

SEQ ID NO: 131725 - DNA, 356 bp, Glycine max
  Clone ID: PAT_MRT3847_89957C.1
gccttcagatttagctacctctttatttttattattattatcattcattagtcatttctcgtaccaaacacaacacactcttctcctctcttatcccattacaatgcctgggagtttagaaccggtagatttgggtgttcacataccctaccacttccgatgccctatctcgctcgaactcatgcgagacccagtcactgtctgcaccggtcaaacctacgaccgcgccagcatcgaggcatgggtcagcaccggcaacaccacatgtacggtcacacgcgccactctgaccgacttcaccctaatcccgaaccacacccttcgccggcttatccaagagtggtgcgttgctaacc

SEQ ID NO: 131726 - DNA, 1346 bp, Glycine max
  unsure (1)..(1346): unsure at all n locations
  Clone ID: PAT_MRT3847_89958C.1
tcggctgtgcgccagcggtgggggccagggtggggatggtggctcagactcatcagagagtatgagttctgctaacccagaagaagccaaatctactccatccagaaataggaggcattcagtttcctgaaaagtagtctggttcgttgtgtcggctgttcggtctttggttctgctcgttctgtgtactgggctccccctggcgggggcccctctctgggcgtggttgatccttgccccagatggggctacaatctatgatgttagtatagtacagaacattgttagagagttttttatgaagaatggcaatgctgagattgagtcagttgggggtgatgaacttgaggggataagaaaaccagggattttatcagatgcttccaagctgatggttgcaaagctcatagatgagtaccttgctgaaatagcaaaagatcccaatttacctttgccagagtttgttaatcttgctgagttagtgtctagcatctctcgtccagctcatgatggcctttatagggctattgatacatatcttaaggagcaccctgcgatcaacaaaggcgaaaagaagaggatatgcaagctgatggattgtagaaagctatcagttgacgcgtgcttgcatgcagtgcaaaacgagagactaccattgcgtgtagtcgtgcaggtactatactttgagcagttaaggactgctgcatcatcaggtaccagcactcctgacatacctagaggaatcaaagacttgaacaatgaatccaatggaagctcaaggtcagggacaactaacccagaagacgagttggatgctgtggccacagctgaggagctgaaggcattaagaaaggaacttgcatcattgaggctgagcaatggagttggaaacaatgacaaagatggagacaacaaacccagcatggacaaagctgtcatgagcaaggtgaaagggttgctcaagtcaaagaagtctttcattaagatttgggccagtaaagggggacaaggtgaaaatagtggctcagactcatcagagagtatgagttctgctaacccagaagaagccaaatctactccatccagaaataggaggcattcagtttcttgaaagtagtagtttggttcattttgttggcttttctattattgtttcttttctttctttctttttactagtttcaccaagacaagattccccaacactagtggtttatcttttctaaattgagtagagtacatatagtttaaaatagtagaattgtgaagaatggaaatcatgtaatccaaacatctattctatcgaatagtagttcaaaccgccctttgcactccccnnnnnnaaa

SEQ ID NO: 131727 - DNA, 382 bp, Glycine max
  Clone ID: PAT_MRT3847_89959C.1
ggaaatgtgttaaccatccttccatattggaaatattaccatgtgtccattaataataaccaaatcaaatcaattgggttcatgtttcttcaggctgattcttttaaaaaacattaacaattagcatattctcttccttctgtgcaagttgtctgcgtgatggaattaacaatatagaaactaaagcatcattaccatgattagagtgttttccagaagctcctttctatttgaaaataaccaaactagatatttaattgttcgatatgctcaaaatacaaagacattctctatcttctgccagtagtagtcacgaagtatggcactgtaaattcatttcttgtgaattaggatgacttatccataccaatatgagctgtac

SEQ ID NO: 131728 - DNA, 505 bp, Glycine max
  Clone ID: PAT_MRT3847_8995C.1
gttcaaaaagattcttaagttactcttaggacaaaacttttagatcattagccatccaaccaaagatcaatcggtctccgattcactcaggaatgaacccacaacggatggaaaaccctacacctgatatgattccagcgatattcattaatcacgttttgtttttttatatattaaatattgcccctctaatatgcaaggctgtgaagctgctatggactgtgggtgaagaaaacatcctgatggataagcccaggaatcccacctccgataagagtggccactcctaaacatacacagcattggccagttcccggtcactagctcaggccctatctttatagaagggttcatggttactccggaaaaagccccacccatccaaaggttatggccctcattgacacccatggccatgggagcaatactctcctaactggcctgtgttggggacaacggaaggggcctaaactgtgtacaccaaaccgatgggtgaggggatctc

SEQ ID NO: 131729 - DNA, 239 bp, Glycine max
  Clone ID: PAT_MRT3847_89960C.1
acatgcttgcatgcctgcacgcgtactctagatgataaccctgctcgagtgcaattgcttacctttgaggagtgacgaaggagacaggggaagagatgcctggtactgatgagaaatcatatgaggcctctgatgaagtccaaggagaagcagatcagcctacctaggctactgccactgacacattatcagcacctgcagcggccacagtggacgtgtacgaaccagcagtaacagtg

SEQ ID NO: 131730 - DNA, 247 bp, Glycine max
  Clone ID: PAT_MRT3847_89961C.1
gccagggtcggggccataatctgcgtcagcaaactctatcacgagattttgactcgcttggtgttaagtgatttctatggacaccatgcatctaactcagacatgttcttgccccctggggggatacattcaagaagcataattatagaggagtgaatagccaatggaaaggcacaagcaatggtgaaggacactgcatattatgacatagtaggtgacaattttgaagcagatgctgcagagaaca

SEQ ID NO: 131731 - DNA, 329 bp, Glycine max
  unsure (1)..(329): unsure at all n locations
  Clone ID: PAT_MRT3847_89962C.1
gcacatttaatccacatgtcatgtgacaggatttttactcataccgcggtaaccaatcatgctaaggatcaaatggcttttttttcagcggaggaattcataggagatggtgttttgaaggagctgctccaaatgttgtgggaagaagggtgggatgatgtaccaaccttggggattatgagttnagatgtcgtgggtttactactgatgacacaggtgctgatggttgtgcttggtattagatcattgtttgttgattgtggatttttgcggtttgttatagtagtggtgattgtgggaaagctttgttggtgcttattantttaatg

SEQ ID NO: 131732 - DNA, 401 bp, Glycine max
  Clone ID: PAT_MRT3847_89963C.1
gccagtcgtgcgctataagctactttatcgtgaggagaatatgaagactcttgccgtctgcgttgctaaaaaagatccggtggcatatacatgccatgtcgcatagctacacaaacgttccactcttagaatgaagactgtctatcgtgagcgttcttactacgtataaagcgcaacctgtatgctcgatgcataagcacacatcaatcctagcctgaaaaaccattcctgaacagagcgactgaccaacaaaagactacatttgtggcgaacattgtagatcaaactctataacacctaaacatcacgctttcttttatgctagcgaacgcgcacaccatcacgacgacactattatattcaacatatattacaccgcactctctaatatgccatactat

SEQ ID NO: 131733 - DNA, 727 bp, Glycine max
  unsure (1)..(727): unsure at all n locations
  Clone ID: PAT_MRT3847_89964C.1
tcgagcgcctcgtagtcttagtgttacctaatgacatagctcaagtcacgagctttagcatatcaaaccatcagagctagacactgggatagaaacgcgtgtaatggaattgaaaagacagctataaactcaacacacctaaataaccctgacattgagncccatatatactgcctctacactccaggcaaatcgcatgacacaagtacattcagccaacaacttgtacctaaagacgcaagagtgtaccatgcacaagatcatgtggtaggtgtggcatatgtcatcccttatgaaaaacatgaaacagacgcactacgacaacaacattgatgcagcaacgtagaatgactagtctcaacaccaaatcatatattaagcaaaaaaaatggatccaatgtacttactattaaataaactatttgctgttatggtcctgataaataacagcctaatcgagacgtcgattgttataggaacgctcatgcgactcatcacataacaataacagattacacatcatgtgcaacaccaaatgcaatatgaattattagtgggcccaaaacatcttatgcttcaccggctgtctacacggcattctacgaatatattaataacattttggagactcattaaaaaagaaattgatattagcctaccatatctattgagctcttggacaagtcctttaatccatgacctacaccacgcgactgaccagctcaca

SEQ ID NO: 131734 - DNA, 238 bp, Glycine max
  Clone ID: PAT_MRT3847_89965C.1
acaaaacatgctcaattggatttgtgtgttaaagaattcgcgtgtcaatttactactcctcacttagagaagactacagaattcgactgccaaaactgcaacaaccgcagcctagtaaaatacatcatttttcctgtgcagggaacaagaaatccgcgtttgagttcttacattactatctcttgacaatgtttcggttccactcgagcattttttaagggcaccgtacacgcttgaa

SEQ ID NO: 131735 - DNA, 129 bp, Glycine max
  Clone ID: PAT_MRT3847_89966C.1
gccacgttttatttttttaacagaacaacgtcttttcatgggatttgttgataataagtgtaactgtaaccctttttagtacgatcattcaaaaatgtcaactgccgacatggaaccaaccgctcatat

SEQ ID NO: 131736 - DNA, 286 bp, Glycine max
  Clone ID: PAT_MRT3847_89967C.1
ctccatcttccttgctctctttctcttttgtgcctccaccacctaatacctaccttgtcactcccttattttcagctcgatactgagaagcacccctgttgatatcggatgcacatattatatcttgtcagacataacaccattctttgtaataagagcaaacccaccggtaaatgatatatgccctctcactgtggtgcaatctcgcattgagctcgactaacggattgaaacaatcatctaggccccatttcgaatccgatttatcgtcaaacgcaatcctttg

SEQ ID NO: 131737 - DNA, 323 bp, Glycine max
  Clone ID: PAT_MRT3847_89968C.1
attcttatcatgctttactttgacgtttatggaaaacaaagcgaactcgaatccagcaagcgaacaaacgagtgattacaccgggggcatatcctgcgggagaagacgattttcagaacaacgggcaatatcctgtgggacacactaagctggcatacgaggattaccagcaaggtcaaacacttgagaaattcccaagagattatcaaaaactgaaaactgtttgggatcggcaatacagaaactcatcagccgtggagtgagatttggccactagaactcccctgctgggaccattaatgcgaccacataccccgattggg

SEQ ID NO: 131738 - DNA, 177 bp, Glycine max
  Clone ID: PAT_MRT3847_89969C.1
ttgcccaaaaatggccaagttaactacggcatggagtgatgatgactggggtgcataatgactaacggagtttcttgtaaaatggtccacaagttgtaaaatgcaagtgagatacgcttccggcaactgctaattttcattatacaatgggtttgactcttcttctgctttcaaaaa

SEQ ID NO: 131739 - DNA, 409 bp, Glycine max
  Clone ID: PAT_MRT3847_8996C.1
catgcatctagactccccattaacccacaaaatgaccaaaatatccgtttttaaactatttcttgttgcatttcgacattgtcactatagtctcgtctcactctataacttgcacgtaccttgattaattaagaaatatggttcccaaagtttatgctggtcaggaaatggcagtggttgagaatgagaattgcatgatgaatgggaagtggaagaaacgtgtgcatgtttttggtgagagggtgatgagatttcctaacaaggcttggcagactacgtggaaagtgggacgtgaagacccaagaaggttgatccatgcattcaaagtgggtttgtctctaactcttgtttctttgttgtatttgttggagcccctttacaaggggattggacagagtgctatttgggc

SEQ ID NO: 131740 - DNA, 281 bp, Glycine max
  unsure (1)..(281): unsure at all n locations
  Clone ID: PAT_MRT3847_89970C.1
tggaaacggtggtctctcggcgctgtcctcgttctctgcactcngcacccaaccacaacngaccctttcactaaacctaacaaantcctccgttcntccntcagcngcggnnccgcttcnttatccgcnaccagcaaatgggcggaggcctcattgcngatttcnaattcctcgnngacgngcngnctccacttnnacntccactntnagntaatnctaccgtccctnnncgcntcgatnctcctgagcgctacgtgtcgatncntctcgacctgtaccgc

SEQ ID NO: 131741 - DNA, 275 bp, Glycine max
  Clone ID: PAT_MRT3847_89971C.1
gactgcgacgaaggaacatcgctatgatcatggctatgacagcatcagcagcagtgcaagttcttaaactgctgcatcacctatctattcagaatgtttatcggaccacaataccgacggctgtgcctcaatttctctccctcatctcactctctctctctctctctctttttcctttctccataacttgttatacattaattagtgaaaattacacaagtgagatggtatgcgtctttctggttgcgagtcctagtgctaatagtctgttgtta

SEQ ID NO: 131742 - DNA, 1847 bp, Glycine max
  Clone ID: PAT_MRT3847_89972C.1
cccacgcgagggcccacgcggacgcttcacaccactgcttccctttcttccttcacttttcttcctcataacttgcattttctccaaaaaccaaagaaagaaagaaacacacacacacacacctctctctctctctcactcacacatggcagctttttcataccaataccatccttttcttgttgaccctgcattcttccccaacaacttaaacaccccttcccctcctcctcatcagtttcaacaactccctcatgaaacatcatcttttaatgtcacaaaccaggagactagctgtgttgatcagagctccaagatcaccatcagtgacaatgagccttctgtcactgaaaaccttagccctcagtcctccatggtagtggacaagcttgaaactggggagcaggtcactcagaaggtgaacactcctgtggagaagaaaaggaaaaccaaaaatggatcttccttgactagtaacccccaatccaaggatgctggtacagctaggaaaaacacgacacgcaataagggcaatggtgggttgaaagatcaagcaccggatagacgaagagaagctgaaacggtgagagtagagaagataagtgaaaggatgctagtgttatgtcggcttgtgccagggtcaggcaacggatagcgaaagccttgctgaaagggtgagaagagagaagataagtgaaaggatgaaaggtgttgcaacggcttgtggaagcctgcttcagtgaatcccatgttttatgacttggcaacggatctagacaccctcttggttagtccagagaaactaaataacatggcatcaccatcaccactaccatcaatgtcacattgcaacagccccaacaaccaagccacaactctcttctgatacaaccaccatgacccccacatggcatttccacactactagtgactatctgttggacattgcaacagccctaacaaccaagccactacttttgctgatacaaccaccatgacccccaccaacatcttccacattgctagtgactatcttttggataattcagtctcattttttcttcaagggcagaggtcaaatgtgttctctgaggaggatactggtagtcatttctgggacgcagaggaccagcggcaaaagtttcttcatccatgtggattcagcaacaacttatgttcctttcattaatataaaattcatagagctgccctacaaaactacgaacatgttgatttagcttttacactagctaggtaaggaaattccaaagaggcatgagaatgagccaacaagaagttaggcattaggaggaaaaaccaaagctacgcttggtatcggtatataagtacatcatcattccagggtaattcgtagcgtaaagagtctggcttggttcctagtccatcagattaaagtggcctttgaagatgaataattaaggggcaccaaaattaatggatgaagaaccaaaaggacagaaaataccgaccaaataagaccatatctttttctagatccattgttctgtttcagtgattgttgactctccaaggacttatgatgcacaaattccgagagactatcaatcctatatacagagcagacattgaaattaatttctgttccatgtaaattatatccaagtattgattcttgtggtggcagttattctgttggtacagttaatttcaccattattgagaaatgaggggttgatgcaactgatcatgttcttgacatgactggccatgcatttgtttgttggtctagttagcttttatgtatatgtgtcttcagaatcttcagagttttggcatcattatgattattgttgttattattattt

SEQ ID NO: 131743 - DNA, 731 bp, Glycine max
  Clone ID: PAT_MRT3847_89973C.1
cccacgcgtccgcaccatcagtgacaatgagccttctgtcactaaaaaccttagccctcagtcctccatggtagtcgacaagcttgaaactggggagcaggtcactcagaaggtgaacattcctgtggacaagaaaaggagaactagaaatggttcttccttcaccagtaacccccaatccaaggatactgcaacagaagggaaaaacaagaaacaaaggaagaacaatggtgggttgaaagaagaggacaaggcaaaagaagagaagaaggatcagagaaagtgtcctgaagagcccccaacaggctatatccacgtcagagcaagaaggggtcaggcaacggatagccacagccttgctgaaagggtgagaagagagaagataagtgaaaggatgaaggtgttgcaacggcttgtgccaggctgtgataaggtgactggaaaggcccttatgttggatgaaataatcaattatgttcagtctttacagaatcaagttgagttcttgtcaatgaagcttgcttcggtgaatcccatgttttatgacttggcaacggatctagacaccctcttggttaggccagagaaactaaatagcatggcatcaccatcaccactaccatcaatgtcacattgcaacagccccaacacccaagccacaactttttgctgatacaaccaccatgacccccaccaacatcttccacactactagtgactatcttttggat

SEQ ID NO: 131744 - DNA, 347 bp, Glycine max
  unsure (1)..(347): unsure at all n locations
  Clone ID: PAT_MRT3847_89974C.1
gagaaaagctttttaaaaaaaacttggttgctcaaagagaaaaactgacacgctaaacaaaaaaaattcccaggaattaccgatcctggagggccaaaacacattaggggacacgtgacacgtgcaggaagaaaatttaaactccgggtggcccaggagaggcaanacccccaccagcccactaaaaataaaaaaacgccacccggggggaacgggggggcgcacaaattcctagaaaaacgatgtgaccctcaacgcaacactgctatgcggaaggaaccatgagattgatctgacgttgtttatggttcccaaagaaaaaatgaatcatctttcatggaagggac

SEQ ID NO: 131745 - DNA, 262 bp, Glycine max
  Clone ID: PAT_MRT3847_89975C.1
caaattatcgcattgtggctcgattaatagcatataagtatgtgagttatataaaagcctgtccgactgctcattaaacaatctgtggggggttcctaatcgggggagcgcaatctgagatcccacctttgttgcattgactttctcatactatatatcacctttaggggcaggcttatgacgaccatattattgagaacatcctctgggactttttcaaatcgccatattttgctaaagtagaaagctgaacacaaatctt

SEQ ID NO: 131746 - DNA, 553 bp, Glycine max
  Clone ID: PAT_MRT3847_89976C.1
gtcaaatttccaaaaacaaaacaaagagatagaatagagcacatacactacttgttttttccaccctcaccaccaccaccatgccccgccgtcgttcctggcactcttcgccacccttactgagccctccgctacttatcattctcttccccattgtgatcctcacgctcctcttcctcgccgtgccgccgatcctctccgccgtcacgcgcctcctccgctcggcatcctccgacgtcaagaccagctgggactccctcaacatcctcctcgtcgttttcgccatcctatgcggcgtgttcgccagacgaaacaacgacgacgaacagaccccgaataaccacgtgcaccagcacgacgacgatgccgtttcggatcgaaacgctgcgtttcgtcgtttgcattcggagggacaatcgcagtggttcgggttcgcagaagaaagaaaggtgtatggtaacgatacacctcttaaccagttgcagtcactggataccgggggaaaccggttgaggatgagacgaaacagcagctcttatccagatctgcgcca

SEQ ID NO: 131747 - DNA, 279 bp, Glycine max
  Clone ID: PAT_MRT3847_89977C.1
gacacaccgtttgttccactctcaactcaacttctgctacccagtctcttcttgcatgtcagatcactgttctctctatactcatgggcatggtcaacatctgaatcatgggatttgctagagttcacgctttggttgccatactcactctggcatatagacgatgtgtggctcgttaccggcatgttctcaacttttgcactctgaggattctcacgtgatccaggtgcacctgtcatcaccatgtcccgcgtgtccacgatgtcgcttttagcgatt

SEQ ID NO: 131748 - DNA, 462 bp, Glycine max
  Clone ID: PAT_MRT3847_89978C.1
agcaaaaaaaacccaaatttattttgccctggccccccgttaccttacaagggatttacctacccggggaaccctggggatttttttaaatatcacacgtgatccaaagggggggttgaaactccccctttaacttatcccaatcctgacctccttgggcatcatttttttttggagcacacaggcccaaatccccatggggccccgggggcgtcccatttttataccctttaaacggtaggcttctaaacccccttcctttcaaccttaccacatacaaatccccatacgggtgaaactggttcgggagccccaccggttgcgggcttccgccacccaagtttgccgggaacaggaaccactcttcggggggggtgaagcccacgtgggtaaacctttttttcttttcttcgaccccctttggcaccttaacccttctgaacccatttccctttgggcccc

SEQ ID NO: 131749 - DNA, 101 bp, Glycine max
  Clone ID: PAT_MRT3847_89979C.1
ggaactagcactgttgcattgcgcgaacaaaattttgtgacctgcttatgttcaacattgaccagcgatgattacgaggagctactgagcaaatagcgact

SEQ ID NO: 131750 - DNA, 409 bp, Glycine max
  unsure (1)..(409): unsure at all n locations
  Clone ID: PAT_MRT3847_8997C.1
ttcccgggcgcgacagctnctnntcgacagccgcccattctgtggccgcccacacaaacaagtggggagacagtgaaccattggggattcaagccattagcaatggctaattccctacatcggcataatctcaaaggactctgactttcatagagctaaagggcagcggctagcactctattcctaggataaattttgacgattactgcagatcgtgaggacggttcttgtccacggaaacgctggacccccattcaagctatgctctactgccgccatacttatgaacactttccatggtgaatgatcatgagccactcttgggacctgtggctgaggcaactgcttaaactagctcctcttcacaaaacaccttggcagccagcatttcccttcaccatagaggatt

SEQ ID NO: 131751 - DNA, 343 bp, Glycine max
  Clone ID: PAT_MRT3847_89980C.1
tggtactttatctaatgcggatgagatgctagttattaccttcatactgtcgatgctgtgtacttctggtcagtcgtattcgcaactaatttagagtactgatatatggatattattagaaacatggtattaatgacactgttggacactgaccatccatctatactttatgccgaaatggttttaagcctatagtgccgctgaacgtgtataccggaggactggttaagctgactgtgagcattattaggctcattgatgtaactagacttacacttgatcgattgtcagttgatcattggatgaacttattgcacatacatatatgggtaaccaaatccta

SEQ ID NO: 131752 - DNA, 548 bp, Glycine max
  Clone ID: PAT_MRT3847_89981C.1
atgcggaaagctctgccggccccgggccccggtccggggttcccgctacgcgccacgcgtttttgatttctgaattggtgttgatgaatgaggccagccttactttaggggttctaaattgaaaagctctctagctggtcataatattaccatttctgtcggtatcggcaaacactagtgcaactttgcaattaagaaagttatcagatggtgattttctcaagaaaaactttaatcagcctgtctaatgttatgtgcgtgacacttgaggacaaggcgagtttatggtcacaacttcattacgtttcatgtcattatctgaaaatgctagaagcttataatgtcaatctcgtgaaagtgttacgagaattgtctattcacagtccagaggaagctcgccaattgagaaggaaagctttctattgcttgcatgactctaaaagctgactgcctaccatgcccacatagagggctacactaaatacacttgtgcttatgctcatgttaaatgtgatattgatctctgatgagcatgtttgtgggataca

SEQ ID NO: 131753 - DNA, 245 bp, Glycine max
  Clone ID: PAT_MRT3847_89982C.1
gcagaagagagagaaatggaccaaagcatcaacattagtggcaaccaagcacaaattccaacaacaccatcaagcggccacaacatcaacaggcaacagcaacaggtgccaccaccaccaccattaacaacgagcaaaacaacaaacccggacggcaaaatatcccatgcggtgaatgctccccaatgcaaccttttacaaaacttgcaatgaataacagacacggcgtatcgggaaaaccaaag

SEQ ID NO: 131754 - DNA, 268 bp, Glycine max
  Clone ID: PAT_MRT3847_89983C.1
tctcgagccgaatcggctcgagtacggctgcgagaagacgacagatagggttttgtgagtcagaaaaccccttcttggcgggataaatgtgaaacttgtttttgaaattcacatttgtaatctattttagtattttgttgaaattgtgtgtaatttattacatgacgtcagaacataaggttccaacaatccaaaaacacaccaccaccacacacgtgttatctcgtgagggttatgagttccttgctccgaagctcatggaggcaaa

SEQ ID NO: 131755 - DNA, 520 bp, Glycine max
  Clone ID: PAT_MRT3847_89984C.1
ggctcgaggatttcagaaggcaaaaaaagtgctggaagctgagaagctgaacacgttaatcggaccgtcttatacaaaccgctcccttggtggggtccatgactatgtcctctctccgcttgaaaacatcaccaccaaccttaaccctacgaggttccatgccacggtggctaccagctctgtgacacactctgagcctatcgccacactctgcgaacgtgccacttttgaagaatatagacactcaaacagtggttgaggaacttgcatcagaaaataaagtggacgagaacaccaacgaggacaacacatgcacttatccttctcctattgacaaacaacttaaaaaggttgctcataagactgctggtacctatgcaccaagggctttcacggttacaaaaaaccctgcagcgcccggatcagatctgtgacagcgtttacgaagatcaagggtatctctgatgtatgcggggggagctttgacttttaatctcatattcccttctgaagaacccga

SEQ ID NO: 131756 - DNA, 312 bp, Glycine max
  Clone ID: PAT_MRT3847_89985C.1
tttctttaaccagagcccacggccactgaatggtgtccaagacaattgcaaagagacttccttccggaggtcaaaacttatgtcagaaacattatgacacacatgttcaaaaatcaattacaagcccattttttggaaggaattttacacaggtggggacacttgggcggatttgcctgggtcacaagtaatgggggaaaataacggtgaaaatctacactttctaaaaacccttttcattgggctaaaaaaaaggaaattgggcaagccaatcgccaccccctgggcccccggttggttttcatttttaca

SEQ ID NO: 131757 - DNA, 1914 bp, Glycine max
  Clone ID: PAT_MRT3847_89986C.1
tttttattcaaaaatcacggtggatataatttttaagatggtccacacagagatgtttgtaagagaaatgttatcaggatggatattaattaaaaagtaataaaaactgttgctagagcaactcccagatagaagaaacagagatatataaatataatttgtcatcataatgttgacaggaaaactgttatctattggtacgtacacacagccaaaatgttgggaagcacgatacgttacggaggtatggaactgttgatatagcaaaaccttgttatagctagtattgccgaattgctgaaataatttcagcaatgccttcaaattttcttctttctttgagaagcatcttagctaaatcaagtgcccgccgttcacaactagcccgtttagcagcatcagcaatggattcgaaatcctcaacatgtgccacaccaacaattctcctaatcattttagcagcaccaaatccaagactgtcgtgaaacaaatctgtcatgtatttcttctgtacaagcagttgaacctcaggattgttatagattgctggaagatatgcttcaccagcaccgtctttgtgctcatcccaaagtgaagtgaattttttatagaaaagattccaactgtcttcaatcgtcttaagaatccactccttataggattttcgatcatttgcttgatcagcatgcccatcttgagcaaagaaagccaaaatcaagtttcccaagaatgctccaatatcaaaacccattggtccataaaatgcaaattctggatcaataacttgagttgattcacgagtaaccatcacagaaccagtgtgtagatctccatgtattagtgcctgggccctctcaatgaacttggatttcagctcagcaacttcaagcttcagcagattgtcttcccgaacagcctcagcatcacgatcaagatagggggaagtacaacgattatattgagaaactttataagggtcagagaaaacgacctgttcagtgagcctgcataactccacattcccacaaaattcggcaacgtcccgtttgtggtcagcagtggaacggaaaagcagagacgtgaagaagagtgtcttcgccatgaaatcagccatgtgttcagccaaaaaagggtactcaatcccagcaatcaacccttttctgaggattatatgtggaggctccaagtaacgcataccaatcaaagacatggtacggtcaaagtgatatacttcaggaacatgttcggggctcaaacgaccctcttctttcagtgccagtgactcaaaatacgctctctccttcgtcataggccacgattcccctatgcaacgaacgtatggcagagcctgtttgatgacaaaagaacctgcggggttggaaacaatgaagacgaagttaagattgccatctccgacttctttgacagataagtcgtcgaggttgtcggcgagtttggaggagagggcggggacggactttatgtattcgatgaggaacttgtcgtcgagtggtcggaactccgagaaagacatggtggccgccggcgaagagggagagggagtggagcaatggtactctactctcccaagttccaaatggatggaatctttagtgcgtttttctattccatttggaggagagacgctaacaaattcgtgaattttttaacaggattttgattcttcatgtctagtgtcattttttattcttttgagaaagataacagattaaaattattgatgagaaaaatgaaaagaaaataaattgaaatctatgttttgaattagtgttaaatgtaaaagtgtgagtttcaataattttattattcattttttgtgtgttcactatttttatctttctcttgtagatgaacacatccttcgtggaattaaaaatattatcatgtacactc

SEQ ID NO: 131758 - DNA, 499 bp, Glycine max
  Clone ID: PAT_MRT3847_89987C.1
gtggttttccccactgctagctaatatcatgttaaaaccatgctcactgacctgaattgaccgccaacaaaactctactgccaatacacctctgtaggcactaggtgagcaaaaaccataactcaggcatccatacatactaatcaaacaaaacgcgacccccctcctattaaggaatatctatcaggacttgacattcacctttatatttatgaacccccattgccttggctatcagcactcttgaatgactctcctcctccttgtttggatggaagatgtttaaccctccctgatgggatacgaactgtgtacctgtctaacccaatacttcctgagctcggcgatggtgattactcattatcttgagatccagatgttcgagaactgtcttctataaaaatgcctgggtctagccagaaccttttgacttctgctggagaagcaacacctacagggtccatattttggagatgtaaccagaataacgacacccact

SEQ ID NO: 131759 - DNA, 167 bp, Glycine max
  Clone ID: PAT_MRT3847_89988C.1
atttggcgagaggcagatgcggtgttttgtatccatagcaaacaaaagagtctcaggtgtagcagacttacaagatggatgatacatactaaacaattccgggcttcgatggcaataaaattccttgattcaattaggcacgaaattatgaccgtgcagacggcatg

SEQ ID NO: 131760 - DNA, 288 bp, Glycine max
  unsure (1)..(288): unsure at all n locations
  Clone ID: PAT_MRT3847_89989C.1
nnnnnacacacctctttttttttttttttctttttttcttttttttttttttttttttcttatttttgcctttcttttttttcttttttttttttttttttctcctttttcctctttttttttccgcactgttattcatttaacggtaattaaattcataaggaaaattttcactttagagtcctgaatggccagttcacaaccccattcggattcatttttttctgatccctcataacctctaaactattttgctcattaaaaaaattcccaccaatcatttttagg

SEQ ID NO: 131761 - DNA, 1045 bp, Glycine max
  unsure (1)..(1045): unsure at all n locations
  Clone ID: PAT_MRT3847_8998C.1
cccacgcgtccgcccacgcgttcgctcgcacaaacgacatcgcaaacaagatcgttgtgaaacggtgcgacgattttggtttacgacttcagtaacaccgcaaaaccgccggtgccgacgagcccgcgacggcggaaacagcgtaagctgcggtggttgtttcaatccatacaaaaactccttgaagaagcagtgagcttccactttttttcaaactctgtctccgacaacacatcatgaggagccacgtttctctctcctcgctattcttcttccctcccaataaaaccccttccttttcatcattctcaccttttcattggaaccaaacgatggcatttggggttcgcaaaatgccgcgttttgtggtgtgcgctggccctaagaagatattatttggcaaagagtgcagagaagccttacaagctgggattgataaactcgctgatgctgtctctcttactgttggacccaaaggacgaaatgtaattctttctgaatccggaaaccttaaagtgattaatgatggcgttacaattgctcgatccattgagctttcggatgcaattgagaatgcaggtgccatcctaatttaagaggttgcaagcaaaatgaatgagttggctggtgatggtactagcactgcaattattttggctcgggccatgattaagtctggactactagcagttgcttttggggctaatcctatttctttgaagaaggggatggaaaagactgtaaaggagctggtcaagttcttgaaggagagaagtgttcctgttgaaggaagggagcatattaaagctgtagcctcgatttctgctggaaacgacgagtatgttggtaacttgattgctgaagctatggacaagattggttcagatggggtgatatctattgagtcttcctcatcatctgaaacctctgtgataattgaagaagggatgaagatagagacaatggtgagaatgaagagattacgagaaaagacactntgaataataatattttcagtactggaatgtttaccatgtgatattat

SEQ ID NO: 131762 - DNA, 360 bp, Glycine max
  Clone ID: PAT_MRT3847_89990C.1
aaccggaacaagacactgaaagtgcaaggagacacagagtgtgtgcataggaccaaaacaacaatgggaggcactggagcctacttaccaccacgaacagatatagaacagcactgatgctgaaaggattggctccctcccggaccgggggggggcgcccaaacccagggtgaagaagctaaaggaccacactacggggaggagacgagggccacaaattgtgactctgaggccgaacacagtgccaaaactgcggcagctgatgatgtcgacatggtgaaagaagaagaagacgaaggagataagagggggtttgatgggaaagaagacgcttgagaaaaaaacatcctttgacgccta

SEQ ID NO: 131763 - DNA, 303 bp, Glycine max
  unsure (1)..(303): unsure at all n locations
  Clone ID: PAT_MRT3847_89991C.1
ttgatttttttgttattttgttttttttgcgagcgaaggcggtcaattattatatgctgagatccgtaattcagacaagccgaactttgtacagaaacgaccatgattgcaacattaagaaaagaacgagctcataacgagcttgccacacccatcacaggtgctgactgtttgatgttgctctaaggcaccagatgaccacttgattctaaggatgttggttaaccagaaaacaccataatgcatgaacactatgcgaaacctaatccgtaaggctctagctaggcattaatannttatcat

SEQ ID NO: 131764 - DNA, 395 bp, Glycine max
  unsure (1)..(395): unsure at all n locations
  Clone ID: PAT_MRT3847_89992C.1
ccggccgcggaagagagggcgnagcaggttttaaagaagattgggcgttcaaaaccacgaagaagccgagagacagaagagggagaagccgaaccagaggcaccacgcgctgcgcgcagcggaaaaaacgaggcaaaaatggacacagcggcacaccagggcgacgccacatcatacatcacggaacagaaggccaagcagcagaccctcgaaacagatcaagaaggaatgcagaagcagctgaaaagtgggaagaacgagctcgagaaaacaaccgacaacgaaacatctaaacacgcgaggaatagcagcagacgacacaacaaacaacgagaaggcggaccagaagctaacagacatgaaggagaaggacaagacgatactcgggtgggacg

SEQ ID NO: 131765 - DNA, 833 bp, Glycine max
  Clone ID: PAT_MRT3847_89993C.1
ggctcgagaagttataaaatttaactcaacagaaccactaaacaggattgagttctggtaacaggtaagattcttctcctaacaagacgaaacgtattttacgcaacacataaaaataaataagaaaattgttttagtgatctatgtcgccattattatccatagctagctagctagctaaagggaatttatgtgggcgttgactgtgccaacagggatcatagggtgagggtctcgctcatccaatcattcctttgttatctgcactagtgagtgtcgtcttctgataaaacgacgtcgtcgtcacacagccttggttagaagaagaagaagaagaaggtatgggagacatattctacggcaacgatgaccaccgagaaatgaatgattgtatgtataaggaggatgtgatagaaagcatgagaaagcaaagggaaatcaaagaactcaagcgcagacaaaacaacaacaactactgctgctgctacttgtacttccttcgatgctttgatgactttctcacgcttctccgtgctttcatcaacttctgatcgatcatcctttcatctccttgtgactagctaagctactattcgtcttatcttaatcaatttcttgtgtatttcattgatcgtacaaaactcgatcatgaaattttttatttcctcatctaatccactgctttacatgaacttttttcataaatccatctgtgttgcagtatcaaaaaaaaaaaaaaaaaaaaaaaaaaaaaaaaaaaaaaaaaaaaaaaaaaaaaaaaaaaaaaaaaaaaaaaaaaaaaaaaaaaaaaaaaaaaaaaaaaaaaaaaaaaa

SEQ ID NO: 131766 - DNA, 325 bp, Glycine max
  Clone ID: PAT_MRT3847_89994C.1
aaaactggaaacttttttttggaaccggatttaaaaaaacccaggggggggaaaacaaaaagccctttttttggtgggccctggaaaaatttccaaggggggggggggaaaaccaaattgggggggggccgccgggaaaaaaccccccccccggggccggggaaagttttggataataaactttttaggggcgccgctaaaaaactccctttctttcccttgggggggcttgcccccttcccatgggaaggcagggtcctttttgccgaagggtccatttgcaggagttttaaaaaacctgtttttccccccccttttgaaatcc

SEQ ID NO: 131767 - DNA, 266 bp, Glycine max
  Clone ID: PAT_MRT3847_89995C.1
ttcatttgtgagactacgacttattgggggttatctgatatacaatatgaacgtggcggggttgttttttctctcacctaagaatgagttgcttcggaggctactgtgtatgtggtaccacttgcgagtgtgcattctgtttcagacgctagagtgatgacactagatctagctgcacccttacaaccaccggagactgctttttctctggagtgtgatcattaccggatctattctagagtggagccatgggactttccccccca

SEQ ID NO: 131768 - DNA, 260 bp, Glycine max
  Clone ID: PAT_MRT3847_89996C.1
cccacgcgtccgcaaatacggtgcttatgtttatggttacagtactatctacgaggccaaggactggtctccaaccggtgatgtctacgctgacggtacgactggcttgcctatctggactgtgactctacttggtcttcttgctggtggtgcacttcttgtctacaacacaagtgcttatggcacaataaactttgcaaatttatgttttaagcttaaacttagtctcatgaactatctattaatgaataagtattcat

SEQ ID NO: 131769 - DNA, 937 bp, Glycine max
  Clone ID: PAT_MRT3847_89997C.1
cgtttctttgaaatttaacacaccctccaacccttcaaaccagatgcattcataattcatagcagccactggcaccgctcttcatcttcaccagcccaacatggccacaatccagtgcgccacaaccaccctaatactgttactcctcctcctcctcatcataccaagatccaattcccaacaagagtacgtaaacaacaagcaactagactgcaacaacgaatacaactccacaaagggtaacctctgcaacagtctcccgtcatgcacctcctacctcaccttcaagtcctccccgccggaatacaccacccccgccgccatctccttcctcctcaactccactccggccctcatcgccgccgccaacaacatcaccgacgtccagaccctcccggccgacaccctcgtcaccgtccccgtcaactgctcctgctccggcccctactaccagcacaacgcctcctacaccatcaaagtccaaggcgaaacctacttctccatcgccaacaacacctaccaggccctcaccacgtgtcaggccctcgagcttcaaaacaccgtcggcatgcgcgacctcctcaagggtcagaacctccacgtgcctctcaggtgcgcgtgtcccacgcagaagcagcgcgaggcagggttcaagtacttgctcacttacttggtttctcaaggagaatcggtttccgccattggagatatcttcggtgtcgacgaacagagcattctcgacgccaacgagctttctacttcttccgttattttctacttcacgccgatttcggttcctttgaaaacagagccaccggttacaataccgagagcagcgattcccccggaggattccccgtcgccgccgctgccgcctgctccggcgggggacggagattccgactcttccaagaaatgggtcattgtcggaatcgtg

SEQ ID NO: 131770 - DNA, 200 bp, Glycine max
  Clone ID: PAT_MRT3847_89998C.1
cggttgcaagaagacaacagaggggggttcatagggggtgatggttggtggttgaaaggggtccttcttctttggtggtcctgggtctgggttggtttttcctctaacctgaaaatgtcttgctggggggggaacctggggttgcgaaacctcctcaagggccgcaaccgctgggggggctgcaaaatgtccccagactt

SEQ ID NO: 131771 - DNA, 429 bp, Glycine max
  Clone ID: PAT_MRT3847_89999C.1
atggctgagagaactgatactttgtatgccttcaatggttgttcgttgaacaatgctcgtggtcacgttactaacctaagagaagtcgtgggatacactcttttttatgacgagaaactagtcaaacagtctacagcaacacgaccatatgcaatgcatatgcagtacctacactacagtataaatgagtctcgcaacaaactactgtttgattatcacaaaatcaattcaggtagggaattcatcaaacatgtggaatgccagctgtttaaatttaaaatggaagatgtgagcatgggaatgtgggttgagcgctataacaatactaatgacaacagtaaagtactacaaaatcaatttgcaagaaatagaatagaattttgtaccaatgtttccaaaaagagaggggataaaaaggaaatgagatga

SEQ ID NO: 131772 - DNA, 239 bp, Glycine max
  Clone ID: PAT_MRT3847_8999C.1
tacgttcccccaccaccatcccttggagtcacaccaaagccactgtgattccattccatctcttcacaatttctattttttttcttctctttttctctgaatacctctaaagtttccatttttctgacatgggtatctcttattttctctgtttctcttagtttcaatcttctcttcttgtctctttggacttgtcacgtgtggggtgccatcatgtgtttgtgttgaagaatctgtga

SEQ ID NO: 131773 - DNA, 522 bp, Glycine max
  Clone ID: PAT_MRT3847_899C.1
tgtttttttttttttttttttttttttttacttttttttttttttgttttttttttttttttttttttgggaaacaaaaaaaaaattatggggttttacaaaaacaaaacttctatttcctgccccccaaaggggggggggttaacctatttgccccttttcaggatccaaaatggggcaagaaccccatatggggctttgggggcatttttttcccctgtttcccacaaaaaaaaacctaaagatccgcccaaaaaataacccggggcaccacaaaaaaacctgcttaaagagtttattctggtcaaactttttaaggaattttttattaacttaaagccccgggcggccaaaattgattttttggcaaaaagcttttatggggggtctcgtttaaaaattgataggcgggtttcaaacacccaagggacccattggaccctttatgcagagtcgcaatttcttttaaaagatttttgaacagggcaagacttttcgggggaatacggcccttgaaaaact

SEQ ID NO: 131774 - DNA, 333 bp, Glycine max
  Clone ID: PAT_MRT3847_89C.1
aatctacagggaggtatatataaaatacacaaatttatgatggtcaatacacaagctggtgcatccatgcattcattatacaaatcaacaaaataaaataattaatcaatctttcaaactagtgctgcaattttattttcaccgcatgaacgttctcaccaccttcaccatctgatcaaagaaagaataagtaggagacacagtgccatcattccccgcaagcaccctatacttatccttcctcgtaaagttggtgcactcaaaccctagcgtagccgccaatattctctggacatagttagccacgtcgggtggactctttcccgaagaaca

SEQ ID NO: 131775 - DNA, 449 bp, Glycine max
  Clone ID: PAT_MRT3847_8C.1
accttatattttataatagggatttttttatggggatgagggttatttgtttttattgttataccccaaacaacattttttatgaggaaaaagttatagattaggttcccttagacaacgacacacaatgttttaattgccttgggactggtccttcctcttctgctgctcctgaggattcctaaatagttatactacaccttggacacaacctccacttgtgcaggatatcaaatgtgaaatccatattcaccaaataactggtgggataattcttcaaccaatttatattttagaaaatcgagccaaggagtgcctctatgaatttttcaaacttaaaaatgttttttttggggggctccccttaaaaccctgtagggatttttcccttttttcccccctttttgaaaaaaaacggggtccaaccccaaaaaaatgttggcccgaat

SEQ ID NO: 131776 - DNA, 627 bp, Glycine max
  Clone ID: PAT_MRT3847_90000C.1
gagacgtgcgcccacacgtccggccaagccccaatacaagccaataaagtccttagtgatccacctgaaggtaactaaagataactatacttaagaggaagtgcaaaactttggaatcttacttgcaggtgggtagaaaattgcttttctaaaccgggggcttgtgagcagaggaaaacaccagcctaaagaggaaagtaaggcgggccagattggatcaagattccaaaggactgactaaccacttgtgtgttttatgctttcattttgagatgttgacagatgcggaaaggaccactggaagaaggaggaactaaggccattgacagtgttgaaacactcagaacttgtttggaaattatttctattcttggtttgcttggggacaagcaaagtttaatttgggggattttgataactgctaaataattgggaatttataggagttaaatagtcaaattttggcttaaaattaattatttagcagttatttgtaattaaaagtgagaaaattaatttaaattgaatttctgggtgcagatacaaaaaataagggtgcctttaccaaaagtggcgccgaaagggagaaaaaagaagaaattttgaagcaggccccatccaataggg

SEQ ID NO: 131777 - DNA, 392 bp, Glycine max
  Clone ID: PAT_MRT3847_90001C.1
acgaccgaagctgattaatacgcagagtggatgtcactagggagggaaatcatgtattgtcgcgctgagatgggttagatagagaactctaccgcacttacctactcaggtctagtgaagagacatgaagaaatacgataagcgaaccagatgcactgattcgcttgcctcttatccaaaaggtgctgaaccagcccttcttacagaactgatgtccttaacatgcttgtcaaggagtgcccggtgatgctgaggattctcttaacgaacgactggtctataattagtgaagattttgaggaacactagtgtcgctacatgtctggaagtgaatacactgagacgcttatgcacggatcatcagaacttgctgaaagtgctgacatggagaa

SEQ ID NO: 131778 - DNA, 191 bp, Glycine max
  Clone ID: PAT_MRT3847_90002C.1
tattcatgcaaaataacaatggattaattcctctatatgaagcaaacaaattatcgcaagaggaaaattatgacctcgtcgttattcctaagcctatccttggggagattgtgtttgtggtaacgtgacccaaatgggcaaaataaatgggaaaagataagggggctttgaacattctttggttggcaaaa

SEQ ID NO: 131779 - DNA, 262 bp, Glycine max
  Clone ID: PAT_MRT3847_90003C.1
aaaccaatgactcagcttagtttcacttcccaaggtgctccatggtgcaaagttacatattttactccatgaacctccttgaacaccgtcaaagttctctttttttccttcgtggtgctcttcaattgtgtgttgtataacatgtctgagcctctgaggagatgatgctgttttaaattgttggcaaggttttacaaaaaggatccgtgactgtgattttggcctcaacgtcaaagttacaggggtctctatgactataatt

SEQ ID NO: 131780 - DNA, 462 bp, Glycine max
  Clone ID: PAT_MRT3847_90004C.1
ggcatgttgaggcagtttgggggtccacttcaactggtggatatagggtcattgagtaggaattgtgggatcaagtgtacagttgatgggatgcattatgatggggttgtttatgaggctggagttcagattttgttgaatgcattgcttattgaatctcatcagaggctatgaagtttgtagcattggtgtggttccccccctcttagatgtgctcagctcagctccctctgaaggggggatatataccgtatgactctccaacgattttgattaatagaagttgagttctccatgatagctttattgtttttgtatggtttcttccggggcattagattcaattagttttagagtgattattacttgtatagtaaaccacatttgaaattctttttcgagttctctttttatatcactccacacatcgcttttgcccacagctcatgtattagtcacaaa

SEQ ID NO: 131781 - DNA, 887 bp, Glycine max
  Clone ID: PAT_MRT3847_90005C.1
gtcgaggtaatacacccagccttaatatctgtctcaattaatctctctaaattttcgcaatgaaaaccgaccgtagtcttggtaatagtcgaagatccaccgaaccaagttactatggttggcgaattgatagcttaattaggagcaatcattcgcgcaagaagaattctgaaatatcaaaattttcagcgcggatcaataattatacgtggagtaattattcacagatggcgaattcgacggtaacacggttttctaagagggttacaaatgccctcggtagttcgtcacacttgtcatcagtatcccatggctatggctctcgggtgaactttggcatcaccagcgtcgtcgcatcatcctggggaagtgcccctcctgactggacttcgcgagtccattcggctatccgaagcaatacttcgggaacttgattcatggacgcatgtccataacatatataaggaagcgacttctggttaattgttcagttacccatgttttaagattatgttgtaaattagtacgtgggataattagctgtggtagagctaaagtctataaacttgctagtttttatttgtgagaataagatgcacccagtactttaagccgtttcatagtaaaaataaaaaaaaaaaaaaaaaaaaataacttgcattgaacaattaatagaaataacagaaaagtagagttaaaatatgggtgctttcactgataagcaagaggctttggtgagtagctcatttgaagcattcaagacaaacattcccgggtaccccccccggggctacacctcgataccgaggtatgcacctgtacccccgggcttaatcccatttctagcaaatggagtagaccccactaatcctaagctcacgggccat

SEQ ID NO: 131782 - DNA, 280 bp, Glycine max
  Clone ID: PAT_MRT3847_90006C.1
ggggaaccaaaacagattttttatcagagttacccgccctttaagttttaaacacaagcctacaaaccctttttaattaacaagaaaactactttggggtttaccaaactaagtatacagttggcccaacggtcaacactttataaacaacccaaagggggatagcccccacgttttttcacccacttccaaaaattattttaaaacctttgcggcgccaaaaaagtttttaaagattttttaaaacccaagaagttttcttttttaacaattctttttt

SEQ ID NO: 131783 - DNA, 514 bp, Glycine max
  Clone ID: PAT_MRT3847_90007C.1
cgaggtttagacacacacacctctctctaactctaacattcaaaattcaatgtcgtgggttcgatcccctagctgagggtcccacagcctcttgtattgtactgtatgcatttgggatatggcggaatcatccactagttctcctgtttcagttgattccattcccagagacaatgataagttctggaaagggtcatttgctgtcgccggaatcatggttactctcatcacctatggaaaagatcatgagagtgccgtatgggacagaaaaggagtatttcaagcattcactgtttcttgttttctgcaaccgcatcacaacatctgctgtttctgctggttctttgctggcaagtaaaaaagtgttggacccggtagctcccatttataagtactgccttatctcgggttcaaacatactaactacaacttgccagtatgaggccctcaaatatgttagttttcctgttcagacccttgcaaaatgtgcaaaatgataccagttattggctgg

SEQ ID NO: 131784 - DNA, 286 bp, Glycine max
  Clone ID: PAT_MRT3847_90008C.1
gacagtttccccatagaatttctcgtctgcaacgcactacccagacaccgcgtctccggttcgaaaccagcatagggaagataacgttgtgctgcgccgccacactgggaccttgcttaaggttgcaggcgtacattcacctacatcagaatatgtaactcgtcttaagtgtcaccactctattggtctatggcagtcacatcatacattcttgactggcaaaacttggtggtaagcctgcatagacggcatgctgcacaactctctttgacaagctagggtaata

SEQ ID NO: 131785 - DNA, 843 bp, Glycine max
  Clone ID: PAT_MRT3847_90009C.1
catttcgccttgtctaaacttgagcaaaatgcaggccatccagcgctccgcctttgctggggccaacaccagggtgtctgtgcgctccaggcagacaaccgtggtggtgcgggctgtgcaggacgtccagggcacagttgtctccacctccatgcagaacaccgtggtggtcaatgtggagcgtcttgcaccccatcctaagtacttcaagcgcatcaggcaaagcaagcgcttcttggcccatgtggaggacagctctgcatgtggtgtaggggactatgtgcgcctggagggctgcaggcctctcagcaagaacaagcgcttcaaggttgctgaggtgctcagggcagcagacaagaactaaagcagcccagcactagccttgatgctgcagcacctacacagtcatgaaccaggcgccctgcctgtacaggactgatgccagttgtacaggcacagttttcaggctccctagcctgctcccccagctggcagctgaggcattatcaagatgttctagcgttagtttgttccctaccataagacccgccccagttttcctgatggaccccaacaggcacctgcaatactgcagtcgctggttcggtatggctgcagttttggtttggcctccgcagcctgtaacgtgccttgcaacttgcagcaagccagttgtttagacacatcgtgatggttgtttgtgcagcgcagcttgcatgcaacaagtgctgttcttctgagggcatttgtcgcctagcacatgcagtgatattgctgcacttggcttccataccatctcaaactcctgtcttggcatgcacatgtaacacatcctgtgtgtcc

SEQ ID NO: 131786 - DNA, 456 bp, Glycine max
  unsure (1)..(456): unsure at all n locations
  Clone ID: PAT_MRT3847_9000C.1
tnnnnnnggggaaaaacgaatcgcataataatttttttggcaattttcccttttggtgcaattataacaatcggaaatagaccggcaatacaaagggggagatttcccgggggaaaagcggttcccgaaccaaaagcaattgggcccagttccaaaaacttttgattggacggggttttttgggggccccccttttggattacccggattttggtttttcatttacgggaaggaacctttcccctcaattttttgaacagaaaagaaggggacccttcccctttttggcgggtccctttttttttttttttttccaaaaatcgcccgttttggttttgtccaaattttccccaataaaacgattttgttttccccctgtttggggtaaaggggttcccgaaccaaaagcaatggggcacaggtccaaaaacttttgatttgacggggtttttttgg

SEQ ID NO: 131787 - DNA, 156 bp, Glycine max
  Clone ID: PAT_MRT3847_90010C.1
tcgggactcgcagttgtgctgttgaccacgggtttcgctgtctgcctcttcaccttctctcgggtcactctgctagcataccccatcatgggcctggcttgcctcagcgacttcacctttccgttgcctgggaccactgtcgaggtactgctgctt

SEQ ID NO: 131788 - DNA, 795 bp, Glycine max
  unsure (1)..(795): unsure at all n locations
  Clone ID: PAT_MRT3847_90011C.1
aattcggctcgagctctctcgctcgcattttcccctcactcttttctctctctcttagcgaacgacacaattgaaccctaaaacgacaatggcgtgctgctgcgtttcgtgactgatgatgctgcgcgtcgtcgtcgtcgtcgtagtctcggacggtggttgcatgggctggaatctggtgcggccgtgtgcattgtgatcaatcaatcataatgatgaaagaggattgtttgattttgtgattgaaatcgaatcagagaagaggagagagagagaaaaaaaattattgttatgatgactgaattagtggcccgaacaggtcggcatcagcaacgatacggacacggttatcgccttattgccgggtgtgttccatttaggtataaagaagatgactgtggagactcttgttctgagaagattgttgaagtgcttatgattaattcaactagtggaccgggtcttttgtttccaaagggaggttgggagaatgatgaaactgttgaggaggctgcagttagagaagctattgaagaagcaggagttcgaggagacctaatggattntcttgggtactatgaatttaggagtaagaccctccaagatgagtgcagtccagaaggtttatgtaaagcagcaatgtttgccttgtttgtgaaagaggaacttgagtcatggcctgagcaaagcaccagaaaaaggagttggcttgggtgtgtcagaggcactaggaaactgccggcatgcatggatgagggatgcncctgcatgcttctgtaatggcatgaggagtgc

SEQ ID NO: 131789 - DNA, 268 bp, Glycine max
  Clone ID: PAT_MRT3847_90012C.1
ctcaagccgaatcgcctcgaggatattatttcttgccaccaacactatttggatcttcgccttttcctgggcggagagggttcctaaaacctctccatcttatcccacaatactagaccattatgatgatgaacttgatcttcccaaccaaagtgaaatggataaaccccacatgtacgttttcaaaatctcccttcatgatttccttacttacgatccccccaaaccaactaacaaaccccttattaatgttcattcccacctacaa

SEQ ID NO: 131790 - DNA, 235 bp, Glycine max
  Clone ID: PAT_MRT3847_90013C.1
gggtggcgctgactgctgtattgacttcgtgaacaacaatgcctccactgccttgggcgagaaaagcttgttcttcaccaaccttggtttgccctacaacgtactgttcctctaggacaacatacccaacggtgttgatgcgagaacaatatccatgtgcaatgaacaccttctcaatgcacctgctgtgacttactccggtgcatgcggtgccaatggatccttccgtttcttc

SEQ ID NO: 131791 - DNA, 299 bp, Glycine max
  unsure (1)..(299): unsure at all n locations
  Clone ID: PAT_MRT3847_90014C.1
cncgtacgtaagctcggaattcggctcgagntgacacaactgagancttcnnatggtttntncgtctncntccctntccctcctcctctcgnncttacccatncncactctgctncctngtaanctcntcttcaganncaataactggncaatccttaaccaacgcnaatncncattgnncgaggaaagaccaagcntngcatntagtgctcnnnaanncacttcanaanacaggattnttannngggatntnatgctgtaggggcttattcgntctctctacnaatgngacnttnngt

SEQ ID NO: 131792 - DNA, 432 bp, Glycine max
  unsure (1)..(432): unsure at all n locations
  Clone ID: PAT_MRT3847_90015C.1
tgtgtggcccgctcgcatttttttttctgtgtatttccgcgtcccctttgctgtcttgtctgcgtggagtccttctatttatttgagtaatttgccctccctagtatccttttccccgggcttttctttttctttccactctgatcctatgagtgcggcgtggtgaatacctattcttgtcttccgaattggtttccagcttaggagaccacacctggtccttacacttcacangctgttcctcgtgcttttgccactgcggggtcctccccccaatactagaggggctaccaggggttccatcactattattattattctctttctgatctccccctgttctgaccctagcgatgatctctggcctgtccttattagcaccccttccatctgagccctctcttgtctcgagagggcctgctccacccttgt

SEQ ID NO: 131793 - DNA, 333 bp, Glycine max
  Clone ID: PAT_MRT3847_90016C.1
cttctttattttgtgactggattctcatttcagtttttgggttgatattgaatgaaaggaaattaagaacaatgtcttcccttttttgccaattacataattctaccgagaatgaagtgaaaagcactaaataaaaaaaaaaaaaagaaagaaaaaacaaaaaaacaaaaaataaaaaaaacttacccgcgcagcttattgcattgaatgcccaacacattgattctattgcctgtggagctgatcatacacttgcgtattcagaataatgcactgaactctatagttggggatggggtgattattgaaggatgcaacataactaatctagtg

SEQ ID NO: 131794 - DNA, 378 bp, Glycine max
  Clone ID: PAT_MRT3847_90017C.1
aaaaaccgggccgaccgcacgcgtccgtaaactcaaaaatgtaccttcatattctttttacacggaggataaacaaccattcatccgcactctttatatgattcctggcccacttcacgtcaccggtaacttctttcatatatactttagctcataaaactataaatacactagagctatccataaatgctctaaaagaaatccaaatgctattgtactcagacattccacctcatcctcaagaacaccttaattgcttaacaacccctctaaccacaaagccaacccaatgcatttatccaatatgtatcatcaaacaaatatcattgaaatatacaatttcaacatatttacgatttactacatactacaatataa

SEQ ID NO: 131795 - DNA, 390 bp, Glycine max
  Clone ID: PAT_MRT3847_90018C.1
gttcgtcttttatttatatcggtacgtgtgtttttttgctttttttttcccgttttttttttaaaaaacgcacaggaggcccagccatggttttactgagtggaaaaaaacccgatgtgatcttggccaccccacgtttttgtgataacttgttgggggggcagaatatcacactcctcacaaaagggatcccccctggggggacccagacgagggaaaaaataaacccatcttacatctttcgggggggaataacagggggaaacccggtcggggccccaggggagacacccgcccccaagagtgcggcgccttacggggagaggaaaaagggggggggatctcctgggcggcaggtttaccccccattcacacgggcaagcggagagg

SEQ ID NO: 131796 - DNA, 374 bp, Glycine max
  unsure (1)..(374): unsure at all n locations
  Clone ID: PAT_MRT3847_90019C.1
ctcgagccgagatcggctgnaacttaattattaaaacttcccttattcaatatggnnnaagcccttcactntctttntttnttncctttgnttgctactnttgnnaagtgcatnctttgctattanntccaacaagcttaanaagtgnnaactaaanaacntnaacncgttggaacccnancaccnnnttnaatccgaaggtggttnnannaaaanatnaaactctnaanannntnanctgaaatgcgccgntgtcaatgnntcaaaactcaccctcaancgnaatggnntccacttgccatcttantnaccttatncnnnnatgatcatcannnnnnaagggaaaggannanttnaagttnnaattccaggat

SEQ ID NO: 131797 - DNA, 191 bp, Glycine max
  Clone ID: PAT_MRT3847_9001C.1
aaggaagtcaagcagatttgaaacatgacatgccaaatgcaagaagtgtggaggtaaaatcttttggaagtgtccgtaccagtcattcatcagaaaatggttagtttctggctctgaaaagcagaatcttaaaacatttttatgcttacattcaggttgatttctacttaaattttacttcttgtgtctat

SEQ ID NO: 131798 - DNA, 214 bp, Glycine max
  unsure (1)..(214): unsure at all n locations
  Clone ID: PAT_MRT3847_90020C.1
aggtgatattggagtttcaaaaagtactgataagggagcaacatggcaacagttgggaaatgacctgaaatgaggattggcatctgtacgtaaccttatgtctttgagcatgatggccagatatatatgatgcctgatgngcagcagtgaggagatcttcgtctctaccgtgcaggtaactttcctttgcagtggaggttggaaaaagtcgtca

SEQ ID NO: 131799 - DNA, 124 bp, Glycine max
  Clone ID: PAT_MRT3847_90021C.1
attgttgctccatagacatggcctccgaatctgctgcaggcggtgctattacctcattcactggccgtaaggcatgcgcaggctgagggagttgccgagacaaagtcttaccttcaaaagccac

SEQ ID NO: 131800 - DNA, 308 bp, Glycine max
  Clone ID: PAT_MRT3847_90022C.1
agctctcagttctagcgaggccacagccgcccactctcaggatccagccaccccaagcattacagtctagagcttaagggcccagagccccagcactagaatgtgcccactgaggaagggggataccacatctacaaggctggtcggctagctacaggccaagaaggctctcagtactggagaagacagtggcattggtcgatcagtcgctatcctggcagcaaggaaggcgcagacagctccatagcctactaggcccatgaagagtccgacgccaagcatatgaagaagaaggttgaggagaaggg

SEQ ID NO: 131801 - DNA, 496 bp, Glycine max
  Clone ID: PAT_MRT3847_90023C.1
ccacgcgtccgtatggaactaaagaaagtacatacacaatgaaatctcaaggagaaagcacatcctacagctacttattgtatagttcaggaaaaattcatcatgttgtcatcggacctcttgaagataacactatttattactaccgatgtggagggcagggtccagaattccaatttaagaccccgccctcccaatttcctttgtcattggctgttgttggtgatcttggtcagactagttggacaacatcaaccctgaatcacatcaagcagtgtgagcatgatatgcttttactccctggtgatctatcttatgctgattatatgcaacacttgtgggattccttcggcacattggtggagccacttgctagcaaccggccttggatggtgacagaaggcaaccatgagaaggagcacattccattttttgagtcaagatttcaatcttataatgcacgatggaaaatgccttatgaagagagcggatctag

SEQ ID NO: 131802 - DNA, 405 bp, Glycine max
  unsure (1)..(405): unsure at all n locations
  Clone ID: PAT_MRT3847_90024C.1
acctgtttaataggatatctctaacaaatattgatgcattgggcaactttgttctattgaatttatctttttctgttgattgttttctgttttgttattttattttaggattccctgacctccttctcctttttgatttttatctctttattaacatttttttaaggaaaaaaatatgcatgaagtatggatgattgcttttgacattgtgtttggttggaggggaaaagagagagggggatttggaggggatggaananncttgaactttaaatactcatgtttaatggttttattcatctattgtaacagcgtaatagtaatttactaatttttccttccctccccttactaaccaaacaagtggtccccttcccctcctttgaagtttgaactaaaatgaga

SEQ ID NO: 131803 - DNA, 321 bp, Glycine max
  Clone ID: PAT_MRT3847_90025C.1
ccttcgagatttctcacacgcttacaaccactttctatctctttatacaccaacataactcgcaggtgggtctcattatatttaactatacctctttcaccaattctaaagcgcaaatgtaaacttatctcaatcatcaatcaatcttttactacctgtacctgtaataaaaagagctccatctgttcttaaactccttatttcaaaaggacttctgctcgcacagagaatggattgttagacaatatgattcttttcaataaaagactattcgtgtgtgagaactacgttactcaacaaaaaatcttccttacctgtcca

SEQ ID NO: 131804 - DNA, 399 bp, Glycine max
  Clone ID: PAT_MRT3847_90026C.1
ggctcgagcttcgatccaacgatgatgaatctggcgaagagagtaactcttacgaaggagatgggtatgacatctcaaaagtggatgatctacaggtcaagatggatctttacagatgacttgttgcatatggttgttctacgtttttggatcatctcaatctctgcagagctgcttgagtttgtaagcagtggctggactgcttgtgctcatgaacactcttggaagagtttgaattctgaagaccggaacatattctgtagagcaacttgaggacattagttcgctgtatcctaatatgacagctttctcgatgtatggaccctgctctctaatcagcttgttatgaatgccatattgttaatatagaaattatttcgcctttaacattgggaaaaa

SEQ ID NO: 131805 - DNA, 358 bp, Glycine max
  Clone ID: PAT_MRT3847_90027C.1
acgacaacacaacacaacagaaaccccatatattacccttttttttaaacaaatacaaatcctaacctttgtgcgcaaaatatccacttgtggctggcgacttaaaacaacttaaatacatacttactctacactctcaccatcaacacacgttccctttacaccatcttccaccctataccaaaacttctcaagaatcccatttccacacatctcatccttgctcttttccggacttcaatcttcattatttctcaaatcctatctaccatgaactctttttcttaattatcttaccactttaaatactaaactacctccaattatattatatgcaaaataaacccctttatttata

SEQ ID NO: 131806 - DNA, 1805 bp, Glycine max
  unsure (1)..(1805): unsure at all n locations
  Clone ID: PAT_MRT3847_90028C.1
ggaagctcggaattcggcaaaccctggttttcgaagcacatttgttttgaagcgaaagtaaacgacacgtagcagaggatagatagtttgtttggtgcggtttggtgttgggcttggagattggaagctagtcaacactcagcagaggatagatagtttgttcgttgcgttgccatgtcggcgtcggagattgttcgggaactggattcgctgaaggacgaaaagaccataattgagcacaaaatctctgcgcttgaagctcaactcagagagattaatctccaaaacgacgccgcaccacccaacggattgacgcaggacatgattcacagatacagtcgccaccttgtgcttccttcctttggtgttcaagggcaggcaaatctgttgaagtcttcaattttagttgtgggagctggagggttgggtgctcctgcattgttatactttgcagcttctggtgttgggcgcttgggagttattgatcatgacgtggttgagctgaataatatgcaccgacaggttatccacacggaagcatatgttggtaagccgaaagtgaaatctgctgctgctgcttgtcgctcgatcaactccactattcaagttgtggaacatgaagaagctctgcggacttccaacgctttggaacttctcagcaaatatgatataatagtagatgcaacagataatgctcctacccggtacttgatcagtgattgctgtgtggttctaggaaagcctcttgtatcaggtgctgcattgggattggaagggcagcttactgtctacaattacaatggtggtccttgctatcgatgcctctttccaactccaccacctagaacagcatgccaaagttgtgctgagggtggagttctaggagtagttcctggtataattggctgtctccaagctcttgaggctattaagattgcagcttcagaaagtgagccactctcccagcggatgcttctcgtggatgcattgtctaaacggattcgtattgtcaaaattagaggaaggtctatgcagtgtgaagcttgtggagaaaatgcaacatttacccaacagcaattccgagaatttgattatgagaagttcactcagactcccttgcgtgtgcctcctttgaagttaaatctacttcccagagaatcaagaatcagcagcaaggagtacagtgaagtaattattaagaagggacctcatgtgctggttgatgttagaccagcacaccatttcaagattgcatctctaccaaagtctctgaacattccactctcaacattagaggctaggctgcctgaagtatcatcagctttgaagaaagaggaagaggaaagtggtgcagtttctgggtcaagtgcacaattgtatgtagtatgtagaaggggaaatgattctcaaagggctgttcagtatcttcacaaaatgggtttcacttctgccaaggatattgttggtggcttagaatcttgggcccacaatgtggaccatcagttccctacatattagctgacacctctagctatgttaaatatcactttcattaagtagttatactgcttgtttaaaattatttctcttattagtgacgctgctttcatttttccatgtctatttacaacattcacgtgactttattttttttagtcttaattcattttattcttgtttttctttgctttgggtagagtttaaaaaaccannngttattcgcgttnnngctacagtgccaatatcgctttctttaaaaaaaaaaaaaaaaaaaaaaaaaaaccagcgcgccgctctagaggatc

SEQ ID NO: 131807 - DNA, 863 bp, Glycine max
  Clone ID: PAT_MRT3847_90029C.1
atcaattcgaagcacatttgttttgttgcaagagaaacagtaatgttggactagaaagtggaaaaccctggtttagattggtgttgggcttttgcgcaggaacatagtcaacactcaacataggatagatagtttgttcgttgcgttgccatgtcggcgtcggagattcttcgggaactggattcgctgaaggacgaaaagaccaaaattgagcacaaaatctctgcgcttgaagctcaactcagagagattaatctccaaaacgacgccgcacctcccaatgcttcttcttcttcatcgtaccccaccaacggattgacccaggacatgattcacagatacagtcgccaccttgtgctcccttcctttggtgttcaagggcaggcaaatctattgaagtcgtcaatcttagttgtgggagctggaggtttgggtgcacctgcattgttatactttgcagcttctggtgttgggcgcttgggtgttattgaccatgacgtggttgagctgaataatatgcataggcaggttatccacaccgaagcatatgttggtaagccaaaagtgaaatctgccgctgctgcttgttgctcgatcaactccactattcaagttgtggaacatgaagaagctttgcagacttccaacgctttggaaattctcagcaaatatgatataatagtagatgcaacagataatgctcctacccgatacttgatcagtgattgctgtgtggttctaggaaagcctcttgtatcaggtgctgcactgggattggaagggcagcttactgtctacaattacaatgggtggtccttgctatcgatgcctctttccaactccaccacctagaacagcatgcc

SEQ ID NO: 131808 - DNA, 280 bp, Glycine max
  Clone ID: PAT_MRT3847_9002C.1
tttcgaagaatcggtggacttcaacgacttcgcggcgtacccacgagcctcgtccctccgattcgacagcgcgagcgtgaaatcaacggcgaagataggctcgtgctcctcgtcacggttctacttcaccgtatctcaccaccttgactcgttgaagccctggtacctgagcctggccgacacgtcagcatccaaagtgggacccacgagtccttcggccgcactcatctcgccgctgaacgcgcgctcgctctcgttcgcgtcgcccgtcgcgagaacc

SEQ ID NO: 131809 - DNA, 358 bp, Glycine max
  Clone ID: PAT_MRT3847_90030C.1
aatgattacatttgatgccagaaaaaacaaaatagactggacaggaggaagagaaagtgagaagcacacacgaataaagtgaaatcaatgacacatactatacatacgattcgggcaaagttgaaagaactgccaggacacagcctagaagtgtgaatggccttaggcctcctcccacttgagcggcgagatcacttaccatgtgaagccaaggttctttcttgccaagtgtgcatatgcagcaatcttcaaatgccagaaagttccaccgctaatgagatcaaggttgacggagaccatgccaggcctgaaataaaagttgtccttcacaaggtctatgatcacattgtctgggatc

SEQ ID NO: 131810 - DNA, 612 bp, Glycine max
  Clone ID: PAT_MRT3847_90031C.1
aagcttgtgaagaaaatgcaacatttacccagcagcaattccgagaatttgattatgagaagttcactcagactcccttgcgtgtgcctcctttgaaattaaatctacttcccagtgaatcaagaatcagcagcaaggagtacagtgaagtaattcttaagaaggaaccacacgtgctggttgatgttagaccagctcaccatttcaagattgtatctctaccaaagtctctgaacattccactctcaacattagaggctaggctgcctgaagtatcatcagctttgaagaaagaggaagaggaaggtggtgtagtttctggatcaagtgcacagttgtatgtagtatgcagaaggggaaatgattctcaaagggctgttcagtatcttcacaaaatgggtttcatttctgccaaggatattgttggtggcctagagtcttgggcccccaatgtggaccctaagttccctacatattagcagacacgttttgctgtgtagaaatattgcttttttcaagttatactgctggcttggaattatttctctctatttatattagtgatgctgatttcatttttccatttaaaaaataaaagtttctttccccaag

SEQ ID NO: 131811 - DNA, 193 bp, Glycine max
  Clone ID: PAT_MRT3847_90032C.1
caccaatctacaatacaaaccagaaagaggaatagagagctcggacgggaacgaatcattaggcctatttagaaacgacacaggcacatagtacagcaccccattctatgtgaaaatcattgaagaagccagctgacatgacgtcacaagaatgtataccgaggctcctgagaagctccaaagaagactcgaa

SEQ ID NO: 131812 - DNA, 342 bp, Glycine max
  Clone ID: PAT_MRT3847_90033C.1
gggattttggatgctctcgtacgatgcctcatctgtatcatgatgcacctgtccatggaggacaacataagaaactatgttcacatataacgtcgagactttagaacagacgctgggaataccatgagcatcgctctaaagattcaatcactagtcactccgttgacactctagacgaatacagcatagattgccgacattcacactacaattgccatggcactttcacaaacatcacactatcagtaactcatctcttctatatgtaatgagcacagagatggcctgtgtgaaagcttggcgaatccaacatgaaaactctccagtactgcgaaaccaact

SEQ ID NO: 131813 - DNA, 360 bp, Glycine max
  Clone ID: PAT_MRT3847_90034C.1
agaatctaattccccgagctacatgctcactaggcgcgcgccgcccttttttttttttggctttttgcatgaaattgaatctatttttgacaccaagggaaaagggtacctttcctaaccactaaagaatgaagcgacggatcataatatgcacccttggcattgaggggtgaggattgaaaagtacaaacaacttaagggagcatggttttaccaccaatgcgctgtgtaccgtaagattaaaaaaggatgatgttgatgcgatccttctcatactaacccactttgtaaaaatttttgggctcaccagatcccaacggacctgcctctccttgtaacatatctaccatatttgaagca

SEQ ID NO: 131814 - DNA, 495 bp, Glycine max
  Clone ID: PAT_MRT3847_90035C.1
agcagcttatgattactgctactatatatggttttctgtggctgttgctttcattcctgcaatcaaaatcacccaaacacactcccccaaatttgggacaaatttgtcttaaaccataatgctctcctataacctaaggaaaggtaaacagagatcaaattgcatttaggcttagggttcaagaactcattcaattatattcaagctcaaaatgggtgcaagggtttaatcattcatgaacaaggtaaggctgtttggctaactggctaaatcagattaatcatggccttcatcatttccaaatcatgcattcattcagcattcagagattcatgcaaaaattggtacttgatgctagtcgatctctcacaatttagattcacacatctcaacgggttatagcaaatgattaccttcactatttacctgtcaaacaaactaacattttcactcacgcccctaatttcatgttctttctcttctaactaccgcata

SEQ ID NO: 131815 - DNA, 338 bp, Glycine max
  Clone ID: PAT_MRT3847_90036C.1
aaaaaagctttattctctgctctgggctttcatagcttaaacattggcaaacatgacagcccacctccttagcgaaaatgtcgctcaatccatgtcctttgaaagctaaaacatacaaatctgacattagttactgggatcaaataaagcctaaccgcttttttaacagctaaaattaaaatttttttgcttagattagccccctccccttttaagagggtgcttccaacaaaaggattttaaattttctcacttagcccccattagtggaaggccttgggcatccacaaaacccctgggggcgctttttgctacttcttttgcccctgggaataaag

SEQ ID NO: 131816 - DNA, 706 bp, Glycine max
  unsure (1)..(706): unsure at all n locations
  Clone ID: PAT_MRT3847_90037C.1
gagaaatgctggtggaaccttttaaagaggaggagatttatagagctgtatggtcttgcgggagtgacaaaagtccagggcctgatggtttcaatttcaggttcctaaagcatttttggaatgatttgaagcctgaattcctaaggtttttctcggaattctatgcaaatgcagttttccctaagggccttaattcatccttcattgcccttatccctaagatcaaggatcctcatcttattagtgatttcagacctatatcccttattggttgtgtttacaaaattgttgctaaagtcctatcaaataggctaagcaaggtcatgaatcatctaatagatgaaaggcaactagcatttgtaaagggcagccaattacttcaaggggttttgattgccaatgaggttgtagaggaggctaagagatctaagaagccttgcctggtttttaaagtggatttcgaaaaagcatacgactcggtgtcttggcaattcctcttctacatgatgagaagaatggggtttcatgagaggtggcttgngtgggtaaagggctgccttacaacagcatccatttctgttttagtaaatggaagcccatcagaagaatttaaaccccaaagaggcttgagacanggagatcctttggctccttttttgtttgacctggttgctgaaggtttgacaggtttgatgagggaagctgc

SEQ ID NO: 131817 - DNA, 211 bp, Glycine max
  unsure (1)..(211): unsure at all n locations
  Clone ID: PAT_MRT3847_90038C.1
ctcngggttgggctcggtggccagagggaggacgatgtcgcgtcggtggcgcgatggtggtgatgggtccgccggtggcgcggctggggcgagtgctgttggggggggtcgctcccgtggtggtgctcctctggggtccttcgggcnagcgagtttgcgtcaanggcggtgtgggcttcgtccgggcgctggcgcggtgctgctccttcgg

SEQ ID NO: 131818 - DNA, 357 bp, Glycine max
  unsure (1)..(357): unsure at all n locations
  Clone ID: PAT_MRT3847_90039C.1
tacgggntggatttccggggccgaccacacccttccggatttaagggagggaccggggttcacttgacctaataataaccgccagcgtcaatggaggaagatcccgtccagaaccatcgccgccggaaggcctgaaaaggcaactaaccccgccccgttaaaggcggtttgggctgatttaatctaaaccttaattttctggtccgccggttaaggctccggcttggcctacaacaagctaaccgacaacggcgctgccacccttgccggcctaatttccgcttctattggccattgctttcgcctttttggtggccttttcctggggggccaacttttccgggggccacttaaacc

SEQ ID NO: 131819 - DNA, 204 bp, Glycine max
  unsure (1)..(204): unsure at all n locations
  Clone ID: PAT_MRT3847_9003C.1
bgcngaggagtagtcgatcgtcacngagagatatgntcgagtgcattgtccacttgaatgacctcgaacatgagtcagattgtgtactcctcgtgagacactatctggcaatgtgtgtgtatactgctgtggtatcagagtgtgtgaagagttataaagtggctgtggagatnagaaaaagcaggtgtgtcattcanttntgna

SEQ ID NO: 131820 - DNA, 161 bp, Glycine max
  Clone ID: PAT_MRT3847_90040C.1
gggaaaaggtaagctatctaggcggtttgacaatggaaggtaaaggaaataagttatgaaagtaagcaagaaatgtaaactaggcgaatcctatgagtgtttgggtgacctcatttaaggtttccaacagagcgggggggtgtcctaagggaaaatcgcct

SEQ ID NO: 131821 - DNA, 312 bp, Glycine max
  Clone ID: PAT_MRT3847_90041C.1
atggcggtggtgcaggatctagggcggttctcggtggaggagcataaccggatgctgaggcaggcgcagaaggaggaggaggaagtgacgttcgaggaagtggtggaggcgcagtcgcaagtggtgtctgggatcaagtactacatgaagatttcggccacgcagggcggcgatggcggagattctagaatattcgaatccgttgtggtggtgaagccgtggcttcgttccaagcagcttctaaacttcgctccttacataatattcggaaaattaaaatgtagactaaaaacatcattatcaaaattataa

SEQ ID NO: 131822 - DNA, 1126 bp, Glycine max
  unsure (1)..(1126): unsure at all n locations
  Clone ID: PAT_MRT3847_90042C.1
ggtccggaattccccgtcgaccccgcgtccgaaccacttctgacccctttgagtactgcttgccaggtagaaaggagggtagaaaaagacgcttccgtggaattcggctcgagctcgagccgattcggctcgagggagtgtggttgcagcagggtcagtgtgggagagcaggatgaagagtgatgaagttagaggggggatcaaggtgttcaatgcagaagaaaaccctgaagaaaatagtggtgccaaattgaaaagaaatccaattggatgtggaaagaggaaaacatggaaatcagagagttctgaggggtcagaaaataatactcataataatagttgtaatagtaagatcccaattcagtgtaaggagctgagcaattcttgttcctctgatggaatcaagaagagcccaattcacaccagaaagattgctgcttttggagataagtttgagagaggtccaattcataccagaaagatgagatctgaggcacacaagagtggtgaattggatgaggggaatgagaggacttcagcacaattgaggaagacgaagtcagattcaatctccaagaagaagactgcttcttcttctggtggcagatcaattcagttgaggaagaccaaatccgaagcaacggatcaaaagattgaggttgagaatgggaagaatgatgatgaaaattgtgtggatttggattatttgtgtcaagagaaagtgatttctagtagctcggataatgtggctcaaggttgttcaacagaattgtcggttgatgctgctgctgctgctgatgttgatgttgttgctgttgctgatgaagaagaggaagaggaggttgagattgagatggtgaaggaaattagtattccagaatacaaggttgaggttgctgtgaaggaaccagaaagtaatgatgaggttgttgttgttgagaatgaacaaggcaagaaggttgttgtgaatgaaccagaaaagaaggtggtggttgtgngttgtgaatgagcaagaacctacgaagattctgaaggaacaagaacctaagaagattctgaatgaaccagaacctaagaggggttgtgagtgcccacatgcgatttcatcacagaaatgaaagaaagc

SEQ ID NO: 131823 - DNA, 348 bp, Glycine max
  Clone ID: PAT_MRT3847_90043C.1
cccacgcgtccgtatttttttcctccttcataagtctttaaagaatgttcttgggtcaaagaaaaaaaaaaaaaaaaaaaagaaaaaaaaaaaaaaaaaaaaaaaaaaaaaaaaaaaaaaaaaaaaaaaaaactaaaaaacaaaaaaaaaaatacaacaccccaattttctataagcacatcacattaccctcattaatctaccaaatataaacactatccttagtttaaaaaaaaatcaatacctgaaaaacataaaccagagccacaagtaaaacattttcaataacatgccatatatccatagccaacccatataaaaattattaactttttcataatcttaaac

SEQ ID NO: 131824 - DNA, 328 bp, Glycine max
  Clone ID: PAT_MRT3847_90044C.1
gggctgcgtgggtcggttttaggcagaaccttctgcggttacagcaaaacacggcgagagcgagagagagaaattggtgaagccatggacgcttagatctgttcactccgtcgtcacccgaggtgcctctcatttcttacgacgcgggtacgcctgcgagccggtgccagagcgcaaggtagcctttctcggcgccgtcggcgggatcggacagcctctatcccttctcatgaagcgcacacccctagagtcgagccacatcctgaacgatatctccgggactcccggcgaggccggcgatatgctccacataaacaccatgatctgg

SEQ ID NO: 131825 - DNA, 570 bp, Glycine max
  Clone ID: PAT_MRT3847_90045C.1
ttattcaatgcctacccactgatgtttatttacgacagaaggggacagcatttttgaagtagtttgtgtagacttaaagaagagttaagggaaaaaaataagatgaacactattggagttatgattatgatcatgtctatgttagggttcgcacaagctaataattacaatcctccatttgtgcaagttgagtcaatcagtgagactaatagacttacttgtccacaagcatgcagagtacaatgtgcagctttagcaccagttgaaccatggtatgacaaatgtgttaaagaatgcactgcaaattgtaagcatgatgtgtccgttgctaaggattgctttactagttgtgccttaatcaagtccattaacatcaacaatgatgttcgtgatctttcgaccaatattgtgatgaattcctgcttgcaagaatgtcaaaacaagaaataagttgttacaagaatcttcaagaaaaaggttgttaattgtaataaaataaattttaatcaataagtaatatctatttctctaattgttttaaaaaaaaactcgagactagttctctctctc

SEQ ID NO: 131826 - DNA, 264 bp, Glycine max
  Clone ID: PAT_MRT3847_90046C.1
atgatcattaatttctatttaaagttaaattattatcatcaaccatccaaggggttaagacgaaaggggcaagtacttccctctaatgcgtattaggaagagaacacaaggaaggttgatgattatgaagtactctattaagttaaattattatcattttgagcatgctctctctctctcacttggtccacatcaatagaattgaatgtagtgtcattattcgggtctaaaaaaaaaatcataattatggtcgtgcgtcggctt

SEQ ID NO: 131827 - DNA, 266 bp, Glycine max
  Clone ID: PAT_MRT3847_90047C.1
gcaaaacaggcagcagaagctgccaaagagagaaacaagcaggcaaataaagggaatgaagaaggcagaagagaaagaggaattggtgggggtgttcatcatgatgctaagtttgaaactaaaggtgaaaaggagaaggatttagtgggaacagagcggaacaaagaggagatacaaagaactattccaagaggaaaagtagaggcagatatagcatgaccgatggtagaaacaaaggtggatagctaaggaagatcaatggatgt

SEQ ID NO: 131828 - DNA, 174 bp, Glycine max
  unsure (1)..(174): unsure at all n locations
  Clone ID: PAT_MRT3847_90048C.1
gctcgaattcgctgggagggtggaaagacacagaaggggaagaacaaacctgcattaattctagtggcctgcanggatctanttggtggattnataanctcattgggagagggaggaattactggaaaatcaccaacataattcatgctcgcctgacactttaaacaagtcttt

SEQ ID NO: 131829 - DNA, 524 bp, Glycine max
  Clone ID: PAT_MRT3847_90049C.1
atctttttagttttattttaagaattctgtatttgatttgaaaggtgaaaatgttgcaagagtatggtattcatgaagttttctgagatctagaaataggtggcgatattagtgacgattgtgtctttctcacgcagaacttacattagtcattagacccgacacagcacaattgtttgcggagtaattggtgttctaaaatctaaagtaaatatcccacttggatattttgggggttgggtcatgagacgcgtaaagtatctcactccttctctatgtatatcatacgcgtgaccaaagtgctaaaaaaagtgccaaggattatcctttccttcttttaaatatgcttgttttattgtctttccttcttttttaacccatgcttgtttgttgtaatgccttctcttctttttaatctgtggtcttccaactttattctctacgatcggttggtacttaatgctagaagcctagaaggtagaagcaactcatggattatgtatttagaaaggtattaatgggac

SEQ ID NO: 131830 - DNA, 249 bp, Glycine max
  Clone ID: PAT_MRT3847_9004C.1
acattcttttttttattctaacttctatctttttttatattttttttttacttcggaaaaactttgagggttaacgacttgaattcaatatgattttgttaatcaaaaattttgggatttgaacattacttatacaaaattttataggtttcttttttaagtaaggatttcactagggttaaaaataattaattaatcaaagacgtttttaagcaagctttaaaaaaagcttgggagccaaatcaggct

SEQ ID NO: 131831 - DNA, 247 bp, Glycine max
  Clone ID: PAT_MRT3847_90050C.1
cttggtgtggaaaaaaaaaggggccctgggatatatatattttggggccgtttaaatataaaagccacataggtgttttaattttaattctctataaaaataaaccccaggttctcatgttcaaggaaattttaaaacattctctaggaattcccacactctttaaacctttccccacaattttagttttttggttaaaatttattaccacaattgcccttgaaaaaaatttttatgtctttttttc

SEQ ID NO: 131832 - DNA, 387 bp, Glycine max
  Clone ID: PAT_MRT3847_90051C.1
gtcttgttaccttgttattgtttgtttttgtgtgagatcctatcaggaacttttagtattgggaggcactggagtttttgcggacaatttgtttgttttttttggggggggaaaactccccccccacaattttggggggaccattttttaaaaagaaagattctcctaagtgtttaaaaaaaaaaaatcattcttatgcgggatgccaagaacccctctgagatttaaaaaaccaattgtcgaacacccaatgatggaatgcccacccctcacaccccctggatgaattagggggattaaaaacccccccctttctgttttctcccccccccgggaaaagaacacggaccaccgttttgccttgtgggccgggggggtttgcagaaa

SEQ ID NO: 131833 - DNA, 729 bp, Glycine max
  unsure (1)..(729): unsure at all n locations
  Clone ID: PAT_MRT3847_90052C.1
tccggaattaccgggtcgacccacgcgtccgatgccatcaaacaattgtccccggacgaaattagggtatgacaacccccaaggtattgggctgaggcaggccaccaaatgctggtcccttagcgacatatgcagggtaaggctcgaactcgcccaatgcatggtaccggggctcttcataggcctctcccataggttaagaaaagggtgcatgccccaactagggttgttggctttcaaggaaaatgggagcagaatggttggcgttcttgccgagcacatgcactgcattgggtggtgtatagttaggtggcaagccgtatagtgggaaagaattcttactttgcataacatggggaccggctgcacttcccaacacttctcctccctaacctaccatgtctgggactggatgacttatttggtttatgtcggatgggtgagtcgaatccgccccaacggcagcgctggtggtggcgactgcgaccgcattgtcctccattatccttcttatactcaacatggccttcatcatggangtcatttggtccttcatggcctccatgtcggccttcatctgctcttacacctcctctatttcactcatgantntggttttcccacgtgtttggtagggggtgtcgtaaagcgcattcgttctttttgttantggggttactgttctactacgactgttaaaaacaaatgcaatgagtaatgcacaatgaa

SEQ ID NO: 131834 - DNA, 2082 bp, Glycine max
  Clone ID: PAT_MRT3847_90053C.1
cgcgggccttagcgagaagacgacagaaggggatggtcagtagtaggtaacttgttttctcttcctcgatttgatcgatcgttccttctctctcttgtgtttatgccaggaatgacagcgtatcagtggcagtgcaggaaacgagagggagagttttcattgggaaggtaaaagcctttgtttgtagcagtgccttacatgaaccctcgccccccttctcttgttcgctaccactaactcatcgttttctcagtgtgccccgcgtgcgttctgctgtgtcctctcactcacaggtgtaaccgtgtaaccactagaatcatacttagtggcatggaaagaaagaaagaaagattaacctaaaaaccctgtgcaggctttcccagaaaagccaagtgagaaaaccaaaccctctattaccacttactacttacttcatgtaactgactatagccaccactatcactatttaggattttctgtaaaaagcctgatactcttttaccataaaacccgggagagccctcataataaaattgagagagagaataagagaattgtgtgtcgtgtttgtttttgtttggtttgttgtaaggttagctagtgagtattctacacaagggtggtggtagggcaaaaaggataagacagtgaatgtgtgtgtgtgtgtgtgtgtgtgtgtgttgttgacaagcaaaagctatggagggtggtagtagtagctctaatggcacttcttatctgttggcttttggagaaaacaacagtggtgggctatgcccaatgacgatgatgcctttggtgacttcccatcacgctggtcatcatccaataaatcctagtaataataataatgtaaacacaaactgtctcttcattcccaactgcagtaacagtactggaactccttctatcatgctccacattaatcacaacaacaacaaaactgaagatgatgataacaacaacaacagtggtgtagggtactatttcttggaacttgtccaccaccaacatcacgagggaaacaacaccaacagaggacgctcatcctctgcttcctcttctgctgccaaggccaagatcatgtctcaacctcactatcaccgtctcttggcagcttacgtcaattgtcagaaggttggggccccgcctgaagtggtggcaaggttagaagaagcatgtgcttctgcagcgacaatggctggtggtgatgcagcagctggatcaagctgcataggtgaagatccagctttggatcagttcatggaggcttactgtgagatgctcacaaagtatgagcaagaactctccaaacccttaaaggaagccatgctcttccttcaaaggatcgagtgccagttcaaaaatcttacaatttcttcctccgactttgctagcaatgagggtggtgataggaatggatcgtctgaagaggatgttgatctacacaacatgatagatccccaggcagaggacagggatttaaagggtcagcttttgcgcaagtatagcggatacttgggcagtctgaagcaagaattcatgaagaagaggaagaaaggaaagctacctaaagaagcaaggcaacaattacttgaatggtggaacagacattacaaatggccttacccatccgaatcccagaagctggctcttgcagagtcgacaggtctggatcagaagcaaatcaacaactggtttattaatcaaaggaaacggcactggaagccttcagaggacatgcagtttgtggtgatggatccaagccatccacactattacatggataatgttctaggcaatccatttcccatggatctttcccatcccatgctctagaaaattatccctcgtttgtgggctgctgataatagattcataaactcgtgctgtcacttattaaaaccttacaattattaatattaattaatatgcattctaagaaatcctagattgctatactataatatagtacgcaaggtgtatcccttgctagctttttagacggtcctttgtgtggatcatctagttgaaggagttatgaataaataaaattccataaatttaaagtttttaaaaacc

SEQ ID NO: 131835 - DNA, 463 bp, Glycine max
  Clone ID: PAT_MRT3847_90054C.1
gtgggggggcccaaccccaaacgaaaaattagttttttgggggggcccaacctggacgggcggcaataatccttttccctcccacggggagaaccctcttatcccccaacgggggggggctcagttgggggaggaggacccaaaaccccccgtttaaaaccaatcccccaaaaaacccctgggggtcccaaattccccaacccccaaaaaaaaaaaaacccgttttaaaaaaggggtttccaccccccggggttctctaaaaagttttgggggggcatccatttcccttgggggggggccacctttcccaagggcaagggaggggaaatccccaaaaaatttggggttttacccctcctttgggttgccccaaagcttttgaaaattttttcccacaatcgggggtgtggggaatcaccttaaacacctccggggggggaaccgcccccccccaatttttccc

SEQ ID NO: 131836 - DNA, 1351 bp, Glycine max
  Clone ID: PAT_MRT3847_90055C.1
ctcgagccgaatcggctcgagtggagaaaacagtggtgggctatgcccaatgacgatgatgcctttggtaacttcccatcatgcaacaaatcctagtaatcctagtaataatactaataataatgaaaacacaaactgtctcttcattcccaactgcagtaacagttctggaactccttctatcatgctccacaacaacaacactgatgatgataacaacaaaaccagcactaacactgggttagggtactatttcatggagagtgaccaccatcaccgcaacaacaacaacaatggaagctcctcctcctcttcctcttctgctgtcaaggccaagatcatggctcatcctcactatcaccgtctcttggcagcttacgtcaattgtcagaaggttggagccccaccggaagtggtggcaaggttagaagaagcatgtgcttctgcagtgacaatggctggtgatgcagcagcagcagctggatcaagctgcataggtgaagatccagctttggatcagttcatggaggcttactgtgagatgctcaccaagtatgagcaagaactctccaaacccttaaaggaagccatgctcttccttcaaaggattgagtgccagttcaaaaatcttacaatttcttccaccgactttgcttgcaacgagggtgctgagaggaatggatcatctgaagaggatgttgatctacacaacatgatagatccccaggcagaggacagggaattaaagggtcagcttttgcgcaagtacagcggatacctgggcagtctgaagcaagaattcatgaagaagaggaagaaaggaaagctacctaaagaagcaaggcaacaattacttgaatggtggagcagacattacaaatggccttacccatccgagtcacagaagctggcccttgcagagtcgacaggtctggatcagaagcaaatcaacaactggtttattaatcaaaggaaacggcactggaagccttcagaggacatgcagtttgtggtgatggatccaagccatccacactattacatggataatgttctgggcaatccatttcccatggatctctcccatccaatgctctagaaaagtatccatcctttgtgggctgataatagattcataagctcgtgctgtcacttattaaaaccttaagcaattattaattaatatgctttctagtgctcatataagcattctaagaaatcctagattgctatatactatatttatagtacgcaggtgtatcctgctagcttaaagagacggtcctttgtgtggatcatctagttcaaggagttatgaataaataaaattccataaatttaaagctaaaaa

SEQ ID NO: 131837 - DNA, 146 bp, Glycine max
  unsure (1)..(146): unsure at all n locations
  Clone ID: PAT_MRT3847_90056C.1
cncaataatttctgtctttagatataaatnatanaaagananaaagantaaataanagtngaggnggagggtgtaggtttggttgatttgattgtngtgcatccatcgttaagccagtggcgatcggatccagctacagcatagag

SEQ ID NO: 131838 - DNA, 512 bp, Glycine max
  Clone ID: PAT_MRT3847_90057C.1
gaaaaacatttgttttttttactgtggtaagaacagaaactttgttactcaatataaagcatgtgaaatttcttacaacagttttgcatggacaattataagtgctgatcaacaatgtagttgagaacatagcatcctttttaggcaaaggaaagaaccatgttggacacacaaacatgaaacaccacaaatgagagatggaaactggaaactagtccaaaggagaaaatggacatagtcgcacataagtatcaaaagaaatcaatatctaaataattacccgaaggcttcacaccaagctccttttccgtttgagcaagcttcataacctgtcttggcacctctggaggatttgcacaacggatcagtgcccagttaacattctgaaagaatggatgctgttttatctctgtcgcaccacgtctataggcaagacgatgctgaggctctttcacaagcaagcccctgatcaagtccctggcagcaaagctgacactaggagattctggaaa

SEQ ID NO: 131839 - DNA, 372 bp, Glycine max
  Clone ID: PAT_MRT3847_90058C.1
aaaaaaaacatcttcgcccttcaatacccaaaagggtcaacccaaaaccattttttcaattacaaatcctatcaaacaaaaaaagcgtactactgattaaaatctcaaattgggacaaaaaaaagtcttaaaaaaccgataaaatagctaattcaaaagctaaggaacttggggacacccttgggaccctcaaaaacggggggcttggccaattcaccgggcagcacaagcctaaccgggggctgaatttcccttaaaaggagggggggtttcttgttgtaccgggcaagtctaaaaaattcctggccaagcttctcaaaaatgcggttgataaagctggtcatgcccttctggcgtcttttcccagccgta

SEQ ID NO: 131840 - DNA, 313 bp, Glycine max
  Clone ID: PAT_MRT3847_90059C.1
ccaacccctttattagggggggcaaatatttaaaaaccttttaagttttgggggtttacctaaaaaggttaaaaccttccctggattaaaggggccttaaaattaactttttttccttccggcaaaaaaaaaaacccttcccttaaatgggcaaaattttttacccggttgtttttggtccaaacttcagggggggatgggccaaaaaaagggtggcttttttttgattaaaagggggaataaccaaaagccggggggtttaaactttaataaaaagccccgtccaaacacacgtttttttaaaagggttggg

SEQ ID NO: 131841 - DNA, 470 bp, Glycine max
  Clone ID: PAT_MRT3847_9005C.1
gatcctctatatcaatctgtttcaaaccataggcttcaccatttatatgagccatgctttttcaacaatggaatgcttagctcctctttgggggggcgcttatcgtaaatactcagacagaaaaaacaaaaatgtcactgtcgagagtataattgtacccttagtcgagtagctctaggacatgcatactttcatgaaaacgatacacaaccgcaactagtagcctctcaaccggcggtgtacatttatcgctttcggaattcgcgtgattgccgacatgtgtacttttattacttatgcctacctacttgccgttaatgttatttatatggctacaacttagatagcacatgttcattctaaatttattggaaaaatctccataaagcacccacttgtgaagtactatatttataccatatacctacctcattgtgatcttataaaacattcacataaaattactctac

SEQ ID NO: 131842 - DNA, 374 bp, Glycine max
  Clone ID: PAT_MRT3847_90060C.1
gggtagaaacatatagaactcactattaaatgctctagtcttatctctagatcatcatctggaggtttccagtaacatggacaatcacctaacaggtatatcaactatagacttcaagggtttcatatttaagttaatcataatggagtcgggttaaaaaatttggaagagctttgctaacagatgctagtgctcctagataaaaattattttttttaaaaaaaactagactgaaataataactagtgaaaataaaaataaaaccatttccttcgtgaagtattaaattgtaaacgattatgcagaatctgtttcttatcttagggaaaccaagttaacagattgcacctacatgctgcacataattggttttt

SEQ ID NO: 131843 - DNA, 290 bp, Glycine max
  Clone ID: PAT_MRT3847_90061C.1
gtcagagtacacactcgcactttgacaaggctaaacaggggtttgggggtggcatatgcacgtttgcgcaaacacagcgcgctctcatcctttggtaacgcgcgttccaaatggtgagggggatttggcgaacctggatctaacttgcccgctcgaacttgtggcttggatatacctggttcgaggaggcattacttgttgacaagtgcgcagtcgtgaagaccacctctttgttctgcctcaccctgctttccaccaaaacacacgccattctagctgggtttctcatt

SEQ ID NO: 131844 - DNA, 282 bp, Glycine max
  Clone ID: PAT_MRT3847_90062C.1
acgcagacgcgtgggcggacgcgtgggttccattggcacccacttttgaatatattactattggttctttggtacttcacttgcttccatacacataaccatgtcttctcaggtcctcaacccaatgcctccttctattcttgcctttagcacttcactcagttttagtgcgcttgatcattgtcattctgggtgctgtactttattcggctaatgttgcttgatatgggtctctgctctaagcgtatgtgctgaacttgatgagctcccaagttgattgag

SEQ ID NO: 131845 - DNA, 157 bp, Glycine max
  Clone ID: PAT_MRT3847_90063C.1
acttcttttttgttacccctcactacaggtagagaaatccggtgctcgagggccgactgataaaatgctgatgtgtgctcagcccgacgatgcgaggctcaatgatacattgacgcatcgcacggcctacgggccggcgaaacataacacaggtctc

SEQ ID NO: 131846 - DNA, 763 bp, Glycine max
  Clone ID: PAT_MRT3847_90064C.1
cccacgcgtccgcccacgcgtccgatatatttatcttttcttggaagaaggaatccaaagaatggcaatgcacaagagcagttcaggttcagcattgggtccgggaggcttggacttaactcaagccttcttcaagtcgatcatgaacgctgcagcttcttctcccaccaaacgccacaacaaaatctctgttgttggggcaggcaacgtgggaatggccatagcccaaaccatcctcactcaggatctcaccgacgagcttgtgctcgtggatgcaattcctgacaaactccgcggcgagatgcttgacctccagcacgccgctgccttcctcccccgcaccagaattcaggcctccaccgattactcggtcacgctgggctctgacctctgcattgtcacagccggggctcgtcaaattaatggcgagtcccggctcaatctcctacagaggaatgtcacactctttcagaaaatcatacctcctttggctcgttactccccagacaccattcttctcatcgtttcaaatcccgtggacgtgctcacttacgtggcatggaagctttcagggttcccttcaaaccgcgtcattggctccggcactaacttggactcttcccgttttcgtttcctcattgctgatcatcttgatgtcaacgctcaagatgtccaggcttttatagtgggggaacatggtgacagctcagtggctctgtggtctagtattagtgtgggggggtgttccggtggctgagttttt

SEQ ID NO: 131847 - DNA, 425 bp, Glycine max
  Clone ID: PAT_MRT3847_90065C.1
ttggtagataccaggcaaaaattggttgtatctgataataaggtccgtcaattggaagctcaagtacatgaagagaagcttgccaatgaaaatgaaatgaagaaagtagaacttgaacaacaggaaacaagaagattaaggaaagagcttgagagcgaaaaggtagatatgaaaatctcatgtcattgaatacgaaatttgttttgatatgaaggtgtttttattggaatgatgtctgctttacatccaggtgccatgctaatgttattttgactagattacagaataagttattgatataacaaatgccttgactttaactgactaaatactcttggtccaaagaatgaagaaaaattttatagtttatatgctgcttggctctctaattagttttttttttggtctatatcttatcctctttt

SEQ ID NO: 131848 - DNA, 401 bp, Glycine max
  Clone ID: PAT_MRT3847_90066C.1
gtttttcttttttgtaaaatgcaagtaacatcaagttggattcggatactcaagaggattcacattatctgaagtactttaccaaacacatatctaaaaactctcaaaagacatttcgttctttgacgcttactatccggcgactaagttgggggcataggcccaggcggtgttgttgacagggtcagtcaggtgatcggcgaggttctcccatggacccttaccggtgacaatggcctgaacacagaagccaaacttggagaacatggtcaatcgttcgaccttgagtaccttgaccttacgctcagcaacagcctgtgggtcatcaattaggcccaatgggtcgaagctgtcaactgggtagattgggtaagtgactctcccgtgggggccaccagcta

SEQ ID NO: 131849 - DNA, 268 bp, Glycine max
  Clone ID: PAT_MRT3847_90067C.1
gtgccagtgccatattgagccattcactaagacatggaagccagcgctgaactggtcgatgggtcacataaccggattgagctagatgtcattcatgggcatgaacagcccaaggcttccaataacttggatgggcaagtgagtcagacttgtggagatagcgtgatactcacggtgaatagaaacatgcctgcggcttgcaatgaacgggggtatgcagtgtgcatgccttgctatgagtatgaaaggagagacggaagccaccttt

SEQ ID NO: 131850 - DNA, 446 bp, Glycine max
  Clone ID: PAT_MRT3847_90068C.1
ggctcgaggggaaagttgttagaaatcaaccaaaaataaagcaataaacaaaagagtatgggttcttagtcaaattagtagtcatttgataagtatgggagacataaaaatttatagaaatcacttaaataaaagatgattaactctccccccccccccccaaaaaaaaaaaaacagacatgcacttggacatgttgaaattttaagggtgttttataacactggctgaaattccatactgagcttttttttgttgaaaaatttgagaactgaatttctagtaagaattgaatttggagctttggaaatgatcctcatttgacatcttgaaagtgtattgaaggaaatccggaaagtattgtcatttaaaaaatgaatgatgatgtgttgaagaggctgcagaagaatataacttagtccatgaactaaatggttatatctttttt

SEQ ID NO: 131851 - DNA, 424 bp, Glycine max
  Clone ID: PAT_MRT3847_90069C.1
gcgccgtctctggctcgcgtacgtttattccttaattgtttttcccccgtacaagcacaagcaaagcatcattcccttttctatctgcttccttagcgaagcatcaacatcccccggcgcactagagcgccataggttgctgcacgcgggtggtgaccgtctctctttaattagcgtgtgtagttccatccacagaagcaacagcctctctgggagctttcttaactattctgtgtccgaacagaacgggggatccgtcatatctttggtgaaatattggctaatgtgggtgggacagtcatctatgaacaggcgcactccttccagagatcatgcaaacgtggaggagatggaagaaaactgagatcttttagacatcggcctggacgaggcaacatcaaatccttcatagatggtttgttta

SEQ ID NO: 131852 - DNA, 373 bp, Glycine max
  Clone ID: PAT_MRT3847_9006C.1
ccctcccttttctgttgacacaaagcgcgggtataccctgttctgtgtgagcagattgattctgatggcaaacgaatcatgtactctctgctctcttatgtctgtcaaaactcggtccgcctgaaccacctgctccagcttgacacccaccaacaaaacttccgtggcactttccctccggggagggaagattgaccaggaggacaccttctttcaaataagaaacatgcttctccaagctgggggcacgattttaaccactagtgccgggacgaccaggtgataggaaactcttatttagggagagagacgaaaaataggtcactgcaagatcctttatgtttacaaggcttgacaataccgtgaagtcatt

SEQ ID NO: 131853 - DNA, 417 bp, Glycine max
  Clone ID: PAT_MRT3847_90070C.1
tggttggactttggctgtttatgtgctgctggtcgtgagaagatgatagaaggggatatctaaaatgaaataaagaagaaaaaaaaaatctaaatattcctaagaatccgcactccctcccgccagcacccgccatcataaccccatacctcccctactctcatacaccctaccagctacggtattctaagtagcccttcctaagcttcctgttgccgtctccaccgcggtgtcccctcctcttgttcttgtctcggatccagccctggggtagctgttggcgttggtgttggtgttggtattagacgttggagtagtcggacttgcgctgagtctggctgttacgaccggagtccttgccgcgaccctaccgtctgttactcctaagtatcgaaaaacaactcgacgacggactga

SEQ ID NO: 131854 - DNA, 493 bp, Glycine max
  Clone ID: PAT_MRT3847_90071C.1
gtacaaagaatagggtttatatctgctgattatgttgagtataacaagtggcactctccagagcaaagctatccatgccaaaagaggcctgagcctcaatgctggcccagttcaataccataggtcgaacgacctaaagggctaaacaaaaccaaggtatctgtgccagctccccctctgcccgatccaggaagaggagaaggaaggaaacttggaatcgctattccttaatccgagtgggggggaaaccccgaaaaattgtgtgagaggttcatttgaaaccatactatcaccaacattgcttagcccttaaagtaccaaagcctgtttttcctgaaacagaagtaaaactaccaatcatttatataaagggcgtgtacctaataaatagctctaccagggtaaattcttaatggtaagggaccctctaggatgcaatataactaacaaataaagcttgataattcagtgtcgcgcccattgaatatccttg

SEQ ID NO: 131855 - DNA, 325 bp, Glycine max
  Clone ID: PAT_MRT3847_90072C.1
gcagttgccacctataggagatgatatactggatctagttgtgattggttgtggtccggctggtcttgctcttgctgctgaatcagccaagttaggactgaaagttgggcttattggtccggatctcccttttacaaacaattatggtgtgtgggaggacgaatttaaagatctcggacttgaaggttgcattgagcatgtttgtaaggataccattgtctttcttgacaataaggaccccatttttattggtcgttcctatggacgtgccagtcggcatctgcttcatgaggaattgttaagaagatttttgattcatattaat

SEQ ID NO: 131856 - DNA, 258 bp, Glycine max
  Clone ID: PAT_MRT3847_90073C.1
ctttgataatctgcttaataaaggtttgagttaaaggattacgatgatttatgcagattacccaggtgaaactccaattcttattggaacctatggaactatatctaagcgtcacacttgaagttttgtgctatttacaaagaaatctcccaatatttgttgggtgttgttagttattggtacttttaatactcttattggaagctgagaagattgggaagtggaggaattggggaagggggctcgtgcttatatttg

SEQ ID NO: 131857 - DNA, 379 bp, Glycine max
  Clone ID: PAT_MRT3847_90074C.1
gcagaggtcgcagttaaacaattgaagcagagggttctccaatttagcacgattgaaacagaggacgaaagaagggttctctcttatttccaaatgcagcagcggcttcttcttccatttttgtgcatcggtgtcactaacggcaacatatgttgcaatgaagcccacaaagctcggcttggaaaagctctggggcagatccgcaactaacattcaccctttcctcctagcacgtcaataacctcgagaagggtttgtgcggactctggttcacgatgcaaagggcaagcggctcaagggttaaggcacctgtcaggaggtcatctaatctgcaatccttccagactttgggtgactcatctaatctgcacatcactac

SEQ ID NO: 131858 - DNA, 463 bp, Glycine max
  Clone ID: PAT_MRT3847_90075C.1
tttaaaaagacaaaagctagcaaagttgaattagtattacagacatctcaccaaacaaaaagcccttcaagcatgttgatgcgcaacaagacattgccttatcaaagagagaaaaacacaactagtataacgaatcctaaaccaattgtaatttttatttatcttgcgtacataataacaatattaaatatgaaatatgtagaataaatcaatatcctcctcaagaaagcatgttgaaggcaagataaatatcaaacgagcgttttgcatgtagacgtgacggggtcccacatcgccggtaacagaaacttgcgaccgtgcaaacccaacgcgttgtagctagctcccgttacgttatccaccaaaacgttacccgtgtaacccggatacgccccttttccgaatatgccggagcaagccgacaccgcctccagtggcgccgtcaccgacccttggtagtacc

SEQ ID NO: 131859 - DNA, 265 bp, Glycine max
  Clone ID: PAT_MRT3847_90076C.1
acaccactgataacagcttatttatttttgtataagggttacaaaaacagacctgtcccaaataaataaaaaatgaaggggggggcagttttccggagacatacaagatgaaaatttggataaatcacttgcttggccaaattttccatgaaattgagatgaagcataaaaaaattttggtgaaaactagttgcggttccagtgggttctgcgcctgaaccagttgtaattaggcaaaccctgaattggtcccatagcagcaatt

SEQ ID NO: 131860 - DNA, 576 bp, Glycine max
  Clone ID: PAT_MRT3847_90077C.1
tgcatgcaaaaccatgtatgcccaagaatagcatgtgaaagtgcatcttaactttgatggtcctgagattttgtggactaataaattgacatatacagcagttttgatgtgatcttgctggaaaaaaatttcctggtagtggaatcagtggtagaagtctgaaacatgtcagaaacttagaggttggaactcttaagctcagagctggaatctttctgaaacaggccaaaaatgctccatggtggagactgaaacgcagaaagaaactcggagaccagaatttgtctgaaattttaatgcatgacaggtgattatttcttgtagaaaacttggagctagaatttgtttgaaacatgctggaaaaaatgcacagtggaggatatcaaaatcttgagagaaacaagggtcatgaaattgtgtgaaacacgatagtaaattcacgtcagaggagagttctggagagaaacacaagtgttagggcacatcaaggatattacaatggtggacaaaacctgtgagagagatggtcagactgaagaacgcaaccaagacatggcaatggtgaccaaatgccag

SEQ ID NO: 131861 - DNA, 1142 bp, Glycine max
  Clone ID: PAT_MRT3847_90078C.1
ggtccggattcccgggtcgacccacgcgtccgatgtgtctcactttcatccatctggattcttttgagtggttctcttctctctccccctaacttctaatttcctctttttcccttccccacacccaaccctaaccctaatcacaaaaattcacaatcccttccattttccaaccctattaacaacaacgccctcgcttaaaaccctaactccgacactccccaagatctcaagctcctcttctcgattccgcaaaccctaacaatggactcgcagcagaacaatctattcgagaccgcttcgcaacccgacaccggcaacgacgcctacacctttcttgaattcaacacgcagggcgaggatttcgactaccccgagttccgcgacccgattaggtcgccggttgcctggcccacgccgtccgattcgctagcggacccgttggagcgcggcggcggcgggggaggcggttctgatcaccagtctgatgcctcgcctgtctccgcggctcccgggagtgccacaaaggggggccggtcggggagcggcggcgggaacagcagccagatggtggatgcgcttgcggcggggatgagcgggttgaatttcgaggacactggggatgatgataactatgagtatgggaaaggggatttcaccgaacacgcttgccgctattgtggggtttccaatcccgcgtgtgttgtgaggtgcaatgtgccttcgtgtagaaagtggttctgtaattctcgagggaacacttcgggatcgcatatcgtcaatcacctggttcgggctaaacacaaggaagtctgcctacacaaagatagtccgttgggagaaacaattctcgaatgctacaactgtggatgtggtaatgtgtttctccttggatttatttctgcaaagacggaaagtgtagtggttcttctttgtcgtgaaccttgcttgagtgttaatgccttgaaggacatgaattgggaccttagtcaatggtgccccttgattgatgataggtgtttcttgcagtggcttgtcaagatcccatctgaacaggagcagttaagggctcgccaaataagtgcacagcaaataaataaggtggaagagttgtggaagacaaatcctgatgcttcttttga

SEQ ID NO: 131862 - DNA, 666 bp, Glycine max
  Clone ID: PAT_MRT3847_90079C.1
atgctacggatctttttcaaacgatctcatctgaacagaggtttttacaacaagtcaaatttaaataataaataataattgatacttgtcatttgtcaatgcttgaaaaatattttacttgtaatcatgtggttccccagccaaagtgaacaacacgctaggtagctaatctccgaaacgttgatttttctttttttatttttataagtgtcacaatagcacaatttgcagacagtcacatgggctttcaattcctctagcacgcaaccacctaaagctaaaagacaatcaattcttgtattaatgatcctcgtcacctcatgcggcaaacggacactcatctcttaagtacagacgcacgcaccaatccaatcaccatatgtttcttttcaaaacgttatcctgttgaattttacctgcattaataacagaatccatttgagccaagcattacagatggaattgcaatggctctattttattcacattaatctgcatttaagccatcagaggatagaacattactaagaacgtatgtaatcaaaactgatgatattttcccaatagccaatagtatttttttcggggcattttatgagtaaacaagttctgcccaggtattggcttttcttatgaatatgtattaatcacccttgattaagttag

SEQ ID NO: 131863 - DNA, 1479 bp, Glycine max
  Clone ID: PAT_MRT3847_9007C.1
gcttcgatctcgaaagcgtgagaagaataatatcaggattcgtggagaaagaaaatggcaacgcggttttcaccacggccgagttcaaagagccttgctccgctgcgatgcagcgcgtcgtgaaaaccgtcgatgcctacctctctgagatcgccgcatacggcgatctcagcatctcgaagttcaacggcatcgctactcttattcctaaaagcgcgcgtaagatcgacgacgatctttaccgcgccgttgatatctatctcaaggcgcatccacagttggatgagatagagagagagaaggtgtgcagcgtgatggatccgttgaagctttcatacgaggcgcgtgtgcacgcgtcgcagaacaagcgattgccggtgcagattgtgctgcacgcgctttactacgaccagctacggctgaggagcggggcggaggagcgtgaagtggcgacggagaagaatcagcttcagatggacgtgaccttggtgagggagaacgaggagttgagaactgaactaatgaagatgaagatgtacatttcggatttgcagcagaataagaacactaataatggcgcgaaccctcaggggcatggaacgacgtcgtctgctgcgaaccctaaccctaagaaggccacgttcttctcttccgtgtcgaaaacgctggggaagttgaacccgtttagaaacgggtcgaaggatacgacccatttggaagatgggaacgtggatttgaccaagccccgaaggagaaggttctctatgtcttagaccaagttagaattgaattaaattatgagcatattaattatgcgaggttcatcacggtttctttcttcttcttttttattttttttgtgtttgcaatttgtgtcgtgtatgtgcagaattcttatagttttcaggctacgtgcgtttgttagtgatcatgaatcatgccaatgttcatgatactgggttctgttctgattcttgcgaacttctcatcatagtgtgtaaattaattgtttaatacactgtgtatatgttattaaggaaaaaaacttttgcagccactttatacactttttattatacttgtagtatgaggaatgaaagaaagagattaatgaataaataaaaaaatgctaaatcactaatattcaattcaaaatatatatattatatcatgtacaaaaaaaattacaatatattatttttttttaaaaagatatccttataataaaatgtcattgagtttcaatattttcctttaaaaatgtcgaatgatacttggaatgataatgttcatatatggatagggtggaaatgagccgagccaagctcggcttgagttgaatacataaaagtttgacttggcccacgagcctatttaaaagcttgtttaaagacgtgtttgattaattaattattttaaaacttagtgaaatactaactaaaaaaatcggacgcgtgggtcgacgcgggaatccggacc

SEQ ID NO: 131864 - DNA, 1026 bp, Glycine max
  unsure (1)..(1026): unsure at all n locations
  Clone ID: PAT_MRT3847_90080C.1
catgacggaaatgcgcgattgtatgcggagagagcgaatatgcgcacgcgacgaaaacaaacaacccaaacatgtcttctcttcgaaacgccattcccaggcgtgctcacaaagagcgttctcaaccgtcgtcgaggaaaaaattcggccttctcgaaaagcacaaggactatatccagcgtgctaaagcattccacaagaaagaagacactttgcggaaacttagggaaaaagcagcgaatagaaatgaagatgaattttacttcaagatggttagaacaaaaaccgttgatggagttcataaaccagagagtgaagcgaataagtatactcaggaagagcttatgctgatgaagactcaggacatgggttacattcttcagaagattcagagtgagagaaataaaattgaaaggctaactgccccactgcactctatcgataatcagccggcgaacaagcatgttttctttgctgaggacaggtgtgagtttctgagatatcattccgtgaccagcgttgattcctttttttttttaaatgttaatatgtagtatttganttggtgtacttagacatgaaaatttgactggttttggttatgcaaaatttaaaggatgatatttccatcgtgcattaagtctgacgatactgcttacccaaccttttagacggtatacaattggtgttataaaagaatgggatgaatgagttaataattctgaggttctttttttctttttcacaattttgcataatgatttaatactccactgggttggatccggagttgaagaatttgcatgtcttagatgaagcaccaacattgctagctgcagcatcgaatgtcttacattaagtgggatcactactgttgccaacaactgtcgctttcttgtttagagttcctttatcatgtaaccattttctttactctgttgagtattcttccttgtaccttcgatgttctgcgactggattttgtaagtcttataaatatattcaatttttgttattttatcgggt

SEQ ID NO: 131865 - DNA, 1230 bp, Glycine max
  Clone ID: PAT_MRT3847_90081C.1
cctcgtgccgcggaatgtaatggtgggtcggcccgttatatgatgcaacaaacaaacgcagaagccaccaccgcttgcagaggtgagagcgaatcgccgtcgacgaacaccacccaaacatgtcttctcttcgaaacgccattcctaggcgtgctcacaaagagcgttctcaaccgtcgtcgaggaaaaaattcggcctgttagaaaagcacaaagactatgtccagcgcgctaaagcattccacaagaaagaaggcactttgcggaaacttagggaaaaagctgcaaatagaaatgaagatgagttttacttcaagatggttataacaaaaaccgttgatggagttcataaacctgagagtgaagcgaataagtacactcagcaagagcttatgctgatgaagactcaagatatgggttacattctccagaagattcagagtgagagaaataaaattgaaaggcttactgcctcgctgcactctatcgataaacagccggtgaacaagcatgttttgtttgccgaggagagggaagaggctgaagagttagaatcacaacatcaaaaaagtaaaattccacttacttctgaggatattcctgctggcattaagaggaaaacagctcagtcttaccaagagttggaagcaaggagaagtagactcagccaactagagaaaatctacatggatatgacaatgcagaaggagttgcagaaaaaaggcaggaagcgcaaactacgtgaagacgagattgtctgtccaacatctaaaccggtatacaagtggcgtgctgaaagaaagcgatgaaagagttaataatcctgaggttcttttttgccttttcacaattttgcatgatgatttaatactactgggttgggtccggagttggacaatttacatgtcttagatgaagcaccaacattcctggctgcagattcgaatgttttgcatgatgagggatcactactggtgccagcaacggtcgcgttcttgtttaggtttcctttaacgcgccaccatttctttctccctggtcgattgtgtgaccactgtctttgccatcaactgtcgctttcttgtttagaattcctttatcatgtaaccattttctttactctgttgagtattcttccttgtacctctgatgttctccgactagattttgtaagtcttataaatatattcagttttttgttatttgtatcgggtagctgttcttggagat

SEQ ID NO: 131866 - DNA, 184 bp, Glycine max
  Clone ID: PAT_MRT3847_90082C.1
gggatgggttaatattacacctcacttgattaaattaaccgggaaggccagccaactggaactaactcaattcccaattctttctttctttctatcaaacacaatgcgggcgtgttttctttctcctaattgtataaaatgggggacaagcaccagcagcaccaccaagacgacagcagggatt

SEQ ID NO: 131867 - DNA, 620 bp, Glycine max
  Clone ID: PAT_MRT3847_90083C.1
ataacaagaaatggctaattaatcgttacgatcgaattcgcaagaaaattgaatatcacccctggcctgtgttttcagcaaatttcaaacatacatgcaaacatgtgtatatatatatatatatatatatatattaatccccatgcatcttttgtttcttgtttttcaaccgatgggacttattgtagattttaaaatgtcacgtatgagattgacctgtgatattacgagtaccgtaattggcatgctcccacatattgcagctcctataatgaggtacctgtatgccctatatgccttgagtattatagcaagtgcagcacaaaaggcaaccatcatggataccacagagaagagaaggaagacaaggcctaaaagtaacttcaacggcaaccatagccgaaagtctctttcagcgaaacgcgatgtgaggatccaaatgaatatcatcactgaagtggcagaagtgaagacagatattgaatctgctatgataaacacagtaaatgccatgttgtttgagaaaatgggcactccagttttttcatcgtttccacctgggattgtgaaagccccagcgaacaagatagtagtcatcagagtacccccaattgaaaatg

SEQ ID NO: 131868 - DNA, 390 bp, Glycine max
  Clone ID: PAT_MRT3847_90084C.1
gcaaaacgcaagctcatgctaaaggtgtttaaatggcagcagcctcctgcatggctctgtctttcccatccttggctggcaaggccgtgaaactgggcccatcagcccacgaagacatgagggtcagcatgaggtagaccgtaaccaagcaggcctcctcctgaagcccatggaacagtccagaccgcgttaagtactatgggcccattctctggcgagccctcatactacctcactggcgagttcccaggtgactactactcgtacacagctgggctttccatcgacccagtaacctatcacagaaaccgtgagctccaatggatccactccaggtgggacatgctcggagccttgagctatgtcttacccgaactattgtcccgtaac

SEQ ID NO: 131869 - DNA, 250 bp, Glycine max
  Clone ID: PAT_MRT3847_90085C.1
ttgttcagggggcggcacttcctttacactgattgtgaaagaagatgcaaccaacatccaacggctctgattcgagacaatggaaaaatttttggctggacaggaaatcatctttgatgatttatccacttgaagaaaagaaactgcttcaccacacgatgccttctcaacattacgctcctccgccgccgcagccctaattcgtctacgaccaatccctacaacagatgcctctcgcccagtaagcaca

SEQ ID NO: 131870 - DNA, 423 bp, Glycine max
  Clone ID: PAT_MRT3847_90086C.1
atctaatcatcccaaatattttaataattcagcgaaacacatttattagtcacatactgtattttatgggtaaaagaacacatttcattttaatccgctttttgaagattgaaacaagccttaaaaaagcagtgaaaagtttcacatgactggatttgcattaatgttttttaattttttcaatatacaaattttcccagaccatgttagcattcattgaccgaggaagggagagacatgactgcaatcagcttaactgttccgaaccccattgattttttaatataagattggttttacaattaaagcattcagaatctggttttcatgttttttcccgccctaagttgattaagttggtccctgaacaaaacagcatctttttagggtttttcaacaacagctttcaacatattgtgtaaa

SEQ ID NO: 131871 - DNA, 494 bp, Glycine max
  Clone ID: PAT_MRT3847_90087C.1
ggctcgagcgactgtgcccattgatctggacagcgcctgctttccggatatgtagaagaacgacgtggcactcaacaccaaccacatccccgtcctgaccaacctgaacaacatcacaaggctgagtggacccgacttttcgctcgaaccttacttcatcgcgaaactccatagcgatctggatctcccagacatcagccattcgctactttatctttgtgactgttagactatctactgcttaccgatgctgtgatcaccgtttgatcggttatgagcgaaaccttggacaaggctcacaaactgtgaatgatgcaggcgcatcagaggatgcatcggaccataccatactcttgctgaatacgacagatgatgctaaaactgtctacgtctgaaggctagccgcatatgatgctgcgcatgcatgatatggggaactgacgattaagagtgactagtcaatcagacgtcctcgcacatattgtactgatggc

SEQ ID NO: 131872 - DNA, 2284 bp, Glycine max
  Clone ID: PAT_MRT3847_90088C.1
cctgttagcaagagggtcactccatgcaaacagcgatggttgcatggcttggacttaaaccaatacactctcgaaacatcttctctctttaccttccttgtctcaagtgaaccttttttctcaaaagcttcccttttgagttatatgttcaccaccaccattttgaattgaaactcgagaatgggagacaaagaggtaaaggaagaagaacaaaaaggtggattcagggcttccatgtttatttttgtgttatcagcattggacaacatgggttttgtggcaaacatggtgagcttggttctatacttttatggggtgatgcactttgatctgtccaactctgccaacaccctgacaaactttatgggctcaactttcttgctctcactcgttggtggcttcatctcggacacttacttcaacagactaaccacatgtttgctttttggatcactcgaagttctggctttggtaatgctgacggttcaagctggtctggaccatttacacccagattattgtggcaagtcaagctgtgtcaaaggtggcatagctgtcatgttttactcatcattgtatttgttggctttgggcatgggaggagtgagaggctccttgactgcatttggtgctgaccaatttgatgaaaagaagaacccaggagaagcaaaggctcttgctagcttcttcaattggattttgctgagttcaacattgggatcaattataggggtcactggggttgtgtgggttagcacccaaaaggcttggcattggggattcatcataataaccatagcttcctccattggatttctcacccttgctcttggcaagccattttaccgcatcaaaactcccggccagagccccattttgaggatcgctcaggttattgttgtgaattcggctcgagggaagttaccactgccagagtctgatgaagaactttatgaggtctatgaagatgctacattggagaagattgcacacaccaaccaaatgaggtttctagatagagcaagcattcttcaggaaaacatcgagtcacagcaatggaaagtttgcacagtgacacaagttgaagaagtgaagatcctaaccagaatgttacctatactagccagtaccattataatgaacacttgtttagcacagcttcaaacattctcagttcagcaagggagtgtgatgaacctgaaacttggttctttcactgtgcctgcaccatccattccagttatcccccttcttttcatgtccatcctgattcccctctatgaatttttctttgttccattcgcaagaaagatcactcaccacccttctggggttacacagcttcaaagagttggcgttggactagtactttctgccatttcaatgacaatagctgggataatagaagtgaaaagaagggaccaaggaaggaaggacccttcaaggccaattagtcttttttggttatccttccaatatgctatatttggagttgcagacatgttcactcttgtaggactcctagaattcttctacagagaagcacctgaaaccatgaagtcactgtcaacttctttcacataatttgtccatgtctcttggttacctcttgagcacagtctttgtggatgtcattaatgctgttaccaaaagggtcactccaagcaaacaaggatggttgcatggcttggacttaaaccaaaacaatctcaacttgttctattggttcttagcaatccttagctgccttaattttttcaacttcctttattgggcctcttggtacaagtacaaagctgaagacaacaattcaaaggtgaatttgaaggctccttcaaaacgactggtgaaagaaaacaagatgaggaagagaagaaggatatgagagtgaaggctagagaaagcagccaaacaagtgaagccaatactgagggaccctcttcctctgatgaaacagatgacggaaggaactctagggaatggaagcacagataaagtcaggaggctcaagacatgatttggtattaaggactagataagataaaacatgttatgtggaaacactgaaaaagatagtggttgttgaaatctctcttatcttgcatgtgtgcttcttgtatgattgattagcattgttgcttctggcaccatctgtgtgtctgttgtgtgcagggtcaaaggtttttttattttctttcatttaacatgttcttttttgttatataagtttattaattattcccctgtacttgtaattatgtattaagagatgcttagttaactt

SEQ ID NO: 131873 - DNA, 125 bp, Glycine max
  Clone ID: PAT_MRT3847_90089C.1
ccaaacaaaaacaataaaaccttggccaaagaaccggcccctgtctaaagaggaccaggcaccacttcgcccacagaggggcataacttcggggcccataaaacacctggaaaatgcatacctat

SEQ ID NO: 131874 - DNA, 513 bp, Glycine max
  Clone ID: PAT_MRT3847_9008C.1
tttgaaggcattttagtaacattagactcctctgcaatcatgatggaaagaactgcaaatatttattctaccaatctattctcttcaattcattttttttctaattgcacagtttcacttgcttttttgccttgaaaattttcaagcacatctacctaaatattatctgcatcatattaaaattctaatttcaaattcaaatgttttgcccgctttcactatgacagttacaatcttttccagcatattggtgtttgaaattaatgaccaagaagcagatatgggtggatatatgaaagaatagaacagaaaatacttctagatttgtataaagtgatcagttttagagttggatctgtgtccaatgaagtcaagaatcttcatggatttgcataaagttatcacaatcattaaaagtcagagagaaaggagaaagtacaatgtacatatgcttgcctgatgtgacacagggaatacatacattatgattttctgcccaagtagtaacaacat

SEQ ID NO: 131875 - DNA, 292 bp, Glycine max
  Clone ID: PAT_MRT3847_90090C.1
cccacgcgttcgaccacgcgttcgcccactcgtccgtaagaaacaaatgagaaaattggggcgtggggatgtttaagatcgaaaaatcacctactttagttgaagccttgaaagatagacatgtgaaaaataggggcgtgcggtttaaactactcaagtttccatatccctgcatgcgagggtatatgtttcttatcggtcccacgactttaaattctatacccgcctttttatacactagaaactggcaaaactgttataattcccaacttaatcactttcattcatatac

SEQ ID NO: 131876 - DNA, 244 bp, Glycine max
  unsure (1)..(244): unsure at all n locations
  Clone ID: PAT_MRT3847_90091C.1
ccaaatccaatttcaatatgatacggattcccacntgttgncgcaaacacacaacatntttcttctnctttctctgcccttcgtnttngctactcnaatctctctccactggtaancatgctaattctgaggaattaaaataagtttngtataatgacagcntagaggatcttgtgagtncatggtgcaaaccttctgagacgngacagagtnctctgtttcaggtcaccttagncaatntaat

SEQ ID NO: 131877 - DNA, 410 bp, Glycine max
  Clone ID: PAT_MRT3847_90092C.1
tggtaattcaaactaaatagtcacaaatatggggggctctgtttgcacctgggggcttggtcacagcgcttgatgccaccgggagcatgccttggaaccaatccttgcactactaaaaagagcttatgggatttgccatacagaacctatggtctaacgaccgactcttaattattgctttttcttccacaggtcgccgcctttttcccctgtgcagaatgacttattttgggctgtagcaggcattgcaagctgacaattctttggcagcaaacggcgttcccaatatcccccaatggctgataaaaggacccatgataatggaagatccgaaggaaaagaatcccgatgccaggattatacttttgtccgatgggcaaaataactacactgtcaattggctctgggac

SEQ ID NO: 131878 - DNA, 355 bp, Glycine max
  Clone ID: PAT_MRT3847_90093C.1
ccaggcgtcagtaaggatgcgaggggacaacacaagggggcacaagtgagtttgttgatccacacacccacacacagtgtgatcagcatgaaggtccttgttatcttcgttgctacaattctggtagcaaggcagtgccatgcgtacgatatgttccctctccgaatgaacactggctatggtgcacgtacgccggaggtgaaatgcgcaagttggacgcatgctgtggaagcacacatcatctttggcgttgagaccattcctgaagagtgcgttgaagcaacccacgaatacatccatggcgaacaatatagatcagactccacaacagttaacctacacgcttacttttatg

SEQ ID NO: 131879 - DNA, 565 bp, Glycine max
  Clone ID: PAT_MRT3847_90094C.1
agactctccatttttatggagtttgtctgatggagaagcatgtatgaagcgttctgaccggctacaaagacaagctgtttacctcttattagcttgttctttcagtctgatctgtaaaagaggagaaaatgcaaaccactgtaataattcaactctgtgctccagttttaccactaacccagattcagagcatgattacttctgcagaaaaaagggatcactagaacttttcaagtggattctaggacatcttccaactgcaatctctatcaaacatgaaaagtacatgcagatgtgtatgaacttcatatcatctttgattcagctatatcttcgtgaggatgatctatgttttgcagttcatttgctatccaggagcatatcatcttctcattcagatcagtctgatttgtattaatgctgcgtatcatgatgtaatggtagataggtttggatgatgtaggtctgaaagtaaggatgctgcgtatcatgatgtaatgaaagattttccttttgagctgtcagacattcttaattctgtgcacctttttcatctgtctggttc

SEQ ID NO: 131880 - DNA, 404 bp, Glycine max
  Clone ID: PAT_MRT3847_90095C.1
aaaatacaaaaaaaaagagggcgacgacaaacaacactaagggaaaagccgaaacgacagcaggaaccggaccggaaaaacttggaagcacccacgtttaaatttcaagaatagcaccgcaggccagaggcagcgggagcaaagcagagacggcacgggaggcagggaagccgaaggagaaagaagaagcggagggcagcgccaccgaaagccggagaagaacgaaagaagaacctcaacacaaaagtgagccacaatgaagaaaacatacgggaagcgaagggccagacaacagaggaaaactcgcaaaaaaggacacgaagcataggggaaagaggagagcgcaagcgagggagcgacaaaactgaaaccaggagaacaagcccatactgggaacacaggag

SEQ ID NO: 131881 - DNA, 419 bp, Glycine max
  Clone ID: PAT_MRT3847_90096C.1
gcacgaggtttcaaaccatgggaatactaatgagattcaataaaaactttgaaatgattacaaggctggtctgagtcacagctaacacaagtcaccatcagaatgaccattatagggaagaatcattgcaagtaggattgtcgataggaagatattataaacatcaacattatagttatagtagggttagggtcatcgttccaattctccccatccgtgtatgctagcattcgaaaaaccaacaataacaccaactaagagaagattttcatcaaagatgaagatttaataacaatattttgggaaaaggaaaaagtcaccaaaaaagtgaagcatggcaaaacaataggaaataaaagagaaataaaaactacagtgaatcataaggtaaagacatcatgtaagaggagttctagatt

SEQ ID NO: 131882 - DNA, 302 bp, Glycine max
  Clone ID: PAT_MRT3847_90097C.1
ggctcgagtgttcacatagtctcatacaagcataacagtgtcacatagactcgataacatcagtgcgcgtgccatgtggcgggttttatgcaactgggtgtgcctcaagtgcttggaagtttgtttccaatgactgttgaaccacattgtgagtatcactactgatacgcaggatgatcgcattctgaaggtatataatacgcttcagacctggacagagtctgcacctcggagtctggcttcactgggaccttatccacttcctctgctagggctgacgtatcatgtgcatcggcaccgtg

SEQ ID NO: 131883 - DNA, 197 bp, Glycine max
  Clone ID: PAT_MRT3847_90098C.1
gtttcattcattctatgaaagctgcagatgcaatattgtttgaaattagattgactctaaagaaaagggatgtatatttgaaggagatgaggccattatcttcttatgacttttaataacacatgcttgttacatcataccccaatggaatgtctacaacttaaatgaagattattgataacatactttttgtaatt

SEQ ID NO: 131884 - DNA, 254 bp, Glycine max
  Clone ID: PAT_MRT3847_90099C.1
cagacattcacgataattaaaagtagtgacttggatgaggttcaaactaccccattattccttggaacaacatggggcgatccaattttctcaacgaatcaagctcgcacttggaagtttgttcagtgtcgacgagttattacattattactctaccgtttgtgccaatttattattgacgcccatgtactcaatttgggaaaagcagtgggaaattataatggtacaatttgctccatatactggtgcaaatt

SEQ ID NO: 131885 - DNA, 163 bp, Glycine max
  Clone ID: PAT_MRT3847_9009C.1
gcagatgttctacatgaccctcaccggcatgaccatgacccttgaggtggaaagctctgacaccatggacaacgactaggtcatgattcaggacaaggaaggaataccgccggaccatcatcgtatcattttcaccagagagcaacttgaggacgggcgtacc

SEQ ID NO: 131886 - DNA, 269 bp, Glycine max
  unsure (1)..(269): unsure at all n locations
  Clone ID: PAT_MRT3847_900C.1
cntaaccaccgcaacgcaataaagcaagcaagcattcccttctttttttttttttatgtcgtgtcgtgccctttaatcttaaaggattgcttttccttagcgttaaacttagtcaaagcacaaatgttttttgtttttatttcaatcaatgagcacataatacatccaattaatccctatcccccaccgagcgaaataatttaataatgagccaccaatgcaaatactttggtagataaaatagaggtagaggtgtggtagatttgaga

SEQ ID NO: 131887 - DNA, 319 bp, Glycine max
  Clone ID: PAT_MRT3847_90100C.1
gcctaaatgatgcatgtaagtggacaaaatgctctgtactgttctgggaattgatcttcttaatagacgcacgtggccctaataatggtttcaaaatggggagtcctgagcggacaaatcaaactatcatggcatttgaatttccttattgacaacccccaccagtctacaccttttgatattcattggggaattcttaaagtgaaactactaaaggttccatgtcttatgccaagctttcaatgatccacaggctaccgcccaaaaatccaaaattgcggaaccattctactgaacgatccattggcaaattctcttg

SEQ ID NO: 131888 - DNA, 289 bp, Glycine max
  Clone ID: PAT_MRT3847_90101C.1
attcggctcgagctgatcgagggattttttttacatgttctcaaaggaatcaatcaatgaataaataaacggcggcggcggtgggagcgacagagctactcccacctaggatgccgcccgacaccaacgtgacccgctgatctgacaagccttatatgactccaccatgaaccaacactaaagccactttgctcttatattgcctcaaccacttctcagtgtgccaaagatactctatgcttgagaccatagcttcttcagaggaatcatgctcagctgatgccaatga

SEQ ID NO: 131889 - DNA, 1534 bp, Glycine max
  Clone ID: PAT_MRT3847_90102C.1
cggtccggaaaacccgtcgacccacgcgtccgcagtgaccgaaaaaggaaggaaatgatagcattctagcttgtttagcttcacgctgtgtagttggtttttcgttatttcatatgtccatcagctcccaaatcctctccacacagtaacagattgcattgactcatctttttgatttggatcaccatggaacataaattagcaacaactgaaggacaacccataagatgtaaagcggcggtttgtcgcaaagctggtgagccactgggtattgaggagatcatggtggcgccaccaatgcctggtgaagctcgcattcgtattatatgctcctctctctgtcgaactgatatcagtttccggaacatgcaggggcctccggccaatttcccaacaattctgggtcatgaggcaataggggttgtggagagcgtaggagaggatgtaactgaagttgcaaaaggagatatggttgtcccaattttcatagctgaatgtggggagtgtatagattgcaaatcaagcaagagcaacctttgttcaaagtttcctttcaagctgtctccttggatgcctagacatgccacttctagattcgtggatttaaaaggagagatcatacaccacttcttgtctgtttctagttttagcgagtacaccgtggtcgacatcgcccatctaaccaagattgatccggaagttcctcccagcaaggcatgcctcctcagttgtggtgtatcaaccggggtaggtgctgcttggagaacagcaggtgtggagccagggtctacagtagctattttcgggctgggaagtattggattagctgttgctgagggagctagactttgtggagcaacaaggattataggtgtggatatcaactcagaaaaatatgaaatcggaaagaagtttggaatcacggattttgttcattctggagaatgtgaaaacaaatctgcgagccaggttatcatagagatgactgatggaggagcagattattgttttgaatgtgttggtaatgcatcattgatgcatgaggcatatgcttcttgtagaaagggttggggaaaaacaatagttttgggatcggacaagccaggctccaagttgagccttagctgtagtgagatcctcgttagtgggaagagcctcgtgggatgcatgtttggaggactcaaacccaagtctcatgtgcctattctcattaaacgctacttggacaaggaactgaatttggatgggtttgtcacacatgaagtggagttcaaagatatcaacaaagcttttgatttaatgattaaaggacagtgtcttcgatgtgtgatttggatggacaaatgagcctgttattgttaagtccttgaattatgagatcaataagtgaaatattgtatgctgctcttgttttgtatttgacgaaaacattttcaatgcattgcttgaaatccaaaagtgcctctgtaaggaggtcacaaaaaaaagacagaacacagaaattacagaaacaaaattattgagtagtgtttgg

SEQ ID NO: 131890 - DNA, 232 bp, Glycine max
  Clone ID: PAT_MRT3847_90103C.1
ggactccgaaaacgacacgacctcgagtcacaaagtctactgctgagccttcgtgtcagctcgtctttcttggaaatcgcagtgggtgcccctactttttgggactccagggcgcacatgggggggccgaagctggctccaatgacacatgctagagggtttgagggatccgttgtgcgagaggcaactgtgtcccatctgtgacttacggaaccgaggagcagcgcccttg

SEQ ID NO: 131891 - DNA, 387 bp, Glycine max
  Clone ID: PAT_MRT3847_90104C.1
gataataattatttaacgactctctatcattataaattgggttgcggacaattttacatcaaatcacatgggagcaaaaatacacaaaccttccttctttatttccccccaatttaatcaaacacacccatggaatttactaatccccctttttggaaggtactcttccacataaacattttcccaaccccataaagattgacgagactaaactgtggcaagacacttgccttgtaggaaaaatcaccttggaggcgaaggcccctgataaagaaggaatgggcccatattgaaccttaaaagacatggcttgccctcacagcaaatgactggtcaaatggcattgcacaacccggatctctgctctatatgcccggaacctaacaa

SEQ ID NO: 131892 - DNA, 130 bp, Glycine max
  Clone ID: PAT_MRT3847_90105C.1
ggcaggccggctccaagcttggcaaatctaaacatgaagcacactctgctctcactgagctcgatggggccgggaaacacactaccccaatcagtgggtcccctcactatggggttgttcaagatcaaca

SEQ ID NO: 131893 - DNA, 1792 bp, Glycine max
  Clone ID: PAT_MRT3847_90106C.1
gaaccaaatccatttcattcaattcaatgtaaaaaaacacagtagccacccaatacataaaatttgtttatgcggtgtctacacgcacttcctccttggtatccgtctcttccccaaccattggaatacattccttaacccaccgcttatccaaatccaaattcaattcgagctgaacctatggtttgttccttcctattgccttcggggatctcgcatacactcacataacctccttcatatccgtgtcttcccccacagttccctaacaaaccgcaaattcaaattcaattcgagctgaacccactgttagtcctatttccttcaccgctctacgaatttgcggaaatggtaaaagaaaatgcacgtcaaatcggcgcagtcatcgttccgggatcggacacagggattccacagcttcacatagaggttgaagaagtccggttcagagccccatgggcccaataagaacagcaattctaccacagcggaggcacagcgatccgcgatcgcgaatcaatcggagttcaatagaagggcctccaaaatcggctacgggattcaccaaacgtctcggaagctcgccaaactcgccaaattagcgaaaaggacttcggtttttgatgaccctactatggaaatccaagagcttacgggggttattaagcaggatatcactgctctgaactctgctgttgtggatcttcagttggtgtgtagctctaggaatgagactggaaatgtttctgccgatacctctagccattcgagcacggtggtcgatgacttgaagacacggttgatgagcaccaccaaagagtttaaggatgttttgaccatgagaactgagaatatgaaagtgcatgagaatagaagacagttgttttcgtcttctgcttctaaggattctgcgaatccttttattcggcaacggccgttggctgcaagggcggctgctagtacttctagtgcccctgctcttccctgggctaatgggtcaccatcttcatctcagggcgtttcccaagaagcaagtggatggggagagtcaaccattgttgcaacagcaacagcagcagcaggaggtagttccattgcaagatagttacatgcaaagcagagctgaagcacttcagaatgttgagtccactattcatgagcttagcaacattttcaatcagctagcaacacttgtttcccaacaaggagagattgccatcaggattgatgaaaacatggatgatacattggcaaacgtagagggagcacagggggctttgttgaagtatctgaacagcatatcttctaatcggtggttgatgatcaaaattttctttgtattaatatttttccttatggttttcttattttttgtggcatagtcatttgggtgacagaaatgaaaacaatgacatgagtgtcggcgttctgtatttctttaatatttatttctccaaatatatatattcattcttgcagagttaacttaaaaccaagtttgtgaagtaagtatatttgttgatatagctaaacacatgatcttctaataagaagctgatgctcaacttgttctttatatgaatattttttcttatggttttcttattttttgtggcatagtcattctaatgacagaaaaatgataacgaggacacacatgacgcccttattgctggtgataagcgttttgtgtttctttgtgatggatatcagtctattgttattagttcagcatgtcaatgggcatgtgggagtgctgagtgtgtttttgctcaacctgacccccaactgc

SEQ ID NO: 131894 - DNA, 1321 bp, Glycine max
  Clone ID: PAT_MRT3847_90107C.1
acggctgcggaagacgacagaagggggggtctgtccattgaaaccactctccaaaatttctctctctctccatccatccatctattgcacacttccatcatcatggccatcgcaacagagactcaacctcaacaacacaaggattcttcggaggtttcgggttcagctgcggagcaacgaaggtggacgctaaacgatttcgatatcggaaagcctctcggaaggggaaaattcggtcacgtttatttggccagggagaagactagtaatcatattgttgctttgaaagtactcttcaagagccaattgcaacaatcccaagttgtgcatcaacttcgacgtgaagttgaaatacaaagtcatctccgacatccccacatcttgcgcctctatggatacttttatgaccagaaacgagtttatttgattttagagtatgcacccaaaggtgaactttacaaggaattgcaaaaatgcaaatatttcagtgaaaggcgtgcagctacttatgttgcatcattggaactacatctaaggtttgcccgagcccttatatattgccatggaaagcaatgaggtgatacattttgtaatacatagggacattaaaccagagaacctgcttatgggtgcagagggtgagttgaaaatagcagactttgggtggtcagtgcacacattcaatcgcaggcggaccatgtgtggcacactggattaccttcctcctgagatggtggagagtgtggaacatgatgcgagtgtggatatatggagccttggtgtcttgtgctatgagtttctttacggagtccctccttttgaggctaaagaacattctgatacttacaggaggataatacaagtggatctgaagttccctcctaaaccaatcgtgtcctcagctgcaaaggatctcattagtcagatgctggtcaaggattcctctcagcgtctaccattgcacaaactccttgaacacccttggattgttcagaatgccgagccctccggtgtatataggagctagtgcacctcattcttttattgtattttcttaatcgtggaaatcatcaaaaatagcagctgcttctaagtatttgacaacatttggtatagagatgatgcaaactatttgaagaagttagttgcttgctgggttaagagaagattttatatttgttaaaacatgtaaccgactccttgaagtgatgtcacttggctatttgatggttatccctgccaccctaggcggattatttgattgtaaaccctactccttcaagggctatataaagaataactgatgtcacttgttgattgt

SEQ ID NO: 131895 - DNA, 429 bp, Glycine max
  unsure (1)..(429): unsure at all n locations
  Clone ID: PAT_MRT3847_90108C.1
cttaatcctttttttttttttttttttttttttttttttttttttttttttttttttttaggggtttcgagttcctttatttggggcgggttncccccttccggggattaaaattttggtaacggctatttccctccgttttttggggagctcttggccgtggtggaaaatttttagtctataacttcttttggttttggggggtttccgggggacccccccgggggggagacgggccctgccttgcggggtcccttttgaatattcttttaaagttgggtttcctccnttttgagagggcttttttaatccccgctgcgggggggtttgatccgcctggttggtgggttttttttcttttggtgcggggggtttggggtggccccctttgtgccctttgggcggggngggggggtttatttgcgccct

SEQ ID NO: 131896 - DNA, 464 bp, Glycine max
  Clone ID: PAT_MRT3847_90109C.1
caagcatgtagctaatcacattcaacatagccgtttggccttgtgacggtgggctgtcctgtttgcttgtaatgattagcctaatccattggctttttttttcgagtccacttcattcaaagaaagatagtagttggactgttggagatgttagaatggctggtgatcaacaataaaactgtaactggttgaacaaaagaatagccgttggatataaattgtaactctggtacaaaacaataaagtaaactactactaagatgtcaattgggtgtttttacgagagtacccaggccagttcttgaccagcaaaatttcctcgcagctcagctttggtacatatatcccaatgatgtgcaaatcaaccattgctcatttttccatcaaacaataccatattgttgcgaaattgttaattggatatcaagttccatatttgatattaatcagattaatttttggtt

SEQ ID NO: 131897 - DNA, 1024 bp, Glycine max
  unsure (1)..(1024): unsure at all n locations
  Clone ID: PAT_MRT3847_9010C.1
ttcttaaagttgcatttctactcactgcactagagccatcttgctttctgttctctcctacaggtggtggtcttagtggtaagaaggaatcgggacaacttcgttttggggggaaagaaaaaccatttcgtgcacccctgaaaccaatcccatatgaggagttgaagaagcttggcatcccccctcctcctgagggaagatacatgtcacgctttcaggtgccatcgcctcctaggagagaaaggaacctttcagacagggaagaagactctcatagtcacaggaggggatctaatgacaggaacaggacggaagatagccacagaagttcagtggacattggtgaagggcactgtaggagttcaagtcatcgcgatgaccactcacgtggaaggagctctttagagaggagtggccgttaccatgataggagttcatctgagaaagaacatcgatacaggagttctactgacaaagacaaacattctcagaagagaaaagaaagtgacaggagttcatctgagaaagaacatcaatataggagttctaccgacaaagataaacattctcggaagagaaaagaaagtgacaggagttcacccgagaaagaacatggactcaggagttctactgacaaagacaaacatcatcggaagagaaaagaaagagatgaacagtcttgaaggcaggaaatatagtcgccattcccctcacgaggactaagctgtacaactcattattatcaccattctgttgtgcttttctgctttgtgtatggtatatgcatgggaggaatgggaatgcaaagtggaaatcctcaaagacttctcaatgaacatgagactggtgcatgtatgttcaatgatagtcatgcttttggtttatattttcatagggggtgttgtatgcaaaagcactcaatctcataccaggcacatcttgctgtagataagtcacaggcagtatgctgagtgaaagttgagcttttttctttataactaaagggaaagagttaagtttanng

SEQ ID NO: 131898 - DNA, 637 bp, Glycine max
  Clone ID: PAT_MRT3847_90110C.1
gggacaattccaaatgaaatctgcaatatctcccgattgcaggacttgctgttggatcagaatttcattacaggagagatccctcatgaaattggaaattgtgcaaaacttcttgaattacaattgggcagtaatattttgactggaactattcctcctgagattggtcgcattaggaacttgcagatagctttaaatttgagcttcaatcatcttcatggatcactgccccctgaattaggaaagctggacaaacttgtttctctggatgtttcaaacaatcggctatcgggtaatatcccacctgagcttaagggaatgttgagcttgatagaggtgaacttctcaaataatctgttcggaggtcctgtgccaacatttgtaccatttcagaagagtcctagttcaagttatttgggcaataaagggctttgtggagagcctttgaactcttcatgtggagacctttatgatgatcacaaggcttaccatcacaaggtttcttacagaatcatactggctgtaattggttctggtttggctgtttttatgtcagtaaccatagtggtctttgctgttatgatcagggagaggcaagaaaaagtagcaaaatgctgggatgttgaaatgttccatg

SEQ ID NO: 131899 - DNA, 457 bp, Glycine max
  Clone ID: PAT_MRT3847_90111C.1
aattcggctcgagtacggctgcgagaagacgacagaagggaggaattttttattttattttatttttcttataattatttttctttgatctgcagataaggttttggatgctgcagaagtagctggaaggaatgtcatgtccacttcatcagttgtgaccaccggcctagtttcagataagtaagttcgttctctatttaagtattcttctcatcactaacataattgcctggcctcaaatgatacaagacctttgcttgattttttatttgttttttatcaaaccaatgttttgttcaaattagttccttgtttggttgtgacatgtggggattgcacttgcttggttttaaaattggacaagcccttatttctgtaggttgcatttaattaacctgtacaagaagcaccttgagccttattgatgtggtgtgattgacttggtcttttttatttt

SEQ ID NO: 131900 - DNA, 112 bp, Glycine max
  Clone ID: PAT_MRT3847_90112C.1
ggctcgagcctcgaggcttacttctctgatcttgtgtctatttatctttcttgattttctaccaggtacggggcctgtagtaaagactctgaccagctttactatcccatac

SEQ ID NO: 131901 - DNA, 384 bp, Glycine max
  Clone ID: PAT_MRT3847_90113C.1
aaaaaaaagaatcctgccccccattttttggtttagatggggaaaaaaaactttcaagggttaattggtaacctaacccaaatggggggttccattaaaagttgccaaaagcgggggaaagcgtgaaaaagtgaaaccctttaggggagttaaagttcccccctttgttgttgttttgtttgcccttgggggtttttatttcccggggggttttgaggctttccataactacatcctttttataaaaacaaaaattgtttatttttgggggggcatcggggccgaaaaaaacgttttccatacctttggctaacccaaagggggaaatatgaacccttttgctatggggacctaaatcactaaaacaactttcttttttttttt

SEQ ID NO: 131902 - DNA, 446 bp, Glycine max
  Clone ID: PAT_MRT3847_90114C.1
aatattatatttttttttttttatattcatacttttgtatttttggggggtttatttattcttgtggcacctttattcttatatgtccaattgttgacaacacacaacacataaaatcaccatcttttttaaagaagcatagtactgtttgcaccacacgcaaatactactacagtttcttgaatccccattaattaaacctattttaaacaagattatttcacatgaaacagtcaccaccgttgggctaacatttttatagaaggaggtcataggagcttgttgaatgaaaccagcttcagttaacatcaacttgaggaacctaaaacttgagattggcaaagcattggggcaaaagctttccatgcacccggccttgtgttaagagccaactgaatgaaccccgtttaagaaaacctcatctcctggaacctgtaactccacat

SEQ ID NO: 131903 - DNA, 1234 bp, Glycine max
  Clone ID: PAT_MRT3847_90115C.1
tgtagacatgctttttccgtcaatttgggcattctgtggttcttgcggattatcttacgcttcgcaaaggcttcatcatgaatcacaacctttcattcaaatatgattttcacagctacatgattcgatcaatggaagaggaattccaaaggatagttggtgtgagtggtccactctggggatttgttattgccttcatgcttttcaacattaaaggatctaatctatatttctggatagctatcattcctgtatctcttgcgctcttggtgggaacaaaactacagcatgttattgcaaccttggcattggagaatgctggaattacaaggttcttcatagaagcaaatgtgagacttcgtgatactcttttatgggtaaaaaaacctgtacaagcgctatcgttgatccatttcattctcttccagaaaacatttaagctggctttattccctcggttaagatggcagtccggatattattccggctatattagtaataaccttctactatatataaggttcaccttggggttagcaggacagtttctttgcagctacagcaccttgccactctatgcacttgttacacagatgggaacaaactacaaggcagcattaatcccacagaggataagagaaacaattcatggttggggcaaggcagctaggaggaagagaagacatggcatgttcactgatgactccaccattcacacagacacaagcactgtgttgtctattgaagaagatgatcaattaattgatacccctgaagtagaattacaaccagcaacagctgttacagctaccccttctcccattgctaatgaaacttcaagtagggctgttacacccctcctaagaccctctgcctcaatatcttcagtgcaatgcagttctaaagctgaagcaattccaagatgctcctctatgccaagtggaagataaattgtgaacaatggagactaatgaaactagttaaatggtacattgataaagatggcttttgtatgatcatcaaagatgtataagataactacttatagttcccttaaagaaagctttacaagggaatagtgcttttggacattactaatttatgtgggacaactatacaatggggtgacttttgtatcttgatgccgagaagtaacactggagaattggccaagtatattgtaattttctttttttggatttgaaatagtgtaaattaaagttgattgtacgtc

SEQ ID NO: 131904 - DNA, 379 bp, Glycine max
  Clone ID: PAT_MRT3847_90116C.1
gtgattcctgtgccttttcctcctccagcaggagatttcaccatattggctggagactggtacaagagaaatcacactgatctgagggccattctagatgggggaagtgatcttcctttccctgatggccttatcatcaatggtcgtggttccaatgcttacgcattcacagtggatcaaggcaagacttacagattcaggatatcaaacgttgggctcacaacttccatcaatttcagaatccaagggcataagatgctgctagttgaggtggaaggaatccatactctccaaaacactttatgattcccttgacatcattggggcagagttactcggtgttagtaatgctgatcaaccacctcaagactattatatt

SEQ ID NO: 131905 - DNA, 621 bp, Glycine max
  Clone ID: PAT_MRT3847_90117C.1
agagaagacatggcatgttcaccgatgactccaccaatcacacagacacaagcactgtcttgtccattgaagaagatgatcaattaattgatactcctgaagtagaattacaccaagtaaaagctgttacagctaccccttctcccattgctaatgaaacttcaagtagggctgttacacccctcctaagaccctctgcctcaatatcttcagtgcaatgcagttccaaagctgaagcaattccaagatgctcctctatgccaagtggaagataaaatgtgaacaatggttggagaccaatgaaactagtcaaatggtacattgataaagatggcttttgtatgattatcaaagatgtataaaatgactacttatagttccctttaaaaaagctttacaaggtaatagtgcttttggacattactaatttatgtgggacaactatcaacggggtgactattgtatcttgatggcaagaagtagaccaagtatattgtaactttcttttttcctttttggatttgaaatagtgtaaattaaagttgattatacatcaaagaaaatggatgtcaacgcagcctgtagaactcctgttgtcaatgcaattttgttgcagtactc

SEQ ID NO: 131906 - DNA, 537 bp, Glycine max
  Clone ID: PAT_MRT3847_90118C.1
ccagaacccactaatatataatttaattggggagcaaaaaataacttaacaaaaaacaaaatcccggtctggaccagcaaaggggaaactcggtcgggggaggagggcccttttggggccccaaaaaaaaaattggtttaattggcctaggaaaagggaaaggccccccataggggacaaaccgggggaaaaaaacccgacccaaaatatggatagaaaaaagaaatatttaaaaaaggccaataaagctggcccagggccccttccaacttggggggctaattgggaatcaatttggggggaaacgtttagggctttcacagagggggccaccgacccactaaaaaggggggccaccccgtttggcccaattttatgcccagtatcaagggggacattgccggaggccggccttcccaaaagggcccctaaaaattagtccctaaggccatcctcgcccaaatttagtggccaacaccctctgggaggggctgaaattggacaaaacccccagtttggggggatctcatattaaaa

SEQ ID NO: 131907 - DNA, 1546 bp, Glycine max
  Clone ID: PAT_MRT3847_90119C.1
cttcactcccacctgcctcgccttctacgcctcccagacactatacgagcattctcttactcttaattctccccactgcccttctcttcctccttactccctctcactcaaacggtgtttggtttagatgtttattttgagttacgtttcctctatgttcgcgttatcttaccttctttcgatcaatccctgctatacttttcccttctattagcgttttcttaccttccccacgtactgtaatgcgcggctacccccaccatatcccctccttccaacacacccacggttccgcctccggcaccagctcccatcacctgaagaacacgaccgatccgtctcgcgccgcacaccctctacagatcccataccatccacacacccgccgccaactccgatccgcacatcaattccagttcccacaccatcgaagagcacggcgccgtctccaaccaccacatccattacagttcccacaccatcgaagtggacggcggcgccactgtcgaagaggtttccgccgttccgccccttgaaatctctatcaacgattctagccagctcacgctctcgtttcgcggccaagtctatgtcttcgacgctgttacacctgataaggttcaagcagtgttgttgctgttgggaggaaatgaactaacttcgggttcgcaatgtgcggagctatcatctcaaaatcagactggtgaggaggaatatcctgcaaaatgtagtctaccacagcgagcagcgtcattgaataggtttcgtcagatacggtaaagaagggttgctcataagaaagttagatatagtgtacgtcaagaagttgcactcaggatgcatcgtaataagggtcaatttacttcatcaaagaatcaggatggaactaatagttggggttcagatcaagagtcagggcaggatgctgttcaatctgaaaccttgtgcacacattgtggaataagttcaaaatccactccaatgatgcgtagggggccatctggtccaaggtcactttgcaatgcttgtgggcttttttgggcaaataggggcactttgagggatctttctaagagaaaccaggaacactctcttgcaccacctgagcaggttgatgagggcagtaataataatgactttgactgtcggagtggcatccctgcacaacataacaatcttgttaatgataacaaagctttggtatctgatcgttgagttttccactcacaggaaatgcaagtccttgactgtgacattcgcaggtttttagtaattccattcagtttgacctatagaatgtacagtatatagcaaagctctcgtcaatacaagagaggtctatttctatactctctgatcagttgcattaaactgtttatctatgactgtacaaactggaatttggaatgacttgatcgaatacaagagatctattgctttactctcggacagttgcattaactgttttatctatgaatgtataaactggaatttgaaacgaacttgatcctcaaaaagtggtcggtggttttagtttagtctagtg

SEQ ID NO: 131908 - DNA, 299 bp, Glycine max
  Clone ID: PAT_MRT3847_9011C.1
cctactctcgagctcgagggggcggcaatcaattccataccgctacctgggggcatacccattttacgtgtaatatgccaaattacaacttgccttacaaaactgtataactctctctctgcgacaacaagtactcactctctatgtaactacccttacgaaccacaaatcatatatacgccaggaccgtgtggcctaaccactgacctctcctatattagttgtgctgagctcacagagctctgtaccttctgaaaacctgctaagccggacgccttaccgaatctaccacctctcgt

SEQ ID NO: 131909 - DNA, 823 bp, Glycine max
  unsure (1)..(823): unsure at all n locations
  Clone ID: PAT_MRT3847_90120C.1
tcttctgattatttatcctttataaaaaagaaaaaaagtgttcatagatgaggacacggatcctctccaagttgaattagccaaggtaagggctagactctagagatttccgcgtggagaaaacacaattggggttgttccttcttctgcttatatagtacatatagcatagcaagcacataatagattgtgtttgtgtttcactttcgcaaaggactaatccatatcgtagagtcaatcacaaaactctctactttgccacaaatgagtgaccccaagtatgcttatccctaccctgctcaaggtcaggggtattatcaaggtcctcctgtgatggcaccaccgcaatattatgctgctccaccaccacgcacaagacaaactggattccttgagggatgtcttgcagctctgtgttgttgctgcctcatagatgagtgctgctgtgatccctcaatcttatgtatcatctgatgtgatcaaaattgctgcaagtaggaaaaacaaaatgaagaagatacaagtacatatatatgcagtgtgatgcttccagagggcttcagttagcattatgtttagttgaatagtagtcttacttttatccagaactagaacttatgtttgtgcttgattaacatggtttctttccatcttggtctttggtgtggttgtgcatcaccagtgatttgatttgtaatgtggaaagtaaacaattattgtgaattcaattgggtcactctgtttctacaattttctttgtcttacatcttatcattttgaatttgaatctggaatgtgnnaatggctcacgnnanntcaacaa

SEQ ID NO: 131910 - DNA, 413 bp, Glycine max
  Clone ID: PAT_MRT3847_90121C.1
cggctcgagctcgaaggaaaaccatcaatggacatgcactctcatgcctgcagaatttgttcccaatcattagttggttgagagattacaaagtctccaagttcaaagatgatctcttggctggcttaactcttgccagtctctgcatacctcagagcataggatatgctactttagcaaaagttgctcctgaatatggcctgtataccagtgttgttcctcctcttatttatgctatgatgggaagctcaagagaaattgcaattggacctgtagctgtagtgtcaatgctgttagcctctctggtcccaaaagtggaagatccagttaccaatcctaatgcctacagaaatctgtctttactgtgactttcttcaccggaatttttcaaactgcatttggtgttttcagat

SEQ ID NO: 131911 - DNA, 187 bp, Glycine max
  Clone ID: PAT_MRT3847_90122C.1
gctcgcaacttggtccacgaaaccctgggcctgggaaaattccacgaagatgtggagagccagcccttaaccagccccaagatgcccaccccgggttttcttttggtcatgaattggaaccagagccccttaaaaggaaggggtggggggattggggaaagggggtggtccctttttttcacttttg

SEQ ID NO: 131912 - DNA, 352 bp, Glycine max
  unsure (1)..(352): unsure at all n locations
  Clone ID: PAT_MRT3847_90123C.1
cggcgcccgaaaaagagaagttccagcgaacgaaaaaaaaaaatttaaaaacaaaagagccaaaaaaaaaaaaaaaaaaagggagaaacaccagaggcagcggggggaaccgcccgacgccgtggnnnntgccgaagaacaagggaaagggaggaaagaaccggaagcgcgggaagggcggggcggcctacgagaaacgggagctacggccccaggaccgccgccaaaaaatcttgcaggggcgccccaaaacgccaaacgggggcgggggggaaaagcgcagggacgggggaaaaccccggcggccccccactaaaacccccggaaggaacaccccctggccccggggggg

SEQ ID NO: 131913 - DNA, 242 bp, Glycine max
  Clone ID: PAT_MRT3847_90124C.1
ttaaaacttcagccggagtaagcactggaccagattgtgatgatccctgtaaaagaactcggcaattaattcaattacaaaaatgtactcaacagttcagaactaattatttattaaaatacggtggagagtacatcccacaaactttgctgattatggaagttaagacttcagtacaagtgctaaatttcaagagtgtagggccaatcctaacaaatgaggtattgttcattggattttta

SEQ ID NO: 131914 - DNA, 204 bp, Glycine max
  Clone ID: PAT_MRT3847_90125C.1
ttacgaccatttctaccgctgtcatctcatttactcaagttcattaccatcaatcccctaaaatttggctttttattgataaagggaggcaaaaagtattcaacttactttaaatatacttacacacttcaacctcctctattccacacaactcaccatcttaacttcaaccttaccatcaatcacttccttcaagttaacctt

SEQ ID NO: 131915 - DNA, 389 bp, Glycine max
  Clone ID: PAT_MRT3847_90126C.1
aacaacttgacctaaatggactacaagggattagattattgcttggatacatgttgatgttaaggggtgttcaccaccctggggtgggggacctaattggttattgtgctcatggggatcaaaggcttttaacttactaaacaatgtaattggtatccgctcatgaacacttacattacaattactccatcaagaaataactttactgtaacacacagatgaaaatatctgctggggctgcaagaggattggaatatttgcatgacaaagctgattctacttgcatatatcgacatgtaaagtactccaacatttttcttggtgaatgatatcatccaaagctatctgaatttggtctggccaaacttggttcattgggggaaaacacc

SEQ ID NO: 131916 - DNA, 328 bp, Glycine max
  unsure (1)..(328): unsure at all n locations
  Clone ID: PAT_MRT3847_90127C.1
annnannnnnnnnnnnnnnnnaaaaaaaaagcataaaatgcccacttgccaccaagaattttttacaacataagggatgcaacacccttgactcattggaacgggattttacaacttttgatctgggggaaaaaaaaactaaaacttttttccattttaaagggttgttccatacaagttaataatactgactttttccaaaaaatatgcctttggttttaaaaaattggcttggacaaaaacatcacaaagcatgggttagtgacattggatgccaccaccccctggaatttaaacattcatccctggaaaaggtccaatggtaaaa

SEQ ID NO: 131917 - DNA, 291 bp, Glycine max
  Clone ID: PAT_MRT3847_90128C.1
tccatacatactaatgccataactcactcactatctttttcactactctatccaattacattatcgactattaccattgtccatgatcaacacctaattctttatcccaattttccccaattccaccaagctcgctccatcactaccctcccttctgatcaacctttcatatgtccttatattctcacccctaattcactaaacttttacactctacatcttgtcttggatcaatatttacaaccctcgaaacctgatacaaccccatttttgttgcacttattgccgaca

SEQ ID NO: 131918 - DNA, 326 bp, Glycine max
  Clone ID: PAT_MRT3847_90129C.1
atgagaagtcaaatacccaatttactcaaacctatctaaaatgttgcatgagtaaggccatgttccatatttatccacatattcatattttgataaaccacacaattaaatcatcttactttgtccgaaccaactcaagcagtaaggtttccattgccagccatagtctcggagttttggcgtcagattttttgtgcagtttacttagctctgactgaaagcttataacgatggcaactttgaactcaactgagaagggaccagctaaggttgttggacaggtcaaaaggcgtggtagtattacataaataggcagcgtcaaatta

SEQ ID NO: 131919 - DNA, 328 bp, Glycine max
  Clone ID: PAT_MRT3847_9012C.1
agcaggacggagggggcgtatgagcgcccctctgtcggcggagatggggactaaaaacaacgcgaggacgatcccaatacggaaggaggacgaggtgcatgtgatgcgaggaacatacaaggggcgagaggggaaggtgactcaagtctaccgaaaaaagggggtgattgagatggagcacaatacccgcgagaaagggaaggggtaaaccgtgcacagaaggatggacggcaagagcgtggtggagacaaagcggatataagacgaggaacaaaaggacggcgggatagaaagggcgagggtaaggcctgacggagaaaaggggaag

SEQ ID NO: 131920 - DNA, 349 bp, Glycine max
  unsure (1)..(349): unsure at all n locations
  Clone ID: PAT_MRT3847_90130C.1
acacgnnncaggggaaaggttatgcctaagattagctcaagcacacattttaatcacattcaagagttaaaaaaacaattctatgaaaattgaaaacaaaacacatatatactaagtcaaaaaagtagtattaataaataatacataattgctaagaaaatatagatttttaattgatatatgaattgaaacattgcatattaagttgaaataactcaatctaaccagttgattaatttctaaaatccaaacctcttaaaattaaactagttagatagaatgatcttaaacacattgatcccattcatggtgtctatcttaattggttcaatatgacatggtaactact

SEQ ID NO: 131921 - DNA, 231 bp, Glycine max
  Clone ID: PAT_MRT3847_90131C.1
ttcacgcgtccgactacgcgtaggtttactttaactgtgatgttatgaatgagttatcttgacttttgaaacgagagactgagaatggaacgtggggctcttgataggatcattaatagggtgcttgaagtcataggcagaccactgaaacatgtgcaacattatgaggctgacatcaaacagctctgtcttgtctacaaggatatcttgatgaggcagaccaacctgttg

SEQ ID NO: 131922 - DNA, 323 bp, Glycine max
  Clone ID: PAT_MRT3847_90132C.1
aactcgagactgggtattgttaccttccttttcatgttactctgacaccatcatcgacactaccaacccacaatgtcataacattataactattaatctattacaataaaatacaaaaaaaataaatccctaaccgtattggtacaggatcctgttaactcttggagcttgaaccttgaattctagacaggacaagttcttggattagcggaagcttcgaattggcaaagggtccagctactgcgtgctgctaaggattgcctacaccaaatattattgattgagaatagattctcgatccctggtgtatgggagaatgagat

SEQ ID NO: 131923 - DNA, 295 bp, Glycine max
  Clone ID: PAT_MRT3847_90133C.1
ggggtatattccagtcaactaaataatacagagatccttgactagatttgatactaatactaataacaatatgaacagcaatagcaccaaagtaatgttaataaaggaataaaggtaatggatctttggagttaactgtcagcaatgctttaaactttacccaaatttgtgctaaaatgatctgtggagttataatctggtttttcagttagggacctgaccattgtggaatcatcatcgccattttaggaagctgaactagcagcatccacctccttccctggaaagtcaattt

SEQ ID NO: 131924 - DNA, 5253 bp, Glycine max
  Clone ID: PAT_MRT3847_90134C.1
gggaacacttgtgacaggactgaggatagtaatggtaatgctgttgctaggcctaattacatgaacctgactcagtccacaaaggcaaagcaaaagacaagtagtaatcatgtgtataatagagctcagaggcagcaatccatggatgagtccaatatctcaagagggcagcggttttctccaatgtagattccaaaagctcggctggttctgacccttcaatcaacttctataggccacttcacttgcacaagagttcagttatgacacgttgaaacggataaggctcagcttcacggtgtgatgtgaatctggtggaagctcaatatctccgtgtactgaatagtaccattcttgtccaagaagttcagcatcttgttgttccatgcaatttacattgagttagctagctagaagtagctgttacatgtctggtgtaataaatgtcaggtgttgattatcacttcatttgcatgtcaattaccactccctcattttcaagtctccaatttgcacatccctcacaatgcaagtccacaagcacacatggtaaggtggtttaggctccttcttctagcctgtgtccctatccttcataagcatatcaaagtcaagtctcagattcttaaatccactaaacttaatgcttatatagttagtttttatcttatttgaaataaataaatcacataccttttgagatacttaagatgatgtgttccaatctctacatgttgagcttgctaccttgacttcgccaactagtgcagtttaattcaagaaaatgatgagtcaaattgctgtaagttaagaacaccgtgtattcctgttaattgttgttatcatgaaagtttctatgatgtagcatgggttagacgttccatgtgtgtggagttgcggatttggtatctatgagctgccaatgcttggaatgccagtttatttatcagctgttcataaagcgactatttgatatttcatttttgaatttacaatgcagctctgttcttttgacaccgaaaagctcttacctgctctgagattggtttccttgtcaattgtggagtaataatcttccccattggttacattcactggtgccgcgtatctttcaaacattgtggggacttcagtatctgttgctcccatttccattgtttcatttacaaatttgatgactctatacaacaagtgctaatgcacgaaaatatgattatttgaagttgtagtatgctgaccctcattctcagctacagcaggcctattttttttcttttcattcctgagttattctgtcgcccctgagttcttcagttgtgacccctccacactcttcataggagctagcttttgtttatgatcaatgggagttcttacccgcgaacaatctataaaattaaatttctccaatatcttctcaatataatgtgattgagaaatgaaaattaagatgtgttcacgtttgatctttattcctaagatcacagcagcctgccccatttcttgcatatcaaacgtagaagaaaaaaatgtcttagtttcatcaacttgatgctgatcgataccaaagatcaagtgatcgtctacacacagacaaatgataactcctttgcaatgagtatcaaacttgctatatagacatttatctgcttggtttagaacataatcactagacaacacaacctcatcaaatttttgatgccattgattaggcgcttgtttcaagccataaagagatttcatcagtttacacaccttattttcatttcctggcataacaaacccttcaggttgtttcatgtatatctcttcatccaattcaccatttaagaatgcagttttcacatccatttggtgaatcaacagattgtggatagcagcaagtgctaacaacagtctaatagtggatatcctagcaacaggagcatatgtatcgaaaaaatcaataccctctttttgcctaaagccttggataaccaatctggctttgtacttgtcaacagtaccatccactttcatctttctcctaaagatcatcttacatcctaatggcttacatccaggaggtaagtcaaccaatttccaggtattattttgcatgatggaatccatctcactttggattgcttctttccagaatacagcatcccttgaagccattgcttcactaaaggtctttgggtcttcctcaacattaaggcaatattgatattgaaattcaatatcattccttgacccttcaaccaaatagagttgaaagtcatcaccaaatgacttagcttttcttactctcgtactctttctagtttcagtactagttaaaggtatatcctcaatattaactgagactttcgacatggaattcatgtcctttggcctaggtatagatgtaaacctttgttcatcaaagatagcatcccgtgactctataaccgagttcacagcaacagaatcattagattctagcacatagaatctatatgctttagaatgttcagcatatccaataaatatgcaatctatacctctttcacctatggttttccttttaggttctgtaagcctgactacagccctacatccccaaattttgagataactcaaatttggtgtctttttgtgccaaagttcatatggggtaaccttattccttctgttaggaattcggttcaacaagtaacaggctgtcagcatagcctcaccccaaaatccttcacttaaacccgaataggataacatggaattcaccatttctttcaaggttctattcttcctttcggctacaccattctgttgtggtgtatagggagctgtagtttgatgtattattccagtagattgaaaataaaccggatcataatactcacctcccctatccgtacgaagagttttgattagcccattttgatgaagttctacctctttcttataaattttaaatttatcaagagcttcatcttttgtatttaataaatatgcataacaataccttgatgcatcatcaataaaagtaacaagatattttttatgacctaatgatggagtagcatgcaaatcacacaaatcactatgaataaggtctaagactttagtctcacttttaacatccttaaaaggtttcctagtgatcttggtcaacatgcaagttttgcatttttcaatgttcatatcaaaaggaggaatcatacttgtttttgacatatcttttaatcttttgtaatgaacatgtcctaatctagcatgccaaatttctgattttgtcatattagttatagaactacacgaggccatacaaacagattcatgaacaaaaggaacatcaatgtttaatttaaacattccattacaacgataaccaaatccaacaaacgaaccatgtcttgacaagatgtacttgtcactttcaagtacttgcttgaaaccacaattatttaaaaccataccagacaataagttcttacgaataccaggtacaaataagacattatccaaatacaaactttttccggaagtaaaaactaaattcacacaacctaatcctaggattggttcagttgcaacattgcccatcttcacaatagagccatcatcgattggtctaaattccttgaaccaacgacgatctttgcacacatggcttgttgctcccgaatcaaaccaccaagcaacgtcatcatcctgcacatagaatgcattagatattagtgatacataatttgaattcgtattcgaattaaaattattcactacaatctgaccttgtcgcttttcaggatcattagacccacttggaccagccttgttctttcctttgaacacccggcaatccctctttaaatgaccaggtttcccacacttccaacatgacaattttgtctgtttgtttggacctttgttcttatttccttgaaattttcgtttgttacctttagcattgtaattttgcttaactgttccactttcctctaccatattaacggaagaggaacctgctacggttttatcattgactttgtcaatttcctgagccctcagcgactcctcaatcatgaaatgactaccgagttgaaccagagtcaactcttccttcttatgtttcaaggtatgcttgaagtctttccaagaagaaggcagtttatcaattatagatgaaactgcaatggattcatccattttcaaatcatgttgagtaaactgacccaaaatccgcagcagttcattatattgctccataacaggcctcgaatcactcattttgtaattaaagaaattactaactaagaatttgttacttgaggcatcttctgccatatacttggattcaagagagtcccataattccttagcagactcaatattttgataaatatcaaagagagagtcagacataccgttcagaatgtgtccacgacaaatgtaatcgtcgttctcccatttcgaacgcttccttgtttgatccagagtttcgtcttccatatataccggcatcggtgtgctcagcacatacaccactttctcttgacaacattgaaagtggatcttcttctgccatcttctgaaatcctgcccttcaaacttgtccaacttcgcaaacttgcttgtcatcttcgaactatcgttcgtcatctcgaaagatttgattcaatcttttgttggttaattttgaaaatcgagataatcctggataaatctgaagtcgtgtataaacactttcagattgaatcaaatttcggggttcaaccaaaattgttcaatcggataaaatcagaagattataattcaagagttttgttttggtcttgtgagtttttcacatgttatgctttctgaaccaggatgattatttataatcaaagaacaggtggtttttggcggttgatggaagttatttatttttaaaaatgccgttgatggaagttttaggtaacttccatgtaacttccaaccgttgatggaagttagtaacttccatgtaacttccaacctttgcctaaaccgaacatctcgttattacattaaaacaagcgtgcactcttattttaacataataaagagatcaattacactaaaatgtccaacactcccccattttagtgtaattaccgatcaaatcaccaaagtcataacataccacaaactactgcatagatgaaatatcgtgacgattgaatttcatcttagcaaattacacgtttcaaatattcgaatatcagggtgtcactaaggattgcccttctgtcgtcttctcgccga

SEQ ID NO: 131925 - DNA, 1541 bp, Glycine max
  unsure (1)..(1541): unsure at all n locations
  Clone ID: PAT_MRT3847_90135C.1
ccacgcgtccgcccaaagtgatccgattgagatgtatcacagagatgatcgccgcagcaatccacagattcgcgatagttatcttctttttagggggagacctgcatgggaagatctccggagctacctgactgcaagagggcgcaagcgttttgaggtttttgtttgcacaatggctgagagggttgatgcactagaaatgtggaggcttcttgatccagaattgaatttgataaattcgaaagaacttgcaaatcgtattgtttggttcaagtcaggtttaaagaaatcattgtttaatgtattccaaaatggcttatgccatctgaagatggcattggtaattgatgatcgcttgaaagtgtgggatgagaaagatcaacctcgggtgcatgttgtccctgcatttgctccatattacactcctcaagctgaagcaagcaatgcaatccctttcttttgtcttgcaagaaatgttgcttgcaatgttaggggtggcttcttcaaggaatttgatgatgtcttttacaaaagattcctcaaattgcctatgaagatgatatcaaagatataccttctcctcctgatgtgagcaattatctagtttcagaggatgatggctctatttccaatggacaccgagatccattcttgtttgatggcatggcagatgccgaggtagaaagaaaattaaaggatgcactatcggcagcttcaactatccctgtgacaactgctaatctagatcccaggctcacttctcttcagtacacaatggtgccttctggttcagttcctcctccaacagcacaagcatctatgatgccatttccccatgtacagttccctcaacctgctacactagtaaagccaatgggtcaagctgccccttccgaacctagcttgcatagctctcctgctagagaagaaggtgaagtacctgaatcagaattagacccagatacaaggcgtaggcttctcatattgcaacatggacaagacaccagggatcatgcatctgctgagcctccatttcctgttagacatcctgtgcaaacctctgctcctcatgttccatcatcacggggggtttggtttcctgcagaagaggagattggttcacagccactaaaccgggtagtacctaaagaatttcctgtagattctggtccattgggtattgcaaagccccggcctcatcatccctcctttttctctaaagttgaaagttctatcaaacatttggcagatatatttgtctagtgccaaggatgagcctggttctacatatggcgatgtgagtgggtttcctaatgtaaatgacagtggttacatgggtattgccagctctcttggtaatcagccattgtctaaagangattcagcttcattttcaactgcatctccatcaagaattntagattcctagttggatgtctctaagagtcaatgggttcaatctcttccctgaaagattgtgcatgatggagggtcttgatgtcaattttctatctgcacctgctccaatgtcaacaaattca

SEQ ID NO: 131926 - DNA, 441 bp, Glycine max
  unsure (1)..(441): unsure at all n locations
  Clone ID: PAT_MRT3847_90136C.1
taagaaatgaaatagattcaatgtgcaactgtgatggaaacgagcaaaccacgacgtgtcaataagtaaaaagaagtaaccgagtctctttccgtcagtgtcagatagcaaacgtgggagtgggaggccttatattcattcttttcaattcgttcatttttcgaaaccctaacgagatgaacccctacgacaatagatattccgacgccgcttcttttcgcggccgtcgcagtgatttcgttggacctattccgcctccgtctttcgtcggccgcggcggcgcagttccctacggcgtccccggacccaacgggttcggatccgcacccgttgctccggtaccaccctttgtgcctccttccggaggcttcaacgtangtcgaggcggtggcagagcgggcaatggtcccgtgagtgatagaaaacatgacatgggtcgtg

SEQ ID NO: 131927 - DNA, 287 bp, Glycine max
  Clone ID: PAT_MRT3847_90137C.1
gacgtgctcactaggctgcgggcccccttgacttgatgaatcaacaggtacttcaggcccagatatgctggataaaactgctaccctgtttcggccaatactcattggggctggtgctcgtgcttatcctcgggacatggactacccgcgcatgggaaaaatggctgatgaagacagtgctttggttatgagggacctgcgccctatctgtgggctcagcgcttggtatgtactttataggcggtctgtgtatggagatactgagaccaccacaaccctcatggcgc

SEQ ID NO: 131928 - DNA, 385 bp, Glycine max
  Clone ID: PAT_MRT3847_90138C.1
aacgttagcgcctccgaacataccaccaacaaagacgtcaacaacaacgtagaaaacggcgagagcagccgcagattcgagtgccattattgttgcagaaacttccccacttcccaggccttaggcgggcaccaaaacgcgcacaaacgagagcgccagcacgcgaaacgacaccttcaaagtaccctgatctccgatgcaaacgcgtatagcttcatgaactacaggttcggttccacggcaatgtctaattactcttactcttcttatccaacgtggaacagttccaactcgtcaagcgctatgcttgggaacactggtggaactggaaggatctacggaaactcctattctcagcaacttcaaactatcaatggaagccctt

SEQ ID NO: 131929 - DNA, 167 bp, Glycine max
  Clone ID: PAT_MRT3847_90139C.1
tcggctcgagactgattcacacattctatcactgattcattcatgtggaactgtgactatgctgagaattaccgaccatcaagtgcattcatgttatacactagcacactcttcaagctttcccctcataatgagtatctattcttcaattgcagtgaggatttttt

SEQ ID NO: 131930 - DNA, 163 bp, Glycine max
  Clone ID: PAT_MRT3847_9013C.1
ctctccggcgaagagaaacaccagggaacctttacctagcaaaggaaaggaggagatttttccccacaacaaacaaaggaaaagggggggccaactccgaaaaagggagatgaaccaaaaagtatccccccctataaaagggccacaccagaaacctgcccca

SEQ ID NO: 131931 - DNA, 361 bp, Glycine max
  Clone ID: PAT_MRT3847_90140C.1
cttacacatctcgtattctagtatgtacggtagataatctgcttattgtagggggttatcggcgaatatcatgtcggctgatgtttagcgatgataccaatcgatcttgtcaacctaatcatcccactgtaggtctagaactggaatattttagtgaattatacaacgaactgtttaataggtacttatggcatcatgcgatctgatgcttatagatacatgaatacggctgatgctaattttgagtatggcaataatatcttttctgccgagtctgctctttcactgactatcgaagacagtgatgctaacattagccaatcagagatgctgtaccacgaggcatattgtgagagttata

SEQ ID NO: 131932 - DNA, 252 bp, Glycine max
  Clone ID: PAT_MRT3847_90141C.1
tacgacgatagaaggggtaatagtgggaggacaggaaacaatagcctgaattgaatttgtctttggatcttactagccaactttaaagttgaccttatgagtagagtggggtatgcgggtaaaccctcccagcgaaacccgcattcttaacatgcttgttattttgagtccaaacccgccctgcatagttcgcgggctgagtggaccgatccacatttgacaaaaaaaaatttaaaaatagaaaattaaatt

SEQ ID NO: 131933 - DNA, 753 bp, Glycine max
  unsure (1)..(753): unsure at all n locations
  Clone ID: PAT_MRT3847_90142C.1
atactcagacacacataacacaacacagcaaagccaggaaactccaacaaagtccccaaccccaatcccctttgaaagcaaaagggtggctagcttttgcttctcatgccccgcgatgatagacactttgtctagctagacaacacccttttatctacccttcttctctcttctctatctcttcctcgtgtgtgtgtgagaagaaacccaacctcgtagctcgatcttcctttaccaatcattaataaggaatggatctgtggctaaaaaaacaatcaagggctaattgatgtgttcatcagatcacacacaaaatcaagcagaaaagaaaaagaaggtttttctcgtacggatattacgagaaggagaattttgtttgagtggatatggcgacgtactttcatggcagcacttcagaaatcccttcctccgctgaagggttgcagacactttaccttatgaatccaaactacgtaccgtactctgacgcggcacaacacccaacgcaaaacatgctcctcgtcaatcccaacaacaacaacactagtaacactagtcccacttacaccaacgcgctcaaccttggtaacttctcccacgcgccgtcaccttcttctcccaacaacaacaacaaccaccgtgaacaacaacaacatcacctgattggggttaccattccctcttcaaacattcttggatccaacgctgccgncaccgaccccgctcgatcatcgttccttcgacaacacgaat

SEQ ID NO: 131934 - DNA, 641 bp, Glycine max
  Clone ID: PAT_MRT3847_90143C.1
cggagcttaggcccacagtatcattgtcgtcttcaagcgttcatacttcatactatcctctctctctctctctgcaactgcaagagatgatggagatggaggaagcagagacgatagatctatacgagcttcaatattcagacttatcttcaccttcaacttcatccatagtcgattccattatggaagccctaggacccactggcccaggcctcctcgccgtcaccaacgtccccaacgcttccaacctccgctcacaccttctccccctcgctcggaacctcgcccttctcgaccgcgaatcccggaaactcgttctcaaggagcataacttgggtagtgacgtccctttaagaaatcctgataggacggtgtcctcctttgctatgcaactcaaatatgccaaatcacaacatgttcaacaaacggtgagtgagtgctatggaatggaattcgagaatcttggaagctctttcaaagagctagggttatgcatgatggagcttgggctttgccttgctcgaatatgtgacagggctattggtggcaatgagttagagcagagtctattggattcatgtgcggctaaagggagactcattcattatcattcacatttagatgctctcctcctaaaacac

SEQ ID NO: 131935 - DNA, 385 bp, Glycine max
  Clone ID: PAT_MRT3847_90144C.1
agggggaaggcccaaaaaaaaacggacaaaagaacggcaggcgggggaaaacaaaaaagggaaacagaaaaaggcaaaaacccaaaaggccaaggacaggaaccggggagcaggctcctctcgggggggagcacccaagggaaggggaagcccaggggaaggcacaaaaggcggggacgggggcaaaccccccaaggaaaacggcccacaaaacaaagccagccaaaccacccccaaacaaggggccaaccaaggagacccagggggcacccaagcccccacggcccacagggggcccaaaggagcgaccggggccaacgaacccggcgaggaaggggccgggggcaaaaaggggggcaccgccgcggaccccaacaccaggggg

SEQ ID NO: 131936 - DNA, 1611 bp, Glycine max
  Clone ID: PAT_MRT3847_90145C.1
ttacaccggagcttaggcccacagtatcattgtcgtcttcaagcgttcatacttcatactatcctctctctctctctctgcaactgcaagagatgatggagatggaggaagcagagacgatagatctatacgagcttcaatattcagacttatcttcaccttcaacttcatccatagtcgattccattatggaagccctaggacccactggcccaggcctcctcgccgtcaccaacgtccccaacgcttccaacctccgctcacaccttctccccctcgctcggaacctcgctcttctcgacctcgactcccggaaactcgttctcagttttgtagggatgctcattgtgcttgaattgcgtagctttccttcctaggagcataacttgggtagtgacgttcctttaagaaatcctgataggacggtcttctcctttgcaatgcaactcgaatatgccaaatcacaacatgttcaacaaaccgtcagtgactgctatggtatgcaactcgagaatcttcgaggttctttcgacgagctaggcttaaacatgattgagcttgggttttgccttggtcgaatatgtccttcaacgattagttgtaatgagttagagcagagtctattggactcatgtgcggcgaaaggaatactcattcatcatcattcacatttagatgctctcctccttcgtcaacgtgagaggaaggtaggactttgcaagagacgtcccggtaatatcaaaccattggaagggttagagtcgaattcaattgccaatgatgcgaattcgggtgggattcattcgaatttgaggcagcagtggcattaatgatatggcggcttcactgttcttacaactccattgtttattctgccgtctttggtggagacaagcaaaacagaagatccgtttcctgcatcttgttttgatgagtgtccatcaccaactaggcatacatgcttgcagatatatgatcccaataagaaaagggccattatggtgaatgcccctccagaaagttttatcattcaagttggggaagctgccgatataatctcaaaggggaagcttcgctcggccctgcactgtgttcatagaccttccaagtttgaaaatttgagcagagaaacttttgttgtgtttctgcagcctgcatggactaaaacattctctatctcggattatccgcatgcaaactccagcttcaatggtcagtgtttagtggctactgatgaggagcagcagcaatctgggcaggatagtgataatctaagtcaagaaattaacaaaatagttccccctctttcgtcacggttgaaggaagggatgacttttgccgagttctcacgtgaaacaacaaagcagtactatggtggtagtggtttgcagtcaaatagatgactagtttctaagggttagtcctgtttcaatgtatacccctgccaatgcaatagaggtttgattagttaaacctcactcattatgtattttggtaccctttatttggaacaatcgtatatttgcaaaagagttacactcatttagtggaatggcaatatatttgggaagctgtttaacaggggaggaaaaaaaaaaaaaaactcgagac

SEQ ID NO: 131937 - DNA, 523 bp, Glycine max
  unsure (1)..(523): unsure at all n locations
  Clone ID: PAT_MRT3847_90146C.1
gttggggatcttcagcagttcagtggtgtcaccgccggaggagctggtggccgctggcatcataactccgtctccgaatacgacaggggggaagctgctaaaccagttcttagagatcaaagcatcaacagtatcgctacgagtgtaggaacacatacatgttactttcacacgccacatcaaatcaccgtatcatgccagatcatttactattaatgatgaaatattctacttatttaaagaaactctatacaatggaggcaggctaanacaacattatgaactatccgagtcggccaataaactaattttgatgatgggaacttacaaaactgtacgtgatcgagcaccctaccctaccaatcggttgagataccatctcagtaatagctgggctttcataatatntgacaantgcacttgtaccctcttttttacttttaatcaagctgtcaagagtcctctctattataaaatgacagctagtgatgacggtgcatctgctgatcatggagattggctt

SEQ ID NO: 131938 - DNA, 295 bp, Glycine max
  Clone ID: PAT_MRT3847_90147C.1
aatcggcgacaggagtcacgcagaaatacagacctgagtatcgctcgttggttgagattggtgtggcttccaatggagagctgtgcactccagtctctctcaacctctcgtctctcgctttactcagctccatcactctcctctccctgacatctccagatctcaattcagccaatctcaatctgtctctctacgatgatgcatcacaatctgccgatcgtttctccttctgctcgtgcacgttcaaattcaaccctttctcaaaacgccattaccctactcaagcttctccttc

SEQ ID NO: 131939 - DNA, 416 bp, Glycine max
  Clone ID: PAT_MRT3847_90148C.1
ggctcgagctcgagccgccctaatctagggtttaggtttaaaattaattcagttttgtagggatgctcattgtgcttgaattgcgtgctttccttcctaggagcataacttgggtagtgacgtccctttaagaaatcctgataggacggtgtcctcctttgctatgcaactcaaatatgccaaatcacaacatgttcaacaaacggtgagtgagtgctatggaatggaattcgagaatcttggaagctctttcaaagagctagggttatgcatgatggagcttgggctttgccttgctcgaatatgtgacaaggctattggtggcaatgagttagagcagagtctattggattcatgtgcggctaaagggagactcattcattatcattcacatttagatgctctcctcctaaaac

SEQ ID NO: 131940 - DNA, 533 bp, Glycine max
  Clone ID: PAT_MRT3847_90149C.1
ggaggaaaaggacccatgtttgattgtttgaaaacaaaatatacatgcatattggaggggaaaaatcatatctaacttggttaaaaacgggttaaaacttttccttctttacctattttatcaaaaaacttaatatcacagattgggcaagtttaaatctctttaaaacaaaaactgcccagctttaaaagtactcgcatatgcaacattcatagctgaactaaacaaaaacaggattttgtgggaaagcttccttcccagaaaggcctttttttaaatttttaaaaaataccccatagcccttttttggaggagggtttgttggacccacaaaaaagggctccctaaagggaaggacacttttgaccccaaatgttttgccacatgcgtaagggctataaagcgcagctacccacataaaagcaatctcttcccttgatatttaacccgaaatattatctccttgaccaaaaataaaaatggcaccagcaggctcctcaattaatgcccaaggcctcacaattgcataggga

SEQ ID NO: 131941 - DNA, 191 bp, Glycine max
  unsure (1)..(191): unsure at all n locations
  Clone ID: PAT_MRT3847_9014C.1
acncatacatacncacngaatnnagcncgaagatncaaacagncncnnacnagtnaacncntcnacccnnnaatnaattccngaccnntacctncaggcntaccancnttccctatagtnantcgtattancncttggcgtaatcatnntcatanctntntcctntntnnantnnttatccnctcacaata

SEQ ID NO: 131942 - DNA, 190 bp, Glycine max
  Clone ID: PAT_MRT3847_90150C.1
caggaatgaattggtatgcttagaacaatttcaggtttttatttattgatgaacaaggagatattgaattactataagaaggctatacgatatgattctcagctggtggaaacttacactattagatgtaagatttaagggatatgaatttggtgtaggattgaagcgtgtagattgacatagaggccta

SEQ ID NO: 131943 - DNA, 153 bp, Glycine max
  Clone ID: PAT_MRT3847_90151C.1
gtgcaaaggctaattattccaacattggggtacctggagttacataaaaaactcttcatgaatagcctatctttaagaagttcgatccaaaaacagcctcgaattgcaacccaatgtattaacattactttcctttccaggatcagtgatctt

SEQ ID NO: 131944 - DNA, 592 bp, Glycine max
  unsure (1)..(592): unsure at all n locations
  Clone ID: PAT_MRT3847_90152C.1
atttaggactgaattgagtgccattggtaaaacctcccacaaaaatctggtcaggttgattggattttgtgaccagggaatcaatagactattggtgtacgagttcatgagcaatggtactcttgcagacatcttatttggacactctaaacccaattggaatacaagggttggatttgctttggggattgcaagagggttggtgtacttacacnaagagtgtgacactccaatcattcattgtgatataaaacctcaaaatatactcatagataaacatttcaataccaaaatatctaactttaggttgaccaagttgttattatctaaccaaagtagaactaatacgatgatccgaagaactcgaagatatatagctcctaaatagttcaagaatatcgctataacgattaaaataaatatttacagctgttaaataatattatttaaaattatgtactacagaaaaaatgatataatgaatgaaccccaagaaaaaaaataaaacagtacttaacagatttaacctatcatttctatatggaaaagaaaatacatcctctagttgaaaatgaagaatacgcctatctaa

SEQ ID NO: 131945 - DNA, 731 bp, Glycine max
  Clone ID: PAT_MRT3847_90153C.1
acgcgtccggtcagcaacgaattaggagcatcacatccaagagtagcaaaattttctgtcttcgtagtgaatggaaccagcatcctcattagtgtggttttctgcacaattatcttgatattccgggtttctttgagcaaacttttcacttctgactctgacgtcattgatgctgtgtctaatttgactcccttgcttgctatttctgttttctttaatggcattcaacctatattatcaggggtggcaattggaagtggatggcaagcattagtggcttatgtaaacttggacccacgcgtccgtgttggtcttactgttggatgtgttcttggcttcaaaacttctctaggagttgctggaatttggtggggaatgatccttggagttcttatacaaacagtaactctaataattctgactgccagaacaaattggcaagcagaggttgaaaaagctgttgttcgcatcaataaatccgctgaaaatgacaccttagatcaactggttgctgacacttagaggcattcgtgttttttcttcaggcttggttgaaatgcattttagctgcacaggaatcttgctttggactaaaggaatgttgttgatgggtttcttcaccctatttaattttatgttttgttcacaattttgagaatctaataatgaaacccaactttcactgccagcataaatatttgatatattattgcgtggttggatatgtgttt

SEQ ID NO: 131946 - DNA, 529 bp, Glycine max
  Clone ID: PAT_MRT3847_90154C.1
gggtggggtttttttttttttttttttttttttttggaggaccagatccctactggaaatttttaatttcttcgaaattttgaggaaaagacgaatccggttctgtccaccattgaaccctagtaaggttcttcacatttaaaattccttgggatgggattcctttgattggacaggactccgaagaaccctaacactgtttttttttttcttccccaggcaaacattgagggcgaggggttactgtttgcaaagaatgctgttttaaccgggatattttctatccaaatcaggttggtctaggatttgtttggcctagggataagaaaattggccccctgcgcctttgtctgtcatgtcgccatttgggaggatccccggaattttgaatggtggggttcccgcttttcttggggaaggtggactcaacttcggaactttttgttgagggccccccagatatttttggggggtgagggtggacttctgcttgctttattgggccatctggggttgtggtttgggaggg

SEQ ID NO: 131947 - DNA, 377 bp, Glycine max
  Clone ID: PAT_MRT3847_90155C.1
cgtttccctaacctacgtgcgaagtcctttgaattctgtaaaaactaactcaagggcctgtgccctgtcgccctcgtcttcatccccctgtcggaaccgaaatccaaggcccgccgtcttgttcagcgcccccccgtccttgagtcggccctgccaaccttcaagcacgatcctggtcgccggacgccttccgcgaataggccttggctccggcgccaggggaacctgcaaagacccgccgcaacaagagccgtccccgatgaagaccgtggacacagcttcaaagccctgcttcgagttgggccttcggatttcgaattccctcccccgagaaccaaacctcgatccaccgccctcttccgattactttgccccgc

SEQ ID NO: 131948 - DNA, 426 bp, Glycine max
  Clone ID: PAT_MRT3847_90156C.1
gttcttcattagacattgaaataaatgacctctttccagggagctctatagtagattgaggccaaccagttgtgaatttatcatcgtctgtaagcacccttttgcatgtttcaggtgttgtcacaattacacttggatttccaaacatcaaggtcttgtacattccagttcttccatatcttcatgatttgttgattgaatcaaaaacgttagtatcatcaactatatgatgcacaaatatgatatacgtatcaaatatttcacatgtttaggatgcataaacatgatagatatgtatataaagtttataaaataataaatatatgaagtaatgcatgtactgatatttttatgataattttgttcactataataataattactttaaaatttaaaattgatgttaacgataatttctgattaatt

SEQ ID NO: 131949 - DNA, 662 bp, Glycine max
  Clone ID: PAT_MRT3847_90157C.1
gtaacaaaccaccaatgtccttcattccaagtgccatctaatctactagccaagctaagtacgtcctgatatggagaaagaagaaagtgaagaggaagaagatgacaacgacttgaatgttatgctgctctccttttgaagagaggagtatcaaaaaggcaattcataaaggcttagggaaggcaaagcctttcttccaggttcaattcacgaagctgtgcctgcactggtgattcagccagctaaggttttaaaaaaacagtccatgaccatgatttcgattgtaacactcagatttttggggggcccacgatcacatcatgaccacaattgtagtcacttcagtgccacttgttcacaataacaaagaacgctaccacaatttaaaaccttgcagctagctaagccatacacagactgcagtttcatcttaaaatcaatgtgtgtttgttgctatgtagctcatttaccgttctgtttctttttccacctattcttgtcacagttgtaagtttgaatggtttactcatgaggtagggaggtagtgagtgatttgagatataggaaatgtaatattttcctgtgttttcgttggaagccatgaataaagtggcgaactgtttgttggcatcaggaaagaaaaatgaaccctgtccctgttt

SEQ ID NO: 131950 - DNA, 452 bp, Glycine max
  Clone ID: PAT_MRT3847_90158C.1
tacatcgttagtactaccaccttcttgggggggggggggggggggggggggggggggggggggggggggggggggggggggggggggggggggggggggggggggggggggggggggaaaattttacccaaaaaaaaaaaaaaaatttttaccccccccaaaaaccgcccctttaaaattttaataaaccccccgaccaaaaaaccgggttatgggttttcagaagtaaaaggaaacccaaaaacccttttgggggaattttaaaacccgaaaaccttaaattttttttccccaaaaccccttaagggggaaagggaaaacccttttaacccaaaattccaaaaattcccaaattttgggaataatcccccaaaaaaaaagtttatttttaaaaaccccccgcggttaaaaccccttcccggaaaatttaaatggggggatttaaagggggg

SEQ ID NO: 131951 - DNA, 231 bp, Glycine max
  Clone ID: PAT_MRT3847_90159C.1
aaaaacaatttttttataatattagctaagggctattacatatgggagagcaattcgttctaaggatgctgccacatttcagacttaaccaagttaaacccattacatcagcattgatggtttaattattcatgggctggtgactgaaacataaatacaaatcataagctaatactctatatcaaagggttccacttgtcactgaagattgtaaaaaaaggattgctatgg

SEQ ID NO: 131952 - DNA, 487 bp, Glycine max
  Clone ID: PAT_MRT3847_9015C.1
caacaacatcgcgatcacaattcatttcacaactcggagttgctgttgtcgttcatcattctcttctcttcactggcacttgatagatccctctctcgcagcttccattcgtaatccagattctctttgatcggatgcatcttctgggttttgaacctgttactcctcatcaacattatttgtagagggaaaggaggtgtcatttcagtttgaacagctttagattctcaaacaattgaaatcagttatggctccttctaggaaatctagaagtgtaaataagaggttttctactgttcgtgaggctgcatctagtaaagacaaaattacagagaatgctagcaaaaataggctgaaggcgagtcctggtattcagaacaagagaaaattggctgacatgttagggccacaatggaataaggaggagcttgagcatttctatgaagcttaccgtaaatatgggagagattggaagaaggatgttctt

SEQ ID NO: 131953 - DNA, 335 bp, Glycine max
  unsure (1)..(335): unsure at all n locations
  Clone ID: PAT_MRT3847_90160C.1
agttatcaaagtctgccgccccttaaaaccgcggacaaaactaaccgtttctcgacgacaagaccccctcaacgacttgatacccgagtgtgaacgactgcttaagggaaagaagatcactcactgtgctggccacaaactacgcgaatcattaagatttgcatgcgaagcatacatgcgtgagcaccctactatccgatataggacgtttgtgacagattcaaacgntgagcaggatgttgaagacgaactaagtacagatcagggacacggtggggcaagaccgaattagggcaaccactctactatctgatataggagcacatgggaagact

SEQ ID NO: 131954 - DNA, 167 bp, Glycine max
  Clone ID: PAT_MRT3847_90161C.1
ggctcgagtcttgttgacactacttctgcatcattcaatttcaaatcatggttaagaatgtatatgaataatgttatgcccagtctttttttcacatcagttttgacaataagaagagagatagagaggagagaaaaatatgatataagaagggtaatgcaatagag

SEQ ID NO: 131955 - DNA, 606 bp, Glycine max
  Clone ID: PAT_MRT3847_90162C.1
ccacgcgtccgcttcaagtagatatttgaacctaatgcagcgacagaatgatgaaaatgaagaacttaaatcgtatcactaagttaattgtatggtttgattggagagccctctgaacctatgctaaatcgaaacggagacttccttgaaatcaagttgaaacgtttttaagttggaaaactatttgacaaaattccacgtggttttagccttataatcctatataaccttaagatgcccgaaaatttttcaattcagaactatacaaagcttgaaatgaggacaatataaagattatttaatgcccttctctatagaagaaaaaagggctaaggatgaagtgtcgccattgatagtttgataaccaaaatagatgcatgacacaacaatgaaccacataaccatcatcactaaaaagtaaaagcattttcctctcagatgctttagcttcttgcgcttaaaaatgggtgaaggtgtgaggtaaacttcattgtagaggagcgaggttcttcctagaaaactactgataagtaaatagagcttcataatgctagagtttgtgggaaaatgtgataaagctttaaccagtaaaagctacaccctaac

SEQ ID NO: 131956 - DNA, 419 bp, Glycine max
  Clone ID: PAT_MRT3847_90163C.1
aagctcatgcctggggttttttttaaacattttggggttcaaaaaccaacctagcataagcatgcacagaccaagacttagcaactgtatactcaggggaccctattcatgaaagaagaggccccactcagccacggcctaaagggttaaagtcggaacaagcatttctaaatggttgccaaaaaaatgggtgataacggaacatgccaaagttccctggaaaacagccactcaccaaactgccaccaatccacccttgatagaaaaatcatgcaaaatgtctgctgcatgtgacccggacaatattatctccttccctgaattaaccagccctatttgccgtctcgttactaacatgattaatcccgactatcacagtctccacaacttgtgcactaacaactccattgtgctgttgc

SEQ ID NO: 131957 - DNA, 255 bp, Glycine max
  unsure (1)..(255): unsure at all n locations
  Clone ID: PAT_MRT3847_90164C.1
tgactccatctttgcgattctcaantntctcnctctnaaaaccatcagagcatgagagngaaacntccctgcccttacnatttccctctcgattncttcgcntttgatttcnatnntttgctagnagagaacctnattcnnnnnnnnnnnnnnnnnnnnnntcaaattcccttcctnttcttccantttcactctctnnctancncgnncgatgnactttggtttngcaaactaattcgttggctaaattactcc

SEQ ID NO: 131958 - DNA, 400 bp, Glycine max
  Clone ID: PAT_MRT3847_90165C.1
aaaactaaagattggttatgtgagtagtgactttggtgataatgccttgcctcatctgctgggatctgtttttggaatgcgcaacaagaaaaatgtggaggtgttctgctatgccttgaatgctaatgatggctctgaatggaggctacgcattcaggatgaaacacagcaatgtgaggatgtatatggcttgacatcggatgccatagctacaatgagtaacgaggatcagatacatatccttgtcaacctaattgggtatactaatggtgctagagatgagagatcatctatgcgacctgcaccaattcaagttatatatatgggactgcatcgaacgactgcggctactgacattgactacgtagtcactgatgagttcgacaacctcgtacggttg

SEQ ID NO: 131959 - DNA, 446 bp, Glycine max
  Clone ID: PAT_MRT3847_90166C.1
aaaaaaaaagctttccccccccgggggggggcattattttttttattattatggccccatgggggggggaaaccccctggaagtttaacaaatcaaccccccaccccccttggggccccccaaaagaaaaaaaaaaaaaaatccccggcccccctgtaaaaaaaccgttgggggccaactggttgggtgaaggggtaaaaacccaaatggggaaaaaaaaccccgacccggtacaaagagctttttgccttttccatgcaacccggaaacttttttaaagggcaggggtttggggggcccaattaaatcccctggggattttaaaaggggcactttccccccgggaataatcgccggggccacggggaagggattctactttggtgccccccccgggggcctttttgaaagcattcacaaacccctttacgggactcccctttcca

SEQ ID NO: 131960 - DNA, 1013 bp, Glycine max
  unsure (1)..(1013): unsure at all n locations
  Clone ID: PAT_MRT3847_90167C.1
accactctctcactcttctctgatatgctttttctttttattttttgcattatttttaatctctctaggttctactactactctttaacaagcaaggaatgcttcaccattaccgtactcacaaccatcaagtgcaaattgcaaaacactagaaagaaccctgtcttctctttctttctcgagcccctaccttctttactatctctctctctacttgtgtgttgtagtcctgtagtaatattttttaaactatacttacttatttagtaaccctatatatctattagtatttccattaaggcattaacattaagttaatatctctaacttgttgtagctggctacttaggtagtgagactgagggaatggaaatctttgtggggttgttttatttctaaagaaagcttcttcttcttcagcattatctgctgcatttttttttaggtctcaaaaagaggaatggtttttactccagaacttaggaaaaaggctattttttgaaaacttgtttgtttctttttaaacccagttgaaagtttggttctctctacctgggaaagctccctccttttttgtcagagaaaagagcaagagcctttcttactccatcttcaaaaagcatccaacccttgttaagataaaggagcactcactacactacattatacattagtgtttgtgcgtgtgtgtgtgtgtgtgagagagagagatgggatgtgttgcctccaaactagaggaagaagaggaagtggtggctatttgtagagagagaaagcngctgttaaagcaagctgtggagaaaagatatgcacttgctgaggctcattgtaagtatttccactctctcaatgcagtagcagcggccattaagctctttgttgcacgccactcttgaccttgatcacctttgctcataactttgcctgctgcttgcccttgttgtgcttctgcttctgcttctcatcccactgagaatgtcatagccaaccccatgttgctgcagcagacaccc

SEQ ID NO: 131961 - DNA, 546 bp, Glycine max
  Clone ID: PAT_MRT3847_90168C.1
gacgagctcactagtctttggccgccctttttttttttttttccttttttttttcaaaaagggtcaatactaaaaaaaggtacatttggatgaggattgagtccaaaggtagcgccaaattcattattttcgctcaaggacagcatccaatatctcataagagggaggaataggggcaataggaggttacagcactctactagttataactaaatgggattatggtcaaaggaagaaaattgccctggaaaataacagttataagatgctttaaacgggctattggacacacggggttgcaactaatgtataccaagaaagaatgaatggttcccgagggccttcatttgaaagcgtctttgtaaaattccaatggaggaccttcatgactactgtgcacgatgagatatatgagcagcgtgcagtcaagccgttcgaacaggccaaggaacattgctgcagacatgtgaacaggcatatgataactgcttcctgctcttgcgatgaaatgatgaccatggagggcttttgcaggggaatgggact

SEQ ID NO: 131962 - DNA, 1592 bp, Glycine max
  Clone ID: PAT_MRT3847_90169C.1
ggctcgaggtttttgaagcaggactaaaacgctttatgcacgagcctgtttatattctcgaatatgctgatttcttgatacgtctgaatgatgaccaaaatatacgtgctttatttgagagggcattaagttcacttacaccagaggaatcagttgaggtctggaaaaagttcaccaagtttgagcaaacttatggggatcttgctagcatgctgaaggttgagcaaagaaggaaagaagcactttctggagctgaagatggaacagcattagagagttctctgcaagacattgtatcacggtacagtttcatggatctgtggccgtgctcctctaatgatcttgatcatttagctcggcaacagtggcttgccaaaaatatcaataggaaagtggagaagtctattatgcctaatggaacgactcttttagataagacatctatggcaagcatttcaactatgccatcaaaaattgtttatcctgatacttcaaagatggtgatatatgatccaaagcatactcctggtgctggaacaaatgcatttgatgaaattctgaaagctacaccacctgctttggtatcatttttggcaaatctacctgcagttgaaggcccaatgccaaatgtggatatcgtgctatcaatttgtttgcaaagtgatctaccaacaggacaaagtgtgaaaacagggattccaacacaagtacaaagtggtaaagcaggaattccagcactattaccagctggttctgctcctgctgctgctgcaagtgaactttctggttcaagcaaatctcaccctgctccaagtggtggtgtatctttgaaaccaggacgtaatagacaatatgggaaaaggaaggaaccagacaggcaagatgaggatgatactacaactgtccaaagtcaaccacttccacgagatgctttccggatacgacagtatcagaaagctcgagccagcagtgcttcacaaacaggatcagtttcatatggaagtgcattttctggcgatttgtctggcagcactggctgataaaatattttcaaaccacttcttgaaggcctaagtaaattaaaagaccttccatgagctcatacagcattatgcatttgcctattgcctatttgataagttgtgaacacgatatatattcactattcaggttcctgcctccattatcatgcctatggccctatagagtcttatggacaaggcaataggactataatctttgcatgagtacgacctcagctcttgggaggattaatacttcaaaaggagcttggacttgcatggaagaaccatacttgtctctgaagtgttaagagtataaactggtattctaaaactgttttcccatgcaggaacgtaacattttttcctagatcttttacaataacatttaatttatgtaattttattttgctatgttattggaggtgcaagaaacccggttgcttaatgatggattaaactttcaatatcctgattttacaatattttggagactggcatctgtctgttatccacgagcttacttacacaatttttattttattttattttgtgaacataattagcact

SEQ ID NO: 131963 - DNA, 429 bp, Glycine max
  Clone ID: PAT_MRT3847_9016C.1
tagaatttagccaccagcatgcatgagattagttggcataagttgagagttcaaaatggccccagaaacataccatatgcatacaagagaacctttctctactgcttattccaactatggattgattgtttgctcatattgttagcctagcactcatgcctaccctagggaacttatagacctcagcagagagagcgggcattctgttcaccgaataattaaggatagctaaggataataatgctcacacaggaatacaaagcgaggaagctacaataccttgggcaataattctgaaattgaggcatccaaggggaagggaatatgctgcttccgactgctagggtattcgcagtgacctcctttacgagacagaattggcagtcgaccataagaaaataaactaacaatggggaaaatgccattaac

SEQ ID NO: 131964 - DNA, 1129 bp, Glycine max
  Clone ID: PAT_MRT3847_90170C.1
acgacccacgcgtccgaagacgaagatggtgcaatgcaagaggagaaggtgacattgagcatgagcatgagcatgagcatgagcatgaacagagggatgatggttcactgcaacaacaataacaatgtcaacaacactaataatgtgtgcaactgcaagcactctccctccgccaccttagaccttctcatcctcctcctagtcctcttctccggcgcgttcctcctctcctcctacctctgctacatcttcaactccctctccctcctcctcccctcggtgccgctctcctacctcctccccttcctcctcttcttcgccctctccctcgccaccgccgacttctgctgcggcgcccgatcccgccgctgccagcgccagggctgcaagggcctcaagaaggccatggagttcgatttgcagattcagcgcttcggctcctccgtgccttcctccgccgaaatcgataagctcccctggaagggcggcactgaggccaaccccgattacgactgcctcaggtccgagctgaggaagatggctccccctaacggccgcgcgcttttgctcttccgggccccctgcggctgccccgtcgccaaactcgaggcctctggtcccaaaaaggccaaacgccataagaggaccccacccagtgcgactcttaatggaggaggagatcatcgttgattgactgtcatgtttcccccgctggcatctcgttctcattctcattctcatcatttactgcaaaacttctgatcagaaccattttttaagaaagaaaaatagcaatcaggtctaaaaaatccttcctcatatatctgcattatctagtagtctataaactttggaaggatcgtacagaattaactgcaataaatatgtgattcgtcatcgagccatttcatttattgaaaaaataaaaaaaaaaaaaaaaaaaaaaaaaaaaaaaaaaaaaaaagggagaaaaaaacaaaaaaaaaaaaaaaaaccagggggggcgccccccacctagggagctcttcttcccgaaatttatttcgggaccgtaccttgaaggcttcccacttttccttatatggggtctttttaaacctgggggtaataagggacaaagttgttccct

SEQ ID NO: 131965 - DNA, 469 bp, Glycine max
  Clone ID: PAT_MRT3847_90171C.1
gccgttagggggagccatcttcctcagctcggacctgaggccgcgcgcttcttctcttccgggccccctgcggctgccccgtcgccaaactcgaggcctctggtcccaaaaaggccaaacgccataagaggaccccacccagtgcgactcttaatggaggaggagatcatcgttgattgactgtgatgttaccaccgctggcatctcatttatattattctcatcatttactgcaaaacttctgatcagaaccattttttttaagaaaaatagcaatctggtcttaacaatccttccttatatatctgcactatctagtagtctatataaactttggaaggatcctacagaattaactgcaataaatatgtgattcatcatcgacccatttcattaattgtaggtgtcctaaaattgctgacttcattgtctctcaagtcatttcacctaaaaaaaaaaaaaaaaatat

SEQ ID NO: 131966 - DNA, 584 bp, Glycine max
  Clone ID: PAT_MRT3847_90172C.1
cgaggttcatcaagctataaggggagaaaccaaagataaaatgtgggcggttaacgaaccacgttattaacccctccttcttgcgaacctccacgtacaagacgtcttcatgtgtgtaatagaaattcggcgcgtcaagacgtggcaagtcctctgtgaagggcggatcatgggccacctcgatctttccgaacagttcgaagggtccgaggtaatgcctgtctggagtgacacgtggcggagattgggagcgtttgggatgagggcgcgtaaacgttcctcaacatggcaccgttggcttggcagttttaggcctccgtgggttttctggtccagcaaacgtagaacacgtgagtgacgtcggtcaaagatgacagctgtgattcggcgtcgctttggtcggagatatcgcactggatgtagcggatcggtgattcgtgttccaacttggttgtgtgcggcgggccacaccgttaaagatgaattattaatgttgcttctatgcctcctaaattttccagcattatattattaccacattcagatattccaccaaaagatgtctccaataattcataaatgac

SEQ ID NO: 131967 - DNA, 337 bp, Glycine max
  Clone ID: PAT_MRT3847_90173C.1
gggataaggcccgctataaaaaaacaggggaatccctttatcatttgatgacaattggttttaatgctaaaaaagcctgatttgaatttatttttgaactattaggggtaccaggcattgaaaatgcattttggaaggaaactttgctttataacattcttaacatatggcatcccgaagagggggacctttggggcttggacatgcccactcgttttaatgggggccacaaataaaatgttggccaggactccgatcaaaaagatgccgacaaaaattcagtccaacaatatgttatgaaggggcctcaaaactttaaagttgggcaaaccattta

SEQ ID NO: 131968 - DNA, 499 bp, Glycine max
  Clone ID: PAT_MRT3847_90174C.1
cttgggggtttgttttttttttttttattttttttttttttttttttttttttttttttttttttttttttttttttttttttttttttttttttttttttttttttgttgaaaaaaaaagacaggacccccttttccttttttaatttgggggggaatttttgggggggaggggggggagtaattctaattcccttcaaagggaggaactttggggggcaaattcatgggcttttttcaaacaaacaggggaataatcctggggcttttttcattggaaaaggggggggggaccccaacattggggcttttttttttttttaaagggggggaacttggggggaaaaaggtgccccaggcttccaaaaagcgggggtgggggttttcgggggtttccaattaaaaccccctttaaaccccaaaagggtttcaccacgggggggggtaaaaaagaaaaacactgccccaaaggacctggggagggggacccaatgggggg

SEQ ID NO: 131969 - DNA, 451 bp, Glycine max
  Clone ID: PAT_MRT3847_90175C.1
atatagttgggtgtcgggttaatgaaatgtaaaattgattaacttgacctaacttattatagtatggcttatctatctttttgataagtacaatttttatccttttagttttagttatggaatgtcgtcttttatttaataatatatttgattgggtaaattttttctctgattttttttaaaaaaattcataatataataatattttgaaaagttgtcaaactatccaatgcaaaccaatctgacttgaatgaaatcggtttggttcgagtcttttactaaaaaataatgaacttatggctcaacctaacttgtcaatcatgttttattgttttgaattttaaaaatgacctgatagaggactatccaatgaggaagagtttgacttaggtgaactcaatatggatagaccaatcatttgagcaaggagtaaaagatttcaagaatagct

SEQ ID NO: 131970 - DNA, 147 bp, Glycine max
  Clone ID: PAT_MRT3847_90176C.1
caaaactaggatcactcctctagctagccagaaatggttctgaaacttgtttatagggaccggtgtgataatagggcggatttaatcattaacatgtgcacaatatcaaaatcaggctataatatctgcacatatttagaaagtgac

SEQ ID NO: 131971 - DNA, 235 bp, Glycine max
  Clone ID: PAT_MRT3847_90177C.1
tcgatctgctaactggaatctcttctcagttacgattagctcccttaacccaatctttgttttgcagaattatgtctaatgcaaatgatcaatcgagagagagaggccataaggtgaattttccattacagtggtcaaatgcaaatgcaattatgtaacttttttaaaaaagaccctgcgtattaaatcactgaacaggatttaatttagatgtttcgcaacatagaactggtgt

SEQ ID NO: 131972 - DNA, 430 bp, Glycine max
  Clone ID: PAT_MRT3847_90178C.1
tataggtttcatgccctgttctgggtagttccacttctccaaggacacttcacattgcttatccccaacaacagggtactatagtttctcttccattttccacttttcccttccttcaccatgaagattgcgtaattttgagacaagggccaaaaggggttctgaatttttgtgtggttgtggtggttttggttgttgactcgttaaagtcagttcctttataagcatagtggttagtgaagatgctttatttttgagactactagggaaggctaccaatttgtctgctagtgttggactttgcttcatggtttgggaagactagatagtccaccttattggctctttctgcctttattattattgctattactttggaacttggatcgatcacttatactatttggatagaagaagatgaggggtggga

SEQ ID NO: 131973 - DNA, 1409 bp, Glycine max
  Clone ID: PAT_MRT3847_90179C.1
ggcggggagaccccctcttttcttaggactaattgattatccaaatggactttattctttacattgaatcaccacaagtttacactccaagttcccaaacagattaatttattgccagaaaacatcgaaaagaaaattttgaatctttaaaacaataatataaatgatgaagaaaaagctcaaagccatctcaaggtgcttgatattagagacacttttcagcttcaggaagatgactttactcaaaaggggaagagattgtccccagcaaatagttttgaaattttctgatataggaacttgtctcctggcttaaaataactttaatctaaatggtaaatgaaccattttcatcccaaggagcaaaataccactcctttcacacagctacatacattggtccccgcttatttggaaaagcaactaacccttgcaatggatttttttgtcatcacaacctggacatggaaatcttattccatctcccacggattttccagataactgtccctgtccacaccctcccagcgccccaccccttcttgcaagccccgacacacgtagacccacccgtccctgctcgcccagtcaatccaacaacccgcgctttggcattcacgaccagactatccccgcactgagtccctccaccccccctgcttatggctaggccccgctctgccaaaccactcaaagcttagtttccgcaaattcgaatatcacatgcaagagccatttcaagtccaccaccaagagctactccttcaataacagcaatagttggaacacgaacatcctctagagatgagaatgtggagcgaagagaattcacaaaaatcttagtttctgactgactcatggtcctgcgctcctttaaatcagccccagcacaaaataccccaggaactgaactactgatcatagcaacattagcgtaagatttctgattaatcaactcaaacgcatgactcaggcctcgcagcatctctttccctatagcatttttggcttgaggcctgtccaagctaatttcgacaatcccggaatcagggccagtgagtttgtgaagcctgacgaattcagaagcggaagactcaagaataagatttctacgggtctggtgctgatgggtgatgagattgagaatgagatagggtttggaagttttaacataggagctgctgttgcatacggacctagtcaacgctctcaaagcgcacatttttctttttggtcaatgctagttcagttctgctctgtttcttcggtgggagatgatcgacttcttcagacaagaacgagaagatcactgtctctttgcgactttcgtgtttaatggaggcactatcatcctgctagtttggtttcacgcattgaaacgccacctatccccttctgtcgtcttctcg

SEQ ID NO: 131974 - DNA, 523 bp, Glycine max
  Clone ID: PAT_MRT3847_9017C.1
cttttctccctacgattcatcgcaattcacaaaatgggcaattgcttgaggcgccaatcgcggatcggatactccaccgacgacgatgaggactgggaggattttcgggcggcggcggcggcaagcggtggtgttaagaaatcgacgagagaggtgaaaattaagataacgaagaagcagttggtggagttggttggtaaagttgaggtaaaggagttgagaatggaacaggttttggcacacttgatgaatcactctcttcaacgtccatggaggcctgctcttcaaagcattccagaagatcattaacgtaattatatggaacagagtatttggcttattggctcaatccttccaccataaagagaggattttgttttgttcttttatgggaatgttaatgtaaccaccagggtgggtgcttacactttttgcttcttttgtaaatacaaaactttagtaccctttgctgctataccctatattattattatatatcacagttagaggttcatttatcttc

SEQ ID NO: 131975 - DNA, 316 bp, Glycine max
  unsure (1)..(316): unsure at all n locations
  Clone ID: PAT_MRT3847_90180C.1
ngcatcgnacgtaagtnggaattcggctcgagngagaagacgatagaagggggnctgaananagagatagtgnnnncnggnannaatnncggatgggnacattgnangggtaccannnnnnnntatagngagnnggantagagcnnggcgnaatnatggtnatagcngtntcntgtgtgaaatngntatccgctcanaattccacacaacagaaaaannnaaaaaaaaagaaaagnatntaanangannnttggtgangttgaagaaattgttatanagtggaaatcgatgatgagacataggaagaaatgtgagg

SEQ ID NO: 131976 - DNA, 928 bp, Glycine max
  unsure (1)..(928): unsure at all n locations
  Clone ID: PAT_MRT3847_90181C.1
gaggtttgtttatcatttacttacgtgacactctaatcttataaggtcattttcatacagctgaatgattccttttgttgtttctttttggaagatgccttacttgcactgcttctaccttatcctttcctccttctaacagtgtttattctgctgatgtgatagttgtagcctgttaataccgtgatagcttctcttagaagggtttgagactaactcaaccccaaaagctatagctcatagggtgaggattgtcctcgacttattactctatcttgacactatctctagccaatgtggaacttggatttttttcaatatactcctctcatgtccaacactttggagcttgaagcgtggataacatggtgggtggtcctttgaatggatctaggatagactttgataccatcttagaagagtttggacctaactcaaccccaaaagctaactcatagggtgaggattgtgctccacttatatactttatcttgacactatctctagtcaatgtgggacttgggtttttcccaatagcttcaaatatgtaatttgagaagtacatccttggattaagagtgtttcaaataaattcaaccagcttttggcttcctctgctgacatatatacatggtatcagaaagcttctactaatacagatggcacatgtacttctgatggagattaaactggacgtccctttgggaatgagaggaagttccttttaggggaggataagaaatcttcctaaattaaaaaaaaaaaaaaaaaagtgagacaatgtggttcagaaatcacaaatgcaacagataaatgcccttgaaataaccacgagtacangacctgagagatgtaatgagttagcatgtaaaattatatggaatngaagcccaaataccatctttgtctgtttggtctggattatttt

SEQ ID NO: 131977 - DNA, 147 bp, Glycine max
  unsure (1)..(147): unsure at all n locations
  Clone ID: PAT_MRT3847_90182C.1
gngcttttgatgnttctgctgtnnttccagatcttactcancantcnattcttctgcntctncntcnctcagactttngnggggtgtgcctcatatttaggaaataaaggcataaggagntcnctnttcttacccatatgaaccttt

SEQ ID NO: 131978 - DNA, 409 bp, Glycine max
  Clone ID: PAT_MRT3847_90183C.1
gttctttctattgctttcagtcattgggttctgctgggctcagtatgccccaaataccaaacctggacggacatctattgtccatctgtttgagtggcgctgggctgacattgctcttgaatgcgaacgatacttagctccaagaggatttggaggggttcagatttctccacccaatgaaaatgttgtgattaataacccttcaagaccttggtgggaaagataccaaccaattagctacaagttgtgcacaagatcaggaaatgaagatgaattcaaagacatggtgactcggtgtaacaatgttggtgtctatatttatgtggatgctgtaattaatcatatgtgtgggaatgctgtgagtgcaggaacaagcagtacttgtggaagttactttaaccctggaaac

SEQ ID NO: 131979 - DNA, 403 bp, Glycine max
  Clone ID: PAT_MRT3847_90184C.1
attaaacactgggtttttactcattcgattacctgcagatgctagaaatattatgttcgctggctaaatggaatctgccacgctagatatcgcataagcatctactactaccttataaactaacttgtaacagggaagttatgaacccataaaagtaaaaacatggaagttagaagccaaattcgtacacaacaatacaaagaggaggctttactaaactaaattcacttctttcttttctttgggggctgcaatgcttcctcatcttcctcgtcctcttcattctcctcatccttagcaccatcttcatcctcttcttgacctgcctcgtcctctttcgaatcaatatcgacatcctcatcgtcgtcatcttgatcatcaccatcttcatcttcatactctt

SEQ ID NO: 131980 - DNA, 364 bp, Glycine max
  Clone ID: PAT_MRT3847_90185C.1
agagcttaggcaaaagtccttttgccttaagtaatttttcactagattttcaaacatgcacacatgtaagtaaattctcagcttattttcgaagggtctgcactatcattgtcatgcactttaaataggggtaaagtgcccccaaacaaattaaataggcccgccacttgaaacttaaacatgaagctaatatcgacacaaatttatttactggtatgacatcataatcacaagcacctaaataacagtcaccaaaccataaaaagtaaactacttaattcatgaggggacttaaggacaactcaaccaggtgtgagacaacaagaagtaatgctttcatttacaattcagatcaaagttagga

SEQ ID NO: 131981 - DNA, 386 bp, Glycine max
  Clone ID: PAT_MRT3847_90186C.1
cccccccagctttgaaaaattgaatggacccagcaatttttttgacatagattcacattcaaacaaagattccaggcaaaatctagaaccaaagaaggggggaaagaaaaaagaagcaccaaggccatgagctggaacattcaaaataaatattgacagaaaaatttgtagttgaggaaaagcacttgcccaggggtgactgaaagcaataatttctttcaagtgattcagttaccaaaaaggaaatgggttctctccagcaaaaaaagagtactgggaaggggaccaaggcttcaaactttggcttaagggggcccttttaaaactttttaaaccccaaggggggggggcaccctttttggggagagggcttaaataaggaaaac

SEQ ID NO: 131982 - DNA, 248 bp, Glycine max
  Clone ID: PAT_MRT3847_90187C.1
gaaaagaagacaaaggaaatttctgagtctgaggctaaatatacaatcatgatagggaaggcttatgctgcggtgaatgatgaatctatacggaaggaagggtctgctcaagagcaacttgcgggtcatgcatgtgcaactgaatgactggttaatcttatgaagtatccacaatctagtagctcagaacttgtcattacaatcgggagcatgcatttatatgattaggcctatatgtagagtaagtg

SEQ ID NO: 131983 - DNA, 320 bp, Glycine max
  Clone ID: PAT_MRT3847_90188C.1
atctccctccccccactcccacttttttactccaaacaaaccctaaatctctgtgggctatttattcttgtgagaacttcaaccatgagagatatccttcacgttcagcatagccaatagcggtgaccaaatagtatccaaattctcggaggcaattttactcgagcacgacattaatactaccacatagtacaactacattcgccacaccgtcttccaactagaacggatcagacgctatcactaataggctcttatccgaacttacgtttcgaaaacagatctttaggatttttatccttctaacattaactgcatta

SEQ ID NO: 131984 - DNA, 193 bp, Glycine max
  Clone ID: PAT_MRT3847_90189C.1
caaaagcacccgggctcgatccacatgaatccctcacttacatttcactgctttgtgggcgttttctcagggtaaggaaattcactctctgcgctgcacacagacttcgagacccattttctcttgcactcctagtttattcgcagcacactctgctattggatagaggacttagtgcccgatctaaactttg

SEQ ID NO: 131985 - DNA, 206 bp, Glycine max
  Clone ID: PAT_MRT3847_9018C.1
acgcattctacctcatagcacttctataatagcacctaaatacaatgcactgtacctggttctacaacgaaattgactggcaaaaccctggccacacccaacacaatccccttgcataacatgcaactttcgccagctctaataatagcgaaaacgcccataccgatgcgccttctcaacagctgctcatcctgaatggaaaatgg

SEQ ID NO: 131986 - DNA, 258 bp, Glycine max
  unsure (1)..(258): unsure at all n locations
  Clone ID: PAT_MRT3847_90190C.1
gtcatcaatcatctatggctacctgtccctcgcctccttcaccatcgtctggttcttcaattccgtgcccaagatctaccatgttttactgtactggaagtgaggactactatgcagagcctcacttcctccaagcttgttgtctttgcagagaaccactaggccaagatcgtgacatcttcatgtctagatggaacacacgatcgagnagcaattagtgcagacaggagcaaagagagattgatgaggcaaaggtga

SEQ ID NO: 131987 - DNA, 126 bp, Glycine max
  Clone ID: PAT_MRT3847_90191C.1
actgttctagtatagggggttagttttggttctcttcccctgtcttttaaatcgagctagatttgtagaaaattcactgtacaaccgatttgttgcctacaatttacaagcattaacattattgca

SEQ ID NO: 131988 - DNA, 742 bp, Glycine max
  unsure (1)..(742): unsure at all n locations
  Clone ID: PAT_MRT3847_90192C.1
ctaagtttcactcccactggaagcgcaaccattctcggtctcagatcatggcaggaatcatctctggcccaagtgggagcgagggtgttaatattttacttaatcatgacttctctagtgagctgaactcttggcatctcaataactgcactggctatgtaatttcggctgaatcaggtaatcaagggggaatttcaatggagtcgaatgttaattatgttgttatcaccgaccgaaaggaatgttggcaaggtcttgagcaagacattaccaacagaatttccattggttccacttacacggtttcggcttgtgtgggagtttctgggctttctcagcgatctagtgatgttatagctactctgaaactagaatatcatgattcagctactagatacttgttcattggaagaacttctgttaataaggatagctgggaaaagttggaagggacattctcattgtcaactatgcctcatagggttatattttatttggaaggacctgctcctggagttgacctgctaatacgatcagtagagatcaactgttccactccaaataatagtaccacaagcacaggatgtgtttcagctggagatgacaacatcataattaacccccatttgatgatggtctgaaaactggtctgnaaaggctgcaggattatgtgcatgatttcatgaatgatgggaaaaatgttccaaagtctgggaaaattctttgcatctgcaacagaacg

SEQ ID NO: 131989 - DNA, 152 bp, Glycine max
  Clone ID: PAT_MRT3847_90193C.1
cgctagataaagagactatgcttcaaccttcatgttcatgaccgaaggggcttcatggccaatggcttgtacctgagtcatggaaatagaggtgaacaatccacacgatgaggattctctccagggcgatgatttaagccttgatgtggcac

SEQ ID NO: 131990 - DNA, 348 bp, Glycine max
  Clone ID: PAT_MRT3847_90194C.1
gatggtgtataatgctgctctgtcatttctcgtgccgaattcggcaccaggcgtgccaaccaaccgcaagccatggagaacaaagagtggatctcgtggtggctttgtgaaacgatctctttggcgacgaaaatgagagacgcagagggcaacatggcggttttcgttagatttgatttttgaagatgaagagaacgaaaagtggatcttgtggtgaggcgctttttggatattgcagtggctttgcgaagtgatatgaatatggttcatatttgaaagaattgaaccaaccatcgtgatttggatttggatctcatggtgatcttagggatctagatctagtgtttg

SEQ ID NO: 131991 - DNA, 409 bp, Glycine max
  Clone ID: PAT_MRT3847_90195C.1
gggggagaaagatccaacccctctttgcagggggggttggaacaatttttcattctttttttaagggtttgacccaagaaattcccgggtgggggaaaaaccagacttccgggggaggaaccttccaaggggattttttaaaaaaacttctttccaatgggcaacttaacccactttttatgggaaaggtcccacaggccttttttttgttttcaacataaaccctccaagggatgctttcaagttcaccccacttagcaatgccaattgccaaaaaaaataatctatgggaccgaagttcaaattatcaggggtccacccaggacgcccattcctaggggggatctttggcccaattggcacaaaaagaaagctcaagtcctttcccaaaaccacggtggtgtgtgaa

SEQ ID NO: 131992 - DNA, 316 bp, Glycine max
  Clone ID: PAT_MRT3847_90196C.1
cactgagcatgcgtctagctatctcgatcgaactgtccaaggtcctgtcaccatacataataaaatacaagcccgcgccgccgcagtcatcctactattcgctctgatggtcgcaatcatcaccgtccttggtctcaacactcggccatcactacggtccccggcgtgccattgtaataatcatccgtcgttgtgtctctgtccagtgttctatccttggtcacgttagctcttgtagtgccatgtatggtcctagtcatcgtcttatctcggtcagtactgctcacgtgtgatcatgttagtggtcataacggtc

SEQ ID NO: 131993 - DNA, 801 bp, Glycine max
  Clone ID: PAT_MRT3847_90197C.1
cgtttctcttgctaattaatgtccaatttacgttccttgtaccttcctttagtttttattgagaaaactattctgccaatgccatgttctgtgacataaggcttattctcatgctagattatcataaaaattagaacttaatagttgtactctggcacaattgtttcttattcatgtcttttaatttaattactttaggaagaaaagaaaattaccctggcctgatctttggttcgtcgaagtaatcttaacaatcatgcataaacttgcataccaaaagatagaataaaataaggaaatagaagaacacaagtacatactgataaataaaaggggaagagcatatacatacttctttagtataattaaatgtgtgtttggtttaggcttattttggtgaaataattgatttttttgcctgctttgtaatagaactttttaaaaaatgcagtaattgtaaacttctgaaccttttgccacccgtattgatattataaagctggatgacattgacatctcagtaaagttcagtttttgaatgtgctggaaaaaatatgcaaatttggtcagcatatcttattgagatctaccatgtgtacaacttaccgtttaatataagttgttattagtctcatgtttgaagaaatatgaatggccctaactaagagccaagtctgccagcctgtgttaaagttgttgagagtttgttagttggctccctaacttcactaacagaggaaggatataatgaggaaagagatgtgagtgaatgaattcaattagttgatcaattagtttttt

SEQ ID NO: 131994 - DNA, 1199 bp, Glycine max
  Clone ID: PAT_MRT3847_90198C.1
acctgtcattctattgttatcatatcctcgcacctagaactgtggaatttcttttttgctttctatgttactgtctggcttttggagcctggacaagacactcctcttggtttcctctcttgcattattcgcatacatttgtttttgtaaatcgataccaccaatcatcgctgtccttgtcgcgccaaatacaaaaaccaaatcctctacctctctcctactgactctctcagtcttaccgggtttgtgagatgtcggatgcgccaccgagcccgactcatgagagtgggggcgagcagagcccgcgcggttcgtcgtccggcgcgagggagcaggaccggtacctcccgattgccaacatcagccgcattatgaagaaggctctgcctcccaacggcaagattgcaaaggatgccaaagacaccatgcaggaatgcgtttctgagttcatcagcttcattaccagcgaggcgagtgagaaatgccagaaggagaagagaaagacaatcaatggagacgatttgctatgggccatggccactttaggatttgaagactacatagagccgcttaaggtgtacctggctaggtacagagaggcggagggtgacactaaaggatctgctagaagtggtgatggatctgctacaccagatcaagttggccttgcaggtcaaaattctcagcttgttcatcagggttcgctgaactatattggtttgcaggtgcaaccacaacatctggttatgccttcaatgcaaagccatgaatagtttagatgcttctacgcatcttatttatttccctttaatgcttgtacgcatggcatgggtggaaacaattgtctggtgatttaatatttaggttctcgtgtagaagggtgtcagaattttgttacggtactaatgtagatttttattaatacatgtcttatttagctttgtaatacctactcaagggagagatgtgtttagggttatgctagtgattcgccatgtagcttgtcagggtgagaagcacttgcttttagagttttctttagattattatataatatataatatttgcagacactgcatttgttagtttatttagtttaggccatacagtttgcttctctcttaatgatgtaaaaaatattcacttgtcattcatctagaaaattcgtaatagtgtaatagaatctttaaagacttgct

SEQ ID NO: 131995 - DNA, 440 bp, Glycine max
  Clone ID: PAT_MRT3847_90199C.1
aaagtgataattcccgatgcatatggtgtgtcttccatacagaatgcaaaagttggggacaatttctaatctttcaaattggaaattgtccccaacttgaaagattagaaaaacttgtttttaataggactgtcaccttaaagggcagctatagcaaaggtggaaagtagggtccctgaatattgattagaagtaacaaggtgggacaggcaggtctgcgggtaatacttgtttaaatagctacttataatgcatagttttttctttgagggggtggggggttatgtacaaacatatttactggccacttagccatgtacattttcttaagggattactcaatagttccccaattatttaattattttgtttggttggttttgtagtttgaagattttttctgtttactcccaatgtagtaccaaattgctgttattttc

SEQ ID NO: 131996 - DNA, 964 bp, Glycine max
  Clone ID: PAT_MRT3847_9019C.1
cggatggatcagtatgagatcatggagcagatcggtagaggagcatttggagctgctattcttgttcaccacaaggctgagaaaaagaaatatgtgttgaaaaaaataaggcttgcaaggcagactgaacgatgcagaagatctgctcatcaagaaatggctcttattgctcgaatccagcacccttacattgtggaattcaaggaggcatgggttgagaagggttgctatgtctgcattgtcactggatactgtgaaggtggagacatggctgaattgatgaaaaaattaaacggtgcttactttcctgaggagaaactctgcaaatggttcactcaattactgttggcagtagattacctgcattcgaattatgttttacatcgtgacctaaagtgttccaacatctttcttaccaaagatcaggatgttcgcctaggggattttgggcttgctaagacactaaaagcggatgatttggcttcttcggtggtaggaactcccaactatatgtgtcctgaacttcttgcagatattccttatggattcaaatctgatatttggtcactaggttgttgtatatatgagatggctgctcatcgcccagcttttaaagcttttgatatggcagggttgataagcaagataaaccgttcctctattggccctttgcctccctgttattccccatctttgaaaacgctgataaagggcatgctgagaaaaaatcctgagcatcgtccaacagcatctgaaatcttaaaacacccttatttgctgccttatgttgatcaatatcgttcatctttctgtaccccaacagctggttctcctgaaaggccaatttctgctgtccatcatcctcgaaaaaataagccagaaagtcaaaacagtagtagtagtttgagtcctgagaaagatagtttcatgttgagtgagaaaaacactgcaaaagaagtaaaga

SEQ ID NO: 131997 - DNA, 763 bp, Glycine max
  Clone ID: PAT_MRT3847_901C.1
aacctctcttctcatgcattgtctgcttcaaagttcaaagccactggcactgaagcaatcgtgatttaacattttagttaaaagtaaacctaatttttgtttccctcctccactccaccgcccaccttcgttccgactatctttcactttctaatttcaccaattcaggaatggtgggtttatctcttggagaaaaacatttcattcaaggtggcattggtcaagatcttcgttgtgatggtagaaagagatttacatataaaccaatctctgttgaaactgaagttattccccagacaaatggttcggcaagagtcagaatgggtgctacagatgtaattgccagtgctaaggctgtacttggaaagccaagcttgttgcaacctgacaaatgaaaagtctctatatatattgattgcagttcaactgcagagccagcttttgaggttgcatattctattgcttttcctccttcatgtttttcaactttacataccatgaacattgataacaaaacaaataagttaatccttaaaagctttaactgaagttagaaggtgcattggattaataagctttacattttcatcagtaatagtgttttccattattatgttatttatcatttttgttctgtaaataccttctaatgtttcaaaattactattttatttggtgctctatttctctgtcttgtatatagggtagagggggtgatgagttggctgcaaaactgtcaaatgctcttcaacgtgtctcttgg

SEQ ID NO: 131998 - DNA, 754 bp, Glycine max
  Clone ID: PAT_MRT3847_90200C.1
cggccgctcgagccggctggcgggagatgctaagtaaaatagtgcggctcgagctctgctttctgtgttattgtctggcttttggagccgatccaaccaatcatcgctggcgccaaatacaaaatctcatcccttcccctttctcttactgactctctttgtcaccgggtttgtgagatgtcggatgcaccggcgagtccgagtcacgagagtggtggcgagcagagccctcgcggctcgttgtccggcgcggctagagagcaggaccggtaccttcccattgccaacatcagccgcatcatgaagaaggctctgcctcccaatggcaagattgcgaaggatgcaaaagacacaatgcaagaatgcgtttctgaattcatcagcttcattaccagcgaggcgagtgagaaatgccagaaggagaagagaaagacaatcaatggagacgatttactatgggccatggcaactttagggtttgaagactacattgagccgcttaaggtgtacctggctaggtacagagaggcggagggtgacactaaaggatctgctagaagtggtgatggatctgctagaccagatcaagttggccttgcaggtcaaaatgctcagcttgttcatcagggtccgctgatgcatattgtgttgcaggtgcaaccacaacatctggttatgccttcaatgcaaggccatgaataggttagatgcttctacgcatcttatttatttcccttggatgcttgtacgcatg

SEQ ID NO: 131999 - DNA, 560 bp, Glycine max
  Clone ID: PAT_MRT3847_90201C.1
ccacgcgtccgccgggtggggccaaaaccatttgcgttgtcgcagtcgcagtcaaaggccaaggcaaaaccctaaattgtctcacactttcgtcggaatccgattttggctttttccgtgacaagatgccggcgaaggacgacggctccgacaaggagaagtgccttgatctctttctgaaaatcggcttagacgagcgcaccgctaaaaacaccgtcgcaaacaacaaagtcaccgccaatcttactgcagtcatctacgaggccggtgttattgatggatgcagccgagcggttggaaatcttctttacacggttgcaacgaagtaccctgcaaatgccttgccacatcgcccaacattgctacagtacattgtctcgttaaaggtgaaaacaactgcacagttagatgcagcattatcatttcttgctatcacgggctccgagaatcttgatttgaacaagtttgaagaagcttgtggtgttggtggtgaggtttcaatagaagatatcaaacaagctgttaatgaagttgtggaagagaacaaggctacaattttg

SEQ ID NO: 132000 - DNA, 1372 bp, Glycine max
  Clone ID: PAT_MRT3847_90202C.1
gagaatatcacacattctctgtgtacacttgaatttgagacacgtcgtgcatcatactattggttgttgcatgcgttaagcatttaccaaccttatgtatgggagtattcaaggttgaatgtctctaacacagttatgtcaaagcgtaagctaaatcgtctagttacagagaagtgggttgatgggtgggatgatcctcgtttgatgacactagctggtttgcggcgtagaggcatgactccaactgcaatcaatgcttttgtacgaggaattggaataactagaagtgatggcactttgatttctgtggaacgccttgaatatcatgttagggaagaattgaacaaaacagcttctcgtgcaatggttgtcctacatccactcaaggttgttattactaatcttgaagccaactcagtaattgaggttgatgcaaagaaatggcctgatgctcaagctgatgatgcttctgctttctacaagatttcattttccaatgttgtatatattgaacattcggacttccggatgcaagattcaaaagattattatggccttgctcctgggaaatctgtgatactcagatatgcatttcctataaagtgcactgaagttattctagctgatgataatgagactattcttgagattcgagcagagtatgatccttcaaagaagaccaagcctaagggggttctccattgggttgctcaaccttctcctggagttgatccattaaaggtggaagtcagattgtttgagaggctgttcctatcagagaatcccgctgaacttgacaactggcttggcgatttaaacccaaattccaaagtgataattcccaatgcatatggtgtgtcttccatacagaatgcaaaagttggggacaatttccaatttgaaagattaggctattttgtggtcgaccaggactcgacatcagaaaaacttgtttttaataggactgtcaccttaaaggacagctatagcaaaggtggaaaatagggttcctgaatattgcttagaaataacaaggtgggggacaggcaggtctggggttaatacttgtttaaatggctacttataatgcatagttttttctttgagggggtgggggggttatgtacaaacacatttactggccacttagccatgtacattttctcaagggattactcaatagttccccagttatttgattaacttttgtttggttggttttgtagtttgaaggttatatttgtatactctcaatgaagtagtagcaacattgctgttattttcctacgatttttgtgagtgtaaaattagtattgaagaatctttccctttacataataaattaagtgaaaatctagtctattttttgttc

SEQ ID NO: 132001 - DNA, 2725 bp, Glycine max
  unsure (1)..(2725): unsure at all n locations
  Clone ID: PAT_MRT3847_90203C.1
ggctcgagctcgagccgaatagtctcgagtccagcactgctgcgtttcccatttttttttttcctagaacagtaaatttcaagtaaaccaaaaaaccataaatagtagtattaattaccaatattgtctttttctttttattttttttaaatactctgaaaccgcgaaaccctagctgaaccctctttcccttctccggccaccgcaatggatttcactccgccgccgatcgaggacggtttcaccgccgagaagctcttcacgcagggcttctcctacacctacgatgacgtcatctttctcccccactacatcgacttcgctgccgacgtcgtggacctctccacgcgcctcacgcgccgccttccccttgccgtgccgtttgttgcctctccgatggacaccgtgtcggagtccgccatggcctccgccatggcctccctcggcggcatcgccgtcgtccactccaacgtccccgccgccgtccaggcggccatcctccgcaaagcgaagtcccgccgcgtccccatcctctccgaccccgccttcgccgcaccttccgccgtcgtggagcacgatgacgccttcggggcctcccccttcctactcgtcaccgacactggcacctccgccgggaaactcctcggctacgtcgctggaagagtctggacgaatcataccgacaagggcttgagagttggggactacatggcgccgcctcccaagccagtgccatggaacgccgacctaaacaaaattaatgaaatatttgagagtgagaaaagtggtgctgtggctttggagaaggatggtgaggttggtggttgatttggtggtgagggaggaggtggagagggttaggggatacccaaagctggtggcgccggctacagtgggggcggacggggagtttatggtgggggctgcggtggggacgagggaggacgataaggagaggttggagcatttggtgaaggctgggttgaatgttgtggtgttggatagttctcaagggaactcaatttatcagttggagatggtgaagtatgtgaagagggtgtaccctgagcttgatgtgattggggggaatgttgtgactatgtaccaggctgagaatctgattcaggctggggttgatgggttgagggttggaatggggtctgggtccatttgtactactcaggaggtttgtgctgtgggccgtggtcaggcaactgctgtttacaaggtctcatccattgcttataaaagtggtgttcctgtgattgctgatggtggcatctcaaactctggtcatattgttaaggctttgtcattgggagcgtcaactgttatgatgggaagcttcttagctggtagccttgaggctcctggggcttatgtatatcagaatggtcaacgtgtgaaaaagtatagaggaatgggttccctagaagctatgactaaagggagtgatgcaaggtacttgggtgatacagcaaagctaaaaattgctcagggggttgttggagctgttaaagataagggttctgtcttgaatttcataccatacaccttgcaagcagtcaggcaagggtttcaggatatcggtgcctcctctctacagtctgctcatgaccttctaagatccagggagttaagactggaggtccggagtggagcagcacaggttgaaggtggagttcatgggctggtttcttatgaaaagaaatacttttgaagtatgaaaccatccaaaaatcataagcggtgctataatcccttgctgcagttcagcataaaagaaggggacacactgttattgggttagtggcaacttgttgctactgtgtctagcgaattgaagtctataccaatagaatatcgtgggaattttcttccctgaggttctgaaggaagaacactgatttcgtggtttttttttgttttttttcatctccattagactttgtcaaatgtgtcatagactttcctaaatatattttgcatgttttctgtcctgttaagtaaatgttactgtcatagtactgcaaaaatttcctcctatcttatgaaaataagacttcataaaaaaaaaattatggtacttgatataagacttttaacaaagttttagaagtattttagatttgaatatgttcgtcttttaaaatgttttctttaaattagtttttaaacaaattttattttagtactttaaaaattatatatgcaaattagaaatttattgataatctccagccctgccttgcataaggtatgcatgataatctcctacatctttatgcaagataaatcttcactctttttgctacctcatcaacatctcttctcgagtctctgaatgtgagcaactttcgggccagccatatatacttccactgcgaaccaaactataagccattggttccgacctctagagctaataaactctttggaggcttttatcacctcccaaaaaatccaaacggtcaagaatacccctgcattgcttcaaccattcttgggaccacgctgttgttgcaaaattagggttggggatgagccacactatggaaggatttgtgaaaggatcccggactcgcacatccttcacgatcttaggcttgcacatttgcgttgattggagtaggtttttgatgaagtgacaatatggtagcaaaggtttctgatagagcagcaattgcaccctttgaaccncatgataacgtgtactgtgatcgac

SEQ ID NO: 132002 - DNA, 3009 bp, Glycine max
  Clone ID: PAT_MRT3847_90204C.1
accacgcgtccgtcttgacaccctcgctgaaacgctaacgataacaataacgctcgccgattagttaatttcttacacacactcttactcttttatctataccaatataccatttgcgttgtcgcagtcacaggcttaaggcaaaaccctaaattctctcacactttcgtcggaatactattttggctttttccgtgacaagatgccggcgaaggacgacggctccgacaaggagaagtgcctcgatctctttctcaagatcggcttagacgagcgcacggctaaaaacacggtcgccaacaacaaagtcactgccaatctcacttccgtcatcgacgaggccggtgctactgatggatgcagccgaacggtcggaaattttctttacacggttgcgacgaagtaccctgcaaatgccttgccgcatcgcccaacattactacagtacattgtctcgttaaaggtgaaaacaactgcccagttagatgcagcattatcatttcttgctaccacaggctccgagaatcttgatttggaccggtttgaagaagcttgtggtgttggtgttgaggtttcagaagaagatatcaaacaagctgttagtgaagttgttgaggagaacaaggctacaattttggagctacgttatcgaacaaatgtgggtgagttgctggggcatgtgcgcaagaggctgccatggggtgatgcaaaaggttgccaaggcaacttgttgatgcaaaactatatgaacttacttggtgatcggacagcagcagatgatgaaaagccttctagaaagaagaaggagaaacctgctaaagtagaggataaggcagctcctgtttctacccctgaaaagtcacctgaagaagaccttaatccatttttaatattccctaatccagaggaaaatttcaaggtgcatactgaagtgccttttagtgatggtagtattttgagatgttgcaatacaagagatctgcttgacaaacacttaaaagcaacaggtggaaaagtcttgacccggtttccacccgaacctaatggatatttgcatattggccatgcaaaagcaatgtttattgattttgggttggcgaaagacagggatggaggtggcacttccaggtatgatgatacaaatcctgaagcagaaaagaaagagtatattgatcatattgaagaaattgtccagtggatgggttggaaaccatttaagattacttacacaagtgattacttccaagaattgtacgaattagcagtggagctcataaaaaagggtcatgcttatgttgatcatcagacacctgatgagataaaggagtatagggagaagaaactgaacagtccttggagagacagaccaatttcagagtcattgaaactctttgaggatatgaaaaatggcagtatcgaagaaggaaaagccactcttagaatgaagcaggacatgcagagtgataactacaatatgtatgaccttattgcatatagaattaagtttaccccacaccctcatgctggagacaaatggtgtatctatccaagttatgattatgcacactgcattgtggattctctagagaatatcacacattcactgtgtacacttgaatttgagacacgtcgtgcatcatactattggttgttgcatgcgttaggcatttaccaaccttatgtgtgggagtattcaaggttgaatgtctctaacacagttatgtcaaagcgtaagctaaatcgtctagttacagagaagtgggttgatgggtgggatgatcctcgtttgatgacactagctggtttgcggcgtagaggcatgaccccaactgcaatcaatgcttttgtccgaggaattggaataactagaagtgatggcactttgatttctgtggaacgccttgaatatcatgttagggaagaattgaacaaaacagcacctcgtgcaatggttgtcctacatccactcaaggttgtcattactaatcttgaagccaactcagcaattgaggttgatgcaaagaaatggcctgatgctcaagctgatgatgcttctgctttctacaagattccattttccaatgttgtatatattgaacattcggacttccggatgcaagattcaaaagattattatggccttgctcctgggaaatctgtgatactcagatatgcatttcctataaagtgcactgaagttattctagctgatgataatgagactattcttgaaattcgagccgagtatgatccttcaaagaagaccaagcctaagggggttctccattgggttgctcaaccttctcctggagttgatccattgaaggtggaagtcagattgtttgagaggctattcctatcagagaatcccgctgaacttgacaactggcttggcgatttgaacccaaattccaaagtgataattcccgatgcatatggtgtgtcttccatacagaatgcaaaagttggggacaatttccaatttgaaagattaggctattttgtggttgaccgggactcgacatcagaaaaacttgtttttaataggactgtcaccttaaagggcagctatagcaaaggtggaaagtagggtccctgaatattgattagaagtaacaaggtgggacaggcaggtctgcgggtaatacttgtttaaatagctacttataatgcatagttttttctttgagggggtggggggttatgtacaaacatatttactggccacttagccatgtacattttcttaagggattactcaatagttccccaattatttaattattttgtttggttggttttgtagtttgaagattttttctgtttactcccaatgtagtaccaaattgctgttattttcctaccattttgtgtaaaattagttttgaagaatctttccctttacatttaagtgaaaatcaagtctaatttttgttcaaaagaaaaaaaaaaaaaaaaaaaaaaaaaaaaaaaaaaaaaaaaaaaaaaaaaaaaaaaaaaaaaaaaaaa

SEQ ID NO: 132003 - DNA, 363 bp, Glycine max
  Clone ID: PAT_MRT3847_90205C.1
tgtcttttaatagccaagtttaaaataataaaggggggaattatataagttggggggggataatggccgaccaaatgggcacggaagggcaatttttgaaattggcactgcattttgccataggcatttgttaattgggaccagtgatgccaacccgaacccgaaacgcagtggaaaaaatcagagaagaatgaagaaggatacggtagagagtcaagtttttgagaatcgtaagtgtctattctcgaatttgccaattaatctggtattgaactcattcattcattttctcggggagcatttttgagtagagaatgcccaagtttttgcgagacggggatggccacccctagggcgagcacc

SEQ ID NO: 132004 - DNA, 372 bp, Glycine max
  Clone ID: PAT_MRT3847_90206C.1
ggcacgacggcattatgaatcgagcaataatctggaaaagcgagaagcttgtcttgtcaacccagtgagtgtgtgacgtgtattggatttgcacagtccggacgaagctcgtctaatgaaaaggagagctctctgtcgtattgaacggctcgaaaaagcaactgtcctaccatagtacagattgaagcgttctatagcactcagactgtgatgaatgctactgatatacacgatagtatggatttactgacgatcattgatttgttaagtttacaaagcgcatctaaagttttttcgatgaaactagtctttgatgataagcttgtgtgggctaacactcatgattgcttggatggaaatattacagcggat

SEQ ID NO: 132005 - DNA, 352 bp, Glycine max
  Clone ID: PAT_MRT3847_90207C.1
attagcaccctccctatcatcacagcgaatccttgacaatatggggggtattgatgcaacggaatcacattgtaccatctagcctcgatgagaacgatatatcgacttatagaacataaagtaatccatttctgacagggaaagggaacaacaccctcttctatagtcttcggagattgtaatgcccccctgactgactagagacgtaatgaggcaatgcaattcatctcgccataagtgctccccagtgaaaacctgtaacgttgaataaataatggctcgcgctccttaaccttggcacggaaaaaaaactgaatttggctacgaatatcaagaacgaatctagaatgga

SEQ ID NO: 132006 - DNA, 233 bp, Glycine max
  unsure (1)..(233): unsure at all n locations
  Clone ID: PAT_MRT3847_90208C.1
caacattgcnacggcgtaacgtaaagcttcggnaattcggctcgagngcaanggcncnatcntgngatnggactnnntnntcnanctcnngagntatgncgtanagnnnngnctggcttgagnntataggagnnnctgccntgtttcntgncatanngncatcagncnnagcgcnctccntggcctccctanncannnnnagttgacctnncatagtctgnatngcatancgc

SEQ ID NO: 132007 - DNA, 238 bp, Glycine max
  Clone ID: PAT_MRT3847_90209C.1
ccccaactcaaatcatctcaaactccacccaacttcacatcctcaacctccattaaccccaccacccccaacttatatatacaccccacaatccccataccctcaaaatcataaaaagaaaaaggaaaaaaaaaaaacccacaacccattttctcattcatctccacctcaaaaactgccttgtatttctcgagaggtatttcactgtattatatattattattctttttgacatcat

SEQ ID NO: 132008 - DNA, 143 bp, Glycine max
  Clone ID: PAT_MRT3847_9020C.1
acaccccttcatcaccaaaacatctaccctactctcaccactccctcacaatcaatactcactacttcttccacaccacacgctcctacacccaatcatacacaatagaaggggccgtgtttactctcttccacataacttca

SEQ ID NO: 132009 - DNA, 273 bp, Glycine max
  unsure (1)..(273): unsure at all n locations
  Clone ID: PAT_MRT3847_90210C.1
aatcagacaaagctttgtattaactaatccgcgtntatcagacatgcctctngntnatgctagtnatgccttcttganattncacaggttatgccaaaactgangtnttgggccgcaactgtagattttaggtggaacagatnctgatacctcgacatacatcngataagggagagcatnaaaacagnacaancctggcaccgtacgtattttgaattacangaaggacaaagcncattttggatttcntcatatctcaccgttcgtgnngct

SEQ ID NO: 132010 - DNA, 511 bp, Glycine max
  Clone ID: PAT_MRT3847_90211C.1
ttcgggaataagttgatattaattagaatttgattgttttctccattgtgagagctcttctttgttcttgggttatgaactttatagtgttagttctactggtaggttgcagttagggtcacacttttttataactttggttctactgatagatcacggttagagtcaagttcctcttgtttcgtttgcttaatttcaagacgatcctataagttgatttgtatcaccacatctgtttggcacttttgaagttgtgtactttggtgtattcttccttagagagagcacacagtagagcgctacaagctttggagtcaagcacaagtctttgtttttgctgttcggtccattgacttctagggatctcattcagttcatcatcatatggaatgtgatttccattctctacaacatcctatagatcgatatgtatggattcgaagtgtgtaattatcctttccttccaatagtcatatttgactcctctaaacatggtggcttgttggtagcg

SEQ ID NO: 132011 - DNA, 521 bp, Glycine max
  unsure (1)..(521): unsure at all n locations
  Clone ID: PAT_MRT3847_90212C.1
tggggggggttttttaatttttctctattatatatatatatatataaatatatatatatatatataataagtatctttagataataagtatctttgtattgtagtattgtttgtagtattgtattcggctcaatccttttaggaaaagattgggccgagtttaattgcaattaattctctgcttacaaagtatccattgcttcgaattcaaatttgatctccttccatacttcacaagcagcagctaattcaggactccatttgctagcctcacggataatttcattaccttcacgagcaagatcgcgtccttcatttcgagcctgcacacatgcttcaagagctactcgattagctacagcacctggtgcatttccccaagggtgtcctaaagttcctccgccaaattggagtacagaatcatccccaaagatctcggtcagagcaggcatatgccaaacgtgaatccctcccgaagctacaggcnnnncccctggtagagnnccccttttttgagtccc

SEQ ID NO: 132012 - DNA, 410 bp, Glycine max
  unsure (1)..(410): unsure at all n locations
  Clone ID: PAT_MRT3847_90213C.1
aggatgccaccactcctccttttcctgatagggtatgtgattgtgactcttgcttgtttttttatctgactgcaattgatttggtcatggaaagtgaaaaatctgcgtatgcaatgttttagtccctgattcagtcaactctattgcaaatttgtctttcttccgtcatctcgatcaaatttggggactgaatttgttacaaatgttcataaattcatggaataatttgctatgaagttgtcatattctaggtctatgatgatggaaataatttacttgtctcgaaattgataaatttagcgactggattgtatacatataaatttccaccaaataaaagaagaaaaattaacacatgttgtcaaaaaaaaaaaaaaaannnnnnnnnananaaaaaaaaaaaaaaaaaa

SEQ ID NO: 132013 - DNA, 376 bp, Glycine max
  Clone ID: PAT_MRT3847_90214C.1
tagcattcaggaatcactccagacaaagctgccaatgctgccgaattaaacaatgatgttcctaaacaggaccccttgcatgagttgattaagacccttgttgagatttacgacaagcctgtggagtttgtgtgggatcttactaaatttgggattccaaatgtaaattcattgttgttcttaacgtatactaatgtcagtgaaataacatcaggtgaaaaatgcttgaacatagccatacttcaattttggaccatgtatatgaatgagtggagtaatggcttgggtcatcgatcggtgtatggattccttggaccctcatcctttacacattgcaaaggataaacttggccattgtgaagaatatattgaaaat

SEQ ID NO: 132014 - DNA, 354 bp, Glycine max
  Clone ID: PAT_MRT3847_90215C.1
gctcgagagccacccagcccggcaatggtcctctttgtggagctggtccaggtatttctaaccataatgagcttcctgggtccccggggagtatgggccatcaaggccgaccacatgggctcctacggaccagccttctaccagtcttacgacgcctctggacagttcacacatgaatttgacggggaacagattttctctgtggatctgaagaagggggaggtcgtgtggcgtctgcccgagtttgcagacttcgcgtactcggactttcagagcgggctgatgagcatctccatgatcagagctcatctggacgtcttggtagaacgctccaaccgaaccagagccgtcagt

SEQ ID NO: 132015 - DNA, 499 bp, Glycine max
  Clone ID: PAT_MRT3847_90216C.1
cttctccctaacaaaatgacaatttatctcaatatgtttggttctcgtagaaaactggttagaggcaatatataatgcggcttgattatcacaaattagtgtcatttgcatagtatcttcaaattgaagctgtttgcgtaattgtttgaaccaaatgagttggcaaattagtgccatggccctgtattcaactttagtacgggaccttgtcacaacattatgttttttgctattccaagatatcaactttcctctaataagcacacaatacctacaagtgggtcgcttgtgaatagcagaacctgcccaatcaacgtctaagtaaccaactatctgagtatgttctctgtcctcataagtgagaccttttcctggagcacttcaatgtattttaggatttgtatcacacatctcaatggtcttaacaagtagaatttaagaattttcttaccacactaactgcaaaagaaatgtcagaatctaatagtgatttataaat

SEQ ID NO: 132016 - DNA, 563 bp, Glycine max
  Clone ID: PAT_MRT3847_90217C.1
ccctccagacagatccccctccctcccgttctcctggtaaaacagttctaaacgattgaactctcaacactgctcattcactattcctactatctgcatctctattgagattacggagtcatcagcaaccaatacagaaaagactaaaagaacatgatgcctcaacgagctaatcttcacatagccttaacatttttacaattttgttatgcaggaaatcatatatttctgagaattgcacttgatacaggcgtaagcaagcttatttttcctgtccatagaaacatcaccgccttggttcttctggttggattgtgatgcaagcatttgttctgaaaaaatactcagccccactcacagtttctgcttttacatgcttctttggtgttgtgcagtttttgacaattgcagccttttttgagacggattccaaagcctggcagttcaattctagtggagagatcttcagtgccttgttctcgggactggtgacttcagggctggcatcagcaatacagatatggactattggccaaggaaggccagtgcttgcttcatttttc

SEQ ID NO: 132017 - DNA, 269 bp, Glycine max
  Clone ID: PAT_MRT3847_90218C.1
gtgagagtagattccaaagaaaattccatgcaaatgacttattatggagtgatcaccaactcttctggtgaagattggaaggatgtcaagctcttcttgtccactgccgcacctaatgttggtggaactcctccattgcttccaacagctaaagtaaccttcaaatctgattacatccctcctccagtggccagaacattccatgaacaacaagcaagaagaaacatgaacttcttagagaacaatatgcaacaggctcactggggaga

SEQ ID NO: 132018 - DNA, 499 bp, Glycine max
  unsure (1)..(499): unsure at all n locations
  Clone ID: PAT_MRT3847_90219C.1
ggggggcgtggggggtacaggggggcagcccaaagaggagggggggttgcgctaccccanagttgtgattgagtgggcaactgcgaaccctgatgaccagaaaagagctcttgggataggggggggggtanccaactttactgagctgcgtccacattgaggggataattcgggattggagggaaggaggaaaattgagagcggcaagggggcgcatctttgtgaggggggngggggtgccaactaccanaaggggtanctttnatgcgaggggttggaagagagattgggatccccattnagggtagggacgtgggcccaatactgggtatgcgaagagggatacaggtcattactgggtcgcggttaaggggaacaacaccttcatttataggattttcatggggaatgctgaanggaacaagtaattcttaatttccttggccattcctgaaattcggaaatataggtagaggatgggtatgaaatcaatccatac

SEQ ID NO: 132019 - DNA, 1455 bp, Glycine max
  Clone ID: PAT_MRT3847_9021C.1
ggatcaggtcgtgatatgagataccttaacttgtgtgctgccgtgctgagtaacccagagagagtaatgggaacggtttgctgctgcataaacaagtttgctactttgagcaacatcaggtcacgacccttcttctcttcacacttcccctctcaccattttccctccacaacaacttccatcaacttcagcatcgcctcttcttctttttcttctgccacatcttcattcacatgggatgatgtctttcgcatatctgaatctcaatctgccactcaagaccgctctcgctacctccaaggcttctcccacaaacttcaactatgcaatcgtgcttctgagaaacaatctgaattccttccatttgtcattgaggaccacgtttttggattcattcacaatgggtttgtggagcatttgagggactttggcgatgtatttgttttccccatagataaaaacaatggaggcccctatggtgactttgtttctttgcatccaacactgaagacagctgacgaaagaaccatcgcagttggatatgtggtagagcgtttgggagcatagcagttactagtcatacgggatgagctctcctacgtggtaaccatcatttggtgcacccattttcttttcattagagcgtgctgcagctccttattttggcattaaggcttatgggagtcccatatgaatggctatgttgaggtggatgggcagaaacacatgtgggtagggaagagaagtgacacgaaacagacatttcctgggatgcttgatcatctagttgcaggaggactgccacacggaattgactgtcaggagaatctcataaaggaatgtgaggaggaagcaggaatacctagatctatctctgtcaaagccatacctgttggtgctatttcatatatggacattgatgggtatagatacaagagagatgttgaattctgttatgatctaaaacttccaaaaagtttcttacctaaaaatgaagatggagaagttgatagcttcaagttgatccctgttacgcaagttgcagaagtcatacgcaagacagagtttttcaagccgaattgctctcttgtaatcattgacttcctgtttcgacatggatacatcactcctgaatatcttggatatttggatctcctacgaaacttaagaataggagattgctcctgactcaaagcatcatgaccatttactatgttgctatgcattgatatgctgctcaagtttcttggttattgttatcctttatattgttgaaattctataatgatttattcaatattatattaactcttgggattgtacttttctcgtaatgcagtctgcaacttggatacttatttggtactcttttttttttcttaagaattggtgagaaaggaccattaagaattattccatgcaaatctgacatgtagctttagtcgcgtcagttcc

SEQ ID NO: 132020 - DNA, 781 bp, Glycine max
  Clone ID: PAT_MRT3847_90220C.1
atatacgtatgtttaggtagcaaaatacctcatgaaaaaaaaaagagcaagcaagaaaagaataagaagaaaaaaaatagaaagagaaataataaaaaaaaaaacaaaaaaaagaaaaaaattcctgatcaaaagaaccggaagaaagcaaaaagataaaattcccaatcaaagagggggagaaagcaaaaaagaaagaaaattccctgatcaaaaattgagaggaagcaaaaagaaaaaaagaaacaaagttcccgatcaaagatcgaaagaaaacagaaatatgcggaaaggtctttggaccagacaacagctgaacaatacagaattgtcaccaagtaaacaagaaaaaaggaaaccacgacctaaagtggtccttcccctttgattgccgacaaaatcctgtgcgctagcgactttctcgccacgcactaaacaaaaacagaaaaggaaaaggcaaaaacactcaaagccaaattccccacctaaaaaccattcccaaaataagagaagtgaaaagaaagaaaaggaagaaatggaaagaaagaaaaagaaaagaaatgaaaataaagagaagaacaaaagaaagaaaaggaaggattcccgatcaaagatcgaaaggaagtaaaaagggaaaagaagcaagaggaggaggaggaagaagaagaagaagaagaagaataagaggggaggagctgggtggtgtagccatcagcctgccaagaaaaaaacaacagtaatgaaacaatgtctacaaactatattatgttctgtaactgaa

SEQ ID NO: 132021 - DNA, 240 bp, Glycine max
  unsure (1)..(240): unsure at all n locations
  Clone ID: PAT_MRT3847_90221C.1
gctcgagcggccgccagggtgatggatatattcagaattcggctttttcnaacccgattccttttttagaatgttagctggaggcttaacgagccaaaagtccctctgtggcgcaaatagaaaattggatgcagttcgatcattaaactccttgtttggctgacaaacatgccccataatatagcacttttggtctttgaagacactgaaccaaagcaggatggcatttttccaaccaga

SEQ ID NO: 132022 - DNA, 308 bp, Glycine max
  Clone ID: PAT_MRT3847_90222C.1
ctcagccaaagccgtgccggaacccggaagacaccacctcctgctgcggttcttcaagaacaaggaaacctactggcttgtgcagggtgtgacacacaaagtacaacaactcactgtagagcccaaagatgtctgcaggtagggccaagtaccctgtagtgcggaccgagatggtggcccacccacaggcagagtggatctggtgggttgactcaccacgccatgttgacagacatggagatgatgctcccccttgagcgatacacggagcacaatctcgcggatcacggctgggcccacctcataca

SEQ ID NO: 132023 - DNA, 313 bp, Glycine max
  Clone ID: PAT_MRT3847_90223C.1
tagaaagtataaaagaaagactcagttcttatccttggcgttgattgcgagtcgaaatctgaatcttaatcatatcgctgcgtatagggtatgagattggctctgacagcatgccgtataatgggaggggctcttaccgacacctcgatgacaggagatgaacgaccgtcatcaccacagagaaccgacagctctatctgtggtgagcctgcaccatcaccaggtgcctgtgggccttcttcttaatcgctctcactgctttctatattagctaccatagctagatggattcctgtggacgttaattgaccga

SEQ ID NO: 132024 - DNA, 452 bp, Glycine max
  Clone ID: PAT_MRT3847_90224C.1
aaaaacataataatatttatctacaactataacatttattatcttatctacattttttgatagtatgaaagtacacatctttttaaaacaatagggtaaatccaaggatattacttccttcttcttctccttctttttcttcttcacataataccttaggaaaaagttggctaaactaaacggttggatttttcctgtggctgaacaatgtattcctattcttaatcaactatttcctagtcatgatcaacatattcctactcttactccgggattcaatcaagatattcttgcttaaacattgcaatggggggggacaggaacgaatattgtctccccaattcccgaccccgactccgactccccaacatggcccatacccatacccgatatctgacggattaaaataaatacctagatgcattgggtgtacctgatgggagcattcttga

SEQ ID NO: 132025 - DNA, 266 bp, Glycine max
  Clone ID: PAT_MRT3847_90225C.1
ctcgagccgcatcggctcgagagttcttctctatgccactcaatgcgaaggatacagcagagtaccccaagccatttgggactggtagctagagtattggacacaatggggatgttggttaggttgagtaccttcttctcaacaccaatcacgaacacaacttctctttctatggcaaaaatgctgaacaatctaggtgtctattatacagttacatgtcttctgtgagaactatggcatgcgagattcttgagttgctggcagaa

SEQ ID NO: 132026 - DNA, 109 bp, Glycine max
  Clone ID: PAT_MRT3847_90226C.1
ggaggagtacaaattcgagtatggacccttggtttttgaacatgcagagcaaatcctagagacgacagatatatgcactataatacgtgactcgcagtcttcagatgta

SEQ ID NO: 132027 - DNA, 743 bp, Glycine max
  Clone ID: PAT_MRT3847_90227C.1
attcagacttagttcgaaactcacttgcaaaaagagtctttgttggtgggtctctgtgttgttcttagttcttacaactgtaatggctattacagcaatctccaactcgagtcagaatatgaacgaggttgctgccggaggcgtgaaaccgaagcgctccaattctcgcggagttcgaatagtgggaagcagaatctacgattctgcaaatgggaaaacttgtcaccagtgtcggcaaaaaaccagggattttgctgtttcttgtaagaatatgaagaaagggaaaccttgtcccattaacttttgccacaagtgcctcttaaacaggtatggggagaaggcagaaaaggtggagcagttgggtaattggatgtgtccaaaatgtagaaacttttgcaactgcagtttttgccggaaaaaacaaggtgaactacctactggtcaattatttcatacagccaaggcatctggtttcaagtcagtgtctgaaatgcttgtttcaaaaactgctgaatctaatgatttggaatcgaccaaggtgaatagggtttttccttcaaaggaagctactgaggtaaagaagcaaaaacgtgttaataaatcaagttccgacaaggttccggtgagcaaagctgtttcacctatgaagcaaattgcatcagataaggagcttgtagtacttctctcaggagaaattggaaaggaaaattcttcagatggaaaacttgaccctgtgctcgtgc

SEQ ID NO: 132028 - DNA, 514 bp, Glycine max
  Clone ID: PAT_MRT3847_90228C.1
aattcggctcgagctggatttcttaatactagttggtagcacagaatcgattcgaaatcgaaccaaaaaaaatatcacgttcttgtaacaagtcaaagacacaactcaacttgaaccaaaaaataacaaaatgcgttcgatctaaggtctgaactaaaaacatcccatttccactcccaactctgtttcaccatttcttcaattgaatacttctctgaatcactatgatatattcactctctttctgctgcatcccacttttattctgaggtcaacggtctttgaattttcctaactcaattgtgtgcacaaccttatccaatgggtcggaggaacaatgaaccaaactccattctctcacaccgtttgatccttcccttggtgtgttttcgcttcgtgcggtttggtctacgcgttcctctctgcggtgctcacaaacagcagaaacagagtttcagagtttgggaggctagttgaagatggtgtggcggcggagaatgatagagggtgctgt

SEQ ID NO: 132029 - DNA, 1419 bp, Glycine max
  Clone ID: PAT_MRT3847_90229C.1
tataaaatgataaaagctttgtattccctctcttataagcccttctcaaaataaaattcattacttgaaattacaacaaacaataatccaaaaaagggtgtaagataaagtaaagaaaaagtttacccaaaaagaaaaaagagaagttacagcaaacgttaactaaaagatttgaaaccaaaagaattgcaatctacatggatgcccagtttgtttcacatttcatctaggtgacttttctggattcttcgaagcaacaagggaacaggtttttccaaaacagtcacgttaacattgttccacacatcaggtattgtagggagtgtagtaattttctcagcaaaatgcatgtcttctggaagaacagaaccaaagacagtgtattcatttttccactcagaatgatcagctaggctaatgaagaactcagggccagaaccaatccaagcaactgaaccccttttaagggttggacaatcttccaccggaagtttattgaatgctgtgccttgtgcttccagtgtcccttgaattaatgcataagggggaccaaaagcagcattttctatatggtttccttctgaatcccatgattggcctcgactctctgcacggtaaaatcggcagccagcacaatgatgcaaagctaacaattctagaatgtagtcaacagagtgtggggcacagtcaggtaaaagtttaatatgaagagttccatattcagtttccagtccaataataccctctcctttcccaaagataagaccagaagtccaaccaatcacttcccccggaggcgttccttcttgccgttcaggtgctaagctgtccttctgtttcttcaaccaacactcaccaaacttggatccacaggccttgcgatccccacaaaagacccaagtatcacaaagacaaggcccatctttcccagaacacatggatttgcaggcgttgcagcactcttcagaactgttgaatttgaactcagaaccccacttcactgctgcaccccaaagctccaaattttcaatccctctacagcaccctccatcattctccgacgccacgccatcttcaactaacctctgaaactctgaaactctgtttctgctgtttgtgagcaccgcagagaggaacgcgtagaccaaaccgcacgaagcgaaacacaccaatgggaggatcaaacggtgtgaaagaatggagtttggttcattgttcctccgacccatttgataaggttgcacacacaattgagtaaggaagattcaaagaccgttgacctcagaataaaagtgggatacacaagaaagagagtgatcatatcataatgattcggagaagtgttgaattgaagaaagagtgaaacagagttgggagtggaaaacacacctcgagccgaatcggctcgagcggcacgag

SEQ ID NO: 132030 - DNA, 195 bp, Glycine max
  Clone ID: PAT_MRT3847_9022C.1
atccaaacacccttgtgaacacaactttaaaaaaaaaaaccctgggaaggcgtattcatttcgggcccctttatcaactcttttaaactatatttcttgaaccacctattaaacatattaatggcgcatcttatatttttaacgtgctcaatagcgatttttaaaaaaaccttttatggtgatactatttccaca

SEQ ID NO: 132031 - DNA, 694 bp, Glycine max
  Clone ID: PAT_MRT3847_90230C.1
gtggtgcaccagttgctgttgcagcagctgcccctgttgctgcctctggtggtggtggtggtgctgctgccgccccagctgctgaggataaaagagcactccataggtataaaaaatgctgctttggtcccccttatcattaattcaagggacactgcacaaggagcattcattcggtaagattgtccaactagaaggggttcagttgcttggattggttctggccctgaattcttcattagcctagctgaccattgtgagtggaaacatgaatacactgtctttggttctattcttccagaagacatgcatatagctgagaaaattgctacactccccacaatacccgatgtgtggaacagtgttaacgtgaccgttttggaaaaacccattcccttgttgctccgaagaatccagaaaagtcacgtagatgaaatgtgaaacaaactgtgcatccatgcaatgaaatggtgcatccatgtagattgcaattcttttggtttcaaatcttatagttaacgtttgctgtaacttctctttttcctttttgggtaaactatttcttcttcttcttgttcttcttcttattacaccccccctttttttggattattgtttgttgtaatttcaagcaatgaattttattttgagaagggcttataagagagggaatacaaagcttttatgttgctgg

SEQ ID NO: 132032 - DNA, 866 bp, Glycine max
  Clone ID: PAT_MRT3847_90231C.1
gtacggacacctgggcataagcttggagtctcggctcgagcttttcttcaagcttgctttccgcacaaacaaaaaaagaaagtaaaaaagaaaaccctagaggagaagaagccaaaaaaaagaagccaaaaaaaaggctccaaagatgggtttcaaaagctcttctcttctatgcctagctcttttgcttgcatgctcttcggctattcatgcctttgacatcacacaactgctaggccaatatccagagttttccacattcaacaaatacctaacggaaaccaagctcgcagacgaaatcaacagccgcaacaccatcactgtcctcgccgttgaagactcagccatgaattccattgctgccaagtccccagaagccattaaggccatcattagcacccatgtcatccttgacttctttgatgagaagaagctcatggaagctcaagctaatagccaacagttgacaaccctattccaggcctcaggcattgcagtgaaccaacaaggcttcctcaaggttgcactcgtcggcgaaggcgagatcgccttcggctcggccgtgagtggcgccccagtcgacgccaccgagctcatgaggaccgtcaccagcgagccctacaacatctccattctccaagtcaccaaacccatcctagtcccaggtgttgattcacaaaccccagcctcatcatctggtgcacaatcctcacaaggagccaatgctcccgttgctgcacagggtgccaaagctcctatgtcatcattacaaggtgccaaggcacccattccgacaccggttgcaaagtcacctgtgccagcacagagtgccaaggcaccagttccttcgaagactcggccgccga

SEQ ID NO: 132033 - DNA, 562 bp, Glycine max
  unsure (1)..(562): unsure at all n locations
  Clone ID: PAT_MRT3847_90232C.1
attcggctcgagcttttcttcaagcttggtttcggaaaaaaaaaacgtaaaagaaacaaaaaaaaaaacccctagaagcgaagaagctgaaaaaaggctccaaagatggatttcaaaaactcttctcttctatgcctagctcttttccttgcatgctcttcggctattcgtgcatttgacatcacacaattgctaggtcaatatccagagttttccacattcaacaaatacctaaccgaaaccaagcttgcagaccaaataaacagccgcaacaccatcactgtcctcgccgttgaagactcagccatgcattccattgctgccaagtccccagaagccattaaggccatcattggcacccatgtcatccttgacttctttgatgagaagaagctcatggaagctcaagctagtagccaacagttgacaaccctattccaggcttcaggccttgctgtgaaccaacaaggcttcctcaaggttgcacttgttggtgaaggcgagatcgcncttcggtcggctgcgagcgatgccccagccgacgccaccgagctcgtcagga

SEQ ID NO: 132034 - DNA, 493 bp, Glycine max
  unsure (1)..(493): unsure at all n locations
  Clone ID: PAT_MRT3847_90233C.1
ctgcttgggggggggggggggcctcggggtaagtgtggtggggtgttatagaaaggtggcggcatagtactactcgataaaaggatgaaggctgcaggttatgacgggagagatagctacctaccactggaaaaacccaaaggaatagaagacgagagcaggatagggcgcagtaggcgtaaaataaagtttttaaaaggggaggttggtgtgtgatataggctgaagcgtttaaaataaaatgaaaccacatattattattattaaaagagagataaaccacggacgggaagggtgggtgagtggtgtggcagaggagcaatgttgaccaggtagcaaacacaaggcctggcaggaaggcaggttagggctaacgacacaaacgggcagagagagagggagagcgtgggtggttatactggccgaggggaataaagcatatanctaggcccaggtgtggttagctgggcaatagaagacgagcgccgtagcg

SEQ ID NO: 132035 - DNA, 509 bp, Glycine max
  Clone ID: PAT_MRT3847_90234C.1
aaaaaaaaaaaaaaaaaaaaaaaaaaaaaaaaaaaaaaaaaaaaaaaaaaaaaaaaaaaaaaaaaaaaaaaaaaaaaaaaaaaaggaaaaaaaaaaaaaaaggaaaccacaattaagaaggatccatttgtttaagtcttggggttttcttttgggttgcctttttttttggtcgctgcctggtttttttcctggggcgggcctttttacaccgctctggcgttgcctacctccttggggtttcccgactatctcccctttgggccgctgccttttttcccttgcggccttttccgtttgcgcgttccccccttgttccgcctcctgaatggcggccgggccccgctgtgtaggggccctttccctgggggggacttttggctcgcccgagcgttaccccccccccgggcggccccttaccctcccttccttcctttttccccctttttttcctttccacctttgtttttttgcctccttttgttttttttccggggctctttttgggg

SEQ ID NO: 132036 - DNA, 3389 bp, Glycine max
  Clone ID: PAT_MRT3847_90235C.1
tccaaataagccctccctcgcaacaacctccacaatcgtcctccgcgacccatcaaggaggtcatcatcgccacacatcttcaggccatcaccgttcgtctggaatgactgcttcttcttcgcgtgctccgaataggacacgtaccggagatgacctgcacattggcaagtacaaactgctgaaaacaattggaaaaggcaacttcgcaaaggtcaaattggcaaagcacgtgccgaccggagtggaagtagcaatcaaaatcatcgacaaaacggcactgaatcagagcagcttgcagaagctttttcgtgaagtccggatcatgaaacaattggatcaccccaacattgtcaagctgtaccaagtaattgagagtgagacgactctgttcctggttatggaatatgcgagtggtggtgagttgtttgattatctggttgcccatggacggatgaaggaaaaggaggcccgggcaaagttccgtcaaattgtttctgccgtccaataccttcactcgaagaatgttattcatagagatttgaaggcagagaatttgttgctcgatgccgacatgaacatcaaaattgccgactttgggttcagcaacacattttcaccgggcaacaaactcgacacattctgtggcagtccgccctatgcagcgcccgaattatttcaaggcaaaaaatatgacggtcctgaagtggatgtttggagtcttggtgttatcctttacacgcttgtttccggcagtcttccgtttgatggccaaaaccttaaggaacttcgtgagcgggttctcagagggaagtacagagtccctttttacatgtcaacagactgcgagaatctcctgaagaagtttctcgttttaaacccgataaggagaggaactttggagatgataatgcgggataaatggatgaatatgggctatgaggaagacgaattaaagccttacaccgaaccgacaaaagacgttcgggatgaaaggcgcattttgaagttgcaagcatttggctacactctccagcaaatacacgagtcgttggaaagagaaaggttcgacgaaattttcggcacgtatttgctgatgaaagaggcaaaaaagcacgacgcgcaaggccaatcgttgggagggagtggaccaaatgcgacggccgaatcgccgtttaatcaatcgatgggtccgaccgtgccacaatcacatgggccaacggtgtcaaatgcgaagaacagcagacgctcttcttcaaatgccgaacaaatccaaccacaacaacatgccataacatctcacagcgtaataaaccaacagtcggctgctcccatccaacaaatttcggcaactccacaagcgattccttctcgtcaaagtcaaactgctccgggacaagtgacgttcagaacggcacaattcaccagtcgccaaccgactctcagcgttcaaccacaagcatatattcatccgatccaaagtgccaatgtgcgcaatatcaccgccacatcttcggcatcttcgggagggcgcaaaggttcggcgccagcaggacgggttcctctaccgaatctcggccttcggcatggaataaatcaaccgggagtcagttatcgttatgcaccgccagttcctggaagtggaagcagcgagaaacccaacgggggctcatcatcagcgagaggcgctcctccgccaacattttttaaccagcaacttcagacaccaatcgctccaaatccaatctctgcaaaattagtggctaaagccacacatcagatgaactccaatttgatatcaacaagttcagtgatgcaaaaaaagcatttctcacgccccacgagagccatcaataaaggaggagccgatgggcggtgacacggcaaaggatgacgacaacggcagcgacaaattctggtcgatggcaacgaagacgacgtcgcaacatggggaagcgccagcaattccaacgatgaccaaaaaaaagaacgtccattgaattgtgcgaagcaacacaaattggacacagggaagaacttggccaattggtttctccaaaaccagcgaccgatcgtacagcaccgaccgccgatttcatcagaatgggcctccatcaaagtccatcgatgccgccaatggtgatgaaggcactagcggcaaacgacaatgatttcacaatttcttcaactgcttctgatgaggcagcaacaacaacggaaggcaaactgacaaagtccgcaaccggtgcacacatttccgccgacccaacactctctcatatcgtcgacattggcgcacaaacgtcaacagccgtacaaaatgcaaattttcctcgaggatcacgaaatcgccaaacttttcacggaaagactgaacacacaaagagtgctacggacgacccagaatcggaccatgacgagggaataacgaatgcacagaacacaataccaccgaatgcccagcgcgggtctttcctttccaaactcacgaaactaacgaaaagaactggcatggacccggcgagtccggccgcacaatcactgagcggttccaacagtcagcagccccctctaaagacacacggagtaatgcgagcaggtaccatcggttcagctgcaggaacggcttttacacaaccgcagcaacaacaacaacagcatgttcaacaactttttcaacaacaacaaccaccaagcgctttctcagcgccgaacaccccaaaccaacaacagcagaacatttcccagcaacagctgacgccggcagctgcgcagttgggcacagcgaacagtccatgcccattgggcatcgaagaggtgaagccgcgttctctgcgctttacttggtcaatgaagacgacttcgtcacttgcaccggacgaaataatgaaagaaatacgaaaagtactcgacagcaatggatgcgaatatgagcaaagggagaggtatttgttactttgtgcacacggcgacccaagcaaagactcattgatacaatgggagatggaggtttgcaaattgccaagactttccctcaatggagtgaggtttaaacggatttctggctcttcgatcgggttcaagaacattgcttctaaaatcgctcaggagcttaacctctgacggttttgtgaaatcggatgctgcctccaaaccatttattgaactttgtcttcgatgttgtggattctgtttctcaaataactaattattgctaacattttcttctgcatgcttttgctctgttcgtgcttctctctctattcgtttgttttatcttttgccactatcgcttttttggtcggtcggtaaccaattttcttcagtttctcagcgacaatattcttattgttcgtgagtatttaaagataatttaactttcatttaaatg

SEQ ID NO: 132037 - DNA, 150 bp, Glycine max
  Clone ID: PAT_MRT3847_90236C.1
aattcggcgtcgaggcctaaaagcgcctcggtctaatgcacgttccttcatgccccagattcttactgttcttacctcgagaagcatcatcgtaaagtatatcatagcacgcttcacgcggcaaattggtgtttccaaagggtcttgcaa

SEQ ID NO: 132038 - DNA, 173 bp, Glycine max
  Clone ID: PAT_MRT3847_90237C.1
ccagcccacttcattccttgcttgctggagagaccattcagtttggggcagtagcatctccgactgttcttccgtctatcaaccgtgttgtgactcatcgcattggtcgacctcgatcatctatatcacacgttccaatgactcacaatcttactgcatctgataacgattgc

SEQ ID NO: 132039 - DNA, 306 bp, Glycine max
  Clone ID: PAT_MRT3847_90238C.1
actatgttttagatcgcgagctgccgccctttttttttttttttttttttttcgagaaaccaccgaaacgtctttactggaatctgtcttaacatggacagagttacgagaacgcacgtggaaaaatagaggacggccaattatgtactataacattcagtaacgacaagtacattagcaaatagagaagaatccaaaaactcttctttcctccacaagaggcaaagcccaaaatagagctaatgttcctaacaaggtaaatccgctggttccagaacccgatttatcctgacctctcattttttg

SEQ ID NO: 132040 - DNA, 372 bp, Glycine max
  unsure (1)..(372): unsure at all n locations
  Clone ID: PAT_MRT3847_90239C.1
gagacaaaaacagagaatatagaacagtgacaaagaggcaaaacctgagactgggaaaatcagagaaatgaacatgcagagcctaaggtgagtccagtcgccagcaagttgctgaagaaggaactgtaaattgaagagaaaaccgcaggaagatgcttggcttttagatatcccttttctgatttctcggatataacaaaaatgtcctttacaaaaagctctggaccaccatgttgatgttgtcatgacgcttgcagccaccatttgccatcacgaggaatcctcaactccaagtgtcccacacagtgatttactgggtggcgctgccctgctgccatngtggctgtttaacaaacactaattacatttttt

SEQ ID NO: 132041 - DNA, 615 bp, Glycine max
  unsure (1)..(615): unsure at all n locations
  Clone ID: PAT_MRT3847_9023C.1
cgaacatctaactaggtaattcggcccgcactaatatggggaagcccttcttcactctctctgtttcttccctttgctagctactcttgccgagtgcatgccttgctattacctccagcaagttcagcgggtgccaactcaacaacctcaacgcgttggaacccgaccacctttttgagtccgaaggtggtcttatggaaacatggaactctcaacaccctgagctgcaatgcgccggtgtcactgggtccaaacgcaccctgaaccgcaacggcctccacttgccttcttaatcaccttatccactagtgatcattgtcggtcaggggaggggagcacttggatttgcatttccgggttgccctgagacgtttgagaagccacaccacctgtcacgctgaagaggctcaaggtcgctgcggcagctacaagacaggcgccccaagattcgtcacttccgtgatggagacgtcctagtgctccctcctggggtgccttactggacctataactctggcgatgaaccgggtgttgccctctggcttcttgccccccccaactccaacagtgggttggatccaaacccctggagattnttaccttgctgggacccca

SEQ ID NO: 132042 - DNA, 1034 bp, Glycine max
  Clone ID: PAT_MRT3847_90240C.1
ctctttcccctgtcatagattatgattttcgaccaaaagttacttaaagtacatatgtggcacgtgcggctcgagtctgtaaacttatgccaagaacatggttgggttgttgtcaaactcagcaatggtaagaggcagagatgaagtgtacgtggcagcaatgcctctaagggctacaaagggaccaccccagttgcttatgtctgctgcttactccctcaatttatgggatttccagcatttcatggtcatcatcaaaccctcttctctttctcaggttctggtttttgattttcaaccaaaagatcctgaagatatatatgtggcactagcggctctatatggtagagcagtgccaggaactgttctggtgaggcagttaaaaaagttgccaagaaacaaatgctggcttgttggatattcaaaggcagaggcggatgctatggaaatagcaagggaattcaacaaagaatgggaaacaaatttgaggattggccttcatgattgtcgcgattataccaatagtttggttaggcaactcactggcgaaaaagatgtgctgaaacgtttgagaaacgttggtagttagagggaatccgttgtctggttagaagatcactttattgaattactttatcttgtatcatgccttcaacattttttagcacattcatcgcttcacttggatgggaactggctaaacatcgctttcatgggggctctgaagaaatcaatctcatacgagaaaaaacttatgctatttactttacccttctgtaacgttcttttctttgcttgtccagtctctgaatgtctatttgttcttgtattatactagtattacgcggctataaatgaatagctgattaagaaaaagtttgagacctctttgtgtaaatattaataatcggcaaaacaatgtgctgatcctatctgaaaaaaaaataaatactaaagggagttttcttatgtaaaataatttatgactcatgctctttttagcatatctcaataaactcaggttccatttatcc

SEQ ID NO: 132043 - DNA, 684 bp, Glycine max
  Clone ID: PAT_MRT3847_90241C.1
ataaaaatacattccataatatgatcatattatgaaatagagagacggtatttttttctataaaaaaatacattaaacttttgaacccttaaaattagggggcgggttctatatgttactctgaaggctgaacccttcaaactttgacagataataatacatatagagaagtattagcaactagcgcccaaggcatttcccaccataatttgcaaggaagtggaacttgggagaaaaatcaagttcactaatcactatatatgcaatgggctaaaacatggcataacctaaatcagcattcaaatccatctctatgaaaccttttcttgcctcagccaaggccctccttgctacctcaaactcagcttctgcagctaccaattcttccctcagcttcttcattttaatctccaaagcaaccacactgtctttgagtttattcacttcatctgttttatccaaatgagttttcatatccaatgcagattgaacataaggctccaaccaagacaattgaaatccagaatgcttaacaagttcctcccataacccttgaaggcgattgcatgcatcttcattcatatccttcaccttacttgtcttgagtaaatgcagaacttggcctaaagatgtgaatgcccatagtttgaaccatcttgaacttttcctctggctccttatcag

SEQ ID NO: 132044 - DNA, 841 bp, Glycine max
  Clone ID: PAT_MRT3847_90242C.1
agcggctctatatggtagagcagtgccaggaactgttctggtgaggcagttaaaaaagttgccgagaaacaaatgctggcttgttggatattcaaaggcagaggcggatgctatggaaatagcaagggaattcaacaaagaatgggaaacaaatttgaggattggccttcatgattgtcgcgattataccaatagtaagaatttatttcagaccttatgttgcctaagcccttttatggaaagaactatatgttagtgtatgttattactttagtacttgatcaatctgctctaatgccatttcactgaaattgtgttaatcgcataggggaaacttagatggtcgatttagaaattctatcatatagtattctttactatattggttttgttttattctaccacgaagtattgaatttttctggtcaattaaaaggtttggttaggcaactcactggcgaaaaagatgtgctgaaacgtttgagaaacgttggtagttagagggaatccgttgtctggttagaagatcactttattgaattactttatcttgtatcatgccttcaacatttttgagcacattcatcgcttcacttggatgggaactggctaaacatcgctttactttacccttctgtaacgttcttttcttatgcgaaaaatcttatgctatttactttacccttctgtaacgttcttttctttgcttgtacagtctctgaatgtctatttgttcttgtattatgctagtattacgcggctataaatgaatagctgattaagaaaaagtttgagacctctttgtgtaaatattaataatcggcaaaacaatgtgctgacc

SEQ ID NO: 132045 - DNA, 564 bp, Glycine max
  Clone ID: PAT_MRT3847_90243C.1
ggctcgagcttcgcagaacgatgaaggaaggcatctatcgattatcgacgaaggtttcgacgagttcgatccctgatagtgttaccagagaggaccctacgaccaaatacgaattgctcaatgaacttgggaaggggtcttatggagctgtttacaaagcaagggacttgagaacctcggagatggttgctatcaaagtaatatcgttatctgaaggggaggaggggtatgaggaaatccgtggtgagattgaaatgttacaacaatgtaatcatccaaatgttgtccgttatcttgcaagctatcagggagaagagtatctttggatagtgatggagtattgcggtggtggtagtgttgctgatttgatgagcgtgactgacgagccacttgatgagggtcaaatagcatatatctgtagagaggcactgaagggtcttgattatttgcactcaatttttaaagtccatagagacattaaaggtgggaatatcttattaactgaacaaggagatgtcaagctaggggattttggtgttgctgcacagcttacaaggactatgt

SEQ ID NO: 132046 - DNA, 314 bp, Glycine max
  Clone ID: PAT_MRT3847_90244C.1
gggattacaaattcatttaaccatttttaaaaaccaaccacaacccaattgggcggggcccattgtccgggttcagggcttatcccaaaacctcataaattcaattccttaaaagtacattaaaccttctacttattaaacattcataagaaattctaatttttattattccaatattccaatcattcacccttgttgtcttttttgtgcttaccaacgttttttaaacataattcttaagcaaatctcaaaagcttgcaaaaagttgggcttttttcaaatcaactaccattgtgttaacccttattttattg

SEQ ID NO: 132047 - DNA, 407 bp, Glycine max
  Clone ID: PAT_MRT3847_90245C.1
atgagaggaaattgtttttttatttttactagatataatgtaaaataataagacaccgtattataaaatgcacaggctacatccgtgagcaataataataatttatgtttaaactgctactagtaactactaagctcggcacatgcaaaaaggagctggatacatatatattgcttgatttgggtgcctcagccttagatccccttgtctattttggtgaccgtcacccactgcatcctgaaactctagacactgtatgggactattcaggacggggctgagccatctatgccgagaaacggccttatagtcgatacagtgcaagtctgttcggtgtccaaccaatgcattgtgcgtatttcccggggaagcagggatgaatatgtggctatgcacgccaacatatt

SEQ ID NO: 132048 - DNA, 470 bp, Glycine max
  Clone ID: PAT_MRT3847_90246C.1
ttttttttttttttttccgattttctgacgcattatcttgttatgaaattacattgtatgggctcgtactcgtgttctatctcgtctaatagctagacttgccttaattgtttgtctcttgccttccgccttatgcaaatcagcaccaagaatttcaagagaaaagagagctccttggggagaaaggaaaaaaacctttaccaaaacctccctaaaacagagagcggaggaaggaaaaagcgagcaaaagcggccaacagagccttcccccccccccgggggaaaaaaaaacgcacccccgaaagaccaaaaacccccgaagagggaaaacgcgccccaccaggaaagactccaaaaaaaacaaaattagtcgtaaaagggggtgcccttccgtctcgaaacccaaccaccccaaagggggacagccccccccgcaccaaagtcaaaaaaaaaaaacgcccccccctccc

SEQ ID NO: 132049 - DNA, 263 bp, Glycine max
  Clone ID: PAT_MRT3847_90247C.1
aagttaataaacaaagaatatagtaaaaaatgaaaaggtccaattttttatctcatgtttatctttgattgcacaataactttccttttgctcattgtcatatttcttcctcttagcaacaaaaaaaaaaatcttaaacaatctcttccatcttcaatgtctacctctacctttctcatttctctgcttgttttcatcacaaaccttacccttcttcttcttctaacctcagcatcatgcacagagttcatctacaacaccaa

SEQ ID NO: 132050 - DNA, 421 bp, Glycine max
  Clone ID: PAT_MRT3847_90248C.1
caaaaaaaaaaaagatatttctttcctttttttttacagaggacccccccaacagggccaacccaataacccaaaaaaaaaaaaaacctcccctaaccagaggaaagacaaacaattttttcttcccttcaaaactgatacttcacaggccccctccacatttccttttttcaaaaccatcagtaccaccccccccgattggggttgaaacccaaaaccttaatcaaattacacgcgttcctcctaactttctaataataatcttcaacaaccccaaaaaaagtttttaaaacccttttttccaaacccaccaaaaccatttcctggttataaaaacaaaccgaagggagtgcaaagagggcttattgaatccccctcgagctacctttcctaaaaactttaaccaaaatctgaacccacc

SEQ ID NO: 132051 - DNA, 553 bp, Glycine max
  unsure (1)..(553): unsure at all n locations
  Clone ID: PAT_MRT3847_90249C.1
agggttcaatgaaagtaacttctaaagggagaaacccttaaaaaagagattattcaaacaaaagggcatttgctgaaatgttatccaaactataagtatagtaattctttatctcaattaaccttcaactttctcaaaaatcctctcaaaagcccggtcaatgtcttaggaacctagaacagcaacccagataaacttttcccaggccccccccccagaaggagggaatcaaaaccattaagccttgggtctgcattagcaaagggcaagcacaaggggcctggattcaaatattcaagactttaaagacaaaatgtaaactctgaacaaaccccggcaatcttcatcacccaatagccaccaccaaccaaccttaacccgcagctaagtggctgccttctntcactcttccttggcttccaaccttccaatcaccaagcaagcaagcncgtctaacgaagaaacccaagaagnnccgcccgtgaacttgggaaaaaccctnntcggtgcaattacccttcaaagaaaccacacccgtcccccttcttttccc

SEQ ID NO: 132052 - DNA, 262 bp, Glycine max
  Clone ID: PAT_MRT3847_9024C.1
aattggcggttggtgaagccttcacccctatgggcatgctgtctgttcttaagggtgtacaagatagaatcgcccttgccatggccacagttggcggaaccacttcacgtagcggtctattggacaattcttggtcagagggcacctcctgagcctgaggcagattgcagtgaactcatggaacataagggatgattaaaccgtgtggccacagtatggtactcatgagaatacagtgctaggcaaaggacctggctatgaa

SEQ ID NO: 132053 - DNA, 440 bp, Glycine max
  Clone ID: PAT_MRT3847_90250C.1
cgcaacctcagcgatcaaaacgacgccgttctggtgctcttcactaaagacgacgagaaccaatccgatctcgcatccgacttcaacctcgccacgctcgccaacgccgcccccaccgtcgattcggattcccagtccgactccgaatctgaatccgattccgactccgactccggctccgaaagaaatggatctagaaagaggagaaagaagaaccctgaggatgatgatgaagatccaattaagctctaccggaagctgaagaaaggctattaccgattggggacgtttcacgggaagccctctgggtgtttgatgtatgaacttgctgacaagctcaggaagaacaccaacgagttgctctggctcgcatgcatttccctcacggatcaatttttgcacgatagattgagcgatgagaggtaccatgatggagtcat

SEQ ID NO: 132054 - DNA, 591 bp, Glycine max
  unsure (1)..(591): unsure at all n locations
  Clone ID: PAT_MRT3847_90251C.1
aagtaaatcatttttgtttgcaaagtagacgatgaagggctcaaatatacaaaaggatgtaaaaggtgaagggataaggaatggatatgaatccatggatgagaatgagctcctaatgattgccttcctcctctagctcaagcttttgggttctctatcttttgaacgagctctctttcttctctccgtttttcacataaaaacccttcctgagtttgagattttgcgacgacgcgttgagcgcgagtaagtggttgtggcgctaagcgcgccatgtgcgctaagcgcccctttgcctgactgcaggttctctatgctgcttcttcgcgctgaacggaaaccttaccgctaagcgacaatagctcgctaagcaagcttagcgcgttgagcgtgaaccatcagacttcaacttttctctctatcccttgctaatatatctgcaaaataaaaaccatcaaaacatataaattagcagtttaaggcacctactgcacaaaaacttagaggatgccgaaattccaatgattcacacanaaagaagccaatagaatgaaagaatatacctaatcttgatgtttaatagatatctac

SEQ ID NO: 132055 - DNA, 309 bp, Glycine max
  Clone ID: PAT_MRT3847_90252C.1
gtcaagtcataagtgtgtgtataatataactgataactggtgctgtgtgaatgacatatttcaatgttgaacaattccttcttgagttcttctgaaaaaaaaaaaaaaaaaaaaaaaaaaaaaaataaaaaaaaaaaaaaaaataaaaaaaaaaagcataaaaattcaatagaaaaaaacataagcacaataaaaaaaaaaggggggcgcccaaaagtttaaaatttaaattgggtgagaaggaaatttaaaaccttttaaaaggggccacaaaattcaaataaaggggacttcttaaaaaacctttta

SEQ ID NO: 132056 - DNA, 295 bp, Glycine max
  Clone ID: PAT_MRT3847_90253C.1
gggtcaaacccgataatgtgaatctatttgatttaagccaggggaaacccggagaaggccctacgggtatggaccccttcggggcccacatttttaaaaatttcctttaaaatcccatggtaatctgggacccccccctaggcatgcggtttgtcttcagggctccaaataagcagggcctatttacttagtgtccgcagaagccaaaatcagctggggttctgcccttccaactcccaacggtcaccaattgcattgttgcctcccatagccttaaacgccagatgggccgcct

SEQ ID NO: 132057 - DNA, 257 bp, Glycine max
  Clone ID: PAT_MRT3847_90254C.1
ggccattctctctctgtctctttcttaagtaagtgtaatcactgatcagacctcatatgtagatactctctgaataaacttctaagtaagcatttataatataaaataataaaaaatgaaattctaaaaacaagtttttttgcattagttaaaattaatataagcataactaattgttagaaactctcttatatttactaatccaaaatctaaaaactaattcaacttatgaaaagcttattttaatttattttttc

SEQ ID NO: 132058 - DNA, 500 bp, Glycine max
  Clone ID: PAT_MRT3847_90255C.1
aatttaaaaaaattcattatgtttaataaggtaacggagatcaaaatacagagaaatacaaagactaagaaaaaattggatttacaataaggggagaacaaaagaacaaaagaacgccgagatacaaaaatataaagaagtaaagagactatgtaaacaaaaacgtaatgtaatgataaagaaaactagaaaataatcataatttagaaagagcaataaaatttaaaaaataaaaataaattaaagagaaagatgggcacaatcggtaaactcattgtaaatagcttacgaatagaacgatcacagagggaatagaaactagatagatcaaatattaagaaacaaaaaaaaggccattctcaaaaatatatcagtgaaaggaaaaactacgtcgtacaaagaacaaggaaagtaacctaagcaccctatttaatgtagaagaagaagaagttcaaatgagtgtataaagccaatactaataacaacatacacaaatattc

SEQ ID NO: 132059 - DNA, 325 bp, Glycine max
  unsure (1)..(325): unsure at all n locations
  Clone ID: PAT_MRT3847_90256C.1
agcttaacgcctgcccgaccgggccggttttcccgtttcgttccacgcccccgggtacgcgtttttgcacaaagcaccacacaggaagncaagtgcagagcaagagcccaccactaccaacggngagccagangaaggaaaagaccccgcaaaggnacaaggccaaggagcaggcgcaggagaagccttgacagcaaggnacaccccaacgccaaggcnggaagatgggtggtcaaaagacagagggctaattgtgcagtatgttggaaagaagtctcacgctgttcataacattaatcagccccaagagaaagatttgttggag

SEQ ID NO: 132060 - DNA, 286 bp, Glycine max
  unsure (1)..(286): unsure at all n locations
  Clone ID: PAT_MRT3847_90257C.1
gcaaaaaatgaaaacccaaagtgcttctctcctctgtctttttctctctcttgctatccttttggntaatngnaatggtnnaantnnaatncaannancngaangncaangccacaatgtttcacnattcacnagaagccttttcccttcnanttttctctttggaattggtncttctgnttacaaggnagaaggagnagnaantgtagntgggagaggaccaagnatatgggacacaancactagncagcntantgaaaagatttgggntcatagcaccgngaac

SEQ ID NO: 132061 - DNA, 1122 bp, Glycine max
  Clone ID: PAT_MRT3847_90258C.1
ctgcgagaaggacgacagaagggggacagaaattaacaaccatatctattcttacaagttacatccattgagaaacatgaaggtctcccccttagcattttcaatcctttttttgtccttcaccatagaactcttcattggcattgcttcagcagcacaagaaccagtgcttgacacctcaggccagaagctgagaacaggtgtcaagtactacattctaccagtcttcagaggcagaggtggaggcctaacagtttcaagcagtggcaacaacacatgccccctctttgtggtgcaagagaagcttgaagtctcaaagggcaccccagttaccttcacaccctacaatgccgaaagtggtgtcattctaacctcaaccgatctcaacatcaagtcctatgtgaaaagcaccacttgtgataaacctccagtgtggaagctcctcaaggtgctaactggggtgtggtttttgagcactggtggtgttgaaggcaatccaggggttaacactgttgtcaattggttcaagattgaaaaggctgagaaagactatgtgctttctttctgtccctcgtttgcacagactttgtgcagggaacttgggttgtatgttggtgatgatgggaacaagcatttgtctttgagtgataaggttccatccttcagggttatcttcaagagggcttaataagttccaaccaaattaacgatagaatgaataaaagtgctagtcaaattaatctgactagaagtttgtttcttttgggaagggcatgattacattaatatataataattgtgctgcacagcatatgcacttttttgaagtctaagcacttcctttcatttggttcacattttgtgaaagaaagagtttatttgatcagtgatcaataattaataaccttagtcatcttgttgctttatctgtttcgtgctcaatttcttgcagtgttactatattgtgtggttaacgaaattagtgcagcatttgaaaccagcgaccctgtaagactttaaattcatggcaaaagaaacaacatattccttggtgtaagatttgtagcctgtatgttatcaatctattgccgaattcggcaccagatcaattgcatcggttac

SEQ ID NO: 132062 - DNA, 588 bp, Glycine max
  unsure (1)..(588): unsure at all n locations
  Clone ID: PAT_MRT3847_90259C.1
ctcgagccgaatcggctcgagagacgacagaagggggtaccgatcaattaacaaccatatctatctattgagaaacatgaagaaggtttcacccttggcattttccattctctttttggccttcaccatagaaccctttattggcattgctgcagcagcaccagaagcagtgcttgacacctcaggccagaagctgagaacaggtgtcaagtactacattctgccagtgttcagaggcaaaggtggaggcctaacagtttcaagcagtggcaacaacacatgccccctctttgtggtgcaagagaagcttgaagtctcaaagggcaccccagttaccttcacaccctacaatgccaaaagtggtgtcatactaacctcaaccgatctcaacatcaagtcttatgggaaaaccaccacttgtgacaaacccccagtgtggaagctcctcaaggtgctaactggggtgtggtttttgagcactggtggtgttgaagggaatccaggggttaacactgatgtcaattggttcaagattgagaaggctgagaaagactatgtgctttctttctgtccctcgnttgcacagac

SEQ ID NO: 132063 - DNA, 564 bp, Glycine max
  Clone ID: PAT_MRT3847_9025C.1
tttcctgtcatcactgtatgacgtcctccttctttgggggggggggggcggataggggggggggggggggcaaaatgtaaaaggaagggtggaagacaagccagcgcaaagtaaagacatatagaataaagagaagacgacgaagctgaggagaggtggggatgaaatatagcgggagtaccgatggcggatatgttgtttaaactaaatagccatgagacgaaaaagagggaaatacggctaaggccattaaaagggcagctgggaaaactggtaaagtggcctgttggccttgccaatggtaatggactagacactggtagcgacgtggtaaatataaaggggcccgacactgcctggggtgtggtgcttgtgggtgttaataaggtgccactacccgacagcatactagtatgcttacccggagacaagcacctgagccataggtgccgtttagtacgggcgctgagtatatccgctgttatatgttgcgatggattaggccgcagaattgtaactgcagtattaagcggaataataagccaagcctctaggccccctata

SEQ ID NO: 132064 - DNA, 294 bp, Glycine max
  Clone ID: PAT_MRT3847_90260C.1
aagaatcaagaatcagcaagtgcgttttggaagcagagaccgaaatacttcgggggggcccttacaaaggagagggggggcaagacaactggaggaaaagctcccaggaagcagcttgcaaccaaggctgcacgcaagtctgcaccaacaactggtggggagaagaaacctcaaacgaatcgccctggaacagatgcactaagggagacaaggaaacaccagaagagcactgaactcctaaataggaggctaacttgccagagggaggcccgtgaaaccgcccaaaaatacaag

SEQ ID NO: 132065 - DNA, 508 bp, Glycine max
  Clone ID: PAT_MRT3847_90261C.1
aaggctatggaaacaaactctcaatttatttgagaaatgttcattgccaaacacatgacaaggcaaagactgtgacttgttcagcaactcatatgccatataagatatccatattataagactggtttaaggcagaccatgccacacgctgaggctcgatgaaggacctccttgtactacatttctaactcttgaaactaccctggcacccagcgtgtgatggtctctttctgcccacactgaagagaatatgtcccaaacacactatcaaattctgacggtgtttctcttaaccctgaaaataccataaatgtgactctgcataaataacagggttcatctacttatgaaacagagaacgctactattaactatctataacagaatgaagacccgacagcgttgtttcaagcgttaatgtcgaacctgttcctgcaccaatagatagaaaagccccattacttcggagtacacacgggtgctgctgtaattatactctatagctgaa

SEQ ID NO: 132066 - DNA, 222 bp, Glycine max
  unsure (1)..(222): unsure at all n locations
  Clone ID: PAT_MRT3847_90262C.1
gggtttttattaattagaagaanaacacttgggctgcgtgtggcctttgcctaattttagccatgctattgctaggttggtatccattatgaacaatgactatgggtgcagtcaatgccccggtattccacaaaaaaaaaaaaaaaaaaaaaaaaaaaaaaaaaaaaaaaaaaaaaaaaaaaaaaaaaaaaaaaaaaaaaaaaagtggtgtgccgcttttaa

SEQ ID NO: 132067 - DNA, 197 bp, Glycine max
  Clone ID: PAT_MRT3847_90263C.1
tttgaacttctagtctctatcattatcatcctgctctagttcttcatcgctgatcttccttcacctttttattgtaagacaaagaaaatcagcagtataagcacgggtacaggtaaagctgccaccaggattcaggtagcatccactgagcattagatcttgcgagtgatcacttgttgtagcaggtgctacacaat

SEQ ID NO: 132068 - DNA, 276 bp, Glycine max
  Clone ID: PAT_MRT3847_90264C.1
cttgcacacatgttattaattattattgttgctctttctctttgccctcatgctacttttctttcattcatagccaatgcttattagtatcttgcttgaacctgttcttcaatctctactacattctgttcattaatgtttgcacaaccacctctgcttaacaattcaaatggtcaaagatatttaagctcataatgaggtttacattggattctttatatgagcaagttgctccttactccttgaaatactgcaaatagaagagtagaactttcc

SEQ ID NO: 132069 - DNA, 359 bp, Glycine max
  Clone ID: PAT_MRT3847_90265C.1
gatcccattcccagttttccttccctccacaatggcagagaaactacagtacccctgtctctcttccttgttaaccctcatcctctgcatctccgccacttccactaacccacacaagtcccaaacccaagcccttcacctccatagcctccctgacccattcacactctcatggcccgaatccgccaccgtagaacgcgacccggaacccaacacatctctctctcttcatcagataaacgcactcaccttcaacaaaaccgcttcccaactcatccacgttagactcgtacgcgatgccagcaaggtcaaaagtctcactcacttatccgcatccaaaatcaaaactcgaaccgcca

SEQ ID NO: 132070 - DNA, 1599 bp, Glycine max
  unsure (1)..(1599): unsure at all n locations
  Clone ID: PAT_MRT3847_90266C.1
ttgacggctgcgagaagacgacagaaggggacacaagattgagacacgaaacagaaaatgccaggactcacagcaccttccgattactcccaagaacccccccgccactcttctcttctcatcaacgccaaggaacctttcaatgcggagccaccgcgtgctgcgttggttgcttcctacgtcaccccttccgatttcttctataagaggaaccacggtccaatccccatcgttgagaacatcaacagatattccgtgaacgtgtccggcttggtggagcgtcccaaacagctcttcatgaaagatatatggatgcttccaaagtataatgtcactgccacgttgcagtgtgcaggtaatcgaaggactgctatgagcaagaccaaaacagtgaagggagttggctgggatgtttctgctattggaaatgctatttggggtggagccaaattgtctgatgttcttgaactcattggaattccaaagttgactagtgtcactgaatttggtggaagacatgtggaattcgtaagcattgataagtgcaaggaggaaaatggaggcccatacaaggcttcaataccactcagtcaggccacaaatcctgaagcagatgttctactagcttatgaaatgaatggtgaacctcttaacagggatcatgggtatccattacgtgtggttgttcctggtgtcattggagcccggtctgttaaatggctggaagatatcaatatcattgaagaagaatgtcagggtttcttcatgcaaaaggactacaaaatgtttccaccatcagtgaattgggataatattgattggtctacccggagaccccaaatggatttcccagttcagtgtgttatatgttctcttgaagacgtgagcacaataaagcctgggaaggtaaaaattagtggatatgcagcatcaggaggtggcagaggcattgagagagtagatgtgtctgttgatggaggcaaaacatggatggaagcctcaagaattcagaaaagtggggttccttatatatcagaacatgccagcagtgacaaatgggcatgggtgctgtttgaagtcacagctgatatccttcacagcactgagataattgcaaaagcggtagattctgctgcaaatgtccaacctgaaaaggttgaagacatttggaaccttagaggtattttaaacacttcatggcatcgagtgaaagttcaagcgagttactcaaacctgtaaaagtagcaccaacttcccaatcgagcctttatgactctctcccccaacaatgcttggtggattttgaagcttctctgtttgaactatgaacactgaaaacacctgaacaggcatcgcaatcagttgtaaaaaagtctttatacaaataagctataggcaagggattataagaaaaatccttgggtttctcagagtttttcatggaatatctgttcttcgtttcttcgaggaaataatttgagatcgtaaacatgattcgtctggcactttgaatttcactaatcttatcattttggtcacacctttagctctgttgcatctaggcatttgatccattatcttagtaannttttaaggtcg

SEQ ID NO: 132071 - DNA, 1114 bp, Glycine max
  Clone ID: PAT_MRT3847_90267C.1
gaattccgggtcgacccacgcgtccgcggacgcgtgggcggacgcgtgggttttggtgggtcccgctttcaccatcgacgttccttcgtctccgccgcgggatggcggttccgaaaatcggatcttccttaacgggtcacccgaaaaagatgatgggtcgaactttcggatctcgggcccacccaagttcttcgccggcggcgagtcggagagttcgtcgtcgatcggaacccccgatgacagcgacaacgaggaggaagaagtgcagagccagttgaagatacgaactgggttgggttctttggatgctatggaagattctcttcccatcaagaggggattgtctggtcattttgatggaaaatcaaaatcgttctcagatctatcacaagtgagtaatttgagtaatctgaaggagttgcaaaagcaagagagtcctttcaacaagagaagaagggttttgatagcatcaaaatggtccagaagatcatctttctattcctggtccaacccacaatccatgcctcttttgcctgtggatgaggatcaggattatgattatgaagaggaagaagaagatgaagaagaaaatgctagaaaagttccctctgcttcatcttcttcctcttcctccttggccgaggaaaagaaacaagaagatcaagttcagctaagattcaacagaatgccagaatcttatgctgctcatatgaggcttagacttggaagcttcaaggctagaagctttctcttgcagatctgcaagaacatgatgatgaggaagaaggtgatgatcattaaattaacatttaacatagggttttatttttgttttattcttttgttattgtggttgttactaaataaaattaaatagtattaagtaactgttaaaaaacttatccttttctttttttacttttgttttaaaaaaatggattttgctaaggggtgtactgtgcatatcctgtgggtattctagtaaagttatgaaagcttcttggtttcatagaatgacaggagttctgagctttacttttcttttgatggtgtttgtttgtttgccaatataaaagtggatatggaaattgggacgcaacgcattcatattttc

SEQ ID NO: 132072 - DNA, 315 bp, Glycine max
  Clone ID: PAT_MRT3847_90268C.1
agcaaacgttcaggagagctattggattaacctcagtaagcagaaaagaacattgaaaaatcaacaaaatgaaaagtacagaaccacatataaactagaacacgtttttgtcccaaatctaattcactacattagaacaaagaaaagcacacgacttccaagtttatacaactttttttatttgtttggacaatcacaactcccactcacattatattagaacaaagaaaagcacacgacttctaacaaaaaagaccaacaacatttggttctgcttaaccagagatttctatgggcttaacatcatgattctta

SEQ ID NO: 132073 - DNA, 1906 bp, Glycine max
  Clone ID: PAT_MRT3847_90269C.1
ggctcgagctctcttcgttcttttggagtgtgtgtgcacccattgatgacaagcaaccccattgcatggaagcctaagaggaggagaagacgaagaggacaagggtaactgaatcgccgcttctgcagcttcgttctttcgtttttgtttcatctttttagcttcagagggtaaataaaaaatggaggttttggtgggtcccgctttcaccatcgacgttccctcgtctccgccgcagcatgccggttccgatgatcggatctttcttaacgtgtcacccgaagaaggtgatgggtcgaactttcgtatttcgggcccacccaagttcttcgccggcggcgagtcggagagttcgtcgtcgatcggaacccctgatgacagcgacaacgaggaggaggaagaagtgcagagccagttaaagatacgaactgggttgggttctttggatgctttggaagaatctcttcccatcaagttaattcctttaattttctcttttcatcccgcttctttgatttgattctcgtaatcatcgaatgcttttctttaacctatcgcgtggcatctttctatcctctctctctctctctctctctctctctctctcttgttcttttggagtgtgtgtgcacccattgatgacaagcaaccccattgcatggaagcctaagaggaggagaagacgaagaggacaagggtaactgaatcgccgcttctgcagcttcgttctttcgtttttgtttcatctttttagcttcagagggtaaataaaaaatggaggttttggtgggtcccgctttcaccatcgacgttccctcgtctccgccgcggcatgccggttccgatgatcggatctttcttaacgtgtcacccgaagaaggtgatgggtcgaactttcgtatttcgggcccacccaagttcttcgccggcggcgagtcggagagttcgtcgtcgatcggaacccctgatgacagcgacaacgaggaggaggaagaagtgcagagccagttaaagatacgaactgggttgggttctttggatgctttggaagaatctcttcccatcaacgatgcacgaggggattgtcgagtcattttgatggaaaatcaaaatcgttctcagatctatctcaaatgagtaatttgagtaatctgaaggagttgcaaaagcaagagagtcctttcaacaagagaagaagggttttgattgcatccaagtggtccagaagatcatctttctattcctggtccaacccacaatccatgcctcttttgcctgtggatgaggatcaggattatgattatgaagaggaagaagaagaagaagatgacgaagaaaaagctagaaaagttccctctgcttcatcttcttcctcttcctccttggccgaggaaaagaaacaagaagatcaggttcagctaagactcaacagaatgccagaatcttatgctgctcatatgaggcttagacttggaagcttcaaggctagaagcttttctcttgcagatctgcaagagcatgatgatgaggaagaagatgatgattgattaaattaacatttaacataggttttttttttttggttttattcttttgttattgttgttgttactaaataaaattaaatagtgtattaattttaagtaagtgttaaaaaacttatccttttctttttactttgttaaaaaaaattggattttgctaaggggtatactgtgcatatcctgtgggtattctagtaaagttatgaaagctaagaggtcttggtttcatagaagatgatgattgattaaattaacatttaacataggttttttttttttggtttgatatggatattgggacgcaacgcattcatattaattaaatagtgtattaatttcaaaaaaaaaaaaaaaaaaagctt

SEQ ID NO: 132074 - DNA, 150 bp, Glycine max
  Clone ID: PAT_MRT3847_90270C.1
ggctcgaggtgagactatgagctcactatttttttttcggggcaacgcatcaacaccactacaagacttttttctcaaaaaccgctaccatccactccagcacagagagaagctaccacacctaaggaatatcgggtacgaccacacgct

SEQ ID NO: 132075 - DNA, 1160 bp, Glycine max
  Clone ID: PAT_MRT3847_90271C.1
ttttttttttttatctcaactatttgattgcattgttcgctcaagggaacaaaatttcgttacgtcaatgaagagccatggcggctgctagcttgtatcctatatacacaatattttaacctattatgtgaataaaaaactttttgactataaatatacagcaaaaatggcagagaggaacctcagatttgattccgtaattgcatcaacaggtcgtgcatagtctctatcttttgactaagtcggatgacggtaaggtgttgagaggaagaagactcggaagtaccaatatcactgattaaatcattaagtttagcctgtgaatccacaagtgcttcctcaagcaaagtcaatgtttgctctgaagttttgtgtgattcctcatttatggtgagattcggcaatggagaaagtcctctactaccaacacttccgtctctactgtacttttcagaagagaaaatcttatcaatgccttcacttcctaggtgcccgagttggtctattacagactgaccaacagaaccttctaacttcagcaaccttataattccagcagttatccggccaattgagtcaatttcagatttgcacagaaaagtgaggtgctgaacctcatccttggttacaaccgccccgacccgtgggttaacagagaattttaggttttccacttcccaattgaccatttcatcatcaacattctccccacccaatatcaagcgaacttcaacaccaattcctccaactgtgttggtgaatcctttacccccatttgcaattggcgttgatgaaggaatgtctttttgcaaatgtggcttcaagatttgcagaccttgaattccaacctgcaagtgtgtaatcaattctactggatgttgttttattcttcgcaattgcccttttccacctggaacatccgttgggccactttttgcatttactcgcaaaccatggaaagatgcatgccaactcctctcttctctgccttcatctacatggcttgagaaccaccatctttcagctgtaaaatgtgcatcttcaagggcaaataaccagtctctcaattctatagttacatccacatcatcaggcttcttcaattgaggaaaactgatttctttcccttctctcatacttccaacatcttctgaattatc

SEQ ID NO: 132076 - DNA, 130 bp, Glycine max
  Clone ID: PAT_MRT3847_90272C.1
ggcagctgggcttcaataactgagagacaggaaaaaatgtcgtgcctgaagcattaaatcactctgagacacagaaaagatctacggccatcctaaaggatgacaaacaaggatcttcccttcaataaac

SEQ ID NO: 132077 - DNA, 1884 bp, Glycine max
  Clone ID: PAT_MRT3847_90273C.1
aaacccacccgtccgcccacgcgtccgtacggctgcgagaagacgacagggtcggaaagggaaaaaaaaaaaaatagcaacaaaaacaagaaaaaaggttacctctttcaattttatcccttgttgtgagcttaattcaatttctgctcacacataatggcttgcacgctcgctgattcattactcctattcaagggttcttatcagaaaccagttctgaggagagacattgctgcccggtactccccgggtatatttagtctaaacagtaatgggcttatccagaaaaggttcaggcgtcaaaggaattttgttactaggaataaggttactgtcatacatgccgtggcaattccagtacaaccagctccggtggaaagtgcggagtatagaaaacagctagctgaagactacggtttcaggcaagttggagagccgcttccagatgatgttactttaaaggatgtcatcaattcccttcctaaggaggtctttgagattgatgatgtgaaagcatggaaatctgttctgatatctgtcacttcttatgcactgggtctcttcatgatttccaaagccccctggtatcttcttcctctggcttgggtatggacagggactgcaataactgggttctttgttataggacatgattgtgctcacagatcattttcgtctaacaaattggtagaagacattgttggaactctggcctttatgcctctgatttatccatatgagccttggcgatttaagcatgacaggcatcatgcaaaaacaaacatgttacgtgaagatactgcttggcaccctgtttggaaggacgagtttgaatctactccacttttgaggaaagcaataatatacggatatggtccatttcgatgttggatgtctatagctcactggttgatgtggcactttgatttgaagaagttcagaccaagtgaagtaccaagggtgaagataagtttggcttgtgtttttgcctttatagcaattggatggccattaattatttacaagactggaatcatgggatggataaaattctggttgatgccatggttgggctatcacttctggatgagtacgtttaccatggtacatcatactgcaccgcatataccattcaaatactcagaagagtggaatgctgcgcaagcacagcttaatggaactgttcattgtgattatcctaaatggatcgagatcctatgtcacgatattaatgtccatattccacaccacatatccccgaggataccaagctataatttaagagcagcccataagtctctccaagaaaactggggacagtatctgaatgaggctagttggaattggagattgatgaagacaatcatgacagtgtgtcatgtgtacgacaaggagcaaaattatgttgccttcgacgaacttgcccctgaagattctcgtccaattacatttttgaaggaaaccatgcctgattatgcttaattatgcccaaactggctttttttctcatatgaaattttttatgtatcaaattaggttcgtatgccattcattttctttttacattttcgatcttgtttaatatagttctactagtatttttcatatcatgtataacgaaaaaattgcttgctgctctcaaagttcacgtattagggtaattatattaccaagttgcggattatccaaggtcaagtcatcgagaagcattcattaggttaaagtagatgttatggtaatctgaacagtggggttcttgttatcacgttggaagaatattatattataaagttgtctgatggataaaaaagcacgtggcgtgtggcacattggattgagcatactgagttactatactgttctcccaaaaaaggaaaaagtatt

SEQ ID NO: 132078 - DNA, 418 bp, Glycine max
  Clone ID: PAT_MRT3847_90274C.1
agaaattgtgacttttgagatggtaatgtctaattgagttattcctctcaaaaaaaaaaaaaaaaaaaaaaaaaaaaaaaaaaaaaaaaaaaaaaaaaaaaaagggaaaaaaaaaaaaaaaaaacaaaaaaaaaaaacacgagcatgcaaaaaaaaaaaaaaaaaaaaaaagaggggggggcccccttttaaggggcccaatctttccaccccgggcggggcagggaaaaccctttttttacgggccccaaaaacaaattcaccggccccccttttcaccagctggggaggggaaaaacaggggggtacccaaattaattcccttgggagacacccccctttttggcgagggggaaaaacccaaaagggccccacccaaccccccttccaaagtggttcccccctaaaggggaaatgg

SEQ ID NO: 132079 - DNA, 1106 bp, Glycine max
  Clone ID: PAT_MRT3847_90275C.1
cacgcgtccgggggttggaagttttgggcagattctaatttgaaaggaaaattctgggggcgttctatccagttagatcctgtgggtgtcctcactctacagtttgaggatggtgaaacatttcagtggagcaaggtcaccacttccatatacaatatcatactaggtaaaatttattgtgaccactacggtaccatgcacatcaagggcagtggcaactattcttgcaaactgaaattcaaggagcaatccattattgacagaaatccacatcaggtccatgggtttgttcaagacaacagaactggagagaaggtagcgatgttaattgggaagtgggatgaagcaatgtactatgtacttggggatccaaccaccaagccaaaaggttatgatccgatgacagaagctgcattattgtgggaaagggacaaccatttaccgaagacaagatacaacctctctccttttgcaatttccttgaatgaaatattacctggtttatcagagaagttgcctccaactgactcaaggttgagaccagatcaaagacatttagaaaatggagaatatgagctggcaaatgcagaaaaactaagacttgaacagttgcagagacaggcaagaaagatgcaagaaagaggatggcaaccgagatggtttaagaaggaagaggatggttgttaccgatatattggtggctattgggaaacaagagaaaagaataattgggacggaatccctgatatatttggacagagttgtgatttaccttcatgctcggaagagactgcatcctactgaatactggttttcttttttttcacagcccttaaaaatatcatgttttgttaaatgtgaatttggttgtaggttgtaagttatataaagatcctttcaaaaagtgttaattccttttctggctgggctgggcgttttgggcatttgtcattaatctccgaaagtaattttatgttgatgcttactttactagtatattaataatatcaggttttcagacgtaagcaaaataaaagcaagccttaaagaatttaagctgttgaattaatctgttaggtaaaaaaagattttaaaagggcggccgc

SEQ ID NO: 132080 - DNA, 310 bp, Glycine max
  Clone ID: PAT_MRT3847_90276C.1
ggtaatactataggcaagcattaacaatatagcatgtgctagagagaggtggcaagaactttttttacattacctgaattgcaatatgaggatgagtgcggttcacatgcattacataacatcatataatgctccgtttataacaaccgtaatttccaaaagaccgcgtaaagatcccatccacatacaaattctccatgcttaccttccatgtagccattccccctctcttatatagacatacttggcaaagaggtccccggtgttgagcactatgttagcagcaacgggccatctctaacccctgaaa

SEQ ID NO: 132081 - DNA, 475 bp, Glycine max
  Clone ID: PAT_MRT3847_90277C.1
attaacccgagtttagcataacagatccagagacatcacacagataaggaaattgatcgaaaggccttatcgctttacaaagtttttcactcctattacaactaaccttcttatgaagccttatttattgcgatttctgaaacccatatataatctttataaagatgccttgttatttgagagggttaggatcaacctcatccttgttatgcggattaggaccatagacacgacgcccggcaccaagctcgacgtcatagccaccatgcccgacacacatagtgagcttgtgcgctgacatattcaccatgtccccctacatagtctgcacacccacctcacatagcctgcaggcgcacctacatattcaccaccatagacgccaccatagacgtcacgcctttacttgctgttatttaccccatctgaactaggcttcccatgtattttgtaaaaattcttgaatgcatgatgg

SEQ ID NO: 132082 - DNA, 435 bp, Glycine max
  Clone ID: PAT_MRT3847_90278C.1
cttgatttgtttatcaaacaaagctaatcccaccctccttgattctgaaccattccttgcaccaaccaacacgacactcccaagttccagcaaggaatcactgccaccttgtttcctttcttctcatcatttcgtttcacaaaaaaataaagaaccatggaggggagaatgggactcttgtttcttcttgtattgggtggtgcatgggcttgtgatggaagagaactcgcaaactgcaatcaattgagcaaactaagcagaaaaccagatgtgtgtgcactttgtgaggaatatactaccaatgcacttgattatttaaatgaaaacaagacccagctagagatcattgatatcctgcacaatacttgctaccagcttcactcttttaagcagaagtgcattacttttgtggactattatgctcctcttttcttc

SEQ ID NO: 132083 - DNA, 396 bp, Glycine max
  Clone ID: PAT_MRT3847_90279C.1
agtcggcggcctgtcctttttttttttttttttaacacgttttaatcggaggaaaataaaatttacacgggagggtggattggggggttacatttaggggattgaaaaaagttacacgggattggcctgaccccgctttcatagcacgagaggaagggcaggaaactctccctggaggggacaagactaattaatccttaataatgtctacataacctatttctttttggggaaacaacgacctccattgttgcatacgactaacatatgaaggttcccaagaacgagatgtagcattacaatattttgaccactgcagagcggtgggaggaaacactgagttggtctatcaaacaacctgtacaaagtgatattcatgcacaaaccccgtggaaa

SEQ ID NO: 132084 - DNA, 1140 bp, Glycine max
  Clone ID: PAT_MRT3847_9027C.1
ggaagttaaaacattcacgaacttccacataaaaacaaaagctttaaagtttttagaagaccgactttgataatcgttcatagaatcagaacttgaaaactttcttagactgttagacatagcaatcatactagcacaccatagacactaatagattccagaactaacattgtctgcagagacatttatcggaggaaacaaataacaaattccattcagcctccaacgaattttacatcattatctactttaactcccacctccagatttagttgtagtccacatgtaagtagcagcagtggagtggaaggtttgaataaaatgcctttcttggttatcacctaacaccttttcggttctctctggacctggttatccatttccgccagtttgggattggctagatcaagatccaaaatcaatattaagcggtgtttgtggagtgcagttattttttgcatctggaaaaaataggtacatctttaatcacactcagattgatttgttttctctgttggaagatatcaaattccaagagtggtcatggctccattccatgtctgatttcaagtattcatgaggtcactcaatccctcggcttgcataagggattgaaaggtggtgcagctgtatgtttttggagtggagagcaagcggtgaagatgatgaacttacgcgaccgtattttgctggggtttatctacgtgcataccaatctgtagcttgccttgttattttaatgtatatatgttggtgggtataggggcttttaatgtagaggctggacttacccctagcgtccgcccacgcgtccggtgggaaactaggttctgttattatgtggggcatagtaaggttagctagtatttatgtcttgctgtgataaaaatataatctaacctttactgtggatattttctgtatatttgatgcctctggtactgctattagatataaatataatgtatcgttttgctgagcaaaaaaaagtagcagcatatttgatcagcagagatattgaggaactataccctgagtgccttactttttgcccaaccatctttccatcaattgctagtgacctcggccagaagttttcttcattaaatttttggttaatttagattacatttaccaacc

SEQ ID NO: 132085 - DNA, 1146 bp, Glycine max
  unsure (1)..(1146): unsure at all n locations
  Clone ID: PAT_MRT3847_90280C.1
ggaggaggatggaaaaggaatatccacccaactttgtgttgaaagcaaagagataaagtaataaaaaagggccaaacataaagcatcaaacctgggtggggtgtggctctactgttttctcttaccataatcatcaatggcttccttatccctctcctctcccccatctctctcttccgcacaccacaacgcctccacgcgccttattctacgcacccctaactcccttaaactgcgcactccaccccactccctccccgccatccgcgccatcaccctcacccaggacgacctcaagagactcgccgccgacaaggccgtggagtccgtcaagagcggcatggtcctcggcctgggcaccggctccactgctgccttcgtcgtcgccaagcttggcgcccttctcgcctccggccaactctccgacatcgtcggtgtccccacctccaaacgcacggaggagcaggcccgctccctcggcatccccctctccgtcctcgacgacaacccccgcctcgatctcgccatcgacggcgccgacgaggtcgaccccgacctcaacctcgtcaaaggccgcggcggcgccctcctccgcgagaagatggtcgaggccgcctccgacaagttcgtcgtggtcgtcgacgacaccaagctcgtggacggcctcggcggaagcgggctggccatgccggtggaggtggtccagttctgctggaagtacaatctggatcggcttcaggagcttttcaaggaagaaggtgtggaagcaaaattgagattggaggagagtgggaaaccctacgtcaccgataattccaattacatcgtggatttgtacttcaagactccaattagggatgcattggccgcaggcgctgaaatttccgctctggaaggcgtcgtcgagcatggcttgttcctcaacatggccacttctgtcatcatcgctggcaaatctggcgttgaagtcaaggccaagtgagactctgaagtaattcgtttcttcttcttcttctcattcttgtctctgtattatttttgttttcagtggaataataataattattgcgttatttggaaaaaaaaaaaaaaaaaaaaaaagacagaagaagaaataagaaannnnnnnnnnnnnnnnnnnnnnnn

SEQ ID NO: 132086 - DNA, 346 bp, Glycine max
  Clone ID: PAT_MRT3847_90281C.1
aaaaaaggggcaaaaccaattttccattctcaattgcttataaatgtgattggggggggaaaaagaattcattattttaaaaaaaatccaaagttggtttttcgagtttgcataaacagagtttgccgtcctgttttttgacctaaatggaaacagtttttttttttttgactcggcctaaacctcctggtggttttttaacaatatccttttaaatgctttgaaacacatgaaaaagattcccgggggtgggtccaactttatgcaactaggggctagccctttttataaaccatttttgcctttttgttcaaaaatgcctgccggggcatgaaacacatttttt

SEQ ID NO: 132087 - DNA, 280 bp, Glycine max
  unsure (1)..(280): unsure at all n locations
  Clone ID: PAT_MRT3847_90282C.1
gtgtaatttccgaaagctatttctattcttatgtgacaataatttgtnttccttggtagcaggctagctgcatttatatttgcngtcaattcccagtagctaaatatgctttgaaactcagcatcagcttctcatcttttgacaataatgctttttgggtttaacttcctttcccccccagaaactgcccccaagtggatgggaaaaatttatattgcacttgaatttaaaataatttgatgcatcgaaccttgttttgtacgagttatttttagtagtt

SEQ ID NO: 132088 - DNA, 523 bp, Glycine max
  Clone ID: PAT_MRT3847_90283C.1
gcacgagtgtgaatatgggatgaagtggatgttaaggtaccctttctacgcgtaccttgataaaatttcattggttactaaccgtacttatacaattatacccttacattaagtaatcgtgatgcgtgagtgaatttctagaatatattattctcgtatcatatcaagatggacccgatgggttggcatttagcatttgacatttggcatttggcacttagcagacaaattttagaaatacagtgcacgttttgtttattactaatatttatagctttgtgctttataatttatagatgtaatggttaatattttattttgaggagatataatgattaagaattaagatttagaatagtgcttagttttattgaaccgaagaatagtactttgtctaacttttttctttttgtcattttttaagtaattgatttttaattatattttataaaaatttatttttgagactctgatttattgggaaaaaattgctttatttttaaaataatttctaaaattattt

SEQ ID NO: 132089 - DNA, 414 bp, Glycine max
  Clone ID: PAT_MRT3847_90284C.1
gaattcggcaccagaattggttgaaattagcgacactaatttaatgcgatcgttgtacaaagctaaacatatgtactagtacatggacaaaacatttccaaacattgacatctgcataactaatgaccaaggtgctcatcaaacatttattttccctatgaaaacaataaacatttcgctactatgacacgtttgcttccctataactgtatgatatgttccacgtatatcattagttggatagatgtcagagtttggaaatggttagttcgtaggtttagctgtgtacaacgattgcattaaattagttctgttaatttcgattaattaatatcgtctctgttcatatgcttaactttgtagcaaagtccaacgattgagttgaataacatcccatgaattaattccaaaaaa

SEQ ID NO: 132090 - DNA, 250 bp, Glycine max
  Clone ID: PAT_MRT3847_90285C.1
gattcacatatctactactctcaatgatttgaagtcactgcatcattatatctgccaaacctcaacactacgcaacgctaaagtcaatggtttatccgatactattctctgtcctatttacattcactttgagtctagcttttctactctcaaagcgtctatcaaaaagtcaaacacaaaatgttccacaaaggtctcttgcgtaccctatcatcgtagagacacttatttctctcaaagcacatataca

SEQ ID NO: 132091 - DNA, 190 bp, Glycine max
  Clone ID: PAT_MRT3847_90286C.1
aagaggggatcctttgtttctttgaccagtctttttaaaaaaatttctattcggatttttgggccttagggaatttattgtttattacctggggggatttttaaaattagaagggattacctcctttgggtccaccgatttgccctaatattcataggccccttaaatattttttttttccaaccccctt

SEQ ID NO: 132092 - DNA, 522 bp, Glycine max
  unsure (1)..(522): unsure at all n locations
  Clone ID: PAT_MRT3847_90287C.1
acatggacacttggaagggattaccataataatatagatgaagctaattaaagggcaagagaagaagaaaatatgataggagtacagagggtggcagcagtcacgtgagggagaagtagaattaagaaaggagctccaccatgaacatgaacacatggtatgaaaaactcgaaaagataaaagagaatgttggtgcaaaggtcaagacggagacaagtgaaaaactagcttcgggaccaccgggagaaaaggaattgtgatttcatacacagctttttcctctcaagttttttgtgctgtaaatatcagcaacacggttnttgaagttgccccatccctgntggcgtggacaaaatgtactacgctgaactacataccattcagtcatacttttagttcccatctgatgctgatggaccagtaagtcatattattctattctataacgcctttgccagcatattttcaccactatcgtttttggcattaacctaaatgcattctcaagaatgacatgacttg

SEQ ID NO: 132093 - DNA, 453 bp, Glycine max
  Clone ID: PAT_MRT3847_90288C.1
ggctcgagcctaatgaaataaccgtagctgaagttgaattgccacgcatagaaagtccacgatgaggtggttctgttgtggaatccagccatggaaagaaaaaaggaatggtttttccttttgagccacattctatcacctttgacgaagtcgcatactctgttgacatgccacaggaaatgaaggaacatggtgttcaagaggacagattggcgcttttgaagggcgttagtggtgcattcaggcctggtgttctcactgctttgatgggggtaagtggagcttggtagactactttgatggatgttctggctggcacgaaaactggtggatatattgatggaaacatcaaattttctgggtacccctagaagcaagaaacatctgctcgtatctctggctactgtgagcaaaatgatatctcctcaccctatgttactgtttatgaaattc

SEQ ID NO: 132094 - DNA, 367 bp, Glycine max
  Clone ID: PAT_MRT3847_90289C.1
caattctccagataaactttacttcattgattatgaatatgcatcgtacaactacagaggctatgatataggagaccactttgcagaatatgctggctttgaatgtgactacgacttgtaagttctttatgcttgcttctctcctttagtcgtgatttgtgttagttacttcagttcatcattttcataatgcaggtacccaaatatgaatgaacaatatcatttcctcaggcattacttgaaacctgaaagaccccaagaggtactaatcacagtgaaggggttaaatatttcatattctattttatttcattgcctccagcttgtcaatcatctctaaaaataagatgcccatactctatcaatt

SEQ ID NO: 132095 - DNA, 289 bp, Glycine max
  Clone ID: PAT_MRT3847_9028C.1
atctaaaattcatcatacaaatttagaaattctaaaaaagaaaaaaaaaaaaaattggtttttgaattcaaaattcttgattctcatgattatcgaataaacccattatctctgctaggaggggtatgtcatggctgtttgtttgaaaataaacccttttatgagccctgcatcttacaagagtttctttcgataaaatattccagggcccccaaaaaaaaattagagaaaaattcttctttaacggggtaaaacaatttgtatccaactgaaagcgggattattcaat

SEQ ID NO: 132096 - DNA, 244 bp, Glycine max
  Clone ID: PAT_MRT3847_90290C.1
tattttcataaccaaatttaatctcaatagaattcaaatttttccgcccgtcttaagggctaaagaggcttattcctctaaaaatttcctgattttaattaaaaaatttatttctatagtgggtgctccaggatgatggtacccatgaattgtagtctcctatttcttcatcataaaaaacttttattaactttctattcccatccaccaagtaaattatttttcgttttcttgattacccttc

SEQ ID NO: 132097 - DNA, 640 bp, Glycine max
  unsure (1)..(640): unsure at all n locations
  Clone ID: PAT_MRT3847_90291C.1
nnccttgacaccgttggagctccccgcggtggcggccgctctagaactagtggatcccccgggctgcaggaattcggcacgagatcaaanatttcagcttgatgaaattttggttcattattagctttatgtttaattactcaaattttaacaggattatttttaactatatattataccgcanatattgaaatancattttatagagtaaattatatttgtcgaaatgtaaattatggttgattaattcgaactcttcatgctaatggagcttcttttttttttatttgtatttatttacatattggacgaggaatttattatgaatcatttaatttaaaatatacatgaatngtaggagtaattatcttatttttattaatagcaacaccatttataggatatgttttaccttgaggtcaaatatctttctgaggagcaactgttattacaaancttctatctgctattccttcattaggtgtaaaaattgtancttgaatttgnggaggatttgcagttnataatgcaacattaactcgattttatacatttcactttttattaccttttattgttttaataataacaataattcatttattatttcttcatcaaacaggttnctaataacccttnt

SEQ ID NO: 132098 - DNA, 403 bp, Glycine max
  Clone ID: PAT_MRT3847_90292C.1
gggcaaaaatatgacagcttatatactttatacctcgaattacaataaaattttactatacttttcaagccttcaacaagagtcctaaagggacaaagtttaaaaatccatgccgcatcaaaaggatggcgatggatggcattttaaatacaaactaaggaaagggtcatcacattggggatttcaatattcaaaatttattcaactgggaaaagctccacattggaggggccattccatgcaattttcaaaatcaaaactacttgcacaacccaacaacacgttttgttggtggtcataacggcatatgtaattgagtcccataagaagcgggcaaaaaggcttcctctggcctggccttggcagcaaagaataagggctgaaaaagcagcacatttggcct

SEQ ID NO: 132099 - DNA, 673 bp, Glycine max
  Clone ID: PAT_MRT3847_90293C.1
aattcggctcgagggcgggggtctaggccattgtttatcgtctctcattttatgtggggatgtgaattgtttgttcttatttcttgtctttttttttttatggagttgggcagagactaaaagtaaataaggatttacatgatgtaaccaatcgttagttgaatgcaagagcactactgtgtggcttatgcaatcaatgatgccatgggtctttttggggattttggttttgttaatgaaaacagtgggcttccttcctcatgaaacacggggatacactccaatagcatatatatttatattatatatcactcttgctaagtatcgtccttggctgtaactgttaatacagcaagtatgacggtggcacctgccagctcactgcaggggatgttgtctggtgaaaaaggttttttcagtaaagcaacttgttggttattgtatgagaattcaagcatatggatgattagtatttttgtatagatcccttgagaaattgtttgtttgacccaaagcatagatacttcccattttctgctagctgtttggcaaagaaaacgtggtggctcccacacagcaccaactgttaaagtcacattatactctaggcctgtgtggggatgtccatgtgaaagaaatatgaacatagtgtgtattgtttctgcttttcaac

SEQ ID NO: 132100 - DNA, 328 bp, Glycine max
  Clone ID: PAT_MRT3847_90294C.1
tttttgttttttttttttttttttttttggtggggggatatattatagacatactatttttttttttagtttttttttgtttttttttttttggggcccccaaaaactttaattaaaaaggggggggaaaaaattcccccgggaaaaggaaaaaggatttttcttacaaaccaaaccaaaaatttttaaaaaaaatttaataaccttatctaaggttgaaaaggagaaaagcttattgggggaaacgccacccttttgatcactggaccataaaaaatatcacaggcgggggaccaatactgggggggcccccaagagaaccgatgga

SEQ ID NO: 132101 - DNA, 2142 bp, Glycine max
  Clone ID: PAT_MRT3847_90295C.1
ccacgcgtccggtatctttttagttcaatccattgatggagtgtggagtgtgaagtatgaagagagcataacgtggcagcaccagaagcactcaaaataaaaagcaacgcccctcatcatcccaaaatctatccactttaaatcaccaccctcgatcctacccatccaacggccacaaaccccctcaaatcccaacccatatcccctcaaacacacataaaattagagctccatagtctcccgctttactcgctcgacccacgcgtccgctccatagccttcaaatccttcgtcggcctccgccagtcctcgccggaggccccacatttcgctgcccagtcccgccccgccactccccaccgcaaattccgcgtcgtggccggaaaattcagccccaggctgaacggccggaacctccgcgtggcggtggtgggcggcggtcccgccggaggagccgccgcggagacgctggcgaagggcggcgtggagacgttcctgatcgagcgaaaaatggacaactgcaagccgtgcggcggcgccatcccgctgtgcatggtgggggagttcgaccttccgctggacatcatcgaccggcgcgtgacgaagatgaagatgatatcgccgtcgaacgtggcggtggacatcgggaggacgctgaagccgcacgagtacatcggcatggtgcggcgcgaggtgctcgacgcttacctaagggaccgcgccaaggagaacggcgccaacgtcatcaacggcttgttcttgaaaatggatattcctaaggataataactccccctacgttctgcattactctagctacgacgggaaaaccaatggagctggtgagaagcgtaccttggaagttgacgctgtcattggcgccgatggggccaattctagagtcgccaagtctatcgatgccggtgattatgagtatgccatcgcttttcaggagagggtaaaaatcccggatgataagatggtgtattacgagaaccttgcggagatgtacgtgggcgatgatgtttctccagatttctacgggtgggtgtttccaaaatgtgaccatgtggctgtaggcactggaactgtgacacacaagggggacatcaagaagttccaactagcaacaaggaaaagagcagaggacaagattttgggaggcaagatcatccgagtggaggctcaccctatcccggaacatcctcggccacgaaggttgttggggagagtggcgctggttggcgacgctgctggctacgtaaccaaatgctccggagaggggatctattttgcagccaagagtgggaggatgtgtgcagaggcaattgttgaaggttctgagaatgggaaaaggatggtggaagaaggggacttgaggaagtacttggagaagtgggacaagacttattggccaacttacaaggtcttggatattcttcagaaggtgttttataggtccaaccctgcaagggaagcgtttgtggagatgtgtgctgatgagtatgtgcagaagatgacctttgatagctacttgtacaagacagtggtgcctggcaatccattggaggatctgaaattggccattaacaccattgggagcttagtgagggccaatgccataaggagggagatgaacaaacttaacgtatgacaataatagtcattatcatatttatcattcatttttgctttgtgtttttcctagtggacatgatctccttataattaagtgataattaactatatatgtgtaagaaaaaggattgaatttcatgcaatcccataaccggtatttgtaccttttatctgcaatgatgtaaaatgctagagtactagcaaagatttacttctcagttctcacacattggccataggttatgtcagctagatttaaagatttaggctctcaagtggtgctgttagtgactcatttagtggcttaagctattccaaattgaaaatatacgtgtaaaatatgttgctatatatccatgccaatgatgaaatgccaactataacagccttcttagtctggtttttggttataacaaaaaaaaaaaaaaaaaaaaaaaaaaaagttgtgtgctgttagtgactcatttagtggtttaagctattccaaaaaaaaaaaaaaaaaaaa

SEQ ID NO: 132102 - DNA, 345 bp, Glycine max
  Clone ID: PAT_MRT3847_90296C.1
tcctatcaacactaacctcattaactaaaatcacaatctcccaaatcaaaaacccacataccacataagcaatttcacaagatatgacgagactaccccctgcattctatcccaaacctatctatgcctccttccaccgaccactggacctttgacgccatccacaacggacccctccacagactcaacctcgactccgacaccaactgcttgaccttccatacctacgacctcttaatccttcactcccacaattatttcaccaaacaccataaatcacccaacgacgactaccacctattcccctccagcatagactagctcaaatcccaatccaaactctac

SEQ ID NO: 132103 - DNA, 316 bp, Glycine max
  Clone ID: PAT_MRT3847_90297C.1
gtagtgattatatatgtacttggcttatcttctgctcggtacatgctcaaggttcttctgtttttttttgtaattcgactagtacttgcatctcaattgttttgaatgtacctaagtataatgattgatgaatgttgcatgttcgacttcacaaattatatgattgtgagtagaagcgtgggcataatcatcctgttactgtgtcgcttcttgacattaggatataccacatgagtaccttccttttgatccggaagctcccttccacatgctggttcgtgtcattgcccatgactttaagactgatttgcgtttc

SEQ ID NO: 132104 - DNA, 290 bp, Glycine max
  Clone ID: PAT_MRT3847_90298C.1
cttttatgggaggaattcaaaaatctgccactcccatgaggcccgtagatgaacaaattctatatgaggcggcacaagacatgggtgaggaatggatccattgggtggatgaggaggatctctttgccgaggactgttcatgggcaggacttccaggtgttagggggttggactatgtggaaagaaatgctttcgccacatataaaccataacgtcatgtgctttcactcgaaaaagggggaaaaggcaaaatgacatgacggtctggggatggagaagatatgacattg

SEQ ID NO: 132105 - DNA, 261 bp, Glycine max
  Clone ID: PAT_MRT3847_90299C.1
tcgaaatacaacacaaacgcccagccgaataccaccaaaagctaggcaaattgaagaccaaaagtaggaatgaaagagattagggtttcaggagtgaaagaagatggggttttcgtccacaaagctgtccagcagggagtttcccaagatggacatgagggttctcgctggaaggtcccaaaactgctggtaaaaaaacctttcggtaaaagttcaaacttggcaaaatcgcaaggataaaccccaccatgggattaaatt

SEQ ID NO: 132106 - DNA, 265 bp, Glycine max
  Clone ID: PAT_MRT3847_9029C.1
tctcgagccgtatcggctcgatgctgcgagaagacgacagaagggactgcctatctactttactagaatagaatatactatggtttataagatgtaaccaaactccagaaccacatattttaagcaactttcctgaggggattctaattgcacaggtggatgaccacatcatagataaagttggaacgaaaacaaatgatagacaacctttagatctcccacgaggagtagtagtgcttatggaattttgaattttatgatatta

SEQ ID NO: 132107 - DNA, 445 bp, Glycine max
  Clone ID: PAT_MRT3847_902C.1
cgggaacaatcaggcgtgcgtgagtttcaagtccaactaatcataaaaaaatatctctagttttatggtgttttctctgatttaccaacgagactaatcatggattagtcactgccttatttttctatgcatataaatataaataaggattgctaatgtttatttactttttttaaaaaaatatttttgcatagacatatgtcgagtgtattttaagaaatttgaaattatttttcttttcgctgaagaaaatttgaaattatattttactcaggtacttctaaaaaaataagtagatataagtttgtaaaaataaatttacaaggccgatcctagtggttttatagggttgcatataatttcaaaatatatttttagctccatgtgatagggcggtgggcaaaatataatcttatgacgaatggtggaatgtttttgaccctat

SEQ ID NO: 132108 - DNA, 347 bp, Glycine max
  Clone ID: PAT_MRT3847_90300C.1
ttatggtatcgggaaatggctgatgtgcttccaaagagaaggatactgatgcggtatgaaaagtcgcatggggaccaggaaacggcggcgtacacgaccacacccgaccataacattcagtcaacggcgcaaagcatgattcaggcccttcgcgccagcgaacaccttcgtcacatgggtgcagttctacatatccccctatgctcgcatctaatcgacactccgggagctcacacggtatttcttgaagaagaggatcatcggcgtgagggaagagtcgcgagttcgaaaacgagatatcgagaactttcaggtgggagagaggatgaaggttataaaggaaatgc

SEQ ID NO: 132109 - DNA, 421 bp, Glycine max
  Clone ID: PAT_MRT3847_90301C.1
ctttgattagttttatttttgaaaggccaaagaaaataatattattaagcaactattgaactaaagcacaagatgataattctttgattagtttgagaattttgttgatttttttctcctattggccggattaatgcaattaatatttcataaagtttggtctttggactcaaacaagcaacgttgtgagatactcagattcatgtagtcgttcttacttcatgaaaaataaaagatttattatattctggattggttgaaaacttgatctaattgttttgatttttaatttttaatgagtattttggaattgttgctatgcagagggaacacaccattttgtagcaaagagtgcagacaggagcaaatagagattgatgaggcaaaggagaaaagttggaagctttcttccaaaggggtg

SEQ ID NO: 132110 - DNA, 389 bp, Glycine max
  unsure (1)..(389): unsure at all n locations
  Clone ID: PAT_MRT3847_90302C.1
acaaccccatgacgnnncacccattaannttccaaccagctagctggttgcgccttgcatcaggagatacctaagtccggtactaacattacagcagtaaaaaaggccacaataagacagaagttancnatggagtagacgtcgcggctgaagatgggaggtatacaaccatgatagaaaagcccttatttttttccacttttgttgagcccaaagcctccaaagcttcccttctgttgcgccttggttttaaactgctttagggcgttctcctcttccttttccttcggaatgttanncatgtcaacctgctcaaatcctgcttatcacactggggtttcttnnaaggnnnngcttttcgaccttgtttggtcgacatggttgcaatc

SEQ ID NO: 132111 - DNA, 399 bp, Glycine max
  Clone ID: PAT_MRT3847_90303C.1
gggacccggaaaaaataagactcttaaaatacaacgatacaaccaactccttccaacaggattttggtggatacgggtttttttagactttattttttttttttcttcccacagtttctcctttgatttctattaacgcatggggctgcatacgggtttatatttttatcttttcctagccttttttttttttcttcccacagcttttccttgatttttattaacactggacacatgttttgcaaatgggccggcccacaaggagaaaacaatttcgttaaaatgtttaacggagaaaaacgatcctcaatttacaaatttttttctccagtttctttcctaaaacagttttcgaggggcacagcccccaggaagactggggatagctcaaaaaagcag

SEQ ID NO: 132112 - DNA, 418 bp, Glycine max
  Clone ID: PAT_MRT3847_90304C.1
ggaagcaaacacccacaaaaatgaccaaaactcaaagggttagaacatagcaacgaaacaattctatttacacggggtgcgcgtgtcacataggggaatagtaaataaataaattgtagcttctgcttcttactttacttccacagttttggaggtttaaggttgcctatactgacgctcttttttatacctggggacttcttcaaggggtcctttactggggtggtcgcgatagatgaagttcggtttaatttcctcatcacttgaatagttttgcgaattggtttagatctcttatctgatgatgttgtgcgttcggtgagactagaattttctgaaccgtcagtttctgtgcctggagcaacagcactgtcagaaagatcacttgatttttcatcaaaatcagaatctggaaatc

SEQ ID NO: 132113 - DNA, 188 bp, Glycine max
  Clone ID: PAT_MRT3847_90305C.1
atttcattagcactcgtctttggttctggtttataaatctcttcgaagttgctttataactctcattctaacatgtataactattaatgatagatcacctaccctcacatcctcacgaagtttactgctttcacacgtctgattattgctaatgaacacgtctccgttcaagtttccattttacatct

SEQ ID NO: 132114 - DNA, 494 bp, Glycine max
  Clone ID: PAT_MRT3847_90306C.1
ggtttgaatataagtggtgtaaatattattaatgagtgaatcacaatcttacaatagagtagcggtgcatttaatcatttataaatacaatagagaaacacatgcagcagcattaaaagaattgttaagcaactttgctcttattatacgtaaccagctagcttgtaacttttgactatatcaatccagtcacgtatggaactccagtttgaggcagccaactatctccatccaagaagttagacacagtaaaattagccgcatcagtagcattgataacatgataaccaggccacgtcactcggtttgcggtgtttgaacccggtcccgtgttattatactctgcatagtacaaggtgcttagggcaaaatccccactccattcatgccaaccagaaggatttatgaaactattcataaaagactgcatataaaccgtgcttgagtactctttccatgggctccctaggtacgtttgcgcggaaccaactgaa

SEQ ID NO: 132115 - DNA, 414 bp, Glycine max
  Clone ID: PAT_MRT3847_90307C.1
tctagatcgcgagcggctgccctttattttttttaatttcaccttttatactctaccttagttatcttttattatatatctataacattttattccacctaaactcttacacatctatttagcatacaacttattacactaaattcacatataaagatattcctaatgcgcttgatattttttctaatatattccataattctaaattttattaataaacgattatcctctatctttacattattcttatataaatttaataaatttatttgcaaatttattaattaattttttaccatttacattcaactgcttttcaatacactccactttttataacaattatttttccttctcataatattattacaatcactataaatcatctacaaaactacattcatacacactata

SEQ ID NO: 132116 - DNA, 167 bp, Glycine max
  Clone ID: PAT_MRT3847_90308C.1
tcttttacatttctattataggcgtgattcagttcagtcgtcactgattggcgaacagtcactcgttgtataccgacgggactcaaaacgcttgggacacggccacgcgacttacatattacaccagtggtggctaatacactgatggacatgacctctttctcacc

SEQ ID NO: 132117 - DNA, 302 bp, Glycine max
  Clone ID: PAT_MRT3847_90309C.1
gtaacgcgtacggatccatcaccacggcaagtttcgacgtgctctgacgaatctctaatgcaggcgtgtttacgactgagatctgggattacttgccaaccactggcacaagagagcatcactgcaaagctcgtaccattatgatagtacaataggccatcttgagctcaatatgcccgatgcatgatctcttctgcacatttttgtataacaagtcaccttcactgacactcatgaggctaaggcagcataacctgagattaatagcttaccattcatcaagaatattactcacagagaca

SEQ ID NO: 132118 - DNA, 259 bp, Glycine max
  Clone ID: PAT_MRT3847_9030C.1
ctgagattctctaattccgttccttccgtaggcccccagatccgttttgccctatttcggagatgaagagccccaggaagaagaagagaccgaagccgcagaagaagcttgagaagaacaaaggcgttgttgctgctgctgctgttgttgccgagaacgaaaacgataacgaagaagtatagagaaaacgcagcattttggaggcactggttgaggccttctccttgtcttcagtcagggaagcttccatggcctataa

SEQ ID NO: 132119 - DNA, 215 bp, Glycine max
  Clone ID: PAT_MRT3847_90310C.1
aggggaaaaatgttttatattaggttcaaaaaaatttaataaagtatagaatgaattaaaaaatttactattatagaaaaacacataaatggttgaaaacaactacaaaggggtgaaactaacttaatagaggtgaaatgacaacgaaacactataagagaaggcctctgttggaggcatgatatagaaaaaagagaaagaaagtctgaacaaag

SEQ ID NO: 132120 - DNA, 367 bp, Glycine max
  Clone ID: PAT_MRT3847_90311C.1
aaaacattatcaaggcccaggatttttttttcaacttagggaaaaggttaaaccttaacccttttgtttatccaaagttgggaagggcccccccccttaaaacccctttttttttttcctggacaaagggtgggggggctttttaaaaaaaattccttaaaaaggatattacttgaacgggctaaggggccccaaaccctgaacttccaaaaaaaatgccatttgcccctttgggggcggccccttttttggggggagggcctaaacccccataaacctttttgggaggggggggaacctcctccctaagaaaacgggctttatccaccatttttggcaaaaatttttggccccccaaacccggttt

SEQ ID NO: 132121 - DNA, 329 bp, Glycine max
  Clone ID: PAT_MRT3847_90312C.1
cgtgttggtgactaccagaaaccctgggcctgagagagaacacccctagatgctttagcacttagggtgtgtaccatacgactgcccactcgcactgtcgttagccctgattactcggaacacaccatctcataaggtcctacatggcctcctgagacgcacgtgttcacacactcaatctcacgcgttaccagcgataccgggatccaagattcaagggtggatcgaccgtgtgactgtggaacgtctttctagccagctacgaaatcatatcattaataacaatgatccgtgacagctgatgactcacgtgcatgaccgagtggatc

SEQ ID NO: 132122 - DNA, 462 bp, Glycine max
  Clone ID: PAT_MRT3847_90313C.1
gttccaggaaggtttcccgtcatcactgtatgacgtcctccttctttgggggggggcgggggttgtgttagaggtgtggaaagtaaataagatgagctggtaagaatagcgcgttgaattactaaacacggagagagagagagagagagagagagagagagagagagagagagagagagcttgacggccaaaaactttggcccagcgttcttacaaagagcgtatttaactacagtgtatagaaaattacggtccttattttggtcgtgagcttgagtagatgtaagaggaaagggcgctattacggtaggtagacgtatgcgagtaggccgcactagggttccagagtgaagtaagaacatcgtaggcgatgttagcaacaaagtagtggcaaagggcttacacgtaagacgtccataagtgggtgtaccacatggcatatggcgtggaagacactaaggt

SEQ ID NO: 132123 - DNA, 169 bp, Glycine max
  Clone ID: PAT_MRT3847_90314C.1
atggattttagaagaaatggtttttgtagaactgaagtatgttagaattgacgtagactaagggagagtacactgatctacttgagaagataatagtgtgcttattgcggggtaaagagcctcaatggtcaaagagaattgtagagagtgaatatttatggggaaaaga

SEQ ID NO: 132124 - DNA, 549 bp, Glycine max
  Clone ID: PAT_MRT3847_90315C.1
ggctcgagttaagataggatactttttaagaaattacaatctttttttggtgtacaagagactatgaactctacttttctaaatgcagtatatatgagtagtttttttacaacttatagatacgtttctgttctttgaaataagaatatgtatgacttattacatttaataatatttaaaaaatttaacctttttgtccgcaaagatttacccctcttaaaaaaatgtgtaacaaacgtgacaacagccaaatgaaaagtggtctttccccttcatagtcgtcaaatctttattgatattttgtccccgtgaattatggatcatcttctcgaactgaaaatcaatcatttttttttttataacggtagccatgaaatttaatgtttcaattaaatagccaagtccacggatcaagggtcatgggaatatttcggtttaataattgggtttaagctagactcctgaatatacagttaccttttacaccagagacatatgcagttaccttaaatgtttgtgaagaaaactttatatacaacttataatatt

SEQ ID NO: 132125 - DNA, 265 bp, Glycine max
  Clone ID: PAT_MRT3847_90316C.1
aattcagcaattctcactagattgaagaattagcaaagatatacctagcagagaagctaaagggtacctaacttaagattctgttcactaggcttcagattctgttcagcaacaagctcattgcatcacacaacatcatggccagtggaccaaagatagtgcacatcgaaacacggtacgtggaaaccgacgctatacacttcagagatgtggttcagcacctcacagggaagaactcctcaacaacaaactgggtaggaaatgg

SEQ ID NO: 132126 - DNA, 334 bp, Glycine max
  Clone ID: PAT_MRT3847_90317C.1
gggaaaaagcaagtaacattaagttggtttgggatacccaaaataattcacattttttgaaggacattggaataacattttctttaccaaacacaaattttaaaacttttaaaagtcccaaaggcatccttttttttcatgcccacttgccggggaccaatttgggggcgtaagcccaagcattgttgttgactgggtccccaaggggaatcaacaagggtcttcaatggacccttaccggggacaatgggctggaccaagaacccaaactttgagaacatggcccatctcccggttttgggttcctttcccttaagccaacaaaaacctttgg

SEQ ID NO: 132127 - DNA, 234 bp, Glycine max
  unsure (1)..(234): unsure at all n locations
  Clone ID: PAT_MRT3847_90318C.1
gaattcggcacgaggaacagtgagctgttgtctgttagtgtgatgtaggaagagaattttaaattcctcgagaaaaaaggatatcgcagtagggtagatcactagaaaaattcaagatttctttgtttgttcagtagttggagaaatcagtatttcatcaacatgttaagttaaacaataattagcaattaaattgtaagtgaattcaattttctaattaaaatnncgnnctac

SEQ ID NO: 132128 - DNA, 368 bp, Glycine max
  Clone ID: PAT_MRT3847_90319C.1
ggtaaccgaaaaccttaaaagatataaaaggatgatctcagatttttattcgatgttgtaatcgataagacgatctcaattataatcgtgcttcatcctgcacacacctgctgctagcttgcagcaaaatttggccacaactggcactattgcaaacctgcatcgcaccaaagtattgcgtcatgtaagtggaattttataacaagaaggtttttgtgcaacatgtggagacaataagcagctctgaggtcacctttgatatcgtgcaatcctttgtggatcttggttccagtggtgcatctgattccaagtcaaaaattaaggaaagaaagaaattcttcaacagggacaataagcaagatcagcta

SEQ ID NO: 132129 - DNA, 391 bp, Glycine max
  unsure (1)..(391): unsure at all n locations
  Clone ID: PAT_MRT3847_9031C.1
agcnaggaataggggtcgagccacttactatcccttttaccaccgttttgtttataagaagcctccacccaccggggggtgctctacaaccatggtggggttatccacttccctgatacctcactcactattccactcttcttctataacccctcagtattctgcacctgtatgaaacacctcatcaagcctatcattttcattccagttaacattccaaccacattagaaacctggatcaccattctttactggccatatacctttatgttcaattcatagtacaactctatcaagataaagatcgttattttataactcatgtgaaatcccaacatgtttctcattactaataatcaaatggtttcagcacccctgatccttcattacc

SEQ ID NO: 132130 - DNA, 300 bp, Glycine max
  Clone ID: PAT_MRT3847_90320C.1
ggtgagacgatggtaaggtcgcgttgtgttgcgtcgtgtcgtgcgctgttcctctgtccgtcgttatagtttaaacatcacacacgagctacgtatcgcacacattgtatagcaagcaaggtggaaaatgtaaccgtttgaagacgatcaagtctgataatcaacgatatctaccacgttgagatagcgaagattcagaagataaacgaagaggagaaggcgctaaaggagttgaaagccaaaggttatcagaacggaaactttggacgttcagggctcataagaagtggagggaaataa

SEQ ID NO: 132131 - DNA, 2447 bp, Glycine max
  Clone ID: PAT_MRT3847_90321C.1
atgccactcaaacaaacaaacccaacattacaaccatggcaacggtgacacaaccgtgtccttcgtggacgcgcggttccgttcctctctcgaagcgcgtcctcccacgacgtcgtttcaccacacgcctcaccacgtacccacaagctgctctggttcaagcaccgcctccaccaccaccttcttcgcccagagacagctctagctccattcagcttctgaccttgtcacgtgccaatgacctgcaagccgaggccagagccatggcacgtgccgccaatgccaccgtctacaacccgcaactcattgcgtccatgtacggttcccaacccatcaaggttgtgcggaggacccttcagatactgactgcgttgggttcattcgggctgaaactgttgctgaacaagataaatggagcgcttgataagaacagaagagttcgtgctgttgagcttaaggacatattcacgaagctgggtcccacttttgtgaaattgggtcagggattgtccaccaggcctgacatctgcccgccggagtatttggaggagctcactgaacttcaagatggattgccaacatttcctgatgaggaggcctttgcatgcattgagagggaattaggactatctattgactttatcttttctactatatctccaacggctgtagcagcagccagtttgggtcaagtttataaagcccggttgaagtactctgggaaacttgttgctgtgaaggtgcaacgccctgatattgaagaagctataggaatggacttctacctaattagaggtttagggatttttataaataaatacattgacataatcaccagtgatgttgttgcacttattgatgaatttgcacgtagagtttttcaggagctcaattatgtgcaggtgagggacaaaatgcaaggagattcaaaaaattgtatgctgacaaggaagatatttgtgtccctgatgttttctgggactatacaagtgctaaagtactgacaatggagtgggttgatggagtcaaattaaatgagcaagaagcaattgagagacaaggattaaaagtcttggatctggtaaatgcaggcattcagtgcagtctcagacagttactcgagtacggatattttcatgcggatcctcatcctgggaatcttttggcaacacctgagggaaagcttgcttttcttgatttcggcatgatgagcgagactccagaagaagcaagatatgccataattggtcatgttgttcacttggttaaccgagactatgaggccatggctcgtgactactatgatcttaattttttatcaagggatgttgatgtatctccaattgtgccagcacttcgaaacttttttgatgatgcacttaattatactgtgagtgagctcaactttaagacactagtggatggtctgggaaatgttttgtatcagtttccatttaatgtcccagcctactatgctttaatattgaggtctctcactgttttagaaggtttagcactctatgctgatcccaattttaaggttcttgcggcatcatacccatattttgctaagcggctcttgacagatccaaacccatatctaagagatgctcttatagagttgcttttccaggatgggaggttcaggtggggtagacttgaaaacctgctagcccaggggagaatggacagggatttctctgcaaaagaggctttgcaacctgtcctgaaggtattattgagtccagatggtgaagaaatcagaaccctagttattaaggaagctgttcgtgtaactgaagcttttactcttagcacaatttctgatacatacaagtcagttcccgattttatgagggttcttgttttcaatggcaatgcaaatggacccattataacgtcagaaactgaaatgcaaaacttgatagagcttagagatcaagtaattaggatatgggaacttctgcgatcctctaatgattatgatccagatcttttactacctatactacaggttcttcagcaacctgaagcacgcagacttggggagcgtgttatgggtgggatcactcaacgtcttgcagcacgctttctgcaacaagtacttcgagttccaatgccagcttcctcatagattttgtgccactgtcaaggtcaacagatgtaatctagataaggttaccatgaacagggaatagaggagctatattcttacaaagcaagaaaaaaatatattctttcaaaattgtttgattagcttgtttgtttggatcctctaatttgcaaaaaatctgtatatattatatactgctttattgatgctgcaagcatcataatcagcttcattatataacaataatgtaatagtgttaattgaaaagggattgctcttggcttcttgcacaaaaaaaaaaaatcatggtgcggctatgccttatttatcatac

SEQ ID NO: 132132 - DNA, 384 bp, Glycine max
  Clone ID: PAT_MRT3847_90322C.1
ctatctttttgccacgggaaacctattgcatacacatttgaggcctaagaccctccgttctccagagtaaatggtttatgctggcgtacaggctatttcgcactacgcccagatgaacaggattggttgtaacgtttgccggcaaaattgctttttctctggtatccacatactcgactggctagttagctgtacaagcagaggctgggagctgtgctcacgatctcttacaagtaattgatgtgacaattcccacgataatagcctgacacctaattgagatctgcgtatacacctgcttattaatgactcggtccacatatgagacaggacccattatgcgtgacagtcttaacgctgataaaagcgagcttgcaaacgcta

SEQ ID NO: 132133 - DNA, 635 bp, Glycine max
  Clone ID: PAT_MRT3847_90323C.1
taaaaaggcagatactgtacagtatattatattgatcatggctattacaacgaaccctcttgttgttggacgtgtaataggagatgttctggagccatttgcaagttctatccctttgagagttgtttacaacaataacaaagaagtcatcaacagtggagagctcaaaccctcccaaataatcaaccctccacgagttgaggttggtggtgatgacctcaggaccctctacactctggtcatggtggaccctgatgcacccagcccaagtgacccaaatatgagggaatatctgcactggttggtaaccaatattccagcgactacaagtgcaagctttggacaagaggttgtgagctatgaaagtccacgaccaacatcagggattcatcgtttcatatttgtgttgtttcgtcaaccgagaagaatgtctatacctgctccaggatggcgccaaaatttcatcactagagattttgcagagtattataatcttggcttaccagttgctgctgtctatttcaattgtcaacgacaaggtggttctgggggaaggaggcttatgttataaattttatattcgatagaaagaaaataatggaaagtgttagttaattattactaattattaattg

SEQ ID NO: 132134 - DNA, 501 bp, Glycine max
  Clone ID: PAT_MRT3847_90324C.1
gttaaatgcttacccttattatggatacaccaaaggagatggaattttcccaattgaatatgctctattcagacccctttctccagtgaagcaaattgttgacccaaacacactattccactacaacagcatgtttgaggctatggtggatgctacctattatgccatagaagccttcaatttcaataatatacctattgttgtcacagaaactggttggccaagttttggtggagcaaatgaaccagatcctactacaaagaattctgagacctacaataataatttaattaagagagtaataaatggttcaagtccccctagtcaagccaaagatagccatcaatacctacctatatgaattattcaatgaagataaaaggaaaggccctatatcagaaaaggaattggggtgttttttttatgctaatggaagtagggtttattccttgagttttagtgcttccaacatgagtaatgcaaattctcaaggatcatttt

SEQ ID NO: 132135 - DNA, 271 bp, Glycine max
  Clone ID: PAT_MRT3847_90325C.1
gacgagaagacgacatttcggggaattcgtaccatgaaagtaatttctagggtgtcccgaatgttgcactaccaatcggctctcgcgctgtacgcctgagaaggatgccggatttccggttgtccctgtagatttcattcagggggagcatcaggatctttattaacacatattatagccacttagaattattccagtcattcccaatcgacattacatctcatataaatctccaactaggatgacgtactatgtataacagatcacctta

SEQ ID NO: 132136 - DNA, 293 bp, Glycine max
  Clone ID: PAT_MRT3847_90326C.1
ggctcgagcgactttgaagatttacttatcacagtatcgacccatcgataccgtcatagagactagctgcgaccagcggctagcggactgggaggacgtcatcactgccggtgttgtgaatgttagggcagatgagacgcgatgatgaggggaagcgctgtccaattacatgacctggataacgaaattgtctatactagtgaaggaagccaggtgagacaatacagggttgacatcggggttctatgggctatggcagtactgggtcagcaggaaagaggcccatgttctca

SEQ ID NO: 132137 - DNA, 130 bp, Glycine max
  Clone ID: PAT_MRT3847_90327C.1
gagaagtgagtctaagaatctcattctctgtttgagctgtcacagggagttcttcttcatggattgcgtaaaagagcggcttttttacactccaaatggcgttaaaaaagccttttccgtttcttgtgga

SEQ ID NO: 132138 - DNA, 464 bp, Glycine max
  Clone ID: PAT_MRT3847_90328C.1
aattcggctcgagtacggctgcgagaagacgacagaagggccgacaggttgagatgagacgaacaaattggagggatgcatctgatgtccattccttctacttcacaagatttctagaagagatgaacgaaaaagacttgtggtatgagtttaagaaatggggggacgtgcgagaggttttcattgcaagaaactgaaataggcatggcaggaggaatggtttcgtgagattcaagggggtgggcgatgtgaggaggtttgaaagacaactggacaacctgattgtagggggctgaaactacatgtcaacataccaaagcatggaagggagaggatggcgaagggagaagccaacttaaactacaagtacaggacgggaataacctcagataaattactcgagggtgagaaacatcaaggtaaccttgaaggtgcaacgaaacagcaactccaaggaacgatag

SEQ ID NO: 132139 - DNA, 215 bp, Glycine max
  unsure (1)..(215): unsure at all n locations
  Clone ID: PAT_MRT3847_90329C.1
cttgcatatcatgataattaccatgagttttgtcgtcttcttggtcggttcagagtgaattatcagtcgtcagagcttgttaatgtcggacgatacgcgtcttggatacgtttggttgcagagtttactctcaagtctttgcaatcatggcagtgggcaagcaatagtgtgtactacctcgtanggctgtggtctagattggtgtcttctgttcc

SEQ ID NO: 132140 - DNA, 403 bp, Glycine max
  Clone ID: PAT_MRT3847_9032C.1
agacatcgaaattgaacttggatgctatcgagaaattcaaatggtcatatctgttcactttgacgtccgattcaggcgcataagatatcgagacgcacgaaatagagcaacggaagctctctggaaatttaaatggtcatatctgttgactcagaggtgcgattcatgtgcgtaatatatcgagacgctcgatattgaccaacggatgctctcgtgaaattcaaatggtgatagcttttaactcggtgatcccattcaggcgcgaaatttatcgagacgctcaataatgatcaacggtaggctttgagatattcaaatatacataacttttaactcgtaagtccgattccggcgcataatatatcggagtcggcttgtaattaaaacaaccgaaatctctccg

SEQ ID NO: 132141 - DNA, 624 bp, Glycine max
  unsure (1)..(624): unsure at all n locations
  Clone ID: PAT_MRT3847_90330C.1
ccacgcgtccggagagggtttcgtgctccgccgcgacaacggggagcggcgtcgggtcgaacggcgccgtttcgagggcgttgcagggactgagcaataacagtaacactgcgctggagcagctcgacatcgagcgtggcgtatgcatccctttccgcaagtactcgcccgagatcggatgaagaggttgttccgtatcgtgctcgacagcttaggaatctcttgtgtgatctggggccttcctttattaaagctggtcaggttcttgcaaataggccagatatcattcgagaagattatatgaatgaactgtgcattcttcaagatgatgttccttcatttcccaatcaaattgccttcagaatcatagagnngaggatctgggtcaaccccttngaagctgttttcagcaaaatctcatcagggacaatagcagctgcaagtttaggtcaagtttacagagctacattacgtgcaactggcgagagatgttgcttncaaggttcagaggccagggatagagcccattattttaccgagatctttttcctattccgcactttgggcttcattcttaaatggcatttagtataccagaattggggatgtaatgctgagctgatt

SEQ ID NO: 132142 - DNA, 378 bp, Glycine max
  Clone ID: PAT_MRT3847_90331C.1
ctgttcggatggattgtgtttaattccgaatgcaacaatgtccactgggtcactcaaaaaggagacggcgcagcatcagcgagctcttctatgactcttgttcttttgcagtcagagcttatcccctgtctatcttaacacaggttacaccctaactcacaatgaaaggaactgtgaatcttcaacatccatatacgctgaactctatatactcatttttattattgaccacatcacatcatcatcttcttcactaattgtcaatgctataattaacaagacttattattgttggatactaggatttgtttttacatcaccagttcatagagtaccggggacgcatatattacgattgccacatgcttaatgatacac

SEQ ID NO: 132143 - DNA, 3474 bp, Glycine max
  Clone ID: PAT_MRT3847_90332C.1
ctttcttcttttatttctcttgctctaatctcacaagtcacttgcaaatgctcccaatttcctcttcaatttagggtttcatctttcgcttcgagtttgcgcatccatggattccatctacgcgagctcgacgtgcacggttcctcaccttctccgtcgcgagactctgttcttgccgcgaacatcgattccttcttcctcgcttcggcgagcgaagaaggcgcggcgcgcgagggtttcgagttctgcctcgacgacgacgacggcgagcagtatcgcttcaaacggcgccgtttcgagggcgttgcagggagtgagcaataagagtaacactgcgctggagcagctcgacatcgagcgtggcgtatgcatccctttccgcaagtactcgccggagatcgtgaggaataaggtattaaaatcaagagggtccattttgtcacttatgttgcggggagtggagatagtttggaatctgggcttgtactggtctaacttggtgtatgatttcctggttggaagggatgaagaggttgttccgtatcgtgctcgacagcttaggaatctcttgtgtgatcttgggccttcctttattaaagctggtcaggttcttgcaaataggccagatatcattcgagaagattatatgaatgaactgtgcattcttcaagatgatgttccttcatttcccaatgaaattgccttcagaatcatagaggaggatctgggtcaaccccttgaagctgttttcagcaaaatctcatcagagacaatagcagctgcaagtttaggtcaagtttacagagctactttacgtgcaactggcgaggatgttgctatcaaggttcagaggccagggatagagcccattatatatcgagaccttttcctattccgcactttggcttcattcttaaacggcattagcatacagaaattgggatgtaatgctgagctgattgttgatgaatttggtgaaaagcttttggaagagcttgattataccctggaagcccgtaatcttgaagactttcttgagaattttaaaaatgaccctactgtcaaaattcctcaggtttacaaacaattttctggtcaacgtgtgctggtaatggaatggattgatggtatcaggtgcaccaatccacaggccatcaaagaagccggtattgatgttgatggatttttaacaattggagttagtgctgccctacgacaattgttggaatttggattatttcatggagaccctcaccctggaaatatttttgccatgcgtgatgggagaattgcatatgtggactttggcaatgttgctgttctcagtcagcaaaataaacagattttaattgatgctgttgtccatgctgtgaatgaggactatgctgagatggctaatgatttcaccagattaggcttcctgaccccagggactgatgtgactcctataattcctgctttggaagcaatttggcagaactctgctggaaaaggactgtcacattttaattttcgtagtgtcacaggaaagtgtacccagttggtttacaattatcccattcgaatcccagaagggttttcacttgtatcgcgtcctgttttcccccgtcatcgcgtctgtttttccaccattcctggcgtcgaatttcgtctccaagttttgggcactgatgtttatgatccttggtcttgcatcatttcttataattcctgcacgaggatacttttttgcggtggcagggtgtaagttaatccaacgtatcaggcaaatgtgttttgagaaggttgtcaacatggaggttagttggtttgatgagcctgaaaactcaagtggtgccattggtgcaaggctctcagcagatgctgcttctgttcgtgcccttgtcggtgatgcgctgggactattggttcaaaatttcgcaactgtactggcaggtttgattattgctttcgttgcatcttggcagctggcattaattattcttgtcttgattcctctgattggagtaaatggatatgttcaaatgaaattcatgaagggattcagtgcagatgcaaagatgatgtacgaggaagcaagccaagttgctaatgatgcagttggaagcataagaacagttgcttctttctgtgctgaagacaaggttatggaactatacaagaataaatgtgagggccccatgaaaacagggatacggcaagggttgatcagcggatcaggatttggggtttcatttttcttactgttttgtgtttatgcaaccagtttctacgcaggagctagacttgtggatgctgggaaggcaacattctcagatgttttccgggttttctttgcattaactatggcagctattggagtttcccaatcaagctcctttgctcctgactcaagcaaagccaagtcagctactgcttccatatttggaattattgataagaagtcaaagatagatcctggtgatgaatctggtagcacactggacagcgttaagggagaaattgagcttcgtcatgtgagcttcaagtatccttctaggcctgatatacagatttttcgagacctcagcttgactatccattctggcaagacagtggctcttgttggtgaaagtggaagtggaaaatcgacagtgattgccttgttgcaaagattttataatcctgattcaggccaaatcacacttgatgggatagaaattcgtgagttacagctcaagtggttaaggcagcagatgggtcttgtaagccaagagccagttttgttcaatgaaactatacgtgccaatattgcctatggaaaaggaggtgatgctactgaagcagaaatcatagctgcagcagaaatggccaatgcacataaattcattagtggcttacaacagggttatgatactatagtgggagagagaggaacccaattatctggtgggcagaagcaacgggtagcaattgctcgtgccataattaaaagtccaaagatattgctactagatgaggcaacaagtgcattagatgctgagtcagaaagagttgttcaagatgcgttggacaaagtcatggtgaacagaactactgtggttgtggcacatcgtctatctacaataaaaaatgcagatgtgattgctgttgtaaaaaatggagttatagtggagaaagggaagcatgaaaagctcattaacatcagtggtggattttatgcttccttagtccaacttcacacaagtgcctcaacagtatgagttttgcctaattccaatcttcctttttttttggttcttttttgtactatgcttctttattctatattttttagaaattcaacagaagattataccaaatatttgtttcccccttcttgtaagaaatttattcatgttgtcaataacaacagataaccaaaaatatgcgagaacgatggaatatatcttgcaatattttgatagcaatatagcaaaaatttaccattaaaaa

SEQ ID NO: 132144 - DNA, 452 bp, Glycine max
  Clone ID: PAT_MRT3847_90333C.1
acaaaatccctcgcatatacaaagacttgcttgggctgctgggatggttgtattttcattttctctttctctccgaggacggggaagaagcggactatagggatactcaaaatagagtcaaaggatcaaaagcacccatcacaggtttctacttgggtggttcaattgcttaactttaactatcgaattaaagaatgacatgtatactaatcaatcgagttcaaacataaacacatgtaaaatagatccgcatttaagggttccattatattcttagttgtggaaatgtattggataggtacgcaaatcatggaaaaagaaaacacgttaccaatctaacaaagattcgaagatatccataatcgaattgagagaaaatcaacagaatcccgagaacaggaaatggcatcctattccaaccgaactactatgaaaaattgcccatttcgaaa

SEQ ID NO: 132145 - DNA, 289 bp, Glycine max
  Clone ID: PAT_MRT3847_90334C.1
ggacgttataaccactttttaccatttttttttggagcaaacgcttccaccgctcagattaatgaggctgaggcacaagttatgagagggggtatatataacaaagccacttaggggggcagcggtttgaaatacccaattttatttggggatggacattattgaaataataggggcttttgaaagttaaaattacattgggcgccttattcaattcccagaacatgcgtgtatttcatgcgtaaaacacaccttgtgttaagctgtggccaaagataaaacccatgcc

SEQ ID NO: 132146 - DNA, 363 bp, Glycine max
  unsure (1)..(363): unsure at all n locations
  Clone ID: PAT_MRT3847_90335C.1
gtccgaatgacatatggccatgaaaggaaacgagggagttcaagagagagagaaattcattcattcattggcatgggtttcctcgaacaaccggagggtttcaaatccagaaaagaaaataaaaccaccttcattcccatcctttctttctgtcaaattttacattaaattacatgacatggcataacacacaccacaccaccctctctttatatatcacaccctacccctcagattcagacacccagttgcttccttttattcctgaatcgtgtgctgacagtcaagaatagtagaggatccanatccatagaagggggtttatgactcattcctaacttatggaaacctttatgtgtacat

SEQ ID NO: 132147 - DNA, 596 bp, Glycine max
  Clone ID: PAT_MRT3847_90336C.1
cgtattatattttttttttatcaaatgggcatatgaaacaacaagaacaagatgtgttttaaaaaaaaagattttgattcgttaactctttgaagaacctccaatctcatgttctcatgatgacaattaaagcccacaaccaatcgctttgaatgtaaaaaacataaaaaaagtggcctatccactttttaaagaaaaagtccaatgtttcatcaattttacttgtttaagcaaaaccctgtttcaggggcataacggaactgcgcctatacatatttatctaatgactgggcaaaataagaacagacttccatccaagagacatttacttgcatctgccaacatttttatggatcacctgttcttgttgaaatccacacttgcgaagacggcaacgatttcatatacagatcaacaccagccagttggaccaccaatcccttgtttaaacaaagggcttggttatcactacatctttatctaaagtagggtctaatgccttgtctgcttaaagaaaaccttctttctaaatcagacttaacatatttacccaattgttgatgttttgttggcccagcagggaaacatttcatgcc

SEQ ID NO: 132148 - DNA, 165 bp, Glycine max
  Clone ID: PAT_MRT3847_90337C.1
gaaattgcggttgaagactgtttttttaaaacgttggcattaattatcaatagtgagaaattttagtgggaaaaaaatgaaaattttagaggtgctacttgtggtcgtggtcatggttttgctgcaatccttgatattgtaggaaattgccaaatgccaaccaat

SEQ ID NO: 132149 - DNA, 302 bp, Glycine max
  Clone ID: PAT_MRT3847_90338C.1
gaaaaactgaaagaaatactaaaggaatagttgacttcatgagacaaaaattttaatttttctttctttctatttcctcttcaatttaatttcaatttttttttctatcaaatcaaataaaagaaacgacatcagacatcgtgatccatgttttttttccatctagtattttctcttccaaacggaccataaaattcagtacaagtccaatgattcaaggaccctgcgagcctggatctgaagagctgttagcctctgctcagtatctagtgttgaatcgaactgacgactggctgcccata

SEQ ID NO: 132150 - DNA, 200 bp, Glycine max
  Clone ID: PAT_MRT3847_90339C.1
ggatgaggtgtgaacaggtaagcgatctctttcgtcggttatctgtaaaggacccttctaagcttcaagtctgcctttaggtaagctcaatgtctaaggttggttgcgcaaagcagaacagaatacaacacaagtacagttacacacaccactttccttagttagcgcattgctttgcgatggccagaatggcactggca

SEQ ID NO: 132151 - DNA, 1729 bp, Glycine max
  Clone ID: PAT_MRT3847_9033C.1
cccgcgtccgtattgccccaaaatttcagaaggattgctcccactattttattggatgttccgcaagattcttcgataatgggtgaggagatatttggtccattgcttcccatcatcacggtatgaataaaggcacatgaagaactgtttgtatgatgcatattttcttcttcaaatttcatttatgttctttgattgcttttccaatagtctaataggtacaatgttcacatagttttgcaacatgttttcaacctgcaagagtaattgatatgtgcttcttcaggtgtgataagagtcacaagtcccaactagaaaagcagcaataagatatattggggaaaacttcaattgattatgtgttacttagagatgctagtctttttgtggacatttacaaaagttttatgctaaatgttaaactatataacgtggaaagaggtgatataatttaaatagttctcagcaatgaactaaagcaaaggaagatcaactttcatactttttttttttttagtggaacaaataataataacaatatataatgtcggttgaggagatgcagtcacagaagaggaatgtgtttgacgcagaaacggcgtcgtccttggtgaaggagctgagggacaacttcggttcgggaaggactcggagttatgaatggagagtgtcacaagtgaaggctctgttgaaggcggtggttgataacgaggaacagatcgtcgacgcgctcctttctctttcttttttgtcggacaaaatagtgatagtaatgtcgggtgaggagacacagaggaatgtgtttggcgcggaaacggcgtcgtccttgctgaaggagctgagggacaacttcggtaaaggaaccacgcgaagttacgaatggagagtgtcgcaagtgaaggctctattgaaggcggtggtggaggctcggcgagattctctgataatgggtgaggagatatttggtccattacttcctattatcacggtcaataagctggaagaaagtattgatttgatcaactcaggaacaaagcccctcgctgcatatgtatttacaaccaacaacaagttcaaggagcagttcgtaatgaatgtttctgccgggggtttgcttgtcaatgacactgtcttacatcttgtcgttgatactttgccatttgggggagttggggagagtggaatgggtgcataccatgggaagttctcttttgatgcttttacacacaaaaaagcagttctttatcgcagttttgctggggattcagcaataaggtacccaccatacacggatacaaaactgagattgatgaaggctctcgtcggtggtcgtatcctcggaataattcgtgctcttttcggatggtcctaagcttaacttgttttgaaacctagctattttttatgtatctttcgttctggtttttttgtacttcatcatgctgtgtagctttattattatttttgtttttttagaagaaaaccaataggcgagagttgcgcatgaaaaaagcaaaataaattaaataatcattgctacttttcttcgtgatcgtgttagaaaaaaaaaaattgtaatgtggctaatgccttttagaggctatgcaggctgtgatactataaaaaaatgtgtatatatgcacatattaacatgcctttcacggaaagacaaggcatgcatgctcatatctatgtcataaatttataataagaattttgctagcaaaaa

SEQ ID NO: 132152 - DNA, 387 bp, Glycine max
  Clone ID: PAT_MRT3847_90340C.1
ccgcccttagtcctctattctcctctgacgggcacacacagggattgatagatcatagagaggggaagcattcttaggcgccaattgtgagtgagacagattgtgggcgccatttctacttttccatttatttgggagagagagagagagagagctgattcttcaccatccctggcattgctatgcttctatcactcagtacaggtagtcaagtatggccttgcctggtgaatgccttacagaaagcacacaccccaattcaccaccattttcctaaagcttcactcttttctctgctaagagaagaaagcacgaaagaaaaagcctaaatggtggaatctaatgccagtttgggattgcggactcaatcaacggcgtgaatttcca

SEQ ID NO: 132153 - DNA, 332 bp, Glycine max
  Clone ID: PAT_MRT3847_90341C.1
atgaacattggttcacacataagaacacattatcataacaagacactcactcgcatatgtacgtactataacttgataaccaattcatggaccctcactttccacagacgattgatgagaatgaggcccaaaacttggtggtgacaggataccatccgcgacctgctatgtgctccaatggacactatcctatgccgctggcacatggatggattccggacatgctgagcctggtcaatcaaacgagctggaggcacttcaccggaagctaagcaaatgccaaagtatcatcagatactgccattgaacctatgcatccttcggggctgaaa

SEQ ID NO: 132154 - DNA, 423 bp, Glycine max
  Clone ID: PAT_MRT3847_90342C.1
tttttttttttttttttttttttttttttttttttttttttttttttttttttttttttttttttttggacacaggcccccaggcagggggggggaaaccctaaaaaaggaaaggaaaaaaaaacagatttaaccaaaaaacccaaactaggggtaattcaaggggaaaaaaaatcaaggggcaaaaggttttagggagttcgggagggcattacccccaaacccttttccttggaacaaaaacggagggctttatccaatttatctttgcagcaacaaaaaaatcattcatagtaaaacccccaagggaagcggcccaaagttctgctctgacttgaatggggggccccaagaaaaaattggggaaagggcccaaagcctcaacaaccttaaaaatcctggtaaggagttcaaccccacatt

SEQ ID NO: 132155 - DNA, 205 bp, Glycine max
  Clone ID: PAT_MRT3847_90343C.1
ctaaactcatatttccaaaaacgcagaaccaacaaatgtcgtttttttttaaccactctctaaaacatgtgagacaacttacactactatcgagcctaacttaaccctacttcgatacacacttaacaacacttcaccacccttctacagcatacatcattcaaaaacccacctttcccatgttttcaacaacaataactactcc

SEQ ID NO: 132156 - DNA, 623 bp, Glycine max
  unsure (1)..(623): unsure at all n locations
  Clone ID: PAT_MRT3847_90344C.1
ccacgcgtccgcaaaactctccttctccttctcttctcttcctggcgtccctgaccccaggcgttctctcgaagctactcgacaacgccggctcgaaggtaaccgccccgcaccggcaagcccttcttcaggtgacggagatcgtgccgcgcctctcctcaacctccccattacaaagccgcggctacttcctcaaactctcggactctcttcactccgcctacgtctccgtccccgacgccgacgccgacctcatctccgccggcaagctcaaccttggccagttcgtctacgtcacccgcctcgacgccgcctcccccgtccccctcgtccgcggcctcaaccccctccccaagcggagaccctgcgtcgggaaccccattgagttggtaccaagtgagaggcttcgcgttaccaccaccaccaccaagaagaagaagaagaaagtagaggtttttaagagagggaagggttctcccgaatggaagaaggagaaggggttggagagagaaagaggntngagttttggattcttctagaagggtttgggatcatagtncggggttctgaagggataanctgctctgcttctacaaactcaaggccaagaaatctaaccccac

SEQ ID NO: 132157 - DNA, 748 bp, Glycine max
  unsure (1)..(748): unsure at all n locations
  Clone ID: PAT_MRT3847_90345C.1
ttgaataccctgtgctgaacagctaagagatgtcaattaaacaatcttgtcccaaagcatgattaattagcaaaggataccttcctttccaaatattctcttttaaacgaatgcaatagggatgcttgatcagtgcatgactgcaatgcatgactttgaaattctatattatatgccttagtgcgctttgatatattaattaatttgtttgtgataagttgttagttttgacatgattatctctgctttaattgttccaatgactggggttgccataaattaagaacatgtaggaggcagtgttgctaaattttatttttagttctattttttatttgtccattttgatcttctttgatctgtacactcaatacgaatgaatagtcaatgtcaagatagataacacaagtacgtgctcttgagataagcagtaaattcacaggtgccctccatgcatgactgacaaacatcagaaaatgaatggtgaggatgaggagtaactcccaaagagtactcttggtgtaagttaatccctcctctctctcacacacacacacacacatgcatcaaatttcctttttccttttttttcttttgnggagtgggcattcaattacttaggaggtcaaatatccatgtttttagatttccgttgccatttttggttgtgccatgaatggaaaaatgagttagctntcattattcagtacttttttttttttttctctctagaaataaatgcaccctg

SEQ ID NO: 132158 - DNA, 559 bp, Glycine max
  unsure (1)..(559): unsure at all n locations
  Clone ID: PAT_MRT3847_90346C.1
ggactagctgtcgatctatcgctaggaatgtggccaagtacctgtgcaccggttgggattcaccacgtgttgtaactgagtatcaacgtactccagcctgtaggtgtgggaaacattaataaaccgatacgccatccgggtgtatagaggagcgggctgataccatctacattgaagatgtacaatggaacttgccacgtgcggccgcgcaaatgactgaaacagccactgagacaccggcagcaagatgtgtaaatagtacgggtggtaagggccctacggccacagcggataaataccagaaagtgtattttacggctgggcagccacccaccactaggacgaaaaatctgcgggtaccagaatttaataaaattgcaggagacactgcggttggtgctgcgaggggtgtaattattaaggccataacggccgtggatgcaccaatanctgcgataataagagccacagaggcatagtggtatgctaaaggggagcttctgcaaactgatgtgtgtgccctggttacatcccgggggagcaanagacgacgtgcgct

SEQ ID NO: 132159 - DNA, 370 bp, Glycine max
  Clone ID: PAT_MRT3847_90347C.1
ggggaaaaaagggaaaggcccccaattttatttaggggggcccttttcccacaaattttggggggagcccgccccattaaaaaaaatttaaaaaaatttttaaaacgggggtttttttttttgcccccaaaaacttggaaattttaaaaagggtcccccccgggccccaaaaaatttttaacactggggaaaacacaacccttgaaaaaaaaaatttttacctggcaaggttgctttcccccccccttaaaggggggaaaaagctcccccggtaaaaacatccctgttggggattccaaaggcggcccttttaaagatccttgcagacaaaagggaccttttgaaatttttttgggccggggcaagcggg

SEQ ID NO: 132160 - DNA, 631 bp, Glycine max
  Clone ID: PAT_MRT3847_90348C.1
gcaaaatgaaacttatttaatctgcacagagatggaacccaatgctacattgaagatgtgaacattttgctcaatacttctccttatgttctctttttctttccagtttttacattcaataatttttttgaaatttcaattttaatttcaattttacccttgtttaagtgacctgtcaacaatataacatattcattttgatctttttgacggcctattatgtgttctctatttaaacgagacccacattttctaaaattctctccaaacaacaaatacacaataaaccccacccattccttatttcaatctgaaatccaacagctcataatcctttggcaccgtgcaagactttttctcctatggcatgctagaagtcgtcagagcattgagccgttttgagattccttcataatgaattttgaaacttggtctggagcattgttcagtacaaaccgatattttatacaaagaaaactaacaatctatttgagattttagaatggacctcaacaaaaaaagactatccccctcttgttcatcaatacagaaaatataatgaagatgtgtattttttccaagtataaaattaagcagttctttcatttttaagtattattgccagcaaggg

SEQ ID NO: 132161 - DNA, 2490 bp, Glycine max
  Clone ID: PAT_MRT3847_90349C.1
cgcccacgcgtccgcccacgcgtccggggcatttctgtgtgtgatcacattgtttccctctatcgtcttctccctccttcttcaatggtcttagggtttccggtgtccatgcgtagcagctcgcaataatgcgcttttgaaacccgtgttcatctgtatccaacgatttactagaaggaggtcgcaatttctccatcttcacatttcgctagcacgtgaaatcaaaagttatcgacactttcgcgcgacacgaaatattgggaaccaagcaaaatatctatggctgacgaaccattatatccaatagcggtgcttatagatgagttgaaaaatgatgacatccagctgcggttaaactcaattcgtaggctatcaacaattgcacgtgctcttggggaggagcgaacccgtcgagaattaattccatttttaagtgaaaataatgatgatgatgatgaagtacttcttgcaatggcagaagagttgggagtgtttattccttatgttgggggagtggaacatgctagtgtgttgctgccaccgctggagacactttgcactgttgaggaaacctgtgtgagagataaagctgtggagtcactttgtagaattggatctcaaatgagggagagtgatttggttgaatattacatcccgttggtgaagagattggcagcaggtgaatggtttactgctcgagtctctgcatgtggactatttcatattgcataccctagcgcaccagaaacatcaaagacagagttgagatcaatatacagtcagttatgtcaggatgatatgcctatggttagaaggtcggctgcatcaaatcttgggaaatttgctgcaactgttgaatatgctcatttgaaggctgatgtcatgtcaatttttgacgatcttactcaagatgatcaagattctgtcagattgttggctgtggagggctgtgctgctcttggcaagctgttggagccacaagattgtgttgcacatatactcccggttattgttaacttctcccaggataagtcttggcgtgtgcgttacatggttgcaaatcaattgtatgagctttgcgaagctgtaggccctgaacctaccagaacggaattggtacctgcttatgtgcggttgcttcgtgataatgaggctgaagtacgcatagcagctgctggaaaagtgaccaagttttgccggattttaaatccagatcttgcaattcagcatattcttccttgtgtgaaggaattgtcatcagattcttcacagcatgtccggtctgctttggcttcagtaataatgggaatggctccagtgttgggaaaggaagcaacaattgagcagcttcttcctattttcctttcccttttgaaggatgaatttcctgacgtacgcctaaacattatcagcaagcttgatcaagtgaatcaggttataggaatcgatctgttatctcagtctttgttaccagccattgttgagcttgctgaggataggcattggagggtccggcttgcaattatagaatatatacccttattggcaagtcaattgggggttacggttttttgatgacaaacttggtgctcttttgcatggatatggttcattcaattcgtgttgcatctactagcaacttgacacgccttgctgaagaattgggtcgtgagtgaactatgccgtgcgtggactccgcagcacataattcctcaggttttggagatgaacaacaatccacactatttgtatcggatgaccattcttcgtgctatctctctgcttgctcctgtgatgggccctgaaatcacttgttcaaacttgttaccggttgttcttgctgcatctaaagacagagtgcccaacataaagttcaatgtggcaaaggtattagagtccatcttccccatcgttgatcagtcggtcgtggagaagactattcgtccatgtctggttgagctcagtgaggatcctgatgttgacgtgcgatttttctccaaccaagcactacaagcaattgatcatgtcatgatgtcttgctaggcagaaatggttccacacgcatttaggttgaagacgtcagaagagatgctaatatttccaactaccataaataatactgcatagttatgtttagtgcttttcagtcattgaccattgatgtgatttagtttccattatatgctaatttccatatattatgtgttttttcctgattgtatttttcgtagatttttttttgttccttggtgtaatattctgctaggcaatgaattgcacatttcaatcattatccaaacgcaccataagtgccacaatagctcgagccttctctagcattttgatttcaatcagggaactggcgcgcattgatagatttatgggatatgaattatttttgtgtttgtaatggtacatggcccttaaccctattagggtgtgggtattgttaaaccatataacaaatgaaaattctttgtaaaaaggagt

SEQ ID NO: 132162 - DNA, 596 bp, Glycine max
  Clone ID: PAT_MRT3847_9034C.1
taacacaatcacgaagaaaagtagcaatgattatttaatttattttgcttttttcatgcgcaactctcgcctattggttttcttctaaaaaaacaaaaataataataaagctacacagcatgatgaagtacaaaaaaaccagaacgaaagatacataaaaaatagctaggtttcaaaacaagttaagcttaggaccatccgaaaagagcacgaattattccgaggatacgaccaccgacgagagccttcatcaatctcagttttgtatccgtgtatggtgggtaccttattgctgaatccccagcaaaactgcgataaagaactgcttttttgtgtgtaaaagcatcaaaagagaacttcccatggtatgcacccattccactctccccaactcccccaaatggcaaggtatcaaccacaagctgcaccaggaaaaggagaatacacatgaaaaatgttcagattttaagttgatatgaaacagaaaataaggatttttaaataacaatgcaaaatgcctatatccatatcatatgtatagatggggaaaagttcttaaaatgaatcataatctatgaccaaaacatctaaaattg

SEQ ID NO: 132163 - DNA, 1286 bp, Glycine max
  Clone ID: PAT_MRT3847_90350C.1
ctgcggtaccggtccgcgcattcccggatcgacccacgcgtccgcccacgcgtccgcccacgcgtccgcccacgcgtccggtcatcagattcttctcagcatgtccggtctgctttggcttcagtaataatgggaatggctccagtgttgggaaaggaagcaacaattgagcagcttcttcctattttcctttcccttttgaaggatgaatttcccgacgtgcgcctaaacattatcagcaagcttgatcaagtgaatcaggttataggaattgatctgttatctcagtctttgttaccagccattgttgagcttgctgaggataggcattggagggttcgacttgcaattatagaatatatacccttattagcaagtcaattgggggttgggtttttttatgacaaacttggtgctctttgcatgcagtggttacaggacaaggttcattcgatccgtgaggcagctgctaacaatttgaagcgcctagctgaagaatttggtcctgagtgggctatgcagcacataattcctcaggttttggagatgaacaacaacccacactatttgtatcggatgactattcttcgtgctatctctctgcttgctcctgtgatgggccctgaaatcacttgttcaaacttgttaccagttgttgttgctgcatcaaaagacagagtgcccaacataaagttcaatgtggcaaaggtattagagtccatcttccccatcgttgatcagtctgtggtggagaagactattcgtccatgtctggttgagctcagtgaggatcccgatgttgacgtgcgatttttctccaaccaagcactgcaggcaattgatcatgtcatgatgtctagctaggcagaaatggttccacacgcaattaattaggttgaagacgtcggaagagatgctaatatttccaactaccataaataatactgcatatttatgtttagtgcttttcaattatagctgaatggttatttatttgtgagtaactactagtcattgaccattgatgtgatttagttcccattatatgctaatttccgtatattatgtgttttttcttgattgtagttttcgtagattcttcgttccttgttgtaatgttcttctaggcaatgaattgcatatttcaaacattatccaaaacaccaaagtgtcacaatagctcgagccttctcttgcattttgatttcaatcagggaactggctcgcattgatagatttatgggatatgtattatttgtgcttcatcattgtcatatactattttt

SEQ ID NO: 132164 - DNA, 350 bp, Glycine max
  Clone ID: PAT_MRT3847_90351C.1
gcgggatggattggtgtcaagatgtgatgattgaagaaatgaaaaccttgaaacgtctacacagattgcagacaaccaatgccaatcttccaacggaaaaggtgctttcaaaaatccgcaactacttacagcttcttgggcgaaggataaatcaaattgtcttagaacatgaagaggaaccctataagcaagatagaatgaccacgcgattgtggaagtatgtttccaccttttctcatctttcaggagagagactttgtcaaatttattcaaaacttaaagtggagcaaaatgttgcaggggttggcccctctcatgccaatggttcaatatctgatccatttagcacg

SEQ ID NO: 132165 - DNA, 252 bp, Glycine max
  Clone ID: PAT_MRT3847_90352C.1
aatttgggtctgcatgaacagctgtagaatttaattaggccacttatgtacattgacaaattgcctctcatggtgccagatcctgtgttcatgttttattctcagcacttctgatttccctttagtgacagataatttctacttcaaattccatttggtgtttgatcgtcagtttgtgctgggatgattcaaaatgtaaatacatgttgccttcatagtgaaataatatacttttactccatagaaattaaa

SEQ ID NO: 132166 - DNA, 173 bp, Glycine max
  unsure (1)..(173): unsure at all n locations
  Clone ID: PAT_MRT3847_90353C.1
nttggtccgtacggttgcgagaagacgacagaaggggacaacaaaccaccacccaccacccacgagggggtcattcacacggggcgccgcctcttccaattttcccggagacccaccctttgcatggtagttagctttttggttcgctatgtatcggacctttgccttgggaa

SEQ ID NO: 132167 - DNA, 330 bp, Glycine max
  Clone ID: PAT_MRT3847_90354C.1
gggggggggaaaaatgaccagacaatacattttttttataaaaaacccaggttgggctttttttcttggacaaggaaaaaaggaccctgccgaaaatcatacccatttttttttaattaagggccccacccttgtttataactcaaggaaacaggggatctttccccacatttgggcaaagggaaaaaaaaactttttgcttttttgtttttggaaaaaattttggcaccattttttccagcccagaggcggggccaacaaaaaactcttttatattggctttttaaaaaattttagttgaaaaagggatttcaccaaccacctccccca

SEQ ID NO: 132168 - DNA, 485 bp, Glycine max
  Clone ID: PAT_MRT3847_90355C.1
ctcagcagaaagacatggtcaattcatctacaacctgtttacatatttatctagcttgcacgaatctatgccatgaccggcgctatcgctaaccttgaggactgccgtgtacgaccactcttgtggtgtgccctatctccccattccctagggtttacatctttactatttctatctatctctcaggatctatcagcaccttttggctcaactgtgatgctactcacagaatgaccagcttcctcagtaaacgaagagtcctgctgaagaacttattcttcccaacacttaccagagcccagggtattttcacagtcacatatgccatgtgtgcaaaccttcatctggagcctcggactatcttcagcctctttggatctcaaaggaatttctccaaattaggtggctggcatcctcattgtagcgatgtatatatgtcgtggcggcacctttcggatcattatgactatacccatcatgccaca

SEQ ID NO: 132169 - DNA, 236 bp, Glycine max
  Clone ID: PAT_MRT3847_90356C.1
ctataacaggcgacaacagatggaaataaacctgcggatagccgacccgtactgattcatagcgcccggcacaaatgttgattaggcaccggcccctccgccagggacaaacaacgagccctggtgccaacggctggaagggtgggctacaaagactgctgaacactacaagcaaggggctcgagatgccaagtggacgacagcggctagcattccatgaggaccttctgcataag

SEQ ID NO: 132170 - DNA, 279 bp, Glycine max
  Clone ID: PAT_MRT3847_90357C.1
atgaaatgaaaaagtcattataattcttcataggtagaatctgattgtgtattcccccaacccctcaatttgacttactttttttaaattgctttgtcatagatgcatgaattaacatctggactcatttaaggaccctgttttttaggggaagaaccaaattttgtttgttgtaacttaagtttccaattccctagcaagataggttactgctaatatgatagtttgaaggtcatttgctctttttggtaaatatagttagtttttaccccaagcata

SEQ ID NO: 132171 - DNA, 694 bp, Glycine max
  Clone ID: PAT_MRT3847_90358C.1
acgaggaaagcttcttcttgaattgtattgtaattgcacaccagtacctttatatctactttactaaatgaagaaggacatgcatggtggaagaattttgcagtttgtttgggtactttcgtgatttgctatggatgtggtcaaggttgccaaatttgaaagtctatgtaaactcatcgagcttccatagaatcaacttgttaacttgtaaaagtttacctaatatgaaaaataatattagaaacacttgttaatgacatatatgcataacataatactcttaacacaacaacaattcaacatttcatctttctgtcctacactgtcaacatgacatttactattcaacctattctaatgatacataatgattgatgaaaattattattacacctattttagtatgtaactgctccttaagtagtcatccccagatagtgatgtgtagcagccaaccccaaaacgctaaagcgggttagcagaaagcagggtggccgctattgtgaagtttagaaaacaatatacatagtttatatcacacacatataaatactcaaaaatagaaaaatacacaaaattaaagacatagtgtattatatgcctaaagtttgttattattataatactattattatttaatttattatattatattttatgatatgctttaaatggtttattatgtttttgttta

SEQ ID NO: 132172 - DNA, 852 bp, Glycine max
  Clone ID: PAT_MRT3847_90359C.1
ggctcgagctagtttcttaatttatcactccgctccttccctccacctatttcctcccttgttcgctttccacccatcaaacaaaaacagagtccccaccccctcctcttaatttcattcatcacaacacactagctagtgtgtgtttgtgtatcattctcataaacacacatatagtaaatccatcacaccctactttgagttcccaccttggttttggatttaagctatggtgtaaggttactttgcgtgataaaaatttctgggtgtttacctcctagattaacttgatttcctaatcaacgaagacgtactgatataacaagaacatgtgcgaatcaaaatcagagcagatgcatgatacggaaaagcagacagaattaggtgggttattaacaagacgaggttcgactaggacaataatgtgggatgtgataggagaagcgaaatccctgtgggaggtggcattcccgacagcactcactggtctaattttctacgcgcgttccatggtctccatgctgttcctaggccacctaggagacaccgaactcgctgcgggatccctagccatcgccttcgccaacatcactggctactcagttctctcgggtctctccttatgtatggaacctctttggtcccaagccttcggagctaaacgccccaaactcctctctctcaccctacatcgctgagtcatctttttattattctcttcaatccccattttcctattgaggctcaacatgtccaaaatcttcatcttactcaaccagcacacacacatgacccaaatggcacaaacctacttgctcttcctactccccaacctccttatcaactctttcc

SEQ ID NO: 132173 - DNA, 1042 bp, Glycine max
  Clone ID: PAT_MRT3847_9035C.1
gggaatcattaaaaatccatctactgtcttgcaatctgattctggagaacagcttcagggagctgaaggatacaactgcaatgttgcaactaaatcttataggccatctgacgacaggacacttccccttaggggattccaaagagcaatggtaaagtcaatgtccctggctgctaaagtcccacattatcattacgtagatgagataaattgtgatgcccttgtggagcttaaaacatcttttcagaaaaataatccttatccagatgttaagtacactttccttccaatattaatcaaatcactatctatggccctcagtaagtacccctttatgaacagttgcttcaaagaggatgcattggaggtcatcctcaaaggttcacacaatgttggaattgccatggcgacatcacatggtttagttgtgccaaacattaaaaatgttcagtctctttccataatggagataaccaaagagctggcaaggttacaacaattggcttcaaataacaagttaacttctgaggatatatgtggtggtactatcactttaagcaacattggagcaataggtggaaagtttggttccccacttatcaatctgcctgaagtctccattattgccgttggtagaattcagaaagttccacggtttgctgataatggaaatgtgtatcctgcatcactcgtgaatgttaatattggtgcagatcacagagtcttggatggagcaaccgttgcaagattttgcaacgagtggaagcaattaattgaaaatcccgagctcctcacgctgcatttgaaatgaaattttcattacatgaaggaagaattgttgaaattgtaatttagatggttaatcactatattgattacaatgagaaatagaacaaaagcatttaaaattgatccaaataaagatctgaaaattttatcataattattctgataaacaaggtgccctcgccattttcttgtaaaaaacacgcaatcaatagtagtttgtgttttaacgaatgccgagtttacaaaaaggaag

SEQ ID NO: 132174 - DNA, 838 bp, Glycine max
  Clone ID: PAT_MRT3847_90360C.1
ggaacagaatgaactgtctctgttagagattttgcagccgttgaccccacaaatagcagaggatgttgaagacatgccggctattgaacacatgactgtccatggagctcttgcatcagaaggtcatcgtgcttcagttggtgaggtaaaggataccgttgatgctgcttttcgatgtgccaattcaaggccaatgttctgtcatctatctgttgctcttagtcccttgccaatccccgtgccttttccatcaatatttgggaacaatgttggccagcacggtgaattgatgagtggtcaaattactaattcttcaccaaaaggatccctcgacatccattccattcccatggctgccagattacgatctagcagtattgtgttaccactcttggagagtaagctgcgaaatcttcatcagtttggaattcaacgaggagcagcgggggctgagttacttaggagttggggctttggccaggaagaattggtggaaatggaagagatgttgtctaaaatggtagcggcattgcatcctcctcagttgtcatcagattcagattagaatatatgcgttgttcttcccaaaaaaagaaaagaaaaaaccaagtcaggtataaagaagtgttataaatgacatctgtggttttgtgtcttctcattcttgtaacttgggtgcattgatcagcgaccaatactggtttttgggaactcccttatgggattaaccttgcccgggggttgaatatttaatcctatagctattgacgttgattcgtgtggtggctttcaacttctccgctctcttaatcatgccttactttttaccaagacattg

SEQ ID NO: 132175 - DNA, 475 bp, Glycine max
  Clone ID: PAT_MRT3847_90361C.1
cttcacctagcgtctagttgtattgatttaatagaatgtatgagttattggaaatcttccgatatatgattctcaccaataaagaaaagtcatgacttcttcagttaagagttcagaagagtacaaagaagtttctcatgattttgaattggaggaggaagaggaattgtttgagattgatcttgaggcagtgaattgcattccaccaccccatttcttggaaagttgttactacacttccacagggaatattgcccttttggccaattgtttgttacccatatctgatgtctctaaagctattcctgcagtgtcttttgaagagaggaccaatgttgtgttgattacagagcccacatcgttgggggagtatcttatgctacccttcttggggactcttggagttatacacgagaaaatggaagcacaatttcatttccagtttcagcggtagtgatgactaattaaaagttgg

SEQ ID NO: 132176 - DNA, 795 bp, Glycine max
  unsure (1)..(795): unsure at all n locations
  Clone ID: PAT_MRT3847_90362C.1
tccggaattcccggcgtcgacccaggcgtccgggcaaaactagctaagcacaagcaacactgtcaaagctcgctaaggatgaagttactcgggtggatgcatagaaaatttcgccagaatagcgctgaagtaccgttcaaagacttgatcatcggaggagggaattcttgcgatgaggagcacaacaactacccgaaagcaagctttgggaattacaaacatgtgaaacaacaaagtcatctgcagaaagaggtaagaaaatctttggatcatgatgagtatgaggaagattcagcgggagctatgtatgagctgttccatgggttcctagcaattggaactcttggttcggaggcatcaacgacgccaacatttgccatctctgtggagaacataacagaaaaggaagatgaagtgaccgagaatgaactgaagctgataaacgatgagctagagaaagttctggttctgggagcggatcatgatgagtcatcatcaatatcatgtgggagaagcagtcatggaagcataataactctgagcggcggcggggggaagccagcagcagctacgttgttggaagatcaatcaaatggaaatgcagtttgtccccttcagggttatctgtttggatcagcgattgaattgtcagaaacaacaancacagtggcaaagaaggagcacaggacatcactagggggagctgttccagagaaccaaactggncagatcaggagaaccaacactntggaccaccaaaggatcaagcagataaatctgccatgcatctcatga

SEQ ID NO: 132177 - DNA, 264 bp, Glycine max
  Clone ID: PAT_MRT3847_90363C.1
ggttgaatacgagatcttggaaaacttcattgacaatgttgagttgagccgtgaagaaactgcacaagctgcttttgatgctaatcgtttggcaaaagttcgtaacaagaaaatttcgtgtggtgatcgaaatcgagttgttttgcgtgagttgcctcgtgtaaagctcactgagatgtcaaacaatgaaagtgttttgcgtggcatgacatgttatgggcgacatcaattacccggacgtttcgatcggtgatgaaaagagtg

SEQ ID NO: 132178 - DNA, 175 bp, Glycine max
  Clone ID: PAT_MRT3847_90364C.1
cgaccagcctactagagtgaattataatggcttttcatggataattcaccttggattaccacgtccttggacttcatcattaatcgccatagggttcacgaaaaacttcccaaaaagcaggtgttaaacaatttttactcattggattgggaggtgtagaaatcttctgtaaaac

SEQ ID NO: 132179 - DNA, 365 bp, Glycine max
  Clone ID: PAT_MRT3847_90365C.1
tttctggcttgcaccaactaactttgaaggaatcttgagacgatttgtcaatgaatttgctatctgccttgcatgcactagttcggatactatactttccaaggagaatcgtctcttctttcttctgtgtgagaagcgtggatcaggtggatcaagcgctccaatcaaggctggtcttggtgctcatgttggccacaagatcacaaggacattggactacttcagatttatgttatttggctgaggatgtgacccttttgctttaagcttcgcctattatatgatgtgtgtgttactcgtcaatagagctcgttgtattaaatgcatctttcgagacaatattcacatatcttatgactttgcaa

SEQ ID NO: 132180 - DNA, 256 bp, Glycine max
  Clone ID: PAT_MRT3847_90366C.1
ctcacgcttacgcaatttaaaaaaggactatagatgggtactgtaaatggtttgctgggaatttagcatctggtggtgctgctggggctttctttctgttgtttgactattctttggactatgcccgaacacatgtagcttatgatgcaaaggctgctaagaagggtgtcgagaggcagttcaatggcttgcttgcatgtatcaggaaaactatcaaatccgatcgtattgttgggctttatcgcgcttcaacatc

SEQ ID NO: 132181 - DNA, 240 bp, Glycine max
  Clone ID: PAT_MRT3847_90367C.1
ctccggcttcgggtcgcggctctccgcacccgcagcctcctggttggcatcagtgggcaggtggcatgcttcatgttcccacttgcagattggcgagctttgcttgttgccttcggctctcctccgccggggtggtgtgcgtggcccactcggtcttatcattttgtccttgtggcgtagctcctaccactgctttccctactgctccagttcgcttatggttctgctgctgctaggtgt

SEQ ID NO: 132182 - DNA, 104 bp, Glycine max
  Clone ID: PAT_MRT3847_90368C.1
gtattgataattaaacaataatacctggcattaatgtgaatgcacatgttcatagaatcctgtaccttaaagatgtacgtgggtaaattgtctagagcaggaaa

SEQ ID NO: 132183 - DNA, 315 bp, Glycine max
  Clone ID: PAT_MRT3847_90369C.1
gaaggaaaacaactctactaaactagagttaataacattcaatttcagaattattttcacttgacacataaatgcttgaaacaaacaagtgaacaacgtacgtgaacatatgaaagctgcatgttattaataccaaacactagaatagctagcatgtcctcattatgtggagagtgcaggaatattaatgtttttatggaaatccaccttcagctccacctcaagctccaaatttctcaccggcaccaccgccgagtccaccgtcattgccaccttcaaacccttcataggatacggtggaggtggcgatctata

SEQ ID NO: 132184 - DNA, 2333 bp, Glycine max
  unsure (1)..(2333): unsure at all n locations
  Clone ID: PAT_MRT3847_9036C.1
ccacgcgtccgctcaccgccaagccactgcacagataatgttcccatggtatgattcagagagtcacgtcgttgattattggagcaagcacgcacgctatccttatctatctcttctcttcttattgctcattattacgcgtctctctcgtgtagtatatatatacgtatggtactgttctttcaatcattaaactcctttatatttacacacacatatatacctctcctcctaatttatatcccaagtttccacctatccaatttcaccgttgctagctcctgtttctttcttttttgtcggagaaaatagtgatagtaatgtcgggtgaggagacacagaggaatgtgtttggcgcggaaacggcgtcgtccttggtgaaggagctgagggacaacttcggtaaaggaaccacgcgaagttacgaatggagagtgtcgcaagtgaaggctctattgaaggcggtggttgaaaacgaggaccagatcgtcggtgctctttgttccgacctagccaagcctccgctcgaaaccgtcgtctacgagattggtatgtttaaaaactcatgtgaagtcatactgaaggaattgaaacattggatgacgccagaaaaggttaaaacgtcaatcagaacttttccttcttcagctgaaatagtacctgaaccgctgggtgtcgtgttagtcatctctgcatggaactatccaatcttgttgtcccttgatccagtagttggagctatagcagctggtaatgctgtggttctaaaaccatcagaaattgctcctgcctcatcatcattattattaaaattgatagagaagtatatggataactcatttataagagttgttgagggggcagttgatgaaacaaccgcactattgcagcaaaagtgggacaagattttctacacaggcaatggaaaagtgggaagaatagtgatgactgctgctgcaaaacaccttacaccagttgtgctggagcttggaggaaaatctcctgttgttgttgattccaatgtcgatttgcagatagcagctaggcgaataatttctggcaagtggggattgaataatggacaagcctgcatttctccagattatgttataacaacaaaagattatgctcccaagttggtggatgccctaaagactgaattggagtcattttatggaaggaacccgttggaatctgaagatttgtctcgaattgtgagttccaaccactttgctcgcttgtcaaagctcttgaatgatgataaggtttctggcaagattgtttatggaggcgaaaaggatgaaaagaaattaaggattgctcccactattttattggatgttccgcaagattcttcgataatgggtgaggagatatttggtccattgcttcccatcatcacggtcaataagctcgaagaaagtatagatgtgatcaactcaggagcaaagcccctcgctgcatatgtatttacaaccgacaacaagttcaaggagcagttcgtaaagaatgtttctgccgggggtttgctcgtcaatgacactgccttacatcttgtggttgataccttgccatttgggggagttggggagagtggaatgggtgcataccatgggaagttctcttttgatgcttttacacacaaaaaagcagttctttatcgcagttttgctggggattcagcaataaggtacccaccatacacggatacaaaactgagattgatgaaggctctcgtcggtggtcgtatcctcggaataattcgtgctcttttcggatggtcctaagcttaacttgttttgaaatctagctattttttatgtatctttcgttctttttttttttgtacttcatcatgctgtgtagctttattattatttttgttgttttagaagaaaacaaataagcgagagtattgtgcatgaaaaaagcaaaatgatcaatgctacttttcttcgtgatcgtgttagatgtcttgtggttgtaaattgtaatgtggctaatgccttttagaggctatgcaggctgtgatactatataatactgtgtatatatgtacatattaacatgcctttcacggaaagacaaggtgcatgctcttatgtatgtcataaatttataatccagattttgctagcgaaaaaaaaaaaaaaaaaaaaaaaaaaaaaaaaaaaaaaaaaaaaaagaaaacaaaaaaaaaaaaaaaaaaaaaaaaaaaaaaaanaaaacannaaaggggggggcattctagggaaaccaggtttaattccccggccttgcgatctaataactttttctttggggaaccccgaattgattccaatgcccgtggt

SEQ ID NO: 132185 - DNA, 320 bp, Glycine max
  Clone ID: PAT_MRT3847_90370C.1
aaatctggaaagacagaaaagaagaaaagaaaaaatgcggaaaggaaaaaaaatccacgcgtccgtgaatctaacggtatatagtgttcactcattaatttaatgtgttgaattcgcaatgtcaagtggaaaagcattattattcaacttttcattctggccttcacgcgcgggatttcgtttctataattcataccctcccattatacagagggatgcgtttaacagagattactaatattttactttttaaaatcatgtaaataagtgtttatatttttcattaataaaaattataataatataacatttaatgcatt

SEQ ID NO: 132186 - DNA, 322 bp, Glycine max
  Clone ID: PAT_MRT3847_90371C.1
cttcaagggagagatctgcgcatggttaaagttaatgtagcatgtcctgctgttgagcttgcatgaagttaccctctaacttgatgtggtggaatgatggttagctaaaagactgagggattattgtcgagttgttaggaagatgacttacgatgctcataaagatcactagccccaagaaaaatgatagttcgagggaaattttttcttggatattgaatcatactctaaattggcaaaagtttactgtacaatagcacaatttgttagtggacaaaactttcaatctgaataataggtgctagctcacatttttcaagac

SEQ ID NO: 132187 - DNA, 327 bp, Glycine max
  Clone ID: PAT_MRT3847_90372C.1
ccacctttacggatgccttttcatttttgccgtaacctgcggaaatgcatcggatatgagggctgtcacggcgggaccaagagccgaacccgtcagctgggagaggggctgatcttgctgacttacggaaaagatgaggctggttggcaacttgcctggtcagggggcactgattgcccagcgggccccccggggcctcagcccggtgcgtctaacataccactcatgggaggcgccggcaggggcaaagcgaccgcgtaagaaaagcattggttggcgatggctcctgctcatggacactctttgtgtttactgcacagatctgtg

SEQ ID NO: 132188 - DNA, 525 bp, Glycine max
  unsure (1)..(525): unsure at all n locations
  Clone ID: PAT_MRT3847_90373C.1
ggctcgagagctcatctttgcttacacattcattaataataatgtctaacatccacactgcaacaggcagcatgaaaaggttgtcaagttatttgcattccctatcccaaacccctcacaggctcagaaagagaatgctagccacttggaccccagaacaggaattcaaccaagtgaggcacagatctggtgctgacatgaagaggaagctcaagtggcatgatcttgtggctcttggtgttggaggaatgcttggtgttggagtctttgtcactactggctctgttgcccttcaccactctggtccttcagtcttcatttcctacatcatagcaggaatttcagcccttctctcctctttgtgttacactgaatttgctgttcaagtaccagttgctggaggagctttcagttatttaagattaacttttggggaattcttgggatattttgctggggcaaatatactaatggagtatgtgttctcaaacnctgccgtggcaaggagcttcacagaatatttga

SEQ ID NO: 132189 - DNA, 1007 bp, Glycine max
  unsure (1)..(1007): unsure at all n locations
  Clone ID: PAT_MRT3847_90374C.1
tatnnatgctgaatcacaccttatctgtgcatttagatcagcttctttggtagtatttgtaacaaattacaattactgagagagctgttgataaaaagcaatttgttttcctaaaaactaatcaacgccaaacatgcactgtattattccaatcagcatgttgagcgcattaacatcatcaaaggcattactgtttcctagcagtaattggaagctgcaatgttaattccacaacatgacaatctggggcaccctgaatatacgttcctcccgactctcctcatcaaacttggcaacccacttgctcctgcttattctgctacgattttctctgaccccaactctcttatcagtttcatcattcttgcaaagcacagtcacttcaatacctttccctataggatgtttagagatctcactgctacttcctcatctcgtagggttgacatctagcaagttgaacaaccttgcatagttttcatctttgcagtcaactaaggagaaatcaatattctcacaataaggcaatatcttggatggatcttcagttcgaaattctacttggtctttaagccctgagttcttaataacttcttgtgactcatcaaggaccggcaccggaagtatagacaccaacctgccaccagtttgtcttgcagcagctgcaagggctattgttgatggagacgctcgagatgccacttccacaataagctttgctttcatcccagctgctaatgctgacacaaattcattgcttccttcttgttgcactccccaagagccgaattgtcttttctgattgttacacttgatttgcgccttctcatgttattcaagaaagatgaagaaggtttaaaagaagaacggaacaacatgcatgcttgtacaagagaaagatgtggggaatatccaccaaaattaagcaagcactgaatatccaaagatttgaagtagtaattaagaaaggatggaaggaaagtgaagaagacaaagagtcagagata

SEQ ID NO: 132190 - DNA, 177 bp, Glycine max
  Clone ID: PAT_MRT3847_90375C.1
tttttcttttttctttttttgaaaacataaatgacctttcttatataatgctcgtggcaatatgattcacattttccatatgcttggacctgattgcaacccccaatttaccattgtgataactaaattttaagttatctatttacaagggcctaagagggaacatgcgaggaaaaa

SEQ ID NO: 132191 - DNA, 249 bp, Glycine max
  Clone ID: PAT_MRT3847_90376C.1
gcgtcagcgtctgactaggaatgtcggccgcgcaggctacctccccccattgtggcctcttgcgatgaagagcagcgaccttcctccgagcaacacacagaagaaggagcttcctcttgggaagaagcttcttggcccagaagatgacgacgacggccaacctcccacccttcctttcgcttccgcctaccccccacccgaagccggcgtcctccgactccggcgaccgacttcgagcccaccgaagta

SEQ ID NO: 132192 - DNA, 792 bp, Glycine max
  Clone ID: PAT_MRT3847_90377C.1
agctcggaattcggctcgagccccattcaatatgtttcaatattccgcaggtgacatggaatttaagcagaataggttcctttctgctgaaaagcaaatggtgacagccaatccagacatcaatactgttgaactttgtgatgaagatgaatttatagtgctggcttgtgatggcatatgggattgcttgtcaagccaacaattggtagattttgtacgtcaacaactgctcttggaaagtaactttctgcggcttgtgaaagagtactagatcgatgtttggcacctacaataactgttggtgatggatgtgataacatgaccatgattttggtgcagttcaaaaagctggctcaaacaagtgcaccagcataagagctattctcttcaaatgaacaagctacatcagaattaagactagagagcagtggaagttagtaaattttgagcagcaacacactacacacatgtattgtatagtgtggaccactgctttcttctgcttagaatgagtctagatggtcattttcacttcaagtaacatttatttccaaatttatgtgtttactttcacacctagagtctgttttctttgttcaataagcggctccaaatgttagtatctatagctattagcaacaatctgcaggcattttgtgatgtttaattgcttagctagttgctatcaactgcatgcaaggattttggttctaacttagaatgttgtatatatggtatatctcatcaagtgaccttgttatgtaggctgaaattgatttttcatggatttaa

SEQ ID NO: 132193 - DNA, 1643 bp, Glycine max
  Clone ID: PAT_MRT3847_90378C.1
gtttgttcatacttctcagttatcaatagttttaaaaaaaagaagaagaaaaagttaaaaaagttttcctcatgaattgttgcttctcatatagttttttcttttcccactttcaagttagaatacacagaattatgagctgtgaactcttattattcatttaatgttcatatgatcatctgggtctttcttgattatggagtctactaccttctgtcgataatgggaacgaatctcagcactcccaaaactgagaagtcttctgatgatggtgaaaatgagcatcttagatatggtttatcatctatgcaaggctggcgtgcaacaatggaagatgcacatgctgcacatcttgatctggatgcatccacttccttttttggtgtttatgatggtcatggaggtaaagtggttgcaaagttttgtgccaagtatcttcaccagcaggtgctcaagaatgaagcatacatagctggagatataggaacctctcttaaggaatcatttttcagaatggacgacatgatgcgtggtcaaaggggatggagggaattagcagttttgggtgataagatagacaagtttaatggtaagatagaagggttgatttggtctccacgaagcagacatagtaaggagcaagatgatacttgggcctttgaggagggccctcattctaattttgctggaccaacttcaggaagcactgcatgtgttgcaattattagaaacaacaaactttttgtagcaaaatgccggtgattcaacggttgtgtaagtatgtagggaagggtcaaagcgtatggatttgtcgatagatcataaacctgatcttgagattgagaaggaaagaatcgtaaaagctggtggttttattcatgcgggacgagttaatgggagtttaagccttgcaagagctataggtgacatggaatttaagcagaatagattcctttctgctgaaaagcaaatggtgacagccaatccagacataaatactgttgaactttgtgatgaagatgaatttatagtgctggcttgtgatggcatatgggattgcttgtcaagccaacaattggtagattttgtacgtcaacaactgctcttggaaactaaactttctgccgtttgcgaaagagtactagatcaatgtttggcaccaacaattactgttggtgatggatgtgataacatgaccatgattttggtgcagttcaaaaaactggcccaatcaagtgcaccggcataacataagagctatcatcttcaaatgaaataagctacatctgaactaagactagagagcagtgaaagttagtaaattttgagcagcaacactacacacatgtagacacatgagtctagatgatcattttcacttcaactagcatttgtttccaaatttctgtgtttattttcacacctagaatctgttttgcttgttcaataagaggctccaaatgttagtttttatagctattagcaacaatctgcaggcattttgtgatgtttagctacttgctatcaactgcaaggatattggccccaacttattagaacattgtgtatatatatagtatatctcatcaaataaccttgttatgtgatgttggtctcacaggtgaggctgaaactgatttttc

SEQ ID NO: 132194 - DNA, 257 bp, Glycine max
  Clone ID: PAT_MRT3847_90379C.1
gtctaaggattacgtatatagaccagcctatgcctgattgcatgaagcagtacttgggacggattcagagtccgcatggggaagatatagtagcagcgtgcatgctcatgactactgttgatgagatgattgtacattctaaagccaaggtacatatcgatgcatattacgaagtgctgagatcattatctaagaacatgaatgaatcgcctacgttgatgttcatgttgaaggatgtcatcgatttgagaaagaat

SEQ ID NO: 132195 - DNA, 443 bp, Glycine max
  Clone ID: PAT_MRT3847_9037C.1
tacggatgcgagaagacgacagaaggggacaggataaagcactgacgaagcggcactgtgaccatgtccctattttttcatgcttgttagagagacaggtaaagttgctgaaaggagctgctttttctcgtgtatctgctagagctgttataggcacttgagcaatttggaaatgtcgaatttattgcggcattctttgagcaaattcactttcagtccaaacggaacaccaactgggagagaaaaagtaacaccaaaacataagcatctgagaccatttcaatgtgtgctgacacaggataacagaagcattgccgtcaagaatggcaatgattcattggtcatatgtcgggttgtgaatgggatgtggcagacgagtggtgggtggggcagaattgatagggatgatgctgttgatgctatgcttaaatatgctgatgctg

SEQ ID NO: 132196 - DNA, 119 bp, Glycine max
  unsure (1)..(119): unsure at all n locations
  Clone ID: PAT_MRT3847_90380C.1
cccatggcntgaccttgagatcggacctggngctccaattntcntcaattgtgtgattnaaattgggnnagggancnaggngaaatntgnactggacacaaagtcggggctnatcaang

SEQ ID NO: 132197 - DNA, 330 bp, Glycine max
  Clone ID: PAT_MRT3847_90381C.1
ctcgagctgtttgcacagtccagaggaagctcgtcgtcggaaaatgaaaagctctgtgtcgcatcgaatgcttgaaaaaggctgatgtgcttcccatagcacaaatggaaaagttccattcgtggcaaaggatgttgaatgctcctgattaaaatgataattttgatctactgttgagcattgattggttgggtttccaaggagcaggcaaagtttttccaatcaggtatgttttcgatgataacttgtgttggctaacacacaagaatgcgtggggggaaattttccagatggtttttttggataccaaattttgtgaatatgtctttt

SEQ ID NO: 132198 - DNA, 538 bp, Glycine max
  unsure (1)..(538): unsure at all n locations
  Clone ID: PAT_MRT3847_90382C.1
ccgcgtccgggaaatgttctgatgtatgaaattcttaattcttgatgcatgtgatatcagtctgtagttttgtgacattcatagtcagatggtcatctttttttgtttgtttgtttgtcagtcatttgccaaatatgatatgccatagagtcacccaaaactgaatgaggacttgtattgttgatgcaatttagaatttgtggcaaaaattcaatagaaggtcctttgaatttctgcatgcatgcagtagaatagtgtatattttcaattctattcaatagtttttttaaatttgtgtttgcttatgtctcctgatatgggaggtctttcttttttgtcttatactcttgagaataagtgaaatcatctgaggctgttttatagttatatagagggttagggaagtgtatttatgcttaacttaattntttatttttattttttgcagtaagaaatattaacttcctgttaagttagatatattgngcatgaaattctatctatatatatgcatatgcatacagttgatttctaaccc

SEQ ID NO: 132199 - DNA, 243 bp, Glycine max
  Clone ID: PAT_MRT3847_90383C.1
cttcaagaggatctccatttaactctgcacccagcttacaaacacttcattagtgggcatcctaacttcgcaaaaggctcgggaaagagccactttcacttgggaggccctacgctccgaacgtgaaaacaaagctttggtcacttacgaagcgtgattaccatactcaatggacaattcttgcttcaatagtaacaggagggatcacattcattccttaaatggcaatgcccctataaaaat

SEQ ID NO: 132200 - DNA, 410 bp, Glycine max
  Clone ID: PAT_MRT3847_90384C.1
ccgactcgtatggcgatatcaattgtgacactggatggactgccgcccgaacggacgatgttcaggatgcagttgaggggacaattgactggcaggaatgcgttcacaggagctattgcgttacgtatccacaaaagacttcagagaaaaatagggggatggaaaagctgactgtacaacagggtacttcccagggcgctaacagaatggctatatgtatggggggaggtgttggggcaggaactgctgctctgatggctatgctcaaggctgtgctttcagcggggagataaatggggggagatctcgtcggagatgttgctaagatgacttctacctacactaaatgctcagtctattgctcaatagcattcggcatagcggctgatgacaccattgatgacgcggtc

SEQ ID NO: 132201 - DNA, 234 bp, Glycine max
  Clone ID: PAT_MRT3847_90385C.1
ggctcgagctcaggccctgctaccatttcttaatatatttttcgcaacgcaacaaaaacactgggagcaggggcgacactgcttcaatagtaaaatatcagcgaacaacattccttagctcattgctgtgccgtcggctacgttacgctatcgtccctacgtatccctacgctaacccgacggcgcaagataagagtccggagttgttggagacaactatcgccgatgctttcc

SEQ ID NO: 132202 - DNA, 345 bp, Glycine max
  unsure (1)..(345): unsure at all n locations
  Clone ID: PAT_MRT3847_90386C.1
gaggtgacttgttataaaacacttcatcactttgtgttttggatgtggacgtagaataatagatctgtattctgggtttgagctctagacttcttcatcctcttcttcctcttgaaatgttctcactccatcagaaatccacactttcaagattatgccttctgcttattctggttagcacatgatacataccagtcgcattagctgatgcaccctttctcaatcctctaagctagactgaaaaatctgtgatatcatgaaaccccacagagtctanctcgatatggaatacctcttcagttctcgcatcatggatcgaacccaagtccacaaactgatttgggc

SEQ ID NO: 132203 - DNA, 421 bp, Glycine max
  Clone ID: PAT_MRT3847_90387C.1
tttttaacaaatattgaaagcatacattatttctccagttaaaaaagaatacaaggtgtaaaataaatcctcactcgtatatatacataaactcaatgaacaaataaataaagaataaatcatatatcctttctcaagtagttcaagtaaataaagtaatttcccttcctacacactctcaaaatcaaccctttactcagttgtttggaccttagctccatcatcatcccctgcagctaagtctggtttaatctcctccaattgctgcagaacttgctgaacttcaggcctagcagctggagaaggatccacacaatgcaatgctaacttcaatgtgttaagcaattcatcccctatggctggtgcatccctcatgagctccaaatcaaacacttcattagtccactcttccttaactatg

SEQ ID NO: 132204 - DNA, 1409 bp, Glycine max
  Clone ID: PAT_MRT3847_90388C.1
gagggaaaaacacaattacagtaatatcattgaatcaagtaaaaacaaaagcatcatcatttcataagatgaagaacttgtttaacaaatattgaaaacatacattatttctccaagttaaaaagaatacatagtgtaaaacaaaatccttgctcgtatatatacataaactcaatgaacaaataaataaagaattaaaacacatatcctttctctagtaattaaagtaaatgaataaaaataatctccttccttaacacacacacacacacactcagaatcaattctctttactcagtttcttgggccttagctccatcatcatcccctgaagctaagtctggtttaatctcctccaattgctgcagaacttgatgaacttcaggcctagcagcaggagaaggatccacacaatgcaatgctaacttcaatgtgttaagcaattcatctcctatggctggtgcatccctcatgagctccaaatcaaacacttcattagtccactcttccttcactatggatgccacccattgtggcaagtccatgccattggttggctccccaggcggtttaccggtcaagagctccaacatgatgacaccgaggctgtacacatcagtctttgtggaaggcttcttggtctttgaaagctctggtgcattgtagccgagacttcctgcagtagcgatgatgttggtgttggcagaagttgtcatcagccttgagaggccaaagtctgttatgtgggcttctgtttgctcatccaatagtatgttgcttgatgtaaggttcccgtgtacaatgttctcttggttgtggaggtagctcaagccgcgagtaactccgatggctatcttcatccttgttggccattcaataacaatttcaggcccgcgagcatgaaggaatgatgctaggcttcctttggtcatgtaatcaaacacaagaagcttctctccttttggtcctaaatagtaggctctaagtgccaagagatttgggtgtctgattttgccaagtgcagcaacctcagtttcaaactccttctgccctttagtagtcttttccctcaacctcttcacagcaacttggttaccatcttccagtgtcgctttgtatgctgtcccaaatgcactttttcccattatctccgcagttgcacacaaaagatcatcagcagtaaacacaaaagggccatcaaagtgaactagtttcccaccagcttcacctcctgattcaacttcaccaccagctgaggcacctttctcaacacccctggcagatgctgcagccttagcagtcttgctactctttctgcttgaagcagctcttcttctgatcaaacaacacagcaagaagcagcacagtactaacagaatcaacaagagaatacctgcaactctcgagcc

SEQ ID NO: 132205 - DNA, 289 bp, Glycine max
  Clone ID: PAT_MRT3847_90389C.1
aaggagattctcaaaaaccgttctaattggcattataaggcgaattagttccagaacgaacactctctggcatagcatatttctttctttgtcgtacaacaccgagcccaaaagttaccttacagcccctctgcttgtatatatttcccctgccataaaaaacgaattaaacagcgggtacgtttccctactccaaagcccatgtattgaaccctgaagccatgatgggaccattaggtcatcagtgtcttccacgaactctgcaagcgtcttaacttttcccccaact

SEQ ID NO: 132206 - DNA, 264 bp, Glycine max
  Clone ID: PAT_MRT3847_9038C.1
aaccaattaaattatttttttgatgttccctaaagtaatttttttaaattaagggtcatacaaattaagtttattatgaataataaaatttacaatgaagggattcaaaacgctcttaagctcacttaaccccaactcaacaaacaaacaaaaaaagctcacttaatccaaaatacaaagttcccttataaaggaaacaacaagtaattgtctaactgaaaatggtttccacataaaaacataaaacaattaccgttacaatac

SEQ ID NO: 132207 - DNA, 324 bp, Glycine max
  Clone ID: PAT_MRT3847_90390C.1
acaagaggaacagcggacagccgggccaacccaggcgcgcccagcaacaacccagaaggccgacgggcgcccatacaagaaggctatggtgcatgatagttcagcgtctacaataccaggcgattatgtcattggtgttaagttggcaaccataaacaatatgtgtgcatatgggctcaatcctggtatttcaggttctcgtctttagggcaccattcctcaggccattttcacagcaaactgtttcggaatcaatggcaacagtgagaacaccagtgaattgggatcctagcaagcagagcctttggcaattttctattgacc

SEQ ID NO: 132208 - DNA, 378 bp, Glycine max
  Clone ID: PAT_MRT3847_90391C.1
agattcgtgatttttttaaaaacaataacgaatctccacagtaaattgatttaatgaatcctcgttaaccacatcatcgtcaccaatgacatttgtatacatggcacatcaaaatccttatgggattaggagagcagcttttgcaagtgctcagttgtcaggtgtggttgctgatggcgcctcatcagggccaggttatgaatgttcggccttggcatcctcatcacatggggcctcgacgatgtctgccatgcgagaatctgaatcaacgtcacttggttcactgacattgccaagtggtaacgccgcactcgatgttgtacgccttcagggcaacgtcgcaagcaagcgtttcgttgatgtcttgattgggggtgg

SEQ ID NO: 132209 - DNA, 367 bp, Glycine max
  Clone ID: PAT_MRT3847_90392C.1
gccacgtttgggttgaggcctgctatgttgggacagggagaaaaagctgcaaaatatttggtgtgcaaaattgctgtcttgcaattcgaacaatgggactggccaatctcatcctgagaggacgtaattttctggtggagttcatgacgtaccaattatgagcggtgaaagcaattatgttaggatgcaagatgtgcccattgagtatgatgcacgtgcaataacaaagaattgtcgctcagtgtttgaggccaaagttgggaagtacattaaacttgtggcaatccatgcagatggagacaatgaacaactggcatatggttcactgcttccatatgaccagccagataggcttgctgaacatgct

SEQ ID NO: 132210 - DNA, 378 bp, Glycine max
  Clone ID: PAT_MRT3847_90393C.1
aaagggccaaaataaacctaccaaatgggggttgtttccatttttctttaaagtccatttttttttaaaaaaacaggatttttttttttttttccaacaaaacttgtttaagtagatattttttatccataaaattaaaaaccattatttttgccccatccccatgtaaaagttattttttaaacattttaaaaatggcaaacccaatgggcggtaccaaattttttttcttttccaaacattgcaaagttttcctgagcccagggggggggtcccatcacaacacagggttttgttttttaaaaataagaaccttttttttgacttttaggacagtggtgttttttttcccaagggcattcctttgaggggcaaaaa

SEQ ID NO: 132211 - DNA, 293 bp, Glycine max
  Clone ID: PAT_MRT3847_90394C.1
gggacgattcacgcgaccggtagattgactgttcgctctagaggaagcaggttcggttccgacgagggcggagctgtacaagttggacccggtgccgcaactgcaagccgcggccatggcctcagattctaatcaatctgaaaaccggggcgtttacgggaaaatgcgcgaagcaccacaaagggctggttcagggagggacatgggactatgggtccgctcaggaggaaatggcccaggggaggcggtcttagtatcaaagagagagagccctggcatggcaatttaagcgc

SEQ ID NO: 132212 - DNA, 252 bp, Glycine max
  Clone ID: PAT_MRT3847_90395C.1
gaagacataatgatttaaaccgaggtgaggggatcaacacgcggaacagaattatcccccctcttcaactaatgcaaaattgtcggattcccgtgcagtaaaaacatactggaagacccactctgttccatttagctcacattaacgatgctattgttgttaacaacccattcgtcatctctataacgcatcagccttttatgaatgactatcataaaggaaccccgctttctacctcttgaattgaatacg

SEQ ID NO: 132213 - DNA, 657 bp, Glycine max
  Clone ID: PAT_MRT3847_90396C.1
gttatcaatcattttaacattatcagcgttctgatgaaaaggtagtaaacatttcaatgtcaaacatttttaagaaatttactaaaaagacactatcatgaaatatccattaatatagtaaaagatccttcaaataaaagctatattcctaggaccagactcaaatagatgtcaattcacatttggttcaaagttctacatgtctttatccacataatgaggaattttactaaaaagacacatttggttcaaacttctatcatgaaatatctattattttagtacaagtaggaaatatatgataaactcaaatagatgtcaattcacatttggttcaaacttctacatgtctttatccacataatgaggtcgttggagcaacacctagatcaacaatctgaaacctgcttctaaattttcactgtttctcaatgtaccgaactgacgaatgacatccaattttaagggcatatacttaaaagatcatataaaagagcagcatagttcttcattccaccaaagatgtagataccaaaaattgacctgacacaaagcctgttcaatatactctttccaatatactagtagtccattgagaagacaaagtgacaaagataaattcttcaaaaacatgggaacagctcccaatacccttga

SEQ ID NO: 132214 - DNA, 211 bp, Glycine max
  Clone ID: PAT_MRT3847_90397C.1
ggtctgcaaaagagaaggacagctctgtcgacaattgcggggcggcgaaaagctcatgggcttgccctggcactggtggaagagttgccttgcttgcggaggaccattagtgctacggatataaatgatcagattgatttactggggcacattgaattttttgggcaacaaagcgcaagtaaagctcttccgcactaaattgacatagaag

SEQ ID NO: 132215 - DNA, 418 bp, Glycine max
  Clone ID: PAT_MRT3847_90398C.1
tgtatctactagggcaactcatatgctatcgcttactaaagtacgggaggcttgtacgaagatagttcagagaatttctcccaaaactacccatggagctcttggagacattgatcatggtcaaactttgatatacaacatgagagtgaaagctggaaggggattgtccctggaagaactcagggcagcagggattcccaaaaagcttgcaccaacaattggtattgctgttgatcatcgccgcgagaaccgctctttggaatgtctgctagctgatgtgcggaggctgaaaacctgcgacgccgtattgggtgtgtacccaagacggtcacagtaggctaaggcgtgtgattctactcccgaggagcgtgcgactgcgatgctagctccaggtgcgactttgcctatggtgggggag

SEQ ID NO: 132216 - DNA, 279 bp, Glycine max
  Clone ID: PAT_MRT3847_90399C.1
caaccagttatttcaaaatttagttacaatcattgggtcttattctctaacattgatgtcttcattttttctatttttttggacatgcaggcctccagtcagttttctttgtccattgtttgtttctgttcgggtaatgaagagtgattcccggtccagcaaccagcgatgtctcgctttttgggttttgtattccttgtgtatgatcatggaaggggaactttcagtgctatttaactgcctcccatggtggcctcatgtgaaatccatagcaactat

SEQ ID NO: 132217 - DNA, 479 bp, Glycine max
  Clone ID: PAT_MRT3847_9039C.1
agactctggtatgttcctctccatactgaaatttggtgtttctgttgtgctgctatgttttaagtttaataggtttggtcctccttgcagccagcgtctttaattttaatgttgaaaaatattcagttttgtttgctcaaggaaataaaatatgcatggttgtgggcctagatgctgtctaggaaataaaatctgtaacctctgtatttgtgaactttgtaatgcgctgaaattagagagatgccaaggtttaattctttgatcaaagactaattattagctccacctctcatgcaataggaaaacacttctaaatacattgccataattttttttaagaataaaaaccaatttgatgtatagtccaagttttcctgggacaaagaacatgctttcttttgttagaaagattttatatgggtcttgtggactgactgccagggtccctatactttgtctcatctttgtctctatacctc

SEQ ID NO: 132218 - DNA, 219 bp, Glycine max
  Clone ID: PAT_MRT3847_903C.1
tttgtttttaaaaaaaagggcaatttagatgtgtctgtatcctccactccactagcaacatcaattccaactttgatttggctccgaaagaagtgaagtcatcagccatatctcctctcttggcaacatggccgtcgctacggaaccatataacatcattatcgataccctccctggaattgatgatcctatggcaatattccccgctctccaaaaacc

SEQ ID NO: 132219 - DNA, 180 bp, Glycine max
  Clone ID: PAT_MRT3847_90400C.1
ggctcgagctctcctggagcctttcaggagataatctttacaggatcatcttcatgctctcaagttcctcgaatcttaggctatgggagagacttacccacccaagagcgctgatgaccgaaaggcccatgataatgcgaagaagaagctcaggggctgcctccgtctaaagagatgcgc

SEQ ID NO: 132220 - DNA, 466 bp, Glycine max
  Clone ID: PAT_MRT3847_90401C.1
atcccattttgagctagcaattgcacccacccaccgagtcctgaaattgctcaacaatttccaagtcaattccatagacgtagacaatgatgatgattccgccgacatactcttcaataccccactacttccaccaccacacgctgcgcccaaatacgtatacattgcgggttcttgcagaggatttatactcttggaactcgtttcggacttaaattccattcatctcgtcgtatggaatccgtcgacgggtctcgtgaaacgaattcaccatgttaatcatttgaatttgtttgatatcgattcacatctatgtggcattgggtatgactcgtcaaccgatgattatgtggtggtaacaatggcatgtcaacgacctggtagggtggggaattgtttatctttgagaaccaattcatggagcttcaccgagaagaaacaactaactgctgcttatgatgataat

SEQ ID NO: 132221 - DNA, 272 bp, Glycine max
  Clone ID: PAT_MRT3847_90402C.1
ggcttaagggagtctgctgatcgatataactagggaccacgggattaatatgaagggccttgctttcttcgttcctacaaatttggtaacatgacaatgccatgcgtacgatatgttccctatccgaatgaacactgcctatcgtgcccttactcctaaggcgaaatgcgcaacttggatgcttgctgtgcaagcacacaacatgtttgtctttgagaccattcctgaagagtgcgccccatcaacataggaatacattcatggcgaacatt

SEQ ID NO: 132222 - DNA, 853 bp, Glycine max
  Clone ID: PAT_MRT3847_90403C.1
ggctcgtggcctatactattgcattggtgggtcactcaaaagtggctcccttcaactgctgtcatagagaatgaaggccacctgtgattggagtctcaatgggttcatacgctacttggagttgtctaaagtatttgccccacaggcttgcagggttggcactgatagcaccagtgatcaattacaggtggccttcattccctaagagactgataagggaggactacaggaggaaacttgtccagtggtgtatgtggcttgcaaaccactggcctagactattgcattggtgggtcactcaaaagtggctcccttcaactgctgtcatagagaagaaccctgcatttttcaacaaaagtgatgtggatattctaaagacaattcctgggttccctatgcttacaaaggacagtttaagggaaaaggctgtttttgacactcttcgccatgactggagggtggcttttggaaaatgggaatttgacccaatgaagctaagtaatccattccctcacaatacaggttcgtttcacatttggcatggctacgaagataaggttgtgccctctgaactccagagatttgtttcagggaagctgccctggatacagtatcatgaagttccagatggtggccatttaattatatactataggggcttgtgtgaggccattttgaaggcacttttacttggacaagaaaatgttgcatatagatctaaagcaccattatttgaatcttaatatgccatgatttcaaaatctaatatgtatattattagattttttaaaggaaactgtcaattgtataaattacatttgtttggcaaataaaaagaatatgtgtgaattgc

SEQ ID NO: 132223 - DNA, 263 bp, Glycine max
  Clone ID: PAT_MRT3847_90404C.1
tttttaacttaaaagacaaatacacgcaatattttataggagaaggccaactttgcaattgaagactcccaaaaggctaactctaaaagtgcgggtcagtatcaattattgtgtatggtaatggaatcaaactttgatatcaacagctggacctccaataattaaacgctccttttatcctgtgaacgaacccttccaataatctttaggaaaaatttacaatattcatttttattattagaaatcacccttcctcgaaaata

SEQ ID NO: 132224 - DNA, 642 bp, Glycine max
  unsure (1)..(642): unsure at all n locations
  Clone ID: PAT_MRT3847_90405C.1
aagcttaaaaattannnatctaaanntnaagacacgacgaagctcggaatcggtcgaggcaacatgctcgccctcaagtccatcctcttcctgctcccgctcttcatcgctggccgggccaacgctgcgcccgcgcccgtcccgagccgaggcgtcggcgcgaggatgaacgacacgccccccgtgtacgaggttgtctctgacttcgactaccagtcgttcgtcgtgggcctgaaccaggagtggatcgagctcgatctgttcaactacggtgtcgcccgattctcccccgaggagttcgccgaggccggtctcggacccgatgacatctcgttgatccagtttatggccaaccaggagatcggccacgccgcgctcttgaccaacatcatcaacaacggcggccgacccgccccgaagcagtgccagtacaagtacgactttgacaccgtccgagactttgtcaacttctgccagaggctcacccgatggggagagtccggagtgtacggcttcctcccgcaccttgactcgcgacccgccgcgcagctgcttctccagtccatcaccaccgaggcgcgacagcagatggtcttccgccagttcttcggcgcgcaccccatgcncgtgtggttcgagagc

SEQ ID NO: 132225 - DNA, 425 bp, Glycine max
  Clone ID: PAT_MRT3847_90406C.1
attttcaggtgataacatataagctaccactttagaagatacattggggggaggaacactgggcaagtgttcaaaatttgattgatcagggctatcggattcctcagaagtcactagattgaagaatagaagtgccagggtcatctctgatctcactataacttgatgccttcatttgaacagaaaaatacctctttaaaatgagatctgattggaccctctataccttatatacctctcctcttacgacataaatagtgactactcttgctcataacctaatctcatgtgactgaccgactttacactgtgacgctctacactacatagtgtcgcagatttaaagggatctattgtactggctgtagacttccaaaggagaccggatcagtaacctgttgatgtcgagaatgacgtacataaag

SEQ ID NO: 132226 - DNA, 1833 bp, Glycine max
  unsure (1)..(1833): unsure at all n locations
  Clone ID: PAT_MRT3847_90407C.1
gttttccgtccacgctttgacaaatcgccattccctatatattccttctcatccctccttctcaaacngtttttcctttccttctcacacccacaaaactcataactcaccaacacacaatcaaagaggaaaaaaaaagaagcttcaaaatttcaatgcaatttgctgagaaaatgcaacccttgaaaatggggttccgtgagtacatcgaagctttggaggaagaaaggaaaaaaatccaagttttccctaaagagcttcctttgtcattagagcttgtcacacaagcaattgaggcgtgtaggcagcaattgtctggaacggttgcggagtacaatttgaatgcccaatcggagtgttcggagcagacatcaacggatggacctgtttttgaggagttcattcctataaagaaaagggcatctcaagaatctgttgaagaagaagatgaagatgaagaacattttcataaacacaaaaaaaccgccactgataaaaaaaaatcagattggctcagatccgttcagttgtggaatcccaatccccctcctaccaaagaggacgttgttgtgcctaggaaaactgatgttgtggaagtgaagagaaacggtggagcttttcaaccgttccaaagagaggaaaaaagtggtgatgcaaaggctagtattaataatgatgcatcagcaattggtaaagcaccctcttcaccaccagtgcctgctacaagttctacaggaccagtgagagtagaaaacaaaaaagaagagaaaggacaagctcagagaaagcaacgcaggtgttggtcacaggaattgcacaagagattcttgcatgcacttcaacaacttgggggtgcagactctgccacgcctaaacagatcagggagctgatgaaggttgatggcctaaccaatgatgaagtcaaaagtcatttacagaaatttcgtcttcacactagaagaagccccataatccacaacaatgcaagttcacaagcaggccctttatttcttgtggggaacatttttgttcagccctcagaatatgctgcagtagcaaccacctcaacagcatctggagaggaattgaccacagttactactactactgctccaactggaatatatgcacctgtggctgcacaccctccagctgtcacccacacattaccaattatgaagcagaaggagcattcacactctgaggaaagacctaatcatagtgttctttcaaactcacctgcctcatcatcctccacacacaccatcacaacttcaccacctgtccccaattgattttgatcaacttgttgtaaaaaattttgtaaacatattctagtacaaaagaaagtctctattgttattctcttagtgtatgtttagattaatttattttaagaaaatagttttattttctgtattttaactagatgatgttttcagttttcacaaataattaatattcgaaaaaacaaacatgttaaactacaaatcacccttttagctggctacactaatatttcctcagcagtaaaatatgtaactgactntttaaagcatcttggatttggaagcacgttcaacatccattaattttaaagtaaagtgttttatctttagatgttttaatttaaaaaatgagttattaattaaatggagtatagaatttttattcaataccaatggtttcattcaatgcctctagtatttctcaactcaattaattttataccgaaaataatttccttgatataaattaaatgtgggactatttaatttaaaatacaataaatggaaattttaatggaattttaaatgatctaatctgaattta

SEQ ID NO: 132227 - DNA, 329 bp, Glycine max
  Clone ID: PAT_MRT3847_90408C.1
ctcccccaccaccttcaccatcaccaccatcaccttattattatcattcaccacctacatctaaagagcatgtataccctccctactaatacaggtcacgtctagtaccaacgtcgcatcctccagcggacaactatgtgagtcctctatgacgttctctaactcctcctctaacataccattctacagcaacacctccgcattctgcagctcccgcgcccaagtatatttacaaatcatctcgacctccagtttacatctatgctcacccacctgcatttatctccagttgagttgtttctacgacgtcaccattctcgatctgtcat

SEQ ID NO: 132228 - DNA, 277 bp, Glycine max
  Clone ID: PAT_MRT3847_90409C.1
gaacagccctggtgaaactgaaagtttagggtctgcattgtctcattctgagaagcaaccggatgaacagttgattcttgtaacatgagtaaatttcctggaagactgaacgagttgtcttgaattaacgagttcatccaataaactcaggctccacagattgcatatttttctccgttgacttctggagagatagttactgtcttgatttgaagatgatacttacagttacagagcctgtctccagacttgaggcattgaatgaatctcctattgg

SEQ ID NO: 132229 - DNA, 865 bp, Glycine max
  Clone ID: PAT_MRT3847_9040C.1
ctcgattcgctcggcgaaactgtgtgtacgtgaaagcgaacactgccagaacgagaatccccgaaggataactgcagcagtggcgaagaagacggtgacgccgcttggagagcagcaatcgattccattgctcaaaccaccacctatgtcgcttccaccaccaaacacaatcacccaaatcatcatattgatgatgatgaccacaaacccaacacacaacagcttaagcactaccaactcaaggcacaaaagcttctgaatgaaatattggaaaattcaatagagatagtgagaaaacctgtccctgtcgtggagtgagatcccgagagcaatgaatgcggcattcgcttgtttaaacatgctcagccaggaatagtgtttgatcacatgaactccaaccaccaaggaaacggcctagactacttcctggaggagatattgatgagaaatcaaagaagtttagaaaacagattagatctgttgctgttaacgggatagatataatagctgcagcaaatgatgcatacaagaagtcattagctagactagaagctaaagatgccgcagcaaaagctaaagccaagagagaagaggaaagaattgaaaatttgaaaaagattaggggagaaaggtggctaccttccatggccaaggagatgcaggttaaaattcgacactgacatgttatgtctttccatgctcttaacttcgatgctagttttatgtgtaactctataactgattagcttttttttatttgttagttgagcacttgagcttgttgtacacaataattttatagaattataacttggttatgaatttttttttctttttttttttccaaaaaaaaaaaaaaaaaaaa

SEQ ID NO: 132230 - DNA, 254 bp, Glycine max
  Clone ID: PAT_MRT3847_90410C.1
ccacgcgtccgtggtgctgccctttcatggaccatctagtgattatattctttcttctgtacaaatgtttagaagtgaaaccagtagtaattgtaaccatgatttggcaactgacaaatatcaaatatgatttgttctatgaaatattgcaccataaacttgttagaagaatttgaaactggatcagctatgtggaacatttttggtcaaagtacgtataatattacgaacatatgctgatttgatacttgtag

SEQ ID NO: 132231 - DNA, 247 bp, Glycine max
  Clone ID: PAT_MRT3847_90411C.1
cactctctcctacctgccataccctaatgatgcacagttgacaaatcaaccaaactaccctcctacgaagagaaggactccctgcgcggaattcgaggacaaacacaatctcgagtaccgtcagcacaacgagtcaccagcagactacaacgaacgcaactgcagcatgcgagagctgcctatggatgattctactgacgcgtctcaaacgttgaagggactccaagaggctaaaatgactaccccc

SEQ ID NO: 132232 - DNA, 351 bp, Glycine max
  Clone ID: PAT_MRT3847_90412C.1
cccacgcgtccggccgttaacgattttttgagatcggggaactctgcatcgctgatgatgagggcaggatgcgacctttggctctgaacaacaaccctccacgatggtgtgaacagattacaatgttggagccttgatttgcgggcacgactaacacttgcacttgttcaaaactttcaattgattgctggcacccaaccagctgctgctgcacctacaccatttgaaccagctacacctgtgcacgacatgatcatccttctgtttgacatacttggtaaggacatgttcaccctcgattattgactctctctatctgcgtatcaagctttcactatatgcttgagcagc

SEQ ID NO: 132233 - DNA, 170 bp, Glycine max
  unsure (1)..(170): unsure at all n locations
  Clone ID: PAT_MRT3847_90413C.1
caacttgagtcaacatatttaatattgagatgaaaatgactgaggaaaattaaatatgttgactcaagttggcaacatatttaattttcctcagtcattatcttctcaatattaaaatgaaaattcatatcgtactacatntttacctgtggggtgatcgaatattctat

SEQ ID NO: 132234 - DNA, 463 bp, Glycine max
  unsure (1)..(463): unsure at all n locations
  Clone ID: PAT_MRT3847_90414C.1
ctatcttaatattngttgcacatataggcgactnnngnngcccttgagggcccaagaagttcaagtctctccactactaagcaggggaatcgagattagggnctctggcnnccacgcgataccccttctgggggtgggnncctcattcgaagaagaggcctgggcgcatcttacggaactacnncgagatnncgccgnnggcaagccggnngctctctcggccccgcctggtgggccttggtggtagaatcctcagaccttctgccctcaccaaatctatgaggaatttcaatccctctcaacgaaggggagcgcccatcccactggctccgtacgctgactacttgacgggccccgcaagaagggagtcccgcattctagctctcaaactgggctgatgggctgggcccaagttcaaccgggaggggcttctctcttcggaggcaatttcagggtggttata

SEQ ID NO: 132235 - DNA, 291 bp, Glycine max
  Clone ID: PAT_MRT3847_90415C.1
cccacgcgtccgccaatcgttctttgacagaaggaacaacatggtggagggagagagagtcacaacacaacactatatggaatcatcatgcataagcatcactagagaatagaaatagagagagggaaagtgtgtgtgtgtttgtgtgagagagaaagagaagaaagtggtgtcttttgactgagcctagccggcaaaagccgtctaaagttgaagtctggatgtagataaagaactttttaatgtctgaatacgcggtgtactttcagacatacccaccaccacacttta

SEQ ID NO: 132236 - DNA, 1281 bp, Glycine max
  Clone ID: PAT_MRT3847_90416C.1
aattcggctcgagctcgagccgcgagggtgtacgagacgcatatcgggtcggatcacacttttcaattcgggtcactaatcgaacgggcgaaatgcatcgatgataatcacccacgctatttagagaaggaaaatgagagtgagggtttgttgttacttttgctttaacacattacactcacactctttgtgaaaaaggggagtttcttattctttctagacgcttccattgatcggcgatttcttagacatggcggagcatcacgaacacgaggaagtgaagggtgagtccttgttggagaagatttctgggaagatccacgaccacgattcgtcatcttcgtcggattccgacaacgagaaaaccagcgcttctgactccttgaagtcaaaggttttcaggcttttcggcagagaaaagcccattcaccatgttcttggtggcggaaaaccggccgacgtttttctctggagaaacaagaagatatctgcatcgacactcggagttgcgaccgctatatgggttctgtttgaattgcttgagtaccacctcctcaccttggtttgccacttcctgatccttggtcttgcggtgttgttcttgtggtccaatgcatccactttcatcaacaagagtccaccaaagatcccacaagtgcacattccagagaaacctgttttagaatttgcctctgctcttagagttgagatcaaccgggcttttgcgttgttaagggatattgcatctggaagggatctcaagaagttcttatcagtgattgctggattatgggttttctctattttgggtagctgggccaacttcttgaccctgttctacatagcttttgttttgctgcacactgtgcctgtgctttatgagaaatatgaagatcatgtagactcttttggtgggaaggcaattgccgagattaagaagcaatatgcagtgtttgatgcgaaggtgttgagcaagatacccagaggacctttgaaagataaaaagaaagattgaagtggcactagattctgacaaatatgttttagtggggtttcatgaatgtcctgttaaatttagattcatcatcagttaaaaccctatcatgtcatattttatttttttagggtccttttactagacattgtggatgaagagtatcttgtatatttttcttctggctttacatgtacctctcagaaatcctatatgcttatggatgacttgttattgtgttgtatttacatcatgaatacatactctgcattaaaatgctttcgtag

SEQ ID NO: 132237 - DNA, 259 bp, Glycine max
  Clone ID: PAT_MRT3847_90417C.1
gcaccagccaaggttggatgcaatgacattcagaaaccattggcatgtctggtgaggcattgagcctgatactggcaccttccacacttgaggactttacaggtcaaagcttttggaaaacatcttggtgagggctatccaaagaaatgcatggtgcctgcttctcaaacgtgttttttaaattgaattgttagactgtaagcaagtacggattactcattctctctctctctctctctctctccccctcccccccacc

SEQ ID NO: 132238 - DNA, 1168 bp, Glycine max
  unsure (1)..(1168): unsure at all n locations
  Clone ID: PAT_MRT3847_90418C.1
tacggctgcgagaagacgacagaagggggttttttttttcctttctgttattacacaacacactctgtgaaaaagggggagtttcttattccttctagacgcttccattgatcggcgatttctgatacatggcggagcatcacgaacacgaggaagtgaagggtgagtccttgttggagaagatttctgggaagatccacgaccacgattcctcgtcttcgtcggattccgacaacgacaaaaccagcgccactgattccttcaagtctaatgttttcaggcttttcggcagagaaaagcccattcatcatgttcttggcggtggaaaaccggctgatgtttttctatggagaaacaagaagatatccgcatcgacactcggagttgcgaccgctatatgggttctgtttgaattgcttgagtaccacctcctgactttggtttgccacttcctgatccttgctctggcggggttgttcttgtggtccaatgcatccactttcatcaacaagagtccaccaaagatcccacaagtgcacattccagaggaacctgttttaaaatttgcctctgctcttagaattgagatcaatcgggcttttgcggtgttaagggatattgcttctggaagggatctcaagaagttcttatcagtgattgctggattatgggttttctctattctgggttgttgggccaacttcttgaccttgttctacatagcttttgttttgcttcacactgtgcctgtgctttatgagaaatatgaagatcatgtcgactcttttggtgagaaagcaattgccgagattaagaagcaatatgcagtgtttgatgcgaaggtattgagcaagatacccagaggacctctgaaagataaaaagaaagattgaagtgggcactagattctgacaaatatgttgtagtggggtttcaggaaccctatgatgtcatattttatttttttagggtccttttactagagacactgtggaagaaaagtatcttatatatttttcttctggctttatatgtacctctcaagacatcctccatgctgcttatggatgacttgttattgtgttgtatttacatgatgaatacatactctgcatttgaatgctttcgtaaatgtcgtggtaattatgtttccccanntnttannttt

SEQ ID NO: 132239 - DNA, 546 bp, Glycine max
  Clone ID: PAT_MRT3847_90419C.1
atgtttgagactaaaattaatttggggttttgtttgattatccctgaaaagtattgcggtcatcggagcatcaagtcttctagctttttcgctctcccccggtgcccttccccttgcaatttggcacccttgacatcttgggccgaattgacatccttgcccaccgcctcggccttgggtacgacgtcaagcagaattgtctcatcgtcggcgcgtaggtccgtggctcgctcatccactccaaggtcgaccctgacctccttgtcgctttcaaggcctgtagtgtcgagctcctctatgagatctgtctcctcagtgcctcgcagcgtgtcaccgccacgcgcttcctcgtcgagaatcactgcggcaggaagatcgtggtgttgtgcgtgttccgatggtgagactgaggattggggaggaggcagaggcgagttcgatggtggtgttgtcggtctccgtggcacagaagggggagattttgctgatctccacggtagaggagagacgaacaacaaggtgaaggagaagtgtgggttagaataa

SEQ ID NO: 132240 - DNA, 507 bp, Glycine max
  Clone ID: PAT_MRT3847_9041C.1
aaaaaaaaaaaaggcaatcaagaagtgaatgaaagtgaagatccaaaaattacaaaacctaatgaagtaatgaaaaacccaaatcgggaacaaaaaaaaaacacaatacacaacgaaggtgaaaggaaggaatcttcatcgccaccaaccctcgacttctgtgttcgcattcaaaggcaaactccatctgtcgcattgctattctcgccaacagccatattttctattgtttgcagatttataactcatcttcccacatgaggttgcacacagtaataaaaattatctcttacaaactcatcttcacatatgagattgcacacaataatgaaagtgacgtctcaccctccaaagcaggtgattgtctttggtttcatgtcaccgcaatggttgttccaatggctccgatgattgtgcttgcagcaaacaatggagaaaaagtaggagaaaagagtgggaataaaaaggaacataaaggaaaagtgagggagaaaacacatttaaagg

SEQ ID NO: 132241 - DNA, 875 bp, Glycine max
  Clone ID: PAT_MRT3847_90420C.1
atgaaagaaataagagaaaagacaatagaaaataaaaatagggaaattttactttatttgcttggttgttggtttattctaacccacacttctccttcaccttgttgttcgtctctcctctaccgtggagatcagcaaaatctcccccttctgtgccacggagaccgacaacaccaccatcgaactcgcctctgcctcctccccaatcctcagtctcaccatcggaacacgcacaacaccctatgcatccattgtatccctctcttcatcatttcccaatcctttattcccacgctagctcatgaaatcctttatggaacgtgcgagctcctacacgatcttcctgccgcagtgattctcgacgaggaagcgcgtggcggtgacacgctgcgaggcactgaggagacagatctcatagaggagctcgacactacaggccttgaaagcgacaaggaggtcagggtcgaccttggagtggatgagcgagccacggacctacgcgccgacgatgagacaattctgcttgacgctaaagatgtcaatggtttcttctagtcagagaggagaagccctcacgaattaaggaagtaattaagggtgcgtactcgtacccaaggccgaggcggtgggcaaggatgtcaattcggcccaagatgtcaagggtgccaaattgcaaggggaagggcaccgggggagagcgaaaaagctagaagacttgatgctccgatgaccgcactgctaggacttcttgaaggaagtgagttaaggacgtcggagatgggtttcacaaaatagcaacggtgaggaacttattaacaacttctaaaatttcaaaactaaaactcaacactcaaaactgaaactagatttaattt

SEQ ID NO: 132242 - DNA, 586 bp, Glycine max
  Clone ID: PAT_MRT3847_90421C.1
acctcccacttagccacatggagcatcatcacctaagacttattctcctactcttgttcctgttcctacccaacacctgcttctctttctcatttcaaactccttcaagcaatgaattctcgaatcaaagttcttcctctctgaagcagcagattctggagctagctaatagtcccagcacggtgaaatggatgaagagaataaggagggaaatccacgagcacccagaacttgcatatgaagagttcagaacaagtgctgtcataaggcgtgagcttgacttgttgggtgttgattacaagtggcctgtggctgggactggtgtggtggccaaaattggttatgggtctcctccttttgttgctcttagagcagacatggatgccttgccaattcaggaaatggttgattgggatcataagagcaaagtagatggaaaaatgcatgcttgtgcacacgatgcacatgttgccatgctacttggggctgcaaagatactgcaagaaatgaaagacatgttacagactactggccttccagctgtgcaaccagccgcgggtgcaggcgcaggtgcataagacatgat

SEQ ID NO: 132243 - DNA, 261 bp, Glycine max
  Clone ID: PAT_MRT3847_90422C.1
aaaaaaattggggcgttataaaaacaggcacgaaacaccaaaaaaaaaaggaaaggccaaacacaagcgacggcaaaaaaaaagaccaccaaaacaggtggctaaagaaacaaaaggcggaccaaatccacggaagaatgcaagcgcggaatcaaaacacaagttccttgaggcccatacacaaattaggggggagggacggaaagcaatcaaacaacccacattcatcgggaggaggaaatcccgccatcacagccccca

SEQ ID NO: 132244 - DNA, 510 bp, Glycine max
  Clone ID: PAT_MRT3847_90423C.1
gagagaactagtctcgagttttttttttttttttttaattatgagcagaacctcactttacaatgctgcggtcatgtactcatgtctccaaattcttaatatttcactttcatggttttcctttcatgtgaaacaactctaatgcctgattgtatcctaacatcatttaattaaaattaatcaattattataggatcgtactgctagaatttcccagaatttaaatatatattatgtggccttcaacgttgcttcaatattgggtctaatgttgttgattcaatttcacaaacaaatagataagggtcttctcgaatctcgaatttgaaggtttataagatcataattggtttgtcattgcccaccaactcaaatattggaactgttgaatattgattaagcattctctctacctctgctctaatggagaagacaggtttggtccttctcgtgggtgaaaattactcacctaagctaaaattaacattcaatgcaaagacattttattcc

SEQ ID NO: 132245 - DNA, 425 bp, Glycine max
  Clone ID: PAT_MRT3847_90424C.1
ggctctgagaaatatgaacgacggatttcagactattcagtatggaattgaatcatatacatggatcagtgggattgtacacatcttacgatgttacatgatactacagattcaatagcaaacaggcggataaatagatgaagcattagacttgcactttcagtcgatgcatgagcgagacaaatagctaatggtagctagcaatatctcgattgatataccagtaaatggtatctttcgtagaaatagcattcttgcttatgtcgatgattctcaataccgaacacagagcacgggaatcactaaatataggactattggtgtgaatgacatttttagcacggaggattctttaattgagcatgaaggaggtaaagaatttaagacagaatggcatcttaaagcatgtcaagcatagttcattt

SEQ ID NO: 132246 - DNA, 1011 bp, Glycine max
  Clone ID: PAT_MRT3847_90425C.1
gggtgcactgaccaaaacccacgttgcacttgtgggccccgtatgtggttatgctctttggtgctcagatatcgaagtcgtttttcttgtcggttttgctcgtttggaccagcttgtacttggtgttgttgcattcgagcttcacaacggcaccaagtagtggtgtggctcccaagagggtgtcaaccccagcatacttgcaggatttaacatagacaactccttgaactgcgacatagcttctagggaaagggtgcaccggagccggaggattgagaggagggtgaaccggaacaggaggtttaactggaggattgagaggagggtgaaccggaacaggaggtttaactggagggttaagaggagggtgaacaggagcagaagggtgatggtgatggtgatgagtaggagacttagcaggggcaggggtaggagggtaattgtggtgggtaggaggagaaggtggatgaacaggtgcaggtgctggtgctgaagggtggtggtggtggtggtggtgggggtgaggagcacttgctggtgggtgaagaggtgcttgtgtgggagagtgagggtgagggtaagaaggtggaagagtttcaagctcttcagcaaccacactactactcactgctaggagcaggaaaagcggcactgatgccaacaaggctttagccattgctccaagcaagtgaaggagagagagagagagagagagagagagagaggaaagttgtgttggtattatgtgagtatggcaggggttggatttataggggctgatgccgggattctctgcggtttttgttcatatctaaacaaaaaatttgaaagaaagaaagaaaagtgtttgcttattagagtaaccagtgctagctagcttagctttgcatgatgggatgggagtggaaaactagggaaaatggcaatgtgaggaaggtacatttgaaaatcagagatcccagcctcacttaattggatctctgagtctgtgatacttcaccggacgcgtgg

SEQ ID NO: 132247 - DNA, 350 bp, Glycine max
  Clone ID: PAT_MRT3847_90426C.1
ggctcgagcagaaaaggggttaagcgaggaagactgtgtagaaactagaaaccctagagagagagagagatgagaagaactcttctgagaaatgctactctctacactcgcaaccttctccatcactcggcccctgcattcgacgcttcaactcgtccccaactcagactcttctgctccaatgaaacccccccaccggttccccaaatcgacgacgttgaccacaaagagctgaaagcgcagatcgagagctacttcaagggcgacgagcaggtgcttccgtcgatcatggagacgattctgaagcggaagctgtcgggaaagcacgaagacaccgacgaccagctcat

SEQ ID NO: 132248 - DNA, 672 bp, Glycine max
  Clone ID: PAT_MRT3847_90427C.1
atcatccttcactcacttactcatcttgggcaattctgatctctccctctggaacaaggcagaatgcttctccttcacttgcatagctgtcagccatggattataccaccaactcacatccacctctcatcaattaccaacaattccaggaggtttatgccgtgccacttcagctggatcagatcttcagcattacacgtgggtcgtcttagagtgcacggtgaagggagatgggaagttgattctcacaggtcagaggttaagtcaaattccaccacttacaaacatgtcctggaaaatttgggctccgagtttgtttggatgaagaaaaataataatagtactcagggtccacaggctagaagcatgatacaatttatgtcattgtacatcatactcagaatgacccataagcagctgtataatctaatgataaaagttggccaagcagtacttccacatgtgtttcagacttgtagtgcaacaagcttgccttttgcttgtgtttctaatgccttgaataaacctaagcctcttaatttagacgtgtccttgccttctattcatgatattagatggagcttagcacggttgttatacttatttaacatccagcttgaaagaaatgttgccacgttctttggggtgctccttttagcgtgcttctcattt

SEQ ID NO: 132249 - DNA, 420 bp, Glycine max
  Clone ID: PAT_MRT3847_90428C.1
tgcttggagaaacgtgagcagcctctgctggcgcagtgtcaaggctaccagccgttccgccctcgccggggtggccgcccctcgtaattcggcagcctcggcatggggcggccgaatcgacatcctcaggagccggctgggcctctggtacgactacgcgccctgaatcaattccctatcccgcgaaggtcttggccgctgcgacagtcggagaaacgaccggcagtctgcggcgtcgagcagaacggcctcatcgtcggggcgcatgtccgggactccctggtccactccaaggccgaacccgacctcctcgatgccttggagaccggtggcgccgaggtcctgtacgagaacgggatgctgagcgcctagcggcgcggcggcgccgcgcgcttcctcggtggagaatcgctgggacgg

SEQ ID NO: 132250 - DNA, 710 bp, Glycine max
  unsure (1)..(710): unsure at all n locations
  Clone ID: PAT_MRT3847_90429C.1
nngaattcnnccgggtnncgaccctaccccctccatacggctgcgagaagacgacagaaggggatccatactcaaaatacaaaaatggagagagtagctaaggtgttggtgatgttgagcatggtggtgttggtgcttgcatcaaatgctgaagggggacgattacttgaggaagagaatgtggatcagccccagaccttccttggatcaggtggaggccttggtgggatatttccaagcccaagcccaggcttcagcttcaccggcgtgggctttggcccatctgggttttgcactttccctggtggttgcaccggtactccttctttgcccactattcccggtgctggtgggtcactaccagtaccaacacatgcataaggaaatggctttggtagaagacctatattattacttaatgctaaagtaccctagaatttgtttaagctttaatttgccttttataattatatttatatttatgtgtatgcgtctattaggttttgttcttctgggttcatggctgggtgtgatatgatttcgtacgtgtctttatttctatttgttggtcactgctcttcgatcttactggccactactgtaatagagtgttagcttctatcgttgatgctacagtttatttatattatagttatgatgatttttttttttgtttgccccaaaaagggcggccgctctnnnnnnnnnnn

SEQ ID NO: 132251 - DNA, 187 bp, Glycine max
  unsure (1)..(187): unsure at all n locations
  Clone ID: PAT_MRT3847_9042C.1
tttgctactgncttgtttttggtcatctgagcggcgagccctgctcgcagcggtagagttgtggccttgagtgactatgtagagacatgggttcggaatccggacaacaacctcttttacatatcgtagggtaacgctgcgtccaacatccctccttcataccttcgctagcacaagctccgggcaa

SEQ ID NO: 132252 - DNA, 313 bp, Glycine max
  unsure (1)..(313): unsure at all n locations
  Clone ID: PAT_MRT3847_90430C.1
gtcgcangcacgcgtacgtaagctcggaattcggctcganctcgagccgaatcggctcgagtacggctgcgagaagacgacagaanggtaaaccaataaatnntaaagttttattttttttaatacttcaaaaaaaaaaaaaaaanaaaanaaanaaaaancaaaacnnaaannaaccangataaaggancttgnangtncccaagngtgncncntccgaaggaggagcnntccaaccnatcaggcnanatggagtttncgttacgcngtcntatgctccctcntaatttgacnatatcggacattgggaatn

SEQ ID NO: 132253 - DNA, 272 bp, Glycine max
  Clone ID: PAT_MRT3847_90431C.1
acggcggcggccgggggggtggtgaggctgttcgtgcggtacttgaatgtaagtactgtggcgacgtttcgcgaaaatgggggtggtggtcagtgtggaactccttggtggacagctttggagggtgcaaagagcaaggatttggggtctttgagttctgttcgttcgcctgggtgttggaacttctgcttgcagaggcctctgtataggtatctgttgagaacgttcttgttttgccctatggcggcttcggttaaggatgtgtcacaggt

SEQ ID NO: 132254 - DNA, 488 bp, Glycine max
  Clone ID: PAT_MRT3847_90432C.1
ggtatccgtcatattaactttcaagatatgaaaccggtacataacattaaacagagagaagtgatacccacagtcctgagaccatgcatatatattaaaagcctaagggggtgccgaaatggttccaattgctcataccagcatgatgtttcagctcaagaaggaactgctaacatctcaatgtcacagactgcaaaaatattgatcttggcaggggagaactaaatcttagagaggcatatcttgacggtaaaaaatataatgtttctttttgtttcaccgtacagaacttgaacataggacagtgaggcgagctaagaggtacgaagagtaaaaagcgcgacattgaataactggtggtttactaagaattctggaggtgtttctgatggctggatttcgggcttgcagtaatactactaccattggatcgaggtttttatggttctcacgggacattactcagtaggtggcttgagaatttgaca

SEQ ID NO: 132255 - DNA, 364 bp, Glycine max
  Clone ID: PAT_MRT3847_90433C.1
caaaccaacaaaatagggcctgtggtagttcatgactaaaaaaaactacaatatactttttccaaaagggagggggataattatattattggtaatacacagggggatgaaggggaaatgtacaaaatgtactttccgtacagaatcatttgatcgagttttactgcgtttccattttcgtaaaattacttactgaaacgggcgcatatatcactggcatcttattacataaaaccttttcataccaccaagagacacttctaactgaatataactggcacgatataatgttgtcactacacttgtgaaaccagcgttcttaagtccaagacccaaatccgctagaagaatactccgagagggg

SEQ ID NO: 132256 - DNA, 536 bp, Glycine max
  Clone ID: PAT_MRT3847_90434C.1
gcaagatacaaatacttaagggttttacatttaagtgattcctcttttgagactctacccaattcaattgctaaattggagcacttgcgagctctcaatcttgcaaataactgcaaaataaaaagacttcctcattcgatatgcaaactccaaaatttgcaagttttgtcactgagaggatgcatggagcttcaaacattgcctaaaggattagggatgttaatgagccttcgaaaattttatataaccacaaaacaatctattctgtcagaggatgaatttgcaagattgagaaatcttcatactctgagttttgaatattgtgacaatttgaaatttttgttcaaagtggcacaagtcagttctcttgaagttttgatcgttcaatcatgtgggagcctagagtcgttacctcttcatattctccctaagctggagtctctgtttgtaaaacggtgcgagaggctaaatttgtcgttcaacagtgaaagtcctatccaaaaattgaggatgaaattgctgcatcttgagcattt

SEQ ID NO: 132257 - DNA, 416 bp, Glycine max
  Clone ID: PAT_MRT3847_90435C.1
cggatgtcattggtctacagctgaactggtcaaacacgactatttgtctaacctacccttctttggctggggctgtgacacagatatgaatgcgcagtgggcattcaacacgactacctttgtggcccaagaccctgcagatcttcatgttcttctggaaaccaatgctcctgataacagtgttcgcacaattactcttccttaatcgttgatgaataatttaccagctcacgacatggacctagcttccaagggtcagttcaatccttttgaatcacctgctttgattcaagtaaaaccgctgcttactgctgttggcttgggctttattcggagacgagggcatttcatttattttagtgctccaatattcttaaggctgccgtgagccatacgaattgccgatatgctgcagc

SEQ ID NO: 132258 - DNA, 314 bp, Glycine max
  Clone ID: PAT_MRT3847_90436C.1
ccacgcgtccgtacggctgcgagaagacgacagaagggggaggaagagcgaagagtgaagagaatgggggcgaagggtttaacctttctggctgtgtaaatatgcgtttcagcactgtcactgagttctactgttgcgggggaagggcaaaataatggccttgttatgaacttctacaaggaatcatgccctcaggctgaagacatcatcacataacaagttaagcttctttacaagctccacaagaacactgttttttcttggctcatggacatttttcatgacttgagctttcataagtgtgatgcttttac

SEQ ID NO: 132259 - DNA, 365 bp, Glycine max
  Clone ID: PAT_MRT3847_90437C.1
atcaaaaaaaagacatggcccaagggaatggcgcatagatcggaatcaagtacagttgtaaacattgagtccaaactaaatgaaaaatatagtaccctcatttgtttttaaacgtcccatgaaacaaatatcgactataatggtacccaccaggatgtcctaatccctaaaacattaagataaagccaatttgactaaagagatacttttttaacgagctacataatcttgacccctgcatctcataatgaccaatgcacacgaagactcctgaaaagctttaagccttgtaggctatttggttcgaaagcctgtccaaaccctcataaagacccttccaagaggctgccattgcgctctggatg

SEQ ID NO: 132260 - DNA, 304 bp, Glycine max
  Clone ID: PAT_MRT3847_90438C.1
gaatgaaactagattccatgttccaaccacagtgctacgaaagtgcgtgcgagaaagagatcacatcacacatgggctattacccacagtttcctgcacgatcatgctcatgccacacctgccagattgccatgcccacacatcataggaagtcccaatcctaaccagcttgcttccgtggcacataagcatgatgatagttacgtcagccgaagctctcgccggtcagctcgcagagtgcgcataggtgcagccgccgttggctctcaggtccaccctgatgaagcaacatatcgggacactg

SEQ ID NO: 132261 - DNA, 396 bp, Glycine max
  Clone ID: PAT_MRT3847_90439C.1
tcggctgcgagaagacgacagaagggggagtgagtgtgttaaagaagagaaggagttgaactggttgttgtattgtcgtagtgtgtcaagtcttggtgctggcttcacacacatgcaagctttgctcaaggtctttcagcaatggccgcgcccttggtgggcacatgacggctcaccttgcttatctccctctccctttccctccaaagttccactcttgtttctcttcctctgactcacaccatgaccaatcttctcgggagattcctccgcaacccttgaggcttctggaccctgcctaccctcagagcgagacataccctcctatgcccccccctcgtcacctatccaagctcaccttcaccttttccatgcccccactcattctctttcccc

SEQ ID NO: 132262 - DNA, 340 bp, Glycine max
  unsure (1)..(340): unsure at all n locations
  Clone ID: PAT_MRT3847_9043C.1
ctttatttgctattaaaatttcgcaggaatngaaggaagaggaaggctggatgatttcaaacctggtggggggctccatatatcactggattatgtggaaagggaattcaaccatgtaaaaaatgatggagaattgttagtctggttcacatattgtcttattgcatgtccattgtcaaataagatttgcatattcgacactttacccttaaactcatttagtagcttacattgtcaaaaacttttgtctttcatttatgaccacttcattacatatcttctttaccaaactatttttacttaagatttctttttcattaatttcatatattcttttctt

SEQ ID NO: 132263 - DNA, 348 bp, Glycine max
  Clone ID: PAT_MRT3847_90440C.1
aaaaacattacaacaccgtaaagactgggacacttcgaatcagggggcatatcagggttatacatgaccagcgttctcgcgcacgaatatgcccacaatcaatttaaaatgaaaacgggaccaccttaaaggatcccccaacaagcttaaaacccaaccgaaaaacggatgacaaaagtaatggcttatacattttgacacaatgtcaaatacatgggaactaactacttggcagacactggcaacaaaaaaaaaaagcatcactaccgtggggatcactcttccctgcaaactggaggcccctacaaagacactaaaccttcaagaattggcgataggggaatgtat

SEQ ID NO: 132264 - DNA, 498 bp, Glycine max
  Clone ID: PAT_MRT3847_90441C.1
gttaacaaaagaaggaaaaaggttttttttaaaaaaaaaaaaaaaaaaataaaacccacgaaaaaaaagggggggagaaaaagaaaaaaaaaaaaactctttccaaagaaaggggggggggaaaacacaaataaaatgggggggggaaaccgccgtgggtaacaaccgaaaactacaaaaaggccagagagggaaacaataatttccttagggagaaccaaaagaaaggacaggaaaaaaaaggaaaaagggcccggcggggaaaaaagggaccccacctcaatacccacaaaaaataaaccgctctaaataaaagaaacagaggcgggggggcccaaaggggggaccaaacaaaatgtttggggggcaagcacagcgccccctacccaagagaaaaaatccggctgagcttgaaagaaaaaaagcaaccccccccggggaaggagggcatccaatggaagagccccaggggagttttttttaagcgcaaggaaaacg

SEQ ID NO: 132265 - DNA, 1818 bp, Glycine max
  Clone ID: PAT_MRT3847_90442C.1
aagagaagggttttaagttaagaagcaaggcttgagggtgggtgtatgtttgagaagtaagaagcatggctcagtatggttacgcataccgaagcgctcaaatatccacctacaacactagcaatgtgagaaacattgaaactggtgcaaagccatttgctccctacgtccccaaatttagtaacggtaatggttactcagacgggatcgttaccaagaaaaaaataattccagttgctagcaggccttattatgaggacgagagtgacaacgaccatgatgacgatgaagggaagcatccacatcaaacaagcccacgtaaatttgatgacttcctcaccaaggtgcacaatgaagctaaccgtagtccaccaaggtcctccggtcacgtgacttcacctgattggcgccactcctcgcagccaaaaccttacaatggcggatatgctgactacggaaccaacaagccaattggaggtgccaataaacatgatggtcctggttatggcaacaacaaggaagggaacaagcctttatatggaggtaacactaagaattttgataaccatgatggttatacaagtcctgccaagaagaacaactttgatcatgcttatgatggatacaacaaaaatggccccaagcccaagcccatgtccaagcccaccggcagtcccgtttataatagtagttatggtggtgactatggtgcacccaagccaattaaccatgacggttatacaagtccctatgatcatgattatgatagctatggggactactacaacaaagatgggtccaagcccactgtcagtcctgtttataatagtggatatggtggtgactacaacaacatagaagggccaaagcccaagcccaagcccactggcagtcccgtttataatagtggatatggtgacaactatgataactacaacaacggagaagggggcaagcccaagcccaagcccacaggtatttccgttaataaaaatggatatggtgggggctatggtagtggaagtgcaagtccaactcgacatggcaactatgatcatgagggtgactacggcaactaccacaacaagcacggtggatcaaaacccgcttcaggctggagtgattcaccaagaaaagggatccaactaaccaaggcaacgaataatatcgacgaggccatggagttgttgatgaaagaagctgcaaaattgcgtgaatatgagaacaaggcccatcaaaatgggccaggccagtttgggagcaggcccgcgccaccaccagcaagcacatgtgacaggaccatgaatccggtgcgacaacgcttcaatttcggtgatggggggaaacgtcctgattatgattatgacaagagacggggctatggagtcatgaatcataaggaggctgagaagaagtttaatggcgtcaccctcgatcataattaaggaggctgatgaggataagtttaatggcatgcatgtccatccaataagctagcagctatagctatacatgtatgaagaattagtaacatgtactcttgttgagtaagctctcaggtgcatgtgctttcagtaattacatggtttggctttcttaagttaattaatatatgtatcaatgcttctctatatgtaataatgatatgacatgtgtgttgtacctgattttagaggcaaaagcgatgtgtaaggattgaataaatatatgtggagtgctatttaaataacgacccttgttggctatatatgatatgatcattggcctggtaagatggtcgatcaatgacatatattcatgcatcatacttatattctt

SEQ ID NO: 132266 - DNA, 329 bp, Glycine max
  Clone ID: PAT_MRT3847_90443C.1
tacgcctgcagtaccgtccggaattccgggtcgcccacgcgttcctagacaaacgcccactgaactaccttaccgagacaacattcatataatgaactggactacgatgtagaccgcaacatgatatagctgctcactaatgtccatctctaaagctgttgctccaactcctgcaggaatgatattgtcgagggcccagacgcgtcaaacagatgcttttcttacagacaaccacttggtggtgttcatactcaacatgttcaagcatgtcagttacgtcttcacattgacatcctgaatgcttccatgcagcgcctagctctgaaaca

SEQ ID NO: 132267 - DNA, 5516 bp, Glycine max
  Clone ID: PAT_MRT3847_90444C.1
atgaagaaatcctcctaccctaatcccacccctcgccgccacgattttcaccgtccgccaccacccacccacggctgcggttgggctccccgccccgcctaccaccgcccctaccaccaatggaggccccgattccacccccacgccgcccgcatcgaccgccctccggagccctatttcagggtggagctccgcctcggcagcagccccctccaccgcgacgatgtcgaggccctgagcgacgaatgccactcccggtacgacaccttcactttctaccccgtcgacgacgtcgccgccgttctcagttaccggagctgggagcaggcgcgagacgccgtcgtttggttctgggaggcgcggctcgccgagaagcacgattccactcggacgctggattccaacgtcgtcgtagtcaaggacgatgtggattgtcgccttcgaccggtgttcgcgaggcacgtgaaagggttgacggaagggaaggagctgaagcggttgatggaggagagtggacggtggtcgagagaaatttctcggtttttgaattcgcggagtaagcccttgctacgtggggtgcgcatcgagttggtggagtaatgaaaagggttagtaggtgagaagaatcttgttgacaggaatttaaaggggtttgagcctgcgatgcagtgtttattgaagtatttggagggtggtgttgacgtggagggtgtgactgtctttaggtttgatggaggttttgattggaagcggattcattgttcgatcaatcatgagtgtgagagacttgaggatggacccagttgcccaatttgcttgtgcgaggttgaggatggataccggcttgaaggctgtggccatttgttctgccggatgtgtttggttgagcaatttgaatctgctattaaaaaccaaggcactttcccggtatgttgtactcacagggactgtggagatcccatcctgcttacagatttgagatctcttttatttggtgataagttggaggatcttttcagggcttctttgggagcttttgtggcaacaagtgggggaacttacaggttttgcccttctcctgactgcccctcaatttatcgagttgcagatcctgggtctgctgccgagccatttgtttgtagggcttgttattcagagacttgtaccaggtgccacttagagtatcatccttacctttcatgtgagagatacaaagaattcaaggaagatccggattcatctctgatagaatggtgcagagggaaagagtccaggaagaaagcattggatgttatgaaggccaatcaatcaaatgctgttctacattttcatcctcacgtgagtttgattccaggatagcattcatgacagatcattgtttattgcagcactacatgagtgataataatttatccggggtctcgtgcatcataattgatgaggctcatgagaggagcttaaatacagatttactgttgactttgttaaagagtttactttgtaggagggttgaaatgagacttatcattatgtctgctacagctgatgcaaagcagctgtctgattacttttttgcttgtggaatttttcgtgtgcttgggagaagctttccagtggatatcaaatatgttccttctgactatgcaggagattctggttctgctgttgttgcctcatatgtttctgatgttgtcagaatggcaactgaggttcacaaaactgagaaagagggaactattcttgcctttttgacctctcagatagaagtagaatgggcctgtgaaaagtttcaagctccctctgcagtagctttgcccttgcatggaaaactttcttctgatgagcaattccgtgtttttcagaactacactggaaagagaaaagtgatattttcaacaaatcttgcagagacatcacttacgattcctggtgttaggtatgtgatagattctgggctggttaaagacagcagatttgatcctggtagtgggatgaatgtacttaaggtttgctggatcagccagagctctgctgatcaacgggctggtcgtgctgggaggactgagcctggtgtgtgctatagactgtacacggaagctgattatcagtctatggacctaaatcaagagccggagattcggagagttcatcttggtgtagcagttctgaggatccttgctttaggagtgaaggatgtgcaaggttttgattttgtggatgctccaagtcctagctccatagatatggcaatcagaaatctaattcaattaggagccattgaactgaacaatgatgttcatgatttaacttctgaaggttggtgcttggtaagaatgggaattgaacctaggctgggtaaacttattcttggttgtttcaaacatggtttgggtagggaaggtatcatccttgctgctgtgatggccaatgctagtagcatcttttgcagagttggcaatgaatttgataaacaaagatctgattgtcttaaagtgcaattttgccattgtgatggtgacctctttactcttctctccgtgtacaaggaatgggaagctttgcctcgagaaaggaagaacaaatggtgttgggaaaacagtatcaatgccaaatccatgaggaggtgccaagacacaattttggagttagaaacttgccttgagcgtgaacatgacgttgttactccgagttactggcgttgggacccttgtatgccctctaatcatgataagaatttgaaaagggtaatactgttctcacttgctgagaatgtagccatgtactccggctgcaatcaacttggttatgaagtggcacaaactgggcaacatgttcaactacatccatcttgttcattgcttgtatttgctcagaaaccaagttgggtagtttttggtgagcttctttccatttccaatcaatatttggtctgtgtgagtgcatttgattttcaatcattatacgacctttgccctgctcccctgtttgatgtatccaaaatggaagagcggaagttgctaatgaagacactgtctggtcttggctgtattcttctcaagagattttgtggaaaagccaactgcaatttgcttgctcttgtttcacgtataaggaaagcttgtatggatgaacgcatcttcatcgaagtgaatgttgacaataatgaaatccacttatatgcctcttcaaatgatatggatatagcccttgggttggttaacgatgttctagaatatgagagaaagtggttacgcactgaatgtatggataagtttttgtatcatggttctggtttctctccacctgtagctttgtttgggtctggtgctgagataaaacatttggaacttgagaaacgttccttgagtgttgatgtgtgtcatccaaacataaatgaaattgatgacaaggagctcttgatgttttttgagaagaatacctctggttgcatctgtgctgtgcacaaattcacaggcaatacgagggatgaagatagggataagtggggcaggataacatttatgtccccagatattgtcagaagagctgctgagctagatggacgggagttttgtggctcatccttaaaagttgttccttcacagttgggaggggataaaacattttcgttccctgctgttaaagcaagaatttcttggcctcgtaggcttagcaggggatttgccatagttaaatgtgatataaaggacgttgattatatcttgagagatttctataaccttgcagtaggagggaggtatgttcgatgtgaagttggcaaaaagagtatggacagtgttgttataaatgggcttgacaaagagctttcggaagctgaaatatcagatgtgctaagaactgctacaactagaaggattttggattttttcttggtgagaggggaagcagttggaaatccaccatgcagtgctttggaagaggcactcctaaaagaaatttacccctttttgcccaaaaggaaccctcacattagtccttgccgagttcaggtgtttgcacctgagcccaaggatgctttcatgagagctttaatcacttttgatggaagattacatttagaggcagcaaaagctttggagcaaattgaaggaaaggtgttacctggatgtctttcatggcaaaagataaagtgccagcagttgtttcatagctcccttacatttcctactccagtgtatcgtgtgattaaggaacaactggatgaagtacttgcaagcttcaggaatttgaaaggtcttgaatgcaacctggacaggacatttaatggttctcaccgagtgaagataacagcgaacgccacaaggacagtggcagaagttagaagacctctggaagaactattgagagggaaaaccattgagcatgacagcctcacccctgtagttctccaactcatgttgtccagagatggctttagtcttaaaaactcattgcagcaagagactggaacttatattctttttgacaggcacaacttgaatttacgggtgtttggttccccaaacatggttgctttggctcaggagaaggtgatacagtccctcctttctctccatgaagaaaagcagttagaaattcatctgagagggagggatctacctcctgatttaatgaagcaaatgattaagaattttgggccagatctccatggattgaaagagagggtacctggggtagatcttacactgaacatacgtcgccacataatcattcttcatggtagcaaggagttgaaaccgagagtagaggaaatagtttttgagattgctcgttcaagccatcatttggttgagagatttggcaatggacccagttgcccaatttgcttgtgcgaggttgaggatggataccggcttgaaggctgtggccatttgttctgccggatgtgtttggttgagcaatttgaatctgctattaaaaaccaaggcactttcccggtatgttgtactcacagggactgtggagatcccatcctgcttacagatttgagatctcttttatttggtgataagttggaggatcttttcagggcttctttgggagcttttgtggcaacaagtgggggaacttacaggttttgcccttctcctgactgcccctcaatttatcgagttgcagatcctgggtctgctggcgagccatttgtttgtagggcttgttattcagagacttgtaccaggtgccacttagagtatcatccttacctttcatgtgagagatacaaagaattcaaggaagatccggattcatctctgatagaatggtgcagagggaaagaacaagttaagtgctgctcggcatgtggatatgtaattgagaaggtagatgggtgcaaccacgttgaatgcaagtgcggaaagcatgtctgctgggttgtgacttttctgctatgcaagctctacattatgtgttcaaaagcagttcaatacggttgtatttatccattaaatgagccggaagagagaattgattacaagtcgattagcacgaactag

SEQ ID NO: 132268 - DNA, 6357 bp, Glycine max
  Clone ID: PAT_MRT3847_90445C.1
ccacgcgtccggcaaaggtatgtgagagagtcttttgacacgacgaagaccaaaaccatcgcagaggcaaagatagattactaaacccacaaccacactcacacacacacactcctctctcagaaaaatacacccttttttctttcacttcacttagggtttcatcgctattgcttcctcatgaagaaatcctcctaccctaatcccacccctcgccgccacgattttcaccgtccgccaccacccacccacggctgcggttgggctccccgccccgcctaccaccgcccctaccaccaatggaggccccgattccacccccacgccgcccgcatcgaccgccctccggagccctatttcagggtggagctccgcctcggcagcagccccctccaccgcgacgacgtcgaggccctgatcgacgaatgccactcccggcacgacaccttcactttctaccccgtcgacgacgtcgccgccgttctcagttaccggagctgggagcaggcgcgagacgccgtcgtttggttctgggaggcgcggctcgcggagaagcacgatttcacgccgacgctggattccaacgtcgtcgtcgtcaaggacgatgtggattgtcgccttcgaccggtgttcgcgaggcacgtgaaagggttgacggaagggaaggaggtgaagcggtggatggaggagagtgaacggttgtcgaaagaaatttctcggctttcgagttcgctgagtaagcccttgcgacttggcgtgcacaacgagttggtggagaagaagaaagggcttgttgatgagaagaatcttgttgaaaggaggttgaaggagtttgagtctgcgatgcagtgtttattgaagtatttggagggtggtgttgacgtggagggtgtgactgtctttaggtttgatggaggttttgattggaagcggattcattgtctgatcaaaagggagtgtcggaggcttgaggacgggttgcctatttatgcttaccggagtgatattcttcaggaaatacattatcaacagataatggtattaatcggagagactggttctgggaagagtacgcagttggtacagtttcttgctgattcaggcattggtactgacgaatccattgtgtgcacccaacctcgcaagattgctgccaaatcagtggctcaaagggtccaggaagaaagcattggatgttatgaaggccaatcaatcaaatgctgttctacattttcatcctcacgtgagtttgattccaggatagcattcatgacagatcattgtttattgcagcactacatgagtgataataatttatccggggtctcgtgcatcataattgatgaggctcatgagaggagcttaaatacagatttactgttgactttgttaaagagtttactttgtaggagggttgaaatgagacttatcattatgtctgctacagctgatgcaaagcagctgtctgattacttttttgcttgtggaatttttcgtgtgcttgggagaagctttccagtggatatcaaatatgttccttctgactatgcaggagattctggttctgctgttgttgcctcatatgtttctgatgttgtcagaatggcaactgaggttcacaaaactgagaaagagggaactattcttgcctttttgacctctcagatagaagtagaatgggcctgtgaaaagtttcaagctccctctgcagtagctttgcccttgcatggaaaactttcttctgatgagcaattccgtgtttttcagaactacactggaaagagaaaagtgatattttcaacaaatcttgcagagacatcacttacgattcctggtgttaggtatgtgatagattctgggctggttaaagacagcagatttgatcctggtagtgggatgaatgtacttaaggtttgctggatcagccagagctctgctgatcaacgggctggtcgtgctgggaggactgagcctggtgtgtgctatagactgtacacggaagctgattatcagtctatggacctaaatcaagagccggagattcggagagttcatcttggtgtagcagttctgaggatccttgctttaggagtgaaggatgtgcaaggttttgattttgtggatgctccaagtcctagctccatagatatggcaatcagaaatctaattcaattaggagccattgaactgaacaatgatgttcatgatttaacttctgaaggttggtgcttggtaagaatgggaattgaacctaggctgggtaaacttattcttggttgtttcaaacatggtttgggtagggaaggtatcatccttgctgctgtgatggccaatgctagtagcatcttttgcagagttggcaatgaatttgataaacaaagatctgattgtcttaaagtgcaattttgccattgtgatggtgacctctttactcttctctccgtgtacaaggaatgggaagctttgcctcgagaaaggaagaacaaatggtgttgggaaaacagtatcaatgccaaatccatgaggaggtgccaagacacaattttggagttagaaacttgccttgagcgtgaacatgacgttgttactccgagttactggcgttgggacccttgtatgccctctaatcatgataagaatttgaaaagggtaatactgttctcacttgctgagaatgtagccatgtactccggctgcaatcaacttggttatgaagtggcacaaactgggcaacatgttcaactacatccatcttgttcattgcttgtatttgctcagaaaccaagttgggtagtttttggtgagcttctttccatttccaatcaatatttggtctgtgtgagtgcatttgattttcaatcattatacgacctttgccctgctcccctgtttgatgtatccaaaatggaagagcggaagttgctaatgaagacactgtctggtcttggctgtattcttctcaagagattttgtggaaaagccaactgcaatttgcttgctcttgtttcacgtataaggaaagcttgtatggatgaacgcatcttcatcgaagtgaatgttgacaataatgaaatccacttatatgcctcttcaaatgatatggatatagcccttgggttggttaacgatgttctagaatatgagagaaagtggttacgcactgaatgtatggataagtttttgtatcatggttctggtttctctccacctgtagctttgtttgggtctggtgctgagataaaacatttggaacttgagaaacgttccttgagtgttgatgtgtgtcatccaaacataaatgaaattgatgacaaggagctcttgatgttttttgagaagaatacctctggttgcatctgtgctgtgcacaaattcacaggcaatacgagggatgaagatagggataagtggggcaggataacatttatgtccccagatattgtcagaagagctgctgagctagatggacgggagttttgtggctcatccttaaaagttgttccttcacagttgggaggggataaaacattttcgttccctgctgttaaagcaagaatttcttggcctcgtaggcttagcaggggatttgccatagttaaatgtgatataaaggacgttgattatatcttgagagatttctataaccttgcagtaggagggaggtatgttcgatgtgaagttggcaaaaagagtatggacagtgttgttataaatgggcttgacaaagagctttcggaagctgaaatatcagatgtgctaagaactgctacaactagaaggattttggattttttcttggtgagaggggaagcagttggaaatccaccatgcagtgctttggaagaggcactcctaaaagaaatttacccctttttgcccaaaaggaaccctcacattagtccttgccgagttcaggtgtttgcacctgagcccaaggatgctttcatgagagctttaatcacttttgatggaagattacatttagaggcagcaaaagctttggagcaaattgaaggaaaggtgttacctggatgtctttcatggcaaaagataaagtgccagcagttgtttcatagctcccttacatttcctactccagtgtatcgtgtgattaaggaacaactggatgaagtacttgcaagcttcaggaatttgaaaggtcttgaatgcaacctggacaggacatttaatggttctcaccgagtgaagataacagcgaacgccacaaggacagtggcagaagttagaagacctctggaagaactattgagagggaaaaccattgagcatgacagcctcacccctgcagttctccaactcatgttgtccagagatggctttagtcttaaaaactcattgcagcaagagactggaacttatattctttttgacaggcacaacttgaatttacgggtgtttggttccccaaacatggttgctttggctcaggagaaggtgatacagtccctcctttctctccatgaagaaaagcagttagaaattcatctgagagggagggatctacctcctgatttaatgaagcaaatgattaagaattttgggccagatctccatggattgaaagagagggtacctggggtagatcttacactgaacatacgtcgccacataatcattcttcatggtagcaaggagttgaaaccgagagtagaggaaatagtttttgagattgctcgttcaagccatcatttggttgagagatttggcaatggacccagttgcccaatttgcttgtgcgaggttgaggatggataccggcttgaaggctgtggccatttgttctgccggatgtgtttggttgagcaatttgaatctgctattaaaaaccaaggcactttcccggtatgttgtactcacagggactgtggagatcccatcctgcttacagatttgagatctcttttatttggtgataagttggaggatcttttcagggcttctttgggagcttttgtggcaacaagtgggggaacttacaggttttgcccttctcctgactgcccctcaatttatcgagttgcagatcctgggtctgctggcgagccatttgtttgtagggcttgttattcagagacttgtaccaggtgccacttagagtatcatccttacctttcatgtgagagatacaaagaattcaaggaagatccggattcatctctgatagaatggtgcagagggaaagaacaagttaagtgctgctcggcatgtggatatgtaattgagaaggtagatgggtgcaaccacgttgaatgcaagtgcggaaagcatgtctgctgggtttgtttagagttctttagtactagtaatgactgttatgaccatttaagaactatacacttaaccatcatataaattgccatttgcgtaccatttttccgagacttgtaattaagcctagcggtatataataatactgtacatggaagtagcaaattgtacagctttcttaaactaatgtatatatatcacagcagttctgcttcttacttgtatatctaattctaatataagttgcacggtgtatataggttgtgacttttctgctatgcaagctctacattatgtgttcaaaagcagttcaatacggttgtatttatccattaaatgagccggaagagagaattgattacaagtcgattagcacgaactaggttacagttatatttgtgtctaaataaatataaagcaaaaaattgtatatgcagatcgtcttctgtgtctcaaaacggttccaaattccaatcacagcagagtggctattcacagatagtatctgcaagcaagagcagtggtaactccaattcccaacgaaagaaccaaggccagaacccatgcaacaccagtagtttcttcatcatggccatctccctctggttgttgacgcagcaaaagggattgttgcaagcggaaaacttgaagctcaagcaaacgcacctgttggcgatatgcaaacaagtgcatggcctcttccaacaaaaccatagaaagaccctccttttcatttttcagaactgcagccttcttttctgcctctctggcccgtgtctgagatgctcgcagtgccttcagaagctccattttatccttttcatcatgtccactgtcaatcctgtaagcaccagactgtttgctatgttgctcttcttctctgttatagagcctattcatggacaatatgacactcttatctggacccataaaaaacttggaaggtggaggaagatcacagttctgcatcaggtcaaaccctgaaggcttgttgtgagaaactgtgaaacccataatctcatttcttcttctttgagtttgaccaatcttcttttgttggccacccat

SEQ ID NO: 132269 - DNA, 315 bp, Glycine max
  Clone ID: PAT_MRT3847_90446C.1
gatgctctagcagattagaggaggcatggacattatgtgggctagcgtacattacttatccacagtgcgatctctcaaaaccaatgggggtttattcgaagaacaacaatggatcctattcaacggctgtgctctactagtgaccacagttcaactctactgctactactgcccgaactctgctgcagtggacgaatcaaccaaacagaggagtatctatgactctcatccgtgttgataaaagagtcttctggtctaaatatggagctaactactttgcagcacaacatgcgggacagaagcataatgagtact

SEQ ID NO: 132270 - DNA, 545 bp, Glycine max
  Clone ID: PAT_MRT3847_90447C.1
ggctcgagctcaaccacaccaccgttccagcatccaacatgggagaccagctcaacaagaagaatgatctcacctctttcctcatcgacttcctgatgggtggtgtctccgccgccgtctcgaagaccgccgctgcccccatcgagcgcgtcaagctgctcatccagaaccaggatgagatgctcaagaccggtcgtctggctgagccctacaagggtatcggtgactgcttcaagagggtcatcgctgaggagggcttcggctctctgtggcgcggtaacttggccaacgtgctccgttacttccccacccaggccctgaactttgccttcaaggatcagttcaagaggatgttcggttacaacaaggaccgcgatggctactggaagtggttcgctggcaaccttgcctcgggtggtgccgctggtgcctcttcgctgctcttcgtgtactcgctcgactacgcccgtacccgtcttgccaacgacaacaagtcggccaagtagggcggtgagcgtcagttcaacggtctcttggacgtctac

SEQ ID NO: 132271 - DNA, 587 bp, Glycine max
  Clone ID: PAT_MRT3847_90448C.1
gggcatgggtggcataggtaagacaaccattgcccatgctatgtatgataaatattctcctcaatatgagggttgctgcttcttgaatgtaagagaagaagtggaacagcgtggactgagtcatttgcaagagaaacttatatctgaactattggagggagaaggtctccatacaagtggcacaagcaaagcaagattcttcgattctgctgggagaaagatgggtcggaaaaaagttctcgttgtgcttgatgatgtgaatacttcggatcttattgaaatatctggttggcaaaccaatttgctttggtccagggagtagagtgctgataacaagtagagataagcgtgtgcttactagcggaggagtttatcaaattcacaaggtcaaggaaatggaccctagagattccctcaaacttttctgcttaaatgccttcaatgaaagccatcccaaaatgggttatgaaaagctatctgaagaggtagttaaaattgcccagggcaatccattagctttaaaagttttgggtgcagatttccattccagaagtatggacacatgggagtgtgccttaagcaaaatc

SEQ ID NO: 132272 - DNA, 370 bp, Glycine max
  unsure (1)..(370): unsure at all n locations
  Clone ID: PAT_MRT3847_90449C.1
aaataaattaacttactagaaatttggggggtttacaaaaagagtgcnaaganacattattaaacacctaattaatggggaagaagccacacccaaaaaccaaaattaaaaacccgcgcgacaaagaaaaaaagctcttcttatgggccccaaaaaataatccacaggcccccctttaaaaaccccgaaaaaagaaaaacccccgggagccccaaaaaaaagactggtggagaaaccccccttctcccacagggggaaaacacaaaaaaggcccacctactctccttttacaaaaattggngacccccaaaaggaaaaggaacccccccccttatggccacaaaaaaccgggggtgtggggatcaccccc

SEQ ID NO: 132273 - DNA, 354 bp, Glycine max
  Clone ID: PAT_MRT3847_9044C.1
gacatattctctccaatctgcacccacccccattccacctaccttatctctctctttctctttatcatcgcctctctctctcttaatcgttcttcacgagagagagagagactcacactagcacacatacatggacgccatcgttcaaaccagaggccttctttctctccccaccaaccccaaaaccagggtttcgcatcacctccatctatctcacggccttaaacaccgttttctctctctaaaacccaaacccctatccaccccttctctctccgccgccgccgccgttaaatttcatccctttggcccaaagccccaaaatttattcatctgccgggccgaggccgccgg

SEQ ID NO: 132274 - DNA, 296 bp, Glycine max
  Clone ID: PAT_MRT3847_90450C.1
gtggatcaggtgggcttaaggttgaattagggcagccatctgggaaattgagtgaaattgaggagcagggtgggaatgatggtactgatgtgcaggggattgggcagcaaccacatggtggagttgttgggagtgtcgggaatgagggtttggtgagacaaggtcaaggtggtggaggaggagcagggaatgttaatagggttggtggaaatggtgttgggaatagtgtgagtactgttaatagtgttaatactggaggacgtggaggtgttgtcgtttgtggtggtggtgctccc

SEQ ID NO: 132275 - DNA, 562 bp, Glycine max
  Clone ID: PAT_MRT3847_90451C.1
tcgatctgtcgctacgaatgtgccagagtcccgtacactgcccacgtgtgtcggcttaagattgctagaagttgcgtcgagaatgttcgaggccggaagagggtgttgatagaggtatagataaaacggttggggccgagacctttagttggggttggtattacggcacaatatcgcagcaaactcccaacagcatcagcgaggtagcaagagtgaataggtcaactctgcagtagatagatggggcagaattagatgtcgtagcaaatgcacgagatgagttaaatgcaagtgacactgttttaaataaaatgttaaatagctgtgaacgccgaacacgaggtccacaaggctggattgctaagggctagcggagattttcggctatgagttcaggtttatagggctgttaataggttgggagaaagcgctgaattagagcttttggctagtcggtccctagcgatgtaggtggccatggtgttaaaccctaggtggcatacgatatagaagcagcagctgcatcggcagctggcagacatatataactgaggaaaaaggt

SEQ ID NO: 132276 - DNA, 195 bp, Glycine max
  Clone ID: PAT_MRT3847_90452C.1
ctctatctttccctctctctcaatcacacgaatcactctctccttagtgctaatcattcaccaatggatcgcggacggtgtaagatgtggtgcgtgcatcggaatctgctaccaccaccctctgcttgcctgctccagcgaccaggctacctgctgcctattcttctccggcaccagattccgtgagctctcccc

SEQ ID NO: 132277 - DNA, 255 bp, Glycine max
  Clone ID: PAT_MRT3847_90453C.1
agggagttcacctcgctcggtgtgcagtgagctcgagtactagattgttgactgcataacaaaacccatcgttgtcggatcggagatgatgagttccgtcgtcgtggatgctgctgctaccagcagcagcgagaagaagacgtcgtggccggaggtgatgggcatgtccatcaaggaggcgacggagaccattctcaaggacatgcccaacgcgtacatccaggtgctgcctgttgggtcgcccgtgacgctgga

SEQ ID NO: 132278 - DNA, 203 bp, Glycine max
  Clone ID: PAT_MRT3847_90454C.1
ttcccttccttcatcttcggtctcggaaaaatttcccccgggcaatgcctgtccaaaccaagcccacccccaccacacccctgtttaaacttcaaccggccccattagaaaatggttttaagtatggggaaacctgagcccccattgccaagtattattgggggaggtcctaaaatggttaacattgagaaaaaccccttcaa

SEQ ID NO: 132279 - DNA, 1042 bp, Glycine max
  Clone ID: PAT_MRT3847_90455C.1
gattgatgatctccctgtccttaacggcttgtggctttataggcttccagagctagcatccttgttcccaaggtgtttgccttccactttacaattcctttctgttgatgttggaatgctatcatctatgtctaaacttgagttaggtttgttattccaacgcctgacttctctgtcttgtcttcgcatctgcggtgttggggaggaagatctggtaaacaccctgctgaaggagatgttacttcccacttctctccagtctctatgcttgcacggttttgatggtttaaagttgttggaaggaaatggtcttcgacatcttacttctctccagaagcttcatgtctggcattgtagaagcctcgaatccttgcccgaagatcagttgccaccctctcttgaattactgagtataaatgactgtcctccactagctgcaaggtatagaggtcgggaaaggaaatacaaattctggtctaagattgctcactggtcaaagattgctcacatttctgcgatccagataaatgatgatgtgacaataagatgagcttttggatgagtaagaatcattgaaaagttggtagcatctaatgacaggcatgcaatatttctcagctgtgatgtttcctgtttactctattggtcgtatgcatttcaatcttgcggtcaggttgctttcttcacactggaaggtttccattgaagcatccgaaccaaactctacaaatttcctctataacattggtaatttgtcaatctaaacatgtgatttgttgagattaattcggctttatgtgttttttcctggtgtgaaatatatttgtaaaacaagtgtattggattgtatatgtgatgttggtgctggatcatccaattttatgcatataaaaaattggactttgtattggagtttggtgctgattgacagcgttgttttcatgcactataatgtgcgtttgccctgttcttttgttcctctgcactccaagttgaatactttttgtaagtgtttatttttattataatcaaaaaaaaataa

SEQ ID NO: 132280 - DNA, 314 bp, Glycine max
  Clone ID: PAT_MRT3847_90456C.1
gacactggtaaaaaagtttgacgggcaacccttcgtgctcccttgacaggcaaagaaaagcagattatgaccctaaaccaaggctataaatgaatggtgcaccatatccattgttaacgcccacttagggtactaaataagatacaactacataggtaccgaattactgccccccaggtgtttccacatttaccaaaaccaggctcgttcatgaaccatgatggattcctagatacggtgcaggaatgaaggttccttgtaagcctcagggttccgatatggcctactcactagttagtgccaccccttgatgc

SEQ ID NO: 132281 - DNA, 240 bp, Glycine max
  unsure (1)..(240): unsure at all n locations
  Clone ID: PAT_MRT3847_90457C.1
cattattgggtcnnatagggaattatgtatataaaattccaaggcatcaatggcaaataactaccaatttttttgggggcatagaatttaataaattaggtttgtaggggagtgtgaatgatcaaatgctacaacccccattatatttatttaatttaagaatcaaagcagtggttgattttacaggcggggcctttgagtccctttcttgaacctttctggtttgatttttaaaataaa

SEQ ID NO: 132282 - DNA, 722 bp, Glycine max
  Clone ID: PAT_MRT3847_90458C.1
aaatatctcaatccattattctgtccctcaatttgggtgtccgatctcacacgaaattatctaatcctcaccacttcaattgttcattactcagtcaacttaaacaaagttatactctaaatcttcccatgcttcctgccctgtgcctacgttctcccaatactacaccagccccaggtattggtaaagaaagccatacaaatccaaagcattttggagtcaattatgcgtttcaagtccctattgctaccaaatatcgctatgtcattaccaaggctgcaaaagacaaccaaagcacaaaccgaaacacaaaaccgaatagtgtgatttgtgctgactgtgatggaaatggagctgttctatgctctcaatgcaaaggcagtggggtgaactctgttgatattttcaatggacagtttaaagccggtgactcttgttggctttgcggaggcaggaaggagatgttatgcgggaattgcaatggagcaggctttgttggtggcttcttgagcacttatgatcagtaggaaaaaagtccttgtagccatatgcgcaataacatacacatgtatattgtgtctttaaatactttcactctgtagatttcatatttggtaattctcagttcacttgtagacatagcggtcgtttaaaaatgaataaacagatttatgtagtatcatatttgagatgtggtttagctgtcacaactcacaacactc

SEQ ID NO: 132283 - DNA, 556 bp, Glycine max
  unsure (1)..(556): unsure at all n locations
  Clone ID: PAT_MRT3847_90459C.1
attaattatattgattgtaattaatctatgggagatattgctcctataattctgatatgataataatgacataatctgaaattgatcctactttgaatctcaacactccccctcaagctgaagcttactaagcaattaacttgttacaagaaaatttattcccgagaaaaaacataaaattgagctccactaaaaaaaacaatagtttgaatgacaactcagggatgttggcgaagttggggtatattgctagaaagagagagctggaatttgaagacgactcaaggatcttggtgaaatcagggaatattgctaggaagagagagctggaatatccatcagcctaagaaaattcaaagcaagttccgatcttcttaaaaccaagatttggaagcttcaaacaaatattagtgaatacccaaaattatttaaaacttgaaaaagagaaaatcttcatcaatagcaagatttcccgagtgtcataatgggctanaacaagacaagcaaagcatatgctgcaacaaaggtgccagggttttgaagccgtcaagggaaa

SEQ ID NO: 132284 - DNA, 926 bp, Glycine max
  Clone ID: PAT_MRT3847_9045C.1
taggggagatgctgtcaagtatgtgaaacaactacaagaacgtgtgcaaactctggaggagcaagcagcgaagagaacacttggatcgggagtgctggtgaaaagatctattatcttcgctgatgatgaaacttctgacagccactgtgagcattcactccccgaagtcgaagtcagggtttctgggaaagacgtactcatcagaactcaatgcgacaaacacagtggacatgctgcaatgatactcagcgaattagaaaagctttacttcattgtccagagtagcagctttttgcccttcggcaatagcaaaactgatgtcactattattgctcagatgaacaaggaaaactgcatgacagcaaaggatctcctaggaaggttgcgacaggctttgaagcagctcatttgatcacataataactagttcaaggaatttatgtctatgatgtgcatgattacaagaataagtttagtcaataatgatttttatcgcagtgctttatttttcctttttcgtccatgatgtggattctggagttacatatcaagggcctgcgagtatctgtttgcataggacttacatggatttgttcattctgctgtgaggtgtggggagtttcaacagaaacaacacatgatgccaaagtgttttattttttctgttgcttttttgcgtagttgattggtcggctacgttaccctacaccagaatagcattttcaaatctcagtagttctttttcccctcatcaaagagggctttttgagaggctttgacttaaagatcacctctttcttctctgtttccatgttgtgaaaaaggttccggtttgatagatgctaaatagtgggcattcatttaaatttgtttctcatgtcgttttatgttctgttacttctgtatacaatcattctggttataat

SEQ ID NO: 132285 - DNA, 393 bp, Glycine max
  Clone ID: PAT_MRT3847_90460C.1
gcgcttgctaatgagcaccacatacatccgcgctcatgctgaggattacaaatcatggacttgccttgcagcatccactgctggtggttgccttacaacgtcacaactgctagaacaccctatcaacctaactgaagccacaaggacaacttcatccgcctgtaaccctgcctacttcaaaactgtccctctctgctccaaattgaaagctgcacctccaactgaagctgcaactgctgctactgccaatgatgagcttgaccagtgctatggtcctgacagaacgaacttctagcctgacggtctctaggaccgatctgacatcccatagtacttgaccggagaagtctccggagactatggttatgacccatctggaacttaacaagaagc

SEQ ID NO: 132286 - DNA, 422 bp, Glycine max
  Clone ID: PAT_MRT3847_90461C.1
acttttggatatttgtgataaccgcgatcacaggttgccgcaccttaaaaccggaaacaaatgcactcgatacttgatatcaagaatttctcaatctcttcctacctcttggtgtacgagttgtgaagggaaagaaaaacactctttgtgctggacacagactttgtgaatcagtttttttttccacttttaggttatttgctgaacactctcctatttgatataggactttgcgtcagattcaaactctcttctgagtctttctcagaaatatgctcaatttcaagttcatgctggtgaaacattggattagtgctcccactctcctatctggtatttgacttcgcgggcagacttttatatttcctctcctttctttcactctcttttttttactgatccgcattggcgttcaaagtggt

SEQ ID NO: 132287 - DNA, 250 bp, Glycine max
  Clone ID: PAT_MRT3847_90462C.1
ttgcaaatagcctgaacgctattaatgtggacatgctctggaatatcggcaatgaatacacgttccctccaataatagaataggctcgatagtttcaatgctgaatagggcgttcatacgccatcactcaaaaccataggacagaaagattgcggataaagttgtgaagctcatagtgaaacaaagagcgagacaagaagaaaagctttgatggtcgatgcttgctctggaatacaattgtgtccgtgat

SEQ ID NO: 132288 - DNA, 770 bp, Glycine max
  Clone ID: PAT_MRT3847_90463C.1
ccacgcgtccgatttttcttcttcgtctctttgactttgagtggggttttttttactaagttactctaaattaatattttgttcctttgtcctactttttaatgatgtctgcagtcagtagttttttactttattttctaagtgtaaatttttcaccttcttgatctttatcattattatgtctctgtagggtaaatttttgtgttttgattctctttgagttttatttaattagattttctttaaaattagtttccttttatcttctttctaatatctttcattgttgttgattatatcttttaagttttttcttataatgatatcttttaagtttttaagtttcactttttaccatatattttttgttctattttgctatagcaaaattgtatttttttttagtgcatattatattgatactctttgggttttcgtcaaatttcttttgttagtcctccattttttattcttacactaacatcttttattgttttaaaaaatattatattatattaaccttccttaattatttgaaaataaatacaccgtatatccctataaaaaattattgtaaacgttaaaaaaatcacaaatttatacgtaatcttaataaaattcaaggaatgtcagtaaaaattattcttctttttatcaaatttatactgatatatctacatttttaatcattgtgattatctaagagatttagcaaaaaaataaaaagtctcataacagaatcaacgtaataaaacttggcctttcttctc

SEQ ID NO: 132289 - DNA, 718 bp, Glycine max
  unsure (1)..(718): unsure at all n locations
  Clone ID: PAT_MRT3847_90464C.1
ccacgcgtccgaatgtttatactactttccatgcaatatgaagtatgaaacatgggcaccatcaatgcactgaccatgggtaattaaagattctaagccacccccctccagagatgcttaaaactctttacccactatatttctccctccaggaatatccaacatggttactgcaccccccatgtacatacatgacatacatcattataatgacattttcaacatctcatctcaatgtcattatcaacatcaacattgtctcatcttaatgtcattctcaacaccaacatcatctcatctcaatatcattctcaacatcaacatcatttcatctcaatgacattatcaacaacaacaacatcatctcttattaacataatcatcactaacaacatcatctcatatcaacataatcataaacaccaacatagtctcgtatcaattattatcaatatcatcttcaataacaacatcattctttatcaacattatcataaacttcaacgtcacctcatatcaattaatatcatcaataacaatgtcatcagtaaatcacattccgcatatacatancatatatagttcatgcctaagactcacacttcctcaagtcttcagataacacaagtctaatgaaaacaataatgtcatttatcaatanttagacgtatcacatcccattagntaaaagcacctggtntttcttaaaaaccaacat

SEQ ID NO: 132290 - DNA, 653 bp, Glycine max
  Clone ID: PAT_MRT3847_90465C.1
ggagacatgaaatcaattttcttttacttgaaccagcagtaggtgtaattccacttctcttaatcacaatcaaaagtttgtataaaatgttcagatcctaaatgattggcagtgtattataccctgcactaaaggaatggaggtgttggctctacggctccgacttttatgctgtacaacttttctgtaacttataagacaaattgtgactgaacagaatcgtaatcatactttctgataaagttttgttccttccttttcagactcacttgaagcagatcttgtcaccttaacacggtatgaagccttatcagaaccaaactcaaccacatcagatggacggacgcgagcaggataatttggaggcaccctgtaccgtcttccttcattgtctgtgatccaggtgccatgtagactcctcaaatcagtcaagaagaaggcgccatccttatagttaattcttgcatgcatttgagaaacctttaaaatagaaactttgttgcatgatgttgaagaccattatgtgttaaaccaagtaaagttcagctcatgataaatttcgttaccttgggtaaaggtattataattgaactgcctgggatgatctttttgctgcatgctcccgattatgcagggtttcatctcatcttgag

SEQ ID NO: 132291 - DNA, 344 bp, Glycine max
  Clone ID: PAT_MRT3847_90466C.1
tgattcactactttattcttccattgcttttatgctaattctaaattctaaattctaaatttcgcattggaaatggcattcacacagcttatcccttcaccttcttcctccttaaaccctatcacactctccctaaaccctaaatccccaacatctccgccgcagcatttcaatctcgactttctccggcaccggcgccggaggcctgcttccactctgcggtgctccgcctcctcattctcggagaagcaccacacgaactcctcgaactccgacgacgtgttggagctccctctgttccctctccctctggttctcttgcccggcgccatccttaccttgca

SEQ ID NO: 132292 - DNA, 317 bp, Glycine max
  Clone ID: PAT_MRT3847_90467C.1
gtctcgaggtagacttgtattcttcgggaaagtgagccgcctatcatatatgtgtcttttaattacatcactgcatgcatacccagacgcagactgacttgcatcccatcactatactcttttttgcatgcacagaatatgaattgcatgactggaccgtacctgtacaaggttcagacgatgaaagggaaatgatctgcaatctgaatggctatgtttaaacaaaccatcattgcgtgaaattggcatcatttgacttgtgaaactggctataaatatttattgattgatatttgattacgttaaaatacctaaac

SEQ ID NO: 132293 - DNA, 371 bp, Glycine max
  Clone ID: PAT_MRT3847_90468C.1
tgcatcaacactggtgaaggttgtcactttcaaaattccaacttcactcaaaattggtctcagccagatgcagaaagtgctggcttttgcctttggcccttataaagttgtggctccagggattgcaacttcaggagccaaaacgtctggcatcatgaaggcagcagtatctgctgaaaagatttgagctgttgctcacggtgttatagcctcagctgaaaaaaacagtatttcagtcatgagaagagctttctatgaaataatggggaagcgaaaggtgcaacctgttgggttcttgccttgggctacatttgcaggcagtattggaacttgtacaagcttgcttttgtatggtgatgggattgagtgtg

SEQ ID NO: 132294 - DNA, 402 bp, Glycine max
  Clone ID: PAT_MRT3847_90469C.1
gtctgaatagtaataatcgacagcaaaaatgaaatatttggaggaatggaccaaaacaatgatctagttttatggctgtttaagaatgttatatctcactaaccaaactcaagtcaaagctaattttaacaggcccagattttagaaattagaccaagttgttttaaggatgacattgggacttggttgatacttcggtcatcccaacccatttcgatgcacatattcttcttaacaaatatatattagtagtaatacttcttaacataacattttaaacaatattatattatatttatgaatttaattggaatgcactatagtgtaaaggttttttatgctgtcatcaatcacaaattgtcacctatgataagtttgttgacttatataataactacttta

SEQ ID NO: 132295 - DNA, 448 bp, Glycine max
  Clone ID: PAT_MRT3847_9046C.1
ccacgcgttcgccacgcgttcggccacgcggtcggccacgcgctcttccacgcgtccgtacggttggagaagacgacagaaggggatatccgaaaccgttgatgttaggattaaggaagtagactagaatctcggaaccaagctcaacgcggcatgttccggtattgccaatacagtcttgtccagtaacccgctagaacgattaagccagtgtcctgatgaatcccgtggaacctagtataggatctcgtctgaggatcctcggcattctgagtggatgtatgattcgccctaatccattaatcacaaaagaagcgcatcagtacaagcggatattgatcctgcaagtggagtggctctccatactacctacagaggtagcttgggagcacatgcctatctgtgtactgttctttccaaaaaaaaaaaaaaaaaaaaaaaccaaaaa

SEQ ID NO: 132296 - DNA, 203 bp, Glycine max
  Clone ID: PAT_MRT3847_90470C.1
cctcagaattcggatcgaggcgcgtgctaacataaaccctactcattttccatacctcaacgactaggttaaagagaccggaacacttttctgttcttcttgaccgaccacaacatcgacttggtttctctattttgccctaaagtactactcattcacaacagacaccgtcggggtcgcttcgacatcaatggctccgaaac

SEQ ID NO: 132297 - DNA, 179 bp, Glycine max
  Clone ID: PAT_MRT3847_90471C.1
tcgttcttgcatccgatctctggatatgttcgcccacacaaaatccttccataaaatcttccaaaaaaaataagaggggcacccatcacttcttcatcggcagctaggggttacctctctcctcttactctttttagaataccgattctaaccgggggaacttgaggagactcattaag

SEQ ID NO: 132298 - DNA, 457 bp, Glycine max
  Clone ID: PAT_MRT3847_90472C.1
cccacgctaggcgcaaaattgctagtgacttgactacagctgatgagagattgattggcacagcacatgcggcatctgatcctgttgttgctggaattcaaatctatgccactcccatgatgcccctatatgacgaaattctttctaaggttgcacaagatacggatgatgcatggcctgattgtgcagatgaggaggattcctttgaggcagttactttaagtgcaccactcaatggtgtcacaggttcggactctatggaaagaattcctcttgccacatatgaaggttttcctcatgtgcttacacgcacaaatggtgaaaaaggcaaaaggagatatgtttctggggatggagaagagatgacattgattcctggaaccactgcagcagaggcttacaacaagctaatagttgaacttgagaaaagcgttcacacattggttggcattgaatg

SEQ ID NO: 132299 - DNA, 824 bp, Glycine max
  Clone ID: PAT_MRT3847_90473C.1
cgaggacttcgtcactgacatagttataagcttcatattggcggggaaggataccacgtcagctgcgctgatgtggtttttctggctactatcgaagaacccgggcgtggagaaggaggttttgaaggagataatggagaaaccagagactccggcgtacgatgaagtgaaggacatggtttacatccatgcagcgttgtgtgagagcatgaggctctaccctccggtgtcgatagactcgaaaggaagcagtggacgacgacgttttgccggatgggacggtggtgaagaaggggacgttggtgacgtatcacgtgtatgcgatggggaggatggagagtatttggggcgaggattgggcggagtttaagccagaaagatggttggagaaggttgaaacgggaaagtggaagtttgtgggaagggattcgttcacttatccggtgtttcaggctggtcccaggatttgtttggggaaggaaatggcatttatgcagatgaagaggttggtggctgggattctgaggcgcttcacggtggttccggcaatggctaaaggggtggagcctcactactttgccttcttgacctcccagatggaaggtggattccccgtcaagatcatcgacagggaagcttcatgttgaaaccaaacatatttttattcagatcgcaacttcactcattcgacaaaccatttagttaaattttagtgctactatgtgactgtgcggttgtcgatctcaatgctgaatattgtcatttcttttcttcttttctttcttctaattaataaaaaaaaatgcgtcttatgcattattagt

SEQ ID NO: 132300 - DNA, 261 bp, Glycine max
  unsure (1)..(261): unsure at all n locations
  Clone ID: PAT_MRT3847_90474C.1
catattctcatttcaatttgcatttgcatttgcgtttcattnngcgttttgtttctttctggaagcttcgttcgggcatcaatggcgtccttcgatgaagctcctcccggaaactccaagaacggcgagaagatcttcaaaaccaagtgcgctcagtgccacaccgtcgacaaaggtgccggccacaaacaaggttcgagagttactctgtattgatgttgagggaaacattatgcttgttgaggacccaatctgaatggt

SEQ ID NO: 132301 - DNA, 192 bp, Glycine max
  Clone ID: PAT_MRT3847_90475C.1
gctccattctttctttgactcgtatcactcaaacctggggaggggaatcaggctctgaaccacagagggaagcatatgacattgtgtcccccttagatatagccgcatagctcagaggtgcacaagacaatctgctcatctccgtaaaatatccattctgaccgccagagtaggaccagtgccacgcgtacg

SEQ ID NO: 132302 - DNA, 383 bp, Glycine max
  unsure (1)..(383): unsure at all n locations
  Clone ID: PAT_MRT3847_90476C.1
gcgtccngaggagatatatttacctaaactaagagatcttgaaagagaatccaaacatgtgggcttacgtggcaccttctttggatgctaagcaaaacattgtggtggtatatgtaccaaaactagggaaaaaagcttcatatatagccataaaagaattgggccagccaaaatcaaaaaatacccactttatccttttcaccaccaacggtgtttacattccttgtgcttattaccaacttaccaaacaaattgggctttttccctatttttaaaagtattttaatttcccaccaagtttctttttaagtggaccggtttttttttgcccaaaatttttttttaacaacaaaggggccccctttcctttttttttgttttta

SEQ ID NO: 132303 - DNA, 730 bp, Glycine max
  Clone ID: PAT_MRT3847_90477C.1
cctcccttacttaattggactaattttccgtgaccgcattcatcaatggttaaagagatggcccaagaatgccgcaatgattaggcttgctggggaaggaagctggttccatcaatttcaagtagttgctctgtttagagtttctccttttccgtataccatattcaactatgctgtagtagtgacaaatatgaggttttggccgtacttatgtgggtcaatagcaggaatggtgccagaagctttcatttacatctacagtggtcgattaataaggaccttggcagacgcacagtatggaaagcaccaattgaccactgtggaaatcatatacaacattatttcattcattgttgctgttgttaccaccattgccttcactgtttatgcaaaaaggaccttaaatgaactcaagattgcagaggccaatgaggaagctgcctctgtatctgggagtagtaatcttgagatggggaaaggttcccattgaaaggcttctcatcaaatttcccacgatactgtacatttatgtatctaaaatttgtgttaggactacatgtaccatagtgtttttctccctcccacttgggccatttattgattattggaatgagtatgtagggtagaacagtctgcaaatgcaccaatcgggtaaacataataaacggctgtttgtaataaattggaaagagcttttactaaaaaaaaaaaaaaaaaaaaaacgataaag

SEQ ID NO: 132304 - DNA, 189 bp, Glycine max
  Clone ID: PAT_MRT3847_90478C.1
gccagaggccgcgtaagacacaattcagcgcggaaaacggttccatactcagatttcggggtcgtcaaactcgtgaaagagcgcatgtagtaggaccccccggagactgtgagcgtaaaaagtatcacgcgcgagagagaaagggcgccacacacaaagagcgacgaacagtgaacccaggctgagagc

SEQ ID NO: 132305 - DNA, 1178 bp, Glycine max
  Clone ID: PAT_MRT3847_90479C.1
atacgttcatgacttgttgctctaaacccaaaaacacctcataaatatttagttagaactattacattgatccatgcactcacaaaagatgtacctaaatgactaagttggtatatatatcaaatacattcatataattcatggctatggctattgtatattaagaagttgacatagaaatgaaataattgacccatctctagtcaggtcgattgttttaatacattacaaatagtttttactaacatatgctactatgttttggatttcttttcttgtttgcatttggagaaggaaggaccatgagtcagcaaggtccacgcaaggcacatcccatcgaaaagacattgccttgcacccttgaggaactctataagggcactacgaaaaaaatgaagatctctagggaaattgctgatgcaagcgggaaaactttgccggtggaagaaatcttgaccattgacattaaacccgggtggaaaaaggggacaaagatcacattccctgaaaaaggaaatgagcagccaaatgttattgcttcggatcttgtgtttgttattgacgagaaaccccaccctgtgtttaccagagatggtaatgatttggttgtgacacaaaaggtgtcacttgaggaagctctaacgggccacattgtccatcttacaacacttaatggcagggttctcaaaattcccataaacaatgtttttcatccaacctatgaagaggtggtccccagagaaggtatgccaattccaaaagacccttcgaagagaggtaatcttaggatcaaattcaacatcaaattcccagcaaagttgacgtcagagcagcaagccggaattaagaaacttctgccgtattgaactgtatcttgttgtgtatagtcttccaatttgctctcattcttctctgtctcctcttttattttaggtggctttcgtttgtgtagtttgcgtgtaatatgtttagagttgggagaggcaatggtatgacattttgaaaaacggttgattttgatggtatccttaaaattgtggtaggatgtgttgatagttaaactttggacgtaatagctatatgattctgaaaatgggtgcccgcataatatgcaaaatgtgacgttgattttgttcacagcccccccctagtacaggattaaaattacgtgttaaaaa

SEQ ID NO: 132306 - DNA, 173 bp, Glycine max
  Clone ID: PAT_MRT3847_9047C.1
cggccgacccacactccgcttaaccattacaaaacacttctgcactcttttactaccacgcccacatatcaacgcttgattctacacatagtgttctcacatatctacctcaatacctcaatgctcacctatccttcatccaccaacacattcatcacatcaaccctctctaa

SEQ ID NO: 132307 - DNA, 227 bp, Glycine max
  Clone ID: PAT_MRT3847_90480C.1
gaaattttcacatgaggagatttttacagcctggtcaacgtatgtgcgtcctgcaacaactctgttgtctgatgggcttccatatttgtattcaatggttcatgattgtgtagtgtcttctatactaggagacaatgtcaatggtgtgatgttgtctaccataaacattatgagtgcgtaattgctggttatactcttatgacgactttttcttttttgcacgatac

SEQ ID NO: 132308 - DNA, 379 bp, Glycine max
  Clone ID: PAT_MRT3847_90481C.1
tttttttttttttttttttttttttttttttttttttttttttttttttttttttttttttttttttttttttaaggcaaaagagaaaaaaaaaacaaaaacatccccctaataatgcaaacaattaaacaaggggcaaatttgcattaaaaaacctaaaccaaaatttaacacaggatttaccacccccaagtcattgaaaaattcggggaaaaaaatgaaaacaaaaattaccaaccggcccctttaaaatgtaaatgggcttgtcaaaattggccaatccggtttctttaaaagccccccccattgttggatttgcaaggaaaaaacgtgcaatgtccccactaaatccaacaaactgtacagcaaatgccgcttc

SEQ ID NO: 132309 - DNA, 273 bp, Glycine max
  Clone ID: PAT_MRT3847_90482C.1
gctcggctcgcgcctcaattcagcttaagagcccaatatcggccccagcagtaactggcctgcctctaatatctgtcttacgcaacaagctttgcttctagtccactttcaattgggcataagccaacctgagccgaattactactctaaaagctgcccacaagacgcagcgatcatacaccggaacaagtcacactgactatgtaacaaccatggacacactgccgcttcgtcgggtcgaaatctcttccacgactacgcggttaagtcatg

SEQ ID NO: 132310 - DNA, 507 bp, Glycine max
  Clone ID: PAT_MRT3847_90483C.1
cccacgcgtccgttaatttttcatatctacaaaccaaatgctgcttggaaagcactgatggctgaaagaaattaccaagagattatttaatggcttcaacatcttgcgttggtaaccgctcattacctataaaacatgcaacaggtccaagttattgagcatattctttttctctagcacaatatgaggaggttgtagacaatccccagctcttcatgtttaccttggaaaaacttcacgccgatatgggtaccaagtgatgattcccattggtggaggaagagaactatatttgcatcccctctttgatgaagtgacttctcgaggagggattgtcaaaataattagagagaggaaatggaaagacgtaccttcagtattaaattttccatcaacagctacagatgctttgattgagctgcggaagtactatgctgcattgctctaccattatgaacaaattgacttctttaaagcccgggaatgggaccctactgctcctgatgc

SEQ ID NO: 132311 - DNA, 422 bp, Glycine max
  Clone ID: PAT_MRT3847_90484C.1
tatccaggatccagtgaccaaaaactggtggtgaaatatggcaaatataaatattggatattttccagcagccttgttctccaacatgacctcagctgatcaagtggggtggggtgggcgaacaagaactcctcctaatactcctagtcccccaatgggatctggacactttcctgatcatacttttcatcatgcgtgttattttacatttgtctcgtttcaaaatgaagcaacaagaaattatggaattggaccacatggagcacaaacattctctgatagatctgattgttttggtgttcgatacttgggatatattgcagaggaggttggatattctctccaatttggaggacccggtggtagttgtggaaattaattaatttttataagcaagctttgtcagatatttgaaaaaataa

SEQ ID NO: 132312 - DNA, 741 bp, Glycine max
  Clone ID: PAT_MRT3847_90485C.1
aatgactgggggcactagtggtggaattgaagcaaggtcaaaacagtgggatgacaagaaaattgaaggtttttatcattttttttaaatttaattcaaagcttttgctcttgcaataatcatgttgttttctcaggacttaataaaaagaaagagcagtatgaatcagaattggaagagctaggatcaataagagatatgcaccttaaagagtctgaagcatctggaaaaattagtgggcttgagaagaaaattcaatatgctgagattgaaaagcgaagcattgaagataaactttcaaatttgagccaagaaaaaaagaccatcaaagaaagaattgaatgcatcagtccagaactgcagaagttaaatgatgctgttaacaagagcaatgcagatgtacgtaagcttgagaggaggataaatgaaattactgataggatatacagggacttcagcaagtcagttggggttgcaaacatccgtgagtatgaagaaaatcgactcaaggctgctcaaagtatagcagaggagaggctgaacctgagtagccaactttcaaaattaaaatatcagttggagtatgagcaaaatcgggatatgacttcacgaattcaagaattggaagcttctcttggcactttagagaaagatttaaaacgtgtacaggacagagaggctgcagcaaagttagcagctgagaatgctacagaagattgtgaaaaggaaatccaagagtgg

SEQ ID NO: 132313 - DNA, 209 bp, Glycine max
  unsure (1)..(209): unsure at all n locations
  Clone ID: PAT_MRT3847_90486C.1
gcaggttcctccactcaggnagcctccctcntncccactcggttccttccatcctcgccatggcaacaacagttggcatnagttttggggaaaaccacaggaaattccctgcanagnaaagnggtcaggcatccanaccaaaggcagttcctggaaaaaaatgggagcattcancncanatcgtccagtggcagtnatgcagngctaat

SEQ ID NO: 132314 - DNA, 466 bp, Glycine max
  unsure (1)..(466): unsure at all n locations
  Clone ID: PAT_MRT3847_90487C.1
tctctctctacaaatacattctttctttcttctcttcgctgctcactgtagccctggctttcatagtaagatgagcgggaagaggaaatgcctcttctggcatgggagtagctagacctagcgtaaacaccttcctggaatagcagaagaagaaagttcatcagctctgagatttttaaaatctgtgagataaagatagaagctctcgttgaaataactggaggccctgctgagagctatgatagatttcactgcatccttgcctgaaaatgagagccgatacactgtctttaactttgattctgtgactcatgagaactgccaaaagagcaaaatcttttttattagataggnctccttcagtgacccacattcgcccgaagatgctgtttgcaacatccaaagacaggttcagaaaggagctgcagggcatccatcttgagactcaggcaacagacccaacaga

SEQ ID NO: 132315 - DNA, 437 bp, Glycine max
  Clone ID: PAT_MRT3847_90488C.1
gttattgcatgcttttggtctgatcacccattggtgtatgctgtcaagaactttagcattggtagagtagggctagataactgcattgctagggatagagtgtatggttttagtttttattatgctgtgattataatgctatttaaattaggctaagttcaacaagagggatctgcaaacggagtttagtttaaattagtctaaactcgcgagacatcggggtttagtacatgagtcttcggcatagaacacaggaacatctttaattagagaaatatctttaattgcatcaacttgtttagtaggaagacccaacgcctttaaataatctatttttcacacttacttgctcacatttattattttcattaggatagaacacacttttacttcaattcacacttattaatttctgtttacaaaatgcctgattattg

SEQ ID NO: 132316 - DNA, 349 bp, Glycine max
  Clone ID: PAT_MRT3847_90489C.1
aggccattaatacacaaaacaacaaccatgaaccgaaacaagaacaacacaatacaaaaaaagccacggaaaaaccggaggaacccacagaggcgcaaaagaaaccacgggcatagaaattaggaaaccaaaaataggggctgcatgcaacatccacccggcccaccacgttggttaggattcagcaaacccaagctcaaaaagctattggcgagcccacacgcaaacagcgaagaaggcaacatagtccgaggcataattccaaacaagagggcggaccgcaggggcagaccaaaaaggcataggagaaaggcaccgaaggagggccccattataaccaccgaagaac

SEQ ID NO: 132317 - DNA, 169 bp, Glycine max
  Clone ID: PAT_MRT3847_9048C.1
tgaaatggtccaagttctatctactatgtctggcctatctttgactcttgagtgccccgtgatgcataccaatttgacaacagagggaggtggcaatgggaatgaagctattgcggggcttgcactatgggtggcggtggggtgcggggctatgagtgctggggtatgg

SEQ ID NO: 132318 - DNA, 307 bp, Glycine max
  Clone ID: PAT_MRT3847_90490C.1
ggagaaatcgttaagatataccttaatgttgtaaattactatcacaacacatgtatttcagaacatgcaatctagatattaactagctatagaagtgttacagattgagaaatccgtaaggattgcatatatgtaaaggttttggatcacatgatttggaatggtattatgtctcttttggaataaataattcagaacaccttacaaattagttgtgacattttagaacacctatttcggaagagacacaatatattacggatgatataatccaaaacctccatagaattgcaaactttacaagttt

SEQ ID NO: 132319 - DNA, 432 bp, Glycine max
  Clone ID: PAT_MRT3847_90491C.1
aggtcgctgcgaatctgtttacattccgagggatgagtcatttggtcacttgaagtcatcagatttccttgcgtatatactcaaatctgcatctcaaaatgtgatacctcaattacaatctgcacttagactacaattcaaccagcctgagtttactagctttgacgacgtgcgcggactctatgatggtgggattaagttgcctactgatgcacttagcaagcttagtcctataccattgttcactgaactctttagaactgatggggaacaggttcttaagtttcccacacctaaagtaatttaagtgaatccgtctgtattgataactcatgaatattttccaaacagatgatttcttcttatcaattcacactttaatttgacacactacatttctcactattaaatgtttttattttctagttttta

SEQ ID NO: 132320 - DNA, 1475 bp, Glycine max
  Clone ID: PAT_MRT3847_90492C.1
aagtccgggtttttccaacagaggtccgctttggcgaaatccacacagccatagctctcaagcacaaagagtttctcccaccattgcctgaaccgattctctgaagtcatcagtggtgcctcacctgtgcatcagactttaactacttcaccatagccagcactgtgaattgtgaggggtctttttccaaaaccagaaagaaacccttccatttttcaccttggttcaccactaaagtgctgtcgtagcttctgctccatcgttctctcagttcactgttcaatctctccttgctcagtataaaagttcctcattttgttgcaaaaggttcaggtttacttcaaatcaatggctgtttcatatgttcacatgcttcaatgcaacaggggtttccacaagggtaacctctcctatcctaattgcagttacaaggcgaggaggagccaccgtttagtttttgcttctatgcacacaccagaacctaaggtagactcattactggacagtgtaaaatgggataccaaaggtttggttgtggcaatagctcagaatgttgacacaggggccatattaatgcaaggttttgccaacagagaagcaatagctacaactatatcttctcgaaaggccacattctatagccgatcacgatctacattgtggaccaaaggagaaacctctaataattttatcaatgttcacgatgtctttattgattgtgatcgtgattctataatatacctgggaaaacctgatgggcctacctgccacacaggggcagaaacatgctattatacatcagtttttgacttgttaaagcagcaagaggctgaggaaaataaattggcattaacctctttgtatgcattagagtcaacaatctcgcaacggaaaacagagttaataggagaaaatgaaaagccttcatggacaaagcgattattgcttaatgataagttgctatgctctaaaatcagagaagaggcaaacgagttgtgtcaaactctagagaacaatgaggacgagaaacgtactgcttcagagatggctgatgtactctatcatgccatggttctgttggcaaagaaaggtgtcaaaatagaagatgttttgcaggttcttcgtctgagattttcccaatctggtattgaggagaagaaaagtcgtgtatcccagaaatcagtggatgattgaatgttctgtcaactctatatctcaagcaatatatttagctttcggccacatagccagatgcaccattcgtgttcttatcggtgggactatgctgaatagggtaacattgttaaatagtgtagagaatgtcgagaacaccatgtaactgttatcctctcatttttgcagaattcagttttacactttaaataaaaggtttagttaattgtattgcttgcatcatgcttatgggtagcaaactgcaagtttgtaatgccctaagcccttaatttttgtctctt

SEQ ID NO: 132321 - DNA, 314 bp, Glycine max
  unsure (1)..(314): unsure at all n locations
  Clone ID: PAT_MRT3847_90493C.1
cacagtnttttcctttntctgctctttgccttctctgncacatttngtaccttgtagagcgtgttttaggcaggaaggnggtatggcgaaggncgttgaanntgctgagcgtggatcnttatctggnaangaataccangaccctccaccagcaccactccttnatgctgagganctcacaaagtggtcnttnngnagggctcacattgctgaattcattgncactttnctctncctctanatactgtgctcaacagtcatagggtacaancancagactgacctcnaaggaanatggtggaaatctgtggtgg

SEQ ID NO: 132322 - DNA, 301 bp, Glycine max
  Clone ID: PAT_MRT3847_90494C.1
gacccacgcgtacgcatacacttttttaaatatataatttttatttttgcaacacattctctattccgcgcctcgttttaatttctacacctctaaactcaacctacaatacacaatataagcacctcttaataatttatttaaaactaatcaaatactaatttaactcattcccaaatcccttcccaacatacattacaataacacccttcaaacttgtaaaacactatcttctaaaaacaatcaaaacagatctcccacatcacactctcactccatctattattaaccaccactttta

SEQ ID NO: 132323 - DNA, 327 bp, Glycine max
  Clone ID: PAT_MRT3847_90495C.1
ttggtggggtttatttaattttcgcgtgggttacaaaggcaaacacatgggatacgatcatagggattacggaggaagaggtcatatacatttaacatcctggggcaaactgagaggcatagacccaagccttgtctgccacagggactgcaaggtggaccaagaggttctacaatgggccttttacagggacaatagcttgaacaaagaactcatacatagagaacatggccagtcttccatttttgagctgctagactgtgaactcaagaaaagtaaccggtgcaacagcaaggcccaaggggacaaagcactggcccccagggc

SEQ ID NO: 132324 - DNA, 338 bp, Glycine max
  Clone ID: PAT_MRT3847_90496C.1
aattcggcttcgagggcttgagagttttagcatagaataccacctctttttgggactacacgtttgttgagatatgagtattcacatttcagagttgacgttagcgggcagtatatttggaggtggtaggcgtatggaaccgaaagacatatggcttctgagtggttttacacgagaacgatgtcgtctttagagtatctaggaaagaatattgtgttctataacaaaacttgacagagaaagattaagagtctttaacataggatggagagaaaaggtcattaatatctatgtatgacaagtgatatattctcagtccatcacacaggtgggttatg

SEQ ID NO: 132325 - DNA, 398 bp, Glycine max
  Clone ID: PAT_MRT3847_90497C.1
gcgtttatattcaaacatggcaagatcgccaaactcagcattcaatgactgattctacttctccgaacttgataacatctttgcataccaactcccacaaaacaaagtttccttctttaccagggaagaaaactctgtacaccaaacttaatttctcattttctattccgttcaataaatcgatacgtgtgaaatccattgacacgaccatatatgatcaacttatagcctatcaagacttgtacaatattataacgctgcagaatagttcatatattataagagtaacattgtaaagtgaaaactgcagaacacttgaccttactcctactgcatttgatgcaatatcatagagttttggaaaagtaattatcaaatgtttcaagaaagaaaaatga

SEQ ID NO: 132326 - DNA, 1380 bp, Glycine max
  Clone ID: PAT_MRT3847_90498C.1
atgactcgcggcataaaacaccgtcagaaagccaagagcaagaagaagggtggttcttcttcatctttggcgccagaaattccagcgaaggtgtggcaaccgggcgtggataagttagaggaaggtgaagagcttcagtgtgatccttctgcttacaattctcttcatgcctttcacattggatggccatgtttgagctttgatattttacgcgactctttgggcttggttcgaacagaatttccccacacagtatatttcatggcagggactcaggcagagaaaccttcttggaattctattggaatttttaaagtatcaaatattactggaaagagacgtgagccagtgcctaaacttggaactgatgacactgaaatggatggtgaggatagtgacagtgatgatgatagtgaggaagaagacgaaggtggtgctcagggtcccagatgtgtcaaccgtatacgctccatgccacaaaatcctcatatatgtgcagcttgggccgataccggtcatgtacaggtctgggacctaaactctcacctcaatgttctagctgagactgaaacagaaggtgtccaaggagttgctgcagtttttaatcaggacccattgtataaatttaaacacaaagatgaaggttatgctatagactggagtcctcttgttcctggaaagcttgcatctggggattgcaataattgtatttatctgtgggagcctacatctgctggaacgtggaatgttgataatgctccatttattggacatactgctagtgttgaagatctgcaatggagccctacagaatctcatgtttttgcttcttgttctgtggatggaaacattgcaatatgggatacccgtttggggaagtcaccagctgcatcttttaaggcacataatgctgatgtgaatgtaatgtcatggaacaggttggctagttgtatgttggcctcggggagtgatgatgggactatttctattcgtgatctcagactgctcaaggaaggagattctgttgtagcacatttcgaatatcacaagcacccaatcacatccattgagtggagtccacatgaagcctcttcattggcagtttcttcatctgataatcagcttacaatatgggacctttctttagaaaaggacgaggaagaggaggctgaatttaaagctaaaactaaagaacaagttaatgctcctgaagatctgcctccccaactattatttattcatcagggacagaaagacctgaaggaactacattggcacacacagattcctggaatgattgtatctaccgctgaagatggattcaacgtccttatgccttcaaatattcagagcacactgccatcgaatggtgctttgtag

SEQ ID NO: 132327 - DNA, 1385 bp, Glycine max
  Clone ID: PAT_MRT3847_90499C.1
cgggaatgtccctggcttatgcattaccctgcaccttccaaacacactagctactaatgcgtttcctgtctcacttattctacaaaaacaatggcatcatttccaatcccacagctcctaccatctcacaccaaccactccttaacttgtttcagtagtaacactaacactctgccgttgtcatcctcactgttgcgccgtcgccggagtctcgactctctccgatgctcggcgtcgtcggagaagcagccccacgacgacgcgctggagctccctctcttccctctccctttggtcctcttccccggtgcgatcctccccctccagatcttcgagttccgctaccgcatcatgatgcacacgctcctccataccgacctccgcttcggcgtcatctacaacgacgccgtctcgggcaccgccgaggtcggctgcgtgggcgaggtcgtcaaacacgagcgcctcgtcgacgacaggttcttcttagtgtgcaaggggcaggagcggttccgcgtgaacgacgtcgtgcggacgaagccgtacctggtggggcgggtgacgtggctggaagacaggccgtccgagattaatgtcggaggcgatgacgtggaggggctggcgcgtgaggtggaagggtacatgaaggacgtgataaggttgtcgaataggttgggagggaagaagggggagaataaggagattgggaacttgcgacggaatctttttccgacgccgttttcgttctttgtcggaagcacgttcgagggtgctccgagggagcaacaagcgcttctggagttggaggacactgcccccaggttgaagagggaaaaggacacgttgaagaacacgcttaattacctcactgctgcttctgctgttaaagatgcctttccttcttcctcttaagtcaaaactggtagggggatataccaatagtacaatacaagttgtaaattttgattcgtaatttcatctgctcgatatttgttaataattactactactttaaatcatagtaaatataataattttgctgcacgtaataatatttctatataactggaacatgattattatacaattttgcggatatagtacaaatactggaggtggctaataagattctgttattgaatattgctggaaactttgcatttgattaatattgctgctacatgatgatgctgacaggtagaagcatattctgttgtaagataaataatacacacagcatgattttgatatccggtactgaaaagctatgttgatgataactgcagccgagaatacctgttaataattagctctttatagagctcagagcatgagaattgttataaatagcaattggctctagcataggcaaatttattctggatttt

SEQ ID NO: 132328 - DNA, 497 bp, Glycine max
  Clone ID: PAT_MRT3847_9049C.1
tgcgcagtagctaggtcacggactggatcgccgggctcactagctgagctgccgggctgtcgtcctttttttttttgtacagaaactttcattccatcccataagttaatatccagttaaataaattaaatgttgctattacacggaatctataagactattatatctcttttgctattaccccaatggcgactacacatatacccgagaattacccgcgctaagattctacaaccagttaccctggaaaccttaccgagctattcttaaccactgagatcattcagtaacgactgcacattcacacgaattcatattagtctcgatgaatgtcacaggctacgacttttcaaccaggtatgcttgttggcagatacagctcaagttgatactgttcaaggtggtcattgccgctagcagcaatgagtgactactctccccagtaatggcggcattcgatggaatcagctctttatgaacgggaactatctcgggta

SEQ ID NO: 132329 - DNA, 690 bp, Glycine max
  Clone ID: PAT_MRT3847_904C.1
ggattctacaggtgctttataagagattttagcaaggtagcccttccactatccaacttgttgcaaaaggaggtggagtttgactttaatgataaatgcaaagaggcctttcattgcctcaaaagagcactgactaccacccctaccattcaggcacctgattggacaaccccatttgagctaatgtgcgatgcatccaattacacattgggggttgtccttgctcaaaagatctccttacttcagcttacttcttttcctatctcctcatttacttttattacatttgtccgattctatttgatgatttacttgcttttaattacttgtgctacattgaggacaatgtgttgtttaagtatggtacatagtgttctttgattttgctagttttgtgggttttgttaattttgttagttgtgttaaatttgttaattttgttagtttttttgggtttctagtttaatattttaggtcaattctgtttgcatgtacaactttgcatatttttctttgaatataggatctgttaagaaatgggtaattgttctaaaaataaaagtctcttgacattttgtgatttgacatccttgtttttcctctacatgtcatgatagttttgaaagctcaatttgaaagtgataagtttacctttgtgagaatttgagccatccatcatcataatctttt

SEQ ID NO: 132330 - DNA, 1935 bp, Glycine max
  Clone ID: PAT_MRT3847_90500C.1
tagctaaaaaattccaatataatgaaattatgacgagcatataaataatttttttggctaaattagcctgtttgtttccactttacttttggtctacatgacttagtttagacggcatacacgaaaattgcattcaaaatcaagtgaagaataccaagctaaccagataatccacaaaacttgaagcacgggccgagaagaaaacaaaaggaaccaaaaagaaaaaaaagttacaataggaaactttcttcaacaacattcaagtagattgacgatgatcgtaaccagaagcagcttattgcttgaaaatttagcacggggggcgtctacaaagcaccattcgatggcagtgtgctctgaatatttgaaggcataaggacgttgaatccatcttcagcggtagatacaatcattccaggaatctgtgtgtgccaatgtagttccttcaggtctttctgtccctgatgaataaataatagttggggaggcagatcttcaggagcattaacttgttctttagttttagctttaaattcagcctcctcttcctcgtccttttctaaagaaaggtcccatattgtaagctgattatcagatgaagaaactgccaatgaagaggcttcatgtggactccactcaatggatgtgattgggtgcttgtgatattcgaaatgtgctacaacagaatctccttccttgagcagtctgagatcacgaatagaaatagtcccatcatcactccccgaggccaacatacaactagccaacctgttccatgacattacattcacatcagcattatgtgccttaaaagatgcagctggtgacttccccaaacgggtatcccatattgcaatgtttccatccacagaacaagaagcaaaaacatgagattctgtagggctccattgcagatcttcaacactagcagtatgtccaataaatggagcattatcaacattccacgttccagcagatgtaggctcccacagataaatacaattattgcaatccccagatgcaagctttccaggaacaagaggactccagtctatagcataaccttcatctttgtgtttaaatttatacaatgggtcctgattaaaaactgcagcaactccttggacaccttctgtttcagtctcagctagaacattgaggtgagagtttaggtcccagacctgtacatgaccggtatcggcccaagctgcacatatatgaggattttgtggcatggagcgtatacggttgacacatccttggtgagcaaccttacgcaatatcaaatttgaagcagtcaataaatcaaacaataaaaactcaaatgaagaggaagtttcctgcaaactgggaccctgagcaccaccttcgtcttcttcctcactatcatcatcactgtcactatcctcaccatccatttcagtgtcatcagttccaagtttaggcactggctcacgtctctttccagtaatatttgatactttaaaaattccaatagaattccaagaaggtttctctgcctgagtccctgccatgaaatatactgtgtggggaaattctgttcgaaccaagcccaaagagtcgcgtaaaatatcaaagctcaaacatggccatccaatgtgaaaggcatgaagagaattgtaagcagaaggatcacactgaagctcttcaccttcctctaacttatccacgcccggttgccacaccttcgctggaatttctggcgccaaagatgaagaagaaccaccctctttcttcgagccctgattttttttttttgccttcttcttgctcttggctttctgacggtgttttatgccgcgagtcatcttcttcgattagttcggagttgggaaaaactgttgtagctgttggtcgcagaaacgctgtctgggttgaggcagcaccgaatggggttttagggcctaacttcaa

SEQ ID NO: 132331 - DNA, 254 bp, Glycine max
  Clone ID: PAT_MRT3847_90501C.1
acgggccgcccttttttttttattttttttttttacgcactaggccacaagactgaaatgaacgggaattaaaggaacaaaacggtgagggacctccctaactagcaatctatcaggacaaggtaactttcaaggaaaaaaactccaacataaagggtggattggacaaaaaagcacattgatcatcattaacgaatactacaagaaagcctaaaacacagggtttatctacctgttgtaaaaaagggccagtg

SEQ ID NO: 132332 - DNA, 2091 bp, Glycine max
  Clone ID: PAT_MRT3847_90502C.1
cagcaggtgggaaggaaggagttctcgtgatttggcggttagacacaaaaaagaattattgcttaccaagatttggatctccacttttgtattttgtagattctcctgatcgatcacttttctcaatatctcatgcagataatcaaatgcttatattgaagaagccttcaaagccaatggaaataatcagctgtatttctggtatcaagccccctttgtcttctcaagatatatgtgaaggtctttccagccgagttgcctttgactgcacttctggtttattggctgtacaaacagagaattatgccatccaattctacagcttgtttgctaatcgcgaagtttatgaggttcaagtctgtgaaagaaaccatcaaccagttgatgaggtcacggtggtggtgagcttggtagagctatctgttgatggctctatgatgggtacagttgatgtcaagcttcctgaagatggaataggaggttttatttgcttgaagttttgggatttggatgataacaagagattttcattatctacccttatttatgaaccacacagggatgctcatatttctgctgttgctttccatccaactcgtcctatggctgtcagcacatcctatggtggagatttcaagatatgggtttgcagggaagaaattcagcaaaaaggccagatggttcggagttctggttggaggtgtcatgctgttgggtcatacaaaaataaagccatgagagctgctgctttttcagctgatggttctgtgctggcagttgcagcagacactgttattacattgtgggatcctaataataatgtcctcattgctgttataggagaaactcaaatgcctattatgaggctcgtctttgctggaaagtcagattatcttctgtctgtatgtcatttttcaaaaccacagctgtctgtttggagtatgtcaaagttagctgcttcttggtcatacagactccaaatagaagctgtctcctctgcaatagacttgtcatattttgctgtccttgcgctccttcccaaatcaaatgaatgtacatttaaaggtgatgggataatcttattattcaaagtgacagatcctgttccggtggcttcctggtctgtaactaaggccaagggagggaggctggcttttatccaaggagatccatttgaacgagcagttattgatgggaaaccaacacagacactgcttgcatatataaatggagatcatgaatatgtcatctttcatccatctggcagaaaagcctgtgagcttagtatgactaagcaggatgatcttgcgtttgaagaaacaggacaatttggatacgcatcaatttatggggagctacccaagtttgatttgaaaaggaaaatggactcatcgatttcatctgctgcttctgcttccaagaggcattggttcaccatatttagtggattatcacaatcgttgccacccctcactaaattgtgctcggaatttttggagtccctgctggagaaaaggtcatcaactgtagaatgccatgcaaccacttccagcagagacttttgttactttgttggccccctagcagagtttaagaggcctaaggacaggacttgaagtaaagatatttgaatgttcccttcaagattggtgtaaacactaccttctacccgctgcaggttggtctggcattagcaatttcccattttcgcatgatggaactatttgtcaaattagctgatgcaggaaaagatgggacaacaaagatttcagctttaattggttggctagatggcttggtacacctgagctgtcccccctctctaaaacccgattttgcctttgctatcgtgtcctttagttatatatattctttaattttcaatttttcagttcttggatggggcgaaaatttttacagtaacgaatgattttgcagtgtagcaatgttgtaagcttgatccctgtcaacgagtctaggtagtatagcggtgaatgctatggaagctacagttcctatgtctaaaaattaagaaagtgtgatcctaaatatagtgataatttgctttttcgtttttcacctaacaacccc

SEQ ID NO: 132333 - DNA, 472 bp, Glycine max
  Clone ID: PAT_MRT3847_90503C.1
tttccgattttcgtcttctactactcacacctctcttttctctcccactttttcttcctcctcaatttctccgttttttttttctttttctttgaaggtttcgttttgcaggtcgcttcaatggagaaatcctcctcttcgctcaagaagaaacgttctaagaaattatcaaaggtcaaggcaagcagtacaattaagaagagtaggaaaagtaaatccaagaaggttcgccgccgggaggtctctctttccagttctgactatgaggattcaaaaaaattggacacattggcttcctctagttctgaagatagctacagaagaaaaagggataggtctcgcacaagaaaagaagtgaaaggtcttaagaggaaggctcggggacgatcttacagcagtgacagcagtgaggactcgcattatgctaggaagagaaaaaaggcgaagaggcaaaatgagcgtgatcaggtga

SEQ ID NO: 132334 - DNA, 781 bp, Glycine max
  Clone ID: PAT_MRT3847_90504C.1
gattaagaaaaaagagagattggccaattgggtttcttcgttataaaaaagcatccatttttctcacacccttttgctttttctacatttccctttcctaaattcctcttctactactcacacctctcttttctctcccactctttctccctcctcaattacttctccttttttttctgattttttctttctttctttgaaggtttcgttttgcaggtcgctccaatggggaaatcctcctcttcgctcaagaagaaacgttctaagaaattatcgaaggccaaggcaagcagtaaaagtaagagaagtaggaaaagtaaatccaagaaggttcgtcgccgtaaggtttctccttctagttctgactatgatgattcaaaaagtttggacacattggcttcctctagttctgaagatagctacagaagaaaaagggacagatctcgcacaagaaaagatgtgaaaggtcttaggaggaaggctcgaggacgatcttacagcagtgacagcagcgaggactctcattatgctaggaagagaaaaaaggcaaagaggaaaaatgagcgtgacgaggtgatgaagaaatcctcccagaagaaaaagattaagagagaagcaagtgttgatttgatgagcagcagatcgtggagctgctcaacatgtcaggatgggagtgctagcagtgatgacagccaatgtaagagccgcaggggaagatcagaagaaaagagaaagacagaagaaggtcgagaggaaagatttggaagtaaaaaaagtagta

SEQ ID NO: 132335 - DNA, 1308 bp, Glycine max
  unsure (1)..(1308): unsure at all n locations
  Clone ID: PAT_MRT3847_90505C.1
attcccgcggctcgaccccataatgagtggttgcaaactgttcagtcagagcctgatgtgatctcaatgtcgttcattccaattacgtctgtattgaatggagtgccagggagtggattcttgagccatgccataaacctttatttgcgatataaaccaccgattgtagagctccaccaattcttggaattccagctgccaaggcagtgggcacctgtattcagtgaccttcctcttggtccccaacgaaagcaacggagttctgcatctttacagtttagcttcatgggcccaaagctttatgttaactccacacaggttgatgtaggtaagaggccagtgactggtctccgtctttatcttgaaggtaagaaaagcaatcggttggccatccatttgcaacacctttcatcacttccaaaaatcttccagcttgaagatgatccaaatgaaaacttttggcggaagtcttatgataggagattctatgagaaggttcaatggaagaatttctctcatgtgtgcactgctccggtggaatctgaggaggatctttcaatagtgactggagcacaattgcaagttgagaattatggcataaaaaatatactcttcttaagacttcgattctcaactgtgttgggagctaaagcagtgaagcatcctgagtgggaggggtcgctcaagttgggagcgaagtcaggactcatatccactttaatcagccaacacttcacgtcaacatttcagaagccacctccgcgaccagcagatgttaatataaattctgctgtctatccgggcggccctcctgttcctgtgcaagctcctaagcttctcaaatttgttgacacaactgagatgaccagaggaccacaagagtctcctggctattgggttatctctggagcaaagcttgttgttgataagggcaagatttctctccgggttaagtattctttgttgaccatggtattaccagatgaagaagagatgttggatgatcagtagctgattccttgcctccagcaaacaagtgctcatttttaaagtgtggtaggtcgggaaataagaaagaaggtagagggtactactagttatcacttggctttggttttgctaatcaggttggccttcttgtgaagagagagagagagagagagagagagaggcaagtgtaagttactcaaggagtgcagtggctttccccttgtaatgtaaacttttacagtccaataccatgacttgttgaaaattactattagaaatcaactccactttggccaattaattacttgtcgtgttnng

SEQ ID NO: 132336 - DNA, 433 bp, Glycine max
  Clone ID: PAT_MRT3847_90506C.1
caggggttcctttttttttacattcatttctttaatactcgctttccacctcttacacattaccagtaccttaacaaaaaccaaacaatattttgctttcccaaaaaccgcaccctgggccaaaaactaaaccaaacccttgaccacaacagaaaccccccctgttgcggattttctgccccaaccccccctgtacccaccccgggcaaaaaaaggggcccccttccatccggcaacgccaaaatcaaacaaccaaagggcccccccttcacctacggaaaaaagaaagaaacaacctgcaccttcaagggcccccttggaacaatgcccacttgacgccccaaaaagcacccagaaaaacctataccgcgcctgcaacgacaaacccctgtaaaaaaccaaaacccccctcttgactcaaaaaaaaccccca

SEQ ID NO: 132337 - DNA, 301 bp, Glycine max
  Clone ID: PAT_MRT3847_90507C.1
tttgctctctctctagaattattgaacactgtgtttatggcccatatttaggaagacatgagcgtgatatttactgcctatagaacatttatgtacctggtcatatagacctcaagttggcagatgatagtacacatatgttctagaaaattagacgaacataagtgacatgcttctgataagcaactcatttcacactaccgttacagagatgattcacaatgtgcaatccatagcatacatcatttgtgattgttgaatacattgatgatacatgggagaacaaacccattttggcttc

SEQ ID NO: 132338 - DNA, 196 bp, Glycine max
  Clone ID: PAT_MRT3847_90508C.1
taaatccaaaagaaaatttgattcgggtaggatttctcgtctgcttgataaagaacctatgagtacattctgtatcaactatgcaaggctcactactgcttactcgtgtctctcatatgcaacacgtgacacccatctcaagctagctgtatgcttcaacatgacgctagtcttcaatgctatgttgcgccacaac

SEQ ID NO: 132339 - DNA, 297 bp, Glycine max
  unsure (1)..(297): unsure at all n locations
  Clone ID: PAT_MRT3847_90509C.1
gttaagggtctgagaataagcagaaatcaaagtgatcatacaaccaccaccaccacagaagtaagaaaacagataaaattttgtttgcgtgtatgatacagacccgatccataggggtgggtgggtgggagagcacatgacttgaaggaatcactctagtagcggcacttggcggagtaatctttgagagcgaagacgagaccccgcctcttcctgtctccacgatagacggnnnncacagtgtccaacaactnncgcttgcccttgagagcccatctgannttgctggtgccacng

SEQ ID NO: 132340 - DNA, 1615 bp, Glycine max
  Clone ID: PAT_MRT3847_9050C.1
aactcccaaaagaaaaaacttgaagcatgagccttcttttgttgagtttcctcttgatcatcccaatccttcttcttcttagaagaaaaagaaaaccatccaaaagggtccctccaggttcacttggaatacctgttgttggccaaagccttggccttcttcgagctatgcgtgccaacaccgcagaaaaatgggttcaagagagaatcaacaagtatggtcccatttcaaagctaagcctctttgggaaaccaacagttttaatccatggacaggctgcaaataagtttatattctccggtggcggtaacgcgattgctaaccagcaaacacagtccatcaaaatgatcctaggtgaccggaacttgctggaattgactggtgaagatcacagccgagtcagaggtgcacttgtcccattcttgaagccagaatccttgaagagatatgtgggaaaaatggatgaagaagttaggaagcaccttgagatgcattggcaggggaaacagcagatcaaggtattgcccctgatgaagactctcacattcaacataatttgctctcttctgtttggtgttgagcgtggaaagcaaagagatcaattcctggattccttccaagagatgatacaaggaatgtggtcagtaccaattaacgtgcccttcacacgctacaaccgcagccttagagcaagtgcaagaatccagaacattttgaaggagattgtgcaaaagaagaagattgaactcaagcaaaatgcggcatctgcacgccaagacttgatcagtttcttgttaggcatggttgatgaagatggcaaacaagttatgagcgagaaagaaatctttcacaacattaagcttgtcatggttgctggacatgacacttcggctgttctgatcactttcatcatccgactcttagccaacgaacctgctatctatgcagcagttcttcaagaacaggaagagatagcaaaaggcaagctctcaggagaggcactgacatgggaagacctttcaaagatgaagtacacctggagagtagcaatggaaactattaggatgtttcctcctatttttggtggcttcagaaaggcagcaacagatattgaatatgatggatacttcatacccaaagggtggcagattttctgggtcacagcaatgacacacatggacgaaaacattttcccagagccatcaaagattgatcctagtagatttgaaaaccaagcatctgtcccaccctactgcttcattccatttggagggggagcaagaatatgtccagggtatgagttttccaggcttgaaactcttgttgcaattcattaccttgtgacacggttcagttggaagctatgttcagacaatttcttcagtagggatccaatgccagtaccaactcaagggctacttgttcagatttggccaaggaaactttcttaatggtcatttcaataactgctgatcttctaatcaatacaatgtaccaaaaataagtcaattttatgatcagcttacgactatattagcttattttgtgttcaaactgtaaaataacttatagttacaatcatactgagaagactttggggggaaagaaagtcaaa

SEQ ID NO: 132341 - DNA, 288 bp, Glycine max
  Clone ID: PAT_MRT3847_90510C.1
cagtcatagacgaaggcattcttttggggaagatgagctagcatatttaccagatagaaaacgtgagacctggattaatgatgacacagggagccatgcttcagttccttcaccagaagaaaaggatgacattaccaatttagatgaattggggaaggattataaaagaagcaaaaggcgtggaatgcttggttggttgaagctgagaaaacctgataatattgatggattatcgccaaatgttgatagtgagggctctggaaatgggtcacctgcatctgctttaaa

SEQ ID NO: 132342 - DNA, 153 bp, Glycine max
  Clone ID: PAT_MRT3847_90511C.1
atacaccttcaacgccaacaatgcatctgaactaaccacatacactgccacctggattaacaaaaggtggatattggttggctgctgatgtgtgtagtgataccggttaaatgtggacccaatttgagctattaggacaaaagatagtaatat

SEQ ID NO: 132343 - DNA, 461 bp, Glycine max
  unsure (1)..(461): unsure at all n locations
  Clone ID: PAT_MRT3847_90512C.1
gggaaaaccaaaccataaaggggttaatggaaggataagttggaaaaacaaaaaggggaacccccaaaaattttgggaaaaaagggggggacccaaaaactttttttttatttggacggggaaaatgggcccgaccactttggggggggggggctggcaacaaaacaaaaaaaaaccaccccaaaaaaaaatttcttcttttttttctaaaaattaaaaacccctacggggggggaaaagcccggggcagcaggggtgggaaaagggaaactcccaaactttcaaccggggaggaaaaatggggggggaccaaaaaaagccctcttcaaattttcagggnggcccgggacaatggggagggacccaaaaattctggtgggagggaagggggggtgtaggcccggggtttgggtntccttaccttgcggggggggcggtttggggtggggggggggcggggg

SEQ ID NO: 132344 - DNA, 641 bp, Glycine max
  unsure (1)..(641): unsure at all n locations
  Clone ID: PAT_MRT3847_90513C.1
ccnnnnnatataacnntgaaaatcggtcaaatataccacatggcaaaacagaacaagtgaatgaaaacaattcaatagaatttggcattaaacatgatgacaacagatatagaaacattaataaattttagcacagaccatgatagccgaattataaatttctacgggtaaaacacaaccaatttcctttcataaccttggtgagaaggttaaggtaaggcggcaatctcaaatctgatactagcgagcccaaccttgaggttgaagagaatgcaaatttggggccaaactcaggtttcactattcctctctctatggtaaggacaaactggatctcagcatacaaaacattacatgcaggcaggtatagtgttcgatgagagcaatcttccaccacataagagcaacaatgtaaaaaaagcaatggatcgtagttgctcaacgcatcaagatctcccaaacaatgtgccacaatcatagaaaatagaacccccttccatcagacccccgggaagaaaacaagagtggtatgcatatttgagtgcaattgtaggtagccatttgcagctgaaaagattttttaagtttttaaaaccatgcatgtccaattagcaacaaaagaacccaatgatgaatcccaa

SEQ ID NO: 132345 - DNA, 577 bp, Glycine max
  unsure (1)..(577): unsure at all n locations
  Clone ID: PAT_MRT3847_90514C.1
gcaccagatattacctgaatccagtacagttggaaaggtgccacagggaaccctggtgggacagttcacaattggaggtatgacatgtgcagcatgtgtaaattctgttgaaggtattttaagaaatcttccaggggtcagaagggctgtggtagctttggctacttcgtcaggtgaagttgaatatgatcccagtgtaattagtaaagatgatatagtcaacgcaattgaagattctggttttgatggttcatttatacaaagcaatgagcaggataaaataattttaagggtggttggtgtgtacagtctgattgacgcacaagttttagaaggcattcttagcagcacaaaaggagtaagacagtttcattttgatcaggtttcangtgaattggatgttctgtttgatactgaaaatctcanatctagatcccgtgttgatgcatcccagaaggaagccatggaaaatttaattacctgtcagaaaccctatacaagaatggttcttaanaccttgcagaaacctcgaccatatttcagcttttattctcagctttttcttaagattctcttt

SEQ ID NO: 132346 - DNA, 1504 bp, Glycine max
  Clone ID: PAT_MRT3847_90515C.1
gccaacatgtttttcctattgcttgctgctcgtcccaaaattacttggttatatatgtagccttcaaaggaagtaataggcttttcaattgttgattaactgatttgtcaagagatgaatgatcccttatgctgccaaaccgtttttaacccaaaagataatgtgtcttgcacgaatttcgttttgatggagaagaaaggggtcagtgttgccctttgcggagatagacgatgagaatggacatctctctgacccaagtcacatttcagtggcataatgttttcaaaatgcaaagtgattgtcgatttttatgttgaaggctcacaacatattttaaaggaagactagtttaaacatttgagaattattagtgggcttcattttttggttccccttcgacgatcgtcttcgccaatcgcctgcgtctctctctgaattgactagcttaaatggctggtcctaggattgcccatgctaccttgaaaggtccgagtgtggttaaggagatcataattggaataacacttggcttagctgctggtggtgtgtggaagatgcaccactggaatgaacagaggaaaaccaggaccttctacgatttactggaaaagggtgagattactgttgttgcagaggaacagtgaaaatgttcttgttttgttgcctatgctctccatttataggcttttttttcccgtgttatattcaattggctcttcaaatgtaaatgagccaacatactatgagattgaaaagaataagtttcttgaactgattgaatactatgttggcctgtaaaagtttcatgcagttatgtttttattttgtgcttggcttatgtttgctaatggttttgtgatcttcttttcatcaacgagaaatggctcaacggtgcttgctctcgagttatacgatgacagagaaaacccctttggaccaataaggtttcctgtgggaaagaaggcccaaaatgaataggggttacctttcttcaaaaacgaaccttccaacttattgtccttgaagaccagctcaatatttgagaaatcttcttgggcttcaaatattgctttcagtgaagggatcacatcctcctccatcatctgaggcagaggcttagctggagctttagcaggaggtttctttgctggtgctgcggcttttggggcttcctttacctcctcctttgtttcagcagtagtagctgctgtgctaggagatgattcttgaacggcagagcaggtaattctgtttctgctggccgttttaaatttacttgcaatcaagggtagtattggtgatgatgatgaggtgggtatggcaacattttgggagacatgcaaagaagaagttgatgttaatgaacacaaacgaaagctagaatctccaagtgctcctcctcttaacaaaattgccatttgcattcttcctctctcttaatgctttgattgtgttctttttttatttttttctatttagtcaccaaccattttttttctgtcac

SEQ ID NO: 132347 - DNA, 256 bp, Glycine max
  unsure (1)..(256): unsure at all n locations
  Clone ID: PAT_MRT3847_90516C.1
caaatctcccactaccaatcaacatctttctcaccactaaanncactnacaacgtctccgtttacattcacacaaaatcctcactctctctcaattcaaaaatctnaacccaacanncacacacnnaccaaannaaataaaanntaaaaatgccaactccaacncnncactctctcnncactctctacctcnntcccttttgttaaacaataaccgttaaccatctccannaccttggcagcacaaaagncaagcc

SEQ ID NO: 132348 - DNA, 536 bp, Glycine max
  Clone ID: PAT_MRT3847_90517C.1
caatgggaagtcttctgcccccaaagtcatctgtttcggagtgggaagttgtatttgacaagtaagatatgggacttatgggatgaagattgtgaaattatccctgctttatttttaagctatcacaaccttcctacctcgctttgaattgtttggcttttttgccttattcccccaagaattccttgttttccagggaggtttaattcaattgtggatggcagaaaatcttttacaattccctcaacaaaacaagagtctgaaagaagttggtgaacaatattatgatgatctattatcgaagtccttctttcaacaatcaagtgaagatgaagcattgtttttcatgcatgaccttctcaacgatttggcaaaatatgtttgtggagacatctatttcaggtttggaattgatgataaggcaagaaggatatcaaaaacgactcgtcatttttcattagcaattaatcatgttaaatattttgatgggtttggcagtttatatgataccaaaaggttacgaacatttatgccaa

SEQ ID NO: 132349 - DNA, 504 bp, Glycine max
  Clone ID: PAT_MRT3847_90518C.1
gtgtacggctgcgagaagacgacagaagggggcccgaactccttcgacgaccgtcttccccaatcgcctgcgtctctctctgaattgacaagcttaaagacaaagtcttaaatggctggtccaaggattgcccatgctaccttgaaaggtccgagtgtggttaaggagataataattggaataacacttggcttagctgctggtagcgtgtggaagatgcaccactggaatgaacagaggaaaaccaggaccttctacgatttactggaaaagggtgagatcagtgttgttgcagaggaacagtgaaaatgttcttgttttgttgcctatgctctccatttataggctttttttcccatgctatattcaattggctcttcaactgtaaatgagccaacttactattagattgaaaagaataagtttcttacactgattgagtactatgttggcttggaaaagtttcatgcagttatgaaaaaaaaaaaaaaaaaaaacccaaaa

SEQ ID NO: 132350 - DNA, 243 bp, Glycine max
  Clone ID: PAT_MRT3847_90519C.1
aatcgcctagggtttctatcgcaaaccctccctacctccaaccaggtcgcgtgcaaagggctttcaaagcttcggaagatcaaaatgtaacctgtactctgtggaaacctggatttcgacgcgcgtcaatccgacgtaggaagggtctttcagaagttacggcaaatttgatagagttgacatgaaatcggggtttgcttttgtctacatggaagatgaagtgatgcagagtatgaaatcaga

SEQ ID NO: 132351 - DNA, 252 bp, Glycine max
  Clone ID: PAT_MRT3847_9051C.1
ggagacaattgtgagcatgattcctgctgatagagggtcagtttcagctggcttcttgtaaaggcttctcagcatttcaagccctcttggtgtctccccagtgaccaaaacagaactgataaagagagccagctacagtttgaggaggcaacagtgagtgacctcctttatccttcaacatcccctttggaccaaaacttttatgacacggagttagtcctagcagtgttggaaattacttgaagttttgga

SEQ ID NO: 132352 - DNA, 639 bp, Glycine max
  unsure (1)..(639): unsure at all n locations
  Clone ID: PAT_MRT3847_90520C.1
ggctcgagccccccttttacttcgaagtcccattccttccacaaatctcactgctgcttcttctcaaaagcacttcttcaacccaatcatctcaacccttcgcttcccaccatttccaatacttgcaaattcccccacttccaccacccacccaggtttcctttcctttcattttcaattgtctctcttatatattcattttccaaacgtgcccttcttcaattgcagtcacccaaacactcaatcctcaatggaccccaaacaatgccgcctgccgaaaccctaattttccctccaaacaacccatgaccaatggcggagcaagagccgcgcccgacgacttcggccgcgccgccgtccgcctcgcggtggcgcagctctgcgacgccgcggggttccaaggcgccaccgactacgcgcttgatgccttcaccgacgtcgacgtccgctaccttctcgaccaaggtcgaaccgccgagtcccacgctaaccacgccggccggtcgcagtgcaccgtcttcgacgcaattcgcggcatggaggacctggaagccccgcgggctttctccgcgcccgcttncgcgcggcatcagagagattatagcttcgttgatccgcagacgaaatccgttcgcccac

SEQ ID NO: 132353 - DNA, 1436 bp, Glycine max
  Clone ID: PAT_MRT3847_90521C.1
agaatttaaaattttagtgttatgcccaattttggtgccagatcctatgacagtgaaagggccaataacagcagactgtgattgtgatatttccgaagcacggtatattccttgtcgttcaagtttagtagctgtgtcgccaaaattcattacatctggcaccagtggatatgtccatcgatgaattatatccttgctgacagtgtcgtagcttcggaaattatcaatccttgcagcatagtctgagtggatttcatgaacaaaaattttgtaccccattatatcatcaagaagcaatcccttgacaaaatgacgccgtagatgctggtagtcaaaattgtctgtaaataggctaaggacttcaggtgagcagatgtcaaaggaacactacatcttgacaagtcattgcttgctgataatccctcactctctctgcatcatgacaagcaggattgttacattgacatctgctcacctgaagtccttagcctatttacagacaattttgactaccagcatctacggcgtcattttgtcaagggattgcttcttgatgatataatggggtacaaaatttttgttcatgaaatccactcagactatgctgcaaggattgataatttccgaagctacgacactgtcagcaaggatataattcatcgatggacatatccactggtgccagatgtaatgaattttggcgacacagctactaaacttgaacgacaaggaatataccgtgcttcggaaatatcacaatcacagtctgctgttattggccctttcactgtcataggatctggcaccaaaattgggcataacactaaaattttaaattctgttattggtgaaggatgtaaaattgggtcaaatgttatcatagagggatgctatatatgggataacatcagcatagaagatggctgtaaactccagcatgcaattgtatgtgatggggtgattataaagtcaggggctgttctggaacctggtgttattttgtcttttaaggtcgtagttgggcctgagtttgttgttcctccatattcaaatgtatctctgttacagcagccaattgaggaagacagtgacgaggagcttgaatatgctgatagtactagtgtcataggcagccaagtggataaatcagatgtagagattgcttccaaagtattggagacacattttagtcctgcctcggagttgggtatgggtggggctggtcatgtgtggtcaacatgtgaaggaagccatgaagaagagtggaggcattcggtggcgcctattcctaaagataaagtatggaggcaattaaaactatgaaagatgatctggagaatgatgatagttttcttccagcttctggagaactgaaacctaattctaattattcagatgatgatgatcatgaagattctagagatgactcttactac

SEQ ID NO: 132354 - DNA, 196 bp, Glycine max
  Clone ID: PAT_MRT3847_90522C.1
ggcctataaaaagtttgactatctatctaaaggcgtaaatctatcatgatatggaaacatcaccaggagacgcatgtcactttaaaacctattttttgtccaatattattacaacatgaccctgttccagttcccctcactaatactgtaagctggcaaacgattcacaaaaattttgggctaaggctcttaaaaa

SEQ ID NO: 132355 - DNA, 523 bp, Glycine max
  Clone ID: PAT_MRT3847_90523C.1
acggctgcgagaagacgacagaaggggagcagcaaaaaaacactgcaatcattcagtaatgacagaagatcaatgtgaaaatagtttcccgtacttaagaagcatggaaagtaccattaaatgaatttatgatcatacaaacttgtacaaatacactagcatggtaataaacttttaaaaagaatcggttaacttctctcgacacagtttctaattttgaagaacatacatgattagatactaacaactttttttttcttatgtcttaaaatttgtcagataggaagattaagcccgttagattattacttttttaaatggaatatctttacaggcattgttatgaaagcaattcaactctcagaagagtgaagattaagtatactcctctaccaagtaatcacttcaaaagttcaacacctataacatttgtctggttcacaatcttttttcactatcctatgttgagttaattctcatttgctcaaatgtttttccagcattaataaattatttgttactt

SEQ ID NO: 132356 - DNA, 278 bp, Glycine max
  unsure (1)..(278): unsure at all n locations
  Clone ID: PAT_MRT3847_90524C.1
aaaaaacataattttaattgacactctgttttacatttgtattaaataaaaaggggtagcttttgggtttattccaaatggaccgaataaccacactccaaagttgaaaaaacgcaaacaaggggccctttattcccctcgcttttgacaaaaaaaaaaaaactttgtgggcaggcttatacaaactgcatagttgaggatttgcatggcnaggcgaacgggaaatatggtgtaggaaaaaattcatgttgtggccataccgtctatgatgcttgggc

SEQ ID NO: 132357 - DNA, 648 bp, Glycine max
  unsure (1)..(648): unsure at all n locations
  Clone ID: PAT_MRT3847_90525C.1
ccacgcgtccggaaggttttgaacacttgtacggatagactatatttgtgaggtaaaaaaatattaaaatagcagtgtcgtgccggagaaagtcaattaatctatcaatcatgatgcctcagtctgatgatattgcggcggcacaagcacgttatgatggtgagagggttgaagctcaagcaatgcataggaaccaatcggcgtggatggctcattggaagcaaacagattataaatcaacaacccctgcttgcaatcgtttaaggattgattgtgaggtgaaagaagaaaaagaagacaatggcgctgagcagcgtgatttacttggtggcttagatagttctatgcacgctggagcagttggagaagcagctagggctacaagtgttaccttcaccaatgaggcagacgatgaaaaatcaaagaaagaaagcagtgattccaaatcatttcctacattcaaattttctcgaaagttagatggaggattgtctctgcagagggaacagcacgacagggaaggtggaaaatctgaaactgaaccctgctctggagatgaagatgacaatatttctctcaacagaaactggacttctggagcangcttatcatcaacatctgcacatgcttctnctaaaatagaaacac

SEQ ID NO: 132358 - DNA, 205 bp, Glycine max
  Clone ID: PAT_MRT3847_90526C.1
aaaaaaaaatcttttgctcctcatgggggcaattttttgggtaaaaaggggttccctggtgaattaataggacttcccccccaaaataatgggataaaggggtatgaaccaaaatgatcaacccaatttcttttttgcccacccccttttttttttttacagaggggtgggctgcccaattgccccattagtgcaagagggtttc

SEQ ID NO: 132359 - DNA, 374 bp, Glycine max
  Clone ID: PAT_MRT3847_90527C.1
ttgcttttttttatataacattttttttttttggttggggcataaatacctaaggttggggaccatgttttaacaccatcggggacagtattcaaacaaaaataatgcaattgaaatggaaaatacctatagggattactactgttgatgcacaagccatggaagaagaggaaactcttggaatcaagatggaccgcgttattttatccatagactgattggtcacgtattaggatatgatgatcaattgccaggatatatcaccaacacatttacattacataagaagggggatcatgctggtgcaggaaagacagaaggggggttaccctgaatctgaaagcccggatgagactaatgttgattaagctgat

SEQ ID NO: 132360 - DNA, 1686 bp, Glycine max
  Clone ID: PAT_MRT3847_90528C.1
gcgtacgtaatctcggaattcggctcgagcgaagttccaagtgctgcgttttgatagccgtgcaaaaacggcatgaaatttgaaatgaaacgagtggaatgcgagccgagcaattatgtatatgtactaatgtagtcttcaatttcattttcaacctctgttctcataaaccctagaaaaattcaaactcttgggattccatcaacaacgatgtcttgggcatgcaaaaaatgcacctttgtgaaccccccttctcaaaaaggggaatgcgaaatctgcttttcccctgcgtccccgtcggcatcgggtccttcttcgtcttcgtcgcccccaaaatggtcgtgcaaggcctgcactttcttaaacccttacaacaacccctcttgcgaggtctgcggcactcgatgccccgttctctccctttctaatctcaccgacttgaatgatgccaccgatcacgattcttctgtgggttctgttttcttccctcttcgaacctgcaaaaagagaaaggccatcgacgacgacgacgattcttctgaggtcaaggtcaagccatccgataaagctaccgatatcaccggtgatgagaatattgactcaggaaaagccttcaagatattgagttacaatgtttggttccgggaagacttggagttgcacaagaggatgaaggctattggcgaccttgttcagttccattcccctgactttatctgtttccaggaggttactcccaatatatatgacattttcaagcgatccacttggtggagtgggtatcgttgctcagtttcttctgagatggattattcaagaccctacttttgtatggtgttaagcaaactgcctgtgaaatcattcagcaagaagcccttcagcaattctataatgggaagagaactttgcattgcggaggttgaagctgcaagtggcaagccattggttattgccactagccatcttgagagtccctgtccagctcctccaaaatgggatcagatgtacagcaaggaaagagtagtgcaggccaatgaggctataaaccttctcaagaaacagccaagtgttgtttttgggggagacatgaactggaatgaccaacaggatggtcaatatcctctacaagatggatgggttgatgcctggtctcagctaagaccaaatgaaagtggttggacttatgacaccaagtcaaaccagatgttgacaggcaaccgtactctccaaaagcgattagatcgctttatttgccaattcactgattttaagataaccagtgttgacatgattgggatggaagcaatacctggtgtttcatacaacaaagaaaagaaagtaagaaaggagataaaacaactggtactcccagttttgcctagtgatcattatggcctgcttttgacaatttctagtaagtaaagccagtcaggagaatctggctggtgaaaccattgttatgatgttctcactctccgctgttgctgtatctgcatgcaattttgtatagaacttgtaaatggagacggtactgacattgcaaatggggacaaagtgcaaagtgctgtatttttcagaacttctatagttttatctaccttggatagtagatatataattttcctttctcgaaaaaaaaaaaactttggttttaaatttgaaggtatcatactattctgtaattct

SEQ ID NO: 132361 - DNA, 463 bp, Glycine max
  Clone ID: PAT_MRT3847_90529C.1
gtgattgtaatagatgagatgaacactgtaatatacaccgtgtctgatcattatcctaaacggggggctaagcaatggggttagtgttcactaccttttctaaggatgatagtactaaagatcgtagcaacatttttaagtggctttaacaatgttctagaaaatattgctacttatgtatacaactcttaagctatttataagaagccttctggatctactaaccaaccacccaagcccatgatagctcactaactagactctcatgattacttggattatttgaaaagaggaataggttctgatgaaaacaacaataacttgcttgataagctacaagatgcaattggaaagagtcaaaaccctatgaaattctttcttcaatctataagaacctgagatttaacagtatcatattctgatattggaatattacgatctggtgccaaatacaactatgata

SEQ ID NO: 132362 - DNA, 2201 bp, Glycine max
  Clone ID: PAT_MRT3847_9052C.1
aagaaatcatagtcaagagccaatagaagcaaatacccagtattgtgcttatcaggtttgcaaccaccaaatgtagtcacaataaagagcactaagcaatattttatatgcatacaaaaggaggaagcaacctttatgagcattatccgcaccatttacataaatcgtatcttctacatggattctacatggattaattacatagtcttaccatgccttaacaagcttaaaagtatgtctagtcacaaccaccacattgcctagaatgtcacaacccacaaaacaagttcactcataagcaaatttttttgaagaagtaaagctgaatttaatcagaatcagatgcagattctaatctttgttcctcagaggctgcattatctccttttaagttcgcctctccctgcttgaatgccttggctatctcttcaatgggaatcaaaggtagatacccgacgaaactataacccttttgagtcatggccttgatcacatggttgtacttctctgaccagtgagcagcagtgggaactgctatctctgccaatgcatggaatggtggatagtgggtgagtccattccacaacttcaccgaatttatcaacacaaaatgctttgactctgtagcaacataatgaacagctgctcttggccccccagattgtgcttcacttgctactttccctgcctcacaagtcactttctgaatcacacccttggcttgatccgcaatgtgtttagcaaaaggaggagcgtgctcatcgaacttgtgggaagcttcatccacctttttgtcaacaaaaacaaggacatcatcagggacgtccttgaatttgttgcagacaggaccgagaatggtggttacagtgttctcaaccgttcctacgacggatctcaaaggcccagaattctgctttgcgtactcatacagatttgacacaatcacaaatgtttgaatagcagcaatcctcacaaaccccaggtgcttgaggtctttgttcttgctctcaacagtcacctctaactgcaggcataaagttgaatcacaagttacttttttagttcaataaattacactctccacctccatgggaaaagagagagaaaaaataaaagaacaatcaaagaaggaattttaagaaaaaccaaatactgtatataaattatgccaagcaacctcggtctttgccattgctttgtctgtgtcggaactagctcgtagctaaaatttaaggaatggagagttcaagttatgtttaagataaagatggagcaagaacaaagacctcaagcacctggggtttgtgaggattgctgctattcaaacatttgtgattgtgtcaaatctgtatgagtacgcaaagcagaattctgggcctttgagatccgtcgtaggaacggttgagaacactgtaaccaccattctcggtcctgtctgcaacaaattcaaggacgtccctgatgatgtccttgtttttgttgacaaaaaggtggatgaagcttcccacaagttcgatgagcacgctcctccttttgctaaacacattgcggatcaagccaagggtgtgattcagaaagtgacttgtgaggcagggaaagtagcaagtgaagcacaatctggggggccaagagcagctgttcattatgttgctacagaatcaaagcattttgtgttgataaattcagtaaagttgtggaatggactcaaccactatccaccattccatgcactgtcagagatggcaattcccactgttgctcactggtcagagaagtacaatcatgtgatcaaggccatgactcaaaagggttacagtttcgttgggtatctacctttgattcccattgaagagatagccaaggcattcaagcagggagaggctaacttgaaaggagataatgcagcctctgaggaacagagatcagaatcatctgattctgattaaattgagctttacttcttcaaaaaatttgcttttgagtgaccttgttttatgggttgtgacattgtggggcatgtggtggttgtgactagaaaaacttttaagttagtaaagacttggcaagactgtgtaactaatccatgtagaaaatagggtttatgtaaatgaatggtgcggatgataatgctcataaaggttgcttcctccttttatatgcatataatataataatattgctcagtgctctttattgtgacg

SEQ ID NO: 132363 - DNA, 688 bp, Glycine max
  unsure (1)..(688): unsure at all n locations
  Clone ID: PAT_MRT3847_90530C.1
ccacgccgtccgaaaaattcaaactcttgggattccatcaacaacgatgtcttgggcatgcaaaaaatgcacctttgtgaaccccccttctcaaaaaggggaatgcgaaatctgcttttcccctgcgtccccgtcggcatcgggtccttcttcgtcttcgtcgcccccaaaatggtcgtgcaaggcctgcactttcttaaacccttacaacaacccctcttgcgaggtctgcggcactcgatgccccgttctctccctttctaatctcaccgacttgaatgatgccaccgatcacgattcttctgtgggttctgttttcttccctcttcgaacctgcaaaaagagaaaggccatcgacgacgacgacgattcttctgaggtcaaggtcaagccatccgataaagctaccgatatcaccggtgatgagaatattgactcaggaaaagccttcaagatattgagttacaatgtttggttccgggaagacttggagttgcacaagaggatgaaggctattggcgaccttgttcagttccattcccctgactttatctgtttccaggtttcaatattcatgcagttgtaattntcttattatgataaaatattgaatttatgtggctttgnttattttgaccgncactgcctcangagggtactcccaatatatatgacattttcaagcgat

SEQ ID NO: 132364 - DNA, 647 bp, Glycine max
  unsure (1)..(647): unsure at all n locations
  Clone ID: PAT_MRT3847_90531C.1
atatatccactatccaaggtagagatagtttagaagttctgaaaaatacagcactctgtccccattacaatgccagcaccgtttccattacatttttcctgtaatctgtacaaaattgcatgcaaagcatgccttggatacagcaacgatggagaatgagaacatcaaaacaatggtttcaccagccatctctccagactggctttacttactagaaattgtcaaaagcaggccatagtgatcactaggcaaaatagggagtaccagttgttttatctcctttcgtactttcttttctttgttgtatgaaacaccaggtattgcttccatcccaatcatgtcaacactggttatcttaaaatcagttaaacggcaaataaagcgatccaatcgcttttgcacagtacggttgcctgtcaacatctggtttgccttggtgtcataagtccaaccattttcatttggccttagttgagaccaggcatcaacccatccatcttgtagaggatattgaccatccaggttgtcattccagttcatgtcacctccaaaaacaacatttggcntgtttcttgagaaggtttatagcctcattggcctgcactactctttccttgctgaacatctgatcccattttggagggcct

SEQ ID NO: 132365 - DNA, 499 bp, Glycine max
  Clone ID: PAT_MRT3847_90532C.1
gcagatattagggaaaactttgaccggcaagaacatcacccttgaggtggaatattgcgacgccattgagaacgtaaaagctaagattcaagagaaggaagggatcgcatctgaccagaagagacttatctttgcgggtaaacaacttgaggatggtttttttcttgccgaggacaacatccaaaaggaatcagccctatatgtcgcgcttcaactcaggggtggcatgcaaatcattgacgagactttgaccgggaaaaccgaaaccctagaggaggaatcctcggacaccattgataatggtaaagacgagatccaggacaaagaggggatgccccaagatcagcagaggctgagttttggagggaaacaactggaagatggaaaaacccttgcggattacaagaaacggaaaggaaccaccccgtcacttggcgctaacttttgagagggtggtgggaagattttcttttggcctttgaccggaaagaccataacc

SEQ ID NO: 132366 - DNA, 788 bp, Glycine max
  Clone ID: PAT_MRT3847_90533C.1
gtagtcttcaatttcattttcaacctctgttccgataaaaccctagaaacattcaaacaaggatgtcttgttgggcatgcaaaaaatgcacctttgtgaatctcccttctcaaaaaggggaatgcgaaatctgcttttcccccgcgtccccattgtcaatgggtccttcttgttcttcgtcgcccccaaaatggtcgtgcaaggcctgcactttcttaaacccttacaacaacccttcttgcgaggtctgcgccactcgatgctccgttctctccctttccaatctcaccgacttgaatgacgccaccgatcacgattcttctgtcggttctgttttctttcctcttcgaacctgcaacaagagaaaggccattgatgatgacgattcttctgaggtcatcaatttcaaggtcaagccatccaatatcaccggtgatgagaatatcgacacaggaaaagcgtttaagatattgagttacaatgtttggttccgggaagacttggagttgcacaagaggatgaaggctattggcgaccttgttcagttgcattcacctgactttatctgtttccaggtttcaatattcatgcttacaattttcatatttgatgaaatttttaatttatgtggctttgtctattttggaccgcttctgccacaggaggttactcccaatatatatgacattttcaagggatccgcttggtggagtgtgtattgttgttcagtttcttctgagatggcttattcaagaccctacttttgtatgctgttaagcaaactgcct

SEQ ID NO: 132367 - DNA, 1431 bp, Glycine max
  Clone ID: PAT_MRT3847_90534C.1
gcgaggttctgcatagctgccacatgcttctgcggaggccgctctcctgttttatgcattactgaacctgttcgccgttccgccgagctcattgggtttcggcctccttagccaaaatcaagatcttttaaacgtcttagacgacgagcatcagctgacacaatgccaattaccattgacaccatttcatcaaatgtgggaagaattaattgcaaggtttactattgcaaggaagatgaagtttgtttgtaccagtctttgctgtttgaggtccccttccaagagggagtttctaaccctgccgaagcagacgtcactcttgcacattttgtgaaacccaaaacttcaaccagcaacttcctgcagtcagttgccccttaagtccgtgggaccgtggcaccttaaaccaggttcttccagtgctgctttttcttgctcatcttttgtttatttttctgtatatactagtagtattcaaatgcttgagagtcatgatctttcttctgatacaacccatcgtaagttcattactaacaaaaattaaggtttttgtctacccttcctcgcttctttgaagatgtggtcatcaatcatcattgtgtaatcatgatgaaaaatttattttatgagaaagttctacaagcacatcatttgcccaaccttctggtctttcgttgtctcaagatctaagggagatctacattgctgatagtgagagtagttcaattcgagctatggatctgaaaacaagaggatctcagttgttagctggtggtgacccaatgttcgctgacaatttgtttaagtttggtgatcaagatggaataggctctgaggtacttcttcaacatccattgggagttgtgtgtggaaatgatggtgaaatttatattgcagatagctacaatcacaagatcaagaagttagatccaaccagtaaaagagttagcaccattgcggggaccggaaaagctggtttcaaagatggaacagctgtaaaagctcagctctctgaaccatcaggaattgttgaagggaacaaggggagattattcatagctgacacaaacaacagcttaattcgatatctagatttaaacattaatgaaactgaactccgtacgttggagctcaaaggaattcagcctcctaagccaaaatcaagatcttttaaacgtcttagacgacgagcatcagctgacacaatgccaattaccattgacaccatttcatcaaatgagggaaacttgtctattaaaatatcattaccaaatgagtatcatttctcaaaggaagcacgcagtagattcagcgttgatattgaacctgaagatgctgtgaatattgatccactcgatggatttcttagtccagaaggatctgcaactcttcactttaaaagatcctctaacaatgcttcagtgggaagaa

SEQ ID NO: 132368 - DNA, 596 bp, Glycine max
  Clone ID: PAT_MRT3847_90535C.1
aaattatatcagtagaaagaatacttcagtatacttgtatttctagtgagcctccccttgttgtggacgaaaatcggccagatccttcctggccgtcatatggcgaagttggtatacaagatttgaaggttcgttatgctccacatctcccacttgtgttgcgcggtcttacatgcaaatttcgtggaggactgaaaactggcattgttgggagaacaggaagtggtaaatccactctcatacaaacacttttccgaattgttgagcctacttccggccaaattatgattgacagcatcaacatctcttcaattggacttcatgatttgaggtctagactaagcatcattcctcaagatccaacaatgtttgaagggactgtgagaaataatttggaccccctggaagaatacactgatgaacaaatttgggaggccttggataagtgtcaacttggagatgaagttagaaagaaagaaggaaagctcgactccaaagttaccgagaatggtgagaattgcagtatgggtcagaggcagttggtcctgccttggcaggggtgcttcttaagaaaagcacggctttggtgcttgatg

SEQ ID NO: 132369 - DNA, 828 bp, Glycine max
  Clone ID: PAT_MRT3847_90536C.1
tggagaataagtcatcatcttttgctcaacttgttgctgagtataccatgaggtccaactccagttttgagaaatctgatgatcattgattgaaacatacagaaacagaagtttgttgacaatgacgaaaatctggtggattacatggattttcttgttttatttatagaaaaatggattttataaaatagggcttttagctgtgaaatactctattctcttttcaagggtgaaggatgaaattattgtcgcaagattccgacaaaaggtccgtagaaaatcgagttggttttgatgcattcttagtatgtgtagaccaaaggcagtataatgtcctctaattagtcaactcgatttaataagtttcgaaagaagtcatataaattgtctcacattgtgagaactcataaaaaaaaaaaaaaaaaaaaaaaaaaaaaaaaaaaaaaaaaaaaaaaaaaaaaaaaaaaaaaaaaaaaaaaaaaaaaaaaaaaagaaaaaaataaaaaaaaaaaaaaaaaaaaaaaaaaaagggggggggccgttttaaaggaccaaagtttatttccccgggcttggaaagtaaaattttttttttgggggcccctaaattaaattcctgggccggggtttaaaaccggcgggatgggaaaaccccgggggttcccaaatttaatccctttggaaaaaatccccttttccccagttggcgaaaaaccaaaaaggcccgaacggatcgcctttccaaaaatttgcccaccctaaatgggaatgggaaccccccctttagcggcccttaaagcggggggggtgggggggttccgcccaggg

SEQ ID NO: 132370 - DNA, 470 bp, Glycine max
  Clone ID: PAT_MRT3847_90537C.1
actcttgctttattttttgaccatataatacatgattaattgcaagttggcattgaaattaaacaacattctggtcataataaaaacttacggaataattatgcaaaagctaccaaggcaaactttaggggacagttgaaaaatgaataaaatctcacttcttattattaaatgttgacatacatgcatggaaatgagtggatatttcccagcaatcgggccctaaatccacccttaatttttatgccttaaaaggctccatgccttgtaaagagaacttgcttccacaggaatagatgagtcagaatttaggggccatatctatttgccatagtataagtgtaaagactctggttccccatcctaatcgggcccactttgatacacaaaggtgggactcgttatgtgtatactagaacaaacatgttacatattgttacagttagaatacaataggtcttgacaaaagc

SEQ ID NO: 132371 - DNA, 375 bp, Glycine max
  Clone ID: PAT_MRT3847_90538C.1
ttttttttttattttttttttttttttttttttttttttttttttttttggaactcgggggtttatctggaaaatttttaccgggccccgcaggggtaccaactttgcatataagaagggccaggagaacccggggaaaaaatgggaaaaggggggaactgggggaaagtgaaatccgctacacaaatccacaaacccgacgaaaccggaagaaaaaacgggaaagcccggggggcccaatgagggagacaactgaaaaaaggggggggggcccaaagaacattttaaaccggggaaaccggccgggccaaaggaactaaaaaaactggcaaagcgcggggaaaggcgtttaacaaatagggggccagggggggt

SEQ ID NO: 132372 - DNA, 3755 bp, Glycine max
  Clone ID: PAT_MRT3847_90539C.1
gtcttccagatacaatttcgatgatagcacaaactaaagtttctcttgataggattgtgtcattccttcgtcttgatgacttacgatctgatgttgtagagaagcttccttggggcagttccgatacagcaattgaagtagttgatggaaacttctcttgggatttatcttcccctagtccaactttgcaaaatataaatcttaaagtttttcatgggatgagggttgctgtgtgtggtactgttggatcaggcaagtctactttactttcttgtgtattgggagaagtgccaaagatatcaggcatccttaaggtttgcggaacaaaagcctatgttgctcaatcttcatggatacaaagcggcaagatagaggataatatattgtttggtgaatgcatggatagggaaaggtatgagaaggtacttgaagcctgctccctgaagaaggatctggagattttatcatttggtgatcagacaattataggagaacgtggaataaatttgagtggtggacagaagcaaagaatacaaattgcacgtgcactttaccaagatgctgatatatatctatttgatgaccctttcagtgctgtggatgctcacacaggatctcacctctttaaggaatgcttgctaggccttttatgttcaaagacagtggtttatgtcactcatcaagtggagttcttacctgctgctgaccttatattggtcatgaaagatgggaaaattactcaatgtggaaaatatacagatctgcttaatagtggtgctgattttatggaacttgttggtgcacacaaaaaagctttgtctacactagattcattggatggagcggcggtatctaatgaaataagtgtgttggaacaagatgtaaacctctctggtgcacatggttttaaagaaaaagaggctagcaaagatgagcaaaatggtcaaacagacaataaaagtgaactacaaggccagcttgttcaggaagaagaaagagagaaaggtaaagttgggttttcagtctattggaaatgtatcacaacagcatatggaggagctcttgtaccattcatattgttggctcagattctttttcaagctcttcaaattggaagtaattattggatggcttgggcgactcccatctcagaggatgtgcagccacctgttgaaggaacgactcttatagcagtctatgttggtttggccattggaagttctttctgcatccttgccagagcgatacttcttgtcacagctggttataaaacagctactatactcttcaataaaatgcacttctgcattttccgtgctccaatgtcatttttcgattccactccaagtggacgaatccttaacagagcttcaactgatcaaagtgcattggatacagacattccttatcaaattgcatcatttgccttcattttgatccagcttctgggaattataggagtgatgtctcaagctgcatggcaggttttcgttgtctttatacctgtgatagcaatcagcgtcttgtatcagcaatattatattccatcagcccgagaactatcacgcttagttggagtctgcaaagccccaatcattcaacactttgctgaaacaatttctggtactacaactattagaagctttgatcagcagtcaagatttcaggaaacaaatatgaaactgactgatggatattctcggccaaagttcaatattgctggtgccatggaatggttgtgtttccgcttggatatgttgtcttctatcacatttgccttttccttaatattcttaatatctattccacagggattcatagatccaggccttgctggtttagctgttacatatggacttaatttgaacatggtacaagcttggatgatatggaatctctgcaatatggagaacaaaattatatcagtagaaagaatacttcagtatacttgtattccttgtgagccttcccttgttgtagacgataatcggccagatccttcttggccttcatatggcgaggttgatatacaagatttgaaggttcgttatgctccacatctcccacttgtcttgcgcggtcttacatgcaaatttcgtggaggactgaaaactggcattgttgggagaacaggaagtggtaaatccactctcatacaaacacttttccgaattgttgagcctactgctgcctcagttatgattgacaacatcaatatctcttcaattggacttcatgatttgaggtctagactatgcattattcctcttgactttatactgtttgaagcaatcatgagtcttgtactagcaatactatattccatcagtccgagacctattacgcttagtttgagtctgcaaagccccaatcattcaacactttgctgaaacaatttctggtactacaactattagaagctttgatcagcagtcaagatttcagggaacaaatatgaaactgaccagggtgctgcctcggaaaagcaaggttttggtgcgtgatgaagccactgcatcagttgatacagctacggataatttgattcagcaaactcttaggcaacatttctctgactctacagtcattaccattgcacatcgaataacttctgttctagacagtgatatggttctgcttctcagtcaaggacttattgaggagtatgacaccccaacaaggctgctggagaataagtcatcatcttttgctcaacttgttgctgagtataccatgaggtccaactccagttttgagaaatctgatgatcattgattgaaacatacagaaacagaagtttgttgacaatgacgaaaatctggtggattacatggattttcttgttttatttatagaaaaatggattttataaaatagggcttttagctgtgaaatactctattctctttacaagggtgaaggatgaaattattgtggtaagatttatacaaaagtcaaatagaaaatcgagttggttttgatgcattcttagtatgtgtagaccaaaggcagtataatgtcctctaattagtcaactcgatttaataagtttcgaaagaagtcatataaattgtctcacattgtgagaactcataagatgtgttctatggtatttccttctttatgtctaaaattagtgtgccttttcttttagccttttgtaattgggaagtgcgtgaaactgtaatatctctacgcaatgtttattggaataaatatgggaagaaccttagaggatttatgggcagggtgctgcttaagaaaagcacggttttggtgcttgatgaagcctccgccaccagcgacacagctacggataatttgattcagcaaactcttaggcaacatttttctgactctacagttattaccattgcgcatcgaataacttctgttcttgacagtgatatggttctgcttcttagccaaggacttattgaggagtatgacactccaacaactttgctagaaaataagtcgtcttcttttgctcaacttgttgcacagtataccatgaggtccaaatccagttttgagaaatctgttgatcactgattgaaatatacagacccaaaagtttcttgacaatgacgaaaatctggggaattacacagattctgtttttttttttttttttgtagaaaaattgtattttataaataaggcttttaatctgtcgtggaccacttgactctcttctttccaacgctgaaggaagaaactattgagggaagctttatacaaagtgctattaa

SEQ ID NO: 132373 - DNA, 895 bp, Glycine max
  Clone ID: PAT_MRT3847_9053C.1
gtccgcggcaagatatccaagtccattcgacaggccttggaccagcccctgaattacgccagaatatacctggccgataccataccagaaaacgtgaaacgtgtgatatatttggactctgacctggtggtggttgacgacatagccaagctttatggtgttgatatgaaaggaaaagtcgtggctgcgccggaatattgtcatgcaaacttcacgctgtatttcacggataatttttggtcggacccggttcttgccaagacgttcaggggaaggaagccgtgctatttcaacacgggggtgatggtgatggacgtggacacgtggaggaaggagaggtacacggagaaggtggaggagtggatggcggtgcagaaacagcagaagaggatctatcatttggggtctcttccgccgtttctgttggttttggcggggaacataaaagcggttgatcatagatggaaccagcatggtttgggtggagataacttcgaaggaaaatgtagaagcctgcaccctgggcccattagtttgttgcattggagtgggaagggtaaaccctggttgagattagattctaggaagccatgcatagtggaccatctatgggctccttatgatctatatcgatcctctagacacttttttgaagaatagaaccaaccatccatatataaaccaggggattcaagtatttctttcaatcagagagagagagatcgagagagaggggtgctgccggataatatcatcattatttttttttcagttttctaactcaaatttggctgaccagaaaggaaccagctaaaacctccatcatcgtaggaagcagtggagttgtaaattcattttttttcctttctttggttcagtattcttttattctttt

SEQ ID NO: 132374 - DNA, 252 bp, Glycine max
  unsure (1)..(252): unsure at all n locations
  Clone ID: PAT_MRT3847_90540C.1
tgaacacaaccatcanncataaccatcgataataatagtatatatgataccgggcccgaaagaatggaccgacaagggcccgggagcccgagaggcgagcccttaaacttgggagcggacgcccaaaactgtgctatacaggtcattccgccggtctgggaagtcatgcaggcttggggtgcaaccactgtcccccagtcgagcaccggccttcacaccggaagagacgagacattattcgcccatgcccgg

SEQ ID NO: 132375 - DNA, 479 bp, Glycine max
  Clone ID: PAT_MRT3847_90541C.1
gggccttaaagaagggcccttttttttttttgtttttgggctggcctatttcttattttttgtttgtgacccttttaccatgagactttctctgttggcccccaaaaaaaaaaaccccctccttgttttctaaatgaaaggggggggaccgggtgtagatgacatggttttttcccccattaagggaacccccccttttttttctcaaatagaaggggggggagccgtttttttttattaaaaaaagggtgtttggataaacctttaaagaggttttttatccccccccgcttggtgggcctatacttttgggggggggggcggggcaattgcaaccccttttttgtgtccccaggggggggtccagggaaaatttccccgcgcccccttcttgttttttttttcgggggggcagttttgggattagatagattatccttctgtggggggggggtcctctggggcctatgggggggggg

SEQ ID NO: 132376 - DNA, 257 bp, Glycine max
  Clone ID: PAT_MRT3847_90542C.1
gtgaattggcttttctgtgcccctatgcgcacccccacaatctaggtctaaccttgataaattcagttttttctatttcaaggatgtgagggtgttctagctgattatgcagaacatgaaattcctattctggctggagcagtttgatcaagtcaagcatgaagtgaagttgcctgttattaggtattctctctttctcataattgcccccagggatttggttggagatatgttatagttatactacacagatatac

SEQ ID NO: 132377 - DNA, 483 bp, Glycine max
  Clone ID: PAT_MRT3847_90543C.1
tcaagaactgtagagatgacaattttgtccgcagaaaacctccaaatgaatagaaaatccattagaggaagcacatttgtgacggttcaatccgacactagcagcgacacaagtgctgctaccaaagtggattcagagggtggaagttacccttcgtggaatgagaaggttgtgatggacgtgccattgcatgcaaggttcataaccgttgaagtgaagtgcaaaacgtcatcatcagggtctaacagtgttggcgtggcacaaattccggtttctgattccattggagggtatatgcccgaaaaccaattgcatttcttgagctataggttgtgggacggcaaagttaggagaaatggggttataaacatttcggtgagggtgaaagtggctgaacattcttcttgtaatttgaattctatgtcattgtcagcggtaactggggtgccggtggccggtaatggccccactggagttgtcaca

SEQ ID NO: 132378 - DNA, 339 bp, Glycine max
  Clone ID: PAT_MRT3847_90544C.1
acgcaagctcggaacacggctcgagattgttggggcatgctcttgctggggcagaagcgatagcagacttggactcaacacccatggactgtgatagggacaagggggtgctcgatgagaccggtttaactgaaaagatctatcagctacttcctagcatggctgggaaccctccaatggataagatgatgcaggaacttgatcaacatgggaaaaccacacacgacatcggggaaactcgtgacaggacaccaatggatactacgactgcccctgatatcgaggggggcaagtgcgttggatgacacctgaagattgagagtgacacaaacacaggac

SEQ ID NO: 132379 - DNA, 400 bp, Glycine max
  Clone ID: PAT_MRT3847_90545C.1
ctcgaatctagtaaaaaatcagagaactggtgaaataatcaaaattgctattacagatacctcagtgccagggacttatgttcatgagcatacttaacggcccaagcacattcacttgacgacaagaatgagatgaccttacagtctatttccacctatagcgaaacaccctagatcctctattctgagacgagtggaccgtacctagctgcaatactggcaacactcatactctagggcatctgaactatctgcattcacaaagtcccccgtgatctgcagtggatttgccaggtttcaaagaaatgaaatgctgttgtatgagctaaagagctaggtgattatagaatgcatctgacacatacttctttgtactacactgcatcttttaagatcatat

SEQ ID NO: 132380 - DNA, 358 bp, Glycine max
  Clone ID: PAT_MRT3847_90546C.1
attaacacaatgagtattctaatctgatgatacaaggtacaggctatgatgcctaatgcatcggctatattacacgggctaaacagttagtttcccgtccaacgtaaatgatgacagtttattttgaatgacagagcgttacaatcgttttaaacagataaatggatgaaagctgctacacattatactacacgttgcttaatacttggggcacagagccaacttccagccagaatggagtcagcataaatctatcactcgagatgcctccagcatcctggcaccaacccatgttcagcgacgcagccgccactctacggtatcatcattgggcagatcgatagagatgtgctggatg

SEQ ID NO: 132381 - DNA, 649 bp, Glycine max
  unsure (1)..(649): unsure at all n locations
  Clone ID: PAT_MRT3847_90547C.1
gttgtatgaannntatgtataatacaagcaattatctttgtgaagtcaaatctttgatatctcagagtgcccacatgcgagatctccaagtgatgattggatgaaagctggaaataaacatacggataatctacggaattgtcctatcttagaaccatatgtcattgcttcccttcatttgaattcccctagctcccatgtgccttttgtaaaatcattgaaattacaagttgcaatgccaggcccaggatcatctgcactaggcaaaacacatgtttcaatagggcagctgcctgcactcaataatattaaattgtagtcattccttcggatctataaataagatcaaaaatcttactcattttaaatttatagatgacatactgagcttaattttgatcttatttattttagcgtaattttttttctatattgccgnntcatgatatattattgtcactgtcatgctatttactaagnncttaaattaacaacacagcagtacnnactgannacagtgatcacatgccggnattcatttcaagcagctgaaaacacgtnnaaacaatgaaacttgagaaatcagncctcnnnatctnnngtatatcacaagactagactttaattacaagccnnctgtaacatanng

SEQ ID NO: 132382 - DNA, 224 bp, Glycine max
  Clone ID: PAT_MRT3847_90548C.1
cataggcactgcaggtagggtgacgattacctccatagaacggagggagcgtcttcttgcaagcaaggcgactgaagttgtttgatgataaagtttttgctgttgagtatgcgcttatctacacctgctaattctgcatgtatgcttagacagacgtgaaacagcaagatctgaaatataattcacaatccttcgttgtgaataaactggaataatttataaat

SEQ ID NO: 132383 - DNA, 138 bp, Glycine max
  Clone ID: PAT_MRT3847_90549C.1
ttgttttttttgagaccgagctggttaacagcgatctattggacattggggagaacttacaagagctgctcctccttgaaggagggcttataatacaaaggtctacaaaagaggtagaaaccattaaacacagggcaa

SEQ ID NO: 132384 - DNA, 176 bp, Glycine max
  unsure (1)..(176): unsure at all n locations
  Clone ID: PAT_MRT3847_9054C.1
tcgcagccgctcccgtgtacagtttgcttacacaaaaagccacctctgacctctcttcttccnttcagttcagaaactcccctccatgaacgtacnatccantaaggntagtaatcnacnanggnttcntggcctaaaggcaaannnnttaggtnanggtttttcnatnggaccaa

SEQ ID NO: 132385 - DNA, 272 bp, Glycine max
  Clone ID: PAT_MRT3847_90550C.1
ccttgggtaactcaccccgatacagacaactacctccacacccgtagtaactgtggtctgatactgacctcccgcgcgtcaacttaacttggtgaagtcacgggggcctattggtcgccgtatgcgttcagggaagcgttccatcgaaccgaaccgtacttacacgcgtatcttgccggggcccatgatcgtcctcgctgaggacgtccgaaatgcacacgactacggcgacaacggtgaccaccccaaatatgtcccttgagatatcatca

SEQ ID NO: 132386 - DNA, 294 bp, Glycine max
  Clone ID: PAT_MRT3847_90551C.1
gaaaatcgccgagcttatgacagaactaatagaagacaaatgactgtaaaagaggtattataaagtcagatcgaacgttgggctaactcatcagatgatactaacaacaaggcactgcgattgaaattggatgctcctaaagctggagagactcccgatccagaatctaagacgagaactggggattgtatatttatgacatcagccagaattattatggtcacacttcctagaaacaggtctggttactgtaaagggactccgggccaaagggggcccatattctttctatga

SEQ ID NO: 132387 - DNA, 255 bp, Glycine max
  Clone ID: PAT_MRT3847_90552C.1
caacaacttctgctacttcctactccaaccgcacttctggtccgcaattatcatgggcaaggtcaagatcgggatcaacggatttggaagaattggccgtttggtagccagagtggctctgcagagagacgatgttgaactcgttgccgttaacgaccctttcatcaccagcgtttacatgacatacatggtgtagatacgacagtgttcatgggagcactggaatcatggctatgtcgcggttaagggcggaga

SEQ ID NO: 132388 - DNA, 193 bp, Glycine max
  Clone ID: PAT_MRT3847_90553C.1
ggaatgcaaagtttatgaatagaggagagctcctccaatgggtctccattttaaaatgtaggtgatttttcaaacagtctatttgaggagagattctcaaagtttatatttatttgcagccaataataagttttggcgtgtctgaatgaatatcacccatatattgattgatattgaatttttgaattcttgt

SEQ ID NO: 132389 - DNA, 512 bp, Glycine max
  Clone ID: PAT_MRT3847_90554C.1
agctacgcacgcgtccgaagggagtggcaattgaatagtgaggtgatggtgaaagtgtcatcaatggagaaagagggtgaaaagcaaaaactgggggaaggaccccaaatctcaagaatggagccggtaacacatggtgcctatggtggtggaatgtacggtaccgagaaagggcaaccggagaaacaaacaaagccaccggcaagtgagagccagagtgctgatggccccgttgataaggacgctatcaagcccaaacacaatcctcccccttcaactggggacagagatttagatatcactggccagtcttatatccagtaacaaaatatatgtaaatacaatcactataataatcagggtgtagcttcctcttttatgtttttttttttcctattgttgttcgtgacttaatgggtacatctttatgttggttttcttttaggcagccaactttttaatccttactgatgttacaatttgataaaaaaaaaaaaaaaaaaaaagggcgg

SEQ ID NO: 132390 - DNA, 258 bp, Glycine max
  Clone ID: PAT_MRT3847_90555C.1
acggctgcgagaagacgacagaagcttggacctttcatgcaagcttctacccttatgtgccagactccgtaatcaagagatggtatggggtacgcgggaagaatgaattattgcagaaccaaggatttattggctgtgatggaatgcgattcataaatgtgaggcgtgggggtgcttccgcctgaaccccacgcttgactggttggatcagcctgtcacctgaactggggtgctagggctagagcaagggttgggtca

SEQ ID NO: 132391 - DNA, 244 bp, Glycine max
  Clone ID: PAT_MRT3847_90556C.1
cttcaggccaagccaggtaagcaagcacaacacaaccccgaaatggcttctggttctggtccgatgggttttttggctgagctctgttatcaacaacaacaagccttcatccgaagcctttttaaggccattacccttacggcaaccaaagaggacccttttaacaacaaaggcagggtcaaactccaaggctaaaataaatgcatctttgaaggaaaaggcagttgcaggactaacagcagct

SEQ ID NO: 132392 - DNA, 201 bp, Glycine max
  unsure (1)..(201): unsure at all n locations
  Clone ID: PAT_MRT3847_90557C.1
agatcgcacccgccccgatcacaggctgtcgnggggtatttttcgaaaacatagggggtttttacctgatttcaagaatctttcaatatccttctacctctttggggaccaatccttaagggaaagaaaatcactccttttggacggccaccaactttccgaattaataccctatccaatcttaggttaattggtggaccc

SEQ ID NO: 132393 - DNA, 365 bp, Glycine max
  Clone ID: PAT_MRT3847_90558C.1
tattattttattgtttttttttttttttttttggaactgagttggggcaatccaatttattggcaacggattttgcaataatttttacgcaaagatatttgcgggggttatgggcctgggaaagaaactgggaaggttttcattggaccaaaagggctttttcaaaatagtgaaggggccctaaaacgagccattggatgaacaccccggtttccccctaaccccagggtgggggctttttctttaaaaagggccccatttttccgggttagcccccgaaggagtgccccctgacaccctttccatgtgaacctttgccccccccatcttcatgctttttttgaaaacaatggggaccccctgtc

SEQ ID NO: 132394 - DNA, 238 bp, Glycine max
  Clone ID: PAT_MRT3847_90559C.1
ttctcttcacttttaagttaaatagtttttcattgtatcattcaatctactatggccgcttcatcaatggctctctcatcatcatacatttgaccggcaagctctcaggtttcgcgcctcgaaccttcagcttcgcgcttgaaagtttagcctcatgttaacagtctccaggactgataccacttggtgcccttggtacggcccaaacggtgtctggtacttgggctcacactctggt

SEQ ID NO: 132395 - DNA, 264 bp, Glycine max
  Clone ID: PAT_MRT3847_9055C.1
acgcgtacgagattgcgcaacacagagtatcttagatggtgcggtacatcacagtggtgtggtgcgcggaggcggcgctactgcacgcctgtgatggcacatactgggaggaggatgcggctaacccgattcaaatggcggcatcacgtggaggaggaggaggaccgctaaattgggcagttccggcgcgcgcaggagtgcgctaggtgcatgagcacgttctagatgagttaccgcagctaggaaaacatgatggagaagtac

SEQ ID NO: 132396 - DNA, 2382 bp, Glycine max
  Clone ID: PAT_MRT3847_90560C.1
acgacccacgcgtccgctgatttctgagggtacatccgattttgtactagtagaaccaccgagcgcccctctcttcatccttcccttctccttctattaccgtaccgtagctaccatcacctacgattatttctctctctctctctctctctctctctctctctctctccttctattctattctatcgatcttcaccgcctcgctcgcaccttttcgatctccaaattagggttttcatcttccattttccgcgcctagattcattccccaattgcctcacagatccaccacaccttctccctcatgttctggaagctcgcctctatctcttcctcctctcccgtggaggtaatattggacaaggagaacttcactttagaagaacttctagatgaagaggaaataatccaagaatgcaaggccttaaacagtcgtcttatcaacttgtattctgagggatagagctcaggttgagcaattgctacgctacatcatagaagaaccaccggaggatgctgaaaacaaacgggtcttcaagtttccattcatttcctgtgagatctttacatgtgaaattgatgtaattttgaagaccttggtggatgaagaagagctcatgaacttattattcaccttcttggagttgttctttctcatattctttactggctgagcatttgttgtttgcaatccaataatgttgcttaatcgcaaaaacttgatcttggaaaacaagtaggattcgttatgcatgcatatcatactgcgtcatacaatcttttagtatcaaagaatttgaagaacttcccactgagtataattaactcaaaaaaaaaaaaaatatctatgcaggcattcaactgggagtccaacaaatacaactggtggaataatttagaaggcaaagtttctgacatagctaaagcaggatttacttcagtctggttgccaccaccaacccactccttctcacctgaaggttatactccgcagaacctttactctcttaatagtaaatatggttctgagcgtcagttaaaagctttacttcaaaagatgaagcaatacaaagtaagagcaatggctgacatagttattaatcatcgtactggcaccacccaaggacgcggagggatgtataatcgttttgatggaattccattaggttgggatgaacgtgctgtgacatcagattctggaggactgggtaatcgaagcacaggagccattttccaagggtttcccaatattgaccatactcaagatttcgtgagaaaggatatcataggatgggctccgttggctgcgccacgaggtgggcttccaggattttcgatttgattttgtaaagggggttttcaccaaaatatgtgaaagaatatattgaaggagcaaagccattgttttgtgttggggagtactgggattcttgcaactacaagggttctaccttggactataaccaagatagccatagacagcgaataatcaattggattgatggcactggacaactttcaactgcatttgactttacaacaaagggaattctccaggaagctgtcaaaggaaatttttggcgtctgcgtgatcctcaagggaagcctccaggtgtgatcggatggtggccctcaagatctgtcacatttgtagataatcatgatacaggttcaactcaggctcattggcccttcccaaaagaccatatcatggaggggtatgcatacatattgactcatcctgggataccaacagttttctatgaccacttctatgactggggtgattcaattcgggagcagattgtgaagttgattgatgttcgcaagcgtcaaggtattcaaagtagatcatctgtgagaattctggaggccaagcacgacctttactctgcagtaatcggagagaaggtgtgcatgaagattggaaatggttcatggtgcccaactgggagggaatggacactatcaacttctggtcacaattatgctgtgtggcacaagtagtgttctgttggcatgtcatgacccttctccactggaatcacagagaagagaaaggaattacgtgcttatatgcttctggagtcttaagcttgataaaattgaagctatttccttaatctcgcaggctttggaaagctctttaatttcctttcaacttacgtgctacccagttaaataaacagtatgtaactataactaatttacagtagctgctttgtttatgtaatacataacaataaaaataagcagctttgtctatgtcatatatgtaaaataaattaataataaaatttctattagtacctataaaaagtgtggcgttcctcatgatttttataccaaaaaaaaaaaaaaaaaaaaaaaaaaaagagaaaa

SEQ ID NO: 132397 - DNA, 1155 bp, Glycine max
  Clone ID: PAT_MRT3847_90561C.1
tcgcccaacgcgtccgtacggctggagaagacgacagaaggggtttgtttccctataatcttaaaccctccgaaaactccccccaacaacgttaattgaccaaaacccatctttgttgttcttaaaaatttccatatgttgaaccattttatttgtggcagtctccatcaccaagaagaagatgtaccatgttcaagccccaagaagtaccaggagaaaagaaagtaggaatgacaaaaacccatactccaatcgaggcttggacaagttttctgcacttttggatgatcttgatgagagaaggcaaaaggtttactcacagatgagtcctcaggacatatcttttgttcggtttgcgtattcaagcaatgatgatttcgttcccatagtggtcaaagtgaaaaaaaataaggatcagaagaagcacaagagtgaagaactcaaagcaagacacataacatctttctcggagcaattggagaaatctgatgaagaagcaaccttgaaagaaaggaagcagaaactcaataagttggaatctcgtaagaagaatttgagcttttcttggtttatgttgaatagtggtcacttctatgtgccagcggttatgatgttgattttggtttttttggttgtttttgggagatcggttgctacactttgcacttgtgttgtgtggtatgtggtccccacattgagtgaatattatgatagttcaaaaccaaggaacaaatcgatgatgaactctaagaagagagactatgttagggggtggctgatgatagtatgaagatgatgaatcctgaagagttagcttctccaagaactggtgattccaaggattattcaaatgacaagaattcagggaaacatggccaccagaaaagttggtgaggatagatcatttgatatgattcgttccttttctttttctatttcccaattattgattggagataggattttttttttcttccttgtgtaaatatgtgtacgttttgttggtgacgttcttgagacaggttaaaaattcaatccttctcttgttgacgttttttaaattgtgatatagttagggctgatagatgtgtacatggagccgttaatggttttgtaaagttctttaaaatcaagtgcggtgacaatccaattcca

SEQ ID NO: 132398 - DNA, 291 bp, Glycine max
  Clone ID: PAT_MRT3847_90562C.1
gggcactaattctgctgaaaaaatcaattttttccccatttggtcaaaattttcagggaataaacggcttaaatatttcccactttaaacaaatgccagccttgtcaaaaaaaaaaaaaaaactggggtaacaattggggttgccaaccgctctttaaaaccattccccgggcattttatttttctttgccccattagccccaaaaaggacccggggagggtctcctggaaaattttatcgggaaaaggttttaaaaccccaggtttttgaaatttactgctcccattggt

SEQ ID NO: 132399 - DNA, 462 bp, Glycine max
  Clone ID: PAT_MRT3847_90563C.1
cttcagctgctaattatgctggagctcgagccgaatcggctcgagacggctgcgagaagacgacagaaggggagagtgagagaaactagtgactgacttttcgagaaaggaaaaaaaaagagtttccggcattattccatcatgaacgctcttcccattcttctcttcttcctcttcgtttcggcattaggtattgttgttcccttcctcttcttcccaatctgcaaaaatttccaacacctctttctttttattgctcttcattcttcgccgcattttcaatccgcagttacttcagatctcgttaattttccgtttcaattcatcattttttttctatggtttctctttgccgtttatgtttttcttttttgctttggcgttctgactttttttttctggtctgtgtttcagtttatgcgaagaaaactggcgatgtgacggagttgcaaattggcgtga

SEQ ID NO: 132400 - DNA, 633 bp, Glycine max
  Clone ID: PAT_MRT3847_90564C.1
atcagaaacagtgaaaataatacggttcttttgtaattaaaattgaaaaaaaaaataaaacaaaaacgggtttcttaattcaagcgggactttatcaatgtattatatacatttacttacatcttattttgaggatttatctttcctcttgaatgatatctttcaaaccgaatgctgatcagtttgatgctcaaattaattatctaacctatttagcatatctttttattgcacccatttcctcagaatacctccttatattaatggatgctgctcaagttggcgggtcaggatgattcaacaacatcttcgcgcaatctttatttttgtatttatgtgtttataaagcggggaggatgctgataatcgaattagcgttcttagtaaaaacccaaagcagtgagtttttcatcaaagttgttcgaaataatagtaagattgatccaattttagtagaggatagaatcaagatcgacacttatctcatggttcttattttttttgattaaaacgtgcgctcgattggaagatttcccattatttgaagtagaatttcatacaaccacagcaccacaaaagcagtttccaaatccttgcagcttctagtcgttgccacattagattgtaaagaat

SEQ ID NO: 132401 - DNA, 353 bp, Glycine max
  Clone ID: PAT_MRT3847_90565C.1
atggaacaggggcccttattttattaaagccacgaaagaaaaaacaacttagggaagtcttttacatgacttgttgacccacagttgaaacaacataaagtgaagctagtgcccttttttgaaccctttttattacttttagatagatgggaccaacctaaattgttgaaaggtgaaggaactactgattgtattacaggggattaggaagcttaaaggtcctgttttcgcctttgtggcctccgaggaaatcgctccattggtctccaatgatcccaacaatgttgaatccctgccttatcagtttctctctcgctgctgttttgaataaaactgcttttggagtggaagga

SEQ ID NO: 132402 - DNA, 929 bp, Glycine max
  Clone ID: PAT_MRT3847_90566C.1
tacggctgcgagaagacgacagaaggggaaggtagagtgtacatatataaatatatattctttctgaaggtcattgtcaaatctcaatcagcttatgatcctacgaggatggcaagtgatggtagatgaagagtggacagatgatttgttttttctttgctgttaaatcatcacagttaatacgtttccttgtcgttttctattgtttttacattaacatgcagctacattaccgacgtgcgacggttgctggacactagcccaagtagtcattgaagtgtcatgttaattttcattttgtagcaagtgcatacttgctttcttgaaggggtacgagtgtaactgcgacccttggattgagaaggaatccaagtttcgcaattatgcttgattttaatcaccgaatagaaatagctttgcatttttatttgaggtcgactggtaaaaggtacaaagaagaatactaagtgaccagtgtcgaagtatgatgatattgacaacgaagaggaaaaggaaaattctaatatttttggattttctcattatgatatgtgatttttctgcttatttacaatttacaatatgtggacttgaaagtccaaaggtgaatcaaccttcaatttgtttccacactattcgactaaaaatatagtatatgattttatgtggcccaatagattaaagttatagcttaaattttgtattgtatgagtgatagttgaatccaagattactgcgctcttcaatacattaaatgcattcatgggctgggttggttcgagttttgaaatttctaaaccaatccagtagtaaatactctggttgagttgatgttgaagtatttaaaaacaaaatgaaaatattaccaaaaaaaatccattggtgttggaactagctaacaaaagggttggtgtcgatctattgctctt

SEQ ID NO: 132403 - DNA, 172 bp, Glycine max
  unsure (1)..(172): unsure at all n locations
  Clone ID: PAT_MRT3847_90567C.1
tcnntnncccattacganacngtcacgctacngcnntgnanntgactcnagtgantcnnntttgctcnagaattgnagtggnnnnancatgnncnactgggancctgctnagagnggccnaacctagnncntgccngtcaatgtgnnnngnggnntncncncnnannagcgn

SEQ ID NO: 132404 - DNA, 151 bp, Glycine max
  Clone ID: PAT_MRT3847_90568C.1
tgctgatcgtgtcttggagctcacagtggccaggtcttttaactggattggacctctaatggattttattcctggcattcatggtccaactgagggtgcttctccgcttattgcatgctttacctatcctattctaacaggaaatcccctg

SEQ ID NO: 132405 - DNA, 303 bp, Glycine max
  Clone ID: PAT_MRT3847_90569C.1
tcctataactataacttcaacacttcattttacaaccgatgctgaagatgctacggctgggtcatttgaaaagtgacaatgactctctcaccctaatggaacaatatacccatcaccacacttacttacactctaacattaaccttatacaagataatgataaacatcttcagaaaacccaaacaataattgaaaatatgcatcttcacaatatacacattgcacctaaacaatctaggtacaacaacaccacctttattaatcgtactcatcacaaattcaacaattctatactcttttaaa

SEQ ID NO: 132406 - DNA, 363 bp, Glycine max
  Clone ID: PAT_MRT3847_9056C.1
gcattcttgatggcaatgacaaattaatcatgggagagaacatggagagcagggaagattggagagaaagaaatgcttgctctttgtcactggttaagagaattcaagctctaggaatacaatgaaaagttgcagaagaaaatgaaggaacaaaatgggaaataattgtttgtaatatatagaaaccttgtttgtaacacaagagtttttttttcttacattgtatctttgtgctttggctatttttcataggggtggtcgacctgatgaacccgaaccaaagtgaaggagaaaatctgggttgttttgtaacatatataatgggcaatgatgatctgtaacttagagaaagcggtttgtaac

SEQ ID NO: 132407 - DNA, 285 bp, Glycine max
  Clone ID: PAT_MRT3847_90570C.1
cccacacttccgaatcatactactttaacactcatcactgacatcatcaccgtatccaactgtgcaactgataaacatacatgtggcgagcagaaacacacaaaacacactaaatagctatatatatcctgccaacttacatcatctttctacccccaaaaacatatccaaatacatttcttcggatgccacaatttacttatcatttggcaggaacgattcaaatgctcttagtttgcgacccgctccaattcaatctcctaagaagaaccatttcttattcct

SEQ ID NO: 132408 - DNA, 477 bp, Glycine max
  Clone ID: PAT_MRT3847_90571C.1
atggattgagtctgtggtagttccgcttgagttgttgcagcagctcaaggcttcggattttactgatcatcaagagtatgatgactggcagaagaggaccttgaaggttcttgaagctggtttgattttgcatcctcatatgccgttggataagtcaaattctgcggcgcagcgactgcggcagattgttcatgctgcattggataagcctatagaaaccgggaagaataccgagtctatgcaggttcttcgtagtgctgttatgtctcttgcaaataggtcgtacgaagggtcttatgctgattcatgccactgggcggatgggattccactgaatcttcggctttatgaaatgcttctgcaatcctgctttgatgctaatgatgagtcgtcaattattgaggaatttgatgagctaatggaacaaatcaagaagacctgggcaatccttgggttgaatcaaacactgcataatct

SEQ ID NO: 132409 - DNA, 371 bp, Glycine max
  Clone ID: PAT_MRT3847_90572C.1
gcacgcctactctagctggtcctctagctcaatgccattgactcatctactacagataaccaggcatagatggtcaaatatgaatcggaggcaggcgaatccctattacgcctatccctaagccaacggaaacgcgatcgcaattcctaattgcaattccgatctcacatcaacaagacctagtgatgcagaaatctacatatatgaataggacccatctcttcacttatcattcctatcctctaaccaaatgagatgacatcggagttcctcgtgtaattccaacaccacatttacacgatgtaacgatgctgtcatgtgcatatatgaattgtgatcattcgtaaacctaacatgcctatcccgaatcc

SEQ ID NO: 132410 - DNA, 302 bp, Glycine max
  Clone ID: PAT_MRT3847_90573C.1
aaacacaaaaaacgtatctcacgcggggactaacatggctgcgccttatttattcatacaaattattacctattatacaacacaattcattgcgcaaaacaataacaattaatggtgttctacccatcccttatgctctatgcctaatccaattttcactccatataactctaccttatcaactctttctcataatccaactttatacattactactaccatccatttaatctcctaaacaatactttcatttactcatcattttctctgacctttatactactatccccattaaactcctt

SEQ ID NO: 132411 - DNA, 461 bp, Glycine max
  Clone ID: PAT_MRT3847_90574C.1
atttttcaggggtgaccttacagaagatgggttcttgagccgaagtggtccttggtgtgatcaggtcagtttttcttggatgatataataagatttttttttttgttggcttcattaatagacagtacatattgtttatcttgcagggtctttgccttgttgactggggaagagggattgatttgcatctctttccagatcacacactatttaagggagattgcaaaacttctggttttcgctgcattgagatgctagaggataagccgtggaaatttcaggtagatgcatatggcctttgtgctgttgtccatatgatgttgcataattgctatatggaagtcgtcaaaaaagaacaatctgatggtagctacatgtatcttcccaaactaccctttaaacggtatgttcctagtgttatattgtatgcaaattgtacttctgtttagcactgcgatttt

SEQ ID NO: 132412 - DNA, 734 bp, Glycine max
  Clone ID: PAT_MRT3847_90575C.1
tgacggctgcgagaagacgacagaagggggatgatcctttaatttcctgagttccggcgaattaacaagcttcaaattcaattgcttttcatgcaaatggatgtttatacacacatctcattaccatctttcatatcgcatcgcttctcttcttcacgattccaatgctcatcactttcttcttgttctcctttcaagcttgtctgttccaacagagactccaaggaatctcaacgaaacgacgataacaataacaagggtgataaatcttcaacagactgggacaaggcatggtcaaaattcaaaaagcaagggggaaaaaacccttctccaaattttcagataagtatgtgagctggaatcctaagcgttcagagttccctctttctgaggaggttgaccctatcaagagaacagagagatcaaacctcagtttctggaatagtccaactttcactttagggggtgcaattataattgtcttatttcttctgttgtacaccattcttgcaccaatcaagtgatctcttttaaagcaatataactgtaaaactgaaatattgtttcgaagaaattgtaaactttactaatgtaattgatggcttctcccacattttcttttctcggatttgtcgttggcttttcatagccaatcatatttacatgtggtctttacacatgccgaattgagatatgaatatggaacaaattgatcacaaaaaaaaaaaaaaaaa

SEQ ID NO: 132413 - DNA, 181 bp, Glycine max
  Clone ID: PAT_MRT3847_90576C.1
tcctgatgacaaattgcggaatacgggggcgccaagggacacacccttgtcttccacaaaaaaaaaaaaaaaaaaaaatcgggcgatgtggacgatctaaaggatccaaccttaccttcccatgcatgcgacgttatatcttttctattaagttaactaaaatcaacttacttgcccaacg

SEQ ID NO: 132414 - DNA, 353 bp, Glycine max
  Clone ID: PAT_MRT3847_90577C.1
tccggctgcaagaagacaccaggaggggataagaaataagttataatatattttacattgtaccttatttcttataaaaagaatcaaagatagataagattaagcaacttagtatctttatacacaccatgcacacaccatggatatatatatgtattgtagtaactactatggggaattatcggagatagagctatgcgattggtgccaaagcgagggaagaaattactcgagatcacatagctccaattcgaagaaattagcggtggccggaaacgacgccggaaccacgacccgttcggaatattccggcgagaaaatcaagcaccatgatcgtgatcaagagatgagtg

SEQ ID NO: 132415 - DNA, 384 bp, Glycine max
  Clone ID: PAT_MRT3847_90578C.1
tttttttaccgtacaacactaatcctactccatatggaactaccataattagtgagtcattatattaacgaaaatcaggagctctattgtgctcacatacaaaaaagaactactgtttggacagagctatctatctgcataacatctcctgacttcattaatgggaacaactccatcactgttgccatccattaggtcaaatatctaatccacttacccccgttctttcatgtcattttacatactatccttttgtaaagcctctagtccatagaatgtttgagtcactgagatcaaaggcccaagtaaaggcttactacaaaaatataatatactcatgcttgaacataaagtataattcaattttgatcttttgctaccatt

SEQ ID NO: 132416 - DNA, 357 bp, Glycine max
  unsure (1)..(357): unsure at all n locations
  Clone ID: PAT_MRT3847_90579C.1
caactgttactacacatcacgaccattgggtaacatgtagtgtgtttttgtagcatatcagcagttaaacagatgaaaaggtgattctagcgaagtatgacaatcggtatggttgtggctaccatacttcggagttctgagatgaagcacagtgtggcacttggagcacccattcttgcgtgatatgatatgccaggaggaagagtgaacgagtatgaataattatgggatggatagataatatggaacgccacatgttgtttgatggcatacggatactgatgacaggacatatcatttgtgacttaccattgaggggttagaaatgtgtncaggccaagacagactattattcta

SEQ ID NO: 132417 - DNA, 563 bp, Glycine max
  Clone ID: PAT_MRT3847_9057C.1
atcaatatcaatcctgcaagttgcgtatatttgatccgaggtctcagtgaaaatgggaggctggatgatgcagtaaacatcttcgtttacactcttgacaaaggtttcaagttgaagtcaagtgtttgtgagcaactcctcaaaattctttcacaagataaaaaggagtgtgctattgatcttgttcctaggatgaagtctgctggatactgtttaaatggtttgtttttgcagaacacatagtgtacagagcaggataagcaataaaactgactgatcaatatgaatgaatttctgtattcagctcttcgtacatctccattaaggaaagaggctatgaatcgggagactcaatacactttctaatgaactaaaggtctcatgttgcaggggcaatttcttttgctttgatattctgcgtgcttgtcatcatgtgctgtatgacccttcatttcaggcatttttgggttttccatttgttgtatgcttcagtacgtttcttcctatatgtctaagagcattttggcaaacattgacaaggaagagggaaagaagactgacta

SEQ ID NO: 132418 - DNA, 292 bp, Glycine max
  Clone ID: PAT_MRT3847_90580C.1
ggtgcacgtctccttttacaggatctatggttagacttttaacaagccccgccgtccgtacaagaaggagctgtctagaccctgagcttaagactggtggggtgagtacgggctgcggtgcaagagggagctgtggagggtgcagtacgctctcacccgcctccacatcaacgcgcggaatctcctttccctcgtcgagaagaactcgctccggatcttctatggcgaggctcttatacgcagaatgttgcgctactgactcctccatgatgactctgaacaagctcgatta

SEQ ID NO: 132419 - DNA, 421 bp, Glycine max
  Clone ID: PAT_MRT3847_90581C.1
caaattttcactcttttcttttccgccagtgattttagatgggtgcgcgggtgatggcaccacggggaagggctattttaataagggttatttcaataataaaaacaactttatagaaaataaacagggttgggagcaagaaaaaaatgacccactaacaggttttggccttcaagttattgagtgagtgggttttcttggatcacccttctgcttcgtcttcatcttcttctgctgcttcctgtgttgtcgatgattttggtgttcaaaatcctctattgagaggcggtgaaaagctccttttttaattgttttctcactccaaattcagctatggctttttcttcccttttaaatttgttgaaagagcttacatcaacggctttaaaatttttttttttacagattatgacactttttt

SEQ ID NO: 132420 - DNA, 359 bp, Glycine max
  unsure (1)..(359): unsure at all n locations
  Clone ID: PAT_MRT3847_90582C.1
gtgttnaaaggggggggctcaagtttgaattattcaacttaaaaataaattgtccaacgggttttgtttttttaataataacaaaaaactttttgacaaactgttttaaaaacttttgaaaggggggaatcccccttggttgggcctgaattacaaaaaactgcggggcaaatgcttttttaatcacttttggtgaggaaatagagcgaaattgggaactaatgttttttgcccaaaaaaatttttatgtgggaatacatttttttgactcctggtcccaaatttaagggggtcctttttcctaaagtcggaatttcggtgggggtcaatgggccccttctttttaaaagttttttttt

SEQ ID NO: 132421 - DNA, 437 bp, Glycine max
  Clone ID: PAT_MRT3847_90583C.1
gctggcagaaaacgaccgacagggaggatcagggcgagtctctgtgtctcgtggcctcggttcgataagtcggtggtggcgttgattaagggattgcttggacgccgcgtgctaccggggttcgagtttgggttgagtgacgacgacgttttgaaaattgggaggagtacggatatggatgtgcagtctgagttgtatatttgatttactgtgtgattgtaatttatattcatggtttgatcccctgaggagtagttcggtactttaagttactgtgtgatgttgtgattggtaatttgattaattagtcacagctacagattttacattgacacatgtgtcatgactagacgaattgtttggcataacgagtagttggtttgtctgttgtggtgcactttacagctttgttgattcactttagacatggccacgga

SEQ ID NO: 132422 - DNA, 2202 bp, Glycine max
  unsure (1)..(2202): unsure at all n locations
  Clone ID: PAT_MRT3847_90584C.1
cccacgcgtccgcccacgcgtccgcccacgcgtccgcccacgcgtccgcccacgcgtccgcccacgcgtccgagaagacgacagaagggccctgccaatctcgcaacgcaagcgacaacaatcgtcacagctcagcagagcaaaaccaaaactcccctttgcgacatttttacaaacaccttctgcctacaaataaaagatatttcagttttcatgtcctcgtagtggttgggtttgagtatgtgtgtgagatggaagagagtggcgatgcgagggatcttcagaaaccgttcctccacacagggagttggtacaagatgggttccaggcagtccagcatcatgggatcctccactcatgttatccgcgacggcgccgtttccgtcctcttctgcgtcctcatcgtcgccttgggtcccattcaattcggcttcacgtgtgggtattcttctccaacccaaggggctatagttcgcgatctaaacctctctatttcggagttttctttctttggatctttgtctaatgtgggagcaatggtgggagctatagctagtggtcagatagctgaatacatcgggcgcaaagggtcattgatgattgctgcgatccccaatataatagggtggcttgctatttcttttgccaaagattcctcgtttttgtatatggggaggttgttggaaggttttggcgttgggattatctcttatgtggtgcctgtttatatagctgagattgcacctcaaaacttgagaggtggccttgggtcagtgaaccagctctctgttacaattggcattatgctggcttatctgttgggtctttttgtcaactggagagtccttgcaattctaggaattttgccttgtacagtattaatacctggattatttttcatacctgaatcccccagatggttggccaagatggggatgatagatgagtttgagacttctttgcaagtgttacgaggatttgacactgatatatctgttgaagtacatgaaattaagagatctgtggcttcaacgggaaaaagagctgcaatccgatttgcagatctcaagaggaaaagatattggttcccgttaatggttggtattggattacttgttcttcagcaattatctggtatcaatggaattttgttctattcaactaccatctttgcaaatgcaggaatttcatccagcgaagctgctacagttggacttggagccgttcaggtcatagcaactggaatttccacatggttggtggacaaaagtggccggaggctgcttctaataatatcctcatctgtaatgacagttagccttctcattgtttctatagcattttatctggagggggttgtatcagaggattcacatttattcagcattttgggaatagtttctattgttggactcgtggctatggtgattgggttctctctaggtctgggacccatcccttggcttataatgtctgagatacttccagtgaatataaagggccttgctggcagcatagcgacaatgggaaattggctgatttcgtgggggatcacgatgactgctaacttgcttttgaattggagcagtggagggacatttacaatctacacagtcgtagctgcctttactatagcttttatagcaatgtgggttcctgagaccaagggaagaacattggaagaaattcagttttccttcagatagatatatgttttgggagagcacagaggtagtctattatgtttaaatttattatgtttaaatttaaatgacgagtccacctgtatcatgtatttttgtagtccattgtatttttattgtgtatcaaattttctgtaacaaatgaaaggagaagaatcagtgcatcgtgttttttcactgtacaagctattggtacaaagacaataaaacaaatatagtagcaaaaaaatgggaaagataaagaccaaaaaacttctagtcatagtgtagctgttaaagtcgagtttttttttattacgaattgtattctgtcatggcatagggaaaaagaaactactagtgacattttttgtaaacgtggtccccaagtaaaccagtgacttggttactccccttgatgacttgaattattgcataatattctggttgctttcctggttttggctgattctcttattgtcgggtaatcaaattaagaaataaaatgattatnnnnnnc

SEQ ID NO: 132423 - DNA, 1231 bp, Glycine max
  unsure (1)..(1231): unsure at all n locations
  Clone ID: PAT_MRT3847_90585C.1
gatgacatttgagtttgagacttctttgcaagtgttacgaggatttgacacagatatatctgttgaagtatatgaaattaagagatctgtggcttcaacgggaaaaagagctacaatccgatttgcagatctcaagaggaaaagatattggttccccttaatggtataatatgacactgtagttggtattggattacttgttcttcagcagttatctggtatcaatggagttttgttctattcaactaccatctttgcaaatgcaggaatttcgtccagcgaagctgctactgttggacttggtgccgttcaggtcatagcaactggaatttccacgtggttggtggacaaaagtggtcggaggctgcttctaatgatatcctcatctgtaatgactgttagccttctcattgtttcaatagcattttatctggagtttatttgattgataccagggggttgtatctgaggattcacatctactcagcatgttgggaatagtttctgttgttggacttgtggttatggcatttgngttctctcttggtctgggacccatcccttggcttataatgtctgagatacttccagtgaatataaagggccttgctggcagcatagcgacaatgggaaattggctgatttcgtgggggatcaccgatgactgctaacttacttttgaattggagcagtggagggacatttacaatctacacagtcgtagctgcctttactatagcttttatagcaatgtgggttcctgagaccaagggaagaacattggaagaaattcagttttccttcagatagatatatgttttgggagagcacagaggtagtctattatgtttaaatttaaatgatgaaaacaccagtatcactgtatttttattgtgtatcaaattttctgtaacaaatgaaaggagaagaatcagtgcatcgtgttttttcactgtacaagctattggtacaaagaaaataaaacaaatatagtagcaaaaaaatgagaaagataaagaacaaaaaacttctagtcatagtgtagctgttaaaatcgagtttatttctattacaaattgtattctgtcatggcatagggaagaagaaactactagtgacatctattgtaaacgtggtcaccaagtaaaccagtgacttggttactcaccttgatgacttgaattattgcataatattctggttgctttaaaaaagacttcccttaacaatt

SEQ ID NO: 132424 - DNA, 273 bp, Glycine max
  Clone ID: PAT_MRT3847_90586C.1
gtacgtcagctcgaacttcagctctaacgagagagatgagaacaagaggagaagaaaagcagtgttgctattcccttatgtcgaaaagatggcatcccattcgccaagctatgatgctggccattctaagggctgaactgaggtacaagcgaaccagacgatgggcaatattgcttccaaagctcaagctgttcaggcgaatacccaggctatggcccaagctgcaaaggcgaagactcaatcaaacagccccagctgcctaggtctagactt

SEQ ID NO: 132425 - DNA, 1258 bp, Glycine max
  Clone ID: PAT_MRT3847_90587C.1
ccagccgtccgcttcaaaaagaccaccgaagggttaatttattcggcgccaaatgggtgtgtgtgatagggcacattatctattgggtaagattttttgttgatgtttgttattattggtaaaggagttggattaaaaaaaagcgttttatgattagtttttaactattttgaatttttttggcgcaattggaagagagtggcgatgcgagggatcttcagaaaccgttcctccacacggggagttggtacaagatgggttccaggcagtccagcatcatgggatcctccactcatgtcatccgcgacggcgccgtctccgtcctcttctgcgtcctcatcgtcgcattgggtcccatccaattcggcttcacgtgtgggtattcttctccaacccaaggggctatagttcgtgatctaaacctctctatttcggaggtcttgctgtatataaaaaaaattatctggtttgttattttttgttgtttaaggttttggtgcttaatatgttgagttcgctgcagttttctttctttggatcattgtctaacgtgggagcgatggtaggagctatagctagtggtcagatagctgaatacatcgggcgcaaagggtcattgatgattgctgcgattcccaatataatagggtggcttgctatttcttttgccaaagattcctcgtttttgtattggggaggttgttggaaggttttggcgtgttcttttgttctgtttaggtgcctgtttatatagctgagattgcacctcaaaacttgagaggtggccttgggtcagtgaaccaggttgaagccttattgttgcttcttgatgcaagtctgtttttttttttttttatttgaagtttattattcattaattttgtagtttttctggctcagctctctgttacaattggcattatgctggcttatctgttgggtctttttgtcaactggagagtccttgcaattctaggtaaattgctaattatttacttggcttagctcttgcggatagacaaatgaaaatattaaaaaccttggtcacaaattagtttcattaagttcttacagaaaggaacagaaggaatatgtgtgtacaggggaggagccatatttataaaataaaaaacagttgaccgtgatatacaggagtaaatttgatcggggatagaaagcacgaatatggcctgtggtcttgaagaaacacggcacaagctgacaactataataaaccttattaaattagcataaaaat

SEQ ID NO: 132426 - DNA, 2105 bp, Glycine max
  unsure (1)..(2105): unsure at all n locations
  Clone ID: PAT_MRT3847_90588C.1
cgaaccgtgttgtgcccttgaaacccctctagttcacgcgtccaggtgaagcacctcgcgccgtgaagcaactcttggtgaaacccctatagttcacaagcacctcgcgccgtgaagcatattttggtcaaacccttgctacgcgacttaaacccctatctcccttaaacccttgctacgtcaagcagtggagctcgctccgtgaagactgtctccgtcatagtgagctcgtgtcgtgacctgctccgcgaagaactattgttgtcatcaagcagtatctccctgaaacccgtttggctccacgtgttaggtcgtggtacaggattcctcatttttgtatatggggagcctgctggaaggttttggcgtcgggattagctcttattaggtgcctgtttatatagctgagattgcacctcaaaacttgagaggtggccttggatcagtgaaccagctctctattactattggcattatgctggcttatcttttgggcctttttgtcaactggagagtgcttgcaattctaggaattttgccctgtacagtattaatacctggattatttttcatacctgaatcccccagatggttggtatggatatgttatgcattatattgatcaagttttgtacttttcatctttgttaaaatacttgttcctttcagaaaaaggatggtaactctttctactcttggtaattatctttctgcttctctttcattttattttattttattttcctggttggtggggaatcggggaagtgtaggctaagatggggatgacagatgagtttgagacttctttgcaagtgttacgaggatttgacacagatatatctgttgaagtatatgaaattaagagatctgtggcttcaacgggaaaaagagctacaatccgatttgcagatctcaagaggaaaagatattggttccccttaatggtataatatgacactgtagttggtattggattacttgttcttcagcagttatctggtatcaatggagttttgttctattcaactaccatctttgcaaatgcaggaatttcgtccagcgaagctgctactgttggacttggtgccgttcaggtcatagcaactggaatttccacgtggttggtggacaaaagtggtcggaggctgcttctaatgatatcctcatctgtaatgactgttagccttctcattgtttcaatagcattttatctggagggggttgtatctgaggattcacatctattcagcatgttgggaatagtttctgttgttggacttgtggttatggtcattgggttctctcttggtctgggacccatcccttggcttataatgtctgagatacttccagtgaatataaagggccttgctggcagcatagcgacaatgggaaattggctgatttcgtgggtgatcacgatgaccgctaacttacttttgaattggaacagtggagggacatttacaatctacacagtggtagctgcctttactattgcttttatagcattatgggttcctgagaccaagggaagaacattggaagaaattcagttttccttcagatagatgttttgggagagagcacacatgtagtctaccatgtttaaatttaaatgaggagtccaccaacttcatgtatttttgtagtcctttgtatttttatcgtgtatcaaattctctgtaacaaatgaaagggagaaaaatcagtgcatcttgtttttccctgtacaagctattggaacaaaaaaaatatagtagcaaaaaaaaaaaaaaaagaacaaaaaacttctagtcatagtgtagctgttaaaatcgagtttatttctattacaaattgtattctgtcatggcatagggaagaagaaactactagtgacatctattgtaaacgtggtcaccaagtaaaccagtgacttggttactcaccttgatgacttgaattattgcataatattctggttgctttaanaaaaaaaaaaaaaaaaaaaaaaaaaaaaaaaaaaaaaaaaaaaaaaaaaaaaaaaaaaaaaaaaaaaaaaaaaaaaaaaaaanaaaaaaaaaaaanaaaaaaaaaaaaaaaaaaaagggggggccccc

SEQ ID NO: 132427 - DNA, 425 bp, Glycine max
  Clone ID: PAT_MRT3847_90589C.1
accccacgagggggatgaaaaagacaacccatacattgattagggttatggaacacctggggactctttacgaaacgccaatgaagatgaatttttgggttaaaaaaaaagtcccaaattattggcacccgctgtatggggggaaacccgtacaatggggaaaccattatatatttcatttggaaaggtcttacaagcacgaggcctcttatttttatattctaaataatggatgccccaactgacagcaccattcccatagagtttatttacctgaaacccaccatatgcgcctggctgttttgggttgtccatgagaaaatggcccccccaattttgaagctgaaaccttcttaacaggcaaatggttgaaagctttggtaatgaaagaggaacaaatagctgctagaaaaagaaatggggac

SEQ ID NO: 132428 - DNA, 297 bp, Glycine max
  unsure (1)..(297): unsure at all n locations
  Clone ID: PAT_MRT3847_9058C.1
tctatatccaaatcngatctacaattccctatccctattttaatcattacccccactacaccaaataccgcctccatctttaaaaccctccggccaaaccttaaactctttctanaattttactttcactctttctcttcaccattgcataatccataaatattctctgcaatacattctacacacaacacataccaacatctcccccttacaactaaattcttacctcctagccagattactatactaatacttttaaatctaataaccaataaccttactactccatcaattctc

SEQ ID NO: 132429 - DNA, 632 bp, Glycine max
  Clone ID: PAT_MRT3847_90590C.1
caaattttgtacttttaatctttgtaaaatacttgttccttccagaaaagaaggatggctactcattctactcttgctttatctttctgcttctcttttattttattttcctggtttggtgggtaatcggggaagtgtaggccaagatggggatgatagatgagtttgagacttctttgcaagtgttacgaggatttgacactgctcatctgttgaagtacatgaaattaagagatctgtggcttcaacgggaaaaagagctgcaatccgatttgcagatctcaagaggaaaagatattggttcccgttaatggtataatatgatgctgtataagttctgattttctaaaccctctcttcccaagcatgacttattgtcatttatccaaaaggtcaagcattatttgctaactgagctcctgcaggttggtattggattacttgttcttcagcaattatctggtatcaatggaattttgttctattcaactaccatctttgcaaatgcaggaatttcatccagcgaagctgctacaggtggacttggagccgttcaggtcatagcaactggaatttccacatggttggtggacaaaagtggccggaggctgcttctaataatatcctcatct

SEQ ID NO: 132430 - DNA, 443 bp, Glycine max
  Clone ID: PAT_MRT3847_90591C.1
tgcatgatgtgtactgatggatgaccagctcgctagctgactggcgggctgccgtcctttttttaaaattcacacactgaacacttgaaaacatcctttataagagcagaggttataactaaccatacagcaattatttagcggacatgatcatgctaagatgtctacataggacaacacatacgaacaaatcgaaatgagcccacttctttcaagatacgcagacgagttcacactaaacatagcatatgctactacagcagcgtgagcatacacaatgatggattcataattttaaaccagcattattacaacatgaagacagacaccgacaatggtctaacattcatagaacggggtgatatgggcaaattggacaaaaccaggcccagaagacagaaactcgaggaacctcatactttagattaggcatcattgggacc

SEQ ID NO: 132431 - DNA, 211 bp, Glycine max
  Clone ID: PAT_MRT3847_90592C.1
aaaaagataacactcttatacttaaataacagaaaatagtgaagaaatcaaaagaactgggcttgagtgtacataaaaagccataaacacatataacacaaacaccggatactacgaagacacaagatcccaacctgagtcgaaaacacatacacgctttaaatgggcccggtacactaccggctgtctggacactcctgtataaccctaa

SEQ ID NO: 132432 - DNA, 343 bp, Glycine max
  Clone ID: PAT_MRT3847_90593C.1
tgtaggaatgatgaagacatgctgtggagctgagcttatctatgatcctcacactgactccttgcagcccatgtttgcatcacatggaaaaagggcggttttcgtactacatggggattcatgtgggaagataaagacaccccctgttgtttctcgtccacatgagatttatatttttgaccgtcgatatgatcggcatgccggtgatcacgatgagaatcattggagaagagacgaagaagatgcatatagtttgtgggttgaggaaggaagacgctttgcggttttctatgcaaaaggaaattgctggcccacacagtgtactatacgtagagggcgagag

SEQ ID NO: 132433 - DNA, 1156 bp, Glycine max
  Clone ID: PAT_MRT3847_90594C.1
acacgcgaacgctattcctatcctgccaccagccgcagccgccgtagccttacacttccttcctccgcactcccccaccatgccaccagccgcaggagccatagccttacactcctccctctgcaccatctcttccgacaaaccctcttctccactaagatcaccccccatccacgtctccccaaagcccaaaagcctcctccaaaaccaccccttatacaccccaacccacacaaaactctcccttgaattcaaagagaaaatcctctgcctcgaggtaatgggtgttgatgcaggcaaagcactgtcccaaaaccctgacctacgcacagccaccatggaatccatccactccatcatctccttcctcctctccaaaggcctccaagaaaaggacttgcccagaatctttggcatgtgccccaagattctaacttctgacatcaaaactgatctcaacccagtttttgatttcatcttgagtgaactcaaagtccctgaaaacagcttcaggagggttgttaacaagtgcccaagattgctcacatcaagtgtcaaagaccagcttaggccttgtttggtttacttgaggagactagggttcaaggatttgggggcattggcttatcaagattctgttttgcttgtgtccaatgtggaaaataccctcattcctaaactcaagtttttggagactttagggctttccaaggatgaggttaggagcatggtgttgaggtgtccagcactgctcactttcagcatagagaataactttcagccaaagtatgagttttttgctggagagatggggagaaaattggaggagctaaaggagtttcctcagtattttgcttttagtttggagaacaggataaagcctagacacatggaggttgtgcaaagtgggattgctttagctttgccagtgatgcttaagagcactgatgaggagtttagggagctggtaaagcaggggggtggttgattgcctatagtggggagcattctattatgtcaatgcatatagtttcccaatgaagttgaaatatttgataaaagtgtttacatgcttttgtattttttacttccttagtacagagttcttatgcgaaattactgatacatagtagtagttgtttcaaaaccaatcaaa

SEQ ID NO: 132434 - DNA, 276 bp, Glycine max
  Clone ID: PAT_MRT3847_90595C.1
caagagcgaccttcttcggtgctcgcaaagtataagtcctcatgggtaaggccaagactcacatcaacactgacgtcattggacatgctcgactctggtgaagtcgactatcactggtcatttgatctacaagctttgaggtattgacaagcgtgtgattgagaggttcgagaatgaggctgctgagatgaacgagagcgtcattcaagtatgcctgggctgctgacaagctcgaggctgagcgcgacacaggaattaccattgatattgctttgt

SEQ ID NO: 132435 - DNA, 1717 bp, Glycine max
  Clone ID: PAT_MRT3847_90596C.1
tgcgagaagacgacagaaggggagcgacagatcggagcagaccctgtatggagtggcgaatggcgctgtggtctcaaattttatgcatagtcactctgctgttatgcagcgattgtgcagcatcttttgccaaggagcagcaaaaggaccgggttggtaggctcccaggtcaaggcttcaacatcagcttcgcacactatgctgggtacatcaccgtcaatgagaaagctgggagaacactcttctactggttcattgaggcacttgaagatcctcattctaagccccttgttttgtggctcaatggagggcctggatgttcgtccattgctttcggacagtcagaagaagttgggccttttcatataaattcagatagcaagaccctccatttcaatccctattcttggaaccgagttgccaacattctttttcttgacactcctgttggggttggattttcatattcgaataacaaatccgacatgctgatcaatggcgatgagaggacagctgaggacaatttagtatttctattgaattggtttgagcgtttccctcaatataaaagaagcaactttttcatcagtggtgagagctatgcagggcattatgttcctcaacttagccaagttattgtaaagtacaactcggttacaaaagaaaatgctataaatctgaaaggtttcatggtaggaaatgctctaacagatgatttccatgatcaattgggaatgtttgagtttatgtggtcaagtggtttgatttcggatcaaacatacaagcttttgaacctactatgtgattttcagtcagttgagcacccgtcacattcatgcgaaaaaatctgggaaattgctaatgaagaacttggaaatatagacccatacagtctctttactcctccgtgccaacatgctaatgttagccagttaagtcggctggtgagaagaaagcatagaattggtagactcagtgcagagtatgatccatgcactgaaaagcactccattgtatacttcaatcgacctgatgtccaaacagttcttcatgttgatccagatcataagcctgctacatgggagacctgcagtgatgaggtatttacaaactggaaggattctccaagaacagtgctcaatatttatcatgaacttattcagatgggattgaggatatgggtgttcagtggtaatacagacgtggtaatacccgtgacatctactcgctatagcataaaagctctcgaccttcctactgtgagtccttggcgagcatggtatgatgatggggaggtgggaggatggactcaagaatatgctggccttacgtttgtggttgtaaggggtgcggggcacgaagttcctttgcattcaccaaaacttgctttgacactgttcaaagccttcctagcaggaacatcaatgcccaatcttgagctagtcggtgcctcctgaatttacgttaatattctccctttaaataagttctaattgactgtatttgactgtttcacatggggaatccgatgttgatttcttttacgcgttactcaatttgtgttttttttttatgtaccaaacaaaatattagatgtaccgatttatgttttttcttttctttataatctttttaatagtgctgaagtcaaagttgtgtattcatttattgtttttaattttttttaatggaacatcacatgtttttttatcctttt

SEQ ID NO: 132436 - DNA, 211 bp, Glycine max
  unsure (1)..(211): unsure at all n locations
  Clone ID: PAT_MRT3847_90597C.1
ncgattgagggncggccttganaancagtggntggntaanaggngtgnncctgntancnagatnggnatcagngatnagannaagcagtttgncatgggaatngngantagncaagnnngnggagtttnatcanggangggnncatncnctggctnagganggagnncgagtggnnntntannaaatngaggncgnngtgnggnggcnatn

SEQ ID NO: 132437 - DNA, 530 bp, Glycine max
  Clone ID: PAT_MRT3847_90598C.1
atgactcccattgtcaatgatcgccatattcagaaataactttatacctgcttgttagcacttgggggcaacggcaacgagatttacatcgtggtgcacatgttgacaccgatatcttacggtttctataggtacaatcccgtcatgcagtgcccttatggcattacctccgggaatggtactgctgggtagaaaaagattgcgagtaatatggttgagaagcattgtttctagacagatgtgttcgtttgagttgacagtatatgtcaagatctatttaacaattactttggaaacatggtcgacgaggttagattcaaccgttgtgatgcaattctcttttaggccatcaacggataaggtgatataaatcagggtgggaaaaaaggtaatgcaccaaccgggagtcgaacccgggccgttcgcttggaaggcgaatatcctaccgttggaccactagtgccacttgatgattaatggttcatcaaaagaatatattagccattacttacgagtaatgacaataaaat

SEQ ID NO: 132438 - DNA, 198 bp, Glycine max
  Clone ID: PAT_MRT3847_90599C.1
gtcacatgggtattctcgcactcatggattgcctgggcctcttctcttgtcaagaacaaaaatctatctttgatagctggagatcatcatgtctactcattactctttacccaccgtggcttgtacatcaccacactccgcgaacacagatctttaattcattacttggcaaacaataacagatcacgatctcttaca

SEQ ID NO: 132439 - DNA, 308 bp, Glycine max
  Clone ID: PAT_MRT3847_9059C.1
tgggatgtgattgttgtgacgcgtgcatcgtcgtcgttatcttcatcttttgttgtatgtgtgtaggttttttctcttaccagaatatgtcttgctgtggtggtaactgtggttgcggaagcgcccgtacgtgaggtagcggctgcggtggctggaacatatacccatgacgtgagctacacttagtcaaccagaatcgagaccttgatcatcgcagtggcatcagtttaggctcaattcgagtgtactgtactcggtgttttagctcagaacgatagatgcgcatgtggagctaactgtcagatgca

SEQ ID NO: 132440 - DNA, 510 bp, Glycine max
  Clone ID: PAT_MRT3847_905C.1
aaaaaaaaaaaaatttaaaattaaaaaaaaaaaaaaaaaaaaaaaaaaaaaaaaaaaaaaaaaaaaaaaaaaaataaaaaaaataaaaaataaaaaaaaaaaaaaaaaaaaaaaaaaaaaaaattaaaaaaaataaaaaaaaataaaaatgggggggggccctttttaaggttccaatttttgttccccgggtttgcaaaatataatttttttttttggggcccctaaattaatttacctggccggttttttaaaaagcggggcttggaaaaacccggggtttaccaaatttaatgcttttgaaaaaaaatccctttttccaaatttgggtaaaaaaaaaaaggcccccaccaatccccttttcaaaaaattggccaccctaaatggaaaatgggaccccccctttaacgggcctttaaacccgggggtgggggttgttcccccccaggtgacccttttttttttcggggccttaaggcccggttctttggtttttttccctttcttttt

SEQ ID NO: 132441 - DNA, 325 bp, Glycine max
  Clone ID: PAT_MRT3847_90600C.1
atgaatgagttgttggttttggatgagtgtataggagacgtgagcactggattgagtgtggacatgataaaaaaggggaaaaaacacccaatttaagtgtttagaaagaaaaaatattctaccggggtgaacgttaggagaaaccgaatggaaaatcctgctgacggagagaaagaaaaatctcaggattgtgggcacgagccccaaaggggtgtgataaagcactggttaagggggaaaaacctttggcccatttaaaaaaaaaaagggggggccacttaaaagggtgaaaatgggtaaaaaaaaaaaaggtgctacggagaac

SEQ ID NO: 132442 - DNA, 481 bp, Glycine max
  Clone ID: PAT_MRT3847_90601C.1
tactaatacacctcgctcctctcaaactggcatcctagcactggcccaaaggagctacaattgcgtgttctttttgcaatcctgttactactcatctctccgtgactggcaagtgctgcacacaacctagtgttattgtttagctcgacgcgaaaactcatccaatgccgcagcggccgtcgtccctggtcgtggaataaccccatccagtggacgctcgtagaggagatgccgaaccaccaagacagcccactctatggcatgaatattgagagatattagaacccttctttaattttgggattgggaactacttttaaagatgtataattgaggggcattactataaaatatgtgatgtatgcttgatggcacagaaccatgtggactactgcttatcggtgcacgaacagtgcatggccacacactgttccagcgaataaaaatctcatcatcaggttgtactctaaaagcaaatgaa

SEQ ID NO: 132443 - DNA, 376 bp, Glycine max
  Clone ID: PAT_MRT3847_90602C.1
gtcaagacaagcaggataattcattccgtcgcgtgcccaaaaacaggagcaaactttcaatattgtatcctaagccccccaaaggaaatcggctttcattcttctgtgccaatctctttttttctagaggcaatgcattttaaccacggcataacattaacgtgtcataacaaagctaacataacatcagacgacgatgcccatctaaagctcatcgagagagtcggagggctcatcctcggtaaggatggcctgcttgacgaccttaccgggctcgggaaccttgtccttgacgccagaggcagaggcggcctgctggggcataccatcagtctccacaccctcagcggaggcctcctcctcgggaatggcgacc

SEQ ID NO: 132444 - DNA, 407 bp, Glycine max
  unsure (1)..(407): unsure at all n locations
  Clone ID: PAT_MRT3847_90603C.1
cccggtcgaccgagcgtccgacggatcgacaagagacctagcgcatttcagacatcacgggtgatgacaacatgttcggttctcttacatcttaatggggtagcaaccttnaacatggaagcctacatgcaatgactatgtcaaactccgtacattattcatcaacgttgcaggacaggtacatcacagaacacgcatctcgggctacaacagttaaccatgatactacagtcatcaaccagtgaaccaaacaccctattttgctacatactcataagctgaactggagaatgatcagattccaccatgcaaagttaccctacaatatgaagaggcctcgacaacaggctgccacggctgtgttgctgatccaggtcaaacatgccaagttgctataagctttctca

SEQ ID NO: 132445 - DNA, 332 bp, Glycine max
  Clone ID: PAT_MRT3847_90604C.1
gttgggcttacatggagctggtaaagcttttaggagcaagagtgcctttgaggatcaggttgtgttgactaacacacacaaatcattggatggaaatgcttgagaggatacttgattaccaccacatgcgagtggactgtattctgcaagtgaagtacctggagaagctgacggtgtaaatgtgacatgtggtagggggcgaagtgagaactccaaggcatgtgagtattcttattgacaatcccaaacagtctacagattttgacattctgttgggaacatctcaagatttatgaaattgctggtagtactcttatgccagctttttctgt

SEQ ID NO: 132446 - DNA, 295 bp, Glycine max
  Clone ID: PAT_MRT3847_90605C.1
gacccacacgtcaagctgggagaacaacagaagggggaacctttgcattcaattcattcaaaattcagcaagtgctttttggaagcatagaccgagatacttcgagatggcccgtataaagcagggtgggcgtaagtcaactggaggaaaagctctcacgaagcatcttgcaacaaatgctgcacgtaagtcggcagcaataatcggtggtgtgatgaaccctcatcatgattgccgtggaagtgtagaacatcctaacattaagaactattccagtagcactgatctcctaatc

SEQ ID NO: 132447 - DNA, 441 bp, Glycine max
  unsure (1)..(441): unsure at all n locations
  Clone ID: PAT_MRT3847_90606C.1
gggggttaggcaaaccacaaacaagatcaaactactataaaaggggagttaatataatctcagatttaggagagccctgccccactatgaaattcagggtcacaagccccaccctagaatcagtctctcgcaaatgccattgaaggcttcctccaagggatgttttaccacnccaacaaccaccacccccaaataactatctccccccggggggtggcggggggcctctttttttaaacaacacccccttaacaccccatttctccccacgacccccccccccccccccccccccctctctactttccccccaccccccccccccccccaccttccccactctatccccctacctcctacatctctttcacaactccccccccccccctcgccccttcccccctaccccaccaccccaaaccccccccccctctccccctc

SEQ ID NO: 132448 - DNA, 436 bp, Glycine max
  Clone ID: PAT_MRT3847_90607C.1
ccggaattcggctccaggctgagtcgactaaaaccccggcagaattttcattttttatacccggcgggccatcacctgggggcccgctaccatcaaccaaccaccgctccttctaacctggtacctccacgacaccattaggcatctgcttcttccaccacctacctttggaccgcaccaactccggtcactgactcggagtcaactccggggccggccactcccttagctctgtggccaccttctcctctctctacaaatttgtacgagacttctatatgtattccaacaccaccatagacaccctcgaagcttcttcctctgaaatttggcaaatgcacttagatcccaatggtgccattctaccagatgctggcggaggatagaacatcaatctagctttcgtacacttcctcataagaacttgtagccactc

SEQ ID NO: 132449 - DNA, 703 bp, Glycine max
  unsure (1)..(703): unsure at all n locations
  Clone ID: PAT_MRT3847_90608C.1
ggaatngcggctcgagggcaatgctggcaatctttcactggataaagtgatgactgaatttatgctccgccttgatgccacaccggcttgtataaagaatatgcctctagatgacgatgatccagccagaggactgaccttcgcaatgacaaaacttaaatatgaactgtgttacagtaggggcaagcaaaagtatacttttgaaagtaagcgtgacattcttgatcttgtttaccaaggtcttgatcttcatatgatcaaggctttcctaaataaaaaagaatgtgccagtgttgccaaagtagttaacatgatactgaaaagttcacaatctctatccatggacaaagtctcctgcaaaaagggttacatgaccgagaaaaattgtgatgatggatttctgttatcctctgattatttcaccatcagaagacaatctccaaaggctgatcctgctaggttactagcatggcaagaagcaggaagaagaactattgagatggcatatgtacggtctgagtatgataatgggagtgaaactgatgaccatatgcggtctgacccaagtgatgacgaaggttacaatgtggtagtagcagatgattgtcagagtgtgtttgtctatggtctcaagcttttgtggactattggaaacagagatgctgtttgggcttgggttggtggcctgtccaaagcctttgaa

SEQ ID NO: 132450 - DNA, 262 bp, Glycine max
  Clone ID: PAT_MRT3847_90609C.1
atccatcccgtggactaccctcggccacaagaacaggccaagcgggtacctatgctataagacctctacatccccactactgtctcgcaagtgggaggactggtagcttctctgctgcgtcacgagcttgctcactatcagaatgactgggcgcggcctcaacgcccagctatgtctcaccatgaggacctgatgccacgaaaaatggctggagcgcgtgaagatgcgaaactggatgaccgccgacggaaacaagaacaac

SEQ ID NO: 132451 - DNA, 512 bp, Glycine max
  Clone ID: PAT_MRT3847_9060C.1
ggctatagggcaaaaggcccttttagagagagagacattgcaagtttttacacccaaattcacatagaaattaacaggtccattatgagctacagtacagcaaccaaatgtacccatatcaactctaaaataagaagcaccacacccctacacaaaagtgacatgcactaaactatatagtacatgcaaggttttaaaaaaggtctccgtgactgtaacacaatcgaaattggaaccacatcggtcgcatttatccgatatcaacgaatatgaccgcgaccgtatttaaaaccttgagtgcatgctagctaagaaataaggtcatgcagggaaggttggtaagaaatgagaaggaaaagcagaagaagaacaaaggcaacaccccaaggggaaccaccagctctgtggatggcactaggctcagatcctggcatggggaagcttatttgggttgcagtggagagccagtgaacaatgatgatcaagaacagtggagaaattaccagcaaacg

SEQ ID NO: 132452 - DNA, 268 bp, Glycine max
  unsure (1)..(268): unsure at all n locations
  Clone ID: PAT_MRT3847_90610C.1
ctttgttttttcaattcattcttttaatccctctagtcactttaccttccctatttctaccaactaccacggcccanggattctcaattgaagaggcaactgtctatgatctccaacttgctttccgtagaaaccaattaacctctaggcaactagttgagttctaccacaaacaaatacaaacccaaaacccagttctgagaggggtgttggagttaaacccagatgactagcacaagctgacaaagctgaccatgagagaaaggct

SEQ ID NO: 132453 - DNA, 199 bp, Glycine max
  Clone ID: PAT_MRT3847_90611C.1
ttcgtccgggtgagtgcaaggagggaggttttgggttccagtaccaatggcgattttgtccaaggtaacgctctacacatggttgaagctactgcggcatgggccgctgctggctggcacatgcgttacacttcaacttgcttgttggaatctggtttgtaaggagacacagggttcatcgacgaccactgtggccgga

SEQ ID NO: 132454 - DNA, 523 bp, Glycine max
  Clone ID: PAT_MRT3847_90612C.1
tccacgcgtccgctcaagagatttacaagaaaaaagggcacctaagaataaagatcaagaatcccatcttctatcaaataagcgaacacggttagtagcggcagagaaaggagatggaatcggcgggggagtggctggagaaggcgttggtggagttgtgctccaagattgaaactggcttgggtttaggtttggaccaagacatcatcaaaggcctcgtgtcttactgtgaccttgccgagccacgagatgccaaagagtaccttgacgtaacccttttcctcttttcttttcttttcttttctatttcactgggtatcaattacacttcactaaccatagcgaattgtattttatagaatttagatcccaattgctacaaatccatttatgattttttattttagtttattctgcaagtgatcaaagtttcagacctttccactagctgcaaatcttggaccttagggtttaatgtacttgtattatgattaaattaattaaccacttatattttgattag

SEQ ID NO: 132455 - DNA, 526 bp, Glycine max
  Clone ID: PAT_MRT3847_90613C.1
ggaattcggcacgagggtccaactaaggtttgaaatttttgacatggtaccaaggtagcaacgattaatagaggaagatcccacctactttaaattaagaaatagctcaaagtgtttgactttgggaaaattttcaagcataaacaaagagagttttacctttcctttcttcttttcttcccctcattccctccctagcatgcaacaccagattcacaacaacagatccgcaccgacttcgtgactttgacaatttgaacatcatatatgcctgatgcttcagaatgcatggtgcactcgcactagctagacccatatccatgacaccagaccactattgaacaaaggagttttcctatctagaggaaaagttgttgttgggtttgttcaacgatggccaatctcaatgtggtgatcaatggttgcatcaaaacaatttttgatgagaaaagaaaaggattaaaaaaaattaaatgttgtctaaaattatcttcgatggcaataaataacgatcattaataatata

SEQ ID NO: 132456 - DNA, 771 bp, Glycine max
  Clone ID: PAT_MRT3847_90614C.1
cacgcgtccgccttttggtacactacctcttgcaggtatgtagtgtaattgacttgaccctaaatgttcgtttgccacacacctctattctacacatactgtgcttttcaccttgaaaggttactgagacgacccaaactggcttaagtcgtggaccgggttttgttgcattctcgactcccgaggaggcatctagagcagtaagttgtaggatattttctttgtgaaaagtaatacttggcctttttagtttgaaggtgacttttttttcttttgttttattttttggtagctcctggagaatgaatggcaaaatggtggtaagcaaacctctgtatgtgactctagcccaaaggaaagaagataggagagctagactgcaggtatgtcttattttaaatgccgagctctttttaactttatctctgttggtggaattatgtattaccaatgcaggattaaatctttgcagtcgtcttttcaagctcatgcatgcacaagcaatttaatgccatttctttccattatcttaagatatgatgattgtaattggagctgaatatgggttgtttgaataattgtttacatgttttctatgtctattatatttcctagtacaaattctggttatatgagatcaataacatgggctatattgttgctgtgttttgcaaatcatcataaatgcaattatgattagttttgcattgtatttggttattgaatctcagtgactgtaaaaatatttctatgctgtactaaattttttat

SEQ ID NO: 132457 - DNA, 432 bp, Glycine max
  Clone ID: PAT_MRT3847_90615C.1
agcagactttctctctctctctctagtttccatagcacacacacacgctaatcattcgacgaggccgcaagtgagtgagagagaagaatcactcactgatccacacacaaaccagaacaaaaccaagcacagacagcgtgcgctcttcttgtgatttgtgttacaagcaaccaaccacactcacacacacccctccataataaaaatcacttccatgctctcttcttcaccccaaccaaaacaaacaggtttgcatttgcttaactggagccagattctgtagctgatttcatcccaataaatctaatgatgcttaagtaactaacactcttcgattggtttctgggttctcttgaagatttggtctttaatcgagtcgaattggatcttgtgatttacttagccgacttcacttagtgctattgtataaga

SEQ ID NO: 132458 - DNA, 614 bp, Glycine max
  Clone ID: PAT_MRT3847_90616C.1
ccacgcgtccgggagagggaagctcaatgggctcatgctcagagaaccctgcatggacttcaaccaccagaaacttctggcattttcaatgagaagaacagttatagagaactctctgagattgctgagcaggccaagagaagagctgaagttgcaaggcttcgtgagcttcacacactgaagggacacgttgagtctgtggtgaagctgaagggtttggacattgatacaatccagcagcactacacggtgtgaaaaaacactggaaaattgtagatagcaaaagtgaccaaattcagtggcatgcctgaaacaaaaagagactagatgtctttgcctttcatatataggccttaccaatttgttctcaatgtattttcggttctggtttaatggatgtctatgccttccttttgcttccatgatagagccaaagtagtgttagtttctttagcccttactttttcccttgctttcatatgactttgggtgcttcctcatttctgtgttctcagttgtatgccacatttaggtggcactgatcatattgtgtcaatattgggattttttaaggtaggagaataagagtttctcgaagttcttttccagcatcc

SEQ ID NO: 132459 - DNA, 322 bp, Glycine max
  Clone ID: PAT_MRT3847_90617C.1
aaaccccaaacgggtttaacaactttattgggcccaaaagatcttttggccaaaaaaaccaggggggggaacacaaccgttttttgcctaccacccaccgtttaatttactggcccgggggggcgccaattcccgagaaataaggggaaaaagcccaagaaaagttttgggcttctgggccccccctggaaagcttaatttttttttttggcccctggaaagtcagggggctttaccaccccccccgcttaacggactctccgggtaaaaccaagatttttgccaaaaactgggaggcaacccccgcggtataaaccccggg

SEQ ID NO: 132460 - DNA, 473 bp, Glycine max
  Clone ID: PAT_MRT3847_90618C.1
tgagaatctaattttgggccaaaaaaaacgctttgacgggtttaatatttttgattggatgaaacaaaggaaagaaacctcaacgggcgctgatatggggaccccacaatatttacacagcgtacgacagcccaccaggtttgcacttcataagcagatgtgtagaacacagggccccaggaaactgaatacataattaacagggaaagcatactactatggccacgcttgcagaacaaaaaatactgtagtgttggggaacaaacaaaacctaccacgcatttgtaattttgaacgtaatcgtccgttattctatcgtgtaagcccatccatgtttgtgcaagaaaagattgaccgcttcttaatggccaaggttggccctacctgtgaggatcaagggggtcccgggtgattgggtttaatttacccaccttgtgaagaagctcaagaatgaatgccctctcataatggaa

SEQ ID NO: 132461 - DNA, 472 bp, Glycine max
  Clone ID: PAT_MRT3847_90619C.1
taatgccagttttctactctgatatgagtctagaagggaacttgatattgaacttaatcctcaagtttccctttttggaaagttccttggaaattgacataccctctcctttaataacttcttcatacgtcaaactaataatagaattaatggaaactataagattcctcccatcaagtatcatgagttatactatataaccaatcagaacttcaactagaaatatgttctgtgtgataacaagatcattgccatcccttttaaagacaccatgaagtgtctcatcaattatgaaaacaaaatcagataatataactcctctgtggtcatgtccctgtctcaaaaaaattatcgttagtcctttcttcgcaccccggttgatctgaatagttaaaattgactctacatgggtaagcctcccactggaatggatgagctgccttggaaatcttatggatgtgtgggagccctt

SEQ ID NO: 132462 - DNA, 688 bp, Glycine max
  Clone ID: PAT_MRT3847_9061C.1
tagtgagagaatgaactatttgcaagatttagtacccggttgcaacaaagtcacgggaaaagctggaatgcttgatgaaatcatcaactatgttcaatctcttcaacgacaagttgagtttctctcaatgaaattagctgctgtgaacccaaggcttgacttcagtatggatgatctatttgacaaagatgtgtttcctacttgtgctgcaaattttccaaacattggaatgtcatcaacatcatcagacattactaaccctgcctatcttccgtttaattcaccgcagcaaatttttcaatatgatggattagacacggggattaacccttctgatgtggggcttagaaggaccataagtgcccccgtatcaatgcctgaaacatatcttcaatcgtcctgtttcacacaaatgctaccctcctcaacatgggaaggtgatttccaaaacctttgcaattttgatgttgatcaagcacgagccacatctttcccttctcagctgttatcaggtctggttgaagctggcaatctaaagatggagatgtagactagagcttctatttcctactgcaacttatcaagattctttttgttttattttcaagtacatagcatatataaattgtttgtaactgctccataatataaataaaatttattaattaatacctgttaacttcaaaaa

SEQ ID NO: 132463 - DNA, 907 bp, Glycine max
  Clone ID: PAT_MRT3847_90620C.1
ccggtccggacttccgggtcgaccacgccgtccgattgtcagcctcttgaattgattacacacaccctttccaattccctcactgagaacttgagtaagtaaagttttctctaactgtgcaggccttctagaccctgaactactaaaggacctctgaaagggactaggacctttgagggaaaccctaagaacctgacttcaaaaaagctttagccaagggtaagcatatagacttccaagatagaaccttcgacttcaaccaaaccaaattttacggaaaacccctacaagccaactgagtcaatggcaatgctttggtgtgaccccaaaccaacaactaggtcatgaaaattttggcgtgaccccttaccaacaactgagtctactggcagcgccctagtgtgacccatatccaaccaattgacccaaatctatggaaattcctttgcgtgaacccatattcaaccaattgagcctatggaaatgcctggtttgatcccaatccaaccaactagttctatgaccattgccgtggtgtcaccccctacccaacaaactttgactatggaaatgcctagtgagcaacctccttctcttgagtttatgaagcaaaggttggagatgatggcatcaaccatggagacttcaggacatacactttcccctcaaatgagagcccaactggattctggaattaaaaatcttctgagaagggtgaatgccaggctaaatgcctgaacaatgttattagaagcttttattctcaaattactcatgatgctatttaagtagattagccagctcctgatttatgttttggtcctaactcagtgattgtattggtccccttttttttcccccctttcacttttgcacaactcatttgaatggttaaagaatatttttg

SEQ ID NO: 132464 - DNA, 282 bp, Glycine max
  Clone ID: PAT_MRT3847_90621C.1
gagaaccccatcgccatgcccttttgattatctgtcaatgccgcatgcaataaggcaaggggtctttggctgagagaccccgattttaccgcagtatatgaggctgcgaagggcgcatgtggtactgcattttgccaagagtcatagaatgaccttatgtgactgtcgtagcccatttccatgccggtttccatcataatgacgtacaactacctgtgtatttcatattcgaaaccatgaccattcgtctccaacaacatcatttatcacccatatggtgct

SEQ ID NO: 132465 - DNA, 379 bp, Glycine max
  Clone ID: PAT_MRT3847_90622C.1
aaatttctgtattggtgggacctttgagttttgaagcgggaagaccgaagatgaacgagggggcaacttacatataagtaacgctccttcttctacaagcttctctctctgtctctcactctctctctctctctgccttttccacccatggctcgaaacaaggaagcgttgcttttgctgcttgatgtgggcccgtcaatgcatcccgctctttctgaaattgagaaagtctgctccatgcttgtgcataagaagctgatctatagcaaatatgatgaagtgggaatagtcttatttggaactgaagttcttgatgctgtcattgttggcatggatgtgttagtaaaaaaatttggagtaacaaacaagggaaagaaac

SEQ ID NO: 132466 - DNA, 1186 bp, Glycine max
  Clone ID: PAT_MRT3847_90623C.1
ccacgcgtccgtctcctcggagctttgctcgttattcttctttttcttttctttttttcgtttcgttcggaaaacgcgtaggctgtgccgtcgtttttagtgggtggatgggaacgacgtcgtgtgagtacgtgagctgggaggaggtgtttatgtcgaacgacaaggggaggagggaggttcattacttgcttaaacgacgaggcggtggctcggatctggccgttttgggaaaagagaagagcctcaaacacatgtcgtatcgctacgccattcgaaacacgtcgtcgtttcggcctgttgttaattggttggattcaattgtttcagattcgtcttctggggatgcggctatggtgggaaaacatggttatgaacctgaaattggagccttgaaggataatcaattgcagaggatgcgcaattgtacaaaagaattctcatggatagggttgccatgggcgtgtaagaaaagaagaaagcactatcaggcatattagagaaacgctggagcagcgccacctcatatcagaagccacagtgcactgacacccatcagaagaggtcgccgaatgttgtcacatcaaatgctcctgacagttttgtgatcccagcatcattaaaagttgatcatgatgactgcaagtatgttggggatccttccatcttcagttcttcagttgtgccttctctaactaacatggttatgtgtaggtgactccttgatccatttcttagtttctgggttctctactctcactcctttgccttcaagtatgtacttatttagcccctaaaccttaatgcatcttttcgatgccctgtcttgtccagatcttcatccaggatctcttttcttcgtcaatttcctttgttaacatagaaatttatcttaggttagtctttttcttccccaacctttcattagttttgtggtttatggcatcgaagccaaggaggcaaggatgatgccatacaagttttggcataggaaaaagtgtaacgtagtggaataaccgaggatggctttgacttgtaggataagatagtgttttttttttcttttttttcatatgggaatgatccaatgtaatttgtgttaaccttctcctataagaatagcatagcagtttgcttgttcttttatattttgagctgaattttgagttaaatagttaacgtttct

SEQ ID NO: 132467 - DNA, 1263 bp, Glycine max
  Clone ID: PAT_MRT3847_90624C.1
ccacgcgtccgctcctcagagcccgcgtccccctgttcgttatttttctttttttttttgtttcgtttcgttcggaacgctgaggctgtgtcgttgttttagtgggtggatgggaacgacgtcgtgtgagaagaagagcgtcgtgtacgtgagctgggacgaggtgttcgtgtcgaacgacaaggggaggagggaggttcattacttgcttaaacgaagaggcggtggctcggatctggccgttttgggaaaagagaagagcctcctcagacacatgtcgtatcgctacgccattcgaaacgccgcgttgtttaagccttacttgaagctcaggtcgcgcagagaggttgttgattggctggattcaattgtttcagggcgagatttccgctggctggatctgaaattgaatgattcgtcttcaggggatgcggttatggtgggaaaacatggttatgaacctgaaattggagccttgaaggacaatcaattgcagaagatgcacagttgtacaaaagagttctcatggatagggttgccatggacgtgtaagaaaagaagaaagcactatcaggcatataaaagaaatggttttcagatatccgtgcatgattttgtatttgttctggcagaagaggacaagcgtttagttgcctacttggaagacctttatgaggattccaaaggcaataagatggttgtggtgcgctggtttcacaaaattgatgaggttggtattgctttgcctcacagttttagtgacagagaggttttcttttctctttatcttcaagatctgagtattgaatgcatagatggattggctttcgtcctcagtcctgggcattacgaaaagtttcagaatgaggcccgttgtactcacttagagccattcatctgcaaccaccagttcgataatgatgatgtgaaaccctttgatataacacagattaagggttattggaaacaggaaattctcaggtacatgtatacccaattggactcgaagtctagtgggagttccaggcaatcagatgatgacctggaacttgatgaaaatcatatgactaccgtttttatcagacctaagaagaggctgcgccttaccaaagcagatgatgccaaagaagcagttgatttggttggccttaaaacagaaaatgtgaataacagttagaataataccaaaatcaatactggaaacaattcttgggaaactgattgggcacacaaacatgacagcaaccattaaagggacaaatg

SEQ ID NO: 132468 - DNA, 614 bp, Glycine max
  Clone ID: PAT_MRT3847_90625C.1
ggctcgagagaaaaagcagagaaactcatgttgacggctcgagcatccttccctcttatactcctcttacttcttctacattctaacatgcctacatcgtgtctgctactgaatggaaactaagttgtgaaatcatgggcatattcagatgtgggaccttgtttttccatgtgctccttttgtttagaacctgtctggccaaagatcaacatgttagtcagatatatcctggcttcagtgcatctcagccagattggagcgaccataatggttttttcttgctatccaacagctcagctttcgcttttggattcttcactactcttgatgtttcatcgtttgttttagttgtcatgcacttaagcagctacaaagtggtttggactgccaacagaggcttactcgttgggacttctgataaatttgtgcttgaccatgatgggaatgcatatttggaaggtgggaatggtgtagtttgggcaacaaatacaagaggacaaaaaataagatccatggaattgcttaactcagggatattggtgttgcttgtggaaaatgggacaactattttgcaaagttttagccatcccactgatactcttttgcccgacaag

SEQ ID NO: 132469 - DNA, 2584 bp, Glycine max
  Clone ID: PAT_MRT3847_90626C.1
aatcacgcgcccacgcgtgcgctttcttcattctcctcggagctttgctcgttattcttctttttcttttctttttttcgtttcgttcggaaaacgcgtaggctgtgccgtcgtttttagtgggtggatgggaacgacgtcgtgtgagtacgtgagctgggaggaggtgtttatgtcgaacgacaaggggaggagggaggttcattacttgcttaaacgacgaggcggtggctcggatctggccgttttgggaaaagagaagagcctcaaacacatgtcgtatcgctacgccattcgaaacacgtcgtcgtttcggccttactttaagctcaggtcgcgcagagaggttgttaattggttggattcaattgtttcagattcgtcttctggggatgcggctatggtgggaaaacatggttatgaacctgaaattggagccttgaaggataatcaattgcagaggatgcgcaattgtacaaaagaattctcatggttagggttgccatgggcgtgtaagaaaagaataaagctctatgaagcatataagagaaatgtttttcagatatctttatatgattttatttttcttctggaatattatgagaagcgtctcgtagtctacttggagttagtctttcaccttcccaaacctttatgagtattctggtttcaagcgttttagtaaatgacggattgatggtcattaaaaagagttaggtatcaggtacatgtgtacccaattggagtcacagagcagtggtctttcctgtgaaactgatgatgataagtattttgatataacacatatgagtattgtttgtaaaaaatagaattaaaggtacctttttaccaaagtggactcgaagtctagtgggagttccaggcaatcagatgatgacctggaacttgatgaaaatcatatgactaccgtttttatcagacctaagaagaggctgcgccttaccaaagcagatgatgccaaagaagcagttgatttggttggccttaaaacagaaaatgtgaataacagtaagaataataccaaaatcaatactggaaacaattctgggaaactgattgggcacacaaacatgacagcaaccattaaagggacaaatgaacatgcttcacaccatttagttgtaggttccctagtcgaggtcctctctcaagacggtgggatgagaggatgctggttcagagcttctgtcattaagaagaataaagataaagtcaaggtgcaatatcaagatattcaggatgctgtcgatgaaaccaagaagcttgaggaatgggttttagcttccagaattgcagtgcctgacaacctgggtcttcgaatgcgtgggaggaccatggtccggccagctccaccatccaacaaacgagaactatcgtgggtcggcgatgttggttttgttgttgatgcttggtggcatgatggatggtgggaaggcattgttgttcaaaaggactcggaatctaattgtcatgtttatttcccaggggaaaaagtggtgtcggtatttggtcctggtaacttgagagagtctcaagattgggtggggaatgagtgggtatttgtgagggaaagacctgatcttgtggcttctgttttatctagcttgaaaacaaaacaaaactcatgcaaatccaattccaataacatccaatcaactggagcaatcaccagagatggaatacaatttgggcaatcggatacttgcttggattctgataaggatagaccaagaaaagctgaagtggttccagaccttttgaagaatgttttgtcatcccagttaaggtggaagaccaccagaaagaggaaacgtggaagaagcagcgcctcatatcagaagccacggtgcactgacacccatcagaaaaggtcaccgaatgttatgaaatcaaatgctcctgacagttttttgatcccggcatcattgaaagttgatcatgatgactgcaagtatgttggggatccttccatcttcagttcttcagttgtgccttctttaactaacatggttatgtgtaggtgactccatgattcatatcttagtttccgggttctttacttctctcactcctttgcttttaagtacatgtatttagcccctaaaccttagtgcatcttttcgatgcctgtcttgtccagatcttcacgtccagtatctattctcttcgtccatttcctttgataacagagaaatttatcttaggttagtctttttctttcccacctttcattagttttgtggtttgtggcatcgaagccaaggaggcaaggatgatgccatacaagttttggcataggaaaaagtgtaacgtagtggaataaccaagggtggctttgacttataggatagattgtgttcttttcatataaaatgatccaatgtaatttgtgtaaaactttctataagagtagcaattttcttgttcttttatattttgagctgaatgttgagttaaatagttaacgtttgtaaagttttatattttcatttagttttaaaattaagattaattgttgataaacatttgatgtaatgtaataaaatgactgtgaattactatt

SEQ ID NO: 132470 - DNA, 429 bp, Glycine max
  Clone ID: PAT_MRT3847_90627C.1
ctcttttttttttttttttttttttttttttttttttttttttttaaaaaaaacaagcaaactgctatgctttttttataggaaaaggttaacacaaattactttggatctttcccatatgaaaaaaaagaaaaaaaaaacccttttttatcctacaagtcaaagccatcctcggttattccactacgttacactttttcctatgccaaaacttggatggcatcatccttgcctccttggcttcgatgccataaaccacaaaactaatgaaaggttggggaaaaaaaagactaacctaagataaatttctatgttaacaaaggaaattgacgaaaaaaaaagatcctggatgaaaatctggacaaaacagggcatcgaaaagatgcattaaggtttaggggctaaataagtacatacttgaaggcaaag

SEQ ID NO: 132471 - DNA, 196 bp, Glycine max
  Clone ID: PAT_MRT3847_90628C.1
ttaccctgcctcgcttggcttgtgactcttccctagtttgaatggttttcgctgccaattctggctcagtttttgatatgactgccatttgcagtctgccatgcctacattagtctggtggagtgatatactataaggataatgggcctgctggacatatggatacgaatgacatcttgcgtgtggcaagtttatg

SEQ ID NO: 132472 - DNA, 382 bp, Glycine max
  Clone ID: PAT_MRT3847_90629C.1
ttcttttcttctttttccaaccggttttgcagtcatgcgtccttgaagtgtttttttaggaaagtgcccggcagtgtccccaaggaagacaacgaaaccgccatggctcaaacgcggcaaaacacatagcagcaaaacaaagacgggttgacaaacaggcccccatgccgaaaaactcatgcccacccagaccgtcggaaagagaagaagacaccaggaaaggacccctcgccgggtttggccggacaaaaaaaaaaaccgactccctaacaaccctgtttgtggaaaagcaacaaagggatataacaaaaccgcctcccccagcccccataataagttttaaaacccccagcaccaccgccacaataagaacgcctccccc

SEQ ID NO: 132473 - DNA, 339 bp, Glycine max
  Clone ID: PAT_MRT3847_9062C.1
accggttgcagaagacgacagaagggtattgttttattaagacaacatgtaaggactgaaattatttgcagcgttattatgtatatgttgtcctagagtatctattttaatctatatttgcctccaaaatcaaaattaaaaaatttttattcacatcggtcaatgtaccaaatcaatactatattattacctctaaacaaaactaattatctctttatggatctctttctttaactgactagaacgcactaatctaattccttgacactaaactctgaaaatctaatattctcttggctcatgtaaatattcttaattatatacaatgtctaagccatt

SEQ ID NO: 132474 - DNA, 278 bp, Glycine max
  Clone ID: PAT_MRT3847_90630C.1
aggtgctctcgggttgtgtctgtgaccgtgactgcgtacctgtgactgtgtagcgcccgtggtgatctggggtagggggaaccctacagtgggacccctcccccaatattccttctgtccagcccctcacttccactggagcaggtccagagccattcctcaaccccgtgaacttctccaggcaaggctgagagggttcgaagtggctgggaaggtttccaagccccctggcccttccccaaaaaatgggtgaataggcggattaactgggccaacct

SEQ ID NO: 132475 - DNA, 238 bp, Glycine max
  unsure (1)..(238): unsure at all n locations
  Clone ID: PAT_MRT3847_90631C.1
ccctatttcaaaagatagtaaaacttaacaaggcatgacataaatgtgcaatagtccccaatcaataatggcaaaactatggattaacaatcaaaagctaattccctccacagcaatcccaaaaacagcatccttgaacgtaagnatccacatccaantatcttctagtctcctctcancccanaaacaacaataatannattnaccannatcantcancagccaagtatcgtccaaa

SEQ ID NO: 132476 - DNA, 623 bp, Glycine max
  Clone ID: PAT_MRT3847_90632C.1
gggggataaacaaaatgttgttaaagttcattgggtattacattattacatacagaattatcacactctaacttttttctttagtgcagttatcacaccctgaactgaattatttatatgaagcatcgagcaaggacaaggtacaaaaatgagtggaaagggaaataatgcaatagtattatacatgtatgggatttggaaacctcatcgatttgaggctcaatcaagggcaccaagaaatgtcaaactccattgcatggccataccactttgactttacacctaagtgaaaatacattgtttatccaaatataccatatcacttctatcaatcaatttcttatggcacaaatattttgggaggtggggttgattcccttacacctgttgcagaacatggtggtgttattttcacaactttcctctttagtttcctgcactgtctaatggcatttttctgagcagatgcatttactttcataatgtccactttcactatatggtgatcagaagttcctttagatgaaatgactgagtaggaccctggtacatatttgtagtgtgagtttggggaagccaaaatgtaatccactcttgtgccatacttgcatgtcccctgcaca

SEQ ID NO: 132477 - DNA, 249 bp, Glycine max
  Clone ID: PAT_MRT3847_90633C.1
tactggtccacgaagacgacagatggctggggatgccaaatgacgaccgaggggtacagttgctagaagactacatagggctactgttgcgaaaagacaacctacggttacgattattagatgactacagatagttactggtttgaaaagacgtcataatggttctgcagctagaatacaacagaatgatacatgcatgtgagaagagacatacttatcaactagacatacatagatcacatgaaggta

SEQ ID NO: 132478 - DNA, 466 bp, Glycine max
  Clone ID: PAT_MRT3847_90634C.1
atgagctgctggactaagaatagagaacagggaaaagacagttacgtataattcggattaaaagatgcatcgtattttgtgggacttggatttcaatataaggatttatcccttaataacaactgcactaatgtagaggttcaaaacatccgcacgttttcagacaccgagaagagcacctaaacaaaaggatctgatgcaagtcgaaaaatacacggagaaactgagaagggtgattcttatattaagaaaaattcgaaaccagattctccagctcgtcagtatactcgaacagtaatgcaaatatagaagaatattaggctcatttcttcaaaataaaacatagttcaaatagaaactcgatgcaaataaataaagttgcaaatacagttaatgttataactgtttgactgagtgttctctgcacttcagttgtaaataaagaaacatctggcattggtttgtc

SEQ ID NO: 132479 - DNA, 520 bp, Glycine max
  Clone ID: PAT_MRT3847_90635C.1
aaaagagattataagttcaaacctttttgcatccattctacaaaaaatgatcaatatacacaacatattctctgactgggcaggtccaagcacactctaaatttgccatattaatggtgccacattccactaggcaaaaacaaaaatttgaagcctacaactacaagttatatgcaaagcaaaacctacatacattataacatctgagataacaaatgaaaactgggagtagcatcaatgatcaaactttggacaacataagaacaaggccttgcccattttttaaaatctaataggaaaagaattgggcattatgtttactctatcgggcaggaggctgtccaatgggttcatcaattgagagggagttctcagttgcaaccaaatccaaaaaacccatggtgattggagaatgaaccgaattgcttggctcatttgaaatggcttcagccctctctttcgatcgcaattgcatcttgggatctcccttcaaaacttctgaaaatgagggggcggaata

SEQ ID NO: 132480 - DNA, 541 bp, Glycine max
  Clone ID: PAT_MRT3847_90636C.1
gcaaatgtgaagagctagtagaagcggtaaatagccatttatcctattcttgaaacctgtgtgatctaatcaaattgcagaaagagtccaatattatgtgggaagaagcaactaaatacttaagtagtacgaaatcagatgttgaatctaagagatctgctacagaaacaaggctgaataatgttgaggctgttttatctgaggtggatgccataagtagtaaaattatatcagtaaaagaagctggagcagttaaagtggcactgttagtgcgcaaatgtgaagagctagtagaagcgtttcacaactatgcgaatccgattgcacgcgtgattgaatctgagcaaagaagactcggggccactaaaggaggtggatttggcatttcagatccggtttaatcatgtatagactactaccaaaaatcaaattatactagagtgtttatttatttatttgacacagctagagtgcatagtttagttgagtacatgttagcatgaaaaatctggaagaatttttgcagaggttattgctaatc

SEQ ID NO: 132481 - DNA, 362 bp, Glycine max
  unsure (1)..(362): unsure at all n locations
  Clone ID: PAT_MRT3847_90637C.1
ccgtccgnngtttggtgtaacctgcatntgtctctttgcacatatgttagataggagtattgccctttaagatttttggagtgtgcccatataagttatacgaatttcacttttaaggagtcttgtttgacttagttgttccttagactaattggttaaaggaacctaaaaaggagaagatttttaatattgtaacatcattaggaacagtatataacaaaaaatcgatgaaagaaccgcacatttgtatgtcctcgtccaataaaaaaaaccttgagttccttaaacccnngtgtcctcgcggacacattgttaagcactttgcccttcatttttatattgtgatcattaagattaattat

SEQ ID NO: 132482 - DNA, 324 bp, Glycine max
  unsure (1)..(324): unsure at all n locations
  Clone ID: PAT_MRT3847_90638C.1
tcagctcaccgcactatacactcttcctttcagccagaggagttcatagccctggcgtgacacacacccactgacccctaacaagcagaataccctcgtcaaccacagtctaaaaaaccccacaccaccaccatgtttcttcatacgtcgctcacgatccacaagacccacgtctaagggcctctcggaccaaacccaccaacgcacgcttcgtgtagccatgcaacactccaatcacaactcatataacataaatctccacgtgttctacaaattacttgacacgngttcccgacttgacctgaagaacaaacttgccatatc

SEQ ID NO: 132483 - DNA, 547 bp, Glycine max
  Clone ID: PAT_MRT3847_90639C.1
actaaaaatatttttaaatttatttacgaaaagaatgggatattacacttattagttgcatagtttatgttatttattatttgttagatagaaatataaattgaatttaaattttttatcaattatagttatatttactaatgaaatgccatgtcaccatttgatagatgaacaaggaaataccaaaaaggtttcgctaacaaaaccaagtgtatttgtgatgcctcgtggtgaacgtctagtcgtgccatttgatagtcaactaagagtctatggagaagcagctacacttctttcatcagcttgtggacgtattgccatggattcaaaaaacatcccaaataactttgatagttggtcaaatgttccaaaatcatacaaggatggttgctttaatattgtaaaggtatatgcatacaccaaaattgtttagccttgttctctttaattatgatttgctaacattttttttccttttcaagaatttgtttcatttccaagcaccaaaatcagctgttgagcgttattgctttctttgcatggcaag

SEQ ID NO: 132484 - DNA, 685 bp, Glycine max
  Clone ID: PAT_MRT3847_9063C.1
gttagaagggaaaaaattagtgagagaatgaagtatttgcaagatttagtgcccggttgcaacaaagtcacgggaaaagctggaatgcttgatgaaatcatcaactatgttcaatctcttcaacgacaagttgagtttctctcaatgaaattagctgctgtgaacccaaggcttgacttgagtattgatgatctatttgacaaagatgttttttctacttgtgctacaaattttccaaacataggaatttcatcaacatcagacatttctaaccctgcctatcttcagtttaattccccacaacaaattttttcatatgatggattagacccatccgatatggggctcagaaggaccataagtgctcctgtatcaatgcctgaaacatatcttcaatcgtcctgtttcacacaaatgctaccctcctcaacatgggaaggtgatttccaaaacctttgcaattttgattttgatcaagcacgggctacatctttcccttctcagctgttatcaggtctggttgaagctggcaatctaaagatggagatgtagactagagcttctatttccttctgcaacttatcaagattctttttgttttgttttcaagtacatagcatatataaattgtttgtaactgctccataatataaataaaatttattaataccagttaacttcagtc

SEQ ID NO: 132485 - DNA, 254 bp, Glycine max
  Clone ID: PAT_MRT3847_90640C.1
ttcccccgaagtttccgccgagaattcccaccaaggaggtggaggtttccaacaataacttccatttggtaagggggacccgggcttttgcttccttgttttccacctgggccacccgttcattaaccaagcttgttccacgggtggttgttgccaaaaacaatgctttggaaaaactttttaagaaccgcttgcaaaaaattgttttcaaaaaagaaaaaaagaaacctggttggcaggttgatcgggtaaat

SEQ ID NO: 132486 - DNA, 283 bp, Glycine max
  Clone ID: PAT_MRT3847_90641C.1
gatatgcgtcatgaatgaatcgttggacggataagagaatgtttgcgccgaatccttgggaacagccattgggtttgccatttcaaagctgggaaagaacattgatgtactttcaactacctttgtcaataagcacgatccctacactgcggaaggagtgcggaatcttcgatacatgccagtgatgtgtcatgggctcaatatcagaactgcgactttttactgccatccagaccgcgatactgcccctttcatggttgcattggtggctggtgatgggacc

SEQ ID NO: 132487 - DNA, 402 bp, Glycine max
  Clone ID: PAT_MRT3847_90642C.1
gctcttaagactgtgacttatggaatcctgcttgctcaaatgcaatgactagtgtcatttaatccaaactccaagttctgatgcatggaggatgcaattcatgaagcgcctaggatgccatagagatatcattagcctcactggatggactaggcccccaatgcaggatgttcaagttacaattgatggctttatttcctctcatgaatgtgtgcccaggacctattgcgttagaaatccacaaaacccttccgcgcaaataagtgcatgggaaaactgactttcccttagggcacttcccgaagcgataagagagtgcctctgtctatagggggaggactctggagcaaagaatgcatattcctatgaatatgcctaatgcctgagctttcaatgtagaga

SEQ ID NO: 132488 - DNA, 638 bp, Glycine max
  unsure (1)..(638): unsure at all n locations
  Clone ID: PAT_MRT3847_90643C.1
gnnnnatgtnnnaattgactgngactgcaaacatgtgatgatattttggaatcatcatatagtaataatttttcttttttagcattttcccaacaatccataactataaccgtttcatggactaacgtgtcccatatgttcccttcaatctctgcaaccagttcttccccttcttcttccattctctcaccatctttctctctctgcaggtcaatcaactcatcaatgtcctccaacacctcacacttggcacgtgggaactcctcaaccctcttccacaccctcttcaccaacccttcaacgctcctccctctttggttacaaataccacccttcaaaaaccaaagcctcttttctctctctccctcttgagactccagaatctccctcagaacctcgtcaaccaaatcgaacagtaatctccgattccaacggtgacccagttggtctttcggggcaaagttgcgatctttgtcgccggcggggtgttcgaggtggtggaagattgatgggtcgnggggctggtttaaggaaactgtagtgggggtaccctgtgagtttagggcagtggtacgtgcaannattgctnngatgtnctgannctcttgtggggtgggnnngtgggtgnnnnngganga

SEQ ID NO: 132489 - DNA, 647 bp, Glycine max
  Clone ID: PAT_MRT3847_90644C.1
ctagctatgtcgatcgaactgtccaaggtcctgtcacccaagggtcagctgtacgtagtgtggggattaggtgtggtgtgtggctgtggctaccaccacacttagcgttagctagtctgattgcaccgaacaggaggcctcaactgcgggcctataaatatgtttaggtttctgagcatcgtcgtgaatgtgttagctatctcgatcgaactgtccaaggtcctgtcagcggcaaagtcagcaatgtttgagctaaaggcaacaaatatacgatttaaaataggtggtgagaaacaacattggtagttacctaaaataagcaaacgataaggtattaacttgtttgggcaataattggacccgcgagagatagcccgaaaccaaaggaaacatattgtgaaacaaccagagacggggcaacacagagctagtaacaaacacgttgggcacccacaacacaacggggccctaaaagttgcccaatacgaaggccggggcttagggaaactgcccaaacaataggtactgatgggtaacggttgggcgtaagaagtaccattaagatatgctccgacccacgcatacaagtggccacataaagtactcagcgctgtagacgtgaaagggtacaatggtacgaggggatg

SEQ ID NO: 132490 - DNA, 609 bp, Glycine max
  Clone ID: PAT_MRT3847_90645C.1
cccacgcgtccgcggacgcgtgggttgtgataacaacgttgcgcgaaggccatttgcctatcacagggatgacaacaatgggagagtgaaaggtttacgtcttccatcataagactgttgacacatggagactggattcgacaccgcccatgacgaagaagaagaaaattgccgatctgagcgatgtgttctcatcctcctggtggcaatggaggttgcggcggccgtatgcatatcatacggccccaaaaggcccaggaacgtggtgacacgatcgctaaatatgaatcgaaccatcatgctgatgtgcggaatgcgggattacagcaaaacatgccgcatgagtgtggccaatgccttcggagccagcgatctgaaggagctgatcatagccgcgttcaacggcactgctcgaagagatcgcgagccatatcatagactctacgctctaccatgaactcgactccgaccacgtgacatgactaggccatggacatatgcaatgaggtactaggatacaccggctactacgttccgcgatccgttcacacgatggaaaagctcgacctaaacaagttgaacgattacccctatgacctcaggtctgga

SEQ ID NO: 132491 - DNA, 413 bp, Glycine max
  Clone ID: PAT_MRT3847_90646C.1
agatcacactttaatctaaaaaattattttattcttacttgatatgaaatttcacctcgcactcgtactcggacaaaatccaatcccagttggtaattgcatctaagttttgttcattagtgtatacaatgcatacataagttcaagcaatggtgagcttgttacaccgaggagacaaagagcgttctccacggttgctctgtcggtccataaagtactttaaaagaatgtgagattcatcccacgatgtggccgcccttagaccttcatttttttttaattccctgacagaattcctctggggttattatattcatattgtagactcccacgttcgttgttctatatcaactacaacgcgcatgctaagcccctcccagttctaactcctaactacatcactatcaccatta

SEQ ID NO: 132492 - DNA, 543 bp, Glycine max
  unsure (1)..(543): unsure at all n locations
  Clone ID: PAT_MRT3847_90647C.1
acgagattcattctactttcaggtacttgataatgttgcatctatgctaaaaattggaaaagaagtcgttgagttaagttgctagaatgcagtccggttattatcctatgaaggttcaaaaggatttcaaaagtggacaatataacatgttcttgtaaaaaacgattcctagcttagcaaaataacagggactgacattcaaaataacatgttcacctctctttgttcaaaatgctctccattcaaagtcttgataatttagaacatattttatttctacgtaccacaaatcaagagaaaagaaaaacaaaacaaaatcagggaacagatccagcaactttggtgcttcaatccagcttcaaatggtttaggtacttgagacgtatgatctgtaatgagcaagacacgtgagcatattgttgaagatccatacttttgagtcttcctcctgttatagatagctcacacaaactcgtacttatcttgtcaggcttcaaccattctggtatatnttgtccagganacccttcaagatgcaacttt

SEQ ID NO: 132493 - DNA, 772 bp, Glycine max
  Clone ID: PAT_MRT3847_90648C.1
tggaaccaaatatgcttgtattaaaaaatgataccattgatttgatgaagtagttggagttagaacttctttacttttaaaagaaactttaaatatagcactgatttacagcattgacttaaatgtttgttcagttgtttttgtatgctttagctttgaatgataatggctgttcttacgtgtctgttgcagattactcaagtttatgggttttatgatgagtgcctgcggaagtaagtacctgttaagttcatgactgaggataagtaattataagattgcaaaatgataccaaattaatatttttactgaaagttgatctggaattcatattattttgctaatattcttttttctccatttttaatcctttatatatattttgcttctttttataactttcattcttgaagttgtgcaatcctatattggtgaatatttttatttcatttgcaggtatggtagtgctaatgtttggaagatctttactgatttgtttgactactttccgttgacagcattggttagtatactattacattattttggtaaggactgtgggatattttgttagattgtcattgttctcaggtccaaggtaggtttgtttgattcaatgatcctgggcacccttagtatgttggcttgcatttaagatcagaccatggcaatgttgttaatggcggatggcggttcatggcggaaagtaaaaaatccgccataaaaatatggcggatggcgtagcggaaaatggcggaagtcatggcggacc

SEQ ID NO: 132494 - DNA, 968 bp, Glycine max
  Clone ID: PAT_MRT3847_90649C.1
aattcgagctgaggaaagaagctgtagttttctaccctgcacctctcataggtcacttagtctccaccatagaactatgcaagttcatcctcactcaccaaccatccctctctattcacatcctcataaccatagcaccctacgacacatcctccacttccaactacatctccaccgtctccaccaccctcccttccattactttccacaccctccccaccttcacccccccacaaacccttctctcttcctcactcaaccacgaaaccctcttgttccatgtcctccaccacaacaaccctcacatccaccaaaccctactttccctctcccaaacccacaccctccatgccctcatcgtagacatcttatcctcccaatctatttccgttgcttcacaactcaacctcccttgttaccttttcgtcccagcaagtgcttcactcctcgctgcttttctctaccacagcacactccatgaaacctaccacaagagtttcaaagatctcaacaacacctttctcaacattcccggtgtcccaccaatgccagcgagggacatgccaaaacccttgctcgaacgcaacgatgaagtttacaaaaactttttgagttgtagtcttgcagcacccaaagccgcaggccttatcgtcaacacgttcgaagctcttgaaccaagtagcaccaaagcaatttgtgacggctttgtgcttaccgaattccccaacctcacccctttattgatttgggtccttctagtaaccaccactgaacaaaaccaaaacaacctccagcgaccatgaatctctagggtccctggacgtgcgacctggctggactggcgtcctcctctgtgtggcgtgcttctatgttttggaagcttgggtgtgttttctagagagcaactaagtgaaatcgctattgggttggagaaaagtgaacaacggtttttatgggtagtgcgaaac

SEQ ID NO: 132495 - DNA, 591 bp, Glycine max
  Clone ID: PAT_MRT3847_9064C.1
ctcgagccgaatcggctcgaggaggatctgagtgaactcaattggcttcactaaacctcaagaaatcagtttaatttacttaaaaaggaacaacatcaaagaggggcagctaatggttttgttatgacttgtatgtcagcattcaaaacagttggtcctgctagtggcggtgcaatattaacttggtcagaaaagcatatacattcttttttcctgccaggcacccatatagtcttccttgccctgaatgttgttgaaggacttggagtactgttgatgttcaaaccattcttgagtgtgaagaagaaaacaccatcatagacgttacattgatatcaaaaaatttggtacaaggggtgaagcatttggagggtaatattgtgtattggttttgagatcatggccagtatggataatgaaatgatgatggatcattatgtgttgtatatttccatcatataagtttagactttagttattaacattttagcatgggtgaatgtgtattgaacagaattagttaaagtatggacctgtatgtaccaatatatgtgatatagagttattatatgttctttgaaaactttcact

SEQ ID NO: 132496 - DNA, 1043 bp, Glycine max
  unsure (1)..(1043): unsure at all n locations
  Clone ID: PAT_MRT3847_90650C.1
agcgctactaggctaactcaagatgagcaaagaactcagatgactttgtggtgtatggcaaagtctcccattatgtatggaggggatctacggaacattgatgcttggacccttggtcttatcacaaatcctacccttttggatataaacactttcagctcaaataatcaggagtttcttgatatcacaacattaaatgatgtcaagactgaaggacacaatgtcacaaaagtaccatttacttactccctagcaatcacagaatgcactgatccaaaagtaagtggttggtctagtgaaaagtataaccaagatcttgaaagaatctgttataagagctcaacacaagatcaggaggaacctttctgcgtgcacaaaagagaactcccaatagcatcaccaaagcaatcatctatccaatctgaacaaatatggaagttgaaatcaaatgggactttggttaatggttattctggcaagtgtgcaacagtgggacgtgtcctagatgtaggcgatcttaatccgattcgatcttgggttgcaacgcatacagaaagaggtttgacactagtcatcctaactccatctattacaattttctaatttaatatttctctaatacctaaattataaggtgagttgaatggttaagaaaggaagaaagaggaaaaagatcacagatttaatctttctgttaacaaaattaacattctaacaaactaacatttctaaaaaaaaaatatttctcaaataccaaattgagaagcatcagagtagcatgtgcaaatgaagttcattttggtatattattctcttattaggttctggtttcttgtcgcattgtttgcttgtttaagtttctactagttgttcctgtgttactctggtgttgggaggagtggtcctcggcctgttactactttttactctgttctgtgtcgtgaaaatgggcttacaaacaaaggtagctaaagagcttgtgtgatttgggaacttgagatacggatataaagaannnaatctcnnntttgtccatgtatgct

SEQ ID NO: 132497 - DNA, 258 bp, Glycine max
  Clone ID: PAT_MRT3847_90651C.1
ggttcgagttgtttgttagatcggacatgtaattggcttgataaaaatcggttggcttgatcgattttagatataattgatgactcacttaaaccggatgatcatataagaaaactacaaagatacccttgatgcaacaaggttattgcttggagtttgtcgttgcaaagtagctgcaccatcgtcagcacatgtgttcgtcaatcataggaaagctataatagagaacgagtggaagaagaaactagaataagagac

SEQ ID NO: 132498 - DNA, 150 bp, Glycine max
  Clone ID: PAT_MRT3847_90652C.1
tagcgcacagtcacattccttccaagttttatcaaactgttcccaatcttttcgtgttcgaatctcacacatcacataccagcacattctctctggaattgaaacccaccatgtggattaaagggcatcaaattaaggcaccaattcatg

SEQ ID NO: 132499 - DNA, 370 bp, Glycine max
  Clone ID: PAT_MRT3847_90653C.1
ctctaccggaccgcacgcgtccgattgccttcacaccatgctcacacagcaacttgcaaactctgagaaagaaagcctgccagcacatggatcattggggctatctcatccttcccatctgtccaatctatctacaaatccatatttgccacacgtaaatccactttctagctctggtgtcaccaatgcctcttatgctcactatcctatgactgctgactggatgccatgccagcctagacctacttaccttgatggttcaacgcctgaagactttaaaatctaccctggtcaacttggtgaaataccagagaatcttgagaggttcaaagagtcagaactcattcactgcaaattggccatgctttct

SEQ ID NO: 132500 - DNA, 260 bp, Glycine max
  Clone ID: PAT_MRT3847_90654C.1
cgcaggaagcgacgacggtggtgataatcggtgccggagcttctggtatcgtcaccgccggttgcttaacgacgcaatcaataacttacatcatgatcgagagaagagactgtttcgcttcgctgtgtcagaaatatacctatgatcgtctccaccttcatatgaggaagcaagtttgcgagttatcgcactaatcgtgtctcaagtcttcacctcactacgtgcgtcggaagcagttcatcagactacttgggagacta

SEQ ID NO: 132501 - DNA, 287 bp, Glycine max
  Clone ID: PAT_MRT3847_90655C.1
caccccgatgcttgtgttgttgtgttctccgagacggtggaacttgatttcttcaaggacagctttgttaaggatgggtacaaagttgctgttgctatgccaaatcttgatgagcttctgaaggatatgcctgctcacatttttgcttctgtgtggtttgaatggaagaagacaaatttctattctactcattacagtgagcttatccgccttgctgctctgtacaagtatggtgggatctatctagattcagatatcatcgtgttgaagccgatttcttttcttaa

SEQ ID NO: 132502 - DNA, 448 bp, Glycine max
  Clone ID: PAT_MRT3847_90656C.1
agcgagtgtttgttctctctttagttcatatctatgctagggaatccactcttaccattaaactgaaattgtgacagaaaaaaggcaaaatggagagccagccactagaaaaagcaaaaccaaaatacagaaaaggcttatggtcacctgaagaagataataaactcagaaaccatatcattaagcatggtcatggctgctggagctctgtccctattaaggcaggcttgcaaagaaatgggaagagctgtagactaaggtggattaactacttgaggccaggattgaagagaggggtgttcagcaaacatgaggaagatacaatcatggtcctacaccatatgttaggaaacaagtggtctcaaatagcacagcatttgccaggaaggactgacaatgagataaaaaattattggcattcatatttgaaaaagaaagagatcaaagc

SEQ ID NO: 132503 - DNA, 268 bp, Glycine max
  Clone ID: PAT_MRT3847_90657C.1
ggcgtgtgattttttttttttttttcgtctcctaaccctaatagaacaggatactcggtctttttattccccccacagttccctttttactcctttgcaagagaggaggcaacgattgttctttcttgggagaggttgagagagcaaggtattggcttgttttaatgcggtgttccagaggttgaaccgccatttcaaagaccgtggtgagtcattcaactcggctaacttttggtgggtgtctgctgagacttcaacttgctaaaac

SEQ ID NO: 132504 - DNA, 284 bp, Glycine max
  Clone ID: PAT_MRT3847_90658C.1
cccacgcgtccggctcaattgaccgatgcagttccacgtcgtacttacactgctgtactgggtgatgagatataaaaagcccatccttacttcttcaacactatgctacacatcctggaatacccttacctacatacactactgacacaacactctatttcaagaacacatcttcacatacttacatccatatgttgaagcagtcacgcatgataaaggaagctcgcaaatctggatgtgatctgcataacgcatcaccaagatcactcatataacactattaa

SEQ ID NO: 132505 - DNA, 586 bp, Glycine max
  Clone ID: PAT_MRT3847_90659C.1
ttccttttttttttttttttttttttttttttttttttttttttttttttttttttttttttttttttttttttttttttttttaaaaaaagggacctcattttccatttatttggcattaaaagggaaataagttacccaaaccgggccaaaaccttttaagcttttatttttttttaaagggtggaaacccacccgggggagggcttaaaagggaaaaacccccacaaccttatgggggattcattaacaacaaaaaatcccccattttataacattaaaaccccccacagggggggggggacccctatgggcccggggggtaaaacaaaaccagttttttaaaaaaacggaacgggtttgggaaaacccttgtttcctggtttggaggggaagggcttaaaacccccttcaaaaattttgggcaaaaggggggggaaaaactgccaagaagccctaaacccatcttgggaaaaaaaaggggggggaccccccctaattggggaaaaaaatagggggtcaaaacccccaggaaggggtaccccttgaaaccgggggccataagaaaaggcaagcccattttgaa

SEQ ID NO: 132506 - DNA, 365 bp, Glycine max
  unsure (1)..(365): unsure at all n locations
  Clone ID: PAT_MRT3847_9065C.1
tacggctgcgagaagacgacagaagggagtgttaaaaatagttagttttactttgtttatatttgagtccaaaagtgagaataatttacaatgatgacactcaaattagaacttataatttaatgcattatgatatatcctttttcactaagtcaaacaaacttagttggttatatgatgttttttatcaatatttttatacgaagtaaattccatcaaatgcgatgaataatcattcttgaagactatgagtgcatacaagataaatattttccaacacaatttattttatacctaanagtcaatcaggattagaaccctgaatcacttgactaaagactacaagccactattacttatattga

SEQ ID NO: 132507 - DNA, 155 bp, Glycine max
  Clone ID: PAT_MRT3847_90660C.1
aacacacatacgtccacccatcattatatgcatccacttatttaaaaggctaagggacttttgcttactacgaagatcttaagacttacacttcatctacgctaatcctggtaactcatctcatattactacgataacacatgttgtcactttac

SEQ ID NO: 132508 - DNA, 149 bp, Glycine max
  Clone ID: PAT_MRT3847_90661C.1
gtgcggcgagtccttcactctgctctgcccctttagcctacacctcccttcatcatggctgaactaaccgaggaagcttttctgaagcatccataagtgtttctcagcacgatgaagactggatagggtaagacacctggagtaggtgg

SEQ ID NO: 132509 - DNA, 401 bp, Glycine max
  unsure (1)..(401): unsure at all n locations
  Clone ID: PAT_MRT3847_90662C.1
ggagaatcgaaacgaagaaaataatactataccggaaacaactataacatgctgaggcagaaccatacatagcaaagtttagcatccaatacattcttaggannnctatataacaaaatatactattcttatatggatttattggggataaattaatttaatagattcataaacgggtggttgctaaagggggttcaggattcatcaaacttaatatctgaatgtgcggaagctggatggtagctgtgcctcctataatcatttccaccatattgggtaggcaatgcatcctcctcattggtcatatgatcagatcttggtaagctctgtgacctgtacattttctcctcagttaaagatttaggtgtcatgttcagggtgcattttgcaagattgtttga

SEQ ID NO: 132510 - DNA, 528 bp, Glycine max
  Clone ID: PAT_MRT3847_90663C.1
cctgccgtccttttttttttttttttgggggtatgtcttaaccaaaaacaacttgctttactccaggacactggggacataacaaagagaagtaacttcttatggtcactcgggggaatgctacacacaacacagtgaagaagttgatgccatgtagtgaaaaaaaagagaaggagaagcagtaaagggggactgatccacactctatgcaaaaggaatagtgttttctggcaaacttagcactagagccattttcccgcaaaaacatatattgaaattcaatccgctggggttctggagaaatgcaaagggatcccatgatggcacaggggcttccttcttcagtgggctgagagtctacttgctgggacctgggggattctgaagggttgtacgcaaattctgaagtatccaggccgtacttgtccctcatccggggactccaagcataattatatgctgggacgctgatcaagggggcccgctcgctggggaaccggctccttggccctggctggcctggggggg

SEQ ID NO: 132511 - DNA, 215 bp, Glycine max
  Clone ID: PAT_MRT3847_90664C.1
ttcttacatcacagaacgcacatcacacacactatgaacttcacacaagattaaagcatgggctcacattgactccagtcccaaaataagatccatgtaaggagcataattttacatggtatacattttatattaacaactgacttctgaatgtgtgaaaaaaaagcaaaagtagcttatcttgaattttttcataaatgaaaaatagttgaccc

SEQ ID NO: 132512 - DNA, 433 bp, Glycine max
  Clone ID: PAT_MRT3847_90665C.1
cggctactactacaagaagacaacagaagggctacctcttaattactcattatactctttttacttaatgaagtagtaccctttaaacccctctatctggctgaaaatttccttctttaaataacatctacatattctcataattctttacatcaacatcttcctcattgtaaactcttattacattctcatattttttattatatatatcttttaacatttatactctttttataactaatttaattattttacaaccaatctttattattctttaaacctatatttaaatatcccttaatgctaaattacacttttatactatttgttttatagttctatctttattcatattatattttcttttcaatacttacttaaatttatatttactttaatatcactatatttcattttatcccttattataatt

SEQ ID NO: 132513 - DNA, 639 bp, Glycine max
  Clone ID: PAT_MRT3847_90666C.1
agttcggctcgaggtccggcgcagtcctgtctgcttccgaaacgttgagatggtgaagaagtaaaggaaggatgccttaaacgtgcgttttatagagagaaaacaaaaccaaacaaacaaacaagtcagaatctcttctcttctctttctctatcgtaactctcttctctgctctcagatcttccaaaaccctcctttccttcattactaaaatcacttctcttcaaagattctttttctctttctttctcagcctccacttcttttttctttcccgcgccctccaaccgcttcttgctccgtttttcccttcccgcatttcatctcacttgcattttccgctccgtacggaattgttgtccactctgcaattattttccgggaaaaacagagcattctcccgatgacagtaacatttttgtgaggaagtgaagaaaaatggacgatagaggcggttccttcgtcgccgtgagaagaatttcgcagggtcttgatcgaagcaacacgtgccattcaagttccgctgagtttgtgacaggatcaacagcatggcttggcagaagtctgtcctgtgtctgtgcacagagaagaaaaagcgatgccagaccctcttttgatttaactccggccccagaggag

SEQ ID NO: 132514 - DNA, 429 bp, Glycine max
  Clone ID: PAT_MRT3847_90667C.1
cggacgcgtggggtaacggcagggtatgatggcaagtggatttgggcaaagaaggtcctacctgctgattggaaaaatggacttatatatgattctggccttcagataacagacattgcacaagagggttgttccccctgcgacgatggaacctggtcatgattcattgctttgctgctcaagtataactcacatatacacatacatatagccataaattttattaatataatagtataggctcataaaaagcaacttataatactaaggaatcatgagtagcttaataaatttgaaaagcattcttatttctgaaccactcgacttcggtctttatattctttcttcttgtaagttgtaagttgtaaccaaccaaaataatagacttttctttttggaatatatgaattacatttttacttttttttt

SEQ ID NO: 132515 - DNA, 972 bp, Glycine max
  unsure (1)..(972): unsure at all n locations
  Clone ID: PAT_MRT3847_90668C.1
ctgttttcatgttcttctctggaaatacgggagaagaacaagatgcaagagaaccacaaggcataatgcatttcgagattgacatagatgtcacgttgcatgacaagaatttagccagattgaatcctttttattgttgttgttggcttttcagaaaaggttaattgtttcctctcatgggaaattgctgtggaactcgttgcaaggttgatgacactttgaactccaaccacagttctgcagatgttaccaaagttcaccgtagaagcacccatttgttagttcattcagaactaacaaatgggtgcttctacggtgatgaaggcaaacctgagattattctccccactccaagatctgaaggggacatactttcttccccgcatttaaaacccttcacattgcatgatcttaagaaggccactagaaatttccagcttgatagtcttattggagaagggggatttggttatgtgtataaggggttgattaatgatggtaaatcctttgggcctacaatgcctaaatctggaactgttgtagctgtgaagaagcttaagcctgaaggttttcaagggcataaggagtggctgtctgaagtcaactatcttggacaacttcgccatccaaatcttgtcaaacttattggatactgtctagaaggagataaccgacttctagtatatgagtacatgcccaacagaagcttggaagatcatatatttcgaaaaggcacacaaccacttccttgggcaacaagagtcaagattgctattggtgctgctcaaggtctttccttcctacatgactctaagcaacaaattatctaccgtgatttcaaggcttctaatatattgttagattcggaatttaatgcaaaactctcagactgtggattggccaaagcangccccactggtgatcgttcttatgtttccactcaagtcctgggaactcatggctatgctgctc

SEQ ID NO: 132516 - DNA, 831 bp, Glycine max
  unsure (1)..(831): unsure at all n locations
  Clone ID: PAT_MRT3847_90669C.1
ttgcatgacctgcagattatggttattttgtgaggatatcctctttccttgtgtgtgttaggagcaggaagagtttgtggttactgcaaatcatattaatggttctttttacttgtttattttgttaattttaagaatgatgcaatttgattctttttgtccaaaatttgattggattgagggatcatattggatttttttcatcattaacagcaaaataaactcactgtttcaatttatgtatgagagaatgttgaggaaaagtacttttccttggcagagctagcttatgtacttaaactgaactttatctttttttatccaggacaaatcgaaatgcagaatgggatacttgtattccagtacctgattttgagtggaaacagattgctgagccggttatgcagttatatatggaaacaactgatggttcaaacatagaggccaaagaaagtgctctagtttggaattacgagtatgcagaccgagactttggttcatgccaagctaaggagctttttgatcatctggaaagtgttcttgccaatgagcctgtttctgttaaaagtagtccaaacattgttgaagtgaaacctcaggtcagtaaaaaaaaaaattccacttttagtcatttttaggttacacatatttataattgaagaagtttatattttatatacatcttatagttgtgacttgtgtggcctctntatcagaaaggatctttggatttggacctttcaggtgatttaattgtagtggtgctcataactggcccagaaccatgttttgacaaccctgttatgttctatgtttgcatagttgactgct

SEQ ID NO: 132517 - DNA, 312 bp, Glycine max
  Clone ID: PAT_MRT3847_9066C.1
actggtaaaccccaagggaggcgtattacaggaaaggccaccccggaaaaagctgggtgcccacagaaaccaaaagcgagtcccaaggacccaaagactaccagccgggcaaacatggtcccttgtcaaaagtgcctaacgagtgagcggacacgcaaaataagccccgggctcactgggggaataccaggcgggacaccatgggggccccacctaccaaaagaggggggtcaataaaaggaaggggcggaagggggaaagacggccagcgagggaaattgataaaccggccaaacccccaacagaggaggg

SEQ ID NO: 132518 - DNA, 1331 bp, Glycine max
  Clone ID: PAT_MRT3847_90670C.1
gaggaaaaacagaaaggagggtttttgtcttcaaattttgaactagtgtggtgtaggatataatagctagggaaaacggacaagagtgtggatgggtgaggaggcaatggagggtgtaatttcttctaaagggatgggttttggagagaatacaagtagtagtggggtttgtccaatgatgatgatgcctttagtgacttctcatcatgttggtcatcatccattaaatcatcctattcttaataatcccaatcctaatgaacacacaaacactctcttccttcccatggcttgtactaataataatcaccacccgaaccgcaataaccacacactccaacgccactgagttagggtatttcatggagatccccaacaacaactatggaggctcctcttcttccgctatcaaggccaagatcatggcccatcctcactatcaccgtctcctggcagcctacgtcaattgccaaaaggttggggctccgcctgaagtgatgggaaggttagaagaagcatgtgcatctgctgcagtgacaatggcaggtggaacagctagcataggcgaggatccagagctggatcaggtcatggaggcttactgtgagatgctgatcaagtacgagcaagagctgtccaaacccttcaaggaagccatgctctttcttcaaaggatagagtgccagctcaaatctctcactatttcttcttcgttggacactactgcttgtaatgaagctattgataggaatggatcatctgatgatgttgatgttcagaccaacataatagatccacaggcagaggaccaagaattgaaaggtcaactcttacgcaagtaccgtggatacctaggcaggttgaagcaggaattcaccaagaagaggaaaaagggcaagctgcccaaagaagcaaggcaacaattacttgaatggtggagcagacactacaaatggccttacccatctgaatctcagaagctggctcttgcagagtcaacaggcctggatcagaagcaaattaacaactggtttatcaatcaaaggaagaggcactggaagccttcagaggacatgcaatttgtggtggtggatccaagccatccacactactacatggaaaatgttctgggcaatccctttcccatggatctctcccacccaatgctctaaaaaataacgttttggtgcttgtgtgctcttaaagtatatgtattgtgtctaaatgcaaggcattcatataataataagtatgttactctgattagtaacgatatttacacagtaaaagatgtctcaaatgctaattattgatatttacacattaaaaga

SEQ ID NO: 132519 - DNA, 1306 bp, Glycine max
  Clone ID: PAT_MRT3847_90671C.1
actataccactaagtatctagtctagtacaaaggatggagatccctgtgatagattttagtaacctcaatggggacaagaggggtgacacaatggccctattgcacgaagcttgtgaaaaatggggctgctttatggttgagaaccatgaaattgacacacaactgatggagaagttgaagcagttaatcaatacatactatgaggaagacctaaaggaaagcttctaccagtctgagatagccaagaggttggagaaagagcagaacacctctgatatagattgggaaattacccttcatttggcatcgccccacctctaacatcaatgaaatttcaaacatctctcaggagctttgccaaacaatggatgagtacattgcacagctcctgaagctgggagagaagttatctgagctcatgagtgaaaatcttggtttggagaaggattacatcaagaaagcattttctggaagtggtgagggtcctgctgtgggaacaaaagtggccaagtaccctcaatgtcccacgtccagaacttgtgaggggacttagagagcacacagatgcgggtggcatcattctactgctccaagatgacaaagtgcctggtctggaattcttcaaagatggcaaatgggtcgagattccaccacccaagaacaatgccgtttttgtgaacacgggtgatcaagtggaagtgttgagcaatggcttatataaaagtgttgtgcatagggtcatgcctgacaataatggaagcagaacctccattgctaccttctataaccccattggagatgccattatttcaccagctcctaagctcttgtacccaagcaatttccgttatggggactatttgaagctctatggcagccccaagttcggtgaaaaggctcctcgatttgaatccatgaagaacatgatcaatggccataaaattattccagcttgagacttggaataacgtcgcattattacccttgggatatctaaatttacaagttattatgtttagatttggaatagtaatattttcttttctttttctttgttggtctatggctttggccgtacaagtaacgaagatacacgtgttctttgattccccaaatagaaaaattaagggtaatgatatatctagacatctcacaattttatatattttattaaagctcgttatcttttttttttcttatcacaaaatatcatggctcatagttttttcttctctccctttgtcttcccaggtatcatgagtttctaggaatcattttttatataataagcttttacatggtgtc

SEQ ID NO: 132520 - DNA, 464 bp, Glycine max
  Clone ID: PAT_MRT3847_90672C.1
cccacgctaccgcccacgcgtccgaaattttgataaaccgcgatcacaggttgccgcaccttagaaccggacacaaaagcaatcgatactggatttcaagaatcttccaattgcttactactacttggatacgattacttaagggaaagaaaatcactctctgtgctggccacagactctgtgaatcatttgattttccacttttagtgtatgtgctgaacactgtactatttgatataggactacgtgtcacatttaaactttttctgctgcttactcaaatctctgcttaattacaagttcaagctggtgaaatcttggattagtgctaccactctcctatctggtataggacttcgtgggtagactgttctattactgtcctttctttcactctcttgttctcactgatccgcattgccgatcaaagtggacttatttgaaaaacacttgggcgtttggtg

SEQ ID NO: 132521 - DNA, 227 bp, Glycine max
  Clone ID: PAT_MRT3847_90673C.1
ccacacgccgatttataccttattcacatcctgtcttaatcaaacctatacggtgattggcaaatacaatatagaaccaaccaaataatcactaaacaatcccaatctcacatcaacaatattaatcttcatcaaaactttaataatatggtacacactggtaacaaatgactttattataagtatttttcctctcaagaatgtattgtatagtaattcaaccattt

SEQ ID NO: 132522 - DNA, 368 bp, Glycine max
  unsure (1)..(368): unsure at all n locations
  Clone ID: PAT_MRT3847_90674C.1
aatatcgctgtgttcagtaagcaagggacttagaagaaaatgcattttgtctctacacatgccatcacaaaagtgtggtttagacaccactcatcaaagtcaagggattaaaagtgccgaatttccatagngagcagagcttccacgtttagcttcttttnnggatacaactggcccttcccctttgaagacttgctttactttcnncagagagagccttctttacttttccagagcagagtnncttttctttctccattcnntctgtccttnttcttgagttggcnnagataaannctcatctccttttcacctcccttgagtcttccttcccagnngcaagagcttttttcagctttccacagttg

SEQ ID NO: 132523 - DNA, 295 bp, Glycine max
  Clone ID: PAT_MRT3847_90675C.1
aaataacacacacctttcacattatttccacaattaaaagaggtggggaaattttgaaatagggagaacatcatcaacaagagggtctagcccaaatagctttattgaattaaacaaacgaacaagccaaagaaaacacaaatttcaaaacaagcggaggattccgcattttcataaaatatggcccatgcctgaggaacagaaaaagctgtgttaagaatattacccgcaatttggaaaaattgggaaattcccaaaaaaatattaaaaactggagactgtttgggattttcaa

SEQ ID NO: 132524 - DNA, 159 bp, Glycine max
  unsure (1)..(159): unsure at all n locations
  Clone ID: PAT_MRT3847_90676C.1
aaccccaagaacggagaaacgattttggagacccctcacaaaagaaggggaggccaccacaccaacgaccacgncaagagcacccccaaaagggggggggagggggcccccaaaancgaaaaaagagcgccgcccacaaacaagccaaggaggccacca

SEQ ID NO: 132525 - DNA, 385 bp, Glycine max
  Clone ID: PAT_MRT3847_90677C.1
gttattggtgtgaaaaaaaagaaaagttctggttggaaggaaaaacaaaagggccatgggggcccaaagttttaagggtcccgagactttcccagggagcaaaagggacaagaattccattaaacccctaggggggggggattaagagaaaacccgccgtgaggggggggagagcgcaattcctcttgggccggcgcggggggaaaaaaaccccggccgcgcaaaggttttaaaccttggggcaaaaagagaaagaatggccctttgccacaaaggggaaaaccctgggctaaattccgccggaagaaaaacgggggtttttcccttggcaaacaaaaagagaaattaccctttgagggggcccccgtaaaaaatcactgtctgg

SEQ ID NO: 132526 - DNA, 286 bp, Glycine max
  Clone ID: PAT_MRT3847_90678C.1
acgcagacgcgtggacccaaccacacgcttcatatgacatgagctcattgggtgggatacaagaggcgcacggcctttatttacttatctaggaaggtgcagcagtccatgcacagtccgagctgaagccgccaacatattcactgcatgcattggagccggtgatgtgcctagagacactcgcgtcatactggaggaagacccccctgacttatgtactatatccgaacaaacaagttgttggtacagatcacgacggcaaggcactacaagagatcattgtcac

SEQ ID NO: 132527 - DNA, 201 bp, Glycine max
  Clone ID: PAT_MRT3847_90679C.1
cgattggcagctgaggcttagattgatttcgtagatcacggcgggaagtagaatgggtcattgcccatgcttcgattcgcgggcggtcgagcagctgtatcccaatcctcagccaggtcaccaccaacatgactatgcatctgaccgacgatctaagccccctgttccttctcgtatatccagattgccgccctactgcct

SEQ ID NO: 132528 - DNA, 334 bp, Glycine max
  Clone ID: PAT_MRT3847_9067C.1
aaaataggaggggttaactttgctccataacatagctcaaactaaaaatccccccaatccccccctcatgaaaaccacttaaggggtttttccttaagaatcccaaagggtgttacaaaactcttgagccaactggggggggtgctggttaaacacaattaattattttccatcatgggaaggaatttggggtagaaaaaatagggtggcataacccggggtttggtgggggccgtttttccccggtacacacaggctaaaagaaccctttggaagaaaccggcccctcctgggggtttggagaggctttgtccaagggggcgctttggggagc

SEQ ID NO: 132529 - DNA, 483 bp, Glycine max
  Clone ID: PAT_MRT3847_90680C.1
ggaccaatgggtgctctaaagagaaaaatggaagaggaaacaggtgcacggatgtctgtaggtgatggaacacttacaatagttgctaagaatcaatctgtaatggacaaaatactagaaaagattgattttattgtgggccgtcaaattgaagttggaggcatctacacaggtattgtcaccactataaaagagtatggagcttttgtggagtttaatggtggccagcagggcctactccacatttctgagttgtcacatgaaccggtttcccaagtttcagaggttgtctctgttggccagaagctgtctttgatgtgcataggccaagatgttcatggtaacattaaattatcccttaaagcaacttcgcctcgtcctggaggattggagactaatgatgcagttgaagaatctgttgcatctgcaaaagaaacagccaacatttgggcaccagttgggaatgtgtctagtacacaagaa

SEQ ID NO: 132530 - DNA, 286 bp, Glycine max
  Clone ID: PAT_MRT3847_90681C.1
tttttttttttttttttttttttttttttttttttttttagaccgcaaaattcaaaatccagaagtggctagttttttggttcaccaaaagcctcgtacaaaatcttaacaaatgaaaacaagtggctactcgccacaatgataaggcaaatgtgacaaaaaaaaaaaaaacccgttatatttgatttgtgaaaaacaggtaaccgaccctaataaatgcttttaattgaagtttgcatccaaggtaaatatgaagaggtttatcgggaccttttttgcaccatcc

SEQ ID NO: 132531 - DNA, 157 bp, Glycine max
  Clone ID: PAT_MRT3847_90682C.1
tgtggttgtccactattctggtaatactgggttttagttttgaggttgagagaactttgttttattacaccatttcaaattgcatgcgttttgtttcagaatcgcacactttcgagaagccagtaaagatttataattaggaaactggaattgatga

SEQ ID NO: 132532 - DNA, 137 bp, Glycine max
  Clone ID: PAT_MRT3847_90683C.1
cgggacaactcagcacaataagctatccatagcagccaaaggattgaaaagtaacgcggccgccctcgagggtccatgcttacgtacgcgctgcatgagacttcatcaatcttcgatgatgtcgcctacactcaatt

SEQ ID NO: 132533 - DNA, 392 bp, Glycine max
  Clone ID: PAT_MRT3847_90684C.1
aaaaagaaagaaaatgatattgatggagggacttaattgtaacaattaaaaaaatatgatcggttgtatttgctcaaaaagttgtcagtggactaaaactacacaattatagtaggactttgtttattttttgagtaaattatactcgcatttcccgtgtttttttcaaattgcattcgacatccttctttttttaccctacagaaaatcccttaattctttagttcacattatacccacatcccctctttcctaaacatcatttaataatttaacaaaaataagtacatgctagtcacatgatttttaatgaaaatttatatctaaaataattcatcttcttcctcttaactttataaaggcatgacatcattttcaacttgaaaatattt

SEQ ID NO: 132534 - DNA, 994 bp, Glycine max
  Clone ID: PAT_MRT3847_90685C.1
ctcggaaaaattaccaattgatgagtggttttgtcattcatgtcttaaaaagaggcagaaaattctcaaggagacagttatcagatcaccaagtatccacaatgaattgggcaaatgtagaactgccccagttaaggctgaattgaatcccatactgttgatgttaagagacaccaagccctatacaactggtgtgcgagttggtaaaggttttcaagcagaagttcttgactggtcaggcccgatgaaaagtgatgaagatgcccttcctgaaccattggaaattagtccttcagaattttataaattgctgggagagaatatgagaaatcctactaaacttagttccattggtaattggattaaatgtcaggaggttttagatagagccaatgaaactatatgtggaaagtggcgcagggctcctctttttgaagttcaaactgatgactgggattgcttttgtgctatccattggaatccatctcatgctgattgtgctgtacctcaggagcttgaaacagatcaagtactgaagcaactgaagtatatagaaatgctacggcctcgacttgctgctaaacggaaaaaatcagattgcacacataatagtgaatgaagtcgggtgagagctggatatttttgtccttgtacatgctacaatttacaaaccattacatgttccatgccttcaagtggtattttgtttttaaggcatgttaatggatttggaatgtaacttccggcttttttaactttttttttgcagtttttttttatttttttatttttaatattttccatatatgtggaatgtgatcaatcatatagttcaattttggcagtggaaacctcttggtaacgctcttagtttcctataaataaaaaaaaatggtaggggaaccggtgcaatgaaccatcataacttggggtaatttcccccttttgagggctttatattcgagtgatgctcaatttgactttattgtcgtcc

SEQ ID NO: 132535 - DNA, 503 bp, Glycine max
  Clone ID: PAT_MRT3847_90686C.1
aaagttccatccctgttttaggaggggaatatttgggaacatcccaacgggggcagcgggggaaaggaaaaaaagaagccaaccccttttttttaaaaaagcagaaaaaaccaaaaaaaaaacaaaagccaactataaaacccttgcccgaataaaaacaaagtttgaaagaaaaaaagacacaaaataaacaagggaaaacaaaaaaaaaggggggccaagggggcacaacaaaacagccagaagaagccaaaaagccggaaaaccaaaaaaggccaaaaaaaaaaaaaacccggaaaggaaacaaaaggaaaaaaacaaaaaggaggggaaggccaaaaaaagaaacaacggggggacccggaatgaaaacaaccacaacgaaaaaaaatttgggaaccaaaagaaacaaggcaaaaaaaccagagggaccacaaagaaagcgcaccagaatgaccccacaaacccatggggggccaccggggagaaaacccccacacccc

SEQ ID NO: 132536 - DNA, 844 bp, Glycine max
  unsure (1)..(844): unsure at all n locations
  Clone ID: PAT_MRT3847_90687C.1
ccgttccgtaattccagcgtcgaccgcacgcgtccgccgacgcgtgggcttttctcctctcttctattccactcagtcattacactatttaatctcccattgcgcgttcctttaccaccctcacttgactgcttacggctttcttgcactcacgccattctttctttgctgaatcactctgcattttgaactttctgacaagctcagtgtttatgatccacatggaaaccgacgaattctctcgcgtgattccctttcagcttcaattcgataaacccctcgcttctcagatcaaaattgcggagtggaatcccgagaaggacttgctcgccatggtgactgacgattctaagatcttgctccatcgtttcaattggcaacgcttgtggaccattactccaggaagatgcataacatctttgtgttggcgtcctgatggaaaagcaattgctgttgggcttgatgacgggacattgtcactgcatgatgttgagaatggaaagctattaagaagcttaaaatcacattgcgctgccattatatgtctcaactgggaggaggagagtcagctaattacagatgactttggtcacacttccaaatatgaagatagaacctctcgtttctttcctcctgctccaagagttcctcggatgcctggattggtatctggggataatggcttcatggatgatagcgaagattcatttcaggagctgtcaaattcttctcaccaacgattcaacatcctatgcagtgcagataaagatggaaacatttgttttagtatatttggcatcttccctatagggaaagtntacatacacaaccttacttttcctac

SEQ ID NO: 132537 - DNA, 325 bp, Glycine max
  Clone ID: PAT_MRT3847_90688C.1
gcaggacacaacagggaaaacggcaccggcttcgtagaataaaacagccatggtgcacgagcctttaggggaactatgggaagacattgaagaagccgcgtacgtcgtacgagaaggatgcgtttggacgcagagttgaagctggttgatgagaactgtcttcggtgcaagagagagctgtggagggtgcactacgcgctcagtcgtatacgaaacaacgcgcggaacctactgactgtatactagaagaaccagggccggatcttcgagggagaggcgctgctcctaaggatgttccgatacggtcgtactcgatgagacacag

SEQ ID NO: 132538 - DNA, 449 bp, Glycine max
  Clone ID: PAT_MRT3847_90689C.1
ggctcgaggtcattccgatatgcttaataacccgatttttcactctctcttcccttcctctggagccgggggtgttgattactgctaagaacaggctgatgagagactgcaagaggatgaaacaagacccttgtgcaggtatcagtggtgccctcccggataacaacctactgctgctgaatgctgtgatatttggtcctgatgatactccatggaatgccggctcggacctgcaagccctgcaatatactgaggactatgccgataaaccaccatctgtacgatgtgtgtctcccatgtctcatccagatatttctgctgaaggaagcatccgatcggatatatcacaaaacttgcgaagctctatttatgacgtagctgctatactcacatataatcaggcatagctttgtgatcccaacccaaattctactgcatactctgaagca

SEQ ID NO: 132539 - DNA, 236 bp, Glycine max
  Clone ID: PAT_MRT3847_9068C.1
ccgagctagctagctagcaagcaagcacagagatggagggaaagcgaggccatgccctcatgtgctcggcacgtgtatcactcttcctgtgcgctctaaccctatgccgctgatcacggaagcaccacggatcaagacatcagcagacagctgaaactcggtgacaacgagcttctgcgcacggaaagaaagttcactgtttttatggagaattcctggaggagctactacagaga

SEQ ID NO: 132540 - DNA, 343 bp, Glycine max
  Clone ID: PAT_MRT3847_90690C.1
taaaatcatcttactttctgtttcgagaagactatttaaaggattaattctatatctaatacgtgcgacatactcctacttttggaagggatgcatttattatactaaaattcaacacaggctcttcctgttacttttactactcaagataactcctctgatcatactaccttttttctctctacacattattcaaatttctcccctatcaacttttcattgttctatagttttctaccatttttgttacagttgaccataaattatatttctattcctgtaacgtaacctgacaaacgtctaccacttccaatttatttcatcatactccccaattacccat

SEQ ID NO: 132541 - DNA, 514 bp, Glycine max
  unsure (1)..(514): unsure at all n locations
  Clone ID: PAT_MRT3847_90692C.1
cgaagcccaactccaccatcttaaccccacccgcgaccgtgtccaagaagccctagccctaaccctaaccccaatccccacgcgcctcatgcgcctcatttcaactttcttcgaccacaccgaaaccgcctccaacctctgcctccacttccaccactgcctcctccgcgcgcttgacctccacgctcccctcctcgacttcttccaaaccctaaaccctaccaaccccacccaaaacgactgcgttcgcgccgtccgcctcttccatgccctccagaaccccatccccgactccacaccttctccgtcacctgctccaacccctccaacgtcaaaacgcagctcgatcgccgcatcgcgaaattgctgtcgtgactctgcctctctcggcgcgtcgtccgcggctccaccatatctctctccgccgtcgtaattgccgtggtggcagccaccgtcgtggtcaccgtgtacgctgtggccgctctagctgctgccgctggtgccgtgtcngtct

SEQ ID NO: 132542 - DNA, 254 bp, Glycine max
  Clone ID: PAT_MRT3847_90693C.1
ataatcactttttactagatatcattttcctcaacaagtcaaacattcatacctaaatcatcatccatcaatcactaccgattctaaattcaatcctataccaacataattaatccacatttacaattaacacgataacacttcctactttcaacttacaaaaaaattgactaccttatcaaaaatcacactctttacaacattcactttatattctttcttaattacacaatactcatatctatctttttcaa

SEQ ID NO: 132543 - DNA, 205 bp, Glycine max
  Clone ID: PAT_MRT3847_90694C.1
cgagcatgcctgcacgctctactctagacgatacctcccgctaatctcaaccccatatttttacccatgaggcaaaattgttcagggtgaatgaggcaatttatgggactattaaacctatcctgacaccacaagtaatgatatcggaattactcaatgaattcaaatacttcattttcaaaaaatattactgcaaaaaagtcca

SEQ ID NO: 132544 - DNA, 341 bp, Glycine max
  Clone ID: PAT_MRT3847_90695C.1
tggaaattttgatatgctgacatcgatggtctttcttctgcctggcctccctccacttcagctcgcggctttgtggctaggggcgtgtaggttttgcgctctggttcctcatgattgactgctaggagcacttgcctgtgggtgtcctttgcagatatatgaaggactccaaagtctattaggaaagccacttatagtgggtgcgaacaatctaacatggacatttggtgaaggttatcaactctgagagttgtgatgttggtagtactaagaatgacttattggcagagaaatacagcaaactcagtgttgcacttttggggatttcacaatttacagtt

SEQ ID NO: 132545 - DNA, 273 bp, Glycine max
  unsure (1)..(273): unsure at all n locations
  Clone ID: PAT_MRT3847_90696C.1
gataaagaagcatcaagcgcgcgcacacacacccctctcaaaaagaagaacaacatgtcaaactccacatgtacagaaatggaaaaggatcacacaatgacagcacaacgatcctcttacatcgccggctgcatgatctccccttcgtgcttgccaatccacaaggagtacgagtactcgcgaatctattacagccccagaaagagggtgagaaggtggaggaacatcctcagaaggttcatgagggagagcaagnggcngtgtagatccaag

SEQ ID NO: 132546 - DNA, 810 bp, Glycine max
  unsure (1)..(810): unsure at all n locations
  Clone ID: PAT_MRT3847_90697C.1
tcgaggaaattttatggccgttaaaataggggtgtaccctacactggcaaaggtcctaacctgatgnntcatattgaataaagatannagttgcttgaggggttgtgtataccctttcatgtaaacctaaaccttatgcnagcaatagtcatnttctcttaagcntgtctattaattgtgtgttatgnntggtaatgcctcattatgtcatattgttgtcatcagagatgtgaacattattttgctaggagactggagttggaaccaaatggaggtgtgtgagaggggaaaaaactgaagaccacgggatggttgttggatgtttgtttgctggtgctgtgatcgggacctggttcaattttatttctgtcatctatattggttttgttgctgcacatacacttccagttctctatgagaagtatgaggatgaagttgacaactttgtatacaaggtccttggtcagatgcaaaatcaatatcgaaatttggataccagtgtgctcagcaaaatccccaagggaaaagggaagaaacatgaataggtttatccttatggcttgtgtaaattaatttgacattcaatgcccatctgaacacattatggcagttgagaatggtggaagaaggccagagactacattggtggctgttgcaaacttgtgacggcacttcaaaggcaggttgtcatatgtgtatttggactaaccacattgttaattttgtggaggtcgatgagcactgctcatcactggatattgtattgggttaagtgggtttacaagtaaaccaccgcaattatttgttaac

SEQ ID NO: 132547 - DNA, 1527 bp, Glycine max
  Clone ID: PAT_MRT3847_90698C.1
tcttcaagaatgcctgcttgcggaaggaaaaccttagaagcagtcttcctatattagttagttagagatggtcctagtttgcctgaacggctgcgagaagacgagaaaagtttatggcctgtaaaatagggagctaatttactcttgaaaagtccagagaataatcttgtggggtgggtgttatttgactagttgcaagttggtgagttcagttattaagctcttttggacatgcttcttgctggtcttagggtgaacttttgatgccataaaaaaccatcccatattagttctatttctctctctgcctctccctttgtttcaagttccctctgcttattctgcacaggaacgatgtctgagaaaaccacagctgagaaccttattgaaaaccttgtggacacatttgttgataagaaaaaatctgtatcattctttgaggatgataagtcagactcagtgagttctcagatcaatagactgtttggacgccagaaacctgtgcaccatgttttagggggtggaaaatctgcggatgtcttgctatggaggaacaagaagatttctgctagtgttttagcatgtgcaacgattgcatgggtgcttttcgaatggcttaattacaactttcttactatcttatgcctttggttttggttcttgtcatgcttgcacagtttctatggtcaaatgcttacagcatgtttaacagttcagcatctaatgtaccccgtcttgttctcacagggtaaatctttctgaacattgccaactgtggttgatagttaaggttatcatgtgcttttgatgtttcttcaatatgctgctttgcggaggaaacttgaatcaatttctttttgttgttggatgtctgttttgctggtgcctgtgatcgggcaggttggtgcaatttttatatctgtcatctatattggttttgttgcagcacatacacttccagttactctatgagaagtatgaggatgaagttgacaactttgtatacaaggtctttggtcagatgcaaaatcaatatcgaaatttggatgctagtgtgctcagcaaaatccccaagggaaaagggaagaaacatgaataggtttatccttatggcttatgttaattatttgacattcaattcccatctgaacacattatggcaattgggaatgatggaagaaggtaacaagagggatcaaaatatttcttccatatgaatgatagagtggaataaatttaaaattgcatttattgttgtagtgtctattgttcctttgcctaaattgtgatcttgaaatgttgttatcgcattacttggccagagactacattggtgactgttgcaaacttgtgacggcacttcaaaggcaggttgtaatatgtatatttggactaagcacattgttaattttgttatagtcaatgaccaacattgttgtctatatggtgttattaagcacggataattattggatattgtattgggttaagtgggtgtacactagcacaccgccggaaaaatttgtt

SEQ ID NO: 132548 - DNA, 644 bp, Glycine max
  unsure (1)..(644): unsure at all n locations
  Clone ID: PAT_MRT3847_90699C.1
tcctctagagcggccgcttttttttttttttttttttttttttttttgagcaacaaatacgaatactatgattagtcatccatctataaatcggaaacaatgtttgaaactttccgcatgatgtaaactcatggtcccttaatgggtgtttgttttagcgtttaaacattacaaggcacgattgaacccaaaccatgggtcttttgtatcattgagctgaagggatgtttgacagtttcaaacgtctgaccaaacacactgttagtgtgtcacgttacttcttatgcattctacagtctggggagttatgtcgtaagggtgataatggtcgtcttgctacctcttgatcgtcaaaatcaatcttcctctgcattgggctacttgttctgggactagactttctcttgtttgacttggctgatgggctgttggtatactcnccaccagaatcgggatggtttctttccttgtatatcctcaataaccttttgttctccttttccaatacattgttttcatcaaacagtaatttgacctcctcctcggctttgtgaaggttaagtcttagatgctccttatccttctcaagtgacttgactttggcaacaagtgacaaacactccgagttgatggggttatgcagt

SEQ ID NO: 132549 - DNA, 416 bp, Glycine max
  Clone ID: PAT_MRT3847_9069C.1
gggcacagcaacagggagggaggaataacatgagatattcatggttggcatgtataaagcaggatataatgttgccgttgcccttgtagtactataagtatgaccaagtaaaagggggagctagcaggagaaaggatcagatagcacttgtatttgattgatgagttaatggaagaatatctcagtccattagctgttacacatcttcttcaacaaacactcagaagcttatgcatccatcaaaattctcaatgggtctatgtagtcttctggaggatcgtgccaagaaactatccaccacccaaatgggaaagtgaagcggctaatgataaatccagaggaaacagaaggaactggatattggtctgggaagatggtttctgcaactttgctacctcatcagcaccctgaaataa

SEQ ID NO: 132550 - DNA, 325 bp, Glycine max
  Clone ID: PAT_MRT3847_906C.1
aattggatttcatgtaggatttaactacaaggaaaaacctgaccttgctgcagctttgaaaaggttttttccacaaggcattgatgattactttcacaatgttgggggaaacacacttgacttcgtactcctgaacatgacagtccctggttccctacacccctgtgcaatgatctcccaccataatcttactcaacatgaaggggacaccaatttgccccccatcctatataacaggattcgcttgccaagctttaacttcctggatttccatcacctatatcccaacctcttgcagcttctcctgccaaatatcatagaaggg

SEQ ID NO: 132551 - DNA, 628 bp, Glycine max
  Clone ID: PAT_MRT3847_90700C.1
cccttaatgtgtgtttgttttagcgtttaaacattacaaggcacgattgaacccaacctgggtcttttgtatcattgagctgaagggatgtttgacagtttcaaacgtctgaccaaacacactgttagtgtgtcacgttacttcttatgcattctacagtctggggagttatgtcgtaagggtgataatggtcgtcttgctacctcttgatcgtcaaaatcaatcttcctctgcattgggctacttgttctgggactagactttctcttgtttgactgcaaaatccaaataaatataaatatgcatacattcaagtagtgatgatgcacagaagatgcttaataaatatatcatcaccaacgaaaaagaaatgaatttgaactggcgctgcaagaatacatcttaaaactaacttgccttggctgatgggctgttggtatactccccaccagaatcgggatggtttctttccttgtatatcctcaataaccttttgttctccttttccaatacattgttttcatcaaacagtaatttgacctgcgcatgccatgccaagttaagtcagatattgatccacactcaaatcatcacccaaaacaaatgaaatggtccaaaaacctgggga

SEQ ID NO: 132552 - DNA, 134 bp, Glycine max
  unsure (1)..(134): unsure at all n locations
  Clone ID: PAT_MRT3847_90701C.1
atcgagcngantnggntngagtgatgcgagtgtangtgaggtnaattcgcggnaatgcngcnnaattcngcgacgtttgcaatggcgagaagggcgtagggcgnanggcaagnccgtcgactagaagggntccc

SEQ ID NO: 132553 - DNA, 477 bp, Glycine max
  Clone ID: PAT_MRT3847_90702C.1
attcatcaattgatggatgagtatgctgcatatagcgacattattcaaccaattcaagttgctgtgtatgagatgaaatttggattgtcgctggttttgtctagtacctgggaaaaaaaatgtttgaatgaacttgggcaggaagacatcaacgtgattatggtatgttatttcatgagtgttgtcatgcttgattttattttatatttgtttaggaactgacatcatgagcttgacaggaaatgatatacacacttatgcgcttccctcgtgctgcttcatgcatgttcatttctgtcaagcatgacattgggttggacatgcgtccttcatacaggctagattctgctacaggcttttatttggtggatgtggatttgatggtaaggcttgttactctttcaagtggtgttgctgctgatcagaaggtatatattttgttggattaaattccaaattccagttctcaaacaatat

SEQ ID NO: 132554 - DNA, 201 bp, Glycine max
  Clone ID: PAT_MRT3847_90703C.1
cgaccgactcgtacgcccagacgtccaagaaggcctcagcttaatttataagcataactgaactaacaagagaaagatagatttaaaaagatggccagcaccggaacaaaaccactaagcaggccatctaaaaaaacctacataacacactcaaacatacaccctaataacctcactaaaagcctaaattaacccaacata

SEQ ID NO: 132555 - DNA, 372 bp, Glycine max
  Clone ID: PAT_MRT3847_90704C.1
aaaaaacgatagtggcttggaaaaaattatttccggaaagacccccaacaaaggtgccaaaaagggggttttccacaacaccccttaaaacatcttacatataaaaaaaagcgggttttataacctcttgcaaaagcccctttaagaacacaattgttgggtttcccctggggccaaaaaagactgtaacctgaaaactatctaaaaaggggtaaatacactacccctctattttgggaaaaacgtgtattgtttggtacccccggggtacatatcccacttaaaatttgcgtgggcctttttaaaaacgccccccaaatgagggcggggggatcccagtttataagggcccctcagggggcttattacccc

SEQ ID NO: 132556 - DNA, 258 bp, Glycine max
  Clone ID: PAT_MRT3847_90705C.1
gtatgctcgccatcggggtctgagatataagcctctgcttaagaatgataaagatgatttaaaccatgcaccaacaccggagctattttcggagcattgatcgatgcatggaactacttataaacctgttgctatcgagccagcttgatggtaagttaagacactgataagcacataaatatcctttgacaagctttagaaaagtacgcagaccattgcattgccaaagatgttcaaaatagttgcgatgtcaactga

SEQ ID NO: 132557 - DNA, 327 bp, Glycine max
  Clone ID: PAT_MRT3847_90706C.1
ttattttttagcacactcgattaaagtttgtcattttcatgacgggcatgtggggtgctaacaccttcctcatgcgtaaacgactcctgaatccttttttcctcaaatcgtagaccattccttatctctcttattttctcgacattttccttaaataaatgttggtggcgactccccaagttttcctctttttcaaggaaacaatttatctaattttatttcttcgtcctgtcagagtgtcggcgtggtgactagttgcacgaggaaaggagtccacgtggtagttgtctaagtgcgccaaaattaaggatttaagtttagtttaac

SEQ ID NO: 132558 - DNA, 157 bp, Glycine max
  Clone ID: PAT_MRT3847_90707C.1
gaatgagcagccagcagcttatggagaaccggtagccattggtggactaaaccctagtgtaaacaatgaacttagtgctgcaattgcttcaattctgggaaccaaattgtcactgccgaactcacgcttcttgttgaaggtgtatgacactcaaggg

SEQ ID NO: 132559 - DNA, 385 bp, Glycine max
  Clone ID: PAT_MRT3847_90708C.1
ccacgcgttcgatttttttttttttttttttttaattaaatttatatatttgggggttggggggaaggggggaaagggggggggatcccgcccaaagcggccccggggcccagcagggcaccaagcgggggcgaagcgggggccggggggaccccgggaaaaacggggaacccgagaaaaaacccaagccaaaagacacccccgaaacaacccgcgccccaagaggacgagaccggaccagaggaaacacctgagaaggggtaaacacacctctcaccccctagaccgggggggaccccaaaaggaaaaaaggcacccataaagcccgcaccccaacaaaaaaagacaacacgcgggagacccggagaggggcaccaggccaaag

SEQ ID NO: 132560 - DNA, 556 bp, Glycine max
  Clone ID: PAT_MRT3847_90709C.1
gcattggcatattattaataacccagtttaaaacacaaggtgtgcaataaaatgatttagaagagtacaaggatatgtttcttatacaaataagatcggtactcaaaacattccaaaatctaagaaaaaagcctactgtcaaaaagccatctaaaatcctctagcaacagctgttttaacgacgcccacaccttgcgtattactaatgcttttgctgcattatgatctgaaataatcaaacactagtacttcatcactgcgtaagcattccttcacccaatccaacacataagaacgcattagttctctacaaccagcttaatagaattatttattcaccaaaaagaaaagcttaatagaattatttagactctgaaaagtctgataactgcacggatccggatcctaaatgcacaatctgtttctgcacgtcgttattgctgtcggtaaccacttcccaaaattccgatttatccacagcatatccattgcccgccacctgcttgtaatatagcctcatcccaaactgggtcttcatccgacctccatataactc

SEQ ID NO: 132561 - DNA, 364 bp, Glycine max
  Clone ID: PAT_MRT3847_9070C.1
cttccaaggcgatgagcgtggcagcggagaagatagcgacggcggcgcgacgccaagccgtgtcgctaacggacgccgccgcctcgcgaatacggcagctgctacagcagcgtcagaggcccttcttgaagctgggagtcaaggctcgcggctgcaacggcttatcctacaccctcaattacgcagatcggaatttattttcgtcaatccaaattctaaaggtcagtgtggttgtggtgaatctttcatgacaacaggcagtagtggatcttctaagccatgaaatagttaaaattgctattcaacttgctgtggatcctcacgtaatgaagtcgtcctttcacgatttaattgatagatagac

SEQ ID NO: 132562 - DNA, 795 bp, Glycine max
  Clone ID: PAT_MRT3847_90710C.1
ggacgaggccaagagcattcccgcgttctaatctttcagccccaaatacctcatccataacattgatactcttttgctctcagtactgcaccttagtacccagagaaaaactaatgatttcactacgaccctataacacatgtcttgaaacaacaaagtttctcttcaacccttcaaagcttggaatctctacacaaacatgcttgatagcaccaaggaagacatcacgtagaatacaagtgaaatgcagtggtgcagaaaacaagggtgagagacgaacgtttttgacactggaagaagctggtttggttgagatatcaggtttgagcacacatgaacgctttctatgccgtttaacgatatcgtccctgaacttgctaagagtgatatcagagcaagaaggatgtccaattgaggagctcaatgctgccaagatatgtgattggttcctcaaagataagctcaaaagagaacagaacttaggctctgcggttcttcagtgggatgattcagagttccaattttaattatctatttaatacttttttctttctaagtcatgagttttttgggattatgtttatcgagaaaggggtgacactttttttcggtattcgattctaaaattcttatcgtatatgattcggattgttgatgctgctcaggttccctttttagagtattttctcctcttcataggtattgaattaattacaactgttgtaatttgaaggacctttcctggtttcatgccattgggtttccaaaatctaatcagtcctgtcaaggtttctt

SEQ ID NO: 132563 - DNA, 151 bp, Glycine max
  unsure (1)..(151): unsure at all n locations
  Clone ID: PAT_MRT3847_90711C.1
ggctcgagctctagccgatgagccactaaaataactgttgaggatgatgaaggtcctgtgtctgataagggatatgatgatctctatctnccntgagacatggcctccctctccccaccatttcaaagctgtggcccccactcctcttttc

SEQ ID NO: 132564 - DNA, 506 bp, Glycine max
  Clone ID: PAT_MRT3847_90712C.1
ctggctctctttatgcatgttgcaaattacatagcatcggcatgattatgaatgatagggactaatatgcaaactgatgtccagtagaataactggattatgcccttacaacgatcaacaccaaggtcctattcgacctgaagctaagcggatgataagattgttctacgagcttttcgaatacgaatcattcttaaaacttgaatataacgggaggatcaagagccctatgggcatctgttcgatttcatgaatttgagctaccaccctttgaagggatgaaaaattgacctggggacgtttgtaaccaactatatcaagccgactttcttacccatagaaatgtcgattaaagccatggagtaaccatggttctatagcccaaaatttgttgtagaaatatggatgccaaccaatgatcatcaccattttaaaagcacctcttgccgccatccagctcatccggaataaacacttgcacgatactgtgaaaggatatctgaata

SEQ ID NO: 132565 - DNA, 406 bp, Glycine max
  Clone ID: PAT_MRT3847_90713C.1
ctgcagccaagcttccatggactagacctttgtagcagacaatttgctctttatcagttcaaaccacttccgttgtcatcatcgcaatgagcataggccttgctaccacttggaagctaactattgctatgataacagggcatccactcacaatccttcgctcttatacaagaaaagcggtgctctctacactctcaacaaaatttgatacagcacagaatcaaagcacacaaatcgcagcggaagcagtttatactcacagaattgtgacaccatttgcgagcattacaaatgtgctacagctatttgatgaagcgcatgaggcgccgacgaaggaggcgaggatgaagtcatagctagctgacatacgaatggatgctgctcagagtattacgttcatgtcatg

SEQ ID NO: 132566 - DNA, 255 bp, Glycine max
  unsure (1)..(255): unsure at all n locations
  Clone ID: PAT_MRT3847_90714C.1
cccagtccacccttttcacgcggcctgcccctcccctcgcttgcaccattggtgctttgctcgcaacaacacactcgtcggtcaacatactacgagcacagcatagcattgctggacatccttcaccgcccgctccttatcgcacagagaaaccgacgatcggccgccaagatctgcgcctgcnccccctgaaatcacctcgagccaagttagctacacccctaccccaccaacccaagcaccatggtcgtcgcg

SEQ ID NO: 132567 - DNA, 454 bp, Glycine max
  Clone ID: PAT_MRT3847_90715C.1
cggctcgagcgagaagacgacagaaggggtctgtttcacagtcatcacaacggaaaccaaccttcacctggagaaacaaaatctagcatctatgttttgtctcttggaaagtgtgaacggacttaaaagtgcattccaatggttttccaaacataccataattgtatacttctactgaatttcctaaaagtattttaacaatttgattcatttgaagaatgcataatacctctcaacaaatttctggaccttccttttttgccaagcctagattatgtctagacatagaaaaaacaaaagagacacatgaggaaacaactcttagcaactcagcactacttatcgaagtccctcataaatttcatgtctgccatgaatgaatgaatgcaaagcttgcagaggaagttatagagaaaaagagatgaatgaagcaatgaattgcatagaatgaatc

SEQ ID NO: 132568 - DNA, 351 bp, Glycine max
  Clone ID: PAT_MRT3847_90716C.1
ccccccccaggacaccaccccccccccaaacaacgggcaaaaaaaagacaaggaaaaaaccccgaaaaaaaccttttataaaccaggggcggcgggttacccaacaatccaaacccgctgaaaccctccggaaagcttaacaaaagggcaaaaaattattttccttccctattcccccaaagatcccctcagctccaattcgttccccaccccggctggggtgaagccgggtggcaacctggggggctacccggcccggacccatcccggtggatcccctggtaaacacccttcctttgggccccccccccccctttcccttatttcccccccaatcaaaaaaaatcctag

SEQ ID NO: 132569 - DNA, 1626 bp, Glycine max
  Clone ID: PAT_MRT3847_90717C.1
ttccatgcatgcgtccgctttgcgtcgccatcgtaaggttcttttcattttatgttatattctattgtgcctttttttttttttttggcttttgggtattatttttttcccttaaaaaatttcaatcgttagtaacgcagagacattgacagtgaaagaagtgtgcttttttgtctgtttctctctgggttctgagctgttttactctccacattctctatatttgtcttgaacccaccacactctctcttctctcaatttggattcatgggttctaactccatattgaaaaccattccttgatgggtttttctgatcaagttaaggtaagggtctgtcccaacttgttttttgtgagtttccccttgtttctgagtgagtgtttttgtccacttcaaatctggatcccatctgtttgttgaaaaacctgagagggaaaaagcttggtaattgaattgaattgcagcagaaaatgaaggattttccttcttgttttggtgaaaatggagttcaagtggcggattcttcgtcttcaagcgctaataaaagtgcccagaatgtggttacctgtgtttatcaatgcaggattggcggtatttcctgcctgattactgtcacgtggagtaagaatctgatggggcaaggccttggcgttgggatcgacgattcatcaagccagagtctttgtaaggtggatatcaaaccgtgggggttctccaagaggagaggttgtaagagtctagaggttcattcttgtaaagttgatgtgtattgggacctttcttcggctaaatttggttctgggccggaaccgttggggggattttatgtgggagctgttgtggatggacaaatggtacttcttctgggggatttgaggaaagaagctttcaagaagaccaatgccaatccactaccccacaatgcagtgttggttgccaagaaagagcatgtttttggtaagaagttgcatggtaccaaggctgtgttttgtgacaatggccaaattcatgatcttgtcattgagtgtggcactgcaagtgttggtgatccgagccttgtaattcgcattgacagcaaaactgtgatgcaagtgaagcggttgagatggaagttcagggggaatcatactatcctggtagatggccttgcagtggaagttttctgggatgttcataattggttctttggtacatcccttggaaatgcggtctttatgttcaggacatgcctctccgcagcggacaagttgtgggctagccaaccaccttctgatttggcatggtctttctccgagagatttcctgagaccaaattgcagggtctcagtttctctcttattttgtatgcttggaagaaccagtagatatgtagaaatccatcacatattgagtactaacagacctctcagtgagttttgatttatcgaccatgtgatttaaacattgttgagtaaaaatgagtacttatgtttctctcattccccttattaaattcatgtcctcaatttgagctatttgaacaaaccagagacttttttcccccaaattgctgtacatttgtcttcaagtgttaactttatggttcatattactaaaaatacaaagtttacatctttctctttta

SEQ ID NO: 132570 - DNA, 695 bp, Glycine max
  Clone ID: PAT_MRT3847_90718C.1
gcacgagccgcagggccaatcgcccaccccggaagtgcgggcacgtgccgtcacaaagctagttctgcccttgggaactgggctgcggccccgctactttggacgggtataagacgcgaccgtgaccacttgggcccggccgcgttaggcgcatgatctacttctaggagcaaagaagagaccagccactagagatagccatggcaagcgatctttagtaaacaaagaagaagtcacaagaagaatctcccatgctgaaagtagagaaaagggtcaacacaaagctaaaagatcagatggtaagttggcattggacttggaaaaaaagatggttataagaggagacaatgaagatataggatcggaaaagttaaggggagccaaggaacaaagaatgtcaagcagcaagtcagacttggatactaagaaaaacatacaaagggcaagaagcaaaaaatcagaacatggccgtgaaaggggaagatagagataatagtgattatactctttgaaacactcagagcaatcttcatttccctatatatgaacttagtagcctctattcttatcatttcttttttacatgtgtcataaatgtaagcaaggtattgtcctttctactatctataactgttaaagagttatattgatcaaagatgtcattgcaacaaatgcagatgacttctgtctgatac

SEQ ID NO: 132571 - DNA, 210 bp, Glycine max
  Clone ID: PAT_MRT3847_90719C.1
ccgagcgcacttcctctcaccccgacacaaaacatggctatgcacaatcatcaaaccgacgagtaccccagcttcaagcttgtcatcgtcggagaagtgcgacatcgaaagagaccttcgtatagaagcatctcactagtgaattcgagaagaaatatgcaccgaccattggtatgaaagttcatccgttggatttgtgcacgagctgtg

SEQ ID NO: 132572 - DNA, 864 bp, Glycine max
  Clone ID: PAT_MRT3847_9071C.1
ccacgcgtccgcttggggaacgttctacgagcagcatagccacaacgtggcggccacgcgccatacctgaaaaggaggaaatgctgtaatatcccaaaacaacgggacagagatagtttatcttcgatggcttccaaggcgatgagcgtggcagcggagaagatagcgacggcggcgcgacgccaagccgtgtcgctaacggacgccgccgcctcgcgaatacggcagctgctacagcagcgtcagaggcccttcttgaagctgggagtcaaggctcgcggctgcaacggcttatcctacaccctcaattacgcagatgaaaaagggaagtttgatgagttggttgaggataagggtgttaagatattgattgatccaaaggcccttatgcatgtcattggaactaaaatggattttgtagatgacaaactaagatcggaatttattttcgtcaatccaaattctaaaggtcagtgtggttgtggtgaatctttcatgacaacaggcagtagtggatcttctaagccatgaaatagttaaaattgctattcaacttgctgtggatcctcacgtaatgaagtcgtcctttcacgatttaattgatagatagacatacaagtacaactaatggatttctattattctgcctgcgagaacaagggaaatgagagctttggtgctcagaacaaaaggatactgaggactgacatggtctcaatatacagagttctctgaagctgatggtaataaggcttatttcaacaatttgtattatcatttgttttgatgattcttatttctaatataaaattatttgtatcatgagaattgtagtttgtaggttaacaatatcatgagatattt

SEQ ID NO: 132573 - DNA, 576 bp, Glycine max
  Clone ID: PAT_MRT3847_90720C.1
gaatacaaggtttggctttactttatttaaataacttttaactgagttcttagttgaacattttacattataagccttaccgaaccaaaataaacaaatacaaaaacatgcaataaatcaagttcctgatgtacatgactggttaaattgataaatcacaaatgcccttgtgtttgacatgcacatcagattggtgttgcacgaagataagttaggctgcggttgaggttgaggttgagggttttgaaacatcccaacgccatattgtcccatcctcacagcaactcaatatagtacttccatcaaaggatgttgcagtctgcctgattggggattttgattgaggatgtgacaactttgcagcaagtacgggaggacttgactgtaattcccaaacaaaaatcttcccttccctgttacccactgtaactatgttgaaatggaagtcacaagaaaacttgatgaaccagatattgcaatcgggaatagggtatttatgaagaacatcaactacacccttccctggagtttgttcgttcactttaggttcccacaagataatttcattatcaacac

SEQ ID NO: 132574 - DNA, 218 bp, Glycine max
  unsure (1)..(218): unsure at all n locations
  Clone ID: PAT_MRT3847_90721C.1
ctagagcgcgcgcgctttttttttttttntttttttttttttttcggaaagaaagactgtgcgcctgaacggtaataaaagttggattatgcgtgacatcagatccgagccggtccaatgttcggaatgattgacaggacaccatgtactggttgtaccataattttatttgccgaagaatgcctttcattggttggccctgagaagctaaactcgta

SEQ ID NO: 132575 - DNA, 115 bp, Glycine max
  unsure (1)..(115): unsure at all n locations
  Clone ID: PAT_MRT3847_90722C.1
gctgacaggtgacagtacttgtcgccccagttgtgcaactactggtggcctgggtcttacctggcaaacttaanctactgatagccctatggaccataccnnnattngcaagacc

SEQ ID NO: 132576 - DNA, 344 bp, Glycine max
  Clone ID: PAT_MRT3847_90723C.1
acggtcgcgtgggttttcctggtttttccggtaccggtctcttgccggtctgccgctgtttttcctttttttcgttttgtgagtccttttaaaaaaaggcgaaacccgggtgtaggggtttattgtttgcgggcgcggggggccccccgggaattcaggcccggccccggaggggtaaccagttttccctaaggggggtaatgagagagcttgctcacattaagggcaatgggcgtcactgcccggaaaaagcctgccaaccccacgggccaaatgaatcaacccaggggcctaaagggggagagcgggggttcgtatattgggggccaacgcacatttattgg

SEQ ID NO: 132577 - DNA, 433 bp, Glycine max
  unsure (1)..(433): unsure at all n locations
  Clone ID: PAT_MRT3847_90724C.1
ggaacgggagtagacggaaaaaggaaaaagcggccgccccacaaacccaaaagacgcagcaggccccacacggcaccgccgacaccaagaagcatgagacccagagaacacagaaggagaacgacacaacgctcaagcggaangagccgcaaagggcaacccaggacgaagcagcgggagccagaagcaccacaactaagatccaagaagacccgggtcatacgcaacacacagcggaaacacaggaagacagggcagctgaaccgagccccaagcaggaccacgcaaacaatggacgggcagagcacaccgaccacgcacaccgaaaaagccccaaaaagccccgaatggggcaggagcaaccgaaacagacaaggaagccccccaacgggacacaaacaaaggaaccccaaagccaagggggcccaaagac

SEQ ID NO: 132578 - DNA, 400 bp, Glycine max
  Clone ID: PAT_MRT3847_90725C.1
agcaaattcatttcattcaattcaatgtaaaaaaacacagtagccacccaatacataaaatttgtttatgctttctacacgcacttcctccttcgtatccgtctcttccccaaccattggaatacattccttaacccaccgcaaatccaaatccaaattcaattcgagctgaacctagggtttgttccttcctattgccttcacggatctcgcattctcctcaaatttccgaaacgggaaaaagaaaatgcacgcgaaatcggcgcagtcgtcgttccgggatcggactcaggaattccacagcatcacagagaggttgaagaagtccggatcagggcccaatgggcccagcagcagcacttctttcaccagatcggaagaacagcgatccgcgatcgcc

SEQ ID NO: 132579 - DNA, 1215 bp, Glycine max
  Clone ID: PAT_MRT3847_90726C.1
cggctcgaggagaaagaaaatgaagggtcaaacacaggctacaaagttggttaatctatacagattttgcgtttcgtcttcttcttcttcaatctctcgcttcaaccacttcactctcactaccaccgattacaataaattcaaattcgcttgcgcgaaagcgaagcacctccaactctcactcaactctcactccttcaacgcgccttcgtttttctttccccccgtaacgttgccgctaattacccgcgtatttatcgcgtttctggcaattacatatattttaggtgtgtctattgcatctgcaccaattatagctcatgccatggatgctggggatgcattggtggatgatcatgtgccaacgatgaatccaccgacctattagagtatgaaatagatgttcatcttttgttgggaatgtcgaggaacaggtctatactttcttttgcttttctgatattgaagtgagacatcaacaattcaatttggttagaattctttgtacttgctgggttctactgcatttcccatctcgggcagtattctcttttttcagttgtagaaacggaatcatctcgatgaaaacaacataacaagggaatagtcactgtacgccagcaaagtcgaagtgcaggactataagctccttttcttggctgatgttgaagtgagagatcaaaagttcacgttggttggagttcttggtagttggtggcctatacctcatttgccattttgggaagcattctcttttgtcagaaatagaattggaagcatcttggtgaaaacaacttaacaaggtagcctgctaatttaaaattagctctccttctaagttctatatagttgggcctctgttggttttgtcccttttggagcttcaacaaaatcaatgttgttcatcgaagaagaaaatgaggggtaggaagagttgatgaatgatgaatgagacaggactgatgattacttgcaattaaagtagcctgtcaaatactaactgcataggctataaggtcatccctctcgttgtttaatgggtcaaatatgcaaaaatttacatctttgtaaaagtgcgacatctcaacattctgtcacagcccctattcttcctctgccactttttgatattttaaagtaattgttagtattgaagttttagtttatctgaaaatgtgtaattttacaaaagtaaggatgtggtatttttttttt

SEQ ID NO: 132580 - DNA, 561 bp, Glycine max
  Clone ID: PAT_MRT3847_90727C.1
gtgccaacgatatatgcaccaagaaactcgattctttaaagtatagtcactttatgccagcaaaatcgaagtgcaggactataagcttctttgcttggctgatgttgaagtgagagatcaaaagttcactttggttggaattcttggtagttggtggcctatactgcatttgccattttgggaagcattctcttttttcagaaatagaattggaagcatcttggtgaaaacaacataacaagggagttgggcctctgttggttttgtcccttttggagcttcaactaaatcatgttattcattgaagataccatcccaaaagtgttatgcatagaagaagaaaataaggggcaggaaatgagacaggactgattattacttgcaaataaagtagcatttcaaatactaactgcctaggctataaggttatccctctcttgtttgatgagtcaaatatgcaaacatttatatctttgtaaaaatgtgacatctcaacattctgtcacagcccctattcttcctctgccactttttgatattttaaattaatcgttagtattg

SEQ ID NO: 132581 - DNA, 1067 bp, Glycine max
  Clone ID: PAT_MRT3847_90728C.1
cgtaacctcggaattcggctcgagctcgagccgattcggctcgagagcattttaggtgtgtcaattgcatctgcaccaattatagctcatgcgatggatggtgagctgcatatctgattgctggggatgcattggtggatgatcatgaatcacaggacctttcagaggaggaaataaatgtgcatcacttgttgagattggctaggaaactttggctgcctgcttttttctttcttaccgtttgtcaaacttggacgactcaattacaaatattattcattaaacttactctattcctcctcagtacaaagcccaaccctttctctgtctatgtatttgttgataagttgtgccaacgatatatgcaccaagaaactcgattctttaaagtaaagtcactttatgccagcaaaatcgaagtgcaggactataagcttctttgcttggctgatgttgaagtgagagatcaaaagttcactttggttggaattcttggtagttggtggcctatactgcatttgccattttgggaagcattctcttttttcagaaatagaattggaagcatcttggtgaaaacaacataacaaggtagcctgctaatttaaaattagcactccttctaagttctatgatgcccctttcccaagtcttctattgtgatcaagttaatcgttctcattttagggagttgggcctctgttggttttgtcccttttggagcttcaactaaatcatgttattcattgaagataccatcccaaaagtgttatgcatagaagaagaaaataaggggcaggaaatgagacaggactgattattacttgcaaataaagtagcatttcaaatactaactgcctaggctataaggttatccctctcttgtttgatgagtcaaatatgcaaacatttatatctttgtaaaaatgtgacatctcaacattctgtcacagcccctattcttcctctgccactttttgatattttaaattaatcgttagtattgaagtttagtttgttaaaatagacttaaatatgtttttgttcatgtaagtttgtattttttt

SEQ ID NO: 132582 - DNA, 531 bp, Glycine max
  unsure (1)..(531): unsure at all n locations
  Clone ID: PAT_MRT3847_90729C.1
acggatgagaangaagaantcaagtnntttgctgtggcgttttctattcnaaatctggaaaacattgagaaccctttctcatgaggactacntanaaattgtttgcntgctngttttctttttagtatgctnctganncgtttggaagggtcatcggtggattctaaggtttattttgttgtttgggcattagcnttaactccccccgaggactacntagngtttgtttgcgtgctagtgtgctactgaaacatattgaaaattcttcgaaggattctaaggtttattttgttgtntnncnttagcnttanctccccntgtttccccctctcnncnnantnnnngtcngcnaactccggnnttcagttctgcttctttctccntgttatcccccccctcttccggaagagcattgtgatcagctttggatttttcctcgtcctgccccttcttgggggaggggcttgtaattggggttgtccggcttgtcttacgtgttccagatgactcactgtgggccngaacccgctt

SEQ ID NO: 132583 - DNA, 418 bp, Glycine max
  Clone ID: PAT_MRT3847_9072C.1
gggggcacacacacccgaagacgagaagggccccaaagccccccacacaaaaaaacccgcgggccaacccaccaacaaacggaaagggccaaaacaacccatccaaccccgccccccaacacaaaaccaccgccaacgacagcaacagcaccaacctcacaaccacacccaaactccaacacccgaaacacccgcagaggccaccgggacacggaacccaaccacacccccccctaaaaacaaactagcccctcccaccgaaacgcaaggaacagccaccggaaagagcggcagaacaagacccccaacaacacgtggagaggggacccacggaacagccacccgcccccgaacgacacggcccggaaaccggggatgacgaaaaacaccaacacacgggccggcggggaaaacccca

SEQ ID NO: 132584 - DNA, 363 bp, Glycine max
  Clone ID: PAT_MRT3847_90730C.1
ggaacattttttcatgacctcaagcttaaaatttatcgcttctactaacaacggtgaaccattttaagcaaacaagtttttgatggttaaagcatattttatatggcctgctattatactagtcatcaaaaaacacatttatcaatatatgagaattttgtaatgtatatgtcactaaatatcttgatgcctattgtttactgattcttttatattattattatggtttttgttttcatagttaaatttttctttattatttttatattttatgtgggggggggtaatctttttatatattttttttataatctctttttaaaatattctcttattttatttattttgtttaattttttcctt

SEQ ID NO: 132585 - DNA, 592 bp, Glycine max
  Clone ID: PAT_MRT3847_90731C.1
aattgttttatgaatgaatatgatccccctgctttttaaaatcggaaatgctcaaatgtatgaaagctatatcgtaatattcgcacgaaggttgtattctatcaaaagatacttcatatatttgttagttttttaattaatattttttttttcaaaaaattataaccatccagatatgaattcgtgtgtttcatgctggttgtattttgtgcaaaatagcattgctcttttaaaatatcctgactggagtttttatattgtcgtatttcgataacttatggttctgattttttaagtgtttatatttctacttgaaattggtgtgatgatgggtcaatcatgttactggttcaaagattgttgtatcttcattttacaaattgtctttcggaacaccgactaaaaaatcattttggcagttttatcatttggaagttactgagaaatataaaggctgcaaatataatgatttaacatggactatgattgagctgtttttcttcatcagtttcttatattatatttctgttctagtggagcatgggtaaataaactttatttagctttcccagggggctccttctttttcttt

SEQ ID NO: 132586 - DNA, 127 bp, Glycine max
  Clone ID: PAT_MRT3847_90732C.1
tgagtaaaaacctcaaactaagctccaaacgcttctttcgtaaaaaggaaccatttttagtctaacgctccgagccgccttctttcggatacggatcctcttccgttgactattcgacataacataa

SEQ ID NO: 132587 - DNA, 376 bp, Glycine max
  Clone ID: PAT_MRT3847_90733C.1
cgggccgaccgacgcgtacggacccacggacaccgaactcaacgcacaggcttgcgcaataaataacacggcgatgatcgcgggactgatcaataaaaagcacgctcgtctgcatcacaaacacccaaataggatcaactgatataactgacacatcggaaccactaaaacaaggccttcttacatatggatcattgcctcttctatgctaccttatccaatactacatatctgctgatgcgagtcgatacgtcggaacgcgaatacgtgcccaatttggacactactcagcatgttacaatgatcacagttacctagaccgcgaacgaattggacacataatcctctgaataactacatgctctggcagttgaac

SEQ ID NO: 132588 - DNA, 2972 bp, Glycine max
  Clone ID: PAT_MRT3847_90734C.1
ccacgcgtccggtcatatttcatgattgaagacagggatatgtatgatgccagctctgggtcaaggtttcagtgtagatcattaaatataaatgaggatttgggtcaaatacgctatgtattttcagacaagacaggaacactaacagaaaacaaaatggaattccagagggctagtgtgcatgggaagaattacgggagctccttgcctatggttgataatacagcagcggaagatgttattcctaaacggaaatggaagctcaaatctgaaattgcagttgattctgaactgatgacattgttgcagaaagactcaaatagagaagaaaaaattgctgcaaatgagttttttcttacattggctgcttgtaacactgtaatccctatacttagtgatgatggattttccagtcttggaactaatgaattaaatgaagatactagacgcattgattaccagggagaatctcctgatgaacaagctctagtttctgcagcctctgcatatggatatactctttttgaacgcacatctggacatattgttattgacgtcaacggtgagaaactcagattggacgtattgggtctgcatgagtttgatagtgtgcgaaaaagaatgtctgttgttattcggtttcctgacaacgcggtaaaggtgttagtcaaaggtgctgatacttcgatgttttgcattttggaaaatggcagtgagagtaacatatggcatgcaactgaaagccatttgaatgaatattcttcacaaggtttgcgcactcttgtagttgcctccagggatctttctgatgctgaacttgaggagtggcaaagcaagtatgaagatgcgagcacttcattgactgatcgagcagcaaaactacgtcaaacagcggctcttatagaatgcaacctaaagcttcttggagcaactggaattgaagacaagctacaggagggtgtaccagaagccattgaatccctgcggcaagctggaatcaaggtctgggttcttaccggtgataagcaagagactgcaatttcaattggtctttcttgtaaacttctgagtgcagatatgcagcaaataattataaatggcacttcagaggttgagtgcagaaatctcttggctgatgccaaaacaaagtatggtgtgaaatcttcaagtagagaacaacagaatctaaaatgcaaaattgattctagacatggaggccctgatattcccaatgatacaaaatccttgagcatgcccaagtggaatccaggaaaggaagaagaaactactgctccattggcactcataattgatggaaccagtttggtttatattttagagaaggaattacagtcagagcttttcgaccttgcaacttcctgtagggttgtgctgtgctgccgtgttgcacccttgcagaaggcaggaatcgttgatctgataaaaagccgcacagatgatatgacactggccataggtgatggggcaaatgacgtgtcaatgatccaaatggcagatgttggtgtagggatatgtgggcaggaagggcgccaagcagtgatggcatcagattttgctatgggacagtttcagttcttgaaaaaattacttctggttcatgggcactggaattatcagcgtgttggttatttagttctgtacaacttctaccgcaatgctgtctttgtaatgatgttgttttggtacatattatgcacggctttttctacaacttctgctttgacagattggagtagtgttttctattctgtgatatacacatctatacctactattattgttggtattcaggacaaggacttgagtcataggacactattgcagtatccaaaactgtatggttcaggtcataggcaagaagcttataatatgcaattattttggatcacaatgatggacacagtatggcagagccttgttcttttctacatcccattgttcacctataaggacagttcaattgatatatggagcatgggcagtttgtggacaattgcagttgttatccttgtaaatgtacaccttgctatggacatcaaccgttgggtattaattactcatgttgctatctggggatcaataatcattacatatggctgcatggtggtattggattctatacctgtctttcccaattactggactatttatcatctggcaaggtcccctacatattggataacaattttgcttataattattgtggcattgctcccacgctttacttgcaaagttgtttatcaaattttttggccttcggatattcagatagccagagaagctaagttaatgagaaaatggcaagataatttgcagccaaggcaacaagtttccagttaacttgtgttactgttccgcgtcttatagaaactacagaaatctcaaatgaaatggcttcccttgtatttgtccgtcacaatgcattcttatggcagttggttgtgcaagtgaccaaatgagttgctgaagcagattgcaggggtgtaagacaaatgcttggcatccaacatagtaatgtgccacgggaaagcacatgccaaggctggcaaatagcttggctggtttttcaaatgcgtcaggtcaggaagctaaatatataggagataggagatgaaggttggaatcggcttagactcgggtatctgtatctccagcaatttgatgtgggtggaattttatcagttgcgacttgataataatgatccacggtttatagaaaaagtgtgggagagtagagtgtaactaagtgtactatagttatgtaaaaatcaggcttgaaaaacgtccttttaaaaggagaatgtctcaaaggacgacaatatgataggaaagaaaatgtaattttcacggtccctgcgtctttcatctcttccttcttgcaaatccccctaatatttgaattgaaaaaacaaaaatagaagaaaaaatttgaacttttgtttttataaacc

SEQ ID NO: 132589 - DNA, 255 bp, Glycine max
  Clone ID: PAT_MRT3847_90735C.1
gttaggtcttttttacttcttctaggttaagtgacagctgctggaataagaagtggcgactttcaaatggtagatcctatgtcacgttttgtgggtggctcctcacgacaaggccagggtatggtcacaactcctttatttttccgctcataatctgggaaagcaagaagctgaacctgtcgatctccctcatgaggggccgtgcttgtcttaatctcatattggttggagcaatctgcttgagcagtttttatg

SEQ ID NO: 132590 - DNA, 1610 bp, Glycine max
  unsure (1)..(1610): unsure at all n locations
  Clone ID: PAT_MRT3847_90736C.1
gcaccccacgcgtccagccacgcgtccgtaaggccataagaagtggtcaggaggagaagaagaagagagaaggtgtaagcagccgttttttctgttggtatatgaaggtggtgaagagagaagaagaaggagaatggtgacggaccaggatatagcgaaaggggtggagtctctactgcgtcactctgacccaaactccataactacggttaacggtgtcgttcagcagctggaggccaaactagggttagacctctctcacaaggccagtttcatcagagaccagatcgaccatcttctccggtcacagccacaggcatttgctcctcaccctcctccacttcacaaagactattttgcccctcacccccaaccgcactttccgaccacccactttccttcccattttgccctccatgacgagatcaacttccagcagcacccccgcgctcctccaccgtgcaaagtcgagacctttcctcctcaaaatgctcacactgttgcccctcctcaagtgcccaaagaaagtgttcaaactggagccaaaagaagaggtggcgctggtggtctaaacaaagtttgtggtgtttctcctgaacttcaggcagttgttggtgagccggcaatgccaagaactgagattgtgaggcagctgtgggcatacataaagaaaaacaacctccaagatcctggtaacaaaagaaagataatttgtgatgatgcactgcgtttggtatttgagacagactgcaccgacatgttcaagatgaatcagttgctagctaaacacattatcccacttggacctacaaaggagtcacaggctaaacgagtgaagctggatgctgaaattaaaattgaaagtgctgaacctgcttcatctactgtggcaatatctgaagcacttgccaaatttttgggcactgagggaagagagatgcaacaggctgaagccataagacttgtttgggagtacatcaagcttcaccatttggaggatcctttaaattcaatggtgatattatgcgatgcaaagcttcaagagctacttggatgtgaaagcatttctgctttaggaataccagagatgttagcacgccatcatctatttaaacagtctgacacctgttagtgctgatcaattgttgccatataagggcatggtcagcccggaatgctggttatatgtttctgctcgctagatcgtataggaactttttacttattcatgtaacttcatttatctttttgttcactgatatgtgtaaactgtatgttgtctgacagttattaggttcgttgtttagaatgagaatgtataccttgagctaggcaagaagtatattgtatttaagatttgccctttaggttacccgtgcattttatttttatcagttctcaatgtctaacctcaactggctgatcgaattagtgatacttttgtacattgagatacaccaactactctgaaatgccccttgttttttcccaatttaaaaaaaaaaaaaaaaaannnnnnnnaaaaaaaaaaaaaaaaaaaaaaaaaaaaaaaaaaaaaaaaaaaaaaaaaaaaaaaaacttggggggggggccgggccccaatttcccct

SEQ ID NO: 132591 - DNA, 820 bp, Glycine max
  Clone ID: PAT_MRT3847_90737C.1
cggccgctcgacgcggccgcgccgatcaaccaatccacttcctctaattgacacccacctaaaccatggcttcccacttcctcaaatccctccttctcctctccacctatgccctcaccatctcagcagaatacacaggcttcgtgggaacactagacccaaagtccataggcatacaccacaagaaaaccctaagccacttcaggttctactggcacgaagtcttcagcggagaaaaccccacatcggttagaatcattccctcactccccaaatacaacgcaaccacaaccttcggctccgttggaatctttgacacccctttaaccgtgggacctgaggtgtactccaaggttgtcggaaaagccgagggcttgtttgcctccacgtcacaaacgcagtttgacctgttactgatttacaacttcgcgttgacccaagggaagtacaacggcagcaccatcacgttcacggggaggagccccctctcggagaaggtgagggagctgcccattgttggtggtagtggggtcttcaaatttgccactgggtatgttgagtctaggacgctaagttttgatccccaaacaaggaataacacggttcagttcgacgtgtatatttactattgatgattattgaatgtgtttttttcatgttgatgcgttatcgctttggtctgtctcacctagtttctacataagtttcctcttttgagggcatgtggtgtcatggaataaagtcatctttgggcaaattaagtttgatcatgataaatattatccattcattttcaaaaaaaaaaaaaaaaaaggcccct

SEQ ID NO: 132592 - DNA, 1089 bp, Glycine max
  Clone ID: PAT_MRT3847_90738C.1
gtcgcagcagcaaagattatcatagtggcacgtctccaatcaactctcccagcaaaggtgttggttaggttgaatctctcatagcaagagatgctcaaacccaaattcacctacttcgatgcttcccccaccttataaattcttgcattaatttaccactttcatcacccaaccacttcctccaattataacacccaccaaagaaccatggctacccagttcctcaaatccctccttctcctctccaccttaaccctaaccatctcagcagaatacacaggctttgtgggcacaatagacccaaagtcaataggcataaagcacaagaaaaccctaagccacttcagattctactggcacgaagtcttcagcggagaaaaccccacatcggttagaatcattcccgcactccccaaatacaacacaaccacaacctttggttcggttgggatcttcgacaacgctttaactgtgggacccgaggtttactccaaggttgtcggaaaagccgagggcttgtttgcctccacgtcgcaaacgcagttggatcttttgctgattttcaacttcgcattgacacaagggaagtacaacggcagcaccatcacgttcactgggaggagccccctctcggagaaggtgagggagttgcccattgttggtggaagtggggtcttcaaatttgccactgggtatattgagtccaggactctcagttttgatccccaaacgaggaataacacggttcagttcgacgtgtatatttactattgatgaatgttgaatgtgttttttttttttttctttttttcacattgatgtgctgtcacgactttgatgtttgtcactttgtttctatttaagtttcctcttttcatgggggcacgtggtgtcatggaataaagtcatgtttgggcaaatttaatgagttggataatgattcttacttttatttcttattaagaatgtctgtgatgtcatggaataaagtcatctttgggcaaattaagtttgatcatgataaatattatccattcattttcactttcgtaaaaaaaaaaaaaaaaaaactcgagactagttcctcgt

SEQ ID NO: 132593 - DNA, 342 bp, Glycine max
  unsure (1)..(342): unsure at all n locations
  Clone ID: PAT_MRT3847_90739C.1
agggaaagcggaagcccccgcaggcacccggaaccggcaagggcccgggcccgagcccacagcgcttccgccttccagcaacggcaggacaacaggangaggcggggggcacacagaacaggccaaacagccccaccaccaccaagaaaaaggggagcagccccaacaaccggnagccgggagaacgacngggcacccacaccccgaaaccaggcgccacaacaggancaccacgcaacacccgaaccngagccaccagaaccggcngaccgcggacaacaggaaacgcagnggacgccaaaaccacggaacngaacaccgggccggcggacgggcaccaac

SEQ ID NO: 132594 - DNA, 983 bp, Glycine max
  Clone ID: PAT_MRT3847_9073C.1
caaagtaacactagaactcacaaaggacagaagaaacgcgaatgccaggagaactccaattaccacccgggttcagattccaccccactgacgatgagcttgtgaatcactacttgtgtagaaagtgtgctgcacaaaccattgctgttcccatcatcaaagaaatcgatttgtacaagtttgatccatggcagcttccagagatggctctttacggtgagaaagagtggtactttttctctcctcgagaccgaaaatacccaaacggttcgagaccgaaccgggctgccggaagcgggtactggaaggctaccggagctgacaaaccgatcggaaaaccgaaagcccttcttgaagctgggagtcaagactcgcggctgtaacggcttatcctacaccctcaattacgcagatgaaaaagggaagtttgatgagttggttgaggataagggtgttatgatactgattgatccaaaggcccttatgcatgtcattggaactaaaatggattttgtagatgacaaactaagatcggaatttattttcgtcaatccaaattccaaaggtcagtgtggttgtggtgaatctttcatgacaacaggaagtagtggatcttctaagccatgaaatagttaaaattgctatccaagccgtggatcctcacgtaatgaagtcgtcctttcatgatttaattgatagatagacatacaagtacaactaatggatttctattattctgcctgcgagaacaagggaaacgaaaactttggtgctcagaacaaaaggatactgaggactgacatggtctcgatatacagagttctctgaagctgatggtaataggcttatttcaacaatttttattgtcatttgttttgatgattcttatttctaatataaaattctttgtatcatgagaattgtagtttgtaggtttacaatatcattgaaataattttcgttaagttgaagaaatttctctt

SEQ ID NO: 132595 - DNA, 398 bp, Glycine max
  Clone ID: PAT_MRT3847_90740C.1
tcgatttcctttattagctgtcgtagttaatgttacaggtggtggtggacgtggtggtttaccctccactgcttggattagttctgcagttaccaatcgctcctcatacaattatctaacggattatcacaccatctaggtaaaggtaagaaaattgttttttcttactagagttgatccttttccagtagcttcactggctgttttttttggcgttaagaatgaaatttctgagtactaacgccactaattctatgctgacgcaactttttgagaactgttagagttctaaatatctggttgatgagtgtccttttgtatatgtgaactaatatgtaatatcttattcacttaaaataagcgctatcactatgtgcaatagggtgtgcttacatttt

SEQ ID NO: 132596 - DNA, 349 bp, Glycine max
  Clone ID: PAT_MRT3847_90741C.1
cttctaaaaaactctcacacctaatactataaccctcaaggtccataacatcgacaccatctacaatgtcaacgccaatattcaagacaaagaatgcattcctcctcatcaccatcctttgattttcgccggaaagcaccttgaacattaaaggaccctgtccgattacaacatccataacgaatcaacccttcatatcttcctcactcttcttcctgtcatcattgaaccttccctcattgctttgactcgcaaatacaattaggacaagattatttgtcgcaagttctactcccgtctgcattctattactttgaactgcctcaagaaaaattgcaccatactaacc

SEQ ID NO: 132597 - DNA, 798 bp, Glycine max
  unsure (1)..(798): unsure at all n locations
  Clone ID: PAT_MRT3847_90742C.1
gaattcgagctctgtacccggggatcctctagagtcgacctgcagggtttggctcaaaaatctggaaaaaggatttgatatttcttttcaatcctgggccagcaatattaggattggattttgtaatcagggggggatttctatttaggtcaattttgtggagggatgtctatactaagccacacctatggaaacttaattcttgcatttcagcttgtattgggattccataggttgtaaatcacttttgaaacattgcaattatactagtacctcttgtacttatcttttatattaatataatttatctttgctgatcaaaataaaaaagaatatgaaagatcataatgcgaaaacaatattgtaaaagacaaacattagtattaaatttacctgttcatatatagaatccagataggattttgccagctgagaaacaggatagtgagtgaaatcccaatgatgtaaaaccctggctggcaagactgcggtctcatttgtgtggcaagaagagcaaaacaanctggcccgtgtattcacaaagtcgaggcttcccccatccaaatgtctgtacaaaatcccgaatcaaagtttttccatcatcaaaatgcttatggcatccagcacaggtgtgatgttgtgcttctaacaactgtttcacagatttgtttggtggaatttcactataagtgaaattgtttttcctaaatggaatgcttcctgtattttcccctcttgtaaaaaaagactgagacactggtgcatttgacacaggtgaaatagatatgaatcttgatg

SEQ ID NO: 132598 - DNA, 699 bp, Glycine max
  Clone ID: PAT_MRT3847_90743C.1
gtcgtgatccatagagatgtgaaaactagcaacattttgatagatgcacacttgaatgcacgtttaggtgactttggactggcgaggctctataaccatggtcaattgtcacacacaacaagtgtggttggcactattggttacattgcaccagagttaactcgcacaggaaaggcttccacaagcacagatgtgtatgcatttgcgcgtgggctccttgaagttgccacaggtaagaggcctcttgattcggatcagtttttcttggtggagtgggttattgagaagtaccacttgggtcaaattcttgaggtggttgatcctaagcttgattcactttatgatgaggaagaaattgagttggttctgaaattgggtttactttgcactcagcatagagcagattatagacctaccatgaaacaagttacaaggtacttgaactttgatgaacctcttcctgatattgttgattggggacatggtgtttctgggagcagtagattgagttcaggtttcttagaagttacgtattctatgggaactgttgaaacattagggtatttgtcatccattagcatgagtactaagtccatagatgctggtaggcagcaaataatcatatagtaacattttacactttaatgtatatttctctctaaatatatccacatatatagttctagtgtaattctttta

SEQ ID NO: 132599 - DNA, 1547 bp, Glycine max
  unsure (1)..(1547): unsure at all n locations
  Clone ID: PAT_MRT3847_90744C.1
ccctgcgtccgaagataattctctaatgaagatgtggccgaaaaatttcttaaatttttgagacatttgtagaacttcctgttgcatatggaagcattgctcaaaatgactgtgcaaatcaaagctgtcgttaacctggcttgaaggcaaagtgactgttggtttctcttgcagtgagaggttaaatctatggagatttaacaaagctggatttcaccgagatggacttgcagctacagattgcaaactctagttatcacattaattgaattgtcttaatccagagggctcaattgtttaaatggttcagtagtttcctgattgatctagttaaggaagcgagctattttagtctgttgatttcctggttccatagcttgagcaattttggtgtcagtcactgtttctaagcctgtctgcacccggctgttttggtggaaacatatgaaaagggtgaaagtgtctcatattatgttgatgatcttcaaggacatgaacgggttaaatctgctcttgcccacattggtactcatgcacttttgaaaatgcttctggtggacaacttcattcatgcagatatgcatcctggaaatatccttgttcgagtgtctcagaacaagtctcgaaaacggctcttcaaatcaaagcctcatgtagttttccttgatgtaggcatgactgccgaactctctggctagtgatagagtaaatttactggaattttttaaagctgttgcccgccgagatggccggactgctgcagaatgtgccctcaacttgtcaaagcaacagaactgtccaaatccggaggccttcattgaggaggtggaagagtcatttactttttggggcaccccagaaggtgatattgttcatcctgcagagtgcatggagcaattacttgagaaagttaggcgtcatagagttaatattgatggcaatgtttgtactgtcatggtgacaaccttggttcttgagggttggcagcgaaaacttgatcctgggtacaatgtgatgcagacactgcagacattgctacttagagctgattgggcaaagtctctttcttacacaattgacggactcatggccccttagggaggaggaagtttctttctttgttgaggctctccttgagaaacaattttgactaacataaaaccccaaaacaaaaacatatgtcctaagggctctcccacatttgttttttttttttttaagatttatcccttgtatttatcttggttaatttccaagttatttttgtgagcatcacagttaactacaaaaatggacgtacaataaagcggtgaatatattctcctctcccttctttacccgcaggatgaatgaacggtatagttagaccctgggaaggttatccccttattcatctttgtcaatttccaacagatattactgtgtgcttgaacaacacagccctcgtgtttagcttggttaagctcccaagtttgttcccgcgagcctctccgtgttcgaccggaaggctccctttaatngcggntgaatatattctcctctccctt

SEQ ID NO: 132600 - DNA, 171 bp, Glycine max
  Clone ID: PAT_MRT3847_90745C.1
ccacgcgtccggagctgcatcactcggtactgggcgaatactatactcctacttgtgcatgaactgcgccacaccacaaccgcatccgccttgacccgatattacgcattagagactacccctagtccccttgatgttccccatctacgtccaggtctcggccggccccta

SEQ ID NO: 132601 - DNA, 572 bp, Glycine max
  Clone ID: PAT_MRT3847_90746C.1
gagagagagagagaaccaaggcacacacaaagatggattttttgcacaccctgttgagtttgatagccttgtcttttctgggtatcttcctagtcttttgtttcatcatgttaaccataattataggaaaatcaataggggaccctgattatgctccagtaaaaggcacagtgtttaaccagctattatacttcaacacactccatgactaccatgctcaactggccaaaactaatccaacttttcggctactggctccggatcaaagcgagttgtacaccgcagacccgcgaaatgtcgaacacatactgaaaaccaactttgataagtactcaaaaggcaagtataaccaggatattatgactgatctttttggtgaggggatttttgccgttgatggtgacaagtggaggcagcaaaggaagcttgcaagttttgaattctccacaagggttcttagagatttcagttgttctgtctttagaaggaatgctgctaagttggtcagggttatctcagaattttcccatcagggtcaggtttttgatatgcaagacatactaatgagatgc

SEQ ID NO: 132602 - DNA, 583 bp, Glycine max
  Clone ID: PAT_MRT3847_90747C.1
ctcattgcttttacactaggagagataggcatgggcacacatgaacagtcaaaatctttagctacacttgctcaggataatctgcacttcctgttcttttcagcaattggggaggacggctagattcttatccttggtaatctgtcctgccaatatgcgtttgctttggctgatctatcggatactgaagtgatgacaggatgcataactgacgtttaggcgcaccttgaattactttttggatgacataataacacagctgagatccttttcccatgagaaggttagttttctgattgcagtttttatactctctgttgtgaatacatttaatgctgatgcatataaagcaaagctcatcaatgtctccgctgattatgaaaatggacacaccgattatttgcaaggatggagatatatgcaaatcagaagacctcgagggtggaagtgattctgcagacagtgttgaacaagtaacggcagttgtgctcatggtgctcgaggaagaaagagctattaatggtgatgaaaagagcacttagcctgaatcgatgctaacttatgtttgctgaactctgcttat

SEQ ID NO: 132603 - DNA, 572 bp, Glycine max
  unsure (1)..(572): unsure at all n locations
  Clone ID: PAT_MRT3847_90748C.1
ttattggttgtaatatcaacttttttattgttggacagttacagtaaaatctcttgcaatcaccattccatcttgatgaaacactggtacagccatgaaggatggaatgtctttggtaattcttccattttacttcacttgcggcctctctagctcttcccggtcgagcaatgaatactgagtaaaacaaacctaaaagtcatggttcgagattttaaaattgaaattctgctattgaagtgtaagccaagatgcaaatctgacttagtacacatgagtcaacttgatcagaacactgacatggtctgcatttgcgttcgaaatgcactacaccagtttatagaagctgcagatcctctaccgatttgaggtcaggaatgtggaatgtggagtcagatctcgcaactctggatgcctgcacttctacctaaaatctattcctaattaatttagatgagtttcttgatctcgtcgnngaagaccaacacaagagcaccaccagtgcctcggaggacgttggagaaggcacccttgaagaggcaccagtaccctcattcttggcgatcttggcc

SEQ ID NO: 132604 - DNA, 1211 bp, Glycine max
  Clone ID: PAT_MRT3847_90749C.1
cccacgcgtccgcttcctctacttctttgttccacaatttcacggttttctccaaatttcattttcaaattcaataggctaggctacggcgacactaagttgcaggcctcaaaggtcacgtcgccgaagcttatcttcaaagacccgcgctgagctttctcatcttctttgttctactaccatttcatggcttatttcaaatttcaatttcaaaaatagaagctttcgtctcactagcttccatacctatgagaatgcaggatgcttgtgttgcactatctctagtacaaagatgcataggatacaagtgttttaattgagaccaaacaaggtaagaaagttgcttgctgaagcattattgggaggattgaagggaaatagatgattgactttcatttacaatgcatcattgcatgcttgcttattaagggaaaatattgcagacctaggccccgaggactgaacccttcgatatgatattgttgaaataattcaaccactcttggatgatgactcttcatcaaagaatagaaattttgagtatcactcaattaataaagagtttcattcttttctcattgacaacaaggatgtattggatgaaacgactatcatgaaacttttagaaagatcttttggataaatcgaatgctcttggaagatgactctgcatcgaagaatagcagttgaaaggaccaatcaattattaaaaagttccatgcttttctaagtgacaacaaatgatgtattggatgaaacaactacaattaagcttttgataaggaatttgtggcaaaggcaacactgcctggagaggaaaaaatattggacatgattgggttgttgttcatgttgttcgaacttccatcaggaaaccactacaaatgagttgagatcagagttcctcagcacaacatggcttattgtctgaagctctgggattattaaatatctccatcattttatgattctcctccatgttcacctttttttcatgtggcaaataatatgagctcaaaagaatgtttcttctttaggaagaagtcacacaatgagaggtaatattttttgtttttatactttgtttttgctaccaatgtaactattacttttcttttctgtttgattgttatattaatattcttttcatgagtattgtattccaaaaaaaaaaaaaaagggccgcccgttttagaggatccaagcttacg

SEQ ID NO: 132605 - DNA, 520 bp, Glycine max
  Clone ID: PAT_MRT3847_9074C.1
cacgcgtccgtttttctccatccgttccttctttctcctcccttttctttactccttcaattcctttgtctctgtcctctcgtcttctttcttctttctcccttcccagtttctcccttcaaactaagccttttctcatcacaacaacacacacacacacacatcaagcttttttcatggttgccatatgtaagcaactttatttccatatcttcctcagcctttttctatcctatgaatccttgaaaagggtcccttttttggcaacaagcttagccccaaagcagatctaaatactcatcttcttctctagctagctatatatcttctgcagaaactaccaccgactgattctgagaagaaacagatcctgagaagttttttcaacctaaaagggtctcagaaaacacaacactggacacgagagagaactgaaggagacggatcgaaattctctagagtgtgaaatatgccagctggtattatgattccagcaagaaacatgccctcgatgattgga

SEQ ID NO: 132606 - DNA, 541 bp, Glycine max
  Clone ID: PAT_MRT3847_90750C.1
tgtatgacgtcctccttctttgggggggggggggggggggggtacacagagcaaaaaagtcgggttaaagttagggaaaatgtgaaaacgggattaactaagggtcaagaaagcggtataatggtatagaaactgttaaaacgattccaataacctaacggttatcaaaacaatgggtttggtatacactatcaccaaaaaaaaaataatatacataaacgaatagaatacgctaaatggtgaagtaagaagtggtgttggtagtattagtggtggtacggcttgtgctattcatggttgtagaagtgggtgttaccctactaacagtggtatcacttgtacacaatgtgtttgtggttagatttgtattaatagattaagcaataaaactttgtggcctagatagcaccgtaaagggcgccgtcagctcacacaacattggaataatatgccgccaaggccacagtagctatatactttgtgcaattggcctaacagtattcttaccaataatacggccacctgccgaaggcaggttata

SEQ ID NO: 132607 - DNA, 139 bp, Glycine max
  unsure (1)..(139): unsure at all n locations
  Clone ID: PAT_MRT3847_90751C.1
aaaaaaggtgcaaaagttaatatgtgaatatcactaacataagttacaatatttacaacacttgcatcctcgtgcaattacacgaacctgacctaactcatattaacaagngttaaagtattcgtttgagtaaaatcat

SEQ ID NO: 132608 - DNA, 289 bp, Glycine max
  Clone ID: PAT_MRT3847_90752C.1
gcgagaaaacaccacattgggtcttacttacaaacaaactaccagctgtacttgctcattttgaaagatacaagtgcttcaatacaaacaaaggctgttactcaggaagatgtgaacactttcgggcattgtaggaagcccatttgtgtgcacggtccagatcgcccttaagttgaagggagttgagtacaaatttttggaagaaaactggggccacaagagagattcgctgcttaaatacaaccctggccacaagatagttccagtgtttggtcacaatgagcaaacc

SEQ ID NO: 132609 - DNA, 450 bp, Glycine max
  unsure (1)..(450): unsure at all n locations
  Clone ID: PAT_MRT3847_90753C.1
accacgcgtccgctcattcgctctctctacactaatcaatggacgactctcacaacaggaagcgactaaaccaccaattgacaatgcacccgcgactttgttgataactcctacgacactcacgcacttgactagacccagattaaactctcaggcgtagacccggaccttttcaacatgctcaatgatgcctagaacgtcacggatcgtgaccctaccatgcaaggtcttgactactgaatcaagagttacgaggaagaaatactttcttcggttacgaacccaaatctaagcgccgaagcagaagtgtntaatgcgaacctagggtacttgctggaagcatacgacgactagctatggttgccagcggcggtagcgcccggcgaggatgcgacagatccataaacacttgattcgggccgacttggatctgacggagtgcaactgact

SEQ ID NO: 132610 - DNA, 230 bp, Glycine max
  Clone ID: PAT_MRT3847_90754C.1
tcacttaaatgatcgcatttggctagcatattaaccaacagattgccaagtggagtatatgcgcgcttagggtgcttgttccatgcgaaaacatgtgtcattcatgctgagatcgatcacttgaatttttggtctgactctacactgcgtaatcctcgcaggcgtcaaagagatttatctccacagcaggctccacatgatcgcaatgaagtacttgcgtttcctccgca

SEQ ID NO: 132611 - DNA, 477 bp, Glycine max
  Clone ID: PAT_MRT3847_90755C.1
atgcttattattacacactataaagaacaagctataatactcaaaggatctaaaatgacagtagccgacacagatgacgtctgtaccaagtgatactaaaccttattattcaacaacaggaataaatcacaccgaatactaaacacacgaggatatacccgaactttattagatccgggctacaataaacattctactgtactaacctgggctaacataatcagtaaaacaacgcagtactctagtcttcataaacaaccacaatgatggtatctattagcaccctagacgtaaaaatgaaattgtacttaaccagatgccaatgaagaagtggcaatgactgaagcatcaatacaacgtgatgaattttatgatgatgctgacaaatcaaagaacattgaggactcaaaaatactgagaggtaggaccatacacagaagttcttctacattcgcaaagaaaagcctatgctttcac

SEQ ID NO: 132612 - DNA, 1236 bp, Glycine max
  unsure (1)..(1236): unsure at all n locations
  Clone ID: PAT_MRT3847_90756C.1
ttatcattcagtaagctaaaggttaaggctgacctaaagcaaggagatcttttgcattcttccaacctagtatgctcactcagctttgatcgtgatggagagtttttcgctactgccggtgtgaataagaaaattaaagtgtttgaatgtgattcaataataaatgaggatcgtgatatccactatccagttgtggagatggctagcaggtcaaagttaagcagtatatgttggaatacatatatcaaaagtcaaattgcttcaagcaactttgaaggtgttgtacagttatgggatgtaacaagaagtcaagtaatctctgaaatgagggagcacgagcggcgggtgtggtcaattgatttctcatcagcagacccaacaatgttagcaagtgggagcgatgacggttctgtcaagctatggagtatcaatcagggagttagtgttggtaccatcaaaaccaaggcaaatgtttgctgcgttcagtgttggttaatttgaaaatcgagataatcctggataaatctgaagtcgtgtataaacactttcagattgaatcaaatttcggggttcaaccaaaattgttcaatcggataaaatcagaagattataattcaagagttttgttttggtcttgtgagtttttcacatgttatgctttctgaaccaggatgattatttataatcaaagaacaggtggtttttggcggttgaaggaagttatggaagttttatcctttgaaaaaaaaacggttggcggttgatggaagtttatctttttaaaaaactgtcttttcttgaaaaataacttccatgtaacttccaaaatttgacttccatgtaacttccaaaatttgcctaaaccgagcatctcgttattacattaaaacaagcgtgcactcttattttaacataataaagagatcgattacactaaaatgtccaacacccctttacatcacaatttgaagagcacttgcacagattaaaggattctaaagccatctcttcttcaacatcatcttcaataaactacaaactcaatgccttgcaagatttgcatttagtgtgctgataagcttctcctattgccaatcacccagcaagccttggcacgagagtgtagcaatgaatgtgttgatgaactactagatggatctgggaggatcttggatatcctgtagtacaattaaaagatgcctactgcacacaggnaaagagtgcatgaccttgagt

SEQ ID NO: 132613 - DNA, 981 bp, Glycine max
  unsure (1)..(981): unsure at all n locations
  Clone ID: PAT_MRT3847_90757C.1
agaaaattaaagtgtttgaatgtgattcaataataaatgaggatcgtgatatccactatccagttgtggagatggctagcaggtcaaagttaagcagtatatgttggaatacatacatcaaaagtcaaattgcttcaagcaactttgaaggtgttgtacagttatgggatgtgacaagaagtcaagtaatctctgaaatgagggagcacgagcggcgggtgtggtcaattgatttctcatcagcagacccaacaatgttagcaagtgggagcgatgacggttctgtcaagctatggagtatcaatcaggcaattccatttttgcacttggtggaatgtcagctttgaaactaaacgtactgcagtcatctgttgcatgttttatgtatattatgctggatgtataatgagttgtttctctcacctgggatgtttctgcagggagttagtgttggtaccatcaaaaccaaggcaaatgtttgctgcgttcagtgttggttaatttgaaaatccagataatcctgcataaatctgaagtcgtgtataaacactttcagattgaatcaaatttcggggttcaaccaaaattgttcaatcggataaaatcagaagattataattcaaaaatcttgttttaaaaaaaaaaaaaaaaaaaaaaaaaaaaaaaaaaaaaaaaataaagttttgcttcctcacccatttgtcctatgaatgcagactgatgaaatgccaaattgttattctgaatttggaaaaaagttctagatcatgcaaaagatggagagggatttagcaagtgctgataaatcagtgatgttataagcagggaaggagaaggggtatatgatagatgcccgacgggtgatatgcatatttaagttgccatgagtgattccttatcacatgcagtgccactccctgcaaaagcgcagcctcttagtttaatatttctttacagaaataaaaanaatcttagagatag

SEQ ID NO: 132614 - DNA, 938 bp, Glycine max
  unsure (1)..(938): unsure at all n locations
  Clone ID: PAT_MRT3847_90758C.1
aaagctataagtattatacgtcttcgttcagacctccagaaagctattgaaaatgaggagcaccccttggctgctcgaatctgctcatgaagtttcgaaacttgatgctcagtcaatgggtgaattatgtattgctttgacacatgaaaaagtgaagtatgcatttttggctggtcgccaataaaaaaatggtgaaatttgtgttatagcgcacttcggcgacatggagacattacgcattatatcgagcttaaccatcgtggatggaccccttaaagacatacctcagattccaaattacctcttttaatggcagacactttggtttacatgctgactcagcacaattagtggcatatattccacaggggaatctttgaacaactagataaacctgactatagaggattcaatcatccctacatctcttttctatgctatggaatggattcaacaggagatttcatcccaatcaagcaactaagggagaagtacaataaaccaaggcatgaaatacccattgacccaccaaatgatgaatgaagatggaggcaaagcttaaattacccatgtgagactatatgcactgttcaattgggttgcggattgagaggttgaaattaaaagtcttctgacaatatattcgatgaatcagttgattggctttgcaggaaacttaaaaagacagaaaacattccttgtgtcgcatgcacaatgatgatcgattgccttcctgtgtgatcactcacattgtcgaatgttatattctgttgtatgagttttcatttttcatgcacatatcattgtcgtgaagatactgattacctacctaacctaccttgtatacatgtaattatatatttatgcgatttttagttggatgaatagtaatgagttcacgtttgtgaactatttggaggcattttcaaaaaanaaaa

SEQ ID NO: 132615 - DNA, 143 bp, Glycine max
  Clone ID: PAT_MRT3847_90759C.1
tagggggtttttttaagacgttttgggtaaacacacgccaaggaaaaagaaaggtgagccaggcctccaaagggacattctaaaagcaaaacgtgacacctacataacaagccatttcgatcgcccgttaaaaggaaacaaga

SEQ ID NO: 132616 - DNA, 442 bp, Glycine max
  Clone ID: PAT_MRT3847_9075C.1
ccacgcgtccggagacgatccttagcattatcacagctcccttaatttgattttctttttgcttgcaattttttttgtataatcgttgttaggttaaaacttgacaagacgaaatgattatctaaattttcctaggcttatatattatgattgtaatgtaaggattacctgtggtttctttttaaatgttactgaccagacgcaattgtcatgtgctatgcttttgtttctcagatactttaaggggcctgaacttctagttgatttgcaagactatgactactcattagacatgtggagccttggctgcatgtttgctggaatggtgtgaattataactataagttactggttatatatggcatactcttgacatttatgcagatggtctaaatttgagcgttcatgattaaaaatgtaaaattctcgtcataatttgttc

SEQ ID NO: 132617 - DNA, 157 bp, Glycine max
  Clone ID: PAT_MRT3847_90760C.1
gggtttggggttcaaaacagactattattatttggcaaacttccccagaagcagacaacaaccctagaatcaatgaaaatggagctctcccgtatggggcatataagaacaggagcacaaactaattgttttcggtccaccgcactttttttttatg

SEQ ID NO: 132618 - DNA, 450 bp, Glycine max
  Clone ID: PAT_MRT3847_90761C.1
gacacaactgaacacttctatgttatcacatagtgtctcttgtatcgcttaggataacaagggccagaatgcgcggaagagcccctgctgcctccgaacccggaccgttacagaatgctcccaacccaatacccataaactttaaacagggacaatgacagacctaacctactgctggcacggacccagaggcggacctctaccatgaccttccacaatgggacttccttaccgaccgagagcgccacttcgtcacccacgcacttgccttcttcgccgtctgcgatggcatagttctagagaacctttctggacgcttcacaaaggaaatccacctacgaaaagcccgggccttatacggctcccagatcgccatcgagaacatccactcacagatgtacggtcttccgctaaaacctacaggaaggactcatgccagaaaaaccaact

SEQ ID NO: 132619 - DNA, 686 bp, Glycine max
  Clone ID: PAT_MRT3847_90762C.1
ggttccttcgcactttggcaaggcttttgggtccttttgcatcacactttgccatgccatgtaactgttactcacttgcaagtagcaattgctgaatctccaagtcaaactccgtttctttagcagcaccagtctctgcattcttagcggctatttatttctagttcactctttagttttaccctcttcttctggagattaaaaatatcgaaacaaaaccccaaaatttcagatctgcccccttgttcctcatactcaattttcaacctagtattaacggtctcactctcatgcttcggtttctcccaactgagtcaaacattttccagtcttttccacacttcgcagttgtaaaagctctgcgagtgttcacttccgccacctgttcgaccattggcctcacccaaacccaggttgaatttgaagatgataaaaacaagtgtagtgatgctgctgagcttttgagcaaatggggttgtagtgatgatgatttggtgagaatattctcacgttgcccctccttgcgcaatgctgatcccatgcaggttcagtctaaactgtgcctgctgagtgatttgggcttgtgtgcatctgaacttgtaaagattgtcaattgtaggccacggtttttccgggctcggattaatagttgcttagaagagaagatggcgcctcctacatcattg

SEQ ID NO: 132620 - DNA, 319 bp, Glycine max
  Clone ID: PAT_MRT3847_90763C.1
gggccaaaaaaccacaggaaggggggaacctttctcacagaacaatcaagaattagaagcttgactattgtcagcattcgccgaagatgagtaacatcggtagatgttacgatctagcggtcaccacattcgcacgagatggtcgcattttccagctcgagtatgccgctgcagctgtctctaccagcgggactgttagtgtgatcaagtgcaaacatagcgttgtgttaaccgttgacaagcttattccgatcgaaaatgatgctaccaggttccactagaacaagacactccgttcatcgacactctggcatggctg

SEQ ID NO: 132621 - DNA, 637 bp, Glycine max
  unsure (1)..(637): unsure at all n locations
  Clone ID: PAT_MRT3847_90764C.1
ggctcgagcgcgcagtgagttctactcgtatctcctaccgtcactcaccgcactcttcttgtatttacgaacacaaccatatgcagcattttgcttcctcaaaattctcttcattctcactttcatttcctcaaaattaggaatcaccattcttctccaccagatccggtgctggatcatcgtcgaatcgctctcttcttcgaatgcctctccagttcctgtgatttccggtgaatcggaattcggaactgcgctgtgattcttcttcctttttcgattttccgaaatgcttctcctcagtcctgtcactcccggtcaggtctcgttcctgctcgggatcattccggtcgtcgtggcatggatatattcggagatgttggagtaccggaacaactatgtcccgtccagagcgcaatcggacatcaacttagttgaaataggaagtgatgttgtcaaagacgaagacagagcagctntattggagggaggagctntacagtcaggatctccaaangcacggagcttaactgcctcgccatcaattatccgattccttttgatggatgagtatttncttcttgagaaccgtttaacacttagagcgatgtctgaatttggtctcatcttggcttacttt

SEQ ID NO: 132622 - DNA, 205 bp, Glycine max
  unsure (1)..(205): unsure at all n locations
  Clone ID: PAT_MRT3847_90765C.1
gatgcgncttcnnttctctnttttcatttaacttctggtctgtgtaagcactacatttcattcactcactcactcacagttctccttttggggggtcgtctctactggacgtcggggatcacgaccttgtgaaccgtccagtggtgtctgatgcggaggaccaccacctgctcaacgcggagcaccacttctacggcttcaagac

SEQ ID NO: 132623 - DNA, 1282 bp, Glycine max
  Clone ID: PAT_MRT3847_90766C.1
attttgaaaagacagaaccgagcagaaccaaacaaacgagagcaacggttttagcttcggcgaaagctttggtcggggttgggggtcccgagccactgctccaacggattccctctcttctgactttcttcatttcctcgggtccctctctctatctctctcacacacacacacacacacacgcgcacacacacacacgcacacgcttgtgttttccaatttcaactttttattggaccgattcttacaagcttggaagaggtggttatggacctgtttataagggaacgtttcctggaggtcaagacatagctgtaaagaggctttcaagtgtttccactcaaggcttagaggaattcaagaatgaggttattttgattgcaaaacttcagcatcggaaccttgttagactcaggggcttttgcattggaggagctgaaaaaatcttactttatcaatacatgcccaccaagagcgtggtctcttttatatttgaccggacacgaacttctctccaggattggccaatacgacaacattcttccagaggaggtgctgaatccatagagatcagactttgggcttcccgaaatagttgggggaaaagaaactgaagcatgtacagggagagtaatgggaacctttggatacatggctccagagtatgccttggacggattcttttcaaccaaatccgacgttttcagctttggagtagtccttctagagattctcagtggaaaaaagaacactggattctatcagtccaagcaaatttctagccttttgggtcatgcatggaagttatggacagagaataagctactggatttaatggacccatctctttgtgaaacatgcaacgaaaatgaattcattaagtgtgcagtcattggactcttatgcgtacaagatgaaccaagtgatcgacccactatgtcaaatgttttgttcatgctcgacatagaggcagcaagcatgccaattcccacgcagccaaccttttttgtgaaaaagcatctttctagctcagcttcctcttcgagcaaaccagatataggtcagtttgagagcagttatcaagaaggtcgatagtgcatgattgaagctattgttagagtacgtgtaaaataattaatgatattttaattgtattttataacaatttagagtattctgtattatttttaaggatcaattttggatttcctgtctgtctttttagtgcatacaccattttgaatttataacgtaagtttttaatataaaattttacttggtt

SEQ ID NO: 132624 - DNA, 1057 bp, Glycine max
  Clone ID: PAT_MRT3847_90767C.1
cttacaagcttggaagaggtggttatggacctgtttataagggaacgtttcctggaggtcaagacatagctgtaaaaaggctttcaagtgtttccactcaaggcttagaggaattcaagaatgaggttattttgattgcaaaacttcagcatcggaaccttgttagactcaggggctattgcattaaaggagatgaaaaaatcttactttatgaatacatgccaaacaagagcttggactcatttatatttgaccggacacgaactttactcctggattggccaatacgatttgagataatcgtaggcattgcgcgaggcatgttgtatcttcaccaagactccagattgagagtgattcatagagacctgaaaaccagcaacattcttctagatgaggagatgaatccaaagatatcagactttggtcttgccaaaatatttgggggaaaagaaactgaagcatgtacagggagaatagtgggaacctatggatacatggctccagagtatgccttggacggattcttttcaaccaaatccgacgttttcagctttggagtagtccttctagagattcttagtggaaaaaagaacactggattctatcagtccaagcaaatttctagccttttgggtcatgcatggaagttatggacagagaagaagctactggatttaatggatcaatcccttggtgaaacatgcaacgaaaatcaattcattaaatgtgcagttattgggctattatgtatacaagatgaaccaggtgatcgacccactatgtcaaatgttttgtacatgcttgacatagagacagcaaccatgccaattcccacgcaaccaaccttttttgtgaacaagcatttttctagttcagcttcctcttctagcaaaccagaaataagtctgcaatttgagagtagttatcaagaaggtcgatagtccatgatggatcctatagttagaatataaataaaataagaaaaatttagagacatgtattatttttaaggattgttgttatcttataattcatttccattttaacaaaaaaa

SEQ ID NO: 132625 - DNA, 630 bp, Glycine max
  unsure (1)..(630): unsure at all n locations
  Clone ID: PAT_MRT3847_90768C.1
ggctcgagcgcatcaaagggcaagccgccgctctcggctggcaacaacaacaacggcggatgggataattgggacccggacgacggattcggaccgccccgaaccagacgggggttaatcagcaaaacgattatctttctgtcgtttctcagggatttggtaaattatcattggctgctgctaatgttgttcaggccgggacaaaagaattctctgctaaggtaaaagagggtggttatgattacaaggtcaatgaaactgtcaatgttgtctctcagaagacatcagagattggacaaaggacttggggtataatgaaaggggtcatggcattggcttcacagaaggttgaggaattcgctagagataacccgaattggatgtctgataactggcaacgaaatgaaagtgatagaaatggtttctaccaggagttcaatcgagagaataatggccgaaattcttctaccagagaaggacaacattcttcaggtgggcaaactaatacttttcactcaagctcttgggatgattggggccacaatgattctaggaaggaagaaacagctaaaggatcagctcctcagtcatcagggtggaagttngataataatataactcaagctcttg

SEQ ID NO: 132626 - DNA, 2025 bp, Glycine max
  Clone ID: PAT_MRT3847_90769C.1
cggtgattcaccaaattccttgtttccttctaaaatctaaattccctttctcccttgtcttctcttttctcaatttcgctctctattgtcatcaattcacacatccaccgttcagttaaaaaccacccaaatccgatggcggcgtcgcggcgtctccgggacctccaatcccaaccggcgaacaagatctgcgtggactgttcccagaagaacccgcaatgggcctccgtatcgtacggcgtcttcatgtgcctagagtgctcaggcaagcaccgcggcctgggcgtgcacatctccttcgtgcgatccgtgacgatggattcgtggtccgaaatccagatcaagaaaatggaagccggaggcaacgacaaactcaacgccttcctcacgcaatacggcatccccaaggaaaccgacatcgtcgccaagtacaactccaatgccgcagccgtctaccgcgaccgcatccaggccctcgccgacggccgtccctggcgggatcccccagtcgtcaaggaagccgtccgctcctccgcatcaaagggcaagccgccgctctcggctggcaacaacaacaacggcggatgggataattgggacccggacgacggattcggatcggccaggggcggggcggatctcaggaggaaccagtccaccggcgatgtgaggggattcggaggcggcgggaacgtgtcgaggtcgaaatcgactcaggatatgtacacgcgggctgaattggaagcctctgctgccaacaaagaagacttcttcgcgcggaagagggcggagaatgagtcaaggccggaggggcttccgccgtcgcagggtggcaagtatgttggattcggatctggccccgccccgaaccagacgggggttaatcagcaaaacgattatctttctgtcgtttctcagggatttggtaaattatcattggctgctgctaatgttgttcaggccgggacaaaagaattctctgctaaggtaaaagagggtggttatgattacaaggtcaatgaaactgtcaatgttgtctctcagaagacatcagagattggacaaaggacttggggtataatgaaaggggtcatggcattggcttcacagaaggttgaggaattcgctagagataacccgaattggatgtctgataactggcaacgaaatgaaagtgatagaaatggtttctaccaggagttcaatcgagagaataatggccgaaattcttctaccagagaaggacaacattcttcaggtgggcaaactaatacttttcactcaagctcttgggatgattggggccacaatgattctaggaaggaagaaacagctaaaggatcagctcctcagtcatcaggtgggaagtttgataataattataactcaagctcttgggatgattgggaccaggaagatacaaggaagaaagaaccagctaaagggtcagctgcccatagcagtgatggttgggctggatgggataatgccaaagatgatggatttgatgatatctatgggagtgcatctaataataaaggtggcgctcataatgacaagtcaggtgctgcctggacaggaggaggctttctctaaggttttgacctgatctctatcagcatgatcaaagttttgttggaagtgacgcaatacagtacctcttggactggtggcatgcaaaccgagtaggggtgttgtttaatatgatggatgtgacctgattgtcaactataagtttgttggtcactattaaattcatgccccgtatgtgctggatgaatgatatattttgaggttagagtaatgtctgcaagtctttatttttcaacattcccccatcctcccttgtgtaatcttttcatgtgattttttggggacttctgtatggttggaaacttattttaaatgtacgtacaagtgtctaaagaaagggcaaattgcccaaatttatgattatttttactggaagtgtgatgaaacatttattgtgacacgaaaatttcataatggttttgaatttatagc

SEQ ID NO: 132627 - DNA, 1320 bp, Glycine max
  Clone ID: PAT_MRT3847_9076C.1
attcggcgcgtcgtgagtgtttgtgtttgttgggttgtgccggggagatggaagtgtctttgctggaggaagtagagaatattctaaggtacagatttcgaaacaagaagcttttagaagaagccttgactcactcctccttccttgacggtgtctcctacgagcgtctcgagttcgtgggagaccccgttctgagtctcgccatcagtaactacttgtttctcgcttaccctgatctagatcccggccagctctccgccctccgcgccgccaacgtcagcaccgagaagctcgcccgtgtcgctgtccgcattggcctccaccgctttgtccgccacagcgcccctccccttgtcgacaaggtcgagcgcttcgtcgacgccgtcaagctcgagattaaccccgttgctcacggcggatccgtcaaggcgcccaaggtcctcgccgacgtcgtcgagtccgtcgccgccgcgatttacgtggacgtcaattttgaccttcagacactatgggtgataatgaggggtgttttggagccaatagtgacaccggatgctttggagaaacagcctcaaccagtgactatgttgtatgagatgtgccaaaagaaggggaagcaggttgatataaaaccgtcaagggaaggagatttaagtgttgctaaggtgtttgttgatggagagtttgttgcctctgcttcctcttctcaaaaggatcatgcaaagcttgaagctgccaagattgccttgggtaaactagcacatttggtgccttccaccgataagaagtctgccactaacatgaagctcaactttgctgccgatgaaaatggtacctgggttgttgaagcacccaaaaataaacttcgtgagttatgtgcggttaaaaaatggcctataccagagtacattattgaaaaggattcaggtccctctcatgaaaagaaatttgtctgcgcagttcagattccaactgctgatggtattcttcaaatgtctggggatgaaaaatctcgggtgaaggatgcagaaaactctgctgcttccttgatgattcgggccttacagcagtataattatctgtagaagagaatggcgtcttccatcttctgttgtaattggctattgtttagaccatagcgcagcttggcagataaaatcaaggtttttttctttcacaattttttcgtgaaattgagatagctagctatctgtaaaatggatcggaatcattaatatataaatttaagaactttttgttgagatagttgtcaatctaataaaggtcccaacttttgaaccttcttgagaaacaatatat

SEQ ID NO: 132628 - DNA, 571 bp, Glycine max
  unsure (1)..(571): unsure at all n locations
  Clone ID: PAT_MRT3847_90770C.1
tggttttggaaatgtctacaaaggaattctccctgatggcactcttgtagctgtcaagaggcttaaagatggcaatgccattggtggagagattcaatttcaaacccaagttgaaatgatcaggctgacattgcaccaaaacctcctcanactgtatagattttacatgacaccatcgaaaaagcttttattttatccatacatgtccaatgacaatatcgcttcccgtctcgaaagaaagcgcattcttgactaaaacacaaagaagcacattacttgtaaatcaagaaggaaactactttaccttcataagcagtgttatccaaaaataatgcatataaatatgaaatctaccaacatattactgaataactattataaagctgatattaaatatgttagattggcaaatcttttaaatcgccgatattcacatatcactactgcagtagaaaacactatgtaccatatatcgccagaatacctatgcacaagagcatcctgtgataagactaatatctgttaatgtagcatgcgtgtgcttcaattgaccacataccagagagctcta

SEQ ID NO: 132629 - DNA, 358 bp, Glycine max
  unsure (1)..(358): unsure at all n locations
  Clone ID: PAT_MRT3847_90771C.1
cggggcgggccaggcgtacacgatggaccttttttcnccaccatagttattatttttaatagtattgacattattgatcgcttttttttaatgaaggctgtggatatcaatacttcanantattctattgttaggctcacgaggtagattgtgcccttcatgattgtcaccggcatggatgttgcataaattgatggctccccaagtatttgtccttactttttttgctatgatgatattatgtcacaattcttattcattttcatttaatgcgttttttatgaacaattcaatttatttaacttatatatttttaattgaagaacctcagcttatttttttttttgcttacacttat

SEQ ID NO: 132630 - DNA, 506 bp, Glycine max
  Clone ID: PAT_MRT3847_90772C.1
cccgcgtccgatcacttgaattttctggtttggtaagagaaaaagggattcccagttgacaccattgctcactcaggtgagtgtttttgtgtgtgactgagaagagaaagaaaagaagaatcttttggtgtctgtctctcatatcttaactcacaccactcaccacctctcttttgcttgttgttttcaaagggtaggatttttcttcattgctgttgtgtaaagtttcttcctttcttgctcttctgttcattcaacgctggtttggcctctcttgagcttcttcgttcatcaaaggaagatgggctaatcgagcatttttatatatcttggtgtttggatccatttaagtgttcacgcagccttcctgaaacgttgctccaattctcagtgttagtggatgcattttttccttttgaactctgaagtgtccaattaatattggcctgcttctgcattgtgaagtgaaaagctcatcattggatcatcatcaaaatggtttcaag

SEQ ID NO: 132631 - DNA, 2334 bp, Glycine max
  Clone ID: PAT_MRT3847_90773C.1
agcaccccgaaggatttgtatatattgtaaatctcattctgatttttaattcatttcatagaaagggggagaaaggctgggattttattgcttatcaaacttctcaccgcaattttagctgttggcacttaacagttatttgtaactgtatttcttgctggctcgagatttgacggtgtcggtgattcaccaaattctctctctctctctctctcaaatctcaattcactcattcatttcccctttcttctctttctcaatttcgctttgtattgtcttcaattcagtaaaccgcaccaattccgatggcggcgtcgcggcggctccgggacctccaatcccaaccggcgaacaagatctgcgtcgactgttcccagaagaacccgcaatgggcctcggtttcctacggcgtcttcatgtgcctggagtgctccggcaagcaccgcggcctcggcgtgcacatctccttcgtgcgatccgtgacgatggattcgtggtctgaaatccagatcaagaagatggaagccggaggcaacgacaaactcaacgcgtttctcttgcagtacggcatccccaaggaaaccgatatcgtcgccaagtataactccaacgctgcctccgtctaccgcgaccgcatccaggccctcgccgacggccgcccctggcgggatccccccgtcgtcaaggaagccgtccgttcctcctccgctgcattcaagggcaagccgccgctctcggctagcagcaacaacaacggcggatgggataattgggacgccgacgacggattcggatcggccaggggcgggtcggatctcaggcggaaccagtccaccggggacgtgaggggattcggcggcggcgggaacgtggcgaggtcaaaatcgacgcaggatatttacacgcgggctgaattggaagcttctgctgccaacaaagaagaattcttcgcgcggaagagagcggagaatgagtcgcggccggaggggcttccgccgtcgcagggtggcaagtatgttggattcggatctggccccgccccgccccagaggggtaatcagcaaaacgattatttctctgtcgtttctcagggacttggtaaattatccttggctgctgcttctgctgctaatgttgttcaggccgggacaaaagagttatccgctaaggtaaaagagggtggttatgattacaaggtcaatgaaactgtcaatgttgtctctcagaagacaacagagattggacaaaggacatggggtatgatgaaaggggtcatggcattggcttcacagaaggttgaggaattcgctagagataacccgaattggacgtctgataactggcaacgaaatgaaagtgatagaaatggtttctaccaggagttcaatcgagagaataatggccggaattcttctaccagagaaggacaacattcttcaggtggacaaactaatacttttcactcaagctcttgggatgattggggccacaatgattttaggaaggaagagccagctaaaggatcagctcctcagtcatcaggtgggaagtttgataattataactcgagctcctgggatgattgggaccaggaagatacaaggaagaaagaaccagctaaagggtcatctgcccgtagcagtgatggttgggctggatgggataatgccaaagatgatggatttgatgatatctatggaagtgcatctaatagtaaaggtgtcactcataatgacaagtcaggtgctgcctggacaggaggaggctttctctaaggtttgacccgatctctatcagcaggatcaaagttttgttggaaatgacctcttggactggtggcatgcaaaccgagcaggggtgttgtttagtatgatggatgtgacctgattgtcaactataagtttgttggtcactattaaattcatgccccatatgtactggatgaatgattattttgaggtcagtgtattgtctacaagtatttatttttcaacattctcccatcctcccttgtgtaatcttttcatgtgattttttggggacttctgtatggttggaaacttattttaaatgtacaagtgtctaaagaaagggcaaattgcccaaatttatgattatttttactggaagtgtgatgaaaaaaaaaaaaaaaaaaaaaaaaagggcggccgccctttttttttttctcattgccccactggtgagtctatggttggttatattaggggtaattttgtgactgtaaactaagtttcggatagaatagagtagtacaattattttatcttgttgtaataagtcatttgatgcactaatggaatattttcttatttc

SEQ ID NO: 132632 - DNA, 409 bp, Glycine max
  unsure (1)..(409): unsure at all n locations
  Clone ID: PAT_MRT3847_90774C.1
aggacaaagngcatcaggtattctcaaaancttcactataaaacttatatttaaaccaataccaccatttctggcgagatatttaaacacaggcgggggcatcactaaaaatcctataatcactttaaaatccccatctgactttaaaggacataatcagtcaaacaatcctgcaactaagcatggtttaaaaatcaaaattctatattgactacacctatcctttaacaggctacctatcgttaagcatatgattgacctccattggatccaaaactttgttgcacactctagaactctcagatcacatatttcagttaccaaacttgcttacttcaatctctcaacttaattaattgccactacacacacatcttaattaacagtctcattttccaaaagaaattta

SEQ ID NO: 132633 - DNA, 543 bp, Glycine max
  Clone ID: PAT_MRT3847_90775C.1
ttggccgtgctacatgtgtagcagtgccgccttgcttggggggggggggggggggggggggggggggggggggggggggggagccccaaatgtgcaagttgggtagctatgagcataaacgggagaataggaaattagctaggagcttctagcaggacaggaaaaatgaaaaaaaaaccaacaggaggttaaattaaagcatgataccttacctccgggaaagacaccaataccaggcaaaagctttgtgatcgtgagcccgaaggtaaccatatcctgaaccctgctgccacggcagcgtggctttggttaacgcggaaattagccattgttgttaatggtgacgctgcttagcggatggcaaatcgttaagagcagtggttttggctgcttagtagagtggtcggtttatagccccaaggggacagggttaaactagcgagtgggatagctacccctaaacttactggtgctgcagccactatctaagcggcgattgccagttgtgccgcagctggtgaaggtaattatagagggcttagg

SEQ ID NO: 132634 - DNA, 1141 bp, Glycine max
  Clone ID: PAT_MRT3847_90776C.1
ctgaacatcttgataggacatactaatgcgttttttggctcacaatctttctcctgagttgaatctcgttataattttgtacgaggatgatgaaggtgtcaaaattgttcttgcaaccaatagtgatcttgtttctgctgtcagctatgctaggtctgcaggagtgaaggctttaaagttgcatttggattttggcagttcaaccaaagcaacaactccaaaatcttgtacagaccctagacagaaaactagtgctttgtctatgcgctctagtatttttgcaagtgcaattgttataacaagtattggcgtgttggtctacttaaaacgctccaaacagtgatgtgttgccagtttggtgagaaaaaaaaaaaaagaagcaataatcgctctgtatgagttcaagagcactattgccttttaaaggctcattacaattaagaaaatcttggataatgaaataggcgaattatatgaggttcttcttaaaattgagtctttttgttttgaggttaattttttcctccacggtcaagccaaggcgattagttacgatagccacttatatttttgtctccgatgtaattgcaatctttaatcctcgtccttcgtagtgggaatatatgtacagataatgtcttggcataatatattcagaaatgttaagacgttcttcatttgcacttccatgctggtttacttaaagcgctccaaacagtgatgtgttgccagtttggtgagacaaaaaaagcaataatcgctctgtatgagttcaagagcactattgccttttaaaggctcattgcaattaagaaaatcttggataatgaaataggcgaatgacatgaggtgcttcttaaaattgagtctttttgttgaggttatttttttcctccattgtcaagccaaggtgattagttaagatagccacgtatatttttgtctctgatgtaattgcaatcagtaatccctcgtccttcgtagtgggaacatatatgtctcggcctatatatatgtcaagggttttaaaatgtatagataatgtctcggcataatatatgttaaagggttctagtttagttgattgggtaggatatgaattattataaagtttttcatattatctttcatttctacgaat

SEQ ID NO: 132635 - DNA, 360 bp, Glycine max
  Clone ID: PAT_MRT3847_90777C.1
cccacgcgtccgcccacgcgttcgaaaaaatttttaataaaaaaacaaaaaacataaaataggggaaggaaaatatatatatgtgaaagattaataaaaatagaatactaagagagtaggtatattgtagatcttcttaagttttactcaattacgagttctttttggaggccaaatatagtataacagttgagttttccatcataactctttagcaagagattcaaattttaaaagcttaaatcttttacataacacgtctaaaactctaccgtgccaataccagttcttattgcataggtaatgttgctgctctactagtatataacttatattagaagttgacaatggacaatgtct

SEQ ID NO: 132636 - DNA, 431 bp, Glycine max
  Clone ID: PAT_MRT3847_90778C.1
ggttgtgctattttgatgcataataaggttttgctcactcgctttacgcttttattggtggtggttattgaaatgaaatacgtcaaattatgaaattattggaaatccctcattgcctagggtttgacttagagatcgataataataattactagttcgacagtgtgcgtgaagcttacataatcttctgatataaaatgatttatagtatgaagttttatatgtaggctaggttttgttgcgtttattggtattgtgggaaattgcggtcacaattgtggttgtggagatccccgcaactttgacgttgtggccaaaattaatggattgtaaacctattgaagggggtcatagaatatgtatctttaggttgtttgaagtttttgtgcgtgttggtgattgcggctgctgacagcgtgttagagtagata

SEQ ID NO: 132637 - DNA, 265 bp, Glycine max
  Clone ID: PAT_MRT3847_90779C.1
gatcagtagtgagtgtgtagactaagatccagacattcagtgtcatgaatgggacggtccttgttacccacgccgctcctattctggtcacatggtttagcttcgcgtcaaatttatgccctcgacaaataattcttgagcatggtgacccgtctcaggaggtgaactgcgcaagttggaagcttgctgtggaaggacacatcatcattggctttgagccgataccagacaatcttgttgctgcaaccagtgattgcctctatgg

SEQ ID NO: 132638 - DNA, 519 bp, Glycine max
  Clone ID: PAT_MRT3847_9077C.1
gttccaggaaggtttcccgtcatcactgtatgacgtcctccgtctttgggggggggggggggcaaaaaagatgaatacaaagaataggaaaaagcagaaataggatggtacggggcatgcggcaccgtgtatttgttgggaggttggttaagagcttacgggctgcggatagtggggtggatacagtggggataccagcggtaaaaagcaaacgaaaaaaaaagctgctatgaggcagcacaaaaagaaccggaaaggatgtacggcctggaaagcgggtagaaggggtactgtttgaaaggaacggggggggacggcaaggttgaaaatggagaaatggttagaaagcgttaggggtggagtgcggagaaatgaagttgacccattcgtgaggggacgtgagccagttaaaaaaacaatgggacccatggcgggcaaaggggttaaagaagggacacattaaggcaagaagggaataaaaaagaaaacgatggggagacggttagggtgggcaaaaat

SEQ ID NO: 132639 - DNA, 277 bp, Glycine max
  Clone ID: PAT_MRT3847_90780C.1
cgacccagtcgtacgcaataattacacttactatctcaaatgcattttgttcaaacactctcatttcatctgaccggaacgttttcatctaaatataggcagtttgaaatattacacttaactatccactattgccttttagaggaatgactattaacttaaagctgtcaactattcctttataaccactcattacattacatacatattcaatatctacaccaaatatgtgcattctaaccattttcatctgaaacttaaagactttaaaaccctt

SEQ ID NO: 132640 - DNA, 794 bp, Glycine max
  unsure (1)..(794): unsure at all n locations
  Clone ID: PAT_MRT3847_90781C.1
ccacgcgtccgaatgtgcatgcaccattaaactgcaaattatgttcaatatgttgtcagatattaattaaatttttaatgtgatagtactattaaaagacaccaaaatagcctctctgtccaccaccttcatggtatagaggcactacgactattccacgagatttcgtatatagagaggtacatgttttcaacgttgttgttgtcgagcctctgtaaaaggcataagtgatcaatggcatattcgttgttggtttcgaggcagaggcactacatggcctcagacgatgcatacttgttcatcatcgttcacacatctacgatgaaacgaccaaatgaaaaaaaacaccttaccttacaaggttgtctttcatcttcaacacataaggagagatcgtcttctaaaagtggcaagaaaccaatcgtcaccacgtcatcactgttggccactgataatgcaaaggcgggaaatagaatatcacacttaacaaccacgatttagtctctctctcacaaaaggtaaaaagaaagaggataaatgaatggttaatttttatggagacttaaaaggtaaaaatcttcacacatgaacgaacaatttggtgcacacatacctagcctagcacatggatgtcacttcccccatgtggatttgtcatgccatatttgatgtaccacttangcattctatgttaatgaaaacaatattacttgagagtatgactaaattgntgntacatttgcacaattgtgaactaaattaatcattttcataatatgaattaaatttgtagc

SEQ ID NO: 132641 - DNA, 538 bp, Glycine max
  unsure (1)..(538): unsure at all n locations
  Clone ID: PAT_MRT3847_90782C.1
ccacgcgtccgcgggttcgttttcttgctttatctcaaaaagcttcaatttttatctccaaactccatgaatataggttcgttttcttgctttatctcaaaaagtttcgatttttgcctctatccctgttgatgtagttttcatgtgcttcgttttcactccccatcttcttctacgttttctttttttacctctatttgcatttgtatgcgtttttttttttggttttttgttttttatttgcatgttcattgtttcttctaaagttgtcatttttatctcaaaaagctttgattgttatctccaaacttcatgaacacgggttcgttttcttgctttatctcaaaaagcttcaatttttatctccaaactccatgaatacaggtttgttttcttactttatctcaaaaagtttcgatttttgcctctatccctgttgatgtagttttcatgtgcttcgttttcactcccaatcttcttctacgntttctttttttacctctatttgcatttgtatgcgttttttttcccggttttt

SEQ ID NO: 132642 - DNA, 180 bp, Glycine max
  Clone ID: PAT_MRT3847_90783C.1
cgtgcctgagtctctaatgtgcacacacacattggaggtactacatgctgcgtgttcagcagcatattagtgtatccgaaggtcgagatcatcacaacgagcatggggactgcgtcgttgtactgtgattgtaaagtgttgagtatgcggcatgcttcatagaactcctcagtcgcatag

SEQ ID NO: 132643 - DNA, 376 bp, Glycine max
  Clone ID: PAT_MRT3847_90784C.1
atggcctccattttcaagctctcaacgccatctacagctgcttccttatcagaagcgcttccagaaaaagaaaaaaggacaccataatcccccctatgaccaacgtgtgaaagtacccaacggagctattcgattccctacagaccattcactccctccctcgtgttacctgcatgcagaacaaatgctcccgtacagattggcacggatgacctacatcctagtctgaggttgccgaacaaatattaactttccccggtcgctgcaggggggaggaaatatgcctaatcattctcgacattaggggtatttgattttatagacgaccgagcaacatttaacatcccgtgaacttctttaatgcactcatatgact

SEQ ID NO: 132644 - DNA, 776 bp, Glycine max
  unsure (1)..(776): unsure at all n locations
  Clone ID: PAT_MRT3847_90785C.1
ccacgcgtccggtttaaattgaaataatggtgtaattagttaaacattatttaaatgttttgttttaattattttttttataatatttcttgatcttatttaataaaaaatattgacgattaaaaaatatttaatgcgtactgaaataaaaattgtgcaatgaatataaagttgtattttttatatctttttatatataaatttaatagagttgggatctcaaaaacaattttctttcctcccaaaatagggacatttgtgtatttttttattgggatctaataaaaggaaatattctatcaacgaaaaaaagggcgttttggtatattcttttttatgtcaatattgtcaattaattagcatttgtcaattacattaaaaaattcactattcacatttttcagtcatcaatttcaggtttcaactttgaatcagaatttatttttagcaagatttcaaactgttctaggtcttttctttcatttaaacgtgagtgggcctaataaggcttaacaattttttttttcagcaaatgcttcaaatcatttgcttcaatgttgaaccaaaaagcagttatttcatttttttaattntgtgttttcgttaaatgggactaatgattttttatttattttttgcttaggatgttataatgaccggaaatcattttttggacttttgatgcgacagattgaagaagacagntttggtgtaaaccatggatatcctaatgataatgtcctgcaagtggattgagtcatgcagatgtaaacatc

SEQ ID NO: 132645 - DNA, 461 bp, Glycine max
  Clone ID: PAT_MRT3847_90786C.1
cccacgcgtgcgcccacgcgtgcggacgacagattggggtgcacagatcaatacagccccacgtgggctgggattaattgcactcactcctattgttctccgctcttcaccttcactctgttcaatatcataatcaatcattgatcataaaagaaacaacattcagctatttctctgaactaaacatgttacaatctatggaagtgcctgattgtgtctatcggcggcaaccactgatcattcctccaagtgctcctaccccaaaacattctctgtatttgtctagcctcgatgaccaacagtttctaagattctccattaagtatttgcacctcttcgagacagcttcgagcttgaatatcatgaagtcttctgtggccagaggtctagtggattattaccccgtaactggaaagatgaggagtgtggatgatcacactcacaaacttgaggtggattgc

SEQ ID NO: 132646 - DNA, 262 bp, Glycine max
  Clone ID: PAT_MRT3847_90787C.1
cccacgcgtccgaacgattaaaaaagtattagcagttttccctcaccaaagaagaagaagcaaacaatgggcgatcagcttaccgatgaacagatctccgagttcaaggaagccttcagcttgttcgacaaggacggcgatggtttgttctctctctatctctctcacgttttgtgtatttgatttgatttgatttatgcgttcgcggtttttgcagatcggggttcctttttgtgataatggattacgaaaattagatgaa

SEQ ID NO: 132647 - DNA, 324 bp, Glycine max
  Clone ID: PAT_MRT3847_90788C.1
caacaaataaatttaaacaaattaattcattcttcagtatcggaaagtaggcaaaattttgctccatttagggaaacaacattttcatttgtgaagaactagaccaacgcgtgagcccagaattttttacatgcgttgatgtcgatttgttgtttgcatccataggcttctcatgaagttgttcaaatgagtcttcccgattcttcgggatcagtatctgtgttggaacttcaaatatgagtagttcattttgtagccatctggaacatcaaacacatgattttcctagtttcattctcatctggttccacaaaatcatcaacc

SEQ ID NO: 132648 - DNA, 440 bp, Glycine max
  Clone ID: PAT_MRT3847_90789C.1
gcgacctccattgagatcatgacttcaatcagagcaaccttaaaaatcttcagttaaaacatttccggctgacctggaacgattaatgcattgaacaccaaattggctacggactatgaccctcatcatcacgctctgtaacagtactcaagcgatgatgcacggatatgtggctgtgttattggtatgcatccttgatgaaccttattgcctgagggtcaccataagcttgtacccaagctatcacaccgttggctacacgctggctgaactgggcaggggcgtatcggggagctgcgtgggggccaatgagtgcacggtttcccgtacacttgctccggccgtgaacgtgggcccccattccatgactagggcagtcaccgtatgccaaggggtgttgtgcgcggtgaccggcccatggactccacccttcggggtga

SEQ ID NO: 132649 - DNA, 530 bp, Glycine max
  Clone ID: PAT_MRT3847_9078C.1
gacccacgcgtacgctggataccgaaccatcggtcgggcataaaatttactgtttacttgaaactaataccatactaacttacttaatgcgagggaatcatctgttatttgtgatatgagagatctattgtgcactctatagtgaaacttgatagattcgggggggcatatccccccagggttaaacctgcttacgtccctgacgcacgtgattgattgaagcaggtgttagtatcgcgactcacaggatatagattggtccttctcattgagagcagcacgaaatatgcttggcgttggatggacctattgctcaatgcatgcttcgtacagactaaaacttaaggcctgggctaatgcattgtatatagtacatctttgttggatgaagatgccattataactacgagaactgctcgccatgaggcaaggctagggtgaagtctgatgacgtttatcactgtgacatcacttgatctcacctactatgattaagccgtgctccttccttgctctagagtcagccccag

SEQ ID NO: 132650 - DNA, 228 bp, Glycine max
  Clone ID: PAT_MRT3847_90790C.1
caccaacgacctcttttgaacatttttctctttcctccctcatacgtttgggtccttcaaagaaagaattgcgttattgaaatttacaactctctacgttggagcatgaatgaagtgattcgccattccggtcattgaggccactgctccatttattaccctaatgttataacaaataaaatccctctttttccccattctcataattttcctacttaaaaaattact

SEQ ID NO: 132651 - DNA, 1593 bp, Glycine max
  Clone ID: PAT_MRT3847_90791C.1
aattcggctcgagctgcgtttcccacgtctaacaataatttatacaatatgattatatgcaccatgttaatattataatatatcgctgggacagtttttgtttgacagcacagcactcggaaatttctggcgatctctgcgttttcccctattttttctgaatctaacaacaaacattcctctggcaacaatcatcactattaataagagttccttccttcactctcacccaagccaaagaaaggaacaagaacaagaacaacaaagtaacgtgaaagagagagagatggaggcgattgttccagtggtggatttccagaggctttcagaggaagaggagcgcaagaagctgagaaaaacatgtgagaaaccagggtgtttcagaatcatcaaccactcaattccactaacactcatggctgacatgaagtcagtggttaaatacttgcatgaccttcccacggaaatcaaaatgcgcaacaaaccctccgtccctgagagtggctatagggcggcaatgccaacaagtcctctatacgagggcatgggaatatatgacatgcatgcctcaccacaagcatttgaagatttctgctccaacttgaatgtgtcaccccgtcacaggcaaataataaaggaatatggtcaagcaattcatgacttggcatcaaatttatcacaaaaaatggctgagtctttgggtataatggataatgatttcaaggactggccattcattttgaggactattaaatatagttttaccccagatgttataggctccacgggagcacaattgcactcagatacaggatttatcactctacttcaagatgatgaacatgttagtggtcttgagatgatggatgattttggctcatttaaggcagttcctcccataccaggggccttcctttgcattgttggagatgttggacatgtttggagcaatggaaaattttggaatgccagacatcgtgtaatatgcaaggaaacgggtactcgttattcatttggtgcatttatgttatcaccaagggatggtaatgttgaggccccaaaaaaattggtggaagttgaccatgtacaacgctatcgaccatttaagtacgaagatttgagggatttcagaatcaccacaggaaagagggatggcgaagtccttgatcaatatcgcatttgttagtcattttatgcatcgaaatacatcgccaatagaactttattttgaaaaataagttggcgataaaataaatgttgcatccattctaaataatttaaatagtttggtgtccttgttcgttcatgaatcctaattcgtcgtgttttaatttggatcatgttattgtattttgttctagttgagttgtgttactattgatatgcttgctgtagaccaaggaaagtctatatatgcagcaggttatgtgatgaatttgagtgtgatcattaaagttgccatggttgatatcttcaaacaaaatatttaataagagtccttagatttattattcaccaaaaaaaaaaaaaaaaaaaaaaaaaatccgaggaaacaaaatatttaataagagtccttagatttattattcacca

SEQ ID NO: 132652 - DNA, 469 bp, Glycine max
  Clone ID: PAT_MRT3847_90792C.1
cggccgccctccaccttactgttcggcaatccacattaaattatcacctctaatatctctcgcgctgtatttaacacttatcaccatgaagaccaaaatttaaatataatatctactctactcagtaggcatgctcagattgaacacaaaaccatttaagactaattcgtcttccttttttttttatcagcgaaaaaactctatggcctatctctgtgctcataaaacctaaaacgatgaatccgtcttcttggaaacccgaaacgatgacgcttttgcgttaacacctgcggcgacaccggagaccctgctacgagcaacacgcgtgacatgagctccaccgccttgaaaagtctataccgacaccacgtccggcgccgagagcgccgcgatagcttctccggcgaccagatccggcatctccagacgtccacagaagagatgtttttaagaggagccctctccgtcg

SEQ ID NO: 132653 - DNA, 1366 bp, Glycine max
  Clone ID: PAT_MRT3847_90793C.1
ggcccgctcccgaggccggcccgggccgcggaagaaaacgcggacgacgtacctttcacttcacttgtggttcctcactctctctctctccacaccacactgaggagggagacagtggaaggaaggaacactcaaatcactgaaccagccatggctaccttctccaaggaacgcgagaactttgtatacgttgccaagttagctgaacaagctgaacgctatgatgaaatggtggatgccatgaagaaggtggcgaagctggacgttgagttgagtgtggaagagaggaacctgttctctgttgggtacaagaatgtggtggggtcacggagagcttcatggagaatcttgtcatcgatagagcagaaagaggattccaaagggaatgagttgcatgttaagcatatcagggattacaggaacaaggtggagttggagctgtccaacatttgcagtgacattatgataattttagatgagcatcttattccatccactaatattgcggagtccacagtgttttattataagatgaaaggagactattaccggtatttggcagaatttaaagctggcaatgaaaagaaagaggtggcagatcagtcacttaaagcatatcagacagcttctaccactgctgagagtgaactacaacctacacatcctattcgtttgggtctggctctaaatttctcagtgttttattatgagatattaaattcacctgaaagggcctgccatcttgcaaagcaagcctttgatgatgctgtctcggagctggataccctgaatgaggattcttacaaggacagtaccttgattatgcagctgttgagggataaccttactttatggacttctgatatccccgaagagggtgaggacctaaaaatggaaagcgcagccagggttgatcaaggagaagatgagttaggccgctaacccatcattctgtcatatgtctaagatttgatgcattaatttttctcaatcatattttctccattgtagtgaagcctctatctgaatggtgcactgcacctcatcaactttgagtcattcttatttttgagtgatggcctatttgagtcatctacttcatttttatgctattgttgagtagttttattcatgtgtttgtgacacaaaaacaccattggtttgcaatgcataatttccctatttgtatcctgttatggttaagatctgttcttgggttggcctttcaagaactgatcacatgtgagccactgtaatattgcaatatttagacttttgttaagtctcattttattaagacagacaaattaggttaaaaaaaaacccctaaaaaaaaaaatggtaataataaaagcaataatataag

SEQ ID NO: 132654 - DNA, 366 bp, Glycine max
  Clone ID: PAT_MRT3847_90794C.1
ggttagttttgtgtgggcaaatcaaacttcatggcatttgtgtttccttattgacaatcccaaacagtctacagtttttgatattctcttgggaatttcacaagatctggaacccccctggagattctcttatgccagctactcctgttctacaggctactgacagatcttctgagaatgcggaatcctgtgcctgatctggtcttcgcgctctccaacgctggtaccttcgtttgggatccactcaggaaactctgcctgaccctcctgttgaggttgctctgcttatgagaaaaagtccacacctactttaactatagtaacgatcggtgaagtgtgcgttcttttgaagaataaaaagatcac

SEQ ID NO: 132655 - DNA, 1880 bp, Glycine max
  Clone ID: PAT_MRT3847_90795C.1
tgaggagggagacagtggaaggaaggaacactcaaatcactgaaccagccatggctaccttctccaaggaacgcgagaactttgtatacgttgccaagttagctgaacaagctgaacgctatgatggttctctctctctctctctcgattttcactgtgaagtgaacactcgttctggttccttcattttagctgcattccactttcaatcacgtttccatcatctcctgcagctacccattttctctttttccttataacagacatttgttctgataaagtttcaatttttccataaaagtccactgctttttcacttctgcatagaactgctattctacttttacatgcccatttcaccatctaaattattatgaaagaaaaagagtaaaatttggatttgtagtaggatatttccattgcatgctaagtttttaaaagtcatacctggacatgatttctgaaagagtgtggaaattaaactttgtattttatttgttacgtgttttggaatttgattcaagagtgttgagtggtggagtataataactatttaaaagtcatacctgagatgatttctgaatgagtgagtgtgaaaattgaactatatttgtttgttatgtgttttggaatttgattcaagagtgctgtgtggtggagtatgataattactttaaaagtcatacattcctcatgatttttgagtggatgagaccgtgaaaattaaactatatttatttgttatgtgttttggattttggttcaagagtgttgaggggtggagtatgataattactttaaaagtcatacctgacatgatttctgagtggatgagggtgtgaaaattaaactctatgtttatttgttgtgttttggaatttgattcaagatgtgtttgagtggtggagtgtggtgtgcagaaatggtggaggccatgaagaaggtggcgaagctggacgttgagttgagtgtggaagagaggaacctgttctctgttgggtacaagaatgtggtggggtcacggagagcttcatggagaatcttgtcatcgatagagcagaaagaggattccaaagggaatgagttgcatgttaagcatatcagggattacaggaacaaggtggagttggagctgtccaacatttgcagtgacattatgataattttagatgagcatcttattccatccactaatattgcggagtccacagtgttttattataagatgaaaggagactattaccggtatttggcagaatttaaagctggcaatgaaaagaaagaggtggcagatcagtcacttaaagcatatcagacagcttctaccactgctgagagtgaactacaacctacacatcctattcgtttgggtctggctctaaatttctcagtgttttattatgagatattaaattcacctgaaagggcctgccatcttgcaaagcaagcctttgatgatgctgtctcggagctggataccctgaatgaggattcttacaaggacagtaccttgattatgcagctgttgagggataaccttactttatggacttctgatatccccgaagagggtgaggacctaaaaatggaaagcgcagccagggttgatcaaggagaagatgagttaggccgctaacccatcattctgtcatatgtctaagatttgatgcattaatttttctcaatcatattttctccattgtagtgaagcctctatctgaatggtgcactgcacctcatcaactttgagtcattcttatttttgagtgatggcctatttgagtcatctacttcatttttatgctattgttgagtagttttattcatgtgtttgtgacacaaaaacaccattggtttgcaatgcataatttccctatttg

SEQ ID NO: 132656 - DNA, 1207 bp, Glycine max
  Clone ID: PAT_MRT3847_90796C.1
gcttatggaatgaatatctttgatctgcatgcatggagaagaactaatataagagagatatatcattcttggctgaaagagaatctgaagtcaaatctgacaatgtggaagcttggaaccctgcctcctgctttgattgcatttaaaggacttgttcatccgattgatccctcttggcacatgcttggattgggttatcagaataataccaatattgagagtgtgaaaaaggctgctgttattcactacaatggccagtcaaaaccttggttgcaaattggctttgaacatcttcggccattttggaccaagtatgtcaattattctaatgattttttgaggaactgtaacatcctggaatcatagtctgccaatgtggagcacaatgttttgtacaacagtgaatatgaaagggacgagtaatacaggtttcatctaaatttttgcagcttgaaattttcttcaagatgaatttgacgaggcaaatataaaattggttgagagggtaaagtgataaaaaaacattggatttccttccattccctacatttttgcagatgatacagttaccattcctgcatggccttaaagaatcatttgagcccttgagttgtgagatagacacacgtcctctatttttggtttgtgaaaggataatattattgatcttctatgggataaatacagcaaagattccatagttgaatattggagaataaagtggatgctggagataaaaaagtcaggtttgtttcatcaatctagttggtgttgagaacacaagtgctagaacagttaatttgtgaggttcccccctctagagcagcgttttacccttcattagtttcttattttttgttagtaccaatttttaccttcatccactttgatttgatatcataatggtgtattctaggagtagttcattagatttgctttgttacgggtccattgaattggggaactgtttgtaggatatatatatttattgttattcattatgtacgattaccagacattggaaatgtgcagaaaattcatttttctcttctccatccttgcattgccgggtcataatcgttctcctcatttttgtgcttcgtgctttcacaactttgatacagcacaattttagaagtaaatgcaagttactatttggtaacaaaagtttggcaagaaaattcaatgcgaatcaatcatattggta

SEQ ID NO: 132657 - DNA, 2419 bp, Glycine max
  Clone ID: PAT_MRT3847_90797C.1
gtaagctcggaattcggctcgaggtgagagtctcagtctcttgggaatgagtgcctccagaagattgattgatgcatctgaagcctttactggatatttcactccttatcaatccaggtactgtgtggatagttccctggataagaccaaagccaaaggaaaggttcttgtgtgtcgacatacagagtattcaggggagtcaaagttggaaaagagtaagatagtgaatgaggcacgtggtgttgggatgatactcattgatgaagcaaatcaaggtgtttccaccccatttgtgataccttcagctggtggtggaacgaaaacaggagaacggattctattctatatcaatatcttgactactgctacaattctggtttagcaccacagacccatcattgctgatccagaacaaagaagggctaatgcatttgattatggatcggggtttgtgaaccctgcaagagttcttgatcctggtctcatctatgacttaaagccagcagattttgttgcattcctgtgttcacttggttatgatccgaggtcactccaccaagttacaagagacaacagcacatgtgatagggcatttagcacagcatctgacctcaactacccgtctatttcagtgccaaatcttaaagacaacttttcagttactaggattgtgaccaatgttgggaaagcaaaaagtgtttataaagctgtagtgtctcctccacctggtgttagagtcagtgttatacctaaccggttaatcttctcaagaattggacagaaaatcaatttcactgtgaatttcaaagtaactgctccatcaaagggatatgcatttgggctcttgtcatggaggaatagaagatcacaagtcactagtcctttggttgtccgggttgcccctggaataattcggctcgagtgcttcttgcaagaagtttctgagcttttatatcctctatatatagttctctggcaattaaggtctcatccaaataagcacaaatgggtagccagagttacttcaaggctttgattatttgccttatagcactaattggatcaactcaagctcaattgcagcttggtttctatgccaaaagttgtccaaaggctgagcaaataattctgaagtacgttgttgagcatatccacaacgctccatcactagcagctgctctcataagattgcacttccatgattgttttgtcaatggttgtgatggatcagtgcttgtggactcaacaccagggaatcaagctgaaaaggacgctattccaaatcttacactccgaggctttggcttcattgaagcaataaagaggcttgttgaagctgaatgccctggtgtagtctcttgtgctgatatcttggctttgactgccagagactctattcatgccactggtggaccctattggaatgttccaacaggacgaagggatgggttcatctctagagcagcagatccgttacgcagccttcctgctccttttcacaacctcactacccaactaacactctttggcaatgttggacttgatgcaaatgaccttgtcttgcttgttggtgctcacacaattggtattgcccattgttcatcaatttcaacccgtctatacaatttcacaggcaagggtgacacagacccaacaatagacaatggatatgcaaaaaatctcaagaccttcaagtgtaagaacattaatgataactcacttattgagatggaccctggaagtcgtgatacatttgatcttggatattacaaacaagtggttaagagaaggggtttgttccaatcagatgctgaattgcttactagtcctatcacaaggtctattatcgctagtcaacttcagtcaactcaaggattctttgcggaatttgccaagtctatggagaaaatgggacgaattaatgtcaagcttggatctgaaggagagataaggaaacattgtgcacgagttaataactaagaatctctttgataatgaccatctaagtgcattttgtatgtctacttttctgtgtaacttattctatgctaggcctatggtgtcttgatatatgagataccatatgatttgattgtttttccaagtgatgcgagaaagggttgggagtgattactaggtttgaatggaaatcatgttatggtgttaataagaagtagaatcaagagagagagaatttattgtaatacacaattgcacaataaagtctcccttgctatattgaaaaaaaaaaatgatcacaaggcctgtaaaaaaagatattagcttaagagctttgaaaatactatagtcactagaacaaccatttttattgaatttttgatcccaactaaatgatccctgtcaaaattatattcattatgtgcttggagtagccacagtttccaaaaatagtgtcccc

SEQ ID NO: 132658 - DNA, 753 bp, Glycine max
  Clone ID: PAT_MRT3847_90798C.1
gacccatcactgcagatccagaacaaagaaagggctaatgcatttgattaccgcgcggggtttgtgaaccctgcaagagttcttgatcctggtctcatctatgacttaaagccagcagattttgttgcattcctgtgttcacttggttatgatccgaggtcactccaccaagttacaagagacaacagcacatgtgatagggcatttagcacagcatctgacctcaactacccgtctatttcagtgcccaatcttaaagacaacttttcagttactaggattgtgaccaatgttgggaaagcaaaaagtgtttataaagctgtagtgtctcctccacctggtgttagagtcagtgttatacctaaccggttaatcttctcaagaattggacagaaaatcaatttcactgtgaatttcaaagtaactgctccatcaaagggatatgcatttgggctcttgtcatggaggaatagaagatcacaagtcactagtcctttggttgtccgggttgctcctggaaaaaatgggttggtcagatagcaatgcttgtaaatatctatattagcataagagctttgagaataccatagtcactagaacaaccattcttattgaatttctgatgcaaactagatgatcactgccaaaattatattcattatgtgcttggagtagcaacagttaccaaaaatagtgtccaaagagatggtatatttaaaattactctgaaattcattatttattaattggtgc

SEQ ID NO: 132659 - DNA, 489 bp, Glycine max
  Clone ID: PAT_MRT3847_90799C.1
cagaagccagattgcaatatgtagactttactgtgccatatgcagaatcaggattgtcaatgatagttacagaaaagtccaacgaatccacatggatgtttatgaagcccttcacctggcaaatgtgggtggcaactggggccgtgttgacttacacaatggtagttgtgtggtacctggagcgggaaccaaatcctgagtttcaaggcaattggaaaagccaagtcagcactgctcttatgtttaccttctcctctctattctttgctcacagggagaaaatccataacgacttatctcgcgtggtgatggtatcatggctgtttctagtgttgattcttaactcaagctacactgctagtctttcttccatgctcacaattcaacgactgcaaccaaatgtgacagacatcctgtgcctgaagaagtacaacatgaaaattggttgtgacggagattcgtttgttagaacatacctggagaaagtcg

SEQ ID NO: 132660 - DNA, 815 bp, Glycine max
  Clone ID: PAT_MRT3847_9079C.1
acgcgtccgaggaggaggaggccgtggaggaagaaggagaaatagttgctattcaccattcttgctagcatcaagtgttcatctccatcacttcttcccttcattcttcttgaagaccaaacctaggcccattatgcctcaagacgtgcattgttgtgtgaaagttcataagactcaagcatgagtactagtgtgacttttattctattctagtgagaataagacattaaagagatgtgcaagcggatgcgagtgcgcggtggaatgttgaaatccaagttgaatagaatcgcatgggagtgtcatgctagaaaattgttagagctcacaaagcgacagtcgattggtggttttcatactgcatggtgtggaaggaacgtgacctcgtctgtctatgagacatgttgttggagtttgggattagtctgggactcatttgacaattcaatgttgtttagtatcacatggaattccatggtgacaaagaacataaaatccctgttgaagtatatggtgagatagtaaaagaaatgtttataggtgtaagtgagactcgacagataaccacatcgtggtggttgataattgtgtgtgtgacattttgaagtcttcttgtatttggttgactaagtaggaagactcattggtacattttgtccaggatcaagcaacgggcaaagagttggggctccatcttgaggatgagtgcacttggaagcggtagatacccgacgggactagaggcgtagatcactttagtgggtatctctgctatgcacgaacctctgctgacttatgtttttgtgtagttttca

SEQ ID NO: 132661 - DNA, 468 bp, Glycine max
  Clone ID: PAT_MRT3847_907C.1
cttgctgttaactttttactgtttcagtcaatattggttccatatggcgagggaaatgccccatggtcttcagtgccccaaaagtatgataatgttagactttcattacattcaacaccaaagtacttcactgttcggaatccaccaacaggtactgtttcagggttttctaactcctctgctttcattgctacggtgcaataagtgcatattcctattgttgttgatgaagttgggcacggtaagaaaaaggggatgcacaataatgtaaagggtggtttggtctctgaaagaaacggctctgatgataatgtttttgaacatggggcagatagaaatgatgttcgtagtttgtctgagaagaaagatgttggaaaaggtgacaggttggagttggagagtgtcggttccaaaaatttcatagcagattcggccaatggcagtaaggttgacttttcagtgaagcaa

SEQ ID NO: 132662 - DNA, 393 bp, Glycine max
  Clone ID: PAT_MRT3847_90800C.1
attcggctcgagtaaaattctcccaccattgtttgggttcccttgcgttgcttcttttctccctcttaggtctctcttctagctccagcctatcaactgatcggtccatattggacgatgacctaaccgtgtttaccagacagctaccaggagacgtcacgtggaccaacagcagaagagggagcatggacgtatctaccatatccacgaagaagaggccaacagactggagatcgtcaagaataacttgaactatatcagggacatgaatgcaaacagaaaatcaccccatgctcatcgggaaggattgaacaagtttgctgacatcactcctcaagagctcagcaaaaagtacttgcacgctcccaaggatgtgtcgcaccacatcaaaat

SEQ ID NO: 132663 - DNA, 345 bp, Glycine max
  Clone ID: PAT_MRT3847_90801C.1
ggctcgagggcaagccctacttttctaccacacctctcctcaatcacgctacccctttctgctcttctaatgccttctagggatgaaagtataaacatggcgacacattcctagtcacctaaaagtctgagaacgagggacaccctgacaagctatgcgaccaaatgttcgatgctgaactccacactcggctggagcaggacccacacaggaaaaatgtctgcgagacatgcaccaagaccaacttgatcatgggctttggagagatgaccaccatagccaacgttgactacaagaagatagtgcgtgacacctgcaggaacatacgcttggtatcaatgatgt

SEQ ID NO: 132664 - DNA, 402 bp, Glycine max
  Clone ID: PAT_MRT3847_90802C.1
cagaacttcatactttgttcgatcgaagagcacaggcagcatttcagcattactacaggaggctattgatatggaaaaccaagttttatcaactaaaccatcagagcagcaaagctcagcaccttaggcatactgcttacgggactgatcgacagcgatgaagttcgcatcaggatatttcgctgcagctttccctgggaaagcagactcatatccaaagttaggaggatccccctttacataagaagagtggctaattgacaggatcacattcacagatggtgcggcctattcaacttgctacacgagtagtacatctggaacatagactctgtcaagagtattaccaatgtttgactcgcacacagttaccagctcattcaccgactgggtgttaactgg

SEQ ID NO: 132665 - DNA, 426 bp, Glycine max
  Clone ID: PAT_MRT3847_90803C.1
ttttttttttttttagaaaatcaagccaagtcaatcagattaagaactagcaattgacaaccactaggactgttaattcttcctcttttgaacaagtctagtcttagattatcgagatgatgtaaatatctttttctctcttctgggtgattaggtccattgactctagccaaaactattaaaaaggagaaaggacccttgttcagctgaacttttttactataaatcattatcagtaatatttctaacacctatattttaggcaaactgattctcacacgagatttcccatgaaaagggtgatcaagacttccacgttcttcacaaagcaacaaaaattataaatgattttcctgttcatgatattgcttctgtcaaaagtaaaccttctatttggaaatcttgagtatgaattgaggattttag

SEQ ID NO: 132666 - DNA, 245 bp, Glycine max
  unsure (1)..(245): unsure at all n locations
  Clone ID: PAT_MRT3847_90804C.1
gtctcgagtttttttttttttttttttttttattcaataaatggggttgttagggagggtaggttttctgctggtantaccattaattgggatatangcaaatactgccgantgtccataactatattttcttcctttaaaaaaattagctgataattaatttgtaaacatatttatgtgttagaatacttctatttgagtttttaaaaaaaaaaaaaaaaaaaaaaaaaaaaaaaaaaaacctc

SEQ ID NO: 132667 - DNA, 463 bp, Glycine max
  unsure (1)..(463): unsure at all n locations
  Clone ID: PAT_MRT3847_90805C.1
tcggttttcaagtaagcattcccaaatcactaatgtatagagctatttgttatgacttattttttaactcttattataactgctggatatacgctttcgttgcaaaataacaaggcatagtaagcttgttgctcttctttattaagtaattatgtatagttgagtttttcatcaatgctattgatgtttatattacttaattatcgatttgtgctatgtgcaaattacaaagtaatccaagttgctctcactaaaatagttttactacaacaatagctatttaaaaggacactttctattgatgtgccccatgtgattggatgatagtataaaaactatgaaagtaaaacaaagctatactcgntaagtatcatctgattcttgaagggatttattaaaaggctagttttgttaatacttcatagtatagctttagtcacaaaaaaaaatgaatctttgcatt

SEQ ID NO: 132668 - DNA, 285 bp, Glycine max
  Clone ID: PAT_MRT3847_90806C.1
tctccgcccactcgtacggtttttacttaaatcttctatatccttctactattctacgtgacgggtatattcactatggaagatgacgtggctctgctagatttctggcctaatacatttgggatgaacgtcaggaatgctcttgctgaaaatggtatcaaatataagtccaaataagacgacttgcataacaagatccctttgctcctcaaaatataaccctgttcacaagataatccctgttctcatacacaatggcaaacccattagtgaatctctcgttgc

SEQ ID NO: 132669 - DNA, 1400 bp, Glycine max
  Clone ID: PAT_MRT3847_90807C.1
cgactttaaggcgctgcgagaagacgacagaaggggggtcttgagcctaataatggattgacatgggagatgacaaaaagaaggggtgacaaagaagttcacatggtgacagaagagaaaccaggctggtgtagtgatccacatttgcctccttgtgctgcatttgtggaaattatggcacctgtcttttctcgtgaagcttggcgttgtgtgtggcacatgattcagaatgatctagtgcatggatggggattgggctttgctctcagaagatgtgtagagccagcacatgaaaaaattggtgtaattgattcacaatggattgttcatcaagtaattccttctcttgggaaccagggagagtctgacaaaggaaaaatgccatgggattcggtccgagccagatgcaaaagtgaatgggcccagtttcaacttcgcgtaaccaatgctgataagtcttatcttgaaggacataaacgtaatgggaaggattgatatgtggatccatctacctattgtatatgttttacgtacacactcgggggtagtatttgttttgcattgtttcctcccctcaggtgccatgcgaatttttgagccatatttttgaggaattaatctatagccatgtaaatcaatcacttttatgttattgaataacttttttatcagccgttagacttggtgacagaagagaaaccaggctggtgtagtgatccacatttgcctccttgtgctgcatttgtggaaattatggcacctgtcttttctcgtgaggcttggcgttgtgtgtggcacatgattcagaacgatctagtgcatggatggggattggactttgctctcagaagatgtgtagagccagcacatgaaaaaattggtgtaattgattcacaatggattgttcatcaagtaattccttctcttgggaaccagggagagtctgacaaaggaaaagggccaagggattcggtccgagccagatgcagaagtgaatgggcccagtttcaacttcgcgtaaccaatgctgacaagtcttatcttgaaggacttaaacgtaatgggaagggttgatgtgtggatccatcttcctattgtacatgttttatgtacactctcggtggtagaagtatttgttttgtattctttcctcccctcaggtgccatgcgtattttctgagccttatttttgaggaattaatttatagcgatgtaagtccatcacttttatgttattgaataactttctatcagccgttagattggaacttcttgtctcattgattgtacatataaaattttatttatattaatttaaaatcatgtcatccatgatatggattaagattgacgttgtatgttataaaatgtgaaaataaaaataaatcgaccattttttt

SEQ ID NO: 132670 - DNA, 378 bp, Glycine max
  Clone ID: PAT_MRT3847_90808C.1
cgatggaatagttatgattccgggacagggagtggagcaaagagtgggggtgtgagtagcactccgagcatgaggggaacggttttctacgttgctccagagtatggctacaatggggatgcgtctgagaagtgtgacgtgtacagcttcggggtattgttgctagtgattgtttcggggaggaggccgcttttttttgactggttcgccggtatcggagtttcagcgtgcgaatctggtgtcttgggcgaggcaatgcgcgcggagagggaagcttctggaaatggtggatgagagtgtggaagggatggataaagagcaggctagtatgtgtgtaacggctgcgctaatgtgcttgctaaagtcacctgctcgtcg

SEQ ID NO: 132671 - DNA, 133 bp, Glycine max
  Clone ID: PAT_MRT3847_90809C.1
actacgattgcacgcgcacggccgcgcggactagggagcgggggtccgctttatatgtagattgttactttttgaatgcttagaaacattgtacacaggggtctgggcacactaaatggaactacacgtgacc

SEQ ID NO: 132672 - DNA, 167 bp, Glycine max
  unsure (1)..(167): unsure at all n locations
  Clone ID: PAT_MRT3847_9080C.1
ttcccaaattcccctctcctttgtgctcgcctccgggggggggggggggggtnttactaaacttgcgggggcgcctcccgaccctgtttngcttcggctgngtcgccctgctgcctcgcattgccgtggnggccgtcgccctctgctattctactcccccgcccccc

SEQ ID NO: 132673 - DNA, 223 bp, Glycine max
  Clone ID: PAT_MRT3847_90810C.1
cgtgggttggactcctcattcacacaaggctaaactaaactaaacacctctctctgcaaaacaaaacaaaacaaaggtggtgtctttattgccacgagttggtgccgcatacctcataacaccggaccttttatcctaagacccgcctcttgctctaacaaacaaaaggcgttacactttttgaacacatcggtgaacccctttacacaacacttttgagaat

SEQ ID NO: 132674 - DNA, 234 bp, Glycine max
  Clone ID: PAT_MRT3847_90811C.1
agaaaatcacgtttttttctcatctaaagtttatctcaaagacgcaaaagatcacttgagggagagcttctgatcctaaaatgcacacttccacggacgcaaccaaccacaacaaaaccaaaaattgttgtctaactatttctggcaaggtctatgatcaaacaaccgtcatggattatcataaccgaattgataaacttttgctcacaaatactacctacaaccatttccttg

SEQ ID NO: 132675 - DNA, 223 bp, Glycine max
  Clone ID: PAT_MRT3847_90812C.1
cggtctggattcccgcaaggttacaggcctcccttaaatattttttccctcctttgccggcttctttttcaaaagggccgtgacgtggggtttctccaccagaatcaggcctaaagtccttgaacgccttcctttttgggaaggcttacgtttctggggttcagtcaacaaaggacgccttcaaagggtttggggctgtttcggaaaacccagataactcttt

SEQ ID NO: 132676 - DNA, 261 bp, Glycine max
  Clone ID: PAT_MRT3847_90813C.1
acgctctcacgcacgcgcacgcaagagtctgaatattgctctagggcgcgggaagagatatatatattttttgagagcacaaacacaccgtattttttccagggagaccagtgtgcacaggccgctgtcaacaaggtgttgtgcacattcgtggggcagttgattatgttgacgcagactgtgagaggggttatgctacatataccttagatccgaaataagcaagacaaaggctgaacttgtagaataaaaagagcaaga

SEQ ID NO: 132677 - DNA, 365 bp, Glycine max
  Clone ID: PAT_MRT3847_90814C.1
cactgactccccctaatagcacttatttcgactaacgaacgctgactcaaagagggacacttcctacggatcgctgagcacccatactagaaaggatacaaagtcacagacgccactgcgctaaccaatttagaacgaagctctgcgcggatatatcacaacgatcacgtcatgactactaccacgaaggactacttctgaggccacagacgcctacaaatcgagaggatcaatgcctattacagatcggcacactggcgaaagggacgttatcagagcaccgcttatggatcttgaaccttgtaccatggacagcattatatctggcccttacggtaagatatttcatcatgacaacttttttt

SEQ ID NO: 132678 - DNA, 113 bp, Glycine max
  Clone ID: PAT_MRT3847_90815C.1
aagctcgaattcggctcgatgaaaggtgcacccccagatttcctccccacgcgacacagacaggggagttcttgatatgagctgcgggtaacacactctacaatagatggtag

SEQ ID NO: 132679 - DNA, 396 bp, Glycine max
  unsure (1)..(396): unsure at all n locations
  Clone ID: PAT_MRT3847_90816C.1
ggaaaaacctaaccctaaccctaccgttagttctctgttctttgtcgttcttgtgtgattcaaaatccaagggtttgtcatggcgagaagacacagccgcagcagcgagtcgagtgaggatgacgtgaggaaacgccgtggtagtgaatctgaggatgaggagagggataggaggtatcggcgcggtggttggagtaataagaagagttccggtcaccgtagtagcagggagaacggtgatggcagtgattcgggagaagaaagaaatggtgctaagagggatggagaaaagctttctttctcattgcttctagtcattgtgatttgtgactctgtaaattgggttttgttgtanngatttaaatnngtctgaannaatgaaatgaatatcnnngg

SEQ ID NO: 132680 - DNA, 208 bp, Glycine max
  Clone ID: PAT_MRT3847_90817C.1
acccaggcgtccgagacgacagaaggggaccacattccggatgacaatcgcatacattgtagtcacacttttgtctcggaatgtgttcgtttgagtcatggcaagcttaatggttgcatgtgtggttttgacgtgcatggccgtcaggagtgcactaatgacggtgcaagccgtgtcatgtcgtgatgtgtcagtgaacctatcaacg

SEQ ID NO: 132681 - DNA, 459 bp, Glycine max
  Clone ID: PAT_MRT3847_90818C.1
cttgttgagttttgaattacgctacacacttcgtactccaacctcaaatccattacctacactgactctgagctttgaaccctgaactccatcgccgtcaaccgccgttttccgccgcttcaaccttctccgtccacttcaggtaattatgaagaattgaagatcatggtttaacaaagtggggtgtgaagagtgtgaagtgtgagctgtttctgtgggaaagttggagggcagaacgtgagaataccttccagagaagtagcaaagcagcaatgaatgaaccaaccctaatattggaggctctaacaactttgaaattaattacatagtgataagccacccatgatcttggctttacaaactcgctttagcataagcagaaatcaacgaattgagtttcttttcttcaaatatggatgagaacatgaaacagttccaaaagaaataacagaactggaa

SEQ ID NO: 132682 - DNA, 447 bp, Glycine max
  Clone ID: PAT_MRT3847_90819C.1
gctatatgtcaaagaaggaggaaaatgacccccaaaggactagaggaaattgaaagacaagtaaaggaattaaaagaagtgggattcatcagagaggtcagatatacagattggctaaccaacatcgtcctagtaaaaaaatagaacgttaaatggaaaatgtgtgttgactctattgatctgaacaagcattgatcgaaggactcatacatgctccccaacatatataaattgatggacggatccttcgtctattgatatatgagtttaaattcgaattcaaaatagaaattatagcagtttggcaaagaaaagaacatcaagatagttgaaatcattagatcgaactagttaggaatctattgaacacatgtcaaaatttgaagatttgactgatagtgttagttgtacaagtctataaataaaaactttggacaaccatttttg

SEQ ID NO: 132683 - DNA, 284 bp, Glycine max
  Clone ID: PAT_MRT3847_9081C.1
tactcgagccgaatcggctcgagcggctcgagcggctcgagctttactcaaaaatcaaacccgatactcctgggcttgcttccagtggaaaaagcttcaatcttttcgcttcaacaattcacttttgcaagctgtgttggtggcaattttgcttttgttctttcaattttgtggatgcactttgatttgtgttttttttatgaattttatttaaatgggtataaagggtttttatactgtcatcctatttatttacttttataataaggacgttgctagggtat

SEQ ID NO: 132684 - DNA, 245 bp, Glycine max
  Clone ID: PAT_MRT3847_90820C.1
attgttgagatttgttttgaaagggggaaacgtgaatggaaaataaagtaacaaaattgaaccaacattcacaggatggtttaaaactcctaagttgcattttgcactttgaaaagagactgcgcccactggttgcgaagggcctggaatctgttgggtgccaaagggcttggttcagggaaacactgggtgatataataaaacctagggtaataatatgtaagcagtcacattggtttgaaccg

SEQ ID NO: 132685 - DNA, 281 bp, Glycine max
  Clone ID: PAT_MRT3847_90821C.1
atcgaataatgtattttcaataatcaatcacatctgcttgccacatattttgttggttaaggagggaagctaacttttggtccaggccgggcatcgtattcccaccaagactgaactgctgactaggaacctagagactggggaaaacactactactgctgagaaggctgtcaaaaaaaaagacgtatacacttgtgcatatgctagcttttctaaaacgggatagcatgatgatatggagcacaaggcgattgtaaaaggatacaaatgcaaaattgaaa

SEQ ID NO: 132686 - DNA, 651 bp, Glycine max
  Clone ID: PAT_MRT3847_90822C.1
tcttgatcttggtcttgctgatgtgaaccacaaaaactataggggctatagtgtgctgcatgttgctgcaatgaggaaggagcctaagattatagtttctctcttgactaagggggcacagccttctgatctcactttggatggaagaaaagcccttcagatttcgaaacgtctcaccaaagctgtggattattataagtccacagaggaaggaaaagtttcatgcagtgacaggttgtgcatagagatattggagcaagctgagagaagggagcctttacttggagaggcatctctttctcttgctatggcaggggatgatttgcgcatgaaactgttgtacctagaaaatagagttggactggcgaaagtgttgtttcccatggaagcaaaggttattatggatatttctcaaattgatggcacatctgagtttccatcaacagacatgtactgtccaaatattagtgatcaccagaggacaactgtggacttaaacgatgcacctttcagaatgaaggaagaacatctagttaggttgagagcactgtctagaactgtggagttggggaaacgcttcttccctcgatgctcagaagtgttgaacaagatcatggatgctgatgacctaactcagcttacatgtatggg

SEQ ID NO: 132687 - DNA, 364 bp, Glycine max
  Clone ID: PAT_MRT3847_90823C.1
ctcaactcgcacctccatctccatttgtctgagcgcagcgcagctcatataccttgaaagattgcaccgtcaccctttaagatattgtcaatcaggcatgaaaatggggggacgctaacttcatggatgagatagactgccgtagctgctctgaccacatagacgaccttctcgagtctaccgccagggacgctgacggcagcgctgacaccttgccttacatcaacgtccgaaacagaaactcggtggcgagcatccaggccttcgagcacgacttgactcccgcctacgacttggtgttaaccggccacagtgcttctgaactgtccgacgagctattcgttcccgatgaagacattctgct

SEQ ID NO: 132688 - DNA, 511 bp, Glycine max
  Clone ID: PAT_MRT3847_90824C.1
ttaagagatggaacataaatcattacgttatatcgttggatagaaacaccacgtcagggcacattgattacaggcaaccaggttaacataggcggatatttagcgagctaaagacactgaatatacctaggcacggaagctctctttaccatggagtaaaacctgaccaaataaaagcagcatgaaagacaaaatctgaggccgacaactaaactataagattagccatgctaacattatatataatgggaggaagggggcatcatttctggaggaccaaccacatagtccagatgcttaatggaagctccagatggtgcttcaacactacaaggcaatgcatgcagtgtcctacgaaccatgaatatagaggttggtcattggagtaaacactgaaaccaaacttactgagctaggtaacactcacgatgtagagagcatcgaaagtgaatgcaggctcatgaatgctgacacaaacctttaggtgatcagggagacgacactcatccca

SEQ ID NO: 132689 - DNA, 363 bp, Glycine max
  Clone ID: PAT_MRT3847_90825C.1
tttttatatctattttaatttttatacattaattatgtaataatttatgggccatagggatattgtttgtatcaaccaaaaacaatatcaccggatcatgatgcatggcatgaaaacccggtcttcctgtaataattataacctaaaaaacctatatacctgccaactacataaataaaaagcctatagccaatagtattggccttttatctcccttcaaagcaaatcgcgatatcgcttttgttatttccaaaacataatcactggaaaatttcgttaggctgacataaaacctttcatagaaaatcatcaaccctcatataatgatacttgaaggcactataaagtttcgcacttgaaaaa

SEQ ID NO: 132690 - DNA, 380 bp, Glycine max
  Clone ID: PAT_MRT3847_90826C.1
ttcactactagttttcccacatgctttaactagcgcttttttttctttctattgtcattatccaatggcttcttctattcctctttatcaaccaaccaacaccttattctccaacacccagttcaaaggttcgcgccgtggcacagtgctgcaccccttaaaataaagcgtcttgcacatgatcctcaaaggttcgcttgggcagtaggtattgcacagtcacgatgtattaacatgcaaacgagaattggtgctctaaatcaagaagcaaatatgctgattccttatgctgatatgctgaaccattcatttgagccaaattgttttttccattggcgttttaaggacaggatgcttgaggctcttataaatgctggaca

SEQ ID NO: 132691 - DNA, 1752 bp, Glycine max
  Clone ID: PAT_MRT3847_90827C.1
atttcaagtaatcgtatttaaaataatagaataaattccaccgaacctttataaaagttacagcaatctatatctacatctagttagtggctcgagaaagtcctaccactactccacactttcttataagttataacaatcaacccactctcagattacgctctgttgaatgaaaagctaaggaatatgagaaggccatggaagcattctaagaacaaacatgatctctttgaatgtcttccggacgatctcgttgttcttattctttccaagctcagcgccaccgcttcatctccttccgatttcatcaacatcatcttaacatgcaagaggctaaaccgctcaggcctgcaccgtcttgtgttgtctaaagctgggcccaaagtattcgccataaagccgaaaaattggtcagaatatgctcactcttttctcaaacactgcgtcaatgccggtaacgtggatgcctgttacactctcggaatgatccgattttactgtttgaaaaaccgagggagcgggctctcgttaatggcgagcctgcgtaaccggtccggattcccggtcctctacgcgtccgcagtgattcagttaacggtagcggcggttcaaagcgcgataaagatctacgcgctggcgtggccttgtcggcgcgtgcatctttactcggccacatcgacgcgcttcgggagttaggccattgccttcaagacggatacggcgtgcggcagaacgtcaccgaggggagaaggctcctcgtgcaggccaacgtgcgcgagctcgcgtatgtcctacgcgccgtggcgcctccttcgcgctgctgcgacgagtcctcctcgctgctgacgtggggcgcgctgagatgtcagagaaaaaacaacaacgcggtgtcatcactggcgtgtccgttgctgagtgattacggttacagcgtggcgccgccggaagtgcaaccggcgaattggtttctgagagagtggtttgagtcaggtaaggggaaattagaagaaggactgaggctttgcgcgcacattgggtgcggtcgaccggagacgcggccacacgagtttcgccggtgttcggtttgcggcaaagtgaattactgttcacgtggatgtcaggcgctggattggaagttgcggcataagattgagtgttcgccggtggaaatgtacggtgatggtggtgttgatgtggagaatgagtttgtggtcccaaacgatgccgtttgaagaagtgtttcagcgacagaatcaatttctaaggttgaaaaataagaaaatagagaggaaaagaagcgattctataaattaaaaaaaaaatgtcaatcagttggtatgtactatgtacagatgaggtagtaacttttatatatatgtatatatatttatggacaactaagattaaaagttctttattataaaggtcctatgtatggggcgggtgctgcctcaagaaaggagcatgagaagccacacatgaatcgtcgttgaaattcaagttattgctattggtgatgaagaaaggcttgctatcactttgccttctctatttgcagaatagctgagattgagtttgatgtccttctgtgtatgcatgcgacaacagtggtcattttatctggaactctggatatatttagtcctaaactggcatatgtaggttttagtgtcgctttgcttttttttaaagaaaacattgctgcagtatctcagtttataatttagtatgatggaattcttcactttatct

SEQ ID NO: 132692 - DNA, 1893 bp, Glycine max
  Clone ID: PAT_MRT3847_90828C.1
atcactttaacttttccccctggcaccgaagactggataacgttttctctatacttattcctctgtttcttcttccttttctctagcataagctgcatcgcaccattcactactacttcgcacacatgctttaactttgcgcttctttccattttcaatatccaatggctctcttctattcatctttatcaaccaaccaacaccttattctccaaaacccagttcaagggctcgcgccgttggcttcttgtggaaacccagttactcgttcggctctcgtgctgaaaacagagcacgacccatcagagcttcggttggtgctcccccatttcccctgtttcagcctccccaagttgaagagacaacatcgtctgagttggagcccgctgatcctgatttctacaagattggttatgtccgaagtatgcgagcttatggagttcagtttaaagaagggccagatggttttggagtgtatgcttccaaagatgtagagcctcttcgccgagcaagggttataatggaaattcctcttgaattgatgttaaccataagcaagaagctcccgtggatgtgtttccctgatataattcccttggatcatccaatatttgatattatcaactcaacaaatccagagacagattgggacctaaggttagcatgccttctcttatgtgcatttgactgtgaaggcaacttttggcaattgtatggcgacttcttaccgagtgcagatgagtgcactagcttacttcttgcttcagaggaggaacttttggagctgcaggatcctgatcttgcttccactattagaaaacagcaacaacgatccttagaattctgggagaataactggcacagtgatgtaccccttaaaataaagcgtcttgcgcgtgatcctcaaaggtttgcttgggcagtaggtattgcacagtcacgatgtattaacatgcaaacgagaattggtgctctaaatcaagaagcaaatatgctgattccttatgctgatatgctgaaccattcatttgagccaaattgttttttccattggcgttttaaggacaggatgcttgaggttcttataaatgctggacagcagattaggaagggagatgagatgacagttaattacatgagtgctcagaagaatgacatgttcatgcaaagatatggattttcatcacccgtgaatccttgggacaagatcaaattctcaggcaatgcgcgtattcatttggattccttcttgtcaatcttcaatatatctggccttcctgaagagtattaccataataattgtctgtcaaaagccggagatagttttgttgatggagcagtcatagctgcagcacgaacattgccaacttggtcagatggggatgtgcctccaatccctagcatggaaagaaaggctgcgaaggagttgcaagatgaatgtcaaaagatgcttgcagaatttgctacaacctctaagcaagaccagaaattgctagattcaatggcagatgctacgaggacacttgaagctgcaataaagtatagattgcacaggaaattgttcatggagaaagttttccaagcattggagatgtatcaagagcaaatactgttctgatcccaatctactaacatgagaatagtcaggaaaattttgtaacactgtcgtatatacctgtaatcctgtgtcacttaaaacaatgctctttatccattaattgtaggttcttcattctgttgtgccttaccatttctttgtgccgttccttgatctagtgttaagcaaattaaaaaaagaaaaaaaaaagtgtaaaattatagttatatttatgtaaaatttcaaaaatacttttttttaatttattaatatattacattttttaatagtaaaaa

SEQ ID NO: 132693 - DNA, 693 bp, Glycine max
  Clone ID: PAT_MRT3847_90829C.1
gaattcgagctcggtacccggggatcctctagagtcgacctgcagaagaagaaaaaaaaataattaattttgttagaaatgtgaattgtgggattcgaaagtccgaactctccttcattctttaaaaaaaaaacctaaaacatttgactaattccataaataatacagttcaatgactaaccattccgagagtgtaacaggcatccacgttaccggcattgacgcagtgtttgagaaaagagtgagcatattctgaccaatttttcggctttatggcgaatactttgggcccagctttagacaacacaagacggtgcaggcctgagcggtttagcctcttgcatctgtgtttatgtttaacatggttagaaattatcatgtttattaaaagaataaataaaaacagtaaggaagagagaatttacgttaagatgatgttgatgaaatcggaaggagatgaagcggtggcgctgagcttggaaagaataagaacaacgagatcgtccggaagacattcaaagagatcatgtttgttcttagaatgcttccatggccttctcatattccttagcttttcattcaacagagcgtaatctgagagtgggttgattgttataacttataagaaagtgtagagtagtggtaggactttgtaacggcgaaacaaatgcgaagagaaggtggaggggcatt

SEQ ID NO: 132694 - DNA, 998 bp, Glycine max
  unsure (1)..(998): unsure at all n locations
  Clone ID: PAT_MRT3847_9082C.1
atttccctcgagagttctcattctctctctctctctcattaatttctctctctctacaattttctctatactccagctgtggtatttctgtccctgccaatacccccacctagtcccctcttctcaggctcaacagtcttttcccttctcttccaagctcacaaacacacacacccaagtgcttcattttccccttctttctaggaactttttttattatattaagggtgtttctctcagggtcgcattcggagttagagagcaacaaaaaaataaataaataataatcgcatatttaatttctctctctgttttcttgtgatgtacgtttctcaatgacgagaagttgacagcttcgccccccctcaatttctcgcgatatttctcaagatggaatcagtgaagccgtcggccgtgaccccgcgaaagaagttggcacgcaattttgcgaaggttcttcatgtcaaagcactgattggaattgcttcagttgatggattgaagaatgttatatctgatgcaaatctcaaggatgaagggaacattggtaagagtaaggctacactgaattggtctgagtcattcaatgaagatgatgatgaagaccttcaagagagagaagccaatgaagcacttttggcaaagcttttgctgcatttcaactgtaaagctgcatatgctgagcagtgctctctttgactgcattaagctgctgatcattgctctggaaaacttatctgagctaaaccatgggacgtttaatttctccctactctctacttttgggatttttcttttttcacaaaatctaattcatgatntcatgcctttatttattctatgaaatatttttctaaagaaaacatttgttataattggtgcgggtaatgttggtcgcaaaatgtaaccattagtggaaaaaattgccgtggctaaggggaaaggcatggcataagaatgcttcatttacgcatacttattaggtggtttctttggct

SEQ ID NO: 132695 - DNA, 604 bp, Glycine max
  Clone ID: PAT_MRT3847_90830C.1
catatttttcggccttttgttggatatagagaagtgagacttgtgagcaaagaatccaaacatcgtggtggagatcctctaatcctttgttttgtggattttgctaatccggcctgtgcagcaactgctctgagtgcattgcaaggttataaagttgatgaactcaatccagagtctagccacttgcggcttcagttctctcggtttcctggtcccagatctggacctggacctcgtggcaagaggtgagccagttcacggaaggcatttaggttttatgcttgtcataatgtcctcctttatctgtatcgttctggggtgagaattcacatgcaaatttagtcttttcctcctagtcctggctacaatcctagttatagagcttgcgaggtgcacatagtttttacaggctgaaatcaaactacaattgcattttgagcaaaatccaacatggagatttttgggatgggcctagtcaatttactgtgttgtataaatattgataattttagtatgaacctaattaaggtataatttattttatttattttcaataatatctgctatactggttgtgtgcttgtggcaaaaacttcagccacgg

SEQ ID NO: 132696 - DNA, 581 bp, Glycine max
  Clone ID: PAT_MRT3847_90831C.1
tagagaagtaaggcttgtgagcaaagaatccaaacatggtggtggagatcctctaatcctttgttttgtggattttgcaaatccggcatgtgcagcaactgctctgagtgcattgcaaggttataaagttgatgaactcaatcctgagtctagtcacaaacggcttcagttctctcggtttcctggtcccagatctggacctggacctcgtggcaagaggtgagctggtctactgaagacatttaggttttatgctggtcttccattatcaggggtgagaaatattcatgaatcagtgttcacatgcaaatttagtctctccctcccagtcctggctacaatcctagttgtagagctcgcgaggtgcacatagtatttttacaggctaatatcaaactacaattgcattatgagcaaaatctaacatggagatttttgggatgggcctagtcaatttactgtgttgtataaatattgataattttagtatgaacctatcagtcatattatgacatcacattattatatttattaatttattgattaaaaatctgattatccctatctaggtttctagaatc

SEQ ID NO: 132697 - DNA, 247 bp, Glycine max
  Clone ID: PAT_MRT3847_90832C.1
ctcaaataagagacccactcttaataacacgcgaattaaaacccgcgaacgaaatattactacgccgctaaaccctacaacattctcaaatacaataatccagagttatttaaataatactagtaatctaaaacttattactaacaatattaaatcttcacaccttaactttgcaaaatacaataacaccttttttaacattactttcactagagatcatacacaacctagaactaccagacctaat

SEQ ID NO: 132698 - DNA, 324 bp, Glycine max
  Clone ID: PAT_MRT3847_90833C.1
gtcacgactgtattgtctggcgatgaataatccgaaaaggggggatggttctcttggcaacaagggttgttaataaacagtaatgggtcagcgcagttcgaaggatgttcgtctacaaaattagaaacctctttctcgtattgaatggtttcaataagcgtatgtgcctatcataatgcagattgaatcgggcgatttcactcagactatcatgaatgctgggcattgagattattttatggatatactgaacagcattgattttttgattttacaatgcgaatctctaattattttgaacatactggtcttacatgttaagct

SEQ ID NO: 132699 - DNA, 271 bp, Glycine max
  Clone ID: PAT_MRT3847_90834C.1
ttccttgactcgacttccactgaatgagctcacagatcgcactccattgaacgttactactggtgtgttcacataggcctcgacacttatacactgctcctcaccggaaaactttgccatgcttaaccgctatggtgatacaactgaatctcacatcaacgccaaccctaaggcttcatacctggaagttgaccggactatccttacgcctggcagtttaaaaagtgttgatcaccactcggatcatccaaatcccttaagtatttttgaa

SEQ ID NO: 132700 - DNA, 285 bp, Glycine max
  Clone ID: PAT_MRT3847_90835C.1
atcaactctttcaaaggggagaacaaaaggaaagggaactgaacgcacaacggattattatagcaatggcctaacataaccaaagccggacaactgaagctggaaggctcctataggttgtacacaacatccttctccagagtgatgctctttaccaatatattgtggagaccaacgtctacccaaaagaacctggatgcatgaaagaactgtgcgagttgtcagctgaacacccatggtacatgatgacaacctgtgcagacgaaaggcaattattgaacatgc

SEQ ID NO: 132701 - DNA, 180 bp, Glycine max
  Clone ID: PAT_MRT3847_90836C.1
gggcgatgcaagctcacacggacaggtcggctcccggccccccagaaagcaccaggactggggcaaagcgcacccagcgcggccgatcggagcgcacacgcccgctcgggaagacagacagcaacagcgcgaggccgctgacctggaacccaaggacagcgagagggcccgcgccccaac

SEQ ID NO: 132702 - DNA, 254 bp, Glycine max
  Clone ID: PAT_MRT3847_90837C.1
caggcgagtgcttgtccatgtttgctagttttattatcttttttatactcctggaaacaacttgagtttctttgataaattgttatttgtatccgttgtgtaacatggggtgtggccatggttgtttaggatgaagtcttgattgctggatttggacaaaaaggtcatgctattttcaatagtttctctcaagtattatgaattttattttgaggtgaacaggttttatgaacaaatttgtatattttctagtt

SEQ ID NO: 132703 - DNA, 199 bp, Glycine max
  Clone ID: PAT_MRT3847_90838C.1
tccggaatatatatatgtgtgtgtgtggtgggttgacaggttgggtgtgacacacaatgtgaattgacatattggattctctatcttatctcgtcaaattgatagcgggctggtaccaacccgtgtgacccgacccattttgtcatctctaattgattttaataagattgtcttcgaatgagaaatacttatattctag

SEQ ID NO: 132704 - DNA, 448 bp, Glycine max
  Clone ID: PAT_MRT3847_90839C.1
gggcaacgagaataggaaggattgctttatggtgtcggtccaaccaggtggattagctaatctttagtggtcactaccatcctgtatcacatactatgactgttgaagctgataacttgacatggtggcctaagattttatttggctaacaaactgctgattatcctgggcggctggggccaaaccaataagaatcggcagccctccattgaaaacctcctattgcctgtagttattatggcaccggcatttgaagacgactctgttttggctttagtaacatggtaagatatcccttcaaagaaaacgccccagttgttgtcctgtgacatagatgcagcctctcatcattgactataactgactgccgcagatgtgcaagtgattagatagggaactcgagtgagaaggcattcgaacagaaattgtgatgttgcctctggaggat

SEQ ID NO: 132705 - DNA, 353 bp, Glycine max
  unsure (1)..(353): unsure at all n locations
  Clone ID: PAT_MRT3847_9083C.1
ngtnantcggacattctggcattcgacgcgatagaggtgtgattctcttgctcgtaacgacgagcacagtgatgcgtgtcagtacaagtaggcacagacctacagagcgtctattgaggtagcaaggctgtactgagtaggcatcggttatgctctgttactgcccaatctacccgtaccgcttgcttcaatgtggagctagaaccgtcagtggactggagcacaatcgctctgtaaccctacggttccagagaagccttgctcgcgcaggggggcatgcggccgtgaagagccttggcgatccggtggcactggcggagccgcctgatagtgacggtctggtcggtgatctg

SEQ ID NO: 132706 - DNA, 774 bp, Glycine max
  Clone ID: PAT_MRT3847_90840C.1
ccatgtcaatgctagtgattccactccccaaaccacatctgccttagaagttaatgccagcccaaaatcttggaaatggttgaattcggccaggaaggttttggtcattcatttatggggtgctgtcatctccttactcccatttttcctatgtcaagtacccaataccacaccaacaatgaactttgtattgtggggtttgctatcagcttttagcttgttaattttatacttgatattgggttcaccaatttttgaagctgctgcatctctacatgagaaaaacaagtgggctagcttaaagtctgtaactatatcaactgcattcatcggtttgtctctcatgtccgtcattaactttgctacagcagagattggggctttacttattgtcccaatttgtctgatggctagaccattgaagcttgattttcaagctaggagttggagaaccttactaagggcctcttgtaatattgctttaggttttattgtgtttcctccagttgcatttgttttactgaaaggtgcatttgaagatttttatggtatgaattttggtgactattggaactgggtggaatccctttgggtttggaacagtgcaacttacctctatgtaggtgttgttcacctaccatgctgggcactgtgtattcacattttatttcatccatgttgacatgtgctattactttatcgggacaagcaatttattatcttgatgtttatgttttcttctgaaatgaacaattgaacatcattcttctctgc

SEQ ID NO: 132707 - DNA, 541 bp, Glycine max
  Clone ID: PAT_MRT3847_90841C.1
ttttttttttttttttttttttttttttttttttttttttttttttttttttttttataaaaaagggaaaaggggccccaaacaaaaggagcaactaatcaacaaccacacccaaaaccgccgtaaaagggggcagcccaaaaaaaaaaaaacatggagaaaggggggggggggaaaacccccaaggaaattaataacccccaaaaaggaaacaataacgaaaaaggggccaaaaatacctttttaaacctctacaaaaacggaccccccgacgaccgcccggggggaccccccaataccggaccggcgcccccagggggcccacctgcccctaataaaaggcgaataaaaacccgggggacaaaaggtgacagaagcttcccgcggagaaaaagtatcagggggcaaagccccaccacaaactaccccggcgcaaaaaaagtaaagcccggggggcccccaaagggggggaaccccccacaatagcggggggccccacgcccgcctttcaaaagggaaaacacccgggccccccccacat

SEQ ID NO: 132708 - DNA, 242 bp, Glycine max
  Clone ID: PAT_MRT3847_90842C.1
gtttgttcttatattggcttgcttttatgttgttatattgagtcatgtttccgccctatgcgcggttcacttgcatgtctttccagtacgctggctgcttcgtacaggggaaatgtgaaggcattccccaaggatttctattttcttacacccaaactcactgcattcttgggttacaaggccggtatgactcacattgttataaaggtctacaagcctatctgaaagcctttctttccttt

SEQ ID NO: 132709 - DNA, 545 bp, Glycine max
  Clone ID: PAT_MRT3847_90843C.1
aatatgatcacagttgaaactacatcctacaatggaagcagtgactctgctgtgaatgttgatgatagctgtctaaacagtaggcaagaaaatggacttggtgaacataattcaaaactatcactcttgggacatggaccacatgggaaacaagttgtagaagatttactgaaggagtatggtgaagatggcatccaagcgttttgtcaaagatggcatccgagcgtttcatcaaagaaagaagacaccaagtcaacacactcttgagatgatttttaccagaacgaaaatgactgttttggtattaatttagctgaagattaaatttttattgtaaacatgtactgtagaaattgtttcggtttagataacctgaactgtggctatagtagttttcaattctataaaaggggtcctcaaaggcattgtgaggcaccctttttacatagacagttcagaaagaggttagagagggaagctctaagaaacaatctttgtaagcttttctttcttttcaaataaatttggtagttttctttgtcttt

SEQ ID NO: 132710 - DNA, 928 bp, Glycine max
  unsure (1)..(928): unsure at all n locations
  Clone ID: PAT_MRT3847_90844C.1
cggcttcttcccgcctcaaccgcctgtgggtctgtccccccctgccgctccgcctcgccctcttctttcccccccccgccgccgtcctcactctctgcgctggcgccgctgctagtgccccccccgtccccgctgtgctccctcctccccgcccccgtggggccggcggcggtgccgccgccgtcggggcgtgggccgcctcgatcgccagcgcggtagtctcctccctcgccgacatccccgccgctcccaccctccccgggctctggtggcgagtggtggctgtggcggtgtgggtgtgtttcttggtgtggctctctgcgtggcgggggactcctgccgcagtgccctccgtcgtgtgcttcctcttctgccctggcgtggtggtgttgctctcggccctggcgcctgctaggtcgtgggccctgcatcctctgctcatgcgggtgttctcgcgggttcctcctgctatggacacagaagatgaggcgtggctgtggctgtgtgtgtgtgtttcaaagtttggttctcttcttggggggggagttaaggcgtagatttctctgatttgtggttcgttttntgcactgtcaatgtggtgttgctctgtgccatggcttgtggaaggtgtttgatcattcaacatgagaagaagggtgtgttgaggggttttggtggagtcagtagtggaacttagaaagtgaagagaaagtggactggactacagacaaagtcaggggttcaagcagaagcagagtaccatggggtatttgtttattttgtgtgtgtgtgtgtgtgttttagtcttttaatattgataagagaaaatggagagataaggtagagagatggatagtatgtagattaaaaaaaaaaagaaaggattaattaattaagtttttaattcttaaaaaaaaaagaaaaaaaa

SEQ ID NO: 132711 - DNA, 162 bp, Glycine max
  Clone ID: PAT_MRT3847_90845C.1
atcatcctctctacttcccaaaaatcgatttcttttgctgctgtaatcctcatgctcattcaccaggtcatcacattacgggtttgctagtacttcactgtacttagtgtgtgagaaggtaattggcatgcatgacacaaaatgctattgcataagggcatc

SEQ ID NO: 132712 - DNA, 595 bp, Glycine max
  Clone ID: PAT_MRT3847_90846C.1
ccacgcgtccgcctcctcataacaaccactcataccacattagtcttatcattaacaagcttgcgtgcatgctctatcaccctcaaggaccgtgttgctttatccaaaccattttccacaattaacacagtctctaccatagtggatcctacttttgctagttcctgactactaaagggcccacagtgaaaatccaacaaagaaactgagggggacaaccctgcttctactgcccttgaattgagggacaagaaccttacaaactatcatctcaaaggtgcttctctatggctgaagcaaggaagaccatatcctattatccacatactccatctaattggatggaaaatgcaccatgtgcactaacccccaactattacttggctctgacactcttgcatgctcagaacgaataagactgactatctagcatccactaagccatcaacttacactgttctacagctctaactatagttcgatatcatttccccatgcctgcactcatgatgatacatgtgaatggaactgaatcctcaccacacaaggttcatactgcttaactaactgtgcaaacgcaagctcacatgctgcg

SEQ ID NO: 132713 - DNA, 363 bp, Glycine max
  unsure (1)..(363): unsure at all n locations
  Clone ID: PAT_MRT3847_90847C.1
ggaattcggcacgagggagagagagagagagagagagagagagagagagagagagagagagagagagagagagagagagagagagagagagagagagagagagagagagagagagagagagatattgtgggggttgggaatgtgattgtttttgtttgatgtgggtggtggacctagttggtgagatagcggtgactgcgatcgggtgttatggctcaaaaaaaagagaagggtggcacatctaaatgaaaaagtgncaaatggggtggtgggaagtaaaggaagataaagtggggtaagggaaaggagatggagaaggagaataactaggtgctgcattgaaatgctacctatgacaagctn

SEQ ID NO: 132714 - DNA, 228 bp, Glycine max
  Clone ID: PAT_MRT3847_90848C.1
caggtacagacggcgtgcgctcttcttgtgatttgtgatgcaagcaagcaaccaccctcacacacacacacacacacacacctccataaatctcttttgttcttcactccaacaaaacaaacaaggtttgcatttgcttaactggagacagattctgtagctggttccatcccaataaatctaatgattctggagtaactagctctcttctattggtttctgagttct

SEQ ID NO: 132715 - DNA, 322 bp, Glycine max
  Clone ID: PAT_MRT3847_90849C.1
cttacctgaaaaggtggccttatcattgctcactcctaatacactggcgtctactatttccagatttaatgcacccaactgagccggagcgcgaaaagatgtcttagtcaaactccaaattcatctgttttttatgaccagcgcggttccgttatacgtgtaaggcaagcggggatcttgctgcggctggattacgggctcaagtgggacgctacttctgtcggggacccgccggtggaggcgttcgatcccaaggtggattgcccgctttagcgagggagggcgaggcctgggcgaatggtgccttggggaccctgggggg

SEQ ID NO: 132716 - DNA, 430 bp, Glycine max
  Clone ID: PAT_MRT3847_9084C.1
acttgtgcacacccttttgaccttgtttcagtcttttctctttctctctctttatttaatctttcttttttatttaaataaataaagtagagcacaaaagaatctaggactatatatattaatttcgttcaaaaaaaggactatatattaattactaacgttgtcatcagtttataccagcttgtcctgagctagatgcgtgttggcatgcgtttcatcttcggctctcatcatttgcattgaattcctttccattcaacaaagggtattcagatttgcgttctgcacttctgctctttggttctggtggagctctcaaggcagaaaagagaaaatttgagagaaaaggagaataaattgttataaacatgagggattgcagagaaatctgcttgttcatctgtgacttatcaatcttgcccttggtatg

SEQ ID NO: 132717 - DNA, 482 bp, Glycine max
  Clone ID: PAT_MRT3847_90850C.1
ggtttttttgtaacattaaattgtcggcgatgattcaatatcatccgcgcttctgaggtttcgcgatgaagcataacggatcaaaatggttgaatttcttgatatgagccgtgtttttgatttgtaaatacatgtgaaattaattttggttgtacttttttttgtttgtttcaatttttggtgtgatggttggctgtgaggataaatgtttcagctttaatgccagttctgcttctgagaaatcgtgattgatagagctgtgatatattctgagtccgtatttatgaaactgcatcaaatatttcttttcgaatgttgttcatgcgtgtatctgtttttgaacttttgatatcaaattgtattaattgcgtgctttgcgttttatcttgatgggatggctattctatagggttacatgaagtaaaaatgaggttatactaactatgtagaaaatgattggaggaattaagaagtatgtcaat

SEQ ID NO: 132718 - DNA, 394 bp, Glycine max
  Clone ID: PAT_MRT3847_90851C.1
aacttccgaatgtgacatactctgcgccaacaactgtggcttcttctgtagcaccaccccgatgaacctctgctcgaaatgctacggctcgatcctcttgaacgagcaagaggaatctttgactaaatctacaatcgagaccgcgctctcttcttcctcgatgaacccgaccttctacacgtcacctcctacgttggtggatgtactcatcgaatcgccgtcgccgtctttggcagaggttgcggtcactgtggcggtggacgcgaccagtaatgtttgcacaacctaccgactggttgctcagcccaacctttgtgccacgtgtcggaagctcgagtcgctgacctggttcaagtgcaggtgctttattgacgatctgcggcgaccacaggtg

SEQ ID NO: 132719 - DNA, 490 bp, Glycine max
  Clone ID: PAT_MRT3847_90852C.1
gctaaaaacatacaacaatataatatactagttaaccttatagactaaaggaaaccatgtgcaaaccggatcctgcaccaatatgcggagccgaccagatcgtgcacggagaggggaaacgcctttcactttcttatgggcctctacaacgcaccaaggggcctctgcgtgtcgtagacaatttacaaacgatacgcattaactcaccgcgcttgagaccaatcttcgccgaatcaggcggcgtttcatgaaggttgtactacaccataaactaactgctgccaaaaaaggacccgtaaaacttcatatgaacctgttcaggcactggcacgttcctatacactcgcctattgatgtcattgccatgaacgataccgtgggtgtgaaacaatccttttaccttttaatagacgatccgatcctatgatcatcaaatgcttaagtcaacactatccgcagccacataatgtctgtcaatcgatagcaaata

SEQ ID NO: 132720 - DNA, 356 bp, Glycine max
  Clone ID: PAT_MRT3847_90853C.1
cccacgcgtacgcattcaccgccggactggccctctcctccattgtactctaggccggtctccgcggcggcgccgacatctcgacgctcaccccatgcaaggagtcgaagcagttaccgaatcgtgagaagcagtcaataaagaatctggagtcgccgctgaaactctacgaggcgggcagcgccctcgcactggccattaacgcaagcgttgagaacacaaataggaggttcgacaactacgcaaagcaagggttgctgtgcggcggctatgggttgccgcacctgatcgtgagcggagaccagaagcactgtggtgagttcaacacactccggatactatacctggacatctcg

SEQ ID NO: 132721 - DNA, 2022 bp, Glycine max
  Clone ID: PAT_MRT3847_90854C.1
ttttcaggcgtccgcacaacttcataaagtgtaacaaaaatcacaccacagatctgcacaacatgattcatgacacattagatctgtgtcattagtccttggtttatcaaaccaccacaattacaccgatcaaaaacacaaaacactactcatcacatcttattcacatcacatccactttcattactacatcattttccacttcacaatcttcacaccacacacacacacacacacaacacaacacaatcatggaagttgatggtaggtttctgaacactggcctcctccttgtggccacaatccttgtggtcaagctcatctcagccttcatagtgcccaaatccagaaagagggtacccccaattgtgaaggggtggcccttaattggaggactcatccgtttcctcaaaggtccaatctttatgctccgtgacgagtaccctaagcttggaagtgtcttcactctcaaactcttccacaagaacatcaccttcctcattggccctgaggtttctgcacacttcttcaaggcctcagagactgatctcagccagcaagaggtgtatcagttcaatgtgccaacttttggacctggggtggtctttgatgttgattactctgtgaggcaagaacagttcaggttcttcactgaggctcttagggccaacaagctcaagggttatgtcaatcagatggttgcagaagctgaggactatttctcaaagtggggaccaagtggtgaggttgatttgaagtatgagcttgagcatctgatcatcttgacagccagtagatgtctcttggggcgtgaagttcgtgacaagctctttgatgatgtctctgcattgttccacgaccttgataatgggatgcttccaatcagtgttctcttcccatacctgccaatcccagctcacatgcgccgtgaccaggcaccgcgctcagaattcggctcgcgttgcaagcatcataacatctcgcaaaagtgcaagcaaatcagaagaagacatgctgcagtgcttcattgactcaaaatacaaagatggtcgctcaacaacagaagctgaagtgactgggcttctcattgctgcactttttgccggtcaacacacaagctcgattacctccacttggactggggcatatctgctgtctaacaaccagtacctttcagctgtgcaggaggagcagaagatgttgatagaaaagcatggggacagagttgatcatgatgttttggctgaaatggatgtgctgtataggtgcatcaaagaagctttgagactccatcctcctctaatcatgctgatgagaagctcacacactgattttagtgtcacaacacgagaggggaaagagtatgacattcccaagggtcatataattgccacatcacctgcttttgcaaacaggctaggtcatgttttcaaagaccctgataggtatgatcccgatcgatttgctgtggggagggaagaggacaaggtggcaggtgcattctcatacatttcatttggagggggcagacatggatgccttggggagccatttgcatatctgcagataaaagcaatatggactcatctgcttaggaattttgagctggagttggtgtcaccttttccagagatcgattggaatgccatggttgtgggagtgaaggggaaagtgatggtccgatataagcggaaggagctttcagttaatcaataggaccacataattcagtgtctggcatgattttattttaagcagttattgttagtcttttctggttcagcttctgtcaaagttcgttgtttatttggcaatgaatatctagaatcttgattttgatttttttttcttctaattctattaagtgattttaacttatttttgtttgtgtatttgatgctactatgatgcaattagttacttgggttgaagtgaaatggtcagagtaaaatgttgcatgggatatttgaaccaaaaaaaaaaaaaaaaaaaaaagctttaaaagaatccaggctaaggaag

SEQ ID NO: 132722 - DNA, 1021 bp, Glycine max
  Clone ID: PAT_MRT3847_90855C.1
gtcggccacgcggtcggccaagccttcggttaaaccttttttaaaactctttaaaatccccctttcccagttcccaacttcatttcaaatggctcgagagaaaattgtgctaaagttggaaatccatgacgacaaaaccaagaaaaaggccatgagggcagtatctggtatttcaggtataaaatctcaacatctaataatcgttctcatgttagttactatatatatgcttttttatgcttagttaatcaagggtaaaaaatcatatgttatacaaaattgaattttttggggtcattttttcaggggtggagacagtctcagtggacatgaatgacctgaaaatgactataattgggaatgttgatgctgtaatagtagttggcaagcttagaaaatgttgtgatcatgctgatatactatcagttggaccagccaaagaggagaagaaagaggaaccaaagaaagatgagaagaagccagatgacaagatagatccaaaggaggaatatgctgaacttctgaacgccttttataatcagaccagacagcagcaatcccccccttattatcacagaacagtggaagaggatccaactagctgtgttatttgctaagtattggaatatcatatggagtttgaaatgatggataataaaatgagatcaagaaaagatggtggctgcatggagttgaagaagaattatgtttcttttggagttccctttttccttcttttctttcttatgttttggtctttcaggctttcctcttgttttagttcataaaagaaaagaaaaaaaaaggagtctaaaactgagatatataatatgtaaattattttgtggtgtagtacaatcaatgtattcaaatttctggcagtgagaaattggttttattaaattcaggtgttcaattcttaatctgtggtttgtgttgttccttttgagaattaaacatggcaaaggaggcaccagggggcaaaacataaaagtcaaaagacaaagtaaaagattttttg

SEQ ID NO: 132723 - DNA, 452 bp, Glycine max
  Clone ID: PAT_MRT3847_90856C.1
cccacgcgtccgaaatttttatatttctttccccacaattagagagatcatcatggaaaaggatatcattgatctttctccaacatgggattgtgacaatggcaattccactgagaaaaggctcaggctatttggctttgagctaaacccttcatcaaaagagggttgtgccaaagaatctggtgaaggagatgaaagtgtgaactcctctaactcagcttcttctggaggagacaaaactgtgcaagagaaaacatcagccaaagaccctgatgagagaaaatctgagtgccaatattgttacaaggaatttgcaaactcccaagccctaggggggcaccaaaatgctcacacgatagagagaatgaagaagaagaggttgcagcttcaatccataaaccgttacctacaacaccctttccaaagcaaccatgggcttgcttacccttctg

SEQ ID NO: 132724 - DNA, 295 bp, Glycine max
  unsure (1)..(295): unsure at all n locations
  Clone ID: PAT_MRT3847_90857C.1
aagaataaaaccttttcatattaccaatctaagatgaacaaacatgtctttaccaaaaaatatcacaatcattgccaaccatctgtggcacaaaataaatctaagacgaacaaaaacatgtctaccgaaaaaataccaccggatcgggggcgacacatattatgtggcacaaaatatctaatactagcagacttgcaccatatcaagttctttacattgttgccggagaaattattttttggacaattttggtgtctctatcaacttggaattgaccgtngaatcattccacatt

SEQ ID NO: 132725 - DNA, 241 bp, Glycine max
  Clone ID: PAT_MRT3847_90858C.1
acacgaacatgcatctacgacatttgattattaaggtgcacgatcattcataaaccattttattgttcacacagtcacacttggagaaccataactaaaatttctcattattgaacatgaactggaggctgaatagattaaacctgatgccacagcacctttttcaagatcatacgatgtgccctcgttcacggtgtatataaaaataatccactataggccaagacgccatccaattcat

SEQ ID NO: 132726 - DNA, 126 bp, Glycine max
  Clone ID: PAT_MRT3847_90859C.1
gggatcactctagcttttactacactgacagcaagcacgaactgatacccctcaagttctacgccccatgtagtgttcaatttgacaagcttgcatttaagtgggagaatgctgcctggaagttga

SEQ ID NO: 132727 - DNA, 327 bp, Glycine max
  Clone ID: PAT_MRT3847_9085C.1
gagctgcggcatctaggctacatgtaaaaccataatgtcgttcatgtgatgagaatcaatccttggggcgcgcgcacatctatcacaggaatgagatactctctctctgcaccctttcaaccataaccgcatataccttattcatcattccactgataaatggctaccactactactccactatctctcaccatcaactacaaaaacccacaccacccacccttagccaattgcatatcctatcctgcccacatcaattctaaggaatacccactttttcttgattatgcattacccctttatcactccacttttaatgtgaaacat

SEQ ID NO: 132728 - DNA, 493 bp, Glycine max
  Clone ID: PAT_MRT3847_90860C.1
tttttatatttgtttttttttttttcaaacatcaaaagtcattttgtaccaaatcaaggattgatttgtaggtaaggcatattgtgaattccactgtccagaactgccattagatggacctaaatcttcatatttaaggccaacctgatatgtccactgctgggaggagagatcaacagggcttccattcttcaaacctttcagtattactggaccagtgatccctgcaccccatgtgtcaaaaaaagctccatagttctgaagtcccacagttaaactcaggagatcaattgaattcttcccagccactagtgggacggggatgtccacattgactttagctttgccactgttgccaggtccactccctgcaatcttcccatttatgaaagcatgaagggcatgaccaagggattcaatgtgaaggacagtttgaaaaccataatcaccttcaacatcaatgcttatcgagtaccataagtaatcactttta

SEQ ID NO: 132729 - DNA, 458 bp, Glycine max
  Clone ID: PAT_MRT3847_90861C.1
tgggctgatttatgtgcttgcatggtcgtgagaagatgatagacggggatcgcgtccaccgccagggcccgtaattctaacgggtcgggaagaactcttactcccttactgatgacgaagaagaatgaggaatgtagtgacaactagagtacgaagaagaaataaacaacgacgaagaagaagaatgccctgaggccgggtggaagcggttccctgtctaatgtccctgttaatgtaaaacctaagaatagctatcacaatttagttactacaaagaagtaaagggagcctcacaaaaacgtcaagaacgcgaacaagcccaagaagccggcaaagtagtaaaattagtagaacgaatttctcctggtctagagatacacagagccctcgcccgtccccatagaacgcaaacgaaatcgaaaagaataaggatgacagcgagaggaaggaagaggaag

SEQ ID NO: 132730 - DNA, 1141 bp, Glycine max
  Clone ID: PAT_MRT3847_90862C.1
accaggagaaccccatcttgtgacaaaagtggaatgaggaaaggtacttggacactggaggaagataggaagttaattgcatatgttactaggtatggctcctggaattggcgccaacttcccaggtttgcaggtctggcaagatgtgggaaaagttgtagattgagatggatcgaatatctaaggcctgatgtcaaaagggggaacttcactcaacaagaagaagaattcatcatcagaatgcacaaaaaacttggtaacagatggtctaccattgcggctgagttaccaggaagaacagataacgaaataaagaaccattggcacaccacactcaagaagaggtctcaacaaaacacactcacaaaggaagaagctagagcctccaaatcaaaggataaggtacttcccaacaagggtgttactgttactcttccagctacttcttcccagatttcagataattcatcattatcgccagcttcatccaccagcagcgagttttccaacataacttcagatccttccactgctgccagcatgcaaaatttggtgtttgaagatgatgatgagttcggttttctggattcatacattgatcctatgaataatgaaagtttctggaaagagctaactctggatgacatttcctttaataatgtaccaatagtttcagaagataccaatggctgttttcaaagtacaagttctagcaatagcaacacccttgattctctgcataaatcaaccagcgaaagtattgttgcggataatgactttggcggctttttcgatgcatacgcagaagcaaccgttgacaacttttggacacaaccatatgtggctggcatgtcctcccacgttccaactgaactacttgctccctccgttgcagaatctgaatattttactccaatatatgatgatctgtggggccaaactcatttgtattattagcttatattctgatatacaaaaaatagtgcttgttcagtttgagagtaactactactattatacacagtcatgaataatgataattattgttacttattgcaggtgtgtattagtcgggttaataaacgagagtgtatatatatataaataaagtatgtatattgaagttgctttagggtaaaaa

SEQ ID NO: 132731 - DNA, 2297 bp, Glycine max
  Clone ID: PAT_MRT3847_90863C.1
gttggtctcaaaatgagcatccggaaggtatatcgtttgtttatgtttcccggtagagtagttattagtttgcattagatgtcatcattccatatcataattcaatttcaaagaagcagttgtagaatgcaaatgcaatgtgctataatcatttgccatatgtaaattatatgtttctcatgaaaggttgtcttgaaagtattgaatgagccattattttttctattcttcaacatttatttcttattcttcatttttaatgtgatttatacactgaagatgaatgttccttgtctctttgtttgtacaatcatggtaatgatgctatagagagacacttggactgaaatccctcctctttaattttcttttttagatgtagtttttttcattgcagggctcacatattacaggcttccatagctgatggtgttttgttagatgatattggccccgagaaaaatattgagttgctacaaaatgctattacttctactactcttttaggaagcataatcatgttcatccctttatcaatgtaccaattaattatggcagcaaatctataaatatgaagatgaataatttttgtgcacagtttaaaattgtgtaatttgaaggaatttgcaatacttaagagactagtatttatacaattactttgttatcttaaaatttctaatacttaggaactattcatataatttccaatacttttggcactatttacgaaaaagtaatagtttagggaccaaattgatggatattcaaattattattgtataatggtttttccattagtttaattactttatcgcaatattattattagtcattggcatgtgtttctaggatataatgtgacatctttgtacgtctagtttttttttgttaagaaaaatctctactaattttgaaatcctacatttttttaattactgttttctaggagctattcccattttctttcatattcttgatatgttatccaagtccaatatctttctcgcatccttttttcttgaactcttctgaaaatgattgcagtgatagtaggtcatcgtttattatcttactatgatgattcactttaattaaattccatgtgcattgattgattaaatgttcctgaactaagtcatttattatcttacatgtgcatttatttctacatcctacaccttcacacttcacacatctagtaacagtaagtgatagtaaattaagaattaatagtgtacatataaaactccttatatttgatttatttagttggatataacattttatattagaataacattaatatattttttgtaagatggttatggttggttcattgtaaaaataaataaaatatttgaaaattttgcaaaaaaataacattggttcggtaagaaccgatgtcgtaagcacattcaatatcggttttttcaaaaaccgatgttatatataattttcaacatcggttttttacagaaccgatgtagaaagtatttcagaatatacaattcaatatcagtttttttcaaaaactgatgttgtatataactttcaacattgggttttacagaaccgatgtagaaagtatttcagaatatacaattcaacatcggtttatcggaaaaatcaatattgtaagtgcaccacaacatcgattttcttaaaaaccgatgtcatatagtgtattttaaccgatttttataaccgatgttaacgttcatacttttaacattggttcgaaaccgatgttgaatgtccaaaataaccgatgttaaaagtgttttttctagtagtgtccattttgtaataccattggtggatggggtgctgcatcttatttgatttcctattcttatttataggcaagcatgttcatagcttagctcatgcaacttctggatatcacaaagttcttgaagaaaatagcaaactatacaatcaagttcatgatcttaagggttctctggactaaaatgtattttatatatatatatatatatatatatatatatatatatatatagtatactattcaattacggctggaatcaagtcaagccgccaagacaagtgttcataatcttcagaatttagaatgcgcttataatagtgaatcatcagaaaaaattgattagtatcaattcatatgtgaacaaaaggttataaatctaaacttttcatgttcttggtaattcaaattctaggtcacaaataattaagacgttgttgaagtcaaaagcattattattgtatttctgaataaatttcccaaacatgattttatcggtaaaacc

SEQ ID NO: 132732 - DNA, 256 bp, Glycine max
  Clone ID: PAT_MRT3847_90864C.1
cgcttaattacccacacgcgggctcggcgagacatgtgatgctttcctaagattcggtgttccagtaacaaacctctggactgaacacgagagagatcttgaatggcataagaagtgtaaggtgcactgttgagaaacagacatcgatctgctgttgagcttgcaaagcgagctcctgaatttgaaaaacatgttgctcacaaaagcctcaaggatcaaattcctgctgttgtcaagtgtgattctactaaggttg

SEQ ID NO: 132733 - DNA, 1674 bp, Glycine max
  Clone ID: PAT_MRT3847_90865C.1
gcacatgttggtctcaaaatgagcatccggaaggtatatcgtttgtttatgtttcccggtagagtagttattagtttgcattagatgtcatcgttccatatcataattcaatttcaaagaagcaattgcagagtacaaatgcagtgtgctgtaatcatttgccatagtaatgtaaattattatgcatgtttctcgtgaaaggttgtcttgaaagtattgaatgagcaattattttttctattcttcaatatttatttcttattcttcattttcaatgtgatttatacactgaaaatgaatgttccttgtctttctgtttgtacagtcatggtaatgatgttatagagagacacttgtactgaaatccctcctctttaattttctttatttagatgtagttttgtttcattgcagggatgcgggtcagtaacttgagcaagaagaaagaaagagaagatgatagtaggtgtgtgcaataaaatttgattttcatttggagagacagagtagtgagtagtgagagggcgaagcgatgaatgccccagatcgttacgagcgtttcgtcgtccctgaaggcaccaaaaaggtttcttatgagagggacacgaagatcatcaatgcggcgtccttcaccatcgagagagaggagcacactatcggcaacatcctccgcatgcagctgcacagagaccccaatgtcttgtttgccggatacaagcttcctcatcctcttcaatacaaaattattgtcaggatacacaccactagtcagtcttcgccaatgcaggcatataaccagtctggttaatgatctggacagggaacttgatcatttgaagagtggcctttgagggcagagatgttgaagttttctagggactattgatatacggccaagatggacggtgttgcgttacaagccctggcagatattgagatagcaaatcccttctgctaaatggaatttaaataggatgcttttgagtgttttgggaaatttgttaaatatgggtgtgttggaggaattttaataattgtgatttgtgaacaattacgaagttagcaaaaatgcattaatattagcaactgcatcatataatgctagttatggacatattagtaaatatctgtcacatggatcttatatataatggtcttattgtagaattatttactgtgccaagtatacgccgttgagggcattgtctggtaacatctggtagcaaaatgagggaagggctcacatagtacaggcttccatagctgatggtgttttgtcaggtaatactgaccccaagaaaaatattgagttgctacaagatgctattgcttctattactctcttaggaagcataatcacgtccatccctttatcgaggtaccaattaattatggcaacaaatctataaacatgaagatgaataatttttgtggacagtttaaaattgtgtaatttgaaggaatttgcaatacttaagagactagtatttatacaattactttgttatcttaaaatttctaatacttaggaactattcatataatttcccatacttttggcactgtttataaaaaagtaatagtttagggaccaaattgatggtcattcagattatcattgtataatggtttttccattagtttaattactttatcgcaatattattattagtc

SEQ ID NO: 132734 - DNA, 1032 bp, Glycine max
  Clone ID: PAT_MRT3847_90866C.1
aactactgctatacaagacaagtattgtgttgaagactgtgggtggccttctcaagattatgcatccgagtgcaaaatcaactttcttactggtaaaacacatcagattcgagctcaatttgctgcctataaggcaccattaattggtgattctatgtatatgccagctgcaattgcggatgtgagtaatcctggacttaatccatttggaaaatacaagaaagatttcagtagtgagagtgaaaaagaaacagctgttgtaaattggatggcacaacatggaaaagagccgagtgttgcaattggccttcaagcatgtcaaatttcatgggatgatgatgaacacttttatgaagctggtttaccttggtggaggtgttaaaatgcttgaaatgtgtgcttggattgaggataaggatctttatagctaatgttttcatctttcctcagttttacatgcagatattcagaaggtggaagactggtcacggatcactgtatactggtttctcctgctgtggtgtaagaatgatgcaatattttcttgaggttgtagaggggaggcaatgagactatcgctggtttgaaaagagaaacccaaataaatggaaaagaagaggagcttcatatagggatttaaatcgtgcatgctgtcatatactggtgactggtgagccttgtaccaccctttctagcagaatcaagtctgaacaggtaaaccagatgtttggatcttcacggataaagaagtctttttgaaaagagagtttaattcatgtattttactaggagattgaaagaactaagaaaatgttgtaacttattggaaacatctgatcaggctgtgttattaatgccttaagctcgcatcaacctcaaattgtttgtactggcatttcccattctctgtcgtgttttggcaagggagccttgtttatgcttggcaatcaattgcttgtactaacttggtagtggttttggaattcttttcaaacagttttaatcttatagtaatatctcagttgtaatgcc

SEQ ID NO: 132735 - DNA, 294 bp, Glycine max
  Clone ID: PAT_MRT3847_90867C.1
gatgtatcgaaggccactgtgtgaattcgatccaatttagacaattctcaactccctgactagtcattgcagcactacgctgcagaagtgcccattacaatgaataaatcataatatctaagtaaatacaggagtataaaaaatacgtactgtggtcttatttttatgcactcacaatgctttaacttctgtgggctttcaataacttagaaacaacttttatgctctcggtccacaatcgtgaatgctagaagcacatttacaagtgctcacagagtatgcgctcatttaact

SEQ ID NO: 132736 - DNA, 414 bp, Glycine max
  Clone ID: PAT_MRT3847_90868C.1
gcatgatgtctcaatggtggctggaggtggcatggcttatattggagagaaaggagttaacttatcaagtggacagagagctcatcttgctttggcaaggtgctagcttcatgttctcttttcaatttgtgtagccaatcccattgacaataactttgtagttcacatttcatgatatatatgtatgtgaagaatgtatatatttcaaatcctactacatttattttcatgataagaaaaggtaggcaattcttatataaaaaaaattattatatatctcctttattattattgtaagttgtaaataaacatgttgtacatatacatatgtaatcctttattatatttataactttttaattatatttaaataaatttttaatttaatttgtatatatttataacgttttaatt

SEQ ID NO: 132737 - DNA, 137 bp, Glycine max
  Clone ID: PAT_MRT3847_90869C.1
ttccgtctacttggcacatcgtatagtccttttgttttactctgccttttttttctccttggatactacggtactcgactatttcctagtgattatatccgttatgaaattaaataccttattgccaaggtttctgc

SEQ ID NO: 132738 - DNA, 452 bp, Glycine max
  Clone ID: PAT_MRT3847_9086C.1
gcacgaggattttttgtcagagagaaagttctcaccaaaactactcaatgttgtccatgttcctgctatggatcaaccagctgatattctgaccaaggctctatccccttcttcatttctttcattcaggtccaagctcagagtagttgaaagacattcttccaacccctcatgggcttgcgggggaattataagagagtatacattactcgcagtgtttctttttttgtttctttcagttaactttttttcaaactactgtagttagtagttagtagttagtctgttatcagttgatagtttagtcagttagtgcctaacagatttgtaacagctgtcaactaacctaagttagttgacagttaggttagttggcagttatccaactaaatattcatctttgtaattagttacagttgggttgaataatattgattttctcaatctcaaaa

SEQ ID NO: 132739 - DNA, 273 bp, Glycine max
  Clone ID: PAT_MRT3847_90870C.1
gcaaaaagaggctaaatctcgaaatgaacaacgtgtgtggctaggccgagcgtatgcaataagcggcaggagactacagactggggaaagatgagctagaaggggctcttgaacaggaggcgggaaaacagcattcctcctacagaagtagcacaagaacagatgaagaatcttccctacatatcatacctctgttagttgggggtataataatccgccttattacccaacagcttggaggattgtcctaccgtatactattgaggagattcc

SEQ ID NO: 132740 - DNA, 893 bp, Glycine max
  Clone ID: PAT_MRT3847_90871C.1
ctttaataaaaggggggtgcgtttggttgggggtggtggaaagaaaggcgctaaaagcagaaagcagagaattggtgagtaagatagccgctacagaagagaaacaagaagcaaatggcttctttccatctcagaagattagtaagcagcgttcttaactcgcgggtgcaaacaaatccccttttgaccttcaggtgcttctgttctcctcctgttacacctttcacttcccatgctagttacgaccctaactccatccacttgtccaaccaagaaagcaaaagacgcttgttcaacaggctattatacagaagcaagcagcgagggttcctcgaactcgatttggttctcggaaaatgggtagaggacaatattcactccttggatgaatatcgcgttcgagctctcattcttctcctcgacttggagaatccagatttatggaagtggatatctggacaagagcaacccccagaatcaatccacataaacccagtctttgccgcagtgcgagaaggagttatgaagaatcttgagagtcattctgctcctgaaacaagagcaacacctggcaaaccatgggtaagaggctgggatgatatcaagaaatttccgggtggttccattactgggaatcagtagctttagaaaaatcttttcattagtgacaatgaaaaaatatctggtctaccatatttttcacaataaataagggctgggtaactgcaacataaaggtttgtattaaccactagagatctgtaaaggggtgaaaccgtgaaactagaagattgtgatcgactttctgttaaacttttgttcaccatttgcactgtatatctattttgagtgttgtatgttgtggcttgaaaaacttgagtctggatttttctt

SEQ ID NO: 132741 - DNA, 465 bp, Glycine max
  Clone ID: PAT_MRT3847_90872C.1
ctgcttgggggggggggggggggggggggggggggggggggggggggggggggggggggggggccggggggggggggggggggggggggggggggggggggggggggggtttaaaaaaccctaaaaggggtttttggaaaaaacccccccaattttagcccaatttccccagaggttttaaaaaagcgcttacccgcattacactgggaaaaagggagatttttccccccaaaaagccgtgcttgcccttaatccccaaccccaaaaagcctttttttaagggggggaaaaaatccctttggccccttttggggccgccttttaaggcccccaattttcccccccctaggcccaaacccccaaatttccctaaaaaaaagcccctattaccccaatttccccccaagaaattttttcccaaaaaggcccctctttatggaagcccttggggggccctttaaaccc

SEQ ID NO: 132742 - DNA, 656 bp, Glycine max
  Clone ID: PAT_MRT3847_90873C.1
catcatcaattagggtgttgacggataaagttggactaaaacaattatccaattctaataatcttttatgagttgactgagtcgaatttatattgataaacttcatctaaatcaattcgatcataaaagaattgattgggtaaagtgattcggtttaaacatttaaaagttattttttatttttttaaaattaaaattttttagatcaataatttatttttatctaaagttttgtaaatatataatgattaaatacattaaaaaaattaaattgtgataatatataactaataaaattaatggttttaatgttaatataatatttttattttagataaaaataaaatattgtgttaatatgaaaaaacataaacaaaataaagataaagatgaaaataatagcttaaaaaagaaaaaaaaatcatggtgatttactttaataatttaataaactatgttagttaaaaattaacatattttatatttaataatttaatttatatataataataaatttaattagatgttacgggttgaattgagttttaaaaatagaacttgttactcgatttgtacattaattgaattgattctgaattcgatccttttaacaaatcctaaccgaactaatttggattagattcataaattatcta

SEQ ID NO: 132743 - DNA, 378 bp, Glycine max
  Clone ID: PAT_MRT3847_90874C.1
aaaaagaaaaaaaaaagtaattagcataacgtagagcgtccattgcccgtcgcttacacattacaaatggttgcaattaaataaaatagaatcacaattcacgaatcactatatatatataataaccataaaataaaaaacaaaggaaccattcagtagcaatactaactaaaaaacatgggttcctagcatgcatatgaggcgttgttactctgtacaacatctatttccttattatatattgatattacgcttatgttcaaaagcacaccaaactaaagaacctacgctttcattcttccatcaagcagaaagcttctgctgaacatggatgctttccctttcattcttacattcttggtgagcttacacaaactt

SEQ ID NO: 132744 - DNA, 488 bp, Glycine max
  Clone ID: PAT_MRT3847_90875C.1
ccactcgcgcgagctaaacaagaaagctatatgactgttgagagccgtacacacaacgaagcactaggggctggatcagtttgggaaatatgcatctcaatacatagatgcataacttgtctgatataacactggccactgggggactgatgataaaccttttaaagggctcgactatcaccaagatggtctccatgtgtatcctgaattaaacctcttggatgcattgaaaaaacctttaaacacttgcagcaagcgactggatgccaacatacatgcagacacaaccatggtcttcttgacaggctattctggttctcatgccaggggtggacaatggaaatcacggacacattgtgattgtcaaactgattcacttgacaatgagaactgtctagccgactatcgcgatctaatgaaggttatggctaaggcgctaaagaatatagaaacccatgtgatctaccgaaacatcactaaaaagacag

SEQ ID NO: 132745 - DNA, 135 bp, Glycine max
  unsure (1)..(135): unsure at all n locations
  Clone ID: PAT_MRT3847_90876C.1
caattgcncgnacgcntacgnaagcncngnattcggctcgagncaccaccgaaccctntnaatcgagacacntnactcattcccanncnacanangatnnnancntanncgncngnnagcanngccnnnanagat

SEQ ID NO: 132746 - DNA, 530 bp, Glycine max
  Clone ID: PAT_MRT3847_90877C.1
ttcagatctttgataccaatttatatgggtcttgttccatttaaaggccagagcttctgctgacctttctttatgtttcattctttcaatttactctgtgaattgtgggagggtggaagggaattagggagttattctttaatataggaagttcagttttcaaagaggttacttacattccttggatcagttgcattgtatgttattgttatccgtaaatgaaatagcagaataagatggcaaaaaacaaaaacagaaatttaaagaaggagaaaatcatgtcatgtactattttgcttatgcatacagagcaatggactgttagttgccgctctactctgtggttcgggaccattaccacaacaggtcaattattctggttaatttctatgtgatatgggattttcaatttagaagaatgagaaattattatgtgtgagacgggctttgtaatttacaagaacgagttaataaaattttattatgcatgagtttgaatgcagtgtatctgattaaaaaaaaaaaaaaaa

SEQ ID NO: 132747 - DNA, 364 bp, Glycine max
  Clone ID: PAT_MRT3847_90878C.1
ggcaaaaaaaaacaaacagaatgtggaattcctttttaacaactttttttgtacatttggaaaatgccaaaaattttggatgcattggtttaatgggacttgactttttaactacacatgtttgtcatattctatgttaaggggaaaattttttcaaaaaagaccctttttttttaatcaggcgcttaaataagcattccaatccattttcaatttcataaagggccaccaccaaagcttttaaccttccatgggcaaattgaattttttaagcctcagcatttttgctcaaattggccacaatcaaactgttaagggcaaaatccaccttttccaactcatttattttttccggaagatgggg

SEQ ID NO: 132748 - DNA, 321 bp, Glycine max
  Clone ID: PAT_MRT3847_90879C.1
gttcagacaaggaggaagagtttcattggctaatcaagtaaggtttatccataacatgatgtaatcattttatttgtatttgtggcctattttatgtgaaaagtaacatgtgtaataattttatttgaatttgtggcaaaatttcaaaattactggtgtcatgatgctgtaactgtgtggtgacggtagggttatgtttggacaatttaaatggactgatgggttgaaaggtggcatttcaaaatagttaaatactaaattgtcagacatggatagatttatcataatttaggtgcataatgaagtgatgaacagagccat

SEQ ID NO: 132749 - DNA, 313 bp, Glycine max
  Clone ID: PAT_MRT3847_9087C.1
gagagaactagtctcgagtttttattgtttaacattcttttttaaaattccaaaattttaaattgtacttataaaattactttccccaattaaaattttccgtccaaacatagcatatagtaatttattcttccctctcttctattttgggggcactatacacatcacttgtgtttatacagtgcaccacaatatatcccaaaatggagcccaatagatttattaacagaattgaactcctagttttggtctatgaaatttaaggggagaaagggtgccccataccaaaatcaagatatgccactagcatccg

SEQ ID NO: 132750 - DNA, 1065 bp, Glycine max
  Clone ID: PAT_MRT3847_90880C.1
attttcttcttcttcaccccactgtcactgcgcaaacccagttctcccgttaccccctctcccttgctcctgatcttttcccgcgcttcctttaccctgattttgaatactagccgttggatctgccatttttattttttttaccgttgctctcgccggagtgaacgggaaatgtctgcgtccgaagcggagaagaaggtcgaggaggaagagaagaaccaagaggtcaaagggggagaactcttgttctgcggtgccacgtgttgggatatcattggtcgtcgcaaaggcgccgtcgacggtaacctcgtctctcccacgcgtccgcccacgcgtccgatggatgatggaaattccctagcatttggatggaacaaacatggacaactaggttctggttctgtgagaaatgaaattgagtcatcacctgttcgctgtcttgtgtctgaagtaaaacatactgcttgtggtggtgacttcactgtgtggttatcttccattgaaggagcttctatactgactgctgggcttccacagtatgggcagcttgggcatggaacagataatgagtataattccaaagacagctctgtgaggttggtttatgaaccccagccacgtcctcgagcaattgctgctcttgctggggaagcaattgtcaaagtggcatgtggaacaaatcatacagtggcggtggataagaatggcttcgtctacacgtggggttttggtggttatggaaggctaggacatagggagcagaaggatgagtgggtcccacgacgtgttgaagtttttcaaaatagaaatgttttgccacccgatgcaatcatatcagcaggttctgtgaattcttcatgtactgcaggtggagggcagttgtatatgtggggcaaattaaagaacactggtgatgactggatgtatccaaagcctctaatggatttaagtggttggaatctactatgcatggattcaggcaatatgcaccattttgttggggctgattcctcttgcataagttggggacatgctcagaatggagagctgggatatggacctact

SEQ ID NO: 132751 - DNA, 2264 bp, Glycine max
  Clone ID: PAT_MRT3847_90881C.1
ttcttactcgtcctcactcggtaaaattgaattagggtttcattttcttcttcttcaccccactgtcactgcgcaaatccagttctccccttaccctctccctcggtcctgatcttttcccgccatttcccgcgtttcttttacccagattttgaatactagccgttggatctgccatttttttcaatttttttcgaccgttgctctcgccggagtgaacgggaaatgtctgcgtccgaagcggagaagaaggtcgaggaggaagagaagaaggaagaggtcaaagggggagaactcctgttctgtggtgccacttgttgggatatcattggtcgtcgtaaaggccccgtcgacggtaacctcgtctctccctcgcgcctccgtcctctcgtcggcgtcgatattcgctacgtcgcctccggctgcgtgtcttgtcattgcgtggcgttggacgttgaagggcgttgttatacatggggacgtaatgagaaagggcaactgggtcatggagatacgattcagcgtgataggccaactgtggtgtctgaactttccaaatacaaaattgtcaaagctggatcagggaggagccatacagttgttgttacggatgatggaaattccctagcatttggatggaacaaacatggacaactaggttctggttctgtgagaaatgaaattgagtcatcacctgttcgctgtcttgtgtctgaagtaaaacatactgcttgtggtggtgacttcactgtgtggttatcttccattgaaggagcttctatactgactgctgggcttccacagtatgggcagcttgggcatggaacagataatgagtataattccaaagacagctctgtgaggttggtttatgaaccccagccacgtcctcgagcaattgctgctcttgctggggaagcaattgtcaaagtggcatgtggaacaaatcatacaggtggttgttattccttgcttgatcttggttatataaccttatttactacttttccttaatgtttttgttttggatatttagtggcggtggataagaatggcttcgtctacacgtggggttttggtggttatggaaggctaggacatagggagcagaaggatgagtgggtcccacgacgtgttgaagtttttcaaaatagaaatgttttgccacccgatgcaatcatatcagcaggttctgtgaattcttcatgtactgcaggtggagggcagttgtatatgtggggcaaattaaagaacactggtgatgactggatgtatccaaagcctctaatggatttaagtggttggaatctactatgcatggattcaggcaatatgcaccattttgttggggctgattcctcttgcataagttggggacatgctcagaatggagagctgggatatggacctactggacagaagtcttcagctgtacccaagaaggtggatttacttgagggtatgcatgtaataagtgttgcttgtggtatgggtcattccatggttattgttgatagagcaaatgttgctgatcgacttgaccagcttgatatatatgatgggaaagctgttggtgaaggtaatgaggccgtaaacacaactccagtgcctaagcaggctgctaaaaagggtgcaaaaggagctgacaattcaaagaagaggaaacaatcaaaagattcatctgactcagatgaggatgctgaagaaagtgaggaggatagtgaggatcaaattaatggtgaggctgaggcgaaaaggccacgtggttctggtaaaggccgaggtaagacacccaaaaagtcaggtgctaagggaaaagggtcggtctctggccgtggtcggggtgggactgcagctaataaaaacagttctaaatcccctcaggtgaaatctggtaagagaggaagaccccgtaagtcataacttagatttttgtcggaaattttgttctctatacctagagaatgtagcgtgtaattcattggcaggtgattatacttagtgttttgttgttattataattcaatcccgctaactatttaattcaaagtttagaaacatgttgaatttgctaactgttttttaagacgcagtgggaagaattgcccgcttgttataattttttttttttttgtaaggggacgcttttattgcttcagtttaccataagcctttggatgtgccctctctatcttgtataccttaattgttctgctaacttggtgggatgcttgttgataaagtttgactgtttgaggcggatt

SEQ ID NO: 132752 - DNA, 636 bp, Glycine max
  Clone ID: PAT_MRT3847_90882C.1
caaaaaagatatttaagggtaatacaaattttatacaaagaaaatgtgaaaaaatactcccatatgctaaaagcagttacgcttcccaaataaggccagctaggctagattgttttttttgtttgttttgttttgttttgagggcgggaattcacaaattttctctctctcctgttttcttctagcgtttcttcctttcttctctagtaggggtaaactgcctgaacaacgcgcagcttggcattctcttatcaacaatgaagagaaagtaaacggagactaaaatgtacaacggaatgtactggaatgatatacagttaatttcttttttctgatatacacacatcaccttttgcttcgatcgatgctcgctttacacaacatacaaaatggaactacagcagacgtagcgttaacggacagcatgtcgggtcctggctttctctcacactgcctgtgtttcatgcttacataaaaacgtagaactccagcagataaataatacatacatgctccatccccgggctggcgtgggcttcgtggcctcgccgtgcacctttgctttttgagtccttgcttctgagaagcacgtcttcacaaatccatgtggggtgttatgggaaaaaacttggccga

SEQ ID NO: 132753 - DNA, 497 bp, Glycine max
  unsure (1)..(497): unsure at all n locations
  Clone ID: PAT_MRT3847_90883C.1
ccgtccggttgctaggatctgcgaggctgaccgccgtgggcgtgactgtctgtgggcggacgcccgtggtgctgacccgggtggngtaatcatanngctatggcgagtacggcgcagtgcacacgttgttgcggtattcaatttaagaaaccttngcttcggctgtgcagtataatctcctcgcgaatcttggggcgttcttgagcctcnntcgtctgaacgtnngcctcagnnnatctgcttccccaacattggccacctcacactccctcaactggcttcttccctttccccacaaccccttccctaaatcgttgccaagagagctgctgtcccttcacttggaaagggaaatcaaacagtggccaactaaagtatcaattttcaatatcacnaagtacaaagaaacctggcagtttggtgaacccttcagtaccaagagaactttcggtgggaagccagggaaagcgctacgtaaaagcttcgttttgtcaact

SEQ ID NO: 132754 - DNA, 1066 bp, Glycine max
  Clone ID: PAT_MRT3847_90884C.1
gaattccggcatagtccgagtgtcgtaaaattttaatcacgtcctaacacattaagtttggcaatttgctaaacttttttcattttgttacctaaaaatgaggggacaacacatactggagaagagatgacgaatagaacaaaaggcttgctgtgtgcaatccttgggccactgttgtggggaattaatagtgtcgtagttgacatgttatttgcgcagggcgtcaatgcgcgttggtttgccacctttcgattgatagtggcaggcgcggtcttgctcgtttgggcctacttgaaacaggggaatcaaatttttgcgccgtttaagcgctggcgagatgccggccatttgttaatattctcgttttttggcatgttatttgtccaatacacttatattatggcgattgaagcggggaatgccgctaccgcaacggtattacaatttacgaatccaattatgattgccattttcttggcgattcgacattggcaactgccagcccgacaagatgttatcgccattatttttgcagttgtcggcacggtcttaattgccacacatggtcaaattggcaccctggcaatgtcgacccccgcattagtttgggggctgctagctggtgttggcgcagtcttttatacgttattgccgcatcaactgattacaaaatttggcgcagtcacggtgagtgcctgggcgatggcgattagtggcattgggattaattttgtgaatccggtttgggttgacgcgccagattggcgtttaccagtcattgggctgcttagcttttcaattctgattgggacagcgtttgcttatgtcgtgtttattcagagtttggcttggattaaaccaacggtggccagcacattaggtgccctggaaccgttgatggggacgatattaagcatcctgattttccatatcgcatttggcgtggcggacatgattggctcaatcttaattattagcaccgtctttattcaagcgttgcgtcgaacaatcttctaaaaaggtgtgtggtgttatgttagaaatagcatgccatcacgcttttttt

SEQ ID NO: 132755 - DNA, 340 bp, Glycine max
  unsure (1)..(340): unsure at all n locations
  Clone ID: PAT_MRT3847_90885C.1
gatgatggtgaagaccagaatgattttgtggacattttgctttcgattcaagagactaacaccacagatttccagattgatagaacattcgtcaagactttggtcatggtaagaagatctatcttagtaatgtattctttaaaacctattttttaacatttcttattgatttaaattaatgtggatttcactaattagaggtgaaattcattcaagaagtgtaacccacttagttagtgaaatccaggtgaatttcatctaatacanaaagtatgtaaagactaaagagcattgaaaattaaagaatgtgttgataacatttttctttctaatatatctc

SEQ ID NO: 132756 - DNA, 395 bp, Glycine max
  unsure (1)..(395): unsure at all n locations
  Clone ID: PAT_MRT3847_90886C.1
ctgaaacagtgagagaaaccgatgtgaaaatagatagggtggatgaagaactannnatcggccagtggaagaaaatgaacagatggaaaaccatctttttgggtatttccctatttctttaataaagataccagctcctctctctctaatacacacactggtgatacaggtgtgatggaaaccctatatctgatagcttgaaactttattttgtatgagggaattcaatacaactagtgacccttgtataaaacgataggaactattatgaataaaaaagnnnnnnttcatgatttttaaaatttaatnnnnnnatgatttgtcaaatgaacttgttaatgagtattatagaataaatgcatcaatactcaggaaatgggaatgtggaatgtatc

SEQ ID NO: 132757 - DNA, 233 bp, Glycine max
  unsure (1)..(233): unsure at all n locations
  Clone ID: PAT_MRT3847_90887C.1
tacactaacattgagatatgatttttctatttgactggggctgataaatacccatcgacgatcgcgataagttattcatatgctncttaaaccgcgcgacctggggcaactacatcatctgtaagcccaccccaaaaaaaaagagtctaccagagcttttaaactaaaaaattgtaggataaaactccctcttttcttaacaaaaaagaatggcgggttggttgttaaactct

SEQ ID NO: 132758 - DNA, 410 bp, Glycine max
  Clone ID: PAT_MRT3847_90888C.1
acgcccatgatctcattttaggtggccttcagaactcaagctatacataactgtaaaacaggcaggttttacatcccccgccttgtttttactaattgaagaacagacatgtagcaaacagatgccgagtaagcaaagggtctcccgcaagctaatagaactcacagctgcacacggctataatatagccaccttctactaccagagtttgatcttgccccacaatttcccagcctatgtgaccaggaccatttggcatttgctttgccagaggatcaaattggccagctaatattggaggggtcatgcaaaacctgaaccgagccttccgaactggagagatgaactgatcctttggattctaaggcattcccacacatgaacgaaatggtggcctgacatcagggttg

SEQ ID NO: 132759 - DNA, 431 bp, Glycine max
  Clone ID: PAT_MRT3847_90889C.1
gcactggtggcattcttcaacaatttgcaaggtactgcaaattcaaaccctttgtctgcaacttttgaggactgtggttacaatgaagttcctggtaattggaatgctaacaagtttcctaaagctccagagattcatggaactgggtgtcagccttattcttctttagcaaatcttgatccaaatgaatggacatcatcaaatctagcaaacatggccaatcatgctaaccattcctctagctttagtaaggaactttctctaagtctcgcaacatcgacaaccacaggacaatgctcagaggtaagttgctctaatgtgaccccatgcatgaatggaaccatgtcaggcttggagcaagccttctgcggaagtagtagggaactttctatgaacttgggtggtgataaatatgtacagtttctcaccaa

SEQ ID NO: 132760 - DNA, 362 bp, Glycine max
  Clone ID: PAT_MRT3847_9088C.1
gtgaatgattactttggtaaggatgtttggagatctgtgcatgaattaagctacagcaatgtaggaacatggatatacagagagcccttgacaggctttacaataaatgcgatggagcaggttcggtcaagaagaccaatgaaacatttggatgggtttttggcttggaaaccctttgttggtcacttgtcaaacttttccttttgggattattttttggtaattttttatttctatatatgcctttggattgaatattctctggaattaggtaaccttcatgcatttctttcggaagataaattagttggtttatttttagcatgtttaactttgttgttttttccttttgacttttttgt

SEQ ID NO: 132761 - DNA, 637 bp, Glycine max
  Clone ID: PAT_MRT3847_90890C.1
ccacgcgtccgcttctatcttcggaaacgctttcaggaacgggatccgttaatcagcccgcggagggaatgcctgttcctcccgcaaatccggtcgtggagcaagccggtccggcaaatccggaagataccactgaaatcataggtggagactctattgactcgataaggaaccgcctcttacagtcatacgggaatccttcggcggagcaaatctctcgcgcctcgtatgacgccgatgatctctttcaggttaaagtggagatcataagggggatgactccacttgatcctgaaggggattggccggggcggggggctcgggcactcgataaccctcgaacgagcacgggcgaggattccctcgagaacctctatcgactaaaggacgacctgaatgagaatgggcgggactccgagacctttaaaagattgaaagacaaagtttttcgaagacctcgacctttagaagatgcaaattctactacttaaacagacctaaaaggactaagtagtagaatttgggctctcactcccatgaatcagatagtgccatacgtcccaccacaaccgtccgatcctttgatggagaagaacagtccccttgaacgggcaggtaataagttgagtagggacaa

SEQ ID NO: 132762 - DNA, 1196 bp, Glycine max
  Clone ID: PAT_MRT3847_90891C.1
actggaaatatggggagagtgaagcttccgatcaaaaagattgagaacacaaccaataggcaagtcactttctccaagaggaggaatggactcatcaagaaagcttacgaactttctgttctttgtgatgttgatgtggctctcatcatgttttccccatcaggaagagccactttcttctctggcaacaaaagcattgaagaaattctagaacgatatgttaatctttcggagggtgaacacggaaggatgcataataaagagcacattcaaaagttgcttagtaagttgaaagatgaagctggtcaaatatgtcaagcccctagctcaatgacttcagattcccaaattgaggatcttcgaagagaaattttcacttgcaagtctcaattggaagagatggagaagcgactaaggatatttgaaggtgatccttcagagatcacaacgctcagcgaggctgaatatcgtgaatatgtccttcgggatactctaaaacaagtgcaactgcgaaagtgtgttttggaggagtacaattctcatgccactcattctccacaggtacatgctgcaaaaactgtagatgtaaatggatttatttccagagcctcaaagaacccagtagattggtttccacagggagatccactacatgtccagactctgaactttgcgaatgtttatgacactgctcttgtcagagatcaacaatcacatcattgcacggttgttgatatgttaacaccaacttcgacccttctgcattccgcaaacatggatctgaatggccaaatgaatccgaggagtagtttagacgctggcattagtaatacattacatccccagtttggacaagctattcacaccaattcgtcctcttggcagcatcttaatcctttagggagtagaactttatcgattgcagagacaagggaagtgcaactcttgaacagtgtttttctcaatttacccggtcaaacatcttaatacctgaacaatcaagatcaacatcgatcatgatatatggtctctggaaaactagaaagttgttgaacagagaaagaaggcaaaacttgaacatgtattttcatttccttaattaacaccagatgaaatagaatgttttcaatgcgtcattgttttttttgtttggcttcaatgtctatgacttgtagatattatgcattaaaatttta

SEQ ID NO: 132763 - DNA, 300 bp, Glycine max
  unsure (1)..(300): unsure at all n locations
  Clone ID: PAT_MRT3847_90892C.1
ccgtccgcgccacgtcgtcgcgctctatagggaggactagcantctcatgngagagagagatggagtgatgactaagtgtgaaataatgacacaccactggcgcaggaaacatttgagatagactatccatcaagaccactgatatacataggatgcatgagaacgggtcctgtactattcaacaatggggggaggtaccactaactggattactggaaacaaggacggctggactcacatacttccagagtgccacaagccaggatcatgcctttacaagaagaaagcttgcatacctg

SEQ ID NO: 132764 - DNA, 297 bp, Glycine max
  Clone ID: PAT_MRT3847_90893C.1
aaatggagtctcactgtcatacaatgttggacggaaatttgaatttctattcaaatttcaccgtcactctgaaggttacattctaaagtcaactttagagccacgatttcactcattaagattatcaaatttcagcaattcgttcagcccacgaattccaacatcaagttcaggaatcaccatgaagtgtaccttggtgtcaccatgcatgtaaaccatgaatggtatacacacagtgtgactataagatgtggacatgtaatgtatcacacaaatgctcagctcggacttacgttg

SEQ ID NO: 132765 - DNA, 329 bp, Glycine max
  Clone ID: PAT_MRT3847_90894C.1
gtaaaataccataacccaccattggccaccgtgggaggcgacggtgatcagaagctcggttccctcgtacatagctggggacttcgtgcggccgataaagcacagcacgtgccgttcccgggaatatcttcgacgcctgagcggagggagtgacaagcgtcgtatgtgtaagcgctctatctgtctccaaagaaaaaacagaccccacatggagaatctgtgtccggcacttggtgtgcctgaaaagacgcaatcttgtgggtcatctaagatgaaaaacgagagtggggcaccgagattggacaacgcttcttgcaatgggaagtgct

SEQ ID NO: 132766 - DNA, 376 bp, Glycine max
  Clone ID: PAT_MRT3847_90895C.1
tgcagcattcttcagattcaaagcccaaaaaaagaaaaaaagttatggtgtctgaggatcttgggcagaaggctatgcatttgcattctccattagtactgactcctgttgtaagcagccacatatctactgctgttgccacttcaacccctgttgggagtgtgcccataactactgttgaaaaatcagttttgtctgtacctccgctatctcttgctgatcacctcaaaagtgagtggaatgttgagaagaggattctgtcagataagtctcttacaaaaattaaggaggcaagggtaaatgcagaggaagcttcagctctttctgtgctgctgtgaatcatagcctggagatttggatacagttggataagcaa

SEQ ID NO: 132767 - DNA, 223 bp, Glycine max
  Clone ID: PAT_MRT3847_90896C.1
atgctattttccagattcttcatctcccttgatcttactattggtttttcctggccatagttattgtgaatgttgatgaccacgttaaacaggtcatgataaagaattcttgtagcccatcctatgcattttatcgggttgactcatactaaataagtattgtccctattttagaactttaaataacccctatggcatattaatccctatgataatgatgaag

SEQ ID NO: 132768 - DNA, 301 bp, Glycine max
  Clone ID: PAT_MRT3847_90897C.1
cttatcacattattatttatttttagaatcgtgttctagggggtcaaatataaacgtaatggtggtataccatacttcatttttttacaaattttcatttatataaacttacaattgcataagcaacctaaacaactgaaaaagcattgttaacgtttctaggatactacaacagctttgttaaaattttcctttatcggcccaataacatgttctgcacaaataccttctctggcttaacattatgctttttcaaaattgaaccgagctattaattatcaaacttgttgtatgactttct

SEQ ID NO: 132769 - DNA, 175 bp, Glycine max
  Clone ID: PAT_MRT3847_90898C.1
acgagcatctattcccccccttttcacctgcaattctgtggagttggatagttagtttagagatttttgtgactaccactatcttgtggggaatggaaggcattttttgtgttgaataaaagaataactaccctttataattttacatggtgaggaagatcaagtgactgataaa

SEQ ID NO: 132770 - DNA, 478 bp, Glycine max
  Clone ID: PAT_MRT3847_90899C.1
tacggctgcgagaagacgacagaagggccctccgtcgcatttcattctttctgcataaaatttgtagtattactcttcacaatttattgatggtcattcgtccagatcaactctaaaactgaaaagaaagaagaaaaaagagcataaaaaagagcacgcacgtaggcaattatatgcgtggctgaaattttttgtaatttatgcaagtatatgttaagcacatggaatcggagtttcaaaatggaattaaacaatgaaaatataattaattatctagaattctttaaagttgaaattacaattctaaaaactacttcaatgggattttagtataattaaagcaaatatttcatttcgttatttataccatttgaatcataatttttaacctcactttcatactgtaaaattggtcttttttttatttgaccatcaccattatcgttacaatcaaatttttattactattaactaatta

SEQ ID NO: 132771 - DNA, 1657 bp, Glycine max
  Clone ID: PAT_MRT3847_9089C.1
ggctcgacttcacgctgacacacactacacaaacccctaaccttccttccttccattcactactactccttcactttacttcaaaatttcacccttccaaatccccaacttttacaattttactattagaatttaccatctctctttctcttcctcaatccaatccaatccaatcccctctcaatcgaagcaagaaaaccatgtatttatcggagaagcctcgtcccatcgatttctacaaggaggaaggcgcgcgcgacatgatgatcgaggtcgtctccaacggcgacctccctcctccgccgccgccgccgccgatgattctcggcgagagcagcggcgaggaccccgaggtcgagatcaaggccccgaagaagcgcgccgagacctgggtccaggacgagacgcgctctctcattggccttcgccgcgagatggacgcgctcttcaacacctccaagtccaacaagcacctgtgggagcagatatcggcgaagatgagggagaaaggtttcgatcgttctccaaccatgtgcaccgataagtggcgcaacctcttgaaggagttcaagaaggccaagcaccaggaccgagggagtggttccgccaagatgtcgtattacaaggagattgacgagatcctcagagagaggagcaagaatgtgcagtataaaagccctactcctccgcccaaggttgattcctttatgcagtttgctgataaaggtattgacgataccagtatctcttttgggcctgttgaagctactggaagaccaacactgaatcttgagagaagtttggatcatgatggacatcctcttgccattaccacagctgatgctgttgcagcaagtggagtccctccttggaattggagagagactcctggaaacggtggagaaagtcagtcatgttgtggaagggttatatcagttaaatggggtgattatacaaggcgaataggtattgatggcaccccagaagccattaaagaagcaattagggctgcttttaggttgagaactaaacgtacattttggttggaggatgaagatcagattatcagaagtattgaccgtgaaatgcctttaggaaattacactcttcacattgatgaaggaatggccattaaattacctctctatgatgagcctgaccatatacctgtgcatactgaagataagatattttacactgaagacgatttccgtgattttctgacccgccggggttggatatgtctaagagaatttgacagctacagaaatattgacaacatggatgatcttcgacctggtgccatatatcgtggtgtgagttgaaagcaggtacatggtgtggtcaatgttcagctaccataaaatgtctggagaactgtggtggggactgttcagatctttgatgtatgtgcggcactaacctggaattgtatttgttttaagttttgataatgctgtttatagttttatataggaaaaggaactagtccctttgcacaaattccgttccaatcattggccttaacatgtctgtaaatatgcatttgcagtgagaacatattgtctaattttatagtggatcattttcatcactcttaactctatgtagctaagttggacagatgcatattatgaagcacacacctttcttgttc

SEQ ID NO: 132772 - DNA, 598 bp, Glycine max
  Clone ID: PAT_MRT3847_908C.1
attcgagctcggtacccggggatcctctagagtcgacctgcaggagacctcgtgtctgggaagttcacacctttgaagatgacgcggagcacaatgagaggggacgaactatccattgaactactgaaagacattgaggactacatacctgacctcatcgaacactactatgactatgcataattcctcatgaggcttaaaagaacttgcttacgctgcttgattgcattgagagaaaacgtctgtagcaaatagccaagtaattacaacgtgtgacctcaataattgctagtaccctgtaggtgcttatggagagacacagccataatacagaaatgatagttctaatgctaagacggacatgcaagtagtccttgcaagaaatacatctgggaaaaagtgcagatgacctatgtgagaaacaacttacatctatggctctcattacaaactcaggccattcatgacaatccctcaacggattgtgttgtaaaaccatcattacaccttcacttgaccatagctatctgaacgtacctagctaagagattaatatctgtgtgaccctcgctaaacctaccaatcaatgcatggatat

SEQ ID NO: 132773 - DNA, 223 bp, Glycine max
  unsure (1)..(223): unsure at all n locations
  Clone ID: PAT_MRT3847_90900C.1
aattgggctcgagcaaacaggccatggcttgcagcactgcatcccgctggtattgacctgcttatcgagtttcttaatgctcgggatgaccccaaggctgtatctagtcctgaaatatcatntttttattgcaagattatggtgagtcaagctgatgatgtgcttggaatcacatcttctaaagtcggcgtgcaatgatttgggcctgatttgtatgctatga

SEQ ID NO: 132774 - DNA, 128 bp, Glycine max
  Clone ID: PAT_MRT3847_90901C.1
agagagagggaggaagtcagggaactctgaggtaggaggaaaagatgccgcttgtcaagggtttgaaaccccgaacagaaaattcctcttttggacttttaaggagaatgggaccattggccttaaca

SEQ ID NO: 132775 - DNA, 387 bp, Glycine max
  Clone ID: PAT_MRT3847_90902C.1
gagctgttgaagtaaggattatcagtgttgatataaagacagtacttgttttacatcgtgggtccaattttcatagcaaggaagggccctgcgcccgatgtgttacatcttcgaatgaacactggctgtggtgccccgtctactcaggtgaaaagcgcaagtagattgcttgttgtgtgagcacacactatctcttgctttgagaccatacctaaagagtgcgtagaggcatcaaatgaatatattcatggcgaacaatatttatcagacttcaaaacaggcaatcaacatgcttacttttatgccatagacctctaaattcatcccaaggacacatttgtgttccatataatatggaccggactctctaatattccatactacaaa

SEQ ID NO: 132776 - DNA, 190 bp, Glycine max
  Clone ID: PAT_MRT3847_90903C.1
cgagctctccaagatcgagggggggaggctctcgatagcgcacggattgacggggatttcccggaaacagaaagcggcgctaaaagaggctgaccagaagaagaagcattggcccctagacctacttcccaaaaagacccgcgccattcggagacgccttaccaaacaccaggcgcctatgaagacggat

SEQ ID NO: 132777 - DNA, 581 bp, Glycine max
  Clone ID: PAT_MRT3847_90904C.1
gcacgagcgggtctctatccatcaaacaaacatctgcatatatagagagagagaagaaccatggctggtggtcggttccaatctcttctccatgccacttcaagatcctccttggtaaagtctagcagtagcaggccattcttcaacaacattatgaattatgggcaagcgagcaatggaactggaaaccgtagtaaccgtttgatggaagagagggcaccttccacagctgaagagttccaaagagttgcagaggaaaaagccaaggaaaccaaggaagaggtggcaaatcagaatgttgaaaagtcatatgatggtgcacaagaagagggtactaaggttcaatctgtccagaacagctacaaatagcatcaattgccaaattacaatgtagaaacctactttctcaactatgagatctctattctatctatgtaataataataataagattattgtgttattttcctagagatcccttgtaacttgtaagcgtttctgcagcagcagaagaaactaaacaatttaccggcttcggtcttttattaattattactcatattattaattattaaaaaaaa

SEQ ID NO: 132778 - DNA, 1948 bp, Glycine max
  Clone ID: PAT_MRT3847_90905C.1
cccatttgaaaaaaattgcattgattcctattaaaacagccaatacaccactctcaccccctaactcaaaatgtccttcttttcctcctccaacctggccaccgccaagacggtgctctcggcggcggcctcggtggctgccaccgcaatggtggtccgctccgtggcgagcgacctcctcccgtcggagctccggtcctacatcaccaacggcatccacagcatgttctggcgcttctcctccgagataaccctggtcatcgacgagttcgacggcctcctcaacaaccaaatctacgaggccgccgaaacctacctcggcgccaaaatctctcccaacacacgcagacttaaagtcagcaagcccgagacagacacaaccttcgccctcacaatggagcgcaacgagtccttaaccgacgttttcagaagcatgaaatttaactgggttctcgtctgccgtcaggtcgagtccagaggcttccacaaccctcgcgacctcaacgccaccatgaaatccgaggttcgctccctcgaactcacttttaacaagaagcataaagacatggtgctccaaacctatcttccctatatcctcaacgaagccaagtccatgaaacaagctacaaaagcgcttaagatcttcacagtcgactaccagaacatgtacggcaacatcagcgacgcgtgggtggggatgaagctggaccatcccgccacgttcgacacgctggcgatggagcgtggcgcgaaggagtttgtcatgagggacttggagaggttcgtaaagaggaaggagtattataggagagttgggaaggcgtggaagagagggtatttgctgtatggtcctcccggcaccgggaaatcgagcttgattgctgccatggcgaattacttgaagtttgatgtgtatgatttggagctgacggagctgaatgctaactcggagctcaggaggttgctcattgcaatggcgaataggtccattcttgttgtggaggacattgattgcactgttgagtttcatgatcggagagctgaggccagagctgcttctggacataacaacgacagacaggttacactatcgggtttgcttaatttcattgatgggttatggtcaagttgtggggatgagaggatcatagtgttcacaacaaaccacaaggacaagcttgaccctgcattgctgcgccctggtcgaatggatgttcacattcacatgtcctattgcactccctgtggtttcaggcagctagcttccaattacctcggaatcaaagagcattctctcttcgaaaagatcgaggaagagatgcagaaaacccaggtgactcctgctgaggtagcagaacagcttctgaagagcagccacatcgaaactagcctcgaacagcttatagatttcatgagaaagaagaaagaaactcagaaattggaggctaaaaagaaggaacaagaggccaaagaggaacagcagagaaaggaaattgatgatggtggtaaaggagaaaaagttgacagtgatgataacaataatgaaaagaaaagtactactacctagttaaataacacttcttgaaacttttgattaacatcataccttaatcaaaaacttgaagactcatatttatgaattttatctttatttatatggtgttcaattttcttatttttatttaatatgaaactttatttttcacttgtattccaacaatttacctgttgatggaaaaaggattgttgttagtgttcgggagtgggtgtcaattgtcaaacccccatatttttgtttgctaagaaaagcattaactgttcatgtcatattggcacggagaatacttctatatttttgtatgtatagtcgttacgcttatttttatctctctttttacctttcacatcttttttatttcatgaatgcagagaatgcttccaattagct

SEQ ID NO: 132779 - DNA, 255 bp, Glycine max
  Clone ID: PAT_MRT3847_90906C.1
accatcaaaattaagggatgcttggtcactttaaacccgacttcaccggcactagggtacgtacagaagcccacgcatcatcgctgtccaacggacaaacatagtgggcactgttagagtatcactgctacacgatgataggcctaccatgcaagatggaaaaagatgaaccatacaagtctgcgaggatagaaaagactgctcattctgaatcagagcctgcacttatctgagacttagccatgtaaattcacg

SEQ ID NO: 132780 - DNA, 363 bp, Glycine max
  Clone ID: PAT_MRT3847_90907C.1
tatacgtccatgcacgctcgtaactggatccttaacggcgcctttttttttttttaacgaaaaatggtaaaaagaaaaatatattaccatattttttagcatggggcgtgactaagtttatatgaaaaagctaactttctgtttagcctttaaaagaagccttttgcaacttaaggaacacatctaatgaaaatggcatgattgtttattactaataaccaccacagtggtacgtgattgaaactacaaacatgactgaaggctcgcacttattccgaaaagataatttgttttataccctttttacacaggaaggaaactgcaatcaatctcccataagcaatccccagaatccccccccct

SEQ ID NO: 132781 - DNA, 210 bp, Glycine max
  Clone ID: PAT_MRT3847_90908C.1
cttcttccttgttttgtggtgtgcaaccaccccgcacccccaacccggaagaaacgccccaccgcaagtgggaagaaacaacccatcccaagcatgtcacccgagggacagcccagcgaaaattggtgtcttcttttgtgaacaagaaaaaaaccggggccggccgagaatcgggaaaaccaggaggagcgaacggcccaaaaaggcggg

SEQ ID NO: 132782 - DNA, 363 bp, Glycine max
  Clone ID: PAT_MRT3847_90909C.1
ctagggcagacccagcaattaatcaccgattcttgcagccggactatcttagcctacaataggtcgtattatagctgctcgaaataatggtgatagttgctgcctgctggaaaaagctatccgtacactaatactcgaccacatattatcccggaggaattatggggtaggtctgctgtgcctcatgagggggcttattacaatcaattgcgtcgtgctaattgctggctgctcagaagggtagcctgctgtgccaactgctttattgaagcatccaacaatccgagagaggcggcttgcttattattccccacaaaggttgctttccaaatgaataatgcttgcatgccaattgtggcacta

SEQ ID NO: 132783 - DNA, 622 bp, Glycine max
  Clone ID: PAT_MRT3847_9090C.1
cctaaccttccttccattcactactcctccttcacttaaaaaatttcagccttccaaatcctcaacttttacaattattacaatttagcatcactctttctcttcctcaatccaatcccctctcgatcgaaccaagaaaatttaagaacccaaaccatgtatttatcggagaagcctcgccccatcgatttctacaaggaggaaggcgcgcgtgacatgatgatcgaggtcgtctccaacggcgacctccctcctccgcctcctccgccgcctccgccgatgatcctcggcgagagcagcggcgaggaccccgaggtcgagataaaggccccgaagaagcgcgccgaaacctgggttcaggacgagacgcgctccctcattggccttcgccgcgagatggactcgctcttcaacacctccaagtccaacaagcacctgtgggagcagatatcggcgaagatgagggagaagggtttcgaccgttctcccaccatgtgcaccgataagtggcgcaatctcttgaaggagttcaagaaggccaagcaccaggaccgagggagtggctccgcgaagatgtcgtattacaaggagattgacgagatcctcagagagaggagcaaga

SEQ ID NO: 132784 - DNA, 384 bp, Glycine max
  Clone ID: PAT_MRT3847_90910C.1
atttctctgtcggattttggatactgcaactggccagtattatactgggtgggccccaacaaattgacgagttcatcgacaaccaattcacatcactgacggataaggtagcaaaaatgcaagatgtcagccttgaatatgatgcaagtagaatctcaaatgacatgtggcacatagtttgttggcaacgctgtaaattacaaacaaaatgaaggattccatgctgctggcagcaaatgtagactgagataagctacatcgataccatatgctgagccatttgcgcaagctctaagcgctgaagtttactttgacttctaccctgtggagggtgatagtcaagagggacctgctcataatggtgaaccgaaatctgacgcctat

SEQ ID NO: 132785 - DNA, 304 bp, Glycine max
  Clone ID: PAT_MRT3847_90911C.1
ggctcgaggcataagtttgaagccttttcttcactaacaaaaagaaacaaggatacgttggggttttttcgatatagcactgggttttgaaaacatgctcatcaatacggataaataaagggtgtatatacccgatcattatataatggctaataatttgggcgcttaatatatttccatgctaaatcaaagatcatgattgtttttcaatctactcaataaaagaataatcttattggtggcggtgtatgattttggctgacaccactattcatataatatactttaataaattgttcttgct

SEQ ID NO: 132786 - DNA, 625 bp, Glycine max
  Clone ID: PAT_MRT3847_90912C.1
tttcaatttctctccacgcgtacccctcgaatagttcgatttcaaaatccatggcgagaccttccaagctacactcatcttccgacgaagcgctctccaatgcttcgagttcctccgatgaagaggagcaagtcaacgagcagatcaacgaagaggaagacgaggaggagctcgaggcggtggcgcgccctgccagttctgctgacgacgacgacgaaatcgccggcgacaatccgccggactccgatgaagatccagccgccgatgacgctgacgatgaccaggatggggataatgttgatcccgaaattagcaagcgagagaaggcgagattaaaagaaatgcagaaaatgaagaaacagaagattcacgagatactggatgtacagaatgcggccattgacgctgacatgaacaatagagggaaggggcgtctgaagtatctcttgcagcagactgagctgtatgctcattttgcaaaaggagatcaatcttagtctcagaataagtaaggtgaaggggtcgccatgcatgcaatttcactgaggaccaagaagatgaagaatacctaattggagaataagatggtctagcatacacacgcctggtgacacaaccatcatgt

SEQ ID NO: 132787 - DNA, 482 bp, Glycine max
  Clone ID: PAT_MRT3847_90913C.1
gccaaccaccttaacattttttctactaggttttttcaagttttcaacatattttgttggttaactcttgagttttcgttatgtgacaatgattttttttggaatttttgtgaccttgttcttaaccatatatgtttttgaacattgatagtgtttttgtgatcttatattgcagttgtgccaacgatatatgcaccaagaaactcgattctttaaagtaaaggtgcatgactatctcatatatttggttatgtatggaaatctaataaactatttcagtttccccccttatattctaatattatttcatgataaactggttgaataattgaatttcctttgcagttcctgtagcatttaatcacatattgtctagaaaccagcattttttcttatctgcagccttctgaaagcaaaatggcgaagcctaaagttagcatgttcaatcaaactaacttgcatgttcaatgatactataatca

SEQ ID NO: 132788 - DNA, 134 bp, Glycine max
  Clone ID: PAT_MRT3847_90914C.1
attattcattttcggattttcaaccctttcattttttgacaggagcgcattttcttgttaatggatagtcgtaatgatggcaatagaagcggaccgatcgacccaaccaaaggttcaaatacgaacattttaca

SEQ ID NO: 132789 - DNA, 462 bp, Glycine max
  Clone ID: PAT_MRT3847_90915C.1
aaaaaaaaggaaaaatttcattctttgggaaaaaaaatatttgaattaaaaagcccagaaaacccctcttccaaggtccaacatccgggggggaactaatttacccccccctcaaagggtactgggtttcccccccccccccctgggggaaaaaaaaagggggggagaaggggggccaaccaagtaacccctctaaaatcgggaaaaccccaaaactttggtatcgaaccctaacatgggcattcacacccaaggggaaaaaaacattccctggatatgattcaaaaacagggggggacccttccaaggcgccatcaaaaaagccccccccaggaaacgacccccccttgccggaataacccttccccccaggaaaggaacccccagaaaccagggctggaaaccacttggggggggggggaaaactcacctccacaaacccttttcaaatttttccccccc

SEQ ID NO: 132790 - DNA, 1721 bp, Glycine max
  Clone ID: PAT_MRT3847_90916C.1
ccacgcgtccgcggcggcgtgggaggacgcgaggacatacgagaggctctttcacatcctaagttatagctaacaatcgttctgcttcgtgtctcaaggcaccagctactccactctagcttcggcttcagagtttgtgtaacattctccttccttcttccgatttcgaagatggactgaagcagaggatgccgtaagatcgccgtaatgcggtcgccgagtatcggaagaaacttctccagcacaaggaattggaatccagagtccgatccgtcagggagaatttgcgagcttcaaagaaagagttcaataaaacagaagatgatttgaaatctcttcaaagtgttgggcagattattggcgaagttctcaggcctcttgacaatgaacgcctgattgttaaagcaagcagtggtcccaggtatgtggttggttgccgcagtaaagtggataaggaaaaattgacttcagggacaagggtggttcttgatatgacaacactcaccataatgcgagctcttcctcgagaagttgatccagtagtttacaatatgttgcatgaagatcctggtaatatcagctactcagctgttggtggcttatctgatcagatcagggaattgagggagtcaattgaactgcctctaatgaatcctgagctcttccttcgagttggaattaaacctccaaagggtgttctcctttacgggcctcctggtactggtaaaacattgttagctagggcaattgcaagtaatatagatgcaaatttcctaaaggttgtttcaaagtgccataattgataagtacattggagaaagtaccaggttaatcggttagatatgtggttatgcacgtgatctccatcctttcaatgtttttgatgatgagagtggttcgccgtgatatcgatgggtcaatgagggatcatgtgcagatcgtgagattaatagagcggttatgtagctgctttgtcaacttgaagcatttgaagaacattaaaatgttaatagcaaaatggccaacaaacctacctgatgcacttgaccctgctctccggcgtcctgggagattggatagaaaaatagaaatccctctgcctaatgaacaatcaaggatggaaattcttaagattcatgctgctggtatcgctaagcatggtgaaatagactatgaagctgttgtgaagcttgcagagggatttaatggggctgatcttcgaaatgtctgcacagaagctggaatggcagcaattcgtgcagagcgtgattatgtgatccatgaagattttatgaaggctgttaggaaactgaacgaggcaaagaaacttgaatccagtgcgcactacagtgctgattttggtaaagactagaatctattgcaaaattcttgcagagccatggatatctaggcagtgcatcttgagttggaaatacctcgagcaagttactcaattcgtagagctaagcgtgatgttccctttgggttatggcttgtgttttccgaattctaaaattggaagggtaactttatcaaacggtaaaagggatgttcaatttaattgtattattgttgcccccaccccaaccaaaccctttttttttctggactgtagaagggcaactcatattttatactggatcttggcatgtgcacaatttgctttatattttaaaaaaattaaaattgtctaattttacacattctcgaggctagtgctc

SEQ ID NO: 132791 - DNA, 404 bp, Glycine max
  Clone ID: PAT_MRT3847_90917C.1
aattcggctcgagccgaggtaagaggcttagcaaggagaatcatcgtagaaaagaagaaagagtttcaagagaaagaaactctggacaccttggatctgttatcacggtttttgtgctctggccactccgacgaagagttcgttatggatattatcataagcttcattttagcggggagggacactacctccgcggcgctaacgtggttcttctggctgatttccaagcacccgaaagtggaggaggaggtggttaaggaggttatggagaaagacgcggcatacacgcacgtgtatgatgaggtgaaggacatggtatacacgcacgcggcgttgtgcgagagcatgaggctgtacccgccggtgccggtggatacgaaagaggcaggggaagacgacgtttt

SEQ ID NO: 132792 - DNA, 1427 bp, Glycine max
  Clone ID: PAT_MRT3847_90918C.1
cccacgcgtccagacagaggcggagaattcgagtcgccgccctcaaaaatcttcccaatcaaaaataggcggcaacaaacaacacaacagcaccttttccctttccctttctctcactactttctctctctacaacctccaatgtcccctcccttctccattgcctccttcctcgtcctctctcgccggttgtagttggaaaaaaaggaagggtttttactttggcggcaatggagggggaaccgagccaactgaagcgtgccgcgattgatgcctctgctggagctatttccggtggcatttccaggacaatcacgtcacctctcgatgttattaagattaggttccaggttcaactagagcccacatcttcatggactttactatgcaaggatttgtctacaccttcaaaatatactggcatgcttcaagcaaccaaagatatttttagagaagaaggcatacggggtttttggcggggcaatgtgccagcattgctcatggttatgccatatacagctatacaatttactgttctacacaagttgaagacttttgcctctggttcttccaatacagagaattacattaatttgagcccttatctatcctacatgagtggagcattagctgggtgtgctgctacagtagggtcatatccctttgatcttctccgaaccatattagcttcccagggtgaaccgaaggtttatccaaacatgaggacagcattagttgatattctgcagactcgtggcttccgaggcttgtatgctggactgtcaccaaccctagttgagattataccatatgcaggtctacaatttggcacctatgatacatttaaacgttggaccatggcgtggaatcatcgtcaatattcaaatcctactgcagaaagcctctctagctttgagcttttcctgtgtgggttggctgctggaacatgtgccaagctcgtctgtcatccacttgatgtggtcaaaaaaagatttcagattgaaggtcttcaaagacatccaagatatggagctcgggttgaacatcgtgcctacaaaaatatgttagatgccgtgaaaagaatattacagatggagggttgggctggtctatataaggggatagtcccatcaactgttaaagctgcaccagctggtgctgtaacatttgttgcgtatgaattgacagtagattggctggaatcttttttaacttgatttttttaccaaggggaagaaggggattttttttttttttttttaatctcattcttttttagtcaacttaatccccccccggataggaagcacgaggtatatgataatttaactacagcaatagtggataagattctagttctcttttaagatggataagaagtcaaaatgaaagctaagatctagcagggtaacatctattttcctttt

SEQ ID NO: 132793 - DNA, 194 bp, Glycine max
  Clone ID: PAT_MRT3847_90919C.1
ctttcaaacctgcagcagcaacagttaataaatcagcaaaagcacctatcaaatatgcatcaacagctgggtaataatgtccctgggttacagccacagcaggtccttggacctcaacctggcaactcaggcatgcaaacaagccagcactctgcacatgtgctacaacagtcgcaggttccaattcaacaaca

SEQ ID NO: 132794 - DNA, 375 bp, Glycine max
  Clone ID: PAT_MRT3847_9091C.1
ccacgcttccgcaagattccggaacttctagcatcgtcctattcacaatagctggctgtcattaccaaaaactctctgaacaacacactctacaatctctgactcaactatccaacaacttctgcagtaaccatcaaatgccctcggttaacatagtttcccattgcgactcccaagccaatcccttactatcaaacctacatctatgacctttacagtacctcttcaaagcaaaatattgctgaactcaaaatgcctacaaaaactataaatgaactctactatgaggttgctagtcacgtctatgaacttaaattcaaactatattttccacggccttcaaaaacgtcacattgcggttaataaaaataatct

SEQ ID NO: 132795 - DNA, 442 bp, Glycine max
  Clone ID: PAT_MRT3847_90920C.1
gctcttatctcgggtcggtgcgggacgacagaagggactgattgcatcattacaaaaataaaagttcagaagatttaaatgttctaaatgctctgaactcaactttattcacatgctctttataaattacaagatgtgcaatgtgaaatgtaatagtaatagaaaggagttttgtagcattattttcaatacacccaagaaaactatcaaaatattgaaataagagctctaagcttttataacaaagaaaataaaaagtcaatttaaacatgaaagtagatcaggaaaattgtattaagcctaaggtaatattggattttattaatcatcgcacattagaaaacaggcccaggtaatgttgcaatgcatcataatgtatataaaggttacctaggcaggttatttatgctaggctcagtatgataagaaatgcactaaagat

SEQ ID NO: 132796 - DNA, 316 bp, Glycine max
  Clone ID: PAT_MRT3847_90921C.1
acgttcaatattgtatccacatactgtgaaaaccacttcattagacacatgaacatttctacacttgtaacaaaagtgttgaaacaagaaaactctcactacaggacaagaatgttgaactacaacctgcatttaaaaaatattcaacaacagtcgtggaaagatttgttaacggcgagaagctaccaaacatacataacccagggaggaaagctgacaatggttagccttcccaaccaaagaaagaaaatggccttggggaaaaactaaaagtccaatacattagagcgatacatatgtacgagaacatatctgg

SEQ ID NO: 132797 - DNA, 490 bp, Glycine max
  Clone ID: PAT_MRT3847_90922C.1
gtgccatccccaaagcctctttttggaattcaacaagggagaaaaatgatatcctttttagcgctacgagtctcgtaaaggaaaaagctaaatcaaaagaattaacttttgtaagagcgtctcgggatgaacaacgatctaaagctaagacacgcctgaagcctgattcactctgattttctcaaaacaggttaacttctttaaagaagcttttatgcatgcctgactcatatactcagtcacagctcaggctgacaggtcacactgcgccaatccactcaggattcatgactattattctaaaccatacaatataccgactggttaatacccaacccgttcagcgttatttgggggctacctgtcagcgatcgcataaaaaaagagaatgcattcgatggaaccctctccactccccatgttaggcgaagcacaacaccggccgtaacataaaaattaaaaagcagtactacatgatgaagaaagtgac

SEQ ID NO: 132798 - DNA, 335 bp, Glycine max
  unsure (1)..(335): unsure at all n locations
  Clone ID: PAT_MRT3847_90923C.1
canagannagaagnaagaatgnggncgaganaaacannagngctantctnngtnacaaganntgtnnatanntcactntgaaganggnnaaanggaggatngtanngntatgatgngagnnnanttngnaganggaaagagaagnnnngaatnngggaaganaaaaanaagtnanaananannnannngngnnnnanggnaggatannanangaancgagtaggagagnangnnaggggagagggtgangagagnannnaacnnngggnagngannanngggaaagaaggagnagnngggagnnggaagatganagangaattaaagggaagggg

SEQ ID NO: 132799 - DNA, 872 bp, Glycine max
  Clone ID: PAT_MRT3847_90924C.1
tataagaaatgtgatgtacaaaatttttacaaaagactacataattaaaaatataacaactcttgtacactttttagtttgtgaaacaaacaagaaatgattaccaagtgagatcagacaataagattcttccaaacaagaataggcctaaacagatccaaaataaggtgggcctcgtgtattgatctttccaaacatacgacaaatatactatagacaagcaattacttaaggcgttgataaatccggagaaataatatggtaaattctccatatctctctctctctctaattttcgtaataagctgttccaatcatccaaaccaaatactaaggtttggtttcctgaggaatttccatagctgcttggagaattatctcaaatgcactttgcatgcacaacttcaatttatgttcgtctatgaagtctttttccgttttgagggtaacacttaggactcccatatagctcataactgaaatgactagactttcaggtccaccggccaatgtgaaatacaagcctttcacaggatggttagctaaagccatttgttgtattggtccagccaagtttgaaatcactgcacttgattttgtcaatgtgccacgaatgcgtttagctactgcctcttgtcccctcaatttgccctctatcttcaaaagtgtcccggtgagtacaactcctagagattgtttcttcctcttgattatgttatgtgtgtcccaaataaattcaagagggtttgtagttcttgtttcatttaatttcggtattggaacatgcaagaaggtaattctgttcccccatggacccgtggctttagaaattaacatatcattgatcgattggtaaccttcaacctcgagcc

SEQ ID NO: 132800 - DNA, 360 bp, Glycine max
  Clone ID: PAT_MRT3847_90925C.1
aaaaaaaaaaaatttttttttttaaaaaaaaaaaaaaaaaaaaaaaaaaaaaaaaaaaaattttattaaaaaaataggggcgtccgttttaaagggtcccggctttcgaaccctggcgttccccttcctggccctgctatgtggaacctttaatttatttcaccggccgttgatttccatggccgtgtctggaaaacccctggcttgacccaacttagccgtctctgaacccattccccttgggcaagctcccgttttccccaattggcctcgtccgatcggccttcccctctttgcccttccttattggcgattgggccccccccttttggggtcccttcctcgcgcgggctgttattt

SEQ ID NO: 132801 - DNA, 748 bp, Glycine max
  Clone ID: PAT_MRT3847_90926C.1
gagagggtgtgcagagagtgctgagggtgagggtggagagggagaggcgtttggggctgttggtggggcgctgaggtgctgaaatcaagtggacacgaattacccgcccgcacaactgaagacttggctgcatctggcatcaatcaaaagcagaagggcgatcgagcttaattcgaacatagaatattttgagcaattgcatggaatttctgctgtctttggcagaagaagagcaagtaatccttgtgggtcatagctttggtggtctatgcatatctgtagccatggaattgttccctaccaagattgcagctgcagtatttgtttccgcttggctgccttctcccgacctaaactatttggatctcctccaagaggtatatatattagccattcttttctgctaaataatttctaactcctagtttcatcatatcatatatatacgtgattttgtgtgtctttgggctaaggagaatgcaggttgcatacttatgtctattgtcattggtcaaaccaagataatggagagattagttagtgactattgactagtaatgaataaataaggggtgtgactcataaatagatggtgtgactcgtcatatatttcgtatctgaattgatttaaacttttataaataattcccaataggccttgattgaacgaattaaatccttaacgatgtgtttagtttgcattttcattttatggtttcatttcttgaaaaatggtttcattttcaaa

SEQ ID NO: 132802 - DNA, 531 bp, Glycine max
  Clone ID: PAT_MRT3847_90927C.1
gacaaatcatttcctctgttattcaagaatactaaccttgccaatcaacaagaatgaacaaacccttctattctaacacaaatagatgacttaatttacctatatggaaccaagttttgaaaagggtgtgaaaaaacccttctgaagaaaatagtcttagacaccataatatatcaaaccatgctagagactaaccagtttgcagggttcttgacactaactatgaaacaaaacaagactaactagtaaacactgcacagcttcactgcattgaggcccgtagctggtaacctttttcatgcccttcttcatttacacccttcttcttttggttttaggtgtcctagagtcttttctgctaaaaatgataggtgaatcatcagccaaatcaacagcagaagtatccgcagatttcacagatttgaagatgcctgcagaagctgaagctcttcccctggactgagaatttatatttgcaccccttggctgactccaatgcggatttttccttgccattttctgctatggctg

SEQ ID NO: 132803 - DNA, 314 bp, Glycine max
  Clone ID: PAT_MRT3847_90928C.1
ggcctggatgggggtgataccacatggcttaaaaattgaaaattggtttgaaatggctgggttttttaaccattttgaacctggattggtcaattttattaaaccggagctggaccttccccctttcttggggcactttcttgtggtagagggccctgccttggaagggaattgggggtttcaaccacttttcttatggagtttattaggcttttaagaagttggcccattaggctgattcacagttggggcttaaaaccttttaagtggaggaccttttttttttaggaaaggcttactttttttggaaggct

SEQ ID NO: 132804 - DNA, 470 bp, Glycine max
  Clone ID: PAT_MRT3847_90929C.1
acgcttgacattacgtgttattttgtttacccagcgagcggacgcgggcctttatttctatttactggatgctctaggaaacgcataaactttgtgccgggctgaacaagagtacatgtcttgaacagactcaaacatttgatgagtagctatttggcttaactctgttctactacaaaatatggaagattacagctccgattagacggaggcttcctatatatctgtccatagatccttggggcatacgcaaaaaagctgggattatggatccatgtccggatcctgatggtccataattttagaactcaggctgacatgttagaagtgattcttcgttgttccaactcacgataatgtatattctaccgcaaatcattcattgagggtatagaggatgtcccttgagggaagaaattaagtttttgagcggaatatgaattaaacggtggatcccttaactatttagg

SEQ ID NO: 132805 - DNA, 420 bp, Glycine max
  Clone ID: PAT_MRT3847_9092C.1
gaaataaaccattagagtaatgatatcttctaagacgtgaaaacaaagacaggcctctgcgggatacttttcctaggacgctttctgaaattcacaacttcaacccacccatatggctcagcttcagagatagatgactccggttctgaattatggttatcattcattgtaaagtcaatgccttgaggttttggagtgatgatgcctctagcactttggtggttttgtgaacattgactttgaaattggttttgggtctccactggatgcactgagatcttgcatgtaatggagcagaagcgattacgctcatcttgtaagtgttttccacattcttcacacgtgccacctgactttggtcttgttgctatgccggtttctttggatttagagtcggggcttagatcagcagatttagat

SEQ ID NO: 132806 - DNA, 275 bp, Glycine max
  unsure (1)..(275): unsure at all n locations
  Clone ID: PAT_MRT3847_90930C.1
ggggttgccaaaggtacagcttgctgcgggagaggaggcgacagttgtgtcccagacgtnggggaaggaggaagatacatgcatgctgataaattgctgatgactttctgctttgcattctacgctggatttctttattagttactttcctagattaagtgatatgttaattcaacagctagatatgattgtatcaaatgccattgatcgttgatattgtggatgggtaattgcattgatattctttcccacttaataaaattatagacgacccc

SEQ ID NO: 132807 - DNA, 168 bp, Glycine max
  Clone ID: PAT_MRT3847_90931C.1
ctgggagagaaagagagacagcgacgtcggagcctggtcatggtggttcggcggtcaacaagttccgcatgtctctgggtcttccagtggcggccacggttaactgctccgaggtccacgcggcgatgaatctctacataatgtcggtgacagggatcactggccgtt

SEQ ID NO: 132808 - DNA, 312 bp, Glycine max
  Clone ID: PAT_MRT3847_90932C.1
atcctattgtaaaaaaattgttctcaattttgtttaaagtctttcttgtatgtaattttgtggggggaaattttttcatgcttggtattcaggacttttgtgggtgtacaatttgttaatcctgctatctgtaatgttaaagcggttcattattctgtcttgatcataaaaatgttcatttctttaccttttaagagagacattaatgctgttttaatcaaattaattgccctatagtgttaaagtctagcttcgtggttggcttgtgcatgtggtaccatttaaccatatatgtgatgcctttaattatgt

SEQ ID NO: 132809 - DNA, 559 bp, Glycine max
  Clone ID: PAT_MRT3847_90933C.1
cggccgctcgagccggcgggcgggattatccttggattctctttatataaactaatttatccgatgatcacttcacttctctatcatctcatggcagacgagatccacgaacaagcatgagagctctgagggggaggctcacgatctctgtcgatattgactttctcggtgaaatactagtagaagaatacgagactgatccgcaggaggtaggcatcgacaccgatgatgaaaaagtcgctgacacgaaccatggagagaacgatgctggctctgaaaacaatctacttcgatcagacactcgctctgaattcttcgagagatgagagacagcgaatatcggaggaggagcttaaggaggctttccgtgtgtccctaggggactcgagatggctgtcactatctgcaacctgaactctaatatggcatgactgatctctgagggggaagatgaccgtagatcaggacgctgaaatgatcccccaagtcaaagcttgaggtgaagaaccgatcaactatgaggagaaacgaaggagacatgatgaacaggagaggagca

SEQ ID NO: 132810 - DNA, 282 bp, Glycine max
  unsure (1)..(282): unsure at all n locations
  Clone ID: PAT_MRT3847_90934C.1
agcagacacaagaacactcctcttcgaacattgcatgtgactccacgtgagcgatgtggtgggtaacagcgcccttgtgacgacggctggnnatcccgagatccatagacctcagtcgagataggagaagcaccgccaattgccgcgagcattcgagctgcatcgcctccgtagaactctcacctgcctgtcgcagntgatcgagcgccctcgagcagcgccctctaccaacaaatgactccgagggcatgcccggcaaccgctactacggcggcaacgaat

SEQ ID NO: 132811 - DNA, 338 bp, Glycine max
  Clone ID: PAT_MRT3847_90935C.1
ttctattcaaacacagacttatgagtcaagcaacgctcgaaccaacttcaccactcactctgaaccgcgttcttatggttgcccctacctaactttgagccgtgcacccattttaccttactactgaatctaatccaagattgcgcaggcacatcgatccgaaatgtcaccataaaacatatgtcaggcttcctgagggccattaatttgcttggctgtcatcagagctcctgcacgggtgttcatcttcctactcccggtgtctctacacacttgctgatgattataattacactgtccaaccaacatgggtgaactgtagatggcagctagcagac

SEQ ID NO: 132812 - DNA, 442 bp, Glycine max
  Clone ID: PAT_MRT3847_90936C.1
atgtcctttgagagattaatatgtatctttaggtcaataagaacataccataagcattttatattcttttgaaataaggctttaacagattagagaagcattttcttttgacctgtatgcaatcagtaaatgttgtgtgtttggtacaaggcatcaaatcaaatgctctaggctgacaaatctctatgctttcttcaggtaaattcaagaaaaatattttatttgtcgccttatcacatgtctaagctgaagaatattgtagacaggtttgccttccatgatgctaagaaaatgccctccacttgtagactcacagctcaagttaggactgaattctttcagccacttaatgtataaaaatacatagctcatgcgagaagtaattagtaaaaagaccaaaatggcatatattatcttggagtgaatttagacttctacttag

SEQ ID NO: 132813 - DNA, 417 bp, Glycine max
  Clone ID: PAT_MRT3847_90937C.1
aaaaccggggcggttttaccccccattgggagccggctttttcattggcccgcttatcaggccggggaacaagaagattcccaaagaaggcccaatttaaaacaaatcgggggtggaaacatggccctttttaaaaaaaggggtttaaaaaagggggtttaaaatctcccggaataaaaatcattcctaaaaatcttggcggccttttaaaaaggggataaggcccccaacatccggaaacttgggggccaaaaaacctccccccggggaaaaaattgtcccgggttccgggaccataaaagcaaatccttttagcaagaaaaagcttgggggcaaaaaaaaggaacccccggaggggggttaattttaaaaaaatgcctgtcccggggggggaaaaaccatcggggggggactttt

SEQ ID NO: 132814 - DNA, 348 bp, Glycine max
  unsure (1)..(348): unsure at all n locations
  Clone ID: PAT_MRT3847_90938C.1
ctctaatntngngctgccgtcttgactctccagagaactgtatagagananatggcagctgcancatctggtgctgngnaaatcgggncgggttcttcctnctctgagtggaggnaacanggntccaaannctctggccactgctattggangcaaantggtgctgctgctgttactgttagtccnngangactcatgtggtagctgctgctgcaccaaagaagtcatngctcccnggtgtcagaggtggtggcancctcgtcgaaccagaatgnntgatgntngctaccagtggntatgntttgancattagcctggganggcnnnagcccngacatgnnacnaaga

SEQ ID NO: 132815 - DNA, 419 bp, Glycine max
  Clone ID: PAT_MRT3847_90939C.1
tttttttttttttttttttttttttttttttttttttttttttttttttttttttttttttttttttttttttttggaaaaaattttttcggtttaacaatcctaaaaccccgtttttcgggggcaaatcccccctttttttttttcccccgaaaacaaaatttggatatttttttaggtggatttatgcggccgggaacggtgttttccaaaaccctaaatgacccccgggggaaaaacaggatcagttgcctttttaacagcattttttgcccccggaataacattggcggggggggttaataggggcccaacaggggggatctggttcaagggtttacccacttgggaacccctttccaggggggaccccattccccccggggggttttttttacccccaacccttgggggcccat

SEQ ID NO: 132816 - DNA, 1100 bp, Glycine max
  Clone ID: PAT_MRT3847_9093C.1
gcacctcgcctcctttcacagaagagagagagagagaaaaaaaaaaaaaaagtctctgtttcttcacttgctcacaagccgcaactgctactgtgtacccaatctgagcccaacgagatgggggggcagaatctttccccaaaggaaaggagtagagattggattggagttcttatgaacagcagctttggttattgtacttatcaccatgatcttcgatctaatgagatgaatgtgttctgcgtggactgtgcacttaggatgtgtaggcactgtaaggaagctcattccctacatagaaggtttcagatttacaaatattcctaccaggatgtcttccgccatgccgagctgcagaagtattttgattgctccaaaattcagacttacatatccaataatgaaaggattgtgcatctcaaacctcggccttcaatcaccaaatctaagtctgctgatctaagtcccgactctaaatacaaagagaccggcatagcaacaagaccaaagtcaggggacttacaagatgagcgtaatcgcttctgctccattacatgcaagatctcagtgcatccagtggagaccctcaaccaacttccagtggaatacccaataccaaggtcaaaatcaatgttcaccaaaccaccaaagtgctagaggcatcatcaatccaaaacctgaaggcattgactttacaatgaatgataaccataattcagaaccggagtcatctatctctgaagctgagccatatgggtgggttgaagttgtgaatttcaataaagcgtccaaggaaaagtatccctcataggcctgtttttgttttcacgtcttacaataaaagacactactctaatggttttcttcatttttttttttttgactttacattttttgaacatttgagggaagctcaaccccggtatgccccatattgggttttaagtttaaataacttgggagttggagtttcaggttcagttgcttttagcaaagtaactagcgaagcttgtatagcacaagggtaatggtactaagtattaacacacctccgacactacttaatatctgtatagttttcagcaaaaaaaaaaaaaaaa

SEQ ID NO: 132817 - DNA, 411 bp, Glycine max
  Clone ID: PAT_MRT3847_90940C.1
tacggctgcgagaagacgacagaaggggtccatcgttattaataaaatagtctacgtgacacggagggacaaatttatcattaaaatgattgccaacgattgccagcatatagagacatatttgtcataatatttttttaattttttgtcttctcatcccgctgacaaatatgttcctgaaagataaaaatacaaaatttagttttcgaaagtataaaaatgtgacaaatatattcagatgttaataatagattgtgactaattattattattattataggtttgtaatttagtgctcttactcgtttagtacttatgtcatgtattttttaaattgtcttctaatatatatatttttattataatggattccttgtcaaaccttaatatttgatattaaaaaaaaatatc

SEQ ID NO: 132818 - DNA, 343 bp, Glycine max
  Clone ID: PAT_MRT3847_90941C.1
attagcttaaaaaaccggttcggctcttgaaccgctttaaaaatttggttcgtaattgagttcagttattataactgagaacatggccgaaagctcttcggctacgcctccaccaccgaagcccgtggtggttagggtcaaacgcaagccctcgcatctccacttgatgctttctggctcgaaattaacgagaggccgttgaagcgtcctctcttggattttggaaatttatcaatctcctccaattctgctcaaaaggtggaattttataacaagaaggtttttgtgcaacatgtggagacaataagcagctctgaggtcacctttgatatcgtgcaatcct

SEQ ID NO: 132819 - DNA, 376 bp, Glycine max
  Clone ID: PAT_MRT3847_90942C.1
ggcaacagtccccaactgcatcccggggacggcttatattcagaccattagcggcatttttggatacagtccaaagctgctaggcccagaagatcctaatcctaaactgtcattagtctagatcggatccatacaccttggaagccatcagagctgttaacatgggtcaggggccaacctgttcttaaagaatcctgagaagtttactaccttatcacacgctgcttgggcaaaaggtgaccttcctactttatattgccaaagccttggccattagttaatcactttcgagagatgacttctattatgcccttcccatcaaaagcctgaaaaaagagaaaatatctttagggggttttcttccccagaaattgct

SEQ ID NO: 132820 - DNA, 1765 bp, Glycine max
  Clone ID: PAT_MRT3847_90943C.1
tacggctgcgagaagacgacagaggggggtgaggctctgtaactgtcagcatcattctgccgtcgacgaagctgaaacttgtttcttcttctccttgcgcgaaccttttctactaaccccaatcgcttctctcccactccaattccccattcctcatctacataaccctaaccccacactctcacacaccaccaccaacatcatatattacatcgattctcaatcaaatcccaaacgttttgaaaccaccgtcacgatgatgctcagaattcgtagccgcgacggcctggagcgagtgagcgtcgaaaacccccacagcacaacagtgtcatacctaaaacggatcatcgaaacccaattgggaatccctgttcacaaccaaaccctgtccacaaaccagaacctcctcttggcaaaatccctagaagatctccaccgattcaccgacatgtccaaccccgacgcgcctctctcgtctctcaacctcggccacggctccatggtcttcctggcctacgagggtgagcgccgcgtggccggccccgccttcaaccccgccggctccttcggccgtaagatgaccatggacgacctcatcgccaagcagatgcgcgtcacgcgccaggagaatccgcactgcgagctcgtctcctttgaccgcgactgcgccaacgccttccagcactacgtcaacgacactctcgccttcgccgtcaagcgcggcggcttcatgtatggcaccgtctcggaggagggaaaggtcgaggtggacttcatctacgagcctcctcagcagggttcggaggacaatctcgtctttttcagggataccgaagaggaaaagtttgttgaggctattgcggtggggttggggatgacgaaggttgggtttattttcacgcagacgataactcaggataagaaggattacactttgtcgaacagggaggtgcttcaggctgtggagtaccatgcggagagtgggttgaaggagtgggttactgctgtggttaagcttgaggcgaatgaggaaatgggtggtgcagatgtgcattttgaagcgtttcaaatgagtgatgtgtgtgtgaggttgtttaaggaagggtggttcgagacggagatcaaggaggacgatgatcccaagttgtctaagatgaagaaggatgtggttgttggggttaaggatactagagaggttgacaatgatttcttcttggtcgttgtcaaaatcgctgatcatcagggtcctctttcatcatcgtttcccattgagaaccggaacactcaagtgcctatgaaggctttgaagaatcatctggaccggacaaaaaatcttccatttgtgaagcgaatttctgattttcatcttctccttgtattagcgagggttttagacctgaatgctgatgttcctgcattgacggaatgtgtgcagacacagacttctgttccagaaggttaccagatccttatcgagtctatggcaagcactgcttgatgctatggtgacaagagaattatgcactctacattctggtctttgcagcaatatggtgcatattgccccatagcactcactcaatgtttcttatgttggtaatttgtacattgcttctttattgctgtggaaaatttcggatctgtcatttgactgaaaatgagctgacgtggtttacattaatctttaaattaaagaaagagatagttcctaccattagtcactattgtaagtgcgataatactagaatgaacacaagtgtttatt

SEQ ID NO: 132821 - DNA, 1775 bp, Glycine max
  Clone ID: PAT_MRT3847_90944C.1
cccacgcgtccgcccacgcgtccggaaacttgttttccttgcgcgaagctttggcattcccccaatcgcttcatcctcatctacttaaccctaaccccacactctcacatactacatatataaaaccgccgtcacgatgatgctcagaattcgtagccgcgatggcctggagcgagtgagcgtcgaaaaccccctcgccacaacagtctcggacctaaaacggattatccaaacccaattgggaatcccggttcacaaccaaaccctctccaccaaccagaacctcctcttggccaaatccctcgaagatctcctccgattcaccgacatgtccaacctcgatgcgtctctctcgtctcttaacctcggccacggctccatcgtcttcttggcctacgagggcgagcggcgcgtggcgggccccgccttcaaccccgccggctccttcggccgcaagatgaccatggacgacctcatcgccaagcagatgcgcgtcacgcgccaggagaatccacactgcgagctcgtctccttcgaccgcgactgcgccaacgcgttccagcactacgtcaacgacactctcgccttcgccgtcaagcgcggggggttcatgtacggcaccgtttcggaggtgggaaaggtcgaggtggacttcatctacgagcctccgcagcagggttcggaggacaatctcgtctttttcagggacccagaagaggagaagtttgttgaagctattgcggtggggttggggatgaggaaggttgggtttattttcacgcagacgattactcaggataagaaggattacactttgtcgaatagggagatgcttcaggctgtggagtaccatgccgagagtgggttgaaggagtgggctactgcggtggttaagcttgaggtgaatgaggaaatgggtggtgctgatgtgcattttgaagcgtttcagatgagtgatgtgtgtgtgaggttgtttaaggaagggtggttcgagacggagatcaaggaggacgatgatcccaagttgtcgaagatgaagaaggatgtggttgtcggggttaaggatactagagaggttgacaatgatttcttcttggtcgtcgtcaaaatcgctgatcatcagggtcctctttcatcatcatttcccattgagaaccggaacactcaagtgactatgaaggctttgaagaatcatctggaacggtcaaaaaatcttccatttgtgaagcgaatttctgattttcatcttcttctcgtattagcaagggttttagacctgaatgctgatgttcctgcattgacggaatgtgtgcagacacagacttctgttccagaaggttatcagatccttattgagtctatggcaagcactgcttgatgctgtatgcagttgttctggactcatggtgacacgagaattatgcactttacgttcaggtcctttgcagcaacatggtgcatattgccccatagcactcaaggaatgtttcgtatgttggtaatttgtacattgcttctttattgctgcggaaaatctcggatctgtcattttactgaaaatgagctgatgtggtttacatgttttaatgtttaaattaattagagatagctccttctaatagttactattttaagtgcgatactgctacaaaaattatagaatgaagacaatgtttaaaatgtgtgctcaaggctactggaatgtctttctcgggcattgtgagcgtggagtccaatgtcgaacttggctatgaatattaaattcatcctatact

SEQ ID NO: 132822 - DNA, 289 bp, Glycine max
  Clone ID: PAT_MRT3847_90945C.1
ttcacgcgtccgatgcctacaaaaacggacttggaggttactcccagggaatggcctctggatctaccttgggacacaatgcctagtgtcttgactacaactgatgagagattgataggcacagaacatgagggatatgagcctcttcttggggcactccaaaaatatgccactcccatgatgcccgtagatgaagaaattctttctaagggtgcacaagacatggttgaggaatggtttgattgcgcagatgtggaggatacctttgaggaagtgactctaagtgcag

SEQ ID NO: 132823 - DNA, 583 bp, Glycine max
  Clone ID: PAT_MRT3847_90946C.1
gatgcatccccatggctactcgtgctgctgcctctgctgttattcctgccccgatcgagacggtgtggaccgcgatccgcaacttcaacttccccgtcaagcttctcccccatgtggttgcctcttgccagcttgtctccggaagctcgccccacgaggttggtgccgttcgtgaggtcgtctggaagagtggcgagaagaagaagcagcgtctcattgagctcagcgaccagttccgccgcattacctgggagactgttgaggctgatcccccgacggagacctccgcggctattaccggcgtcaagctctaccgcatcactgagaccaatggcaccctgatcgagtgggccactgatttcagcgccgatgtttcgccggctgtgatcaagttcgagagcaaggccattgcggagactcttgtcgatatccgcaaggccctcgttcacactgcgtgattgctctccaaatcaacatgcgcgacgcagaggcttgcaaggagatctcacttgcgtcgcctcagcatgtcgaggcaaagactaggctacgtgctagagttgatcattcataaaacgcttcgtcc

SEQ ID NO: 132824 - DNA, 666 bp, Glycine max
  unsure (1)..(666): unsure at all n locations
  Clone ID: PAT_MRT3847_90947C.1
acttccaagtacttcttttaaagattccatgtgggactccattgcagaagagctttggtcccttgttgccaaatcactcaaggctcaccgtctagctcgccaagtaatcacatatgcattagtaatacattaatttgtgtgcttgcttgtccttcatggcttgatcattccaattcatttttttccttatatatgatatatttaaaattttcttattggatatacagcacatattaaatgtatgtgaaagataagggaatgcctgatgttgacacttgacaagtatgtgaaattacggaaattcaataacaaatgatttgtaaaggttaaaagatactattctttgataataatatacaattatacatatagaaattcagtttaggatggaatccagttttagcatctttttcctagatagaaggaantcggtgtctagacaaatttatgaagattaaacttataagaggattgaattggcagttcttattaagatgcaaccatgagtgttttgcagttgggtgatcttttgaaggaaaaatcttggcattactagtaatactttatcactgagacaattcttttatagcttntagtttataatataagngggctgttttcaattcttccttgcatagctttgcaatgaatccatttatttctgac

SEQ ID NO: 132825 - DNA, 255 bp, Glycine max
  Clone ID: PAT_MRT3847_90948C.1
atcccacctgaccagcagattcttatctttgcgggtaaacagcttgaggatggtcgaaccctcgccgactacaacatctagaaggaatccactctccattccgagtttcgcctcagtggtgccagttctatctgagcatagactttgtctggtccgcagatcaccctcgatgtcgaatcctcggacactattgataatgtctaggccaagatgcaagactcggaggctgtacctccagatgaaccgttgcttata

SEQ ID NO: 132826 - DNA, 778 bp, Glycine max
  Clone ID: PAT_MRT3847_90949C.1
gattggctcttggggatgctcgatgcctgcctgctggtaattcctttcattagagagcccatggatttatattcccatggttcggaaaaaagtttcttcaagcagtgtaagtaacaccaaatgattttactgaaaatctggtattcggtgacgctttattaacatcaatttgaccaatggttttactatggacgcttattaacatcagttaacggtatgaagcttgggaaagctgttggaaaatggggtctttgagatgcttgatgcaagtttgccatcatgacttccatttcacacttagacattgagtggtgaacgtccatagtatttgatataaatgtgtaagggctattcttcattgatcttcgctgggttttgacgcccaagttgatttaacatatgttgattaaattaaatggtgtggcaactgttgtggggactagagtttaccatattcacgacctagctgtcaataccattgcttacactgaaggaattccaaacccccatttatttgaatgatttttttggctgtcatctcatttcgtttttaattggtatcctcaacatttaaatgtatgactcatctaagcctttaaattttggacattagtatgttattattctcagttcccccgagttttattgtttttcttattcatggtattgtggtttatatacattgagagggggcatcttgtatcacagtggaaaaaaggattgttacagttaaaaaaatattgatagaagtggttcgaaccacttccatttatttatc

SEQ ID NO: 132827 - DNA, 325 bp, Glycine max
  Clone ID: PAT_MRT3847_9094C.1
gattcacgggtctagctaagaaagtcttcgatgggcccccagatatgaagagcaccagctggctgtgctctctttctcttttgtgcgttcacgacgtcatatctaccttcagcgatcgctgatttcgtgctcgatagtgaaggtagccgtcttgacaatggtggcacatagtattggttgggacggagggcagcatttcgggggataggtgcagcgcctacggggaatgcaagatgccctctcactgtggggcaatggggcagtgagctcgacgtatggattgggtcaatcatctcgtcggcatatcgtgtccgttttatcgccg

SEQ ID NO: 132828 - DNA, 342 bp, Glycine max
  Clone ID: PAT_MRT3847_90950C.1
ggggcaaccccttaaagatatggggttaaaacccctaaaaattcgattttttaaccacaaacggggatccgaaaaaaccccccaattaaaaaaaatgctggggcgtaaaagccttcaaggggaaaacacacttttgctttattcaagggctccccccctactttaaaggggccccaaaaaactgttaaaagaaaattccggggatacatattaaaaaaacaggctccccccctcatggggaaacaacattggccagggacaaatacgaagagcttgaaaaaaaaaaggaggccacttgctcccaaatgaagaaaaaacaccattttataacccccaaggggg

SEQ ID NO: 132829 - DNA, 349 bp, Glycine max
  Clone ID: PAT_MRT3847_90951C.1
acacaaataactcggtgtcagtgtgagcagttgataagagagatgatgatcaacgtgaaggaatcgaccatggtgcggacggcggaggaggtggcgcggcggatggtgtggaactccaacgtggacctggaggtacacaattggcacacgcccagcgtatatttctataggcacaatggcgccacacacttttttgacagcaaggttatgaaagaggcactgaccaaggggctggagcccttgtaccaaatggctgggcggatcatgcatgatgacgacggacgagtggagatagactgggacgggcatggggtgcttgtcacggaggtcgtcactgggggcgtgatct

SEQ ID NO: 132830 - DNA, 231 bp, Glycine max
  Clone ID: PAT_MRT3847_90952C.1
aaaatactgtacaaactcttcttcttttatagaaggatttattaattcaagaagatctcttctgcaatcaaaataagaattcaaaactctttgcctaatctaagcaaatcccaaatattctcctacctggaaatcctcactcaaaaactcataacaagaaaaaaaaattaaaaaaaatttaatgagctcactcccatcccggttacatattccgctttattacacccaaaa

SEQ ID NO: 132831 - DNA, 469 bp, Glycine max
  Clone ID: PAT_MRT3847_90953C.1
ggctcgagaacaaataatcatgaataattgtcttagggaagacctaatgccggatttaaacccttgcaattctcaatttccttagctaagccaactcttcccatgcccttattatttgctcccaagtgcaaggtgaattcccagttctaggaaaattggaatagttaagcattatagagctgaggagaaaatctataaagttaagtataaaatagttgagatgaactgtgctatcaagtgtataattgaggtaacagtactaccatgatctatttacattcttcttaaccaaattaaattaatgatccaaattagcttaatgcacggaattgcttgctgcctggagaccatgaaaataaaagaagtctatcaacagttctaatattggtcaagaaccaactaccctgtagcatagtagttagtcccaaatagtggtgtggagtggctgctccccaaaaacgctaaagca

SEQ ID NO: 132832 - DNA, 381 bp, Glycine max
  Clone ID: PAT_MRT3847_90954C.1
ttggatttttctagcgatagtctacatcctgagggggaggctgggatctatactggaactggagaaggcaaatatcctttggggacattggctgatcgccatactggggcaggagagaggatttatttgtcgttggtggcaaaacctagacactgtggcaggcgggaactcatttaggtcctgacaaaacagcggccactcaagatcacccacttgacgaacgcattctaggaaagacatgtggtgcgacaattcatggacaaggacgttctgctagacagagtgaggtctatgaaaacttgcactgaaccgcgagtgcaaaacacggtagtgacaggacgattcacagcgagttcaacgattaggtaggccttacccttg

SEQ ID NO: 132833 - DNA, 1038 bp, Glycine max
  Clone ID: PAT_MRT3847_90955C.1
cccacgcgtccgtacggctgcgagaagacgacagaaggggaaacacattggttatcaagagggggatgcagtactcccgtagtttggaactttcggaagtcgcgcgttgtaattaaccgcaacccgaaacggtgcactgcagtcttgtctaccatcggcgttcactgctctcccagagagaggcgagagccactgaaacaaaacaaccatcaaatcaagtttaaatttcagttctgttctgcttctaatggtaatggggagtttcagaaacgctgcaatcaacgtcgtcagagtgatcaattccaacaaagccaccatcgctgcttccacaaacccccttcacactctcaggtttacccctttctcgtcccacactcaaaatcaaaccctggaaatcgatttatctaacgaagaaagcaaaagacgcttgtttaaccagctattatatagaagcaaacagcgagggttcctggaactggatttggtcctcggaaaatgggttgaggacaacattcactccttggatgaaattcggattaaggccctcattcatgttctcgacctggagaatccagatttatggaagtggatatctggacaggaacaacccccagaatcagtcagcacaaacccggtctttgctgcagtgcgggaaagagttatgaaaaaccttgataatcattctgctcctgaagtaagagcaacgcctggccaaccatgggtaagaggctgggatgatatcaagaaaggacaagatggccctgtttctggaaatcagtagcttgacattcaatgatcttatcatctattacaatgaagaaaatgtggtccaccattgttgactttgtaactatatataactaaataagggctgggtaactgcaactcaaaaggtttgtattagctgctagaaatcagtaaagggatttaaactgcatgattttgactttcttacgaaatctttactcttcatctgttttatatccagtaagtttattgtttatatggtaaagtagaattaatttaggtgtaaataga

SEQ ID NO: 132834 - DNA, 865 bp, Glycine max
  unsure (1)..(865): unsure at all n locations
  Clone ID: PAT_MRT3847_90956C.1
taaccgataacccgaaacagtgcactgcatctggactcatcggcgttgctgtgctcccaatcctatttacacagagagagccactgaaacaaaacaacgatctaattcaagtttaaattttcagttctgttctgcttctaatggcgagtttcagaaacgctgcgatcaacgtcttcagagcgatcaatactaacaaagccaccatcgctgcttccacaaactctcttcacactctcaggccccttttttgttattctaggtctacccctttctcttcccacactgaagctgaatccctgcaaatcgatttatctaacgaagaaagcaaaagatgcttgtttaaccggctattgtatagaagcaaacaacgagggttcctggaactcgatttggtcctcgggaaatgggttgaggaaaacattcactccttggatgaaaatcggattaaggctctcattcatgttctcgatctggagaatccagacttatggaagtggatatcaggacaggagcaacccccagaatcagtcagcgcaaacctggtctttgctgcagtgcgggaaagagttaagaaaaaccttgatatccattctgctcctgaagtaagagcaacgcctggccaaccatgggtaagaggctgggatgatatcaagaaaggacaagatggtcctgtttctggaaatcagtagcttgacattcaatgatcataccatctattacaatgaatgaaatccggtccaccattttttactttgtaactataaataactaaataagggctgggtaactgcaacnttaaaaggtttgtattagctgctagaaatcagtanaggggtttaaactggatgattgtgactttcttgag

SEQ ID NO: 132835 - DNA, 291 bp, Glycine max
  unsure (1)..(291): unsure at all n locations
  Clone ID: PAT_MRT3847_90957C.1
ggaagaatcaatgtctcttaaaacctaagggtacttacgtacgttctgcaacaactggtgaaggctgatgggtgtacatatctgaatgcaatggtgcatgataattcagtgtctacaataccaggtgattttgtcattcgtgtcaacttgacaaccataaacaatctgtgtacatatgtgctcaatactggtatatgaggttctcgtcttttgggcaccattcctcagtccatttcacagcaaactgtttggaatcaaatagcaacagtgngaacaccattgaatttttat

SEQ ID NO: 132836 - DNA, 208 bp, Glycine max
  unsure (1)..(208): unsure at all n locations
  Clone ID: PAT_MRT3847_90958C.1
ttccagttgctctatactttacagcttattcctctaccttaaaaagatcttcccctttctttacctgaattattactgttgtttctgcancttccttataaattgcggcaattgtggttgttatcttgtctacaacgtggacctttttctgctgcagtgcttctgcgatctgttgcaagtcagcctgcacatcagctggcttggcttt

SEQ ID NO: 132837 - DNA, 364 bp, Glycine max
  Clone ID: PAT_MRT3847_90959C.1
ctccctacaacgaagacagggagggaatgaacgaacctaagaacagatctcactttatgtccttttcaattcacatacacagaccaacccctaaatctccataacacattcattctctctttctctctaactctctggataagatcttcagatacagagggaccccacttcctccattaacataataacaatatccataacttctcaataccaaaactcagaagaacccatatgatctgggttgttcccgtgatgaagacgaatcctcgtttcttttgaggactatgctttggtctgatcctcctcccctcggcgccgattctgggtgtgagccaaaaagctttcttttttttcgctccattac

SEQ ID NO: 132838 - DNA, 915 bp, Glycine max
  Clone ID: PAT_MRT3847_9095C.1
gttaaagataaagaaaagcccaaaaggcccaaaaaggttgcacaccaccgcctcaatcggtgctatctgctgccacacgcatacaggcaggcacaacacaaaggaaaacgtgatgtgatgtgatgtgatgtgatggagtctacaaaggaacaatctggaatgctgcacaagatcctacctccacgtctagaagatgccggcctcgaagatcctgcccttccacccgattccatccacgaagcttttctgaaggccgccgccgccgtcaaatcacgcgccgcctccattttctcctccaccgacgacgacaacgacggaggttgcgtcagcgacccgtggcccagcgccaaggacgcctccgatgcagtcatcggagtcgaatcggaaaacgaactgccgggatcctgcatcgtagagaggggagtcgagcccgtcgccgacgaagtcaaagttgctggtgaaggaggcgacgcctccgccgacgtggtggtggagggaggagacaaattaggagaggatgtggaagcgtgcgttgatgagttgcaagggttggatatcaaggatgtgaagaaaggtggagaagaagatgatgaagaagaaaacaagaaacctaccttggttgaaggctatgtgtgaaaaaagggttaaatctttatgttcttgttctttacccacttgtactagtagttttctgtaataatcttttaagtgtcttaacgtttgtaatatgaagaaagtttcttcaatgttcataatcaatgccttcgtttcacataatctatagtctttttgtattactatatagctggctaatatgctcatattttatgagcttttatttagttagtccaatctgctagaatcacattgtaaggcttgttttttgtgtatgagaaaaaaatgtttgattcaggg

SEQ ID NO: 132839 - DNA, 207 bp, Glycine max
  unsure (1)..(207): unsure at all n locations
  Clone ID: PAT_MRT3847_90960C.1
acagaancggaaaagcgggccgaccgcacgcgtacggncattcattcataacatattatcagatttttacacaatagttgtactaaggtcaaaaaagcgtgtactcatgtactgcaattttaaaagcattgcaactgagaattaattactttttccgtcctgnaaaaaaaaaagaaaaccaaaaaggaaatttaccttcattgttta

SEQ ID NO: 132840 - DNA, 225 bp, Glycine max
  Clone ID: PAT_MRT3847_90961C.1
aagactttgggaattttttggaaagctctaacactttaaccatgattttaatattcaatcaacatccccatgataagtttggtctaagactagaaaaaggagcatcatcttctaagtcacaatttgtcttagacaaatgtgacttctatggtaagtctggaaatttcaagtttagatgcatccataagaagaaaaaaatgtctaagggtactaatgcctatgggc

SEQ ID NO: 132841 - DNA, 247 bp, Glycine max
  Clone ID: PAT_MRT3847_90962C.1
tcccaaatcaataacaaacaaaccaaacacgacataaacgcaaatgcaaatgcaaacgcagatgctaactccgacgaccggagtaccgaagctccggccgcgatccggccggacgccgcttcagcttaagaactctccggccgatcccatccagccttccgcgaactcaagtcgaagccatattttgagatttcgttgatcgataaagagaacaatccgatcgtcgccgttgccgttccgccggctg

SEQ ID NO: 132842 - DNA, 256 bp, Glycine max
  Clone ID: PAT_MRT3847_90963C.1
accacgcgtccgctttggataacaacaactatatgtgcttaccctatgctgaagacatggaggatgatggccacaggatgaagaatgccaacatgctgaataagattgcagtcttgtggaagaagcctcaaacatagttgagatgatgtctgatttatgaagcgttctgaaattgtagtccaataaatagcgtgttcatgtgatgtctattactatgtctcttgcaaacgtctgacccctacattatcctctgtac

SEQ ID NO: 132843 - DNA, 419 bp, Glycine max
  Clone ID: PAT_MRT3847_90964C.1
aaagcccggaattcggctcgagctcgagccgaataggctccaggccttcttctctttttctgcaaccagaatattattactagggacggggactatcaccaaggcagcaggactggctttcctacaaactgtgaccatatttattctctcttcaaaccttcatgggaacattacaaagaaactaactgtgaccccactcatctcaacttgttaagaatagcatgcttgtgcgggacagaaagaaacttcccttattacaggatttagtgagattcatgaccactaaagaacttagagagaaagagaaaaccaaagttaaaccttaaggatagaccaccttcccgcggaaacaagtatcactattcttctcattctaggacccgatgaatcgttactaaactacacaaattgcaatttca

SEQ ID NO: 132844 - DNA, 1165 bp, Glycine max
  unsure (1)..(1165): unsure at all n locations
  Clone ID: PAT_MRT3847_90965C.1
gatccaaagaaaaaacaagaagctcaattgtctagttgaagagcttcaaaacaagatttacaagagaaaaaggggaaatgggtattgcttatctcaacatgccaggcttcatgagggcaatgtttattatgttatgtgctatgatgatattgccggaactaacacatgcaaagcatgcaagagtcactaggcactacaagtttaatatcaaaatgcaaaacttcacaaggctttgccaaacaaagagcattgtaactgtcaatggacgatttcctggtcctagaatcatagcaagagaaggagacagaattgtggttaaagtggttaaccacgttcaatacaatgtcacccttcattggcatggaattcgccaactgaaaagtgcatgggcagatggacctgcctatatcacacagtgtccaattcagacaggccaaagttttgtgtacgacttcacagtcattggccaaagaggaacattgtggtggcatgcacatatctcatggcttagaacaactctctatggtcccattgtcattcttcccaaaagacatgtcccttacccattccctcaacctttcagagaagtccccatcatattgggggagtggtggaaagcagacacagaagcagttataaaccaagcaatgcaaacaggattggcaccaaatatctcagatgttcacaccatcaatggtcttccaggtcctgtctccaactgcgcagccaaagaaacattccagctcaaggtgaagcctggaaaaacatatctgcttcgtctgatcaacgctgcacttaatgatgagatgttcttcagcatagccaaccacacccttaccatggttgaagctgatgcagtgtatgtaaagcccttcagcacaaagattggtctgatcacacctggtcaaaccgtcaacgtccttctcaaggccaaatccaaggctccaaatggcacatgtgccatatccacaaggccctatgctacaggtccagcttcttttgatacaccacagccacagggttccttgagtacaagaaaacttcacatgncgagcacaagtcaaacaccaagaagcttcctcttcttagagcagtgttccctaaattcaatgacactgtctttgcaatgaacttccacaacaggggtcgtagcttggccaatgca

SEQ ID NO: 132845 - DNA, 177 bp, Glycine max
  Clone ID: PAT_MRT3847_90966C.1
attcatatgattgtgaaagaattataatatacgtgatccagaataagaaaaaaggccactgcccatatggggctttaaagaaaaaaatggtttgatctgccccactttccttttttggagtgattagttgtttaagaaactagttttcctggtggccgggatccttaaagccttggg

SEQ ID NO: 132846 - DNA, 241 bp, Glycine max
  Clone ID: PAT_MRT3847_90967C.1
gaagaatatgtgcaacgaattaaagatagcgttggatagcgcttcgcgatgcacgaaagagaagaaatggaagcaaagtttctgagttttgtctttcatataaaatatgttaaattattattttctatgataggattggatacttggcttaagtctcttgtttaagaattttggtgtattttaaccattgtaaagcactttgcgctgtgtctgcatgatcaagtacaactactagcatgct

SEQ ID NO: 132847 - DNA, 195 bp, Glycine max
  unsure (1)..(195): unsure at all n locations
  Clone ID: PAT_MRT3847_90968C.1
cattgttggcgctatagttcaatactgacttatccgaaggatctggtaaaacaagactacacacccatgctngngaaagtggcaaaaaggctagnnnnggagccctnaaaaaagatatatggcttcaggaaggacccagagcctctnatatggggttgagtncggcttgtgctcggggattgtaccttatgccgg

SEQ ID NO: 132848 - DNA, 142 bp, Glycine max
  unsure (1)..(142): unsure at all n locations
  Clone ID: PAT_MRT3847_90969C.1
attcgntcctcaaactacttaagaaacactcagtttagcaagtgaatagaagtagtgggggaagcaggggaaaaaattttagtttggaccaaattccagaaaattacccatattatggagacaaatgctaaaattctgattt

SEQ ID NO: 132849 - DNA, 397 bp, Glycine max
  Clone ID: PAT_MRT3847_9096C.1
acggccgagaagacgacagaagggttagtggatatattatttatcaacaaatttaatttggtatttattatactatcgttgatgagaaaaaaaatattgataatataatataatttttaatttgtgatcaattatgttgtaagataggtgacccaataaactaacacaatgagatattaaaattgtttaattattaaactttaattaataaatttgtagttctagattagaatttatactaaacataatttctaattatttgaaactaaacattgtgaaaattatacacataatgcatatttattaaattttattataaaaattatcaaaatatgtgatttaatgattatattttttttacactatgagtacatatattatttattctttttatatc

SEQ ID NO: 132850 - DNA, 229 bp, Glycine max
  Clone ID: PAT_MRT3847_90970C.1
cttgcctggcgtcgtgctgcgcagcctgctcatgcaacgcctgcaataccgtcgtatctggagacagccgccgttccgccaggatcgcctacatggtgctcttcgcatactctctcgttcgtcgctggatcatccgtgacgtcgccgctcgcctcatggaatcgcttcgctggatcaatcacttcatacacacacgtagccgagaatggtttgaaacggatgcagttct

SEQ ID NO: 132851 - DNA, 749 bp, Glycine max
  Clone ID: PAT_MRT3847_90971C.1
ccacgcgtccgcactgccaagccacgcgtccagacagagacagaggagagagaaaccaagagagacagaggcaaagacagagtagcctcctccttcccagtgaaaaacaaacaagaggtgaaagcttgagagcatataaagcttgaggcctgatttctgcgtttctcggagaatttgtcttcaaaaaagaagggcaaccagtggatttatgtcgtctgggtttattctggcagtgattggggctccgttgaagctcttcattgtatatgctttcgtttctttcttcttgactctctttgtttgctactgttgctgtatgctacactgcattctgagccacaatactgtgaacctacctgtttcaatgcgattgaggccaaaaaggacttgttgtggagtggagtgtttcggaggctttcacatacaaagattttcttatctcttcatattcttaagaggggatttcacctaagaccttgagagattttgctacctttttttttttgttccttggagattcccttctttgattcgattcggtttcctttctgggtactcttgaggaggtttttggagggtttttctctttatttttttttaccaccatgtccgagtttcgaaaacaaccggcttctagaccgaagcaaaagcttcgcaacagcactcctcgaaagagtcaaaggcgatgagaaaacttcgcatcatttgcgacgatcctgatgctactgattcatccgaagatgagactg

SEQ ID NO: 132852 - DNA, 889 bp, Glycine max
  unsure (1)..(889): unsure at all n locations
  Clone ID: PAT_MRT3847_90972C.1
ccacgcgtccgctctgtgtcaaggtcggctatttttttttcttctgtatttattggacttggttcgtccgaaattccccctagtgttttcttcgtctcgataaaactagtatttttgttgtactggaggatacaatcttggccatagatttgtaatttttttttaatctgaggaactaaactaggctagagtgtttttgttttgttttttggttatatatatcagcatctttcacttgttgatactcttttctctcctgcttgggcgagtgaagaggtgaaagcttgagagcatataaagcttgaggcctgatttctgcgtttctcggagaatttgtcttcaaaaaagaagggcaaccagtggatttatgtcgtctgggtttattctggcagtgattggggctccgttgaagctcttcattgtatatgctttcgtttctttcttcttgactctctttgtttgctactgttgctgtatgctacactgcattctgagccacaatactgtgaacctacctgtttcaatgcgattgaggccaaaaaggacttgttgtggagtggagtgtttcggaggctttcacatacaaagattttcttatctcttcatattcttaagaggggatttcacctaagaccttgagagattttgctaccttttttttttgttccttggagattcccttctttgattcgattcggtttcctttctgggtactcttgagggaggtttttggagggtttttctctttatttttttttaccaccatgtgcgagttttcgaaacaaccggcttctagaccgaagcaaaagcttcggcaacagcactcctcngaagagtcaaaggcgatgagaaaacttcgcatcatttgcgacgatccctgagctactga

SEQ ID NO: 132853 - DNA, 126 bp, Glycine max
  Clone ID: PAT_MRT3847_90973C.1
cggtgttcgcgtgtccgatttgagtcgtctcttccattagttgggatctcctggatttgacaaaggtgctggtggtgtcccacgtagtaggcttgtgattcgatctaggcctccagttactttgga

SEQ ID NO: 132854 - DNA, 1338 bp, Glycine max
  unsure (1)..(1338): unsure at all n locations
  Clone ID: PAT_MRT3847_90974C.1
actgattcatccgaagatgagactgagaaggttcagagcccgagaagagttaaaagaaacgtgtctgagatctctcttccccctcttcctccaccattcaccaccactcctgaaaccagctcctgtgaggtgaatagcggcaaaaatgcaacattgaagggtttcattgaaggtcaaccccagagtaagaagagggttttgactcaccccccatcaacaaggaggaacacttctgggaaattcagaggtgttaggcagagaaaatggggtaaatgggctgcagagattcgtgacccctttcagagtactcgtatatggctcggcactttcaacactgcagaagaggcttcccaagcctacgaggccagaaggcttgagtttgaggctatggcagaggctcaagcttacaaaactagttctgtttctgaacctttggctacaatttctgataataagagtaactgctgtaactcttctgccgctgctatctccgccgctgccgtctccgccgctgatgtgtctgtatctgagaagttttctactacttttgatgacttagaagagagtgtgttgtctcacaattcaccatcctctgtgcttgagctggatacattggcttccaaatcccttgagaagggtaatgtttcaaccgaggaagctattgaggctaatgatttggtggctgaacttgcagggttagaggtaccagatgtcagtctgttaaacttgttaccaccaccatctgattcntggtggtgcagctgctgctgtttcatctgggattgagccaaactttgggcttgattttgattggctatcgtttaatgattatggacaaggttttgatgatttcggtggcttggaagatattcatattggtgggtttgatgacaatgagcctactgagcttcctgattttgattttggtgattttggtgctgatgagtttgctggttggattgaggagcccctgaatataccttgtgcctaagttttgcagaactacgtaggaatatgaggctagatttctacaatattataagttttgttatttataagttagtctttctgtgagatctcaggaatgatgagttagtttttctgtgggatctcaggaatgatgagtgagtgaatggttactatatgcgttttacatttcatttgtttttgatggagttgttagttagagcagtgagatggtgagagaatcctttgggttttcccgtgctgttaaagagccgtccaagggaatctcgaaccatgatactatgtcgtaatttcaaggttcttcaatggcagagtattaatggaatgaaagttaatgttttgcatcgtttt

SEQ ID NO: 132855 - DNA, 2397 bp, Glycine max
  unsure (1)..(2397): unsure at all n locations
  Clone ID: PAT_MRT3847_90975C.1
gtatttttaaaaatataaaattctcagtctggcgtgtttttatagagatttgcgttcgtttcactctctgtgtcaaggttggcttttttttttttctcttttctttttcttctggatttattgagcttgtttcacccaagtcacatgccagtgttttcgttagagcgataaaaactagtgttttgttgtacgggaagatacaatcttggccttagatttgtaatattttatctggggaactagaccagactgtttttgttttttggttatatatatcagtttctttcacctgttgatgctcttttctctcctgcttgtgacggctgcgagaagacgacagaagggggagacagaggagagagaaaccaagagagacagaggtccctcctattcccgagtgaaaaacaaacgtcaggtgagagagcagataaaagcttgaggcttgatttctgcgtttcttggagaatttgtcttcaaaaaaagaaggggcagcagtggatttatgtcgtctgggtttattctggcagtgattggggctccgttgaagctcttcattgtttatgtttccgtttttttcttcctgactcgcttcgtgttctactgttgctgtatgctacactgcatcctgaaccacaatactgtgaacccatctgtttcaatgcgattgagaccaaaaaggacttgttgtggagtggagtgtttcggaggctttcacatacaaagattttcttatctcttcatattcttaagaggggatttcacctgataccttgagagattttgttaccctaccctttttttcttcgtttcttactttgagatttcctttctttgattccatttggtttcctttctgggtattctgaggggtttttggagggttttttctttctcatttttgtcacatccatgcccgagtctcggaaacaacacgctcttcccccgaagcaaaggcttcatcaacactcttttcagaccccaaggcgatgagaaaacttcgcatcgtttgcttaacaaaggtcctgggaacacattcctgagaggaaataaaccggaaacaaccggcttctagaccgaagcaaaagcttcatcaccactccttgcaagagtccaaggcgatgagaaaacttcgcatcatttgcgacgatcctgatgctactgattcatccgaagatgagaccccgaaggttcagagcccgagaagagttaaaagaaacgtgtctgagatctctcttccccctcttcttactctggggttgaccttcgatgcaacccttccgcattatgacaatgagctactgagcttcctgattttgattttggtgattttgcttagtttgcgggattgcccctgaccttgtgccgaagttttgcagaactcgacgtaggaatatgaggctagatttctacaatattataagttttgttatttataagttagtctttctgtgagatctcaggaatgatgagttagtttttctgtgggatctcaggaatgatgagtgagtgaatggttactatatgcgttttacatttcatttgtttttgatgnagttgttagttagagcagtgagatggtgagggaatcctttgggttttcccgtgctgttaaagagccgtccaagggaatcccgaaccatgaaactacgaaggaatttagtaggctggcagagattatactgagaaacgagtttataattcaaactataaatcatggcaatacatcatggaagtatgccaaggcttcgtattcttaacaaagagggggaagcaaactcagcagaggttataatttacaaactataaatcagagttttaatacatcttgaatttagtaggccaaagctagtattcttgttctagcatattttctcaacacttattaagttactgaaaatgtcatccaatagtttctcaactcatgcaaagaacacaggcatacatgacgtgacacacatgtcacaacacaatcagcatttttgcatggttaaaattcctgttcagatggaccaaaatatgctgtattcagattaaaaataaaaacagtggtgtgtttgtcaggtaagtagagagagaattcatcaagaacatctcacagtttgagttttgccaggctctacagcaggtttgctatgaggatcagtggcagtctttcctggtgaatctgggttaccacctgtctttttctcatctattaaaaatcactgtgaacccctcagctgaggttggatcattgacatcccattcaccaaattttggaagtggccggcccttttccgacatcaatacgacgaggaaatgttttcagggaaaggaaaaggagcgagtaaactccaattaataaaaggaatcggagagaggagaaaattcagagagagagaggagagttccatggcc

SEQ ID NO: 132856 - DNA, 226 bp, Glycine max
  Clone ID: PAT_MRT3847_90976C.1
gtttgagtcttcttgatccttctttttctccttgaactcaaacatggcagatgaggtggttctgctagatttctggtcaagtccatctgggatgagggtcaagattgcacttgctgaaaacggtatcaactatgagtacacagacgaggacttgaggtacaagagtacagttctggtcccactgaacccggttcacaagacgactccggttctcatccaccatggc

SEQ ID NO: 132857 - DNA, 383 bp, Glycine max
  Clone ID: PAT_MRT3847_90977C.1
cccaaaggggaaattggacacataaatttgattttttaaaagcaaaccaagcaaaatttgaacccaaatttaaagttgccttttaaaagggaaaccaacaccgcaacgggaaagccctaaaacttggtgggcttaacaaaaatgtattgaggggttctcccaaacccaccacattaaaacagaatgataaagggggtcttgccaccggagatcaaaaacccaattttgggaacaaaagttgcaaaatgatgggggagacttcaaactatgtccgaaaaacaagctccctaaaaacgaaaacacaagggcaagaaaccaacattttttgtaaccataaaaaacgacattccttgatgaaccaaaccggacgattcacttttttt

SEQ ID NO: 132858 - DNA, 1977 bp, Glycine max
  Clone ID: PAT_MRT3847_90978C.1
accgtccgaattcccgggtcgaccacgcgtccgggtgtcaagttttcccatttttttttcttctggatttattggacttgtttcacccgagtcacagcctagtgttttcttcatatcgataaaactagtatttttgttgtactggaggatacaatcttggccttagatttgtaatttttttttaatctgaggaactaaactaggctagagtgtttttgttttgttttttggttatatatatcagcatctttcacttgttgatactcttttctctcctgcttgggcgagtgaagaggtgaaagcttgagagcatataaagcttgaggcctgatttctgcgtttctcggagaatttgtcttcaaaaaagaagggcaaccagtggatttatgtcgtctgggtttattctggcagtgattggggctccgttgaagctcttcattgtatatgctttcgtttctttcttcttgactctctttgtttgctactgttgctgtatgctacactgcattctgagccacaatactgtgaacctacctgtttcaatgcgattgacgccaaaaagactgttgtggagtgagtgtttccgaggccataccttctccttcgacttgaaaacttgatcggcaaagaaatcaaaggaaggaataaaatgggttcataaaataggatttgtttgttaatacaagcaatacaatgtgacaagcaactctctagctcatagtgcaagacaaggcaaaacaggaagcaaccctggctcctaataataaaccacaacattgatacacacacataaataatagtctgtcttcttttctttcccccattgcagctcacttttacagcacataatagaaattccgtagaattcgcttatgactctacagctcttatcttagagaaaatactgtgacgctagttacacaaacattgttcttctgttcaggcttttcacaggagcaaccattgctatgctatgattcggcagaagggttttgcatgcagcaaaaccattttttagtttgagttttgccaggctctactgcaggtttgctatgaggatcagtagcagtctttcctggtgactctgggttgccacctgtctttttctcatccctggccttattaaaaatcactgtgaacccctcagctgaggctggatcattgacatcccattcaccaaatttgggaagtggccgacccttttccgacatcaatacgaagatgaaatgttttcagggaaagaaaaaggagcgagaaaactccaattaataaaaggaatcggagagaggagaaaattctgagagagagagagagagagagaaagagtgtgaaagtgttagagagagaaagtgcgtgatgacgatgaagaaagaaaagaagagtagtagtccttgttgcccccttctgtcgtcttctcgcagccgtacaatgcaagagtattatggaatgaaagttaatgttttgcatcgttttttctccagtctcatagcatatgaattggtcgtctcattgatatttgtctttttattcacgaatttgcccatgtgcgaagatcttttttgtattttcttcatatagtcatcaaaatctcttggctggttgatctgcctaattatcagaatggatcatggtcaccctttatcgattaagattctaaaattggataaaaaggatgtttagaggggggaagatcattatattgtcttgcttccgttgaatcttctgtgcgcaaatgcattcttcttccgcaaaggttaccgcaattagatatgcctaaaagaattctattattccaacgccaaaatggatctcaatcaatcaatggttacttcaaccgacaccggcggtgatttctcagccgtcgtcttcttcttcggccgcggtagatccgtcatcggcggtggttgatgacgcgccactcgaggcggaggaggttaaggctccgcaacagaaccggtgtatgacgtgcaggctgcg

SEQ ID NO: 132859 - DNA, 302 bp, Glycine max
  Clone ID: PAT_MRT3847_90979C.1
gctttttagtttcagttagatcagcatgaatgttggtatgggaatctgtgacaactagttggcatattataactatcctgcatccaatctaaatcatatccgaattactactggctttccaactccacattctcaagaaatatgcacacataaatgtccatatatgaattcacactatatgttttcttattaagacctatcctgaagacaacggaaatgagatcggaatacctatccatatcccacttcctcattcacactacataacgattcaccaacgttcatatatgaattccaattac

SEQ ID NO: 132860 - DNA, 585 bp, Glycine max
  unsure (1)..(585): unsure at all n locations
  Clone ID: PAT_MRT3847_9097C.1
gctcccccacagtatattatttactctctcctcaagacagacaccaatgctaaaaaagggaagggagaaaaagccatgagaaattgcataaggtgctgcatctcttgcatcttcccatgtggggctctcgacgtgatccgcatagtgcactccaatggcagagtagaagaaatcagcggcaccgtcaaggccagtgatgtcatgaaggcacaccccaaacatgtcctcaagaagccatgctcttcccccgccgatgccgccggcatcagcggcggggtccacaagatcgtggtggtgccacccgacgctgagctccaacgtggcaagatttacttcctcatgccactccctcctactcctcctacacaagagaagaagaaccggcagagaaagaagaagaggaaggaacatagagagagaactatgaacaacaccaacaacgcgtccatgattacgtctatgactagcttgcttgtctctgatcgctacttgaatgatatactctcagagaaggtgtcaagtcaaagagacagaagaagagggcgtgtngctgtgtggaggcctcacttggagagcatntatgag

SEQ ID NO: 132861 - DNA, 134 bp, Glycine max
  unsure (1)..(134): unsure at all n locations
  Clone ID: PAT_MRT3847_90980C.1
ctttcctacagnnaggaggaaccaccccgcgcagggtacattagacaaacccnccgacacagggcaaccnnagagcaagagnngaanngcagcgcacccaccgcannaaaggaangaccaaaacggcggccaca

SEQ ID NO: 132862 - DNA, 464 bp, Glycine max
  unsure (1)..(464): unsure at all n locations
  Clone ID: PAT_MRT3847_90981C.1
nggacagggacagagattggttttatattttttactttggttagggatctttttcagcgaaggggaccacaaaaagccctgtgacaccggaaaaacttttttaacaaattggcatggttggttttttaataatggcatttaaaaagaacagttttttttttaagaaccacacttctacgttacaaggttttgataatgatccaaaagatttttccttgctcattaagatagaattcaaactccacctaattacccttcataatctccctgagcaaattttttctgtggataaaaaacacttcctacttgatttccatgaatttttgggccattaaaacccgcccgggcttttgttgcccccctaattttaacgttgttcaaaaacacctttttaactccaagggtaggtttactataaaacggggggtgtgggatccccaccttcaccaaagtaccaaatttgg

SEQ ID NO: 132863 - DNA, 608 bp, Glycine max
  Clone ID: PAT_MRT3847_90982C.1
tgactgccactgccgcgtacttggacctctgtacactcgtgagcagccctcgccctttttttttatatcttcttcctttgtcttttccttcacttcttatggatcctcatggaaatattctggtgctggcactgccttgattgcattcatgtcttcctctggttcttcttcctcattgtcctcttcttggatgtatagctttttgtggcgcgctttgtctctgatgtattgatccatgacctctagcttcttagctgagaccctctcaatctctgggtactcagtatagcgggcaaccccgacactcttggaccagctgtacaacaggtctagttcctcatactgtttcccaactcgacaaaaaatgtcatataccttaatgccttcaggtaactacatgccaatgaaactgacaatgaatatcccctgtatttatgtaatgtccccttctattagaaaactctccttcacaatttgatagcagagcactatcacaattggagagcgattagctctccctgtgggacgacaagctagaaagcgctcacccaccaattgcaattgctgcattttggaaaatagcttctcacgcttcatttcacacaatg

SEQ ID NO: 132864 - DNA, 435 bp, Glycine max
  Clone ID: PAT_MRT3847_90983C.1
ggaattttgccccaggaaagccttagccatgcttgaagagttacaaaacaaggaaaaggtcaccaccccaaactgttggtctatagtggcaggtggatacattcacaagggtgagatggagaaagcatttaagtgctttaaaacagccctctctttgtacgttgaaaataaaggatggaagccaaacgcaaaggtgattgcagaactattgtgttgttattggtgataatggcagtgttgaagatgcagaagttttggtcagcttattaagaaatgccgtcccagtgaatagacaaatgtatcacaccctaatcaagacttatatacgaggtggaaaagaagtggacgaccttttgggccgcatggaaaaagatggcatcgatgaaaacaaagaaactaagaaaatcattaacaagaagaatgcttaaagtgatg

SEQ ID NO: 132865 - DNA, 533 bp, Glycine max
  unsure (1)..(533): unsure at all n locations
  Clone ID: PAT_MRT3847_90984C.1
gcgagccctgtgtnngcatcnngacgctnnnctcacacnnaacaaccccttctctncgtcccatggcgnnnatgatgannntcttcnnttccttgtgagtctacccgagtcttcncnnttctcacgttagcgtcgagcagccttannatcacgctgtttnnngccctcctctcgcacctnnccgcacattctctacctacctaccttgccatnnttcgacgaggggaaggtnngttttcttcacccgacgaccttncaacctaaannaagctgaaaacccgcgccaaggggatnttggaatttannaattcagcttggggcagagggttgtttcaagctaccgctggcctntngatcgcgttaagcagaattcatagannacggattgggaggccaactctttattgggaaannntcatttgcaagattggtttagaaatgaagcagtggagggtagggcactaattcnncatcttttactggggatatattggtgaccataccagatttcagaaatagcataccctgaaata

SEQ ID NO: 132866 - DNA, 483 bp, Glycine max
  Clone ID: PAT_MRT3847_90985C.1
ggaattcggcacgaggtgagattttatgtggaattttagcagcaaggccacgaggagtagctgatgtggcttgttgccagtggttagtgtatgtttggcacacgaggccagttggggtacccaaatggaatctaaccacatgaactcaattcatacctcaagaacaaaagaaaagccaaaaccccaattaaaaaaaagaaaaaaaaaacaagataattcaacaacaacaactctataaagaacaacaaaagcgcttactttcagaacctccagaaaatcaaaacaaacggggttcaaagcctgttaactatacttttacaatctacaggctttgttgtatcgattaaaagccatatactttcacttaaggaaagagatttaaaaatgaaaaagaaaaaaaaggaacccctgatttatgaatcaaaacccaacagtgatcccttaaagagggaaagactcacgtaccttggcaaatccatatag

SEQ ID NO: 132867 - DNA, 313 bp, Glycine max
  Clone ID: PAT_MRT3847_90986C.1
atataaaaaaaccatattattgattttgtgaaataaaatatttataataaccagggcgtttttaaattacagattcagggcaactttacatttgttttaaaaggggcatgctttattctagagtttttcaactggaaaaccaataacaggtttaattttttgaggcaaactacgcagtttaggttcctttttattagttagttttcaaccaagggcacccatgaattcctcaacttgttttgttgtcttggctcccggaaatgggacaacatattcttgtgctaccagccagttcaaggattcctggtttgga

SEQ ID NO: 132868 - DNA, 546 bp, Glycine max
  Clone ID: PAT_MRT3847_90987C.1
attagactctctctctctacacacacactttctgggacactctctatgtaatcaatagtttcaagagtgaactgaatatagcttatactactaccccatgtttatcttcatgtaaaattagctgcttttttatctgggtggtaaggaaaggggaatgagaagaacttgctaagcttggcaaaattggctcttttttgctttgaaattgattgtgtgatggagtttccttcctttgatcatttgaatgtttggagggaatgtgcaaatgtgcgagtttggatccttttcttactcctgctgctactgaagagtgatgtgtgttctggttctgactacttggttggtctcggaagctatgacattactggccctgcggctgatgttaacatgatggggtatgctaacacaggacagattgcgtccggaattcacttcaggctgcgggctcgtgctttcattgttgcagagccaaatggtaaccgggtagtggttgtgaaccttgatgcttgcatggcttcacagattgtgaagatcaaagtaattgag

SEQ ID NO: 132869 - DNA, 600 bp, Glycine max
  Clone ID: PAT_MRT3847_90988C.1
ccacgcgtccgcacacactttctgcttcactctttacgtaatcaatagtttcaagtgtgggctgaatatagcttatactactaccccgtgtttatcttcatgtaaagttggctgcttttttatctgggtggggaatgagtagaacttgctaagcttggaaaaattggccctttttgctttgaaattgagtgtgtgatggagtttccttcctttgatcatttaaatgtttggagggcatgtgcaaatgtgcgagtttggatccttttcttactcctgctgctactgaagagtgatattgcgtgttctggttctgactacttggttggtcttggaagctatgacattactggccctgctgctgatgttaacatgatggggtatgctaacacaggacagattgcatctggaattcacttcaggctgcgggctcgtgctttcattgttgcagagccaaatggtaactgggtagtgtttgtaaaccttgatgcttgcatggcttcacagattgtgaagatcaaagtaattgagaggctgaaagcaagatatggtgatctatatactgaagagaatgtggccattagtggaaatcacactcatgct

SEQ ID NO: 132870 - DNA, 233 bp, Glycine max
  Clone ID: PAT_MRT3847_90989C.1
gaaatcattattccactcacttattggagaccatcagttgtattagatgtccaacatctaggacagctctgaggctagttgtggcactgtgaatcccatggacaatttttgctgtttcagtcacggtactatctaaagcatgttgatgtgactgtgtctcacactatcatttcatatctgaagcacatgctcctctttgcgacattttgtttctgttcctgactaggttttgc

SEQ ID NO: 132871 - DNA, 244 bp, Glycine max
  Clone ID: PAT_MRT3847_9098C.1
ggactgggctgggaatgaagcttatgcagaatatcacttccgggtaggctctgaggctgaatgctatgccctccaagtatcctcctatgaaggcactgcgggtgatgctctgattgagggttccgtagaggaaggggcagagtacacctctcacaacaacatgcagttcagcacctttgacagggatgcagaccagtgggaagagaactgtgcagaagtctatgggggaggctggtggtataat

SEQ ID NO: 132872 - DNA, 676 bp, Glycine max
  Clone ID: PAT_MRT3847_90990C.1
gtcatcacaacacaaccccatgttgcatggagaaaaatcattaccattcttcatgtctcaaaccttgtaatttgtgactaacagactatcatatcaccaacacatattgaggaactaattcaacaattccatgaataatatacataagaactaccctcattcagaatatactatacacgagaagtatatcagccttctggtgaagtacacattcaacacatcatcgttggtgacaaaaactatagaacggcagtcaacatggactgcaaaagtgggagacacaaagaacctgtgaaacattgctatttgctgctacttgtgcttgtgcatcacaattaaaaaaaaaaaaaaaaaaaaccacatccatccaaacccaacaaccaccaccaagtatcatctgtgaccttcaaccaagccctccagctccctctgcccgaacctcctaccatgaagatcggcgtccttacaccgcgctgcaaagtaaaacataagccaagtcaccatgaagtaaacctccatggtggactgaaacatcttggccaaggacctcccgcaaacccggctcaaaccccacctcacaaacgacccgcaaagtatagcctccaagcacttcacctgaatagcctgattcaacatagtggatatcaaataacacccttccttcacaatctccctc

SEQ ID NO: 132873 - DNA, 249 bp, Glycine max
  Clone ID: PAT_MRT3847_90991C.1
aaaaaaaaggtcccggattcccttaattcccaagagccggggggcagcaataaagggcaaaggttccctaaaacctcacctgtaaacccagaaaaaaggtaccagggaattttcatcctcaaggcccaataaaattttggaaaaaaaaaatcactttttttaaacaaacgacagtcataacttttcctcgaagaacccatcaagtccctgggtttatggaaccaaaagctgaataccaatcggccccgg

SEQ ID NO: 132874 - DNA, 259 bp, Glycine max
  Clone ID: PAT_MRT3847_90992C.1
tacatgaactcatgctttgactgaaataagcctctatgagctgccttaatcttgcatcttcttagtgttcagacctttaaactgagtgtgtcttgatattgagctgcactctaccttgagtcactttttctttaaggctgaagtgtatctctgatatagaacattacatttggtacacccgggacctgagtgtatacctccttgcaattgaaggcgttgaactgtggagacctaaaacatggtaactcacctgcattaa

SEQ ID NO: 132875 - DNA, 492 bp, Glycine max
  Clone ID: PAT_MRT3847_90993C.1
ctttctcttcaacgaggcggccgagcggcagacgccaacatgcagatcttcgtgaagaccctgacgggcaagaccatcactcttgaggtcgagcccagtgacaccatcgagaatgtcaaggccaagatccaagacaaggaaggcatcccccctgaccagcagagactgatctttgctggcaaacagctggaggatggccgcaccctgtccgactacaacatccagaaagagtccaccttgcacctggtgctgcgtcttcgcggtggcatcatcgagccgtcccttcgtcagcttgcccagaagtacaactgtgacaagatgatctgccgcaagtgctacgcacgcctgcacccccgtgcagtcaactgccgcaagaagaagtgcggccacaccaacaacctgcgccccaagaagaaggtcaaatagagctgggccatacctggcctgtgaccccgggaccaaataaagtccccttccatcgactggagcagt

SEQ ID NO: 132876 - DNA, 265 bp, Glycine max
  Clone ID: PAT_MRT3847_90994C.1
tcggttgcagaccgagctaactagctagcaagcaaacacagagctggacacttatcgaggacatgcgctcatgtacatggtacgtgtcacactcaaccttaacgctctaatcctaactgctgctcaccgtatcaccactgttcatgacatcgccaaaaagttcactctccaggacaacgatcttctgatgcacggagtagaagttcaaagttttcatccagaattactcgcagaactactgcacagtgccggagtcttttcgccg

SEQ ID NO: 132877 - DNA, 273 bp, Glycine max
  Clone ID: PAT_MRT3847_90995C.1
ctgttgtggccactgccgctagtgcagtgcctgcctagcaacgccatggccattgaagtgttgctgggtggtgatgacggatctctggctttcgttcccaacaatttctccgtggcctctggggagaagatcgtgttcaagaacaacgcatgtttccctcacaacgttgtgttcgacgaggacgagattcctagcggtgtggatgcagggaaaatctctatgagcgatgatgaccttctcatagcgcctgttgagacttacagcgatactttg

SEQ ID NO: 132878 - DNA, 211 bp, Glycine max
  Clone ID: PAT_MRT3847_90996C.1
ccagcccccaaacgaccaccgatcctacgagtaccgacccatcagagagaccgtcgacacacgcgaaaagacgcgccgctacaagaccgacaagataacctacgccgacaccgacgacgaaaacgacggagccggcacgggggggcacacctgagcgaacgagaatagcaagaacccccccgagagtgacgtcaagatctatgtgattgag

SEQ ID NO: 132879 - DNA, 252 bp, Glycine max
  Clone ID: PAT_MRT3847_90997C.1
gctcaatcatgtgcgtggcatgctgtatgatgatgaactgactacaactaagtcatgtggagagcgggtaatgcgataatgcttcaaggtctagcctctgatgactggtagtgatgggtaggacaatggaagaggatatcaggcttagctctaagagagcactatcatgagatctccaatctatacactactatttagtggacgactcatatcatatgtagatagaagatactagtcctcggacatgacatg

SEQ ID NO: 132880 - DNA, 508 bp, Glycine max
  Clone ID: PAT_MRT3847_90998C.1
caacctcaaattttcttgatattcctcggtagaaaatcttagcttagatgttcatgtgatagttatttttgaagaaaacttaaacaactgagctcttgaaacccaacttcacagccaaacagtttttgtccaagcacaaaaaaccaaacccactttctaaacaacgaaatgacaatctaaaaactaaaattgaaccaaaacaggttgatgactcaaaccgtggtgttgtgcctgagttccggagactgacgcattagcagcacacgcctggcagagtcacagaacgacacatgtgggcacgttttagggttttggacttcgaaaccttctaggttaggccgcacttggtgaggcccaccagatccaatgttcattagaaaaaaatggcaatggtcaacggtggctagagacaacaactcatacaatactcagcaatgctggcttttagtactagcgggctttagggttaagcattccttgaaaagataagtaccagatttttgttttt

SEQ ID NO: 132881 - DNA, 331 bp, Glycine max
  Clone ID: PAT_MRT3847_90999C.1
ggctcgagctcaaacaccaattcccagtgttcagggtgagcttactactaatatcggaggattgacctctgcaagtaagccaggacactagctataatataagcagtgaatcttctgcccagatgtctgaccaattatttgagaatattggtgatcagaaaagctggagtgctacacttcctgagcaaattaatgacaattaccagaaggaaacattgcctgtatcagcttctgttgaaggctcactattgcttgaacagaacaaatccaaagagggacccggcaatgcccagaaacttcttactgttctgactatactgctaaaaccttg

SEQ ID NO: 132882 - DNA, 1502 bp, Glycine max
  Clone ID: PAT_MRT3847_9099C.1
ggatgtccatgtaaagtgcatgtcttgatcatttcataatgttacacgttttattgtccgagtacagcttgaattcaatactacttcagcaagcaaataacattactagaaattccacattgctggaaactcatttgaagatattctcagactcagacatcactcgaattttataatatccctatgcacgaagggaatcagtgcacatcaaaatattaatcgatatgcacatagaaatacaacctttttttttgtctataggttggggggttggttgagaagggacatacactattgctacaaaataaataattaaaagcgtactccatgttacacaacactatttatttatttatttaagaaaaccatcattttataaccatgagttcatcaaatcctcgcacaacttctcaattatgctatatggtacaaatgagcatcaattttcccagtaaaactagagtccctgatatcatagaggaaagattacatctttcttaaattgtctaaccttgcctgtaaatcactatctatccctccatcatcattcccagtcgtttcaacttgtggtacctttgtctttgcagccggggcagcaacagctgatgatggtgcatttacaagctcttggttaatgtcaatgccaatctcatcaagaacttggttaactaggtcttcagtttcctcttcatcttcttctccttccaaagcatcatctattgcatttcccatcatctcagatgtcaattccatcttctcattctgtctctcaaattcttgcatgattttctgcaatgatggcaagttcatctgcctattcatttgccccatggcctttgtcacgcctttcatagcctcacccattgcttgtgttgatttcaaagtctgaattctgagtgatacaccttggagctgagattttagcttataaaatttctcaacctgatgccttgttctaacaagatcttttgccataactctaacagctcccatctggccctgtttggcacttttctttatctccgcaatcaatttcttctcttgcgtttgcaagccttgccgctcgcgctcaatttctctgattgatttgtccagcatcctcttattttcccgcagaagctctgcgggtgtttttcgctttccgaagatgaaactcatggcggaggtggaaggaacaaccttggttgagatcgaacagaaaattttgtagaagacgagagaacagcgcctaatagattagcctccgatcccgttgttatgatatgagtttgggattttggagatgatgcttttggtttgatcacaggttgaggttgtttacgcggtaagcgttgaaacgaggaatcatcaacgaaccattgtcaccgtcgtttcccacacgtgccgcactcggggtcggacccaccgttgcgtagttactcagtttcctcgaaataacccaagccctaatgaactgagttagggtagcttgttttaggagaaagatagacaaacctcgagcc

SEQ ID NO: 132883 - DNA, 375 bp, Glycine max
  unsure (1)..(375): unsure at all n locations
  Clone ID: PAT_MRT3847_909C.1
atcttcctaatgtnaangcacgcntacgtaagctcggaattcggctcgagggcggacgcagtactgttcgagtttctgcacaccgagatggtggcggagctgtgggccccagacccggaccctggctcggggggaaagaagaagagcttgtcagtcctggagggcctgggcttccgcgtggggcaggctctgggtgagaggctgccccgggagacgctggccgttagggaggagctagatgccctcaagttcctgtgatcagatctgtgggcggccatgtttccaaaagcatatggacggactccgcacataccaccaggggacctatgtgctgcaggacaacagcttccccctcctcatccccatgggctcggg

SEQ ID NO: 132884 - DNA, 394 bp, Glycine max
  Clone ID: PAT_MRT3847_90C.1
gagcaggtcaagctgtttcaaacaacattgtttttgacgatgggcttgtgttggctaacacacaagaattctttgctggaaatgttgcagtggattcttggttaccaatgcttgagaattgtctttatcctgtcagtcaattaccttcataagctgtcggtggacatgttacatgtggtagcggacgtggtggattacccaccactgctaggattaatgctgcatataacaattgctcctcacattttaacaaaaggattcgcacagcacttgggaaaggtcagaaaatattttttcttactagagatgatccttttacagtagcttcactggctggtcttttaggcgttcataatgaaagtcttggttctcacgccactcaacctatgctgac

SEQ ID NO: 132885 - DNA, 964 bp, Glycine max
  Clone ID: PAT_MRT3847_91000C.1
ttttttaaaagactaacatatattacattagaagttgaaattacacctgtaagacaaaataaaatgaaataacagaaataatttatgatttcacggatttttgtaaataactaaaaacacaagttggatatactgttaatttgaccaatcccaaataaatagctggtgcgtaataaatggtcattcacatatttaaaaactcatttttattttatatgtaaaattgataattttaaaagtgaaaaagatttactaataaaaaagtaaaactaattttaaatatgtgttaacctatgtcaagtaatcgttcattttaactaaaatcctgaaatgaaaactattttttaaaataagataaaaacttgttttcaatttgatttttttaaaaaaattcacttgaataacaaaagcataagaaattagagacaaataatttttttaaaaaattgaaaaacatgaaacaaaagttatattcgacaatagaaaacaaaggcagaaaaataatataattttcaaaaaaaatttaaaaattatcttattcaattttaaatttttaaaatcaaaattttaaggaaaataattttaaaatttttaaaacaacaaataattttaaaaataaaatgttacaaaatatgtttgcatccaaggcactaacacattattataacgagaaaaaattaaaataataataataataaaaaatgaaaagaagaaaccgccagagaagttgcagtaaccgtcagttgggtacataaggcaatgtggttccatttgaaaaggttttggttggttgatttgaggtatgaagagggagtctgattgtggcgaagcgggttcttcttcttggtgtgtgggaaagaagcagaagcagaagcagaagcggttaatggaggatgcaggagggtggaaggggaagatatcatcatcatcgtcatcgtcggagccacgtccctgtaccgagtgc

SEQ ID NO: 132886 - DNA, 313 bp, Glycine max
  Clone ID: PAT_MRT3847_91001C.1
cgttcttttttttttttttttttttatttcaaattatcattatcctattttttaaatctttttttggaaacgggtctaattcatttaataaaattcaatttaattcttaaatccttcccaccaaaaataaatattttattaaaaacttaaaaccaccctggcttacccccgtttgaactcaaattttgtaaaaatttaaaggcccaccaaccctcatcttttaaatttccccccttaaattactttatattcccctctctggactacaatccatctttttctcttcctataaaatacctatatccctttcttt

SEQ ID NO: 132887 - DNA, 282 bp, Glycine max
  unsure (1)..(282): unsure at all n locations
  Clone ID: PAT_MRT3847_91002C.1
accctngggccggccggggcgtttatgngatgggaatangcgatggggtgggagaaaaagggaagngtgggttgggtgtattngagaaagagacaattggttatgtgaagngaaggataggntnagnatttgacttgttggatanattgggttgttgctttggtgtaattaggctttgtggttaattaggttagtggaatccattgctgtttgctgccctttttttgttgttaggttatgttatggattagtttgtattttgggaagagcaattgatgatca

SEQ ID NO: 132888 - DNA, 207 bp, Glycine max
  Clone ID: PAT_MRT3847_91003C.1
ctgccaatcacacaagtacgtctaactcacttttttattatttccatgcatcaacagctgtggatctatttctggtgaaggtggccctagtgatcctcatagctcactccagaaaaacatacatgatatgatgatgtcctcccagattaatggcattggtttaatgttccgtgttggatctcttggttatgacgtgaataatgtaag

SEQ ID NO: 132889 - DNA, 558 bp, Glycine max
  Clone ID: PAT_MRT3847_91004C.1
gtcaaactcgtcgtggacccctctcgtctccattcccatttccccttctcttctcaatcaacaacatcactccaaaaccctacttctctctccgattcccatgtccccttcctcctaatcccccttccccctccgatttctattctcaccccccctatggaatccaccgccaccaccgtttcccccgattccgaaaacgacaccaccaacacgcgagtgaacggctacgtcgtttacactcgccgcaagcgcaccctcctcaccctccattccggtaatgacgccgccaagaggctcagaacagctgaaatcaaagtcgaagctcgcaacgacgatgacgacgtcgttttcaagcgccccaagctcgagtctgaattaacggaggaggaattgaaaacgacgtcgtcgtcgaagaagatcattgtcgtccacaagaaacccgccaccgtcaaggagctcttccaaaccggcttgctcgatggggtaccggtcgtttacgtcggttgcaaaaaggattcaactaccgaattgcgaggtgaaatcaaagatggggggatc

SEQ ID NO: 132890 - DNA, 946 bp, Glycine max
  Clone ID: PAT_MRT3847_91005C.1
acggttttaaagttgaggctaattcagcgccacaaacatttgaataatagaaatatcttatcatcatttcttctgatttgcttccaagttccaatccatggagtccatgacggtgattaaatcaaccttcccaattttcatgaccaataacgccccattttccctctccacaagacctcttagacccatcctgaaggtttccgtgaaacccccacctccagatttcgattacaggcgagagatatcggaggagtcaagagccgccatagccgaatctcacccggagttgcttgacctggctgacaatgggagcttggttttggttcagaagaagaggttcggtcctgtcccttcttggaggaccgaattcgtcgaacctgaatccatttggttgattggaaccacccatgtttctgaggtttccgctgtggaggtggaacgcgtggtgcgtgctctgaggccagataatgttcgttgttgagctctgcagaagcagatttcatttccaacgcttactacatgtatgctactgccaatgatgagcttggcaaacaactgcgttctaatatgtttttattgagtggcactggcaaagaaaatgtcgttggtcgtagcataaacttaggtggtcaaactgctttagcattacgattacttttggctactttttaatcgaagatctcttcagatattaatcgcccttttggtgatgaatttcgtgctgatcgggaagcttctgaggaaattggtgcactacccttaaatggagatcggccaattgaaatcatgtttcgaagagcatggaaggctatgaaatggactcagaaactaagtttagtgttatcaattattcgggggagaaagcagaactgggatcatgtctgctactggcactgatgaggttggcagacaactgcgttctgctctgaccggcttgaatggtact

SEQ ID NO: 132891 - DNA, 315 bp, Glycine max
  Clone ID: PAT_MRT3847_91006C.1
ccttcataaggtttttagtaaactttgtagatccaccataaacatctccatcataggtatttcccaaaaaaaccacttgttcctccataacagtcgccaaacccacctccccaagacaactcttttgttgcataaagttcaaaaagagcctactgtatttgttcaccaaatgttgaatgccagcccacacatcataccacaacttcaccttattccctctagcaactttctgtcggggtaatcaactctcccataaataaaattatctacccccacagaagatcgtgataacacaacaaagattacatcgtagga

SEQ ID NO: 132892 - DNA, 199 bp, Glycine max
  Clone ID: PAT_MRT3847_91007C.1
cattcttgcataatattaattccactaaccctatacaaacccggcggctttattacaatgggggtgtcaaatatcattatgataactgtctcttttgcaattgcgaactagaatgtaatattttattcacttaaataaagcccattactataagcaatgaatgtcgttttaatattattataaaaataaaaacttatat

SEQ ID NO: 132893 - DNA, 526 bp, Glycine max
  Clone ID: PAT_MRT3847_91008C.1
agcttagcgcatacaatagagaagatagcgaaaggggatccttcgatcacaccactgcaaaaatgtaggactcgtcgggaacgacgctcatggatctgataacggcggaccctactccggcgccgtcgtcttcgtcgactgcggctgcatcttcggcgccgacggcaccggcatctctgccctcggcgttaggtaagcctccggcggagaagaaatcgaagagagccgcgctgatgcagatccagaacgataccatttctgctgccaaagctgctttgcatccagttaggaccaatatcatgccgcaaaggcaaaagaaaaaaccagtttcctattcacaactcgctagaagtattcacgagctagctgccacttctgatcagaaaagttctcaacggcaattagtgcatcatgtgtttccaaagcttgcagtgtataattctgtggacccttcattggctccctctcttctcatgcttaatcaacagtgtgaagatagaagtgttctccgatacgtctattacta

SEQ ID NO: 132894 - DNA, 290 bp, Glycine max
  Clone ID: PAT_MRT3847_91009C.1
ggatatatatctccagaatatgcgatgcattgtgaacactcagacaaagctgaattctatagctctagagttaaatccttataaatagtatctatcaagagcaataccatccaccgatccaagcaagaagcattagcatcttctatattagtcacattaattgaaagtgatggacaacctaatggaactagtagataaaaggctaagttcatatttcaattaatatcactttattattataatcaaagttgcactactatgcacctataccactttaaaccttaggctca

SEQ ID NO: 132895 - DNA, 261 bp, Glycine max
  Clone ID: PAT_MRT3847_9100C.1
cttggctgcggctggaacagacatggttgctaacatatggtatattcgtgctaggatgcggatgcataaacttgtcaggcatacacaatggatacggggcttaagaatctttgccaacactattattactggtagtcaggaatggactgctagattatgaactgcttcccgtggaacaatgaatgctgtcttagattgacatgctgagtcaatattatgtgttgaggattcttgtttagacagaggtataattacacgtgt

SEQ ID NO: 132896 - DNA, 766 bp, Glycine max
  Clone ID: PAT_MRT3847_91010C.1
gcgcataaataagtaaatatatcataataggaatgggattatgaattattggtattggtgcaagcaaggggaacatggaaagataaaagtacgaagttgatgctataaaagaaaagagagaaattcacatagcagtctgaagaatagagccaagggtgcccaagacggcgaaggcgagaagagggctgacatcgagggtgtcaaaaacaggggggatgatgttgcggaagaggttgagataaggatcgcagaggtctcggatggccgagagaggctgccgctcccaggggatgtttgggaaccaactcagcaaaaccctaaccatcaaaacaccgctgtatatgtcaagccacttccccagccccgccgccacaaccgtcagcggcgtgttcagggctccactagcactcggacggtcacgaagggaagcgaagaacaaagtgcccatcgtggacacgctgtcgctgttgatgctcaacactggagtggccgccttcttcatcagcaacagggcgagtcccatcagcgtggacagcgtgcgagtgcatttcgtagtacaagtaagacttgggctgggtgaagaagggagggcttgaggtttgaagctcaagcaagtggaagaaggacttggggtgtgcctgtgttgtctaacaaagggaagcgaggaaatggagttctgacccagtgacagcgccatcgtcatctcaatccgctagggatttcgcggagaacggagacccaaatctctatgtttatgatcctccgc

SEQ ID NO: 132897 - DNA, 277 bp, Glycine max
  unsure (1)..(277): unsure at all n locations
  Clone ID: PAT_MRT3847_91011C.1
gctctgagtcacannttgtgaaccgtngtnngcacttggcagannattattgcatctaatgagtnatctgcaaaaattgtgtctctgaatgnccatcaagtgatncagggcgatngganngaactngccaantananagantgnctacttgntatnctcattgatnntncttggcggagtnaatacttcntttctagatgcaaacgtctcagaagcacctngttcagctggtgaccatnnctatcnccagntgtgcaaaggcantaacaaatnttgc

SEQ ID NO: 132898 - DNA, 352 bp, Glycine max
  Clone ID: PAT_MRT3847_91012C.1
gcagtgtgttgagtacaaagaatgcatgacgaaaggggcatcggagagatagaatgataatagatgagtggtggtcgactttgtccattgcttggagaattatggtactaatgctgggaagcactggatcctgacagcttcgactggtcctttcagtacgaagatactctctctcttctccactggatctgctccaatcttcgctcctccaacgtcctctctctcgtagaactcaactactatgagcacttcaagcatcatcggaagctgttatatggcgacgatttggactttgcttactacatcatctctgcattctctgacactagacacactcatgatgccctttttg

SEQ ID NO: 132899 - DNA, 1433 bp, Glycine max
  Clone ID: PAT_MRT3847_91013C.1
cccaccctaccgcaattaaaagcaatataagcaatatagttgttgtttaattgttgcttcatttctattgtgtgaatggctatttgggaagttcattatgaatagaggggttgtggcaatggttctgggtttatggattcgggttggattttgcacaacaagtaccttgctactttatttttggagactctttggtggataatgggaacaacaaccagcttaactcactggctaaggctaattatctcccttatgggattgacttcgctggtggcccaactggaaggttttccaatggaaaaaccactgttgatgtagtcgctgagcttttgggattcaacggttacattcgtccatatgcaagggctagaggccgagatatacttagtggagtcaattatgcttctgcagctgccggaattagagaagaaactggacagcaactgggaggccgaatcagttttagagggcaggtgcaaaattaccaaagaacagtgtcccagatggtaaatttactgggagatgagaacacaactgcaaattacctgagcaggtgcatttattcaattggaatgggtagcaatgattaccttaacaactatttcatgcctctaatctattccagcagcaggcaattcacaccacagcagtatgctgacgtgcttgttcaagcatatgctcaacaactgaggattctgtacaaatatggggcaaggaaaatggccttgtttggtgttggtcaaataggttgcagccctaatgcactggcccaaaacagcccagatggtagaacatgtgtggcaagaatcaattctgcaaaccaattattcaacaacgggttgagatctcttgttgatcaactcaacaaccaggttccggatgcaagattcatctatataaacgtttatggtatctttcaagatatcttaagcaacccatcttcctatggatttagggtcacaaatgctgggtgctgtggggtaggaaggaacaatggtcaagttacatgtctgcctctgcaaaccccatgcaggaccaggggtgcgttcctgttttgggatgcatttcatccaactgaggctgccaataccatcattggtaggagagcttacaatgctcaatctgcatcagatgcttaccctgttgatatcaatcgcttagctcagatctaaagagggtcttgtagtagccataagctgtgccgtgataactataattgtaatgtttgtgtagtcttcgcatccttttcttgttcaggttttaaatgtttgtgttcagaagtctaagtgtaatttggcataaaaattttggttaagaaatttgcatattttttagtgagtactacttgttggctgatgttatgtatattttcatccaaagtgaataaaatgacaagaaattgtttgctttcaaaaaaaaaaaaaaaaaaaaaa

SEQ ID NO: 132900 - DNA, 781 bp, Glycine max
  unsure (1)..(781): unsure at all n locations
  Clone ID: PAT_MRT3847_91014C.1
aaaatatatataattcttaacattagtaaaaaatattaaataaaactaacaaagaaaacatacattaattcattaaataattaaaaaaatagttatgatttaaaaaatattaaaaaaaactatttatgatttaaaaaaagattatatagtcattttcgtccttaaatgtgtagagcgttgaaaacttcatcctcaaagataaaaatttaaattttagtcttcgaaggaaaaagaaatgcgacaaattcatctatccgttacaagcataacattacaataaacactaaaaaaataaaaaattgaacataagttagaacaaacataacaataagcataatattgattagtaaacttaatctgtatgttgctttgatatttctttgataacattaggtaatgacaaaatcaagttaagtcccatttttataagaattaacttaacggctgtacatttttatttgagtatcatattttgaacggtcacataagaaactttagactaatagacaaattatacttattaattaatatgatgcttattattatatttgttctaacttatgcttattcttaattttttaagtatttattgtaatgttatgcttgtaataattaaaaaagaaaaaaaggaagatcaaattatattttggataaataacaatttttttccttagatatataaaatgctatcaaaattcgtgtatgaaatggttctttcattaatgataacanatgaaaattaaggaatgaataaatttgtcatagtttttcctaatgtcaa

SEQ ID NO: 132901 - DNA, 397 bp, Glycine max
  Clone ID: PAT_MRT3847_91015C.1
ggggggccccggcccaatattcctggtttttcccacgcgcccgatcttgcatccaatgcatcgctctctccctggggctctttcaaattattgatggggttttcaattccaaaagcaaaagctccactctctgctccaaatcttctcattcagctgtgctgagaatggactttttggagcataatccgtcatcccatctggaatcggtgggagacatcctctttccttttttctacctgggtgtaaatcacgtttctgacactcatgatagtttcctcactgatcgagagagagagaaatccaatcgaggatatattgaaatacgcgcaccagcctgcacacttggcactggctaggcgcgaccactccgtgttgcgcccgtctcttatacaccata

SEQ ID NO: 132902 - DNA, 1798 bp, Glycine max
  Clone ID: PAT_MRT3847_91016C.1
ttgctagatgtcttgttttaattgataattgatagtcaaatttgacccgcaaattgtttagagatgaagacaagaaaaaccaatgagtgtgtatcattttgttttagtcattgtcttagtatatttaacattttctgaatccgaactgaggagtagcaaaactgacacggacgcgtgggcagacttcccattccaatttccaagtttttcaaagaaggtgagtgatgagcatggagcatttgccaggagaattggtgtccaacgtgctctcaaggttaccatcgaaggtgttgcttctatgcaagtgcgtgtgcaagtcctggttcgatctcataaccgatcctcattttgtttccaattactatgttgtctacaacagtcttcaaagccaagaggagcatctcttggtaattcgaagaccctttttttctggcctcaaaacttacatttctgttctttcttggaacaccaatgaccccaaaaagcatgtttcttctgatgttctaaaccctccctatgaatacaactctgaccacaaatactggaccgaaatcttgggtccttgcaatggcatatactttttagaaggcaatcctaatgtcttgatgaacccttcattgggtgagttcaaggctttgcctaaatcccatttcactagcccacatgggacttacactttcactgattatgctggctttggctttgaccccaaaaccaatgactacaaagttgtggtgctcaaagacctttggttgaaggaaacagatgaaagagaaattgggtattggagtgctgagttgtatagcctcaattcaaactcttggagaaaacttgatccctctcttctccctcttccaattgaaatctgggggtcttctcgggttttcacttatgccaacaattgctgccactggtggggctttgtggaagattctggtgcaacacaagatattgttcttgcatttgacatggtcaaagaatcgtttaggaagataagggtaccaaaagttcgtgattcttctgatgaaaagtttgcaactttggtaccctttgaagaatctgcttcaattggggtccttgtttaccctgtgaggggagcagcagaaaagctttgatgtgtgggtgatgaaggattattgggacgaagggtcttgggtgaagcaatatagtgttggaccagtgcaagtgaatcacaggatcgtggggttttatgggactaatcggtttctttggaaagacagcaacgaaagattggtgctttatgattcggagaaaacaagggatcttcaggtttatgggaagtttgattctataagggccgctaggtacacagaaagtcttgtttcacttcatagaggaaatgagtttagtcataagtgtttttcgtgtagtttggttcctgaccctctgctacatgatagtgagtatcttttttcattttaattcctgtatctctgctgaaacttgattttagtctttaaactttaattttgattaatttgattcttaaattaaaaaaaaaaatagtttttgtccttccttaaggtgaaaatggtctctgtgaaggaccaaaactactactttttttttttagtttaagaaccaaattaatcaaaattaagtatagagagtcttaaattaagctggttttagtctgagactatgcttttggtctgctttgtagcttgtagatcagccttgctagttagttgtcacagattgctgtaattggctgattacataattcgataaatgtcatttttgtttgttttgaacgttatactttggatcttaaaaa

SEQ ID NO: 132903 - DNA, 557 bp, Glycine max
  Clone ID: PAT_MRT3847_91017C.1
tacggctgcgagaagacgacagaagggggtcgtaaccctaaaatcagaaccagtggcactgacacaaaaaatatctgttcctctcgatcgaactcactcagtcatttccctctctgcgcgcgcgcttctcattcacagtcacagttcatggcggaggaagaagttgtggcacccgctgctagccccgttccctctgataacaaacgcaagctcgaagatctgcaacccgaaaacaccgaatctaatgccaactccatctccatctccgacgccgagaacgccgatgccgcggtttccgccgagaccgagaacaagcgcctccgcctcgacgaccaccaggatggcctcgctaataatacaaatgggcatcaagatgagcaggttgctgagccaggaaaagagactgaggaaagatccactctggagaatgtcactcccgagcatgataaaactatatccgtagatcattcagaggcaactgctaatgaacaaacttcagctgagaataacgagccagctgatgccaaagaacctcacgtagaggactctggacaaga

SEQ ID NO: 132904 - DNA, 608 bp, Glycine max
  unsure (1)..(608): unsure at all n locations
  Clone ID: PAT_MRT3847_91018C.1
tactgagcatcgtctagctatctcgatcgaactgtccaaggtcctgtcacaaataaacctgtgctaaggctaaaggtacacccagcgtcagtggtcacgataatccaactcttcgccagcctgagccgatcctaacaatgcatggtcttaggcttactcattccaacatgtcctcggtactgttaaatgagacttatccaggggtaatctagggttaacaggtatcatacatgtggtagtctgtgtgtgccttgtcttattcacgtgtaaataggcgagtagtcgtggcggggttcatataaatgcgattactcatcgcaacacacccagagcaaattacacattggcattacgggacgtgtcctgtgctgtgagcacaaaaccaggccgttagagggggcttacttgcgaaggctgccaggaccccagcaacataaattaggtagggctataagccaggcgaggcctctaaaccactggctaaacaggggctgcaggtgcctatgctagtgcacgtgtgcaagcgctggcgcaactaagcgggaacttgcatagccaatttacacaaggcgggcacattagtgntctactatgctgagtagtgcgac

SEQ ID NO: 132905 - DNA, 271 bp, Glycine max
  Clone ID: PAT_MRT3847_91019C.1
tttttaacgaaaactatatctccagatgcggggaaaatggattaccctgagaaaagcaataagcaccgcttctcaactaaaacacacctctcggatcctgggacagctaccacctattgacaaaaaagatccaaacgaatcagcctgacactaccgatggcatcccggctgtttacggcctccggcaagtgttgcgcgcgacgcctcatagaaattgtaagcctcaagacatcataaccaaactcatgataatttgagacgggccttgcct

SEQ ID NO: 132906 - DNA, 356 bp, Glycine max
  Clone ID: PAT_MRT3847_9101C.1
ctcggaattcggctcgaggctagccgtattctaaaaatggattttaatttaagtgctgcaggaacacaagatagggctgggatgaagtctgctgatcaaagagcactatcaaacgggcgcactgacataatgactcaccggctgaagaatcccgagagacaccgcagatatagggcccgttagcgcctacaagcccaaacaaagaaggcattcgttgtggaagacacaccagctgtcccagttgaactacaaccaaacaggaactcccacaacaactgtctgacccgtatctattgtaaaccacattggaaaaaggacgcacgacccgcccatattttaaagcatcagccaatgaa

SEQ ID NO: 132907 - DNA, 684 bp, Glycine max
  Clone ID: PAT_MRT3847_91020C.1
tctgtcacgcgtacaggtttgttttactcactaaagacggctgcaacaaagggttcagcgaagaaactttgagaaaccaatgagggagataaaagtgcagaagctcgacctcaatatctgggtaagcaagaggtgggaatgttttatgatcagccatagagagttgggacaactcaagagtcgaaccctcaaggattccaaagcagggtgctgaaaatgctcccaaaatcatgggattacttatgatataggaccatggggagaaagcaaaggtgacaaggccatgcgactcatagagagtggttcaatgggggatgaataaagaccgcaaagactggagtttacctttacaagtttgctccacacccgtaattaagagcatatttttacgggaaataagtaggaaaaactaaaagacttttataggactgagtgttagggggatcaagctccatcctgctatcactattcaaaacccttatgattcaagggctactattgtaaagcataaaaccgatatggaggatgggtctactactggtttatagtccttaccctactatgctaacggaggctgggatccaattgatgagtttcaacttgaagaccagctttgtttcctgaatgaaggttttaatactagcatttgtcacaagaacaacccaaatttggttttaacggact

SEQ ID NO: 132908 - DNA, 266 bp, Glycine max
  Clone ID: PAT_MRT3847_91021C.1
ggctcgagctcacattccgcagacttcgacccgggctgtgagacatggcaacttctatatcctggagacagctatcatgatctggcctgtgcacagtctctctaatccagaatcgctctctgctcctgatctctcatgcgcaagaacgttttcggcgtagaccgctcgcgattaagggacacggacaccgtgcggggtaagcggctaaaagagcctggacccagaacagatgctgcgagtgcacttcagctgctgaggtgcgctcg

SEQ ID NO: 132909 - DNA, 394 bp, Glycine max
  Clone ID: PAT_MRT3847_91022C.1
ggacgaggaacgcagagtgaatctgagcagggagacgtgtccggggttcatatcagacggttacgggagggtgacggggacgaatgaagcatacgagaagatgatggagggtgatgagggacagggaccagtgttgctggtgaataaggtgaacacagtggttccgcacgcgtcgttcacgtgcttggtgagggtggtgcaatacgcgtgtgggagggagagaagctctctcacggtgccctgcgacgtgtggagaatggactctggtgggtttgcatggagattagacgttgaaactgcgcttagcttgagactgggttactaattcacaaaggtatcacgaactccgaacgcaaaacggcgtcggtttatggtcatagaactatatataact

SEQ ID NO: 132910 - DNA, 616 bp, Glycine max
  Clone ID: PAT_MRT3847_91023C.1
agtttccgtcatcactgtatgacgtcctccttctttgggggggggggggggatcgaaagtgcggagggtaggtagtatggaagagcgccatgcgcgggataaagaagggggggacacgaagagttatcagcccgttaaaaagaggcatggtaagaggggtatgaaaggccgagcagcgagagtaccgatagacagaaggataaaacacaaaaaagccggagcgatttgagcagtacaagaaccgacaaaaccatgaagaacgtgagatcgaatagcagtggaccctggttgtagtcaggtgccgtattgcagcgagcgtaggcgttaacgaagttatagcgtgacaccgtatattgcatacgtgtaggtggttagtaccccgtagcgagagagccaatacgtggtgttagtgcggcaattgcagtacccggaagttacaaaaatacaatagcttaattgcagtacggagcgcatgtttaaggcaaacagcaagctaacggtgtaacataagcttgaaccgacggtctagacgggcaagttcgggactttgcattgggagtgtggggtgttaacgctgggcgagtgcctgtctggagagtagacgatgcgcaaagat

SEQ ID NO: 132911 - DNA, 479 bp, Glycine max
  Clone ID: PAT_MRT3847_91024C.1
aacccaaaaataacccttaaaaaaaagttcctaatggcaacatatcagtttggggctataacaaggcccctttacttttaaggaaaaacctgcaaaaaaacaatcaaggcccccaaaatttcaaggaccccaatcaagaaccgataaacggggggggttttaaaaaaacttccccccgcataaacagagggggttttaataaaaaaaaaaaatccttttttttttggcaaaaaaaaagggcctgccggaagggatgataataaagaggggttttttttttttaatccctggacaacagcaggaagggctttaggattgaccccaaaatcacaaagggctttaaaaacaaaaagggggggacgggctaaaccagtttcaagtttttgggacatatggaacccccggtcaaaaaattttcgggcagttggggcaccccccggatccatgctttaaagctgaaaacggggcaaagtttgccc

SEQ ID NO: 132912 - DNA, 430 bp, Glycine max
  Clone ID: PAT_MRT3847_91025C.1
ccattcttgaatgttactatatatgttagttttagtttgtctatatgattcctgttggatttcctgatgagatgttcacagataaaaatatgatttataaaatataataacacttaatattttgcgctgctaacacgtctctatacacctataaattttttccttcttttcttttgtctgtatacagcaagtttgaaaagaagaagtcaaaattttcagcagcaaccacatgatgatcaaatctgcacaaattcattgaccatattatgcattccaacatcgttttagaaattttacagctaggagaatattatattaaaaaaattaatttaatataactcaacaattgttattttatttttttcatatcaataataaaattatttatcagaaatttataatcgaatatttttaacattttcttcttaat

SEQ ID NO: 132913 - DNA, 555 bp, Glycine max
  Clone ID: PAT_MRT3847_91026C.1
ttttccttttttttttttttttttttttttttttttttttttttttttttttttttttttttttttttttttttttttttttttttttttttggggggggaaaatttgaaaacaaacttcattacaaaacaggttccttacaattgggaaaaaacatttgggggaaacaaaaatttccccctgttgccatttcacaaaaccgtaaagggatccaactaaatcccaaataacctttcccaccccccccatcatgacggaaaaaaaacccaaaaacccccaaattcgattcccagaaaaaaaatggagggggggaaaggccccacaaagaatttttcttaaactttctttcccccggggcttgggaaaaagaaattttgaataaaaaaaaaggcgggctccgggttaaaaaagagcccaaaaccccccttacagaaaaaaccaagggggaaagggggacccaattcagttggaaataaatcggccctggctttacccccccaccggaaaaaacaacccttaagtttcacccaccatgggcagcaaaaaaaaaccacc

SEQ ID NO: 132914 - DNA, 1295 bp, Glycine max
  Clone ID: PAT_MRT3847_91027C.1
aatagaaaaacgatcggagttcgattattgcacttaagaagaaataagaagtccaaatcaagtgattagtatcaatactatcagagcagttacataaccgcaagagtaaccttttttatggcttaaatatataaaaagaaattaaacataaaaagttcaaacaaacgaatttgatcttcccttaccataatggagtaggaagagggggccaaaagaaaacgaaagatcaccgaacgtaatacaaatatataattatgagtatatgggtacaagccacatgattatgaatatgtaaggagccataaaaagattaaaagttattaaaaaggacaaagcaacagcatgtgaagggaacatatataatatattttgccaggtgagcatctaaagcgccaacacgtgccttgacctttgttaatgtgaatctcaaatcctctattgccacctggattcatccataataaatccagagagagcaatcttaagtctctcacaagttcacaacagaatctatgattgctttctgcatgttagttattctcacaccccaaaaaacaaactcaacagagactagttacaaaattctcaatgaatcaataatgctgtcacaattttcacaagggcaatgaagaacgacaaagaaaaaccaattcaagttagaaacctcttgtccgtctcctcgggtcctcaatcatacatattcctatataatctgaaatgcacaagctttcatacacatgacgacccaccaggcaaaatcagattggtgtcaacagagattcctttgtaaataaagataaaggaatttgaccccactatacagctaaactagttagacttgccagttatggaagacaagtttaacttgatctagttcgccgaccatggtttacataatcctaaggcattttcaatcatctatgactccaaccaacatctcagcaatccaggagcaattcaacaatcatcaattctctctacctcttcatggtcgatctttaagatcaactaatctgtcatcaaacccttttacatataacaaaaagatattttgatataccaatttctaaatatagcagcaagggacatcagttacgagacaaagattataactaattcgaaagtagaataactaggatagtttgacatactaatttctaaatatagcagcaagatattttttgatcattacctttgaaacttaagttccctgtggatgagcattacgctgagtaaaattgggatcagtgctaagcacaagtgttccaaagaatgtccactgataatgctcgtgc

SEQ ID NO: 132915 - DNA, 283 bp, Glycine max
  Clone ID: PAT_MRT3847_91028C.1
acgaaagctaggaagacggcacgagcaagcagcaccggagctttttatggcagccgggaaagaacccaccagcaggggacggaaaaaaagaccggaagggcacccacgaagcccccaccagaggacgaacaccggagaaagacccacaaaggcgagagcaggaagacaggaagccccccaaacgaaggaaaaacacaaacaagcaaacacaaaggaggaaaaacagcaggggcaagccagaaaggggaaaacaaaaggcaaaccaccagaagaaagaagaagg

SEQ ID NO: 132916 - DNA, 456 bp, Glycine max
  Clone ID: PAT_MRT3847_91029C.1
atatattctgtcaatggtcattttagtcttgacagtctatgtcgttgctttatctgtcctatgttaataagattttgatgatcgtaatcttggatacaactccttatgcttattcgctgagactaactgctagatatgatcctactaatcaaggaactctgtatatgcatatctatcagtgctgatattggatagacatgatctatgaatgaaagatgtcactgtaggatagacctcattacactatttacgaatatattcaacgtgaaaacttgcgtgtcctagtctaagacgggctctagaaaggaacagtctgtgtcgtgcattacaccatatgtggaactgaagcctattacgaatgtacgcctgagcttcaattgtacgtgcaggatcttctctcatgacctattagcaacttaactggggctggcctagactagtcactacacagtgatg

SEQ ID NO: 132917 - DNA, 299 bp, Glycine max
  Clone ID: PAT_MRT3847_9102C.1
gaccgggatagccccgaccatccacgcgatcgcatgtccgtacataatttggatggacggacgcacaagactttgtagaaacaaaaggaaacaattttgatgctttcactacaggaccggacagaacatagcttgattgtaaaaagacgcaagacaagacatgtgtcattctacaagaaaggaatgctcatggcgccacggtgaattaagcatttaaattgcttgaactatgttacttgagaacaactgcctacattgtcctactttattaatgctctgggattaacaaaaacacaagg

SEQ ID NO: 132918 - DNA, 517 bp, Glycine max
  Clone ID: PAT_MRT3847_91030C.1
gcgaccagctactaggaagcggcctttcctttgttttgtgatctgatggaacactgctacttccactcacccattcataatatgtgcatcgatattctgcctctgcagaccattccaaagtggctttgacattcccaacttctatatgctatcaaaagggtacgaactttgaatgcactggaggaaagatctgatgacgaaccaaaacgcggcgactcatgaggttataaacacgcagattgccgtggcacctgccatgtaaaactcaaccgcgttgcctagtgcaacagtagacacaatacatggctgtgcttggcgggtactgggggctgccccataatcaaactcttgagaaaaggctggaacgagctaaagtgagagctcgtattgattcaatgagagctctttccccaactcgtgccaaatcagagcgctcgcgactagagatcttggatggtttatcacccttcaactctgaacacgcctgagcaaatagtatgtagtgccaaaggaaagc

SEQ ID NO: 132919 - DNA, 557 bp, Glycine max
  unsure (1)..(557): unsure at all n locations
  Clone ID: PAT_MRT3847_91031C.1
aattcggctcgagcaataacaagtacgtcatcttggaaccaggcccagcatgtgttggtcatcgcactcactgttagagttagagttagagttagagttggatggagtcgttaacgttgtgaagcataagcaacaacacaacatgagattgaagaggaacaagttggaggacattccggaggaaacagaacttcctcctattggtattgatactaatccagcagagcttgaagaagcgggccttcacttggaaacagatttggaaatactgaggcgggccatggatatgggactttgggcactctgcctcggtttcggctatatgctttccagagctcactttcgtccactttcttgacaaaaattattcatttcgtgtcaattatgtaccttgttagaaccaaaagaaatatcacttttgtcaattgtaccatttggaaagagtggtagttaggccttaataggtgccgtttgtgataatgttatagggcttttaattgggcactcacggaagatggctgatcaggaccgaccagnctaggttttttgtatataca

SEQ ID NO: 132920 - DNA, 286 bp, Glycine max
  unsure (1)..(286): unsure at all n locations
  Clone ID: PAT_MRT3847_91032C.1
gtcttttttttttgaataatactaacaacgaagattgatgcttgaaagataaaaaacaagtaggctgaaaaggtactaaatacttggataacactagaatatacctacggacgctggacactaaccagagattaccgggctgcctacaactcctcgaaagagagagtgncncaaagacncacactagaatcgaaacaaatcctacgaaagatttgaaaaaactgaagtatctactatcatatagcactgacctttatgctatcctactaagtcacatttataatga

SEQ ID NO: 132921 - DNA, 263 bp, Glycine max
  Clone ID: PAT_MRT3847_91033C.1
ctctgatctcactcatcattcaccaagctgcttctctgttctcttcttgcccttaccaagaagaagaagacgacgatgtcttctgcagaatcatcaacaggcttctccgtcaccatttgggtgaaaggcgctggtaggctcatcgactcttggatggtcaaactccacttggacaaaggctacactgtccgtggaaccctcagaaacccagatgatgccaagatctggcacttaaaaaattttgaaggagattcccagagact

SEQ ID NO: 132922 - DNA, 147 bp, Glycine max
  Clone ID: PAT_MRT3847_91034C.1
cttcattttttttttcccccacaccccatgaaatatgggccaatgttactcttcagtgtgggggtcactgttccaattatccccttatccaatctcgcatcaacgatatgggctctctatttttagtcttttgctgtattcaaactt

SEQ ID NO: 132923 - DNA, 1129 bp, Glycine max
  Clone ID: PAT_MRT3847_91035C.1
tttaggcattacagtttattcttccatgcaagatgaagcggtatctaatttttctctaatgaatgaatctatgtcactcgaaaacgaggcagaatggtctgagcaaagctcttccatagtgatgggggataacatggccagtgaacaatcaagtgtaatgtcaaattcggccgaatttacaagatcagcgaggaacatggaacttgaatatgtaaaggatatattcagcaatgcagagttgatgacagaagaatttgtggtgggtgagacagacaagatcataatgccaaatctctttgacaagttggagaataaaggccttggggcagaaaactatgaagagtactctaagattgagaggagggctatatttgacactgtgagtgagtgcctagaactaaggtgcagacaaatttttgttggaagctgcaaagcatggccaaaatggttggcttcagttcagaggaagaactgtttagcagaagagttttacaaggaaatactgagctttagaagtatggaagaagaggtagaggtggatgaacttgtcaacaaggacatgagcactggatggtgtaaatggcttgactttgaaattgaagcctttgagaagggttcagaacttgaatttgatatcctaacatgtttgattaacgaattggtttctgatttattgcatgtttaattccttggtggcataaattaacattcttcacaatgtatacatggataaagcaatcacaagacatggtaagatttgtattagttttctataattgtaaacaactgatcccttcaaaattccctctatgcaaatccattggatagtgatattttttatgtacttgacggtagaacttatcttaatcgttaaaagatctattagtatattatactcctttctccgtatttattaatttatacatttttttgttgtatttatgaaaaacaatgttacttctacgtttaattttttatttctagaagtaaactgttttttttatatattttcttttcactttttcttcaaccaaataaagaaagtttttttttattttttactttcactcgctttcatatcttccaaacgtaccataagataaatcttttaagttagcaatattacatg

SEQ ID NO: 132924 - DNA, 689 bp, Glycine max
  unsure (1)..(689): unsure at all n locations
  Clone ID: PAT_MRT3847_91036C.1
tttccttctcactcaaagctatgctatgagaataattcatccataacataacagcttggtacccatgtgtcattcctatcatttcgttgacaaaactttcatatccccgaaattctctctttttccactgttccctaggaaatatttattctcatcttcatcctctacacaacacctaagaaggacaagagggaactcataatttataaaaagaacattgagaaagagagaagggaagaagaatggaccaccaagctgacactaacagaactgatttgatgactatcacacgctttgttctgaatgaacagtcaaagtatcccgaatcacgtggcgatttcaccatccttctcagtcacattgttcttggctgcaaattcgtttgttctgctgttaacaaggcgggattggcgaaactcataggacttgctggagagaccaatgttcaaggtgaggagcaaaagaaattggatgtgctttcaaatgaagtatttgtgaaagccttaatcagcagtggacgcacatgccttcttgtttctgaagaggttgaagaggctatatttgtgccatcatcacatcgtggcaaatacattgttgtgtttgaccctctggatggatcctcaaacattgactgncgggtttctattggaactatctttggtatttacatggtgaagaatgaggctgaa

SEQ ID NO: 132925 - DNA, 262 bp, Glycine max
  Clone ID: PAT_MRT3847_91037C.1
ccgccctttttttggggggggggagcccaaaacaatcatgttaatcagagggagggcctcttatgctggatcatacatatgccagaccacccccaaacagcccccaagaccatttaaagtatgcagggttctccattggcatactatcttatataccccaacgtgacttaacgggggggggggaccaccttaacaaaacgagaaacaaacacaccctttagaaggaaaatactggtagttcttgacatacaaactcccacaa

SEQ ID NO: 132926 - DNA, 244 bp, Glycine max
  Clone ID: PAT_MRT3847_91038C.1
atgccacatatcatacactgatcaatagctcggcgaggacactcacaatggaaggcagatatctctgtctgctcaacaaggcaccacgagctagtatgtatgtctatctgctaaatggcgtaacttctaaatgttacactatagccatgcctgatctcttctaggggtagcttctaacttatgaggcgccggtctgagatactgtccttgtctggatcattcatgcctactgataaccaaggaa

SEQ ID NO: 132927 - DNA, 160 bp, Glycine max
  Clone ID: PAT_MRT3847_91039C.1
tctccatcaacattttcattctctcaatgccggaactatcgacgatgtcagggtgcaacgagacaaaggctttgggtatgcgagatacacgacccatgctgaagcagctctcgctatacagatgggtaatgctcgaattctattaggaaacccaatcaag

SEQ ID NO: 132928 - DNA, 1643 bp, Glycine max
  Clone ID: PAT_MRT3847_9103C.1
acaaacttcaccaccaattcaagcacctgcagtagctatagctccttgaagagaatgtggcggcaaaataggcccaaataagccacgttgattaattaaaagggtggtcgcttgtcttagtgctactacacatgagtttatgcattcagttatttactgctttctcaacagctacaacattggcttcaatataagaacttgtttacatcatgagacactctcttgcacgtacaaacttcaccaccaattcaagcacctgcagtagctatagctccttgaagagaatgtggcggcaaacattgtggttcgttgctaccatcctcgtcttcctccgtgtcccaaaggaaactagcatatgctgcttgtacatggctgtcttcaggagaggcttggactgctctttcaaaatagctggaggcacgttcttggtcatgatgtagctcccaaactaacttcccatactgtgatagaacttctccgtcatccgggtctgcaagtatggcgcgggaataatactcctctgctccttcacagtcttgtttgtactgatacaaaaaattagcataattcctcagaaacaatggatccccaggattttccttaaccattttcttgtaatattcttccactgcatgcctatctccatcatttcctccagaacccaagggattatgatcaccaccaccgccgcctctacaaccacctatgccatcgccacaacactccacaccaagtccctttgcaagatacatttctttaccactaccaacctcttcctggtcaccaaaactcaccctacaaactccattcttcactctcacctcttcactgaatatcacatcctttccaccattcaccacactgaacccatcttcactctcactttccatttcttcatcttcctcttcttcactcaagccattgtgctagcagtagagtaagaaggaattgtctccagcaccaagctcctgtgtctagctgaaaacctcttggaagggtctaaatactccaacctttcttcattgttgcaagaaaagtaggccaagtcttgcaagttcccatcagattggactcttctaaagcctttgttttgcctttcaagctcaccaattgagggagagattggagaagaaccacatgcaaaggaccgggtttggtggcaagtaagtttgtgataaggttgtgggacactggttggtggaaagtgtttaagtgcatgacaggtttctgagtgaatattgttgttaggactatctgggaaggatgagaggagggatccaagaactggtgttgaagagcttcttagcatcatgttttctgattcaagataacttctgtgtggctgtcccttgttttctgattataaatcactgagaaaatagaacaaactgtaaattacttacttctacaggaaaataaagctagaaaaagagaaaggcataaggcatattggtttttgaaacagaaaacaaattgatatggctacaaggaaaagtaataatgatgctgattgctgaatgctgagaggaatcagtaaataacacaaaagaaatgttttggttgggaaaggaagaaggagaacaagaaaagaacaatcgtgggccagaaaggaccaatccccttttgtgatccctttcggtggc

SEQ ID NO: 132929 - DNA, 240 bp, Glycine max
  Clone ID: PAT_MRT3847_91040C.1
cgtccggttccaacaactagactatcaaagacgcaataattgagcacgggacaatccttaacagccgtattttaataaaccagtctcgacctctaaaacactctaatgtccacaatgaacataactggtcatctaacattcttaaaagaacacttgtgatgtttgcaataaaaatctacctatacatagctataacaatctacattctatctcaacaaacctgttatgagaacatttcat

SEQ ID NO: 132930 - DNA, 774 bp, Glycine max
  Clone ID: PAT_MRT3847_91041C.1
acccttcttagcttagcgtcttcttctccgatcaaccgtccgctcctctcctccttattttgcgtcgcctcgccggaaagacagaaaacagagagagagagagagagattcgtgtaaattagggtttctttcgccaaagagaggcttcaaacctgacctcttttttcttatcttttttccctttcgcagagcgagcgactcgcgaaaagaagatcctgctcctgatctagttcgcaaaatcgtagaatcattcgaatttgcgattcagatctccattttttactaccttgcttctcaggaaggatgttcggttcaaacccttttgggcagtcatcgtcgagccctttcggctctcaatcggtttttggacagaccaattcgagtagcaatccttttgctcctaagccgtttggtagtacagctccatttggttcgcaaaccggtggttccatatttggaggtacgtccactggggtgtttggaacagctcaaccggcttctccgttcggtgcttcatcttcaccggctttcggtagttcacaacccgcttttgggtcatcttcaactcctgcttttggtagttcatcgtcatcgtttggtggatcgtcggtttttggtcagaagcctgcttttggaggctttggatctactcctactcaagcaagtccatttggtgccgctcagccatcacaaccagcttttggaagcagcatatttggttcctcaacgcctttttggtgcatcatctcagccagcatttggtgcgacgagcac

SEQ ID NO: 132931 - DNA, 800 bp, Glycine max
  Clone ID: PAT_MRT3847_91042C.1
taaaacccccaccttcggtccggattcccgggtcgacccacgcgtccgccggcatgccactcaccaaccaacaccaatcattcccttccaatacccgccgcaaagccacgacggcgaaggcggagctcgggacggcggtggcgcggacgggcggagccggttaccaatctccgtccgtcgacgttcccacgcataaggtcacagtccacgacagacaacgaggaatcgttcacgagttcgtcgtgcctgaggaccagtatatattacatactgctgaggcccagaatattacccttccattcgcctgcaggcatggttgttgtactagctgtgctgtacgtataaagaagggacaaattaggcaaccagaggcacttgggatatctgccgaattgagagacaagggttatgcacttctttgtgtgggcttcccgacctctgatgttgaagtggaaactcaagatgaagatgaggtatattggcttcaatttggacgttattttgcccgaggaccagtggaaagagatgactatgccttggagttggccatggctgacgagtaagcaatgcgagcaaagaatgtgaatattttgtttccccttcttttctccttttttttcttcttcatatatctactatgttatcttcttgtctttgtttatttttcccatctatatatactattgtgtgaattctaagtaaagcctcatgctatatgcctgttcctatcttttttcctatttggtatggtatacaaggttgggtaatttaatgtaaaaaaaaaaaaaaaaaaaaaaaaa

SEQ ID NO: 132932 - DNA, 308 bp, Glycine max
  Clone ID: PAT_MRT3847_91043C.1
ttccacgcgtccggagcatggatcccaaggtgatggcctgtttggctgactgaataaaccacgtatggctggcactttgggctgctgtaccggtggaatggcacttcaatagacttgctggggactatttccatgtaacaagccgtctggctgaggacaccatttcggatctagtgcagctggtgttccagggccactaaaacacaagtttcccatggttatgcatcataccccaagactgggctgttcatcgtagagttactagactgtaaatgcccttcacaaaaaagagcttgtgagcaatggat

SEQ ID NO: 132933 - DNA, 501 bp, Glycine max
  unsure (1)..(501): unsure at all n locations
  Clone ID: PAT_MRT3847_91044C.1
tnnnnnnnnnnnnnnnnnnnnnnnnnnnnnattattccaaataaaagaaatgaaaacaaaattgtctagtctcctagacaaaccacttcccactccaccaaattaatatcaaggaccccactttttccacttgaaccatagactactccatcaagtccaagtcaatgtccttcattttttcatcttgaaccttaggacactccacagccaaccatatttaggtctgtatcttcttcaacatgaaccataggtcactacattaccttcatatcaagttccttatcattgacaacaaatgtttagaattaagtaagcaaggaaaaaaattataaatgatgaatacatcaattataggtaaatgatctaatttaaagactatttcggttaaaaaatctatataaaaaaagactctttcgtttcaatctaactatttaattttgatctattttttaatttacaaaataatattcttcttatatgtgaaaaaaaactaattttcat

SEQ ID NO: 132934 - DNA, 147 bp, Glycine max
  Clone ID: PAT_MRT3847_91045C.1
ccctccaaagaaataacaatgatggaaacatcatcatggtaacggcgcctatcaccctgtggagggaaggatatggagattctgtgtataaataagtatactgaaaatcatatatattactatcatatatataaaaaaaaaattaat

SEQ ID NO: 132935 - DNA, 1210 bp, Glycine max
  unsure (1)..(1210): unsure at all n locations
  Clone ID: PAT_MRT3847_91046C.1
cttgaagagagtagattttctttctgtttgggagcaccacagtcactaaatcagaatccccacccaccactgggtcagcgatagaggaagcagagaggggtatattttggcgggtttctatttcatatcaaacttttccctttagggttagaatagaacccaacaaaagaaagaaaaaaaaaacatagagagagagagagagagaggaatcaatggaagaggaaggcatagggttagtgttggcgagagccacagaacttcgtttgaaaatcagcaactgcatccaaagagccaccgctaatggcccctcgccgcacgccgatgacgatgacgatgaagccaccgaacgccttctcaacatttgcgatgcccttgaagccttggagacccagctctcttccttgcaggttctgcaacaacaacagcagtatgaaagagaaattgccttggctgaaattgaaagcagtcgcaaaatgttaattgacaagctcagggagtacaaaggtaaggaattagaagtgataaatgaagcttccacttttgctagtgaaacagtggagcccaacaatgatctattacttccaccgtatcctagccaccctccatactctgtgtctatggacaaggaatatctctcacagatcccttccgtgaacaagtctggtcgcaatgggttaatcacacttgatccaatgattgaggctaacaagaatctcagtgaaaaagagcaaaatcatgttgaaaatggggctaaaaattcgagaaaaggattgggattttttataacttctgcagccaaagcaatgctcacggtagttggtgtggtatcaatattaagtttgtctggttttgggcctaagttgggcgttcgtttcagtgtgcaaggctggcgtcacagagtagaaaatgaggagagatctacaactaaaaatgggggtgagagaccaaatattcagtgtccaccagggagaattctagtgtgggaaaatggggaagctcgatgcctagtgaaagagagagttgaaattccattttcagctgttgctgcaacacctgatataaactatggatgtggttgacaatagcattcgttctccgtattgtatatctttcactcacttttcccttttttttttttactttgttctaccttttgtcaatatgctatttaaaatattatagtcagtggctgattgtcttgnttttggtt

SEQ ID NO: 132936 - DNA, 727 bp, Glycine max
  Clone ID: PAT_MRT3847_91047C.1
aatcaatcaaggcgtttttaattaaaaaaagaagaagaagacattttagaaagaaagaaagagaagagaagagaagaatccctcttgtaaattctcatttccccgtatttgtaggggccattttgattttgatcccaacccacgttaattgttggtccttttttcgatgttcatgaaagaaaagcattgaattgaatcatcccacacacagacagattcaactggagcgccaaatcaaaaaggaaaccctaacgtattatgagaaggagcagtcaaccaaaaaagacacccaccccattccatttcatttcattttcacacactcttctgtcagatctgcttctgctctctctctctcctttttcccactcataaagccatgatttttactcagaatcctcaagtgggtaaatttaaatgagcatgtgtcgttcattttgaagaagaagatgtcagaaatgcgggtatctgagcttcacttgaagaaggaactcacccaaatccgcaaggctgctcgagtgctcagagatcctggcaccacttcttcttggaagtcacctctcagttcatcaagatctgtggctgcatggaacaacgacactgccagtagaaggctcactactatttcacaactgggtcccaacaacaccaatgacaaggacaagaagggtggttcttgtacaaactgggaagaactacaaaatctttccagtgagaaatacaacga

SEQ ID NO: 132937 - DNA, 279 bp, Glycine max
  Clone ID: PAT_MRT3847_91048C.1
ttcttgcgtacgatcctattcttagggacttgcacaaggtcattctacataggaattgatctgtgcagggaagagactattttcacgatagaaatgtccaagcaacgggcgacgctggttgattttcatggtgataattagacagttaaaatcgacacattatctgaaccgatgcttgctaatgatgagaagccaactattcatattctatgtctcaaccttaggctgcactacgtttcccgcagagaccgacccaaaagtgtctcatctttacaggtg

SEQ ID NO: 132938 - DNA, 349 bp, Glycine max
  Clone ID: PAT_MRT3847_91049C.1
gtaagagtaacaaacaattaatgttaccggtgcattcttaatgggatatataacaaaagcaatgtccttagggcaatagtaagcaaaatcattcataaaaatagaatatagtttacctggcctaagagcaaatgttaataaatgaaaatcatattcattactaatcctaatctctcaaagaatgaagtattgaatgctttaaaattttcaagatattaaacacttgtacttccatcactagaatattatatacttgtgagttcaagaatctacccattctttgggatcatacatggaataaatttttaattcccactctaagcatgcaaatctaaaactcttggtatat

SEQ ID NO: 132939 - DNA, 4069 bp, Glycine max
  unsure (1)..(4069): unsure at all n locations
  Clone ID: PAT_MRT3847_9104C.1
atcgtattacctattcaacattaatattcaatccttcctaatccttctataggcaagtcaagactcaagtcccttaataacatgacaatattctccatggccatactgcacgccatcgctgtgatccccatcacataaatcggtccctaattctcctgagttatgaacaagattgatgatatttggacatccataatttacaaacactacatctctcatttctctatatttttttgggctcacatcatatcaccaatcttaattattgggcccttttctcttcctatctctttcgaggcagtctacatccttttgggtgtccaagaattattttcctatgaaaaaagagaacagaatacccagtcaaatttccgttcacacttaggtcttctagaaccttttctcgagcgttgtgtatctttcaagctggcttttggagcatgttttgattactttccgtctcatgggtcattgtcatgttatctgtaataatgtaatgacgtaacatgttggttcttccctgtaggccattttctttttctaatctcgtttttcctttttaaattgcagtgcctttgatgcaacaaaccaaaacattcaagtactagtagtcccaaatacatgttatcaatcagtagacgttgattaattaaaagggttgcacacaaactcgtcgcttgtcttagtgctactacacatgggtaatgagtttgtgaattcagttatttataaacattggcttcaacataagaacttcattacatcacaagacactcgcttgtatttgtacgtataaaaacttcatcaccaattcaagcacctgcagtagccacagctccttgatgagaatgtggcggtaaactttgtggttcattgataccatcctcgtcttcctctgtgtcccaaaggaaactagcatatgctgcttgtacatggctgtcttcaggagaggcttggactgctctttcaaaatagctggaggcacgttcttggttgtgatgtagttcccaaactaacttcccatactgtgatagaacctctccatcatttgggtctgcaagtatggcacgggaataatactcctctgctccttcacggtcttgtttgcactgatacaaaaaattggcataattcctcagaaacaaaggatccccaggattttccctaaccattttcttgtaatattcttccactccatgcctttctccatcatttcctccagaacccaaggaataatgatatccaccacctcgcttccaccacctctacaaccacctatgccatcaccacagcactctacaccaagtccctttgcaagatacatttctttaccactactaacctcttcctggtcaccaaaactcaccctacaaactccatccttcaccctcacttcttcactgaatattacacccttcccaccattcagcacactgaacccatcttcactctcactttccatttcttcatcttcctcttcttcactcaagccattgtgcttggcagtagagaaagaaggaatggtctccagcaccaagctcctgtgtctagctgaaaacctcttggaagggtctgaaaactcaaacctttcttcattgttgcaagaaaagaaggccaagtcttgcaagttcccatcagattggactcttctgatcaagcctttgttttgcctttcaagctcaccaattgagggagagattggagaagaaccacatgcagaggacccagtttggtggaaagtaagtttgtgataatgttgtgggacagtggttggtggaaagtgtttcagtgcatgacaggtttctgagtgaatattgttgttagggctatctgtgaaggaagagaggagggatccaagaactggtgttgaagagcttcttagcatcatgttttctgattcaagataacaacttctgtgtgtctgtcccttgctttttgattataaatcaccttttgtgatgctgaagagttcttgatgaccctataaatcctatgtaatttcagatgatcattggaagggagacttttgtagcagcagacctcaaatgtagacctcaacttcaccctacctccctgccgttttccgtagattcagctcgaactctttcacgctcccacctcctgggtcgctctccaaaaagcctgcattgtctctacctacttcaccctttcttcagcgctgaacgtcaagtacgccatgccatgcaccccaccttccgcctcgtctgctcgcaatatgcctttggtcttcctcttcctcttcactcttgaagcgtgtgattggctcttgagttagtagtattggtccgcctttccgggcaggaggttcgaggggatccactcgcaaacgcccgcgtttcatgacccatcttcttcaacgatgcttccactgcactcctatctccattgtttcgtacatcttattccaactactgccgttcttcctcatcccccctctcccaccccacacacccacttcaacactacctcctccccactgactagccaagccttcgcgccacgcccctaacaccccctccctttgcctcgtaccttttcctccgccatcactactctcccataataactatacacataccatcctaactgctttctgtcatctggctccggtcttattccgtctcaggactcctaccgtcatccttgtccgcatacatcccaatggcctaaaacgtctaaatcactcctctccaaagatgtttctgcaagagtgtggtggaattttttctcacaatcttcctctcccttttttttatcttaatcattccctttaataaaactccccgtttacgacggctataaaaacacttgtgtctacaaccttcaccatcgattccaaaaccagacttaacttacatttcaagaacacattgactccccagatctttgttacccattgggagcaaactttctttttttccatgcttctatacaagtacaaccttcgctgcccatacgaaacttgatacaagcaatagccacattttttttacataaaaccaagaattacattttaactcccttagttccttccaaagtcactttacttaatgacaacaaaacttctaccatgatctgggtctgaaactaccgttcctacatttctcatttagatcccttactcccttgtttagaacggctacagaaacttttgctaattcctctgaaacaatcctttccgaagtttctaaacttgcattgactgttatgcctctcacccagcaaaccttcctactactcctaaatagcccacgttaaccacgttgaaggggtagtcgctttgctccctcctactacccctcacttactagtgtcaactaattacccatgtcgataaagtgacaacattggccgctagtccaagtcctccttccagcgtgtggatccgttcttttttttacttctttcgcaagcaatcagcaaaatatcgtattacctattcaacaataacattcaatccttcctgttccttctatcgtcaagacccttaataacatgaaatattctccatggtcataatactgcacctacaacttccacaaccataactgtgatccctgattcccttgcgaaaaacaagaacagaatagttagcctgtcaaatttccgttcatatttaggtcttctagaaccttttctcgagcgttcaagctggcttttggaacatgttctgattccatcttaatagcaccgtgtaaagttgcttaaattgcagtgcctttgatgcaacaaaccaacatacaagtactagtagtcccaaataagccacgttgattaattaaaagggtggtcgcttgtcttagtgctactacacatgagtttatgcattcagttatttactgctttctcaacagctacaacattggcttcaatataagaacttgtttacatcatgagacacttctcttggccgtacaaacttgaccaccaattgaagcccctgcagtagctatagctccttgaagagaatgtggcggcaaacattggggttcgttgctaccatcctcgtcttccttcgtgtcccaaaggaaactagcantatgctgct

SEQ ID NO: 132940 - DNA, 154 bp, Glycine max
  Clone ID: PAT_MRT3847_91050C.1
ctcagaggaggggacaccaaagaactatgcgatcagtttaataacaatggtcactgcttatgatatcgtatctctataactaacgcagtgatctcatttgctatgattagaatccttacttaccgaggccttaaccaaattagttccctactgg

SEQ ID NO: 132941 - DNA, 425 bp, Glycine max
  unsure (1)..(425): unsure at all n locations
  Clone ID: PAT_MRT3847_91051C.1
acgcatncnttttatgtattcactttctttttccaaacacacattattcattanttttgtgggcgtcacttaaactgaagatgattttatttaagttattcaatgtatctggtccttgncttgaaaccattcatctcataaatgaccctcactatcctatttttaaccttggcttagcgtttgttttgtattacaataattcatatgcttattattcccttcaaaagattgcaagttctatctttaaactgaatggcaacacccctactgtcacatgtgcatatccaaataactcaccttaccattctgcttttttacaattttaaactctatacgtcaaaaacattcccgataattttaccacttaacaatttaatgaactaattccccgtcatggacaaataacaaaaattttcattccccct

SEQ ID NO: 132942 - DNA, 373 bp, Glycine max
  unsure (1)..(373): unsure at all n locations
  Clone ID: PAT_MRT3847_91052C.1
agcgcccacgcgtccgatgccttagaccctagaaacaaagaagggattagacaggaggctattgttgatctggcggaccagagtctaacttacaagcagagagtgcaacaccttgacaactcacctttggaagaatcactttggtggtttggactattcccgaangacgaacttcagcaggactggctaagcacgaatctattgcttctggaccttctaccaaaattgagaataacgcacaaagtgcaaaacctgcaccctgctgtggctcttgtatatcttgatgctcctttggctgatactggagatactcgcaaacaaacttgatgggagatcctctttttaatgacgaagcagggtccctaaccactga

SEQ ID NO: 132943 - DNA, 288 bp, Glycine max
  Clone ID: PAT_MRT3847_91053C.1
gccacagaactaatcatattttatatcttcttcgaaaccacacttatccccaccttggctatcatcacccggtgaggcaaccagccagaacgcctgaacgcaggcacatacttcctattctacaccctagtaggctcccttcccctactcatcgcactaatttacgctcacaacaccctaggctcactaaacattctactactcactctcactgcccaagaactatcaaactcctgagccaacaacttaatatgactagcttacacaatagcttttatagtaaagata

SEQ ID NO: 132944 - DNA, 848 bp, Glycine max
  Clone ID: PAT_MRT3847_91054C.1
ggccttccggctttgttagtggcttggctcggggatctccctgtctgccccaagcctctcggctttggatctggcattgcgcgcggacggcttgttctgcttcatggctcaaggctatggatccaaaaatttcagattttggtttggctcgaatgtgtggaggtgatcaaattgaaggggaaacgagcagagtagttggtacatatggttatatggcacctgaatatgcctttgatggactattttccattaaatcggatgtgtttagttttggcgtactattgctagagatagtaagcggcaagaaaaatagcagactcttctatccaaatgactacaataattggctcattggccatgcatggatgttatggaatgaatgaaatccaatgcaattcattgccactagtttggacgactcatgctttgtggctggggacatgcgtggctctcctatccgtctgacttcagtactccatctgcccatgggtgggccagtcatggcatttttttttcatataatggaccaatagataaccattcctttaccaaagtttcctaagtacttaagcacagacatctcaaccgaaagagaatcttcgtctgagaagtttacgtcttattctattaatgaggtgactatctctatgttgagtgtggtcttgtgtgtgtgcatcctcatcctaatgataggccaatcatggcctctgtggtcgtattattgagcaacgagaatgcattgcctctaccaaaggatcctagctacttaagcaaagacatttcaacagaaagagaatcttcttctgagaactttacatctgtttctattaacgatgtcactatctcaa

SEQ ID NO: 132945 - DNA, 792 bp, Glycine max
  unsure (1)..(792): unsure at all n locations
  Clone ID: PAT_MRT3847_91055C.1
gtgatgcaatttagtgtgtttttatgtgtgtttgcttttatttattttttttaataaatttgtttctcttttaaaattgtcaaagaaggaaggaagttgcataaactttcacttttaactttcattctccacctatgtgaaatttgaaaaaaactgtatatgattttttttattatttgaaaaaaaaggagagaaaaattatttttagaaacagaatgtatttatttttaatttaaacttcaaaattttctccactctttcattttctattaatatttcaaacagtttaaatgagtacaaacttggaaaaaccttaaagttgtagcccagaaaaacaatgaaaagatgtccaatgagaagtcgaagtatgttagtatatctgcaatgaaaagatttaatatacttattttccaaaaagaaaaaaaaattcaaaacaattggaattttttttggagattggatgcagtttgatatgttcaatatcaactatcagtgatattcattgttgtatttggaccttaaattcaataccaaatctgttcttacccctaatgttttacagaaagagtccccaaaagcagacatagagaggctgattctggagactggtggtgtaaaatccctaataggatgcttgcatgggatttcaatcatgcacaaacttaagaagggtgacatgaatctgagcaaggatgtaaaatcagaaagaggtgagagactgtgtcccatacctgatggattgccaaaatctgctgatgaactganggaagaggagccaagcagaatgcctga

SEQ ID NO: 132946 - DNA, 217 bp, Glycine max
  Clone ID: PAT_MRT3847_91056C.1
gtgttccacaaactttagccccgactatcatagttgaaaatggtacgtgaagaaaaatgacaatatacatgggaggccccccatcctataggcaattaccacctggaatctaattttaaatagctggcctttttacagagaacctgttttattttcccgggtgtgaagatacaacaattgttcctatcccgcttttccaaacccctaccggggtgca

SEQ ID NO: 132947 - DNA, 480 bp, Glycine max
  Clone ID: PAT_MRT3847_91057C.1
ttcacgcgtacgggtggactttctgatgatagcttgaaaccgaatccatgggttcttagtgatgtctgttgcacttcgtgtgtgaatgatgttcataatgtagaaagtaacaactctgatgttggtcattttcatttaccttctgatgatttagaaggcttttctaaggacatagagggtctcatttcagaacttaatccagctattgagtgctgttggaatcttcatcatcagataagtagaaaactaacgatagcatcagcagaatgttttgtcttttcaaaatgtttgacatcactttctcaaaaatttcataaagctgaagatgatgaccaaaattcttcaccaactaaatcatttgacatattcacactccattggagatttggtcttccaggactttgtgaattgactgttatgcttaagaaagaagttgctgggaagtttcttgttgatgcttgactgttacttggagtacct

SEQ ID NO: 132948 - DNA, 343 bp, Glycine max
  Clone ID: PAT_MRT3847_91058C.1
gataaagctctgtgctaacccgtaaagacaatgcaggttgtaaacgactgccgagggacggtgacgaagaatgacttgcaccggaggcgacacggcatgagtgaccacacatcgcttgaacagtgacacagtgttgaacgggaccaaccaatgctgtcctgacaagtgtgaaggtctcctctagagaagcctggcagcaccgatatgatgcaggtggcaatgggccccccacgctgccagaccacccccatgtaccttatgtacctaaaatacaaggaaaagttctcaaaaactaatcgaacaagggaagtgatggggtgtgttgatgtgctgggcaaagcct

SEQ ID NO: 132949 - DNA, 434 bp, Glycine max
  Clone ID: PAT_MRT3847_91059C.1
cccacgcgtccgtacggctgcgagaggacgacagaagggtacggctgcgagaagacgacagaggggtacggctgcgagaagactacagatgggcaatattaaatgtgagcttgttgatcccgatggtctactaaagcagctaagggtgttgaaatcagtacatgttgatggtgttatggtagactgttggtggggaatagtggaggcacatgctccacaagagtataattggaatggctacaagagactctttcaaatggtgcgagagcttaagcttaagctgcaggttgtaatttcatttcatgaatgtggaggcaattttggcgatgatgtttgtattccactaccgcattgggttgctgaaattggtcggagcaatcctggcatttttttcactaataaaagagggacgacactatcctgaattgttttat

SEQ ID NO: 132950 - DNA, 382 bp, Glycine max
  Clone ID: PAT_MRT3847_9105C.1
cgctgatgcgagaagacgacggaaggggataccaggggcaattcaagccaggtggctgactcttgccaagggcatggcggaaccccggatcagccacaagatcggacacggcctgcatgcaaaaggccacccgaaggaggaggagcacaagggggagcagcaccaagggggcgaaaacacaggggagcatcatggagaacacaggactgaatacaaaggagagcatcatgctggtgagcacaagccggagcaccatggaggagaagagcacaaagaggggttcctagacaagatcaaggacaagatccacggcgaggagggtggcgcccaccgccggggccagaagaagaagaagaagaatggaaaggaaaagcaagaacat

SEQ ID NO: 132951 - DNA, 172 bp, Glycine max
  Clone ID: PAT_MRT3847_91060C.1
gcacgagttgctgaaggagaaaacgttcgagggcgaagtgatgctgtggtgtgtgatcatcaatgacgagatgctcaatgtatcaccttggtcagctttcaattgtcctgatcctgcttggtatacggtgtgctctgctaacatggattatgaaactgtggatgttgctctc

SEQ ID NO: 132952 - DNA, 405 bp, Glycine max
  Clone ID: PAT_MRT3847_91061C.1
agtcggcggccgcccttttttttttttttttcgtgcaaagcgaacttgtgaccaaacatagcttccttgaatgaagaaagcactactctgattatacaacccaataacaaaacccaatttcttgcatgccaaacaaaataaccttacgaacttactagcacaccgatcttgagccagatctaaccatacccacatggatgctcactatttatcttccacttgatcatattgccaaggtcagaattgtgatctgaggacatgcacttcaatgctctcacaactttcagagcgtgcccgatgttgcctatatctaccgttgtattgaacaacttacgagtcaccccaagggagaggagcaacttgatctgtgctgacggaccatccacgagtgaacttatggccctt

SEQ ID NO: 132953 - DNA, 529 bp, Glycine max
  Clone ID: PAT_MRT3847_91062C.1
ggtgggtgtaagaggcatggctcagtatggttacgcataccgaagcgctcaaatatccacctacaatactagcaatgtgaggaatattgaaacaggtgcaaagccatttgctccctacgtccccaaatttaataacggtcatggttactcagaggggcacgttaccaagaaaaaaactattccagttgctagcaggccttatgttagaacaattgctacaacaccttattatgaccatccacgtaaatttgatgacttgaccaatgaagctagccgcagtccacctgattggccaaaaccttcttataatggctatgctgactacggaaccaacaagccatttcaaggtaaaattaagaattatgatgaccatgatcctgtcaagaaggacaactatcatcatggttatgacggctatggggactacaacaacaaagatgagcccaagcccaaacccactgccagtcctgtttataatagtggatatggcggcgactacaacaacagagaaagggccaagcccaagccc

SEQ ID NO: 132954 - DNA, 155 bp, Glycine max
  unsure (1)..(155): unsure at all n locations
  Clone ID: PAT_MRT3847_91063C.1
atccacgcgaccgcagacccccagcgcagggggttttagtacagcaaccgggaggaaccaccccaagccacaagcnacagcaacgcaagcgggagccaaagaaacaaccaccgacagccccgccaagccccgacagcaacacagacggcgcaacg

SEQ ID NO: 132955 - DNA, 1015 bp, Glycine max
  Clone ID: PAT_MRT3847_91064C.1
ataaaggtgaaaaggagttgcactcactgaatgcggatagagttactcaaggtctaagtactgtatggagtttgattcttctaaggcctcccattcgacgcgcttgcttacaaattgctctacagagtgcagtgcatcacctggaagaagtgcgtatgaaggcgatacgtctggtggcaaataagctttatcctttgtcatccatttctaagcaaatagaagattttgcaaaggaaatgcttttctcagtgatgagtggggatgcatctgaagctactgatattgaatgttccattgctgattcagaaaagggacctgatgttgagaaggttccaaacgaacaatcatcattgagtggcagcactaaagatgtcacctcagataatcgtcaatcatgcacatctgagagtgtctcaccagattcagtttctgaggctcagaggtgcatgtcattgtattttgctttgtgtacaaagaaacattctctctttcgccaaatatttgtcatctatagaagtacatcaaaggcagtgaagcaggcagtacatcgccaaattccaatactagtacgtactatgggctcatcttcagatctacttgaaattatttcagatcccccaaatggaagcgagaatcttctaatgcaggtattgcaaacacttacagatggtacgatcccttctaaggatttaatatgtaccgtgaaaaggttgcatgattcaaaactcaaggatgcagaggttcttattccgatattaccattcctatcgcatgatgaggtaatgcccatttttcctcacattgtgaatcttcctttggagaagttccaagcagcacttgggcgcatattacagggatcatcacaatctggtccagtgcttactccggctgaagttttaattgcaattcatggaattgatcctgaaaaggatggaattcccttgaaaaaggtcacagacgcatgcaatgcttgctttgagcagtggcaaacttttacttaagaaggtcttgctag

SEQ ID NO: 132956 - DNA, 721 bp, Glycine max
  Clone ID: PAT_MRT3847_91065C.1
agcttcttccttttgattgaagttcgtttatcatgttaaattttgcttataagtggcatcaaacatatgttattttgttttttaatagtattgtttagaaaacagttatttcctttggacaatcctagagataacagaacataaaccatgtgaaaagttcaatcttgctgtttctgatgttgaggtttcattcaatttccagcaaacccatattccagttttcaaatcaattgccagttttatagagaaccaagtctaaattttcccattttaccttgtctacattgcattgaatctccaatttgagagtaatattagctgtgtatgtattggccagtatatgaactcttcatcaactcaactagtcctcacgaaaaggatgggtatatatgatccattccatcaagtgaacatgtggggggacagctttaaaattgatggaagcttgaactcaattgctccccaaatgttgatgattaagcctagcatgcggaacaagtctgaatgtactcctcacgaatcaagggaaccttctggagatgatcaagagactaatgaaaaagctgatactaaggcactaagacgtcaagctcaaaatcgtgaggctgctcggaaatgtcggctgcggaagaagggtgtaaaaactgaatttataggaaggtggccggtgtttataatctgattcttacttatgtaattcataggcttatgttcaacaatt

SEQ ID NO: 132957 - DNA, 235 bp, Glycine max
  Clone ID: PAT_MRT3847_91066C.1
aaaacaaccaacaacgctttcgtacaataaccttttacattaactacaatggacgttgaacaacaatcacgttataacacaagatgtcatgataatgacaatcaacaaagtgccaagaacagatctcaacaatcagcaacaagggtagataccagtcaagaactagaaccccaagtgaagacagagatagtgatgactacaaccaaagaggtgaacctaaagtcaatgatggtag

SEQ ID NO: 132958 - DNA, 239 bp, Glycine max
  Clone ID: PAT_MRT3847_91067C.1
ccacgcgtccggccacccctagcaacaccaccattattgcctcctgtctcaccaccatcattgtcaccccctacctcaccaccattgttgccacctgtctcaccaccattgttaccaccctctgccacaccaccattgttgcctcctatatcaccaccgttatcaccacccccagcaacaccaccgttgttgcctcctatctcaccaccatcattgtcaccccctacctcaccaccatt

SEQ ID NO: 132959 - DNA, 425 bp, Glycine max
  unsure (1)..(425): unsure at all n locations
  Clone ID: PAT_MRT3847_91068C.1
gtttgattgttttgcgttgctggaggttttgtgtggggaagggtatgctatgagagcgttggaggttgtttatgagctgtggaatgggggtagtgttccgagtttggttgcttgtattgtcatggttgatgggttgagagggttggggaagattgacgaggcgaggagattggtggaaaggatgcttgaagagggtttggtgctggatgttgtgactttcaactgtgttcttcgggatatttgtgataagcggagaacgaatgaggcgaatagattgaggttgcttgcttcaagcaagggttttgaaccagatgagatgacgtataggattttggtcatggggtatatagggngagggagggagagagcaaggagagttgctggtggatgagatgttggatattgggtttatacctgatcttgct

SEQ ID NO: 132960 - DNA, 149 bp, Glycine max
  unsure (1)..(149): unsure at all n locations
  Clone ID: PAT_MRT3847_91069C.1
agagacgcangcacgcgcaacgnangnacggnnacgggcacgagannanngaccnccgccgacncgcncgccncncgnagcnacagganagggggcaaaacaagcgcancccgnannnacgancggagggnnanaangcacncgcnggg

SEQ ID NO: 132961 - DNA, 298 bp, Glycine max
  Clone ID: PAT_MRT3847_9106C.1
gatctaaatgcttgtgcttaaaaatggtcaccaggaaccataactggccgccgttatcactcacatccacaccaccgccttgttgaaatttgaacgtaccattacggtttattctgatttctctatccatttttgcaatctccagctcattttaaatcatggttcgctcttgttcttcaatttcattgcaccaccatgcttaaaaatatagtctctttatcatgtcgaggattcaaaattctgacggtgatgtgctctttctagacatcagagagcaaagagttggagcataaacaat

SEQ ID NO: 132962 - DNA, 1100 bp, Glycine max
  Clone ID: PAT_MRT3847_91070C.1
ggctcgaggggaaatctgattgcaagaaatggttcaggaagctattcatcatcttggtcgaagttggtggctgacttgtatcctttctcgatcagaacatggacatgcacctactgcaatatggagcagcctccacgagcaaaacattgtcatgattgtgacaagtgtgttcttcagtttgatcatcattgtgtttggcttggtaactgcattggccagggtaatcactgtaaattttggtggtacctttttgaagagacagcattgtgcctttggactggtgtcttgtatatttcatacctgaaggctcgcattacaaggggttggtggcaggatgcgatcatgataattctcttgatcactctgttagtttgtctcgtctttcttctcctcctactgctattccatagttatcttattttaacaaatcagactacctttgaacttgtaaggagaagacggattcattatctaaggggaattccggaaagagtgcatccattcagtagaggagttcgtagaaatttatacaatttctgctgtacaaggagcaccatatacggagtcgaaccattgcctacccctgaagagatagaggaaaaatcaaggccgtacacatgcttggatgctgtaacttgtcgatgttgttgatggtttttgtacaagtagaagtctttccgtctagtagtttaatcgtgaaaactcagaagtatgtcgatgtacccttttgctttagatgggtaggtgttatctttaggcaatttgcttcatgacatcttctgttcttcattttttccctaaattttggaggtagagttccaagttagatgtacagttgcagtgctattgtgttgttttgtttttactgtttagtctgtagacctggatatccagctattatcaaaccgactactgcctggaacgctagagacagagaatttattttagttagttgcatgccatggtgggcgttggcccccctcaacacttattacagtctcatgaattcactgttattttacccccagaacttatctagctccactcctggtgcttgcagttgaagaaaaaaaaaaacactcttgcttatattatatttg

SEQ ID NO: 132963 - DNA, 210 bp, Glycine max
  Clone ID: PAT_MRT3847_91071C.1
ccgccccggactggcccggagacccaggcgcgcgcccacgcgtgtttgtagagatttagagcggaaaaagaaaatgctcgtgacttaggaggctctacattacatgggagagtgtcgctcgtgtgaaaacttgaataataaatggcaagagaacagggactggggcccgggcacacagggggtaaagccgcacacggggggggcgctgtg

SEQ ID NO: 132964 - DNA, 444 bp, Glycine max
  Clone ID: PAT_MRT3847_91072C.1
gggaaaggagtgagcggaagattaactttgagcttggacaaatgggtgaggagagatctggttcacagaacagaagagtgaagatctatggaggagttctattgggatttataattatgttaatctgcacagtccagttttcacttgcagacactgatcccattgatgttgctgcaattaatagattgtatactgcattgggaaaccctgttcttcctggatgggtttctagtgcgggagacccgtgcggagaagggtggcaaggtgttcaatgtaatggttcagtcatacaagaaataattctgaatggtgcaaacttgggaggagaactgggtgatagcttgggaagttttgtttctatcagagcaatagttctaaacaacaattcacattgggggaaatattccatccagtttgccaggcactttacagcacttctttctt

SEQ ID NO: 132965 - DNA, 136 bp, Glycine max
  Clone ID: PAT_MRT3847_91073C.1
ttgcttttttttcccccccgccgagcccgtgtccgcacaactggcgtaattatggcccctccgggccatttgtttcttttgtggaggatgtccattgacgaagagacgacactgattgctccgccctccgcactgc

SEQ ID NO: 132966 - DNA, 272 bp, Glycine max
  Clone ID: PAT_MRT3847_91074C.1
atccatgaatcactaataaaacaacttttcataaacaaatcctacggatgagtattcattaccttccactgtaaccaactatttttatactacatttcttaaactaactataatacaatccttcgatccataattcatctttaatattatcctacctatcttaataaaaatctttattgataacacataatccaagaaaacatggtatatttccagataatcttttctttcaaatgaaacctgcttaacctccactttatgtatcctaaatt

SEQ ID NO: 132967 - DNA, 315 bp, Glycine max
  unsure (1)..(315): unsure at all n locations
  Clone ID: PAT_MRT3847_91075C.1
tccagggcatatttgttgacctagggcaatntttggacatgctgggagcttctcttgtcaatccggcacagacagtaaacgagaattgtattcgctcaggccacagtgaactagcctctcgtgaaggaaagctctctctcgtattgaatggctgcaaatagctgatgtgcctaccatagcacaaattgaaaagttccattcgaggctgcgataatgcatgctccttactcgaatgataatattgatttactggtgagcattgatttgttgggtttacacggagccngtaaagcttttccaaacaaaattggtttt

SEQ ID NO: 132968 - DNA, 303 bp, Glycine max
  Clone ID: PAT_MRT3847_91076C.1
cggtcttgaatttccgggtcgagccaagccttcgcaccggttccagaagaccaccgaaggggatatttaagacgatgctagaaggaactgttgcgggaagtacgaggcatagctgcattcacccgattgttatcaccaaaaccatctacatggctttccattttgagctattaaagattaatgcctaggtcatccaagttgatgacgacattgaattgatcgagacttcatgcttgtgatacttgacttcaactgatctctgactacaacctagcctgtcagctgtatatctacacctagttt

SEQ ID NO: 132969 - DNA, 158 bp, Glycine max
  Clone ID: PAT_MRT3847_91077C.1
tatgggggcgaagataggtaacctatggagtgggctgtggtggatagagggagaatgcgcagtgagctctttttgtggacccattttgattgtagagccctgcttgagtaggggtgtgcattgcatatgttgttgatgtggtattgtgccatgagggg

SEQ ID NO: 132970 - DNA, 968 bp, Glycine max
  Clone ID: PAT_MRT3847_91078C.1
aacagttaagataagaaaaagaaaaaagaaaaagagaccgaaaatatcagacgccaagaagaaagaaaaagaaatcgcgcgaggcattaacatgcgcttcttcatgatgatgcgttatcctctattcttctaatttcaagatccaccacactctcagtccttctctggtccaaggaatcaaaagttaagctggtacagttcctttctataaagcagcatgtccctgggtacatccaaggcagtttttcaggttctgtccagggctgtgcctcaaactgggtataatgattctcttgtgaactcttcagatttagcattacattcccagtttcgagtaaaatgtatcaagaaaagaatcctcaaggcatagggatttaattgagtgttctagcatgcttcagagtaggttaataactcaacaatttcagtggatgggtgtcagtttccatgactacaagacctatagtcgtccacggctgcagacatgcaaatgccaacaggctgaaagtgcgagtggaataactaagggagatgaaaatggatcaagacttgtgaatgatggtgaaacatcaaattcagtaagcaatgggatgagtgcaaagcatatcctagagtttgaggatgtcgaagcccaacagttgaaacaggaaaaggaggttttgtcatctaatcttacaaatggatctattacagacagctttgacacaattggccgcaactctattgaggaagaagcatgggacctactaagggaatctgtagtttattattgtggcaatccaattggaactattgctgcaaaggacccaaccagttccaatgttttgaattatgaccaggtctttattcgtgatttcattccttctggaattgccttcctattgaagggggagtatgatattgttcggaattttatcctttatacacttcagttgcagagctgggagaaaacaatggattgtcatagt

SEQ ID NO: 132971 - DNA, 306 bp, Glycine max
  unsure (1)..(306): unsure at all n locations
  Clone ID: PAT_MRT3847_91079C.1
tttttttttttttttttgggttttttttatggtgggggtgagttttggttnnaggaagaatttttttattaaccctaccatttatttccaccagaaacctaaccaacaggtatttcgaaccatttttacgggggaaaactaaaaactttttaactaataaccttctatgggaacacctggattttagttttagggaaaggggccagttaagacaaaaaaaaacttctttgggggtttggggcaataaaaaggggggaaaatttttttagaccctagaaccaggttttttccttttaaatttttggg

SEQ ID NO: 132972 - DNA, 474 bp, Glycine max
  Clone ID: PAT_MRT3847_9107C.1
tccttcaccccgttcagctttaagagaagaaagcaaattgaagtcattttgaaaagaagaataaaaaacacacacacacacaaaaatgaactcaaccatgagtgaatcaggagcaggtggtttcaaaaccttgagttctcccattccttacctctctggtggattagccatcatgctagcactcatagcaagtgcattactcatcttagcttggtcttattggatacaatactatactacttcttctaactcaaacagtgatgaagagaaaccaccacaaatcacgatggtggaaaaggaggagattgtttcagaaccaaagattgttgtgatcatggctggagagggcaaccctacttacttgggcaaggcagctccattcacaagccattatgaacaagccctaatttcaaagttgcagtgagaagatcagagtctacaaggatcatatatatatatatatatatatttatt

SEQ ID NO: 132973 - DNA, 257 bp, Glycine max
  Clone ID: PAT_MRT3847_91080C.1
ggaacaccagatctatttcagagaacttatccagagaatgaagtcaagtctagtggtcttaatattcatcaagatacttgtgaagaggagttaaaaataccacaaaagacaggtctcattgcagatccaggggaatgcattggattttctcccaataaccttgaagcttcagcggttaaaagctttcaggctgaaacttattttcttccgagtgcacttgaagatgttgggggaacttgtaacttgaaagaacaacg

SEQ ID NO: 132974 - DNA, 284 bp, Glycine max
  Clone ID: PAT_MRT3847_91081C.1
cttacacacaaaacacaaacacacaaatttcctttcttttaaaagagagaagcaatgcgtaaagaagagatagaaaagagaaagaagagaagatgaaacatagtgcttcctcctctgatattctctgcttctccattccctgaaccaaaattttcaatttttaatacatataaacttctggggttgttgtaaaagttgaaggcttttgggggtatctgatccattgggatcatcatcatcatcatcattcatcagcacatggccaagcctggggtgttggagtc

SEQ ID NO: 132975 - DNA, 661 bp, Glycine max
  Clone ID: PAT_MRT3847_91082C.1
ccacgcgtccgctctacgagagtgggcagaggatggtctgggaagtgcagaggaacatgcataccgagtcctgtaggcttacaaatgctgaaccagcactctcttgagtgaagaaggaactgttcttccttcgcactgtggggactccttagatgatgtgattgggtcaaggagcccacatggtgactgaaatcaatactgtcctacctgcgcatcagatcccaggggctcgtactggcgatgccgccattgtacaccatgactggggaactgaccatacccccaggcgaacttataggatctgagggaaggactgggcgtctcctccagatggtcgagatactccttggacacgggcatcgaaatactcttgaacaggggccgattacaacgatactgtaactgctggagaggacatgcagtgacatggcagaacctgaaaagccctgcgctgtgcaagctgacgaggatcctgaaggaaacacagattctggaggattgcctcttgtgactgtatataaacctgatcaaactgctgaagatgccgagaagtccgacgtacatatggatgaaagtgctctgaacgatactaacatatgactagaaaatgattcagcggatatgaagaatagtcatgagaaaggagaacttgtgattactg

SEQ ID NO: 132976 - DNA, 1021 bp, Glycine max
  Clone ID: PAT_MRT3847_91083C.1
ctactgcaacaacaacaaggagatgatcttggtctatgatttcatgacacgtggcaatctccgtgaccatctctacaacaccgacaaatcccctttatcgtggaagcaacgtttgcagatttgtattggcgccgcccatgggttgtattatcttcacaaatgtgccgggaaatacatgatcatccatagtgacgtgaaaaccaccaacatcttgttggatgatgactgggtggccaaggtttcggactttgggctttccagatttgggcccatggactcatcccaagcctatggcagcaccaccgctgtaagaggcagctttgggtatatagacccagtgtattataagcggcatcatttgacggacaagtctgacgtgtacgctttcggggtagtgttgtttgaggtactgtgcgctcgtccgcctcttatacgcaatgaagatcccaaacaggagtcgcttgctaagtgggttaggtactgttaccaaagtgggaccatggaccagattgtggaccccacgttgaaggggaggatcgcgcctgaatgcttccagaggttttgccatattggggtgagttgtttgtcagaggttgggatgcagaggccgtcgatgaaagatgttgttttcatgttggagtctactctgcaggtgcaagagagcgcggagaatgtaaaaagaggaaattagtgaaaatatcaatatgtctagtagtgagttgagtatggctactactagtggagagcatagtggggttttataaggaacccaaagcctctttgagcaaatcgagttaacacaacgctggcaaaacaattagctatacatgctaaatttttttgtctattttcaaaatcgttagattagaatgcctgtgtacaggaatcaacttgcttctatctcttgtgaaagaagacaagtgcaaggttgtgtttgtaagtcataaatttcaactcttcttttgttagcctgtatgatatgtgttgatttatttataacataaacccttccaatgtgatc

SEQ ID NO: 132977 - DNA, 1110 bp, Glycine max
  Clone ID: PAT_MRT3847_91084C.1
gttcgcgaaccccaaaatactactagtaccttaataaacaaataaataaataaggtgagagaaaaaaaaaaatgtagaggaacctggaaacttccacgaggttttcggtgaaaaccaaatttggggctttgcatcgcaagatttaccctttccaatcaaaattcttctgccttcccctaccaattctttctctcaaccgatttatctgagtgaggggtttggccaatgacgagtggttttggtgaatcaacgagagcgtctgcaccgagcccatcatgctcggggaacagttcaaacgatgccggtgattttgaatgcaacatatgcttcgatttggcgcaagaccctgtgatcacactctgtggtcacctattctgttggccatgcctttataggtggctccaccatcactcccattctcaggaatgccctgtttgcaaggcccttgtgcaggaagagaaattggttcctctttatggaaggggcaaaacacagactgatcccaggaccaagtcatatcctggaatggagatcccccaccgtccttccgggcagaggccgcaaaccgcgccacccccgccacctcctgaggctaaccctttcgggagttatgggtttggactaatgggagggttcattcctatggcaactgctcgatttggaaacttcacgctttccactgcctttggcgggtttatcccgtccctactcaacattcatttccatgggtttcaggatgccactgtctatgggacaacgtctggttatccctttgggtttaatggctttcatggagggaacacgcggggttttacgcaggcaactggtcaagtgcagcggcaggaggataatgttttgaagaatctgcttatgttgattgggtttcttgtccttcttacggttatttttgtgtggtaatggtcgttctgtgttgaggttacaatgcttcttaaggagttgcttgtgtaaatattttaactggctttatgagggaattgtatgcttgagaatgctgccactttggctctttattaactgtattataagcatctgcagtaaacttgaatgctgcctatttgtctttaacgcttgcctgttgttttttctgtc

SEQ ID NO: 132978 - DNA, 443 bp, Glycine max
  Clone ID: PAT_MRT3847_91085C.1
gacccacgcgcccgctagtatacaaccaaagctcctccactcatgacgggggctcagctgccaccggaggggtaagccaacgcaacttgctcggacaaggtgggttcggatatgtgcacaaaggcgtcctacccaatggcaaggaaaatgcagtgaagagcctcaagcccaccgggggacaaggtgacagagaaccccaagctgaggttgatattattagccgggtccatcatcgccatcttgtgacacctgccggctatcgcaagccagaaagcaaaaaacttctgggtaatgagtccgggcccaaagggacccctgaactccaaccccaaggaaagggcccacccggcaaggaatggaaaaccaagcccaaaatcgggaatggaacggccaaaggacttgcctaataaccagaggaacggcaccctcggaacaaccaccga

SEQ ID NO: 132979 - DNA, 1059 bp, Glycine max
  Clone ID: PAT_MRT3847_91086C.1
tagagccgtagaggaacctggaaacttccacgaggttttcggtgaaaaccaaatttggggctttgcatcgcaagatttaccctttccaatcaaaattcttctgccttccccaaccaattgtctttctcactatcgatttggtttggttggcattgtaattgattttgtttgtgaagatctgagtgaggggttaggcaaatgacgagtggttttggtgaatcaacgagagcatctgcaccgagcccatcatgctcggggaacagttcaaacgatgctggcgatttcgaatgcaacatatgcttcgatttggcgcaagatcctgtgatcacactctgtggtcacctattctgttggccatgcctttataggtggctccatcatcactcccattctcaggagtgccctgtttgcaaggcccttgtgcaggaagagaaattggttcctctttatggaaggggcaaaacacagaccgatcccaggaccaagttatatcctggaatggagatcccccaccgtccttccgggcagaggccgcaaaccatgccgcccccgccgcctcccgaggtcaacccatttgggagttatgggtttggactcatgggagggttcattcctatggcaactgcccgatttggaaacttcacgctttccactgcctttggtgggtttatcccgtccctgctcaacattcatttccatggttttcaggatgccactgtctatgggacaacgtctggttatccctttgggtttaatggctttcatggagggaatgcgcggggttttatgcaggcaaccggtcaagtgcagcggcaggaggacaatgttttgaagaatctgcttatgttgattgggtttctcgtccttcttacggttatttttgtgtggtaatggtcgttttgtgttgaggttacaatgcttcttaaggagttgttgtgtgtaaatattttagctgacttcgtatgagggaattgtatgcttgagaaggttgccactttggctctttattaactgtattataagcattgcagtaaacttgaatgctgcctgtttgtcttt

SEQ ID NO: 132980 - DNA, 532 bp, Glycine max
  Clone ID: PAT_MRT3847_91087C.1
ggctcgaggtgaaaaccaaatttggggctttgcatcgcaagatttaccctttccaatcaaaattcttctgccttccccaaccaattgtctttctcactatcgatttgtaagtttctctctcagaatgcttatttcgttatcaattcatgtttttatttttctacgtttttattctgagacgagatctgtatctcttttgttaaaatatacttttcttcttgttttgttttctcgttccactaattgcaacgttcaatccctagatttatacgtcgattattcgattgattaattgttgattttcgtgcaattcgctgtttcgtattttagtataaccttgtcggtgacaatgatgcaaatgcgatatagcctatggtgattttttttaatttatttgtgacattgtagggtttggttggcattgtaattgattttgtttgtgaagatctgagtgaggggttaggcaaatgacgagtggtttggtgaatcaactagagcatttgcaccgagccattatgctcggggaacagtt

SEQ ID NO: 132981 - DNA, 900 bp, Glycine max
  unsure (1)..(900): unsure at all n locations
  Clone ID: PAT_MRT3847_91088C.1
atcggagggaggagcaagttgagcagaggaaaaacaagcgaaaagagaaagaaaagaagaaaaaatggtgggagaagaagtagtaccaatggacgacaaagcgaagaggatgcgagatctgctatcgagtttctactcccctgacccttccatctccaacaacacctccaaacacgcttctctcgacgacatcaattctacttccttcgatcccgatcagtacatgaacatcctggcacacaagtccaatttggaaggcctgctccaacgccacgttgaaatggcagctgaaatcaagaatctcgacaccgacttgcaaatgctggtttacgagaattacaacaagttcatcagtgctacagacactataaagaggatgaaaagtaacatttccgggatggagacgaatatggagcagcttcttgagaagataatgtctgtgcagtcgagaagtgacagtgtcaacacttctctatttgacaaaagggagcatattgagaaactacatcggacttgtaatcttcttcgtaaagttcagttcatatatgacctacccgatagactaagcaagtgcatcaagtcggaggcctatgcagatgcagtcaggttttacattggagcaatgccaatttttaaggcatatggagattcttcattccgggattgtaaacaagcttctgaagaagcaatagctgttgtagtaaaaaacttgcaggggaagctattttcagattctgaatcaatacaagtgagagctgatgcagcagtgcttcttaagcagttggattntccggtgaacaatttgaaggcaaagttatttgaaaagttagaacaatctattacagacattcgactgaaccctgaagaaataataatccttcaggggaccgttctactcat

SEQ ID NO: 132982 - DNA, 578 bp, Glycine max
  unsure (1)..(578): unsure at all n locations
  Clone ID: PAT_MRT3847_91089C.1
tggaaacttccacgaggttttcggtgaaaaccaaatttggggctttgcatcgcaagatttaccctttccaatcaaaattcttctgccttcccctaccaattctttctctcaaccgatttgtaagtttctctctcagatttcttatttcgttatcaattcatgttttttaattttttattttctacgtttttattctgagacgagatctgtatctgtatctgtttttctttcgttaaaatatttttctttctgcttttgttttctcgttccactaattgccacgttcaatccctagatttatacgtcgattattcgattgcttttcgtgcaattcgctgatttgtattttagtataaccttgttggtgacaatgatgcgatatagcgtatggtgattgtttttttcttttttgtgacattntaattaattttgtttgtgaagatctgagtgaggggtttggccaatgacgagtggttttggtgaatcaacgagagcgtctgcaccgagcccatcatgctcggggaacagttcanacgatgccggtgattntgaatgcaacatatgcttcgatttggcgc

SEQ ID NO: 132983 - DNA, 520 bp, Glycine max
  unsure (1)..(520): unsure at all n locations
  Clone ID: PAT_MRT3847_9108C.1
ctttntttttttttttttttttatcacagaaatctttttattactgtatgaaaacgaagagttaagtatacaatctttagcaataaaaaatatgttatcattaagtattcacaagtgtttcccatataactttagaaatatattccctcacctctatccctgcctgaagacatggcctctactctatcactnctgngaaagactncanggntcaagccaggcttgccttcgatctgaggcaatccccttagctctgagcttcaggtaagcgaccacaggggtgtgccaccatccccaagttaaatctaagcatctacttggatttccccactctccccactctggccctggccaggggttgaatctccatcctagaacttaccacacatatatttcccccttagctacattcccaccatactttggctcaggagggtctataatgaatttcacatctgctatgcggcacgccagtggaaaggtgggtgctggtttttatacagagccacagtgagatcag

SEQ ID NO: 132984 - DNA, 412 bp, Glycine max
  Clone ID: PAT_MRT3847_91090C.1
ggagcagaggaagaacaaaggagaagagaaaaaatggtgggtaatgaaatagtagtaccaatggacgacaaagcgaagaggatgcgagatctgctatccagtttctactccctagacccttccatctccaacaccaccttcaaacacgcttctctcgacgacatcaattccacctccttcgatcccgatcagtacatgaacattctggcacacaagtccaatttggaaggccttctacaacgccacgttgcaatggctgctgaaatcaagaatctcgacaccgacttgcaaatgctagtttacgagaattacaacaagttcatcagtgccacagacactataaagaggatgaaaagtaacatttcggggatggagacgaatatggagcagcttcttgagaaggtaaccgtag

SEQ ID NO: 132985 - DNA, 826 bp, Glycine max
  Clone ID: PAT_MRT3847_91091C.1
aaacattattttatctaggtccgaaggtggtatcaaggcactgctgggaatgggcagatgcagacatcctgatgtacatgcacaagttgctcgtggaatagcaaattttgcgaagtgcgagtcaagagcatctagtcaagggacaaagagtggaagatctttccttattgaggatggtgcccttccatggattgttcaaaatgcaaacaacgaagctgcatcagttaggcgtcatattgagcttgcactctgtcacttggcacaacatgaaataaatgcaagagacatgattagtgggggtgcattgtgggagctagttcgtatctcccgagattgttcaagagaagacataaagactcttgctcatcgaacactagtctccagccccactttccaagctgaaatgaggcgtttgcgggtaaattactgaagaattctgtagagtaaactaaagtgggctgaaagatccgaagacaaacaagacttttcaatatgtatactctataagtattcaagcaggaaggctttgttcagtgttctagctgaaattctaaacgagcgtaactgcgtaagtgagttcttgtatgtggttgatccatcaatgaatggccataacttaatcaagtcaaagtggtgtctttctttccgcttgctagtgtccagcaactgggatgtaaattgatttgtatattaaataaatagaggtaagggtagtgaaagttttgaatttcttccatgcaatagcttgttgccattcatagggacaattgttgatttgttgattagtgatattatttgaattgttttaacataattctgtttgtta

SEQ ID NO: 132986 - DNA, 257 bp, Glycine max
  Clone ID: PAT_MRT3847_91092C.1
gtcttgtggtgttgtatttatggtctgacaccggttcacaggacacttggaatcgagcgggatgtgcagagacggtgagattgacccgaggcctcgaactcgatgatgcacgctcatgcggcacaacgttgttccgcctggaaatatgtcaccagtaagatgaacctcctctcgagctggagacagtcacgccgtggtggctgattgatcgtatggtgacactagccaacgacctgacgactgtggaggacatgaag

SEQ ID NO: 132987 - DNA, 407 bp, Glycine max
  Clone ID: PAT_MRT3847_91093C.1
aaaaaaaaaaaattaaaaaaaaaaaaaaaaaaaaaaaaaaaaaggaaaaaaaaaaaaaaaaaaaaaaaaaaaaaaaaaaaaaaaaaaaaaaaaaaaaaaaaaaaaaaaaaaaaaaaaaaaaaaaaaaaaaaaaaaagggggcgcccccccctttttaaccccttccccccggaatttatttccgacccgttccctgagggctccccaatttccccttttggaagcccttttaaacctgggcgaaaaaatggcaataccttttccctgggaaaaatttttttcccctaaaatttccccaaaaattccaacccgaaaccttaaagtttaaaccctgggggccctaataaggaacctacctccctttatttgcgttgccctcactcccccttttcaataggaaaaacctt

SEQ ID NO: 132988 - DNA, 982 bp, Glycine max
  Clone ID: PAT_MRT3847_91094C.1
cacgcggccctcggctcggaattcggctcgaggtataaagcatccgttttgtagtttttacacttgacgctgctgggttggccactggctcttttgttcaagctgtgcttgctgatgccaaatctatcaaagttggaccaccttccccaccttctggtggattgcgtatgtgtctctctctctctctccctccctcttctcttacaattcaattcaatccattttgaagaaatgatgattagttgagagtgtaaaaatctctactgatagtgcatgaaaattgatctctctctctctcttgctgatttctttacagaacttggaaaataatttctttaaaactgaactttttcaaatttgtatttaattttgatttgattattcatgcgactgattagtttagattaactcctttttgccttttatttcttaattgatgtacatgtgtgcaaatgtctatgcaatgatcataacttgtctagtgaaaatcattaatgggtcatggatgttgcattaaaagacgagggcttgagggaagaaacatggaaattggggtagagaagttttgagatagaattgaaattggttttagagggaaagataggaaaccagcaaaaatctgaaaaaggggttttgtgacatagtagtagtattgtaccacgggacagcaagttttgaacagaaaataggtcgtgcatgttgcattatatgatgagagaagaaaaatagaaatggggtggaaaagtttgaggtagaattgagtttgattttagaggtagatttcatttatgataaagggttagaggcaaagacaacgaaaacaaaagaagaaaagaaagaattcttgaagtgggagttgttattagggacataaagaatgtagtttgaagatgttataattataaccatggtggggtgtgttatggaatatggcagctggaacgttgaactcagatgaagcaagagaccttcagctgccatt

SEQ ID NO: 132989 - DNA, 610 bp, Glycine max
  Clone ID: PAT_MRT3847_91095C.1
cgccgccgatcgccgcccggggatgtcggcctcgcgcgctccccccgccgctaacccgccggaccagatcatgcactccatgaaacgccaactccccttctcctccatgaagcctcccttcgtcgccgccggagactatcaccgccatgacgccgccgaagccatcgtcgtcaagactcccctactgaagcggaagagtgaagtggctgattttgaagctgattctggtgataggatgactgctggattcactgaagcagctaatagtccttttcagacacctgtatcaggaaagacgggaaagggaggcaaatcctctaggctgacaaaaggcaacagagttggaactcagaccccaggctcaaacattggttctcctgcaggaagtaatctcactcctgctggtccatgtcgttatgacagctctttagggctgttgacaaagaagttcatcaatttgatcaaacaagctgaggatggtatccttgatctgaataaagctgctgacacattagaggtgcaaaagatgaggatatatgatataacaaatgttcttgaagggattggccttatagaaaagagacttcaagatcgaattcaatggaaggga

SEQ ID NO: 132990 - DNA, 360 bp, Glycine max
  Clone ID: PAT_MRT3847_91096C.1
acattaaggatggcgtttaccaagggtttgtggaaccaacaaatgaaaggacctatgtggtgtttattggggagggggggaaaaggacactagtgtccgctgacagaaacaagatagatggcacgaacacttatagaactgtcactgtgactattgaaggagatcactacgtgcacataaataaggggttagagaattacgatgggccttataagcatcattcggagcaattgagagatcaagcagacaagcgcatgatttcgacatgctcaatggatgggcttcaagacacactttatagcacacaccttggcgaacactatatagagattgcacacttaaaggtgccaactatgcatg

SEQ ID NO: 132991 - DNA, 760 bp, Glycine max
  Clone ID: PAT_MRT3847_91097C.1
cgagtacggctgcgagaagacgacagaaggggagtgtgaattaaaaacactttcttgctacattatagagtttaccttttcttctccacaacctctccatttttaaaaccacaaataaataccaccattcttcccctgcctaacccataatctaacatcaacagcatctcttcaccaacatgacgcggtcaacgcttccaccctcatctccgatctccctcttcgtgtcgctcatgtgcgttgctttcgcgtgcgccacatcgttgaacaaagttgagcactgcgagttggattgtgcaagttccacggtggaggggctgaacgtggttggtgactgcgaacccaagtgttctcaggggttgaagattccgacccaaattgaaaaagaagggcaagacgcgatcaaagagtatttggataccgttttcagcaacgcgctctttggcggtggttcaattgaaacagggcagaataaggaaacacaaattgaggacaacaagggtgcgtaaatatgtaattctcgattttttttttgttaactttgcctaaattttttaagagatgttaattttatttctaacttagttttaatttgtttgagtttaatgtctacgtgcaattattattgatccattgaaaaatcatgctagatataatttttaaggtatttattatatatgactgattataattgaatgataaaaccttcctaaaaaaagagaaattacttatccaataaaatatctaactaagagtttgt

SEQ ID NO: 132992 - DNA, 199 bp, Glycine max
  Clone ID: PAT_MRT3847_91098C.1
gctcgagggccagtactgatcacattattatactacagctatatggacatctttttcaattttatcctactgaccccacagagattcagtggttcattcctaagagaccgggcgcatttaaacctcctatcacttaattaacttccttatcataatccacttagtttcatagcattacgttaaattattttccttttta

SEQ ID NO: 132993 - DNA, 460 bp, Glycine max
  Clone ID: PAT_MRT3847_91099C.1
ggaaacaaacacagacttttcttattaaaaataggggtaaaggaaaagtttgtctgcccacaattgttatttcaatctttatcagttaactaaaaagcaacccaaactaaccaatcaaggtgcgtgctggttgtaacatctactgaaacaaaattgtttcattattactaacataaatgccatccagaaatttcctgatttccttctttttaacatagaatttatggttgatgaaagcacaggaactaccaacaagtttaatggcggtcccctccaaaataaattaatttataactttctcagatcgaacaacggaaacaccgtcaagaaggtgcgctttttttaccttcctttcgccaaggaaatttcttgactcacatcactgggtgggggtgcccatgcttgctttgatgggaaaatgggcctacactaacctaattttgtttcgggcgcccttggt

SEQ ID NO: 132994 - DNA, 418 bp, Glycine max
  Clone ID: PAT_MRT3847_9109C.1
ggctcgaggggagattgatcatcttggacttggaggtgaaccgcgtgattgatacgatcataatgttggaggtacagatatcctaggatgtggagccatttacatctgggaggaacgagcgggaaaataccttgcgctaactgcatgacttgggctgtgtggctctggagccgagactgaggacattataagtggaccaccatcgtttgcatcacttgagtgctgatgaattactggcaggtacatactttcacctgatggccaagagagttgatctacatgaatcaatgacccatgctgtattctgtagggtatcagctgctcaagaacttgagtctcattagaactgtctgcctgagctgaatgatatacattcatgatcctctgaaaccttatgacctgctgatgcgctcattct

SEQ ID NO: 132995 - DNA, 387 bp, Glycine max
  Clone ID: PAT_MRT3847_910C.1
tttttattatttatgatagactccaaacaacccaactcttcaacaattggttggaattttagaggcaccaactcaggaactaaaatgggtatatctgtagtgtcattgctcgggatgtcagtgtcctcggtgttaagaacacagatcataaaaccctcactttgttcagcatgaggagtttgcacagcaccagatgatccagcattgtttccagactcagaaacacaatgttgatcagcacaaccgccacctaatggctcacggccatcatcatcaccctgaacatcacagggagaactcaacagaagcgaatcgacattatcataactaggcttatccttatccgcagccagcacctcctttctaactagatccataaagacaacc

SEQ ID NO: 132996 - DNA, 304 bp, Glycine max
  Clone ID: PAT_MRT3847_91100C.1
tttgccttctctggctcctcgcggtaccaacactagaaccactttgctcttatcttccctcaaccacttctcagggtcacgaaaatcttctctgcttcagaccacatcttctacaaatgaatcatcctcaggagatgccaatgaggagtacacacaataaaatgaatagagggatgctcttgaaaacaagtgcacgttacttttttatggtgatggggctttagatgctgcttgggtatcacctaatcttgggggagccatcaactctggtcccttgcttcctgagattatggacttagtgggg

SEQ ID NO: 132997 - DNA, 1608 bp, Glycine max
  Clone ID: PAT_MRT3847_91101C.1
tacggctgcgagaagacgacagaagggcctttgtcaattattttttctggttgctgaaattttttttttggattctctatgtcactttagttagttcttcgaagacagtacccgcaacatacaagctggaaaacgtgtggggcttcacactgtgctggtttgtcattcgaatctttgttatttagtagaaacttctttggtttcattcaataacttataacttagcattgtattgtgttcaaactttgtttcttccatactttcatcttctttagcctttactgctttatttctttatgaaatggccttcaaccatcgcaatacaatattgctctctaagctttgattcttcttaattcatacccttcccacactcattcattgttgtgcgtctggttttctgcctgaaatggagtacatgaaccagagaccaaaatatgattgccttctttttgatttagatgatactttgtatccactaagcactggtcttgcaaaagcatgtggccaaaacattaaagactatatggccgaaaagcttggcatagagaaaagcaaaattgatgacttgtccaacctcctctacaagaactatggaacaactatggctggtttaagggcaattggatatgactttgactatgatgaatatcacagttttgttcatgggagattaccttatgagaatttgaaaccagacccagttctgaggaacctcttgctgagcctaccctataggagactgatcttcacaaactcagacaaagtccatgcagttaaggcactaagcaggctaggattagaagactgctttgaaggaatcatatgctttgagacccttaatcccatccacaaaagcactgtctctgatgatgaagatgacattgaatttgtggggggttcaggcacaaccaatccaaccacaaaaaaagatgctagcagctttcaaatctttgacatcattggaccattttgctcaacccaatccccacacagttttgccaaagacaccaattatttgcaaaccatcagaaaatgccattgagttggccctcaagatagccaaccttaatccacaaagaactttgttctttgaggatagtgtccgcaacacacaagctggaaaacgtgtgggtcttcacactgtgctggttggaaaatctcagagaattaaaggagcagattatgcattagaaagcatccacaaccttagggaggcagtgccagaactatgggaagatgacataaaatcagaagttgcttatcctggcaagcttgctgtggagacatctgtgactgcttagatcattgatgaacaaaaaaataaaataaaaaaataagaaaaagagagagaaagagagaagtcctttgtgaatttcccgagttgggatgtagtaattgtatgtagttgatgtagatgctttgatcatattacaattataataaaataatatgtgtagttgacgtagatgctttgataagataataataaaaaattaatataaaatattaaattctccatttgggcctagcgttcatatatatatgtatatttttccgtcgtctccatcaactgaggaagatttgctttgcattaaagcgcaagag

SEQ ID NO: 132998 - DNA, 195 bp, Glycine max
  unsure (1)..(195): unsure at all n locations
  Clone ID: PAT_MRT3847_91102C.1
ttnttttttngaagggcaactcataccctaacgctctttattgaaatgaaaggtattattcccttccaaccaaaaggggtggttttttgccaggaaggatcggtaaaaagacattaaatttaccaaattggaatggaacgggttcccaaaccaggaaggaaatttttttacggttcccttttgaggaaaagggag

SEQ ID NO: 132999 - DNA, 269 bp, Glycine max
  Clone ID: PAT_MRT3847_91103C.1
ctcgagcgcgggcgatgaagaggcaatgcaagagttcattgccagaggtggaatgattggaacaaccattggtcccaaagggatggttaagggtgataaggatgagagtgactacaagaaggagctgaaggacaagaagtttgggcaagaggctcagaaactgtggatgaggatgaggagtgaggtcattgctgagcttcaggagaagggctttgatgtggaatgaatgagtgcaatgagtgctcaaaactattggtggtagtaaatat

SEQ ID NO: 133000 - DNA, 145 bp, Glycine max
  Clone ID: PAT_MRT3847_91104C.1
cccaggcgtccgcccacgcgtccgcccacgctttcgcggacacatgggcttcaacgggtatgtccactttaactaccctgatggggatcagattccttactttgaagattgtgaatctgtgacctaccataatgaaaaagagggg

SEQ ID NO: 133001 - DNA, 215 bp, Glycine max
  Clone ID: PAT_MRT3847_91105C.1
ggaaagggacctaatgtggatcccattttttttttccttatgaaaatggttggtataataacttctttaagctaaaaattgctaccaagggggacccaaggggggctggtgtttatttctcccaaaagggggccttaaaataataccttaaatccttgaaatggttaagggttacactttgccccctccattcctttctaaagggacattatttc

SEQ ID NO: 133002 - DNA, 225 bp, Glycine max
  Clone ID: PAT_MRT3847_91106C.1
gactacctaacactaacaatcattctaatcctcagatcttctctcttgacccaaaggctaacttctcaccctgcaccactctaatatgcgtcatgaaaagcagaaagcccaacaccgactactatacagccgaacccaaacttgctgagaacaataatggctacgccaccaaagctaccaaacccacctacaaagacaatgcaactaaacatcctaacaagccca

SEQ ID NO: 133003 - DNA, 350 bp, Glycine max
  Clone ID: PAT_MRT3847_91107C.1
gtaacatacaatgacttttcttcttcatcattatcagttgatgatcaactggtacttttgggggatccattgagtgacatgaagaatctctttcaacaactccccatgaagagggggctatcaagattgtaccagcgaatgtcacaatgtctcacttcactaacaaatgtgaggagcttgtatgatcttgtaaagccagagaaccctcacaacaaatgattgaagccttacaagagctatgcacgatggttgacccatatccattcaacaagggttgtttctaatgggggaaagatgctttcaacaagatcatgagggtcatggtgttatttgggaaagggcaggggcac

SEQ ID NO: 133004 - DNA, 260 bp, Glycine max
  unsure (1)..(260): unsure at all n locations
  Clone ID: PAT_MRT3847_91108C.1
tgaatccaccatgaaccaacatttcattacacactgggaaggaaanaaagaagtgaaggtgtaccccttggtgaaggccttttcccttacacttggatgccaattcttcttaggaattgatggaccaaaatttgccagtgagtttgagaacttgtattttggtatctattctgttcctgtgaattttccaggctccacataccatagggcactgaaggctgcagctgctataaggaaagagatccaaattctgatcaaga

SEQ ID NO: 133005 - DNA, 1592 bp, Glycine max
  Clone ID: PAT_MRT3847_91109C.1
ggaccaaccaataatatatattctcgattataactccttgccaataattagagcgaaggttcccacgacgttaaagacaacaacaggctaatagaggagtccttcctatccaaaagccaaaattcttcgagataaccaaaacaattgaatgaagaaagcacaagaaacatttcatatttctcaacctttgtccaattcagcaactctattcacattgataaaaaaaacaatcaatcctgacgagacaatgccttattatattaagtcccaccaccaccaacaaggtcataacctgaaccagctaactccagcaacaacaacaatagaagaggaagaactaggaattccttttgttgttgttgttgttgttgttgtccttgcccctctcctcttctttgatgggttccgaggtctccaaacaggttgagagacgaaaggcgatccacacagagggaaaaactctgtctgatcttagaaactctggggaagattaccctggctcagattatcatccctcagacagaaaaaaatggatgtctgagctcaaccctgagaaagttgtgataaaacaaattgtttggcctggaacccatgattctgcaaccaacaagattggcatcccatgcatcactcggccttttgctcaatgccaatccttgtccatctaccagcagcttgtgttggggacaagggtgattgacattcgggtgcaggaggatcgtaaagtgtgccacggagtcctcgttacatacagcatcgacgttgtcatcaaagatctcaagaagttcttatcagaaactcagtccgagatcatcatcctcgaggttagaaccgagtttgggcacgaggaccctcaggaattcgacaagtaccttgaggaacaactgggggattacctagttccccaggatgataaggtttttgaaaagacaatcgcagaggtgctaccaaagagagttatatgtgtttggaagccaagaaaatcgccacagcctaaggcagggagtcctctgtggagtgcagggtacttgagggataactggatcaacactgatttgccatcaaccaagtttgagagcaacatgaagcatttgagtgagcagcaacctgttacgtccagaaaatacttctacagggtggagaataccgttacgcctgtggcggataaccccgttctgtgtgtgaagcctgtcactgagcgcattcatggctttgcaaggctcttcattagtcagtgcttctccaaagggtatgcagatagactgcagattttttctacggatttcattgaccaggatttcgttgatgcatgcgttggactcacacgtgccagggttgagggtagagcctgaaaattgaaattatctctcttatgctcgtaactcttcttgttcatggttctgtctcttttatgtagcagtgtagctggatcatatggttgttggggtcacataatatttggtggaaatttctgatgtggtaataaacagtggtttgtgctgtggtgtcatatgaatgcaaatctttaatttggattaaaaaccaacaatgttatagttatctattgatttcttgaatgtacccaatttcta

SEQ ID NO: 133006 - DNA, 1000 bp, Glycine max
  Clone ID: PAT_MRT3847_9110C.1
caaaaccaaaagggaaccataggatagaagccagttaccgctgtagcaatggcatggtcactcacactgccaccgccttcttccctttcttcttcttcttctccttcttttcccaccttccaccaccaccaccactctctctttttcaatggagtagtagcgttcaccaggctccgccatcgccgaaactcgaacaccctttcccatgttccctctgtggggaaggaagacactgaccttcgtgtctcttctcttcaggaacagcaactaggcgaagatgacgacggcgatgatgaaccaactcctcaggacattgaatacgttgcccaaatcaaaagggttttggagcttctcaggaaaaaccgggacatgcttttcggcgaggtcaaattaaccataatgattgaagaccctagagaagttgagagaagaagattacttggtattgaagatttagatggcccaacaagagaagatctagttgatgccttggatgaaatcaatgaaggaaaaattcccaaggatagagcttctctccagatgcttgctgaggaattggcttcatggcctaatctagaggatgccgtgcctaagaaaaagcccagcaaatctctctatgcaaaagccactgacactggaattgatccagaattggctgcaaagaaactgaacattgattgggattctgctgctgaaattgaagagacaaatgcagatgatgagacagaagtgccttcagtggtgggctatggagcactatacttggtttcggctttccctattattataggtatttcagttgttctgattttgttttacaattccctccagtaggaaattgcattccactcaaattcagtgtataatgttacactatattgaaatgagttagtatatcgcaatgttcgcctaaaatttacccgtctattttacgttaaaattcatccttttgaggaaaaaaaaaaaaaaaaaaaaaaaaaacaaaaaaaaaaaaaaaaaa

SEQ ID NO: 133007 - DNA, 460 bp, Glycine max
  Clone ID: PAT_MRT3847_91110C.1
aacttaaacaaaattaaaagggaactgaaaggtggccaaaacaggttctaaagggggggcaacaccccccagggaaaaacaaaaacaaaagcattctaacacatacatatgtccaaaaatcaattacaagccaatttttttaaaggaagaaaacacagccacggacccttaacaaaatttgcctatatcccaattaatgctactaccagcaaaaaacctaccctccctaacaaccccatttattgaaaaaaaaaaggaatctgaaaaacaaaaacaccaaccggagccaccaatcatttttatttttccaaccaccaactaaagcccgctcaccacaaaacctttttgccagctgaatattcttgggcataaagggtacacccctggcgggaatggcacacaggttagggcccccaaagaacccaacaagggatgcctcaacaacttcttgcaaagcaag

SEQ ID NO: 133008 - DNA, 195 bp, Glycine max
  Clone ID: PAT_MRT3847_91111C.1
gtccgaccacgcatccggagtcggaaacaaatgccattcgatctctcggagcacttgagggcccccatggggcaatacctcatgtgccatcccaatagattcgatgtctcggtgctcgcacacgtatcttcggtcagcaacaccataatcagcttgtatatcgtcacagcacaccgtatcctattcagggaaatg

SEQ ID NO: 133009 - DNA, 680 bp, Glycine max
  Clone ID: PAT_MRT3847_91112C.1
tttcccatcttaagcctcgcattgacaacttaattctagctacaactgataatacaaaatgggtaaaaagaatatgtaagctaaattggcatttaaaaagtcaaaaatagtaatagcaaagcaaaaaaaaaaaaagaaagatgtaaaaatactatagctgccataaaatgctagctaggatttgtggcagaccaccgcggtgcatgacaaatcactgtctatgctccacaaattgaactcgtcgagccatttctgaattgaattcagctccatctcacttgaccaatataccaacttcttatcccgaagagaagtttcactaccagagccaatctttgtggcaaaagaattctcatcaactcttctaatcctcgcaccattctgttccaataattttattacaacatacacgaaacttaagctaccatgggttgctgaatcttttcctgccaaagactccgccatggctacaacctttgacacaaagccatcaacccagattttctgactagaagatgagcttttagcataaaagagttccaagttgtttgcaacaaagaagtcaccattggaatcttcagactcagacaagaagaggtctgaagtgagaagcatgctcccatccataacccacgtgttatacctattctcaatacacttcttaattgcataagtctttg

SEQ ID NO: 133010 - DNA, 813 bp, Glycine max
  Clone ID: PAT_MRT3847_91113C.1
gagaggacgagcaaatcgaaagacaagagtcacagcgcacccccaaacagaaacagagttattgggagcacgaaacactaactgattcgattcgattgaggttacaaaacactaaactgattcgattcgattcgattgaggtttcggtttggtcttgatggtgtcggtgaacccaagccctgctcaaggcttctacttcttcgatccctccaacatggtccttcccggcgtcaacaatcttccaccgcccccgccgcctgctccgccttctcacgccgccgtggaggatccgagtaagaagatcaggaaaccctacacgattaccaagtccagggagagctggactgagcgggagcacgacaagtttctagaagctctccaattatttgatcgggactggaaaaagattgaagcatttgttggttcaaaaacagttatccagatacgaagtcatgcacagaagtattttcttaaagttcagaagaagggaacaagtgaacatgtacctcctccccggccaaagagaaaagctgctcgcccataccctcaaaaagctcctaaaactcctactgtatcccaagttatgggcccattgcaatcttcatcttctttcattgaacctgcatacatttatatcccggattcttcatctgcgcttggaactccagttactaacatgccttcgtcatcttggaactataataatacaccacaatctgtcaatgtgccacaagtgaccagagatgacatgggattcactgtagctggacaaacagctcctcttaattgttgctgcagcagtagtaatgagag

SEQ ID NO: 133011 - DNA, 799 bp, Glycine max
  unsure (1)..(799): unsure at all n locations
  Clone ID: PAT_MRT3847_91114C.1
cgttccatgaatcataataatccttataatagtgtaatgtccgaagatcaaaaccctctgatggggcatcgtatttgattggtcggtcatagcaattagcaactccacccttcaaacttgaaaggaaaaaaggactttggttatccacgccacaccacgctgtaattaactaaactttctagaatcttcttctctcgccatggccgcgccgtcgtcctccgccgcggcaaacatcatgctggcgatctccgagaagaagacgaacagtgtagatctgtatcgccctctccgcaactacgtggccttccactactcggagcgagaggcgcagaacctcgaggatgatctccaaaccctgaagcaactccgctccgatgtggagcgccactccgatccatcgctcccggcgcgccgtgatctcctccaatcctactacaaatctctctgcctcgtggagacgcggttccctatctcttccgaccccgatcacgtcaacgccctcaccttcgtctggttcgacgccttcaagcccaagcagaaggcctcgcagcagaacatccacctcgagaaggcctccgtgctcttcaatttgggtgccgtttacagccagattggtttgtcctatgatcggaacactgtagatggccgccgtcaggcctcccacgccttcatcgcggctgccggatccttcgccttccttcgcgacaatgcttccctgaaggcctnncgttggagttccaccactgtgnatttgtccgttgagtgcgccgggatgctggagaagctcatgctcgcgcag

SEQ ID NO: 133012 - DNA, 568 bp, Glycine max
  Clone ID: PAT_MRT3847_91115C.1
ggggtgcaatatttggaaaaactagaaccataagggggctctatgaattaggggaacatctttgattttctgtggaattatatgaaccttagaaatattttatattatttattttccaaaattcctaaaatttgtcctatagcgtgttttaataaggaaaattatttattactttagccatttcaaaagttgttaatcaaagatcattcagctgaaactttgtattgatgtctatgattataaaaactcattttcataaataaaaacacaagaaaaattggtttaaaaaaaacatatttttttagttccactcacaatgggttggagcctagaaaaaggatttgaacttttttgtaatattctttgatctcaaagcttatataccacaatttgagaacgttgcctaatgatatttcatcaatgaaatgtctcacatctgattctatcttagtgtttcttgttggaaaacatgccaaaggggattcagaagctcactagtctccaagtgctcaagagatttctaataagtacttctagaaaaaactcccggtagaatatcatatcatgc

SEQ ID NO: 133013 - DNA, 1087 bp, Glycine max
  Clone ID: PAT_MRT3847_91116C.1
cccattcgtcagcccaatatattgttttgatttttgcttctttcatctcattttcatacactttattcgtttcttaatttcctactcttctcacctgagaatttaatttgtcatttagacatggagcttagttttaagcaccaacttggccttgtttgtgtcataatgctctttcctgcactgtgtttctgccaggaatatactaaatccagagcaaccttttatggtacctctgatggctatgggactccaaccggagcttgtggctttggtgaatatggaagagcgatgaattggtatgatggaagagtcgcaggggtgtctgatctatggaggaatggagctggctgtggaacatgttatcaggtaaggtgcctagtaccagaattatgtgatacgaatggagcatacctggtggcaacagaccaaggttatggagacagaacagactttgtcatgagcccacgcgccttcttgaaattgggacgtgatgaatattcatctgaagagcttaagaaatacggcacagtggatattgaatacaaaagggttccatgcacatacaccggcaatgtcttgttccacatcaaggaaactagcaccaaccctggttactttgctttggtcattctcaatgtaaatggaatacacgacgtcactgctgttgaattgtatcagatgggacaatggaagtcacttaacaggaactatggagcagtgtttgactttcctaacccaccaagtggcgaaatccggttaaggtttagggtgagtggcatgtctgattgggtggaccccatgattgtcatacccagtaactggcagcctggaaatacttatgccaccaaggttcagcttaaatagaaagaatcccaggaacagattacaaataataggcactagagtatattcagtttgtttcttatatggtgtcactcaatgttctattgtggaaagggactagaataaagggatattcatgtacttcccatttaagattacatgtaataatgaatcaaataaaattgtcctgttttgttgttaaaaaaaaaaaaaaaaaactcgagactagttctctctctctctc

SEQ ID NO: 133014 - DNA, 399 bp, Glycine max
  Clone ID: PAT_MRT3847_91117C.1
cccatgtgtccggtctaacgggagaaccttccaaaatggcgcgaatgagccaatggatcgacatagatgaaaaggagatgcatgctcttatacaggcaggaggactacctgaagctgtggcacacccatgccatagctgcacacacgcaaaatccaagccaaagctcaatgcttgcaccttgagctcagcgagccaacaacctactgccattactgttgaaaggtctaatgcccctggcctcgtcaagacattgggcttgggcaacgactcttgcaccatataactaatgatcaccggatgagcctatgcgagagccactgaggactccatctgcactgccgtcaaggatgaaagacaattcacattccgtggctgtctccaccaaatgaaaattggcc

SEQ ID NO: 133015 - DNA, 217 bp, Glycine max
  Clone ID: PAT_MRT3847_91118C.1
gaattaggatagagaggatgagagaagaagacagaagggggagggtgaacagtgaacaaaataaagggaagcatcgacatgggattgagtattatgagaagcacttccatttacactcctatctcttcctccagatccagacccattttatcaactcttgttcgttcatcattcgaatccatttacaccacaaagtgtgttactccaaccactcttt

SEQ ID NO: 133016 - DNA, 1317 bp, Glycine max
  Clone ID: PAT_MRT3847_91119C.1
ctcggaattcggctttagatttgcctgctccaccattcctacttctcatatctctatcgttagtcccttgtttaattactctcatatcatagcagttgctgaatctagcttttctaagtttttttcaaaaatcaaaatggcacttcccaatctttgctttgtcgttttaatcctaaaagtttccttttttctccttgcatcaacccaagttagagccgccacctctgactcaagcttgttccgagaatacattggagcattgttcaatggtgtcaaattctcagatgtacccataaacccaaatgtaaattttcacttcattttgtccttcgctattgactacgacacatcatctggttcaccttctcccaccaacggaaaatttaacatcttttgggacaaccaaaacctcacccctacccaagtttcttccattaaggccaaaaatccaaacgttaaggtagcccttagtctcggaggagacactgtttcaagtgcttttgcttactttgatccaacttcagttgattcatgggtttccaacgcggtttcttcactcaccaacataatcaaagagtacaacttggacggaatcgacattgactatgagcatttcaaggcagattctgaaacttttgctcagagcattggaaaattgatacaaactctgaaaagcagaggggtcattacttttgcttcaattgctccttttgataatgatgaagttcagagtcattatttggccttgtggaagagttatgggcacatcatagattacgttaattttcagttttatgcatatgacagaagcaccaccgtatctcagtttattgattactttaacaaacaaagctcgaattataatggtgggaaggtcttggtgagtttcaatagtgatgggagtcgagggttgatccctgataatggattcttcactgcgtgtagtatgctcaagactcagcaaaaacttcatggtatctttgtgtggtgtgctgatgactccaaggcaaatggtttcagctatgagaagcaatcacaggaccttttggtgactgccaattaggttttgaagtagaccaattttaatatgttagtgcgcttgatggctattacatttaaattaataacgtttgtgtgtgtaatgatgtatacatacatgtaacctgatgtaggcatgtagcttaagcctcctgtcttgaatgtgtgtaaacagacgtgtgctggtcataattttactttactcttttaatagttgatttaggaaccacattttacttcactcgcgaataaacacagccataaaccatttgttttctt

SEQ ID NO: 133017 - DNA, 546 bp, Glycine max
  Clone ID: PAT_MRT3847_9111C.1
ttctacattttatatctatctgaatgattcttgactgttcctcggttcagcgacacagcatatatgtttcttatcttgcacacggaccgtgttcgcacaaaagaattaactcacggcttcgatatattttccctgaagttcacatcttttacaaaaccggaaccgcacataatgactgtttcgtacggccattatttttcttccaaatatgacattacgcgtgcgctacaatgttccgttttgctgcaacgcatgtacaaaaataattattgcttgtacaatctattgaaccttgattaaacaaccggttcacaccagttcattcacgttctttgccctctaacctgcacgtgaaatttccttggatctaagcaaaaccccaaaactaaatgccagcctttcaatccagagcccaacctattaagggcaaccaaagaattttctaagatggtaacaaacccaaacagtaggcattacccattcatgcactttcgaaagttggtgtaaacctattgttaacctgcagaaactattttgtgttgctaa

SEQ ID NO: 133018 - DNA, 316 bp, Glycine max
  Clone ID: PAT_MRT3847_91120C.1
tttcatcttcgtacgaccacccgaccggctacgctgtccgcacaacaatgtgaggttgcgtgagggggaaccgctaaggagatgagagacgacaggagccaaaaaggcgtgctaggaccgggaaatacaggtagtgccacaagagttacgccactacagcgggaggctgtgctgtcgatagttgcacgccgtcaatggcgagtggatccaccggagaaggaacaagagctgttctaacttgtggcgactgtggatgccacaggcaactgcacaggagacatgaaaccgatggggtgagtgagtgctcctcgcctac

SEQ ID NO: 133019 - DNA, 1208 bp, Glycine max
  unsure (1)..(1208): unsure at all n locations
  Clone ID: PAT_MRT3847_91121C.1
ccacgcgtccggtggaggatatagtcgtcaaaaaatggctgtaccggcaccaagactaatcagctcaagtgaacttgaggagttccgaccactcatccaaatcaaacgtgaccgtgatactgggaaggtttttgaggttcttgatggcttgatgctcaaggatgggtatgtatacaagaaagtatctctggattcattaagtttatggggtgttgtgccaacagaagaggagcttttaaagtttgggccttgtgaaaacaatgaatcaaatgatttagagtggctctctcagctttatggtgacaagaagaaaaaacgggttataagacctgataagggaggtggtgggaaaggagagagttcgtcaggttctggtgtgggaaatggttttgaactttatgatttagtttgttttggtaagaaggacttcggtgtaatagtaggcatggataaagatgatatctacaagattctaaaagagggttcagatgggtccgctgctgtaactattgaacgacatgaaataaagagtgggttatttgatttgaaacttactgcccttgatcagcaaagtaagactatattggttaatgatactgtcagggtgctggagggtccatctaagggtaagcaaggcattgttaagcacatttatagagggattgtctttttatatgatggaaatgaggaagaaaatggaggttacttaacttgtaaatctaatatgtgtgagaaggtcaaggttgctgttggagattgcagtggaaaggacagtgaaccggctcctttagtgtttgaagaccaaccatcatcaccaagatctccattgtcacccaaaaaaccatggcaagcaagagaaaataatcgtgaatttaaccgtggggacaacaataacatgtttagtattggtcagacattgagaattaggataggtcctttgaagggatacatttgccgagtcattgccttgcgtcgtgctgatgttactgtgaaactagattctcagcagaaggttcttacagttaaatgtgagcatctttctgaggttcaggggaagagtactgccatttcatcaagtggtgatccagattcaagttcatctaagccatttgatctgcttggtactgaaggcagctctggaggttggctgaatggagtggggaacgtccactgnngggtggcggattggaatgctggacgggcatcat

SEQ ID NO: 133020 - DNA, 486 bp, Glycine max
  Clone ID: PAT_MRT3847_91122C.1
aaaaaccccacaaaggggcccaaaattaaaggaagtatttttatagagcagtttaagtggaaacccaaccttatcaaaatatacataaaaggtaaactttattaaaataaagcaggcgggggaaaactgatagcatcacaaacaatagcctcccttttataaccaaacttgaaaaggggggagtataaggcacatgaaacctttgggatgggataccagggccaaaaattagaaattctttgcattaaaaatatcaaaagagggttgaactatttctgcaaagctgttgttttggttaaggctcaggggggggcacaaagggaaaggccctctccatttaattaagtcttcaaagcctttaattctccttttttaaccggaaaattttaatctccagttcttgggggaatgcctgttttcttgcccgggaccgaccagaaaattccctattttataaaatccttttctgcctcctttccaaagttt

SEQ ID NO: 133021 - DNA, 985 bp, Glycine max
  unsure (1)..(985): unsure at all n locations
  Clone ID: PAT_MRT3847_91123C.1
gatggattgaagtatttcttctctctctctcttcacttttcacgtttttggtttttaatttttttttcatcttcatgtctatcctcttcttatatgagcctcaaggtgttgtatatatagcatattgccttgtgcagcttattgggcacttgaaatttgaaaacttgatctgcctttgctttgttatttcattaacagcacccctttgggccatatattggttacctcaactgcttttctgttcatctttccagaattattgtaaagttccctttttttgttctgtcttttcattcttttttcaaagtgaattcctgggattttttgttttcaattgagggcactaaaaaaaaagaactgactggaatttccatttgtcttgctgggtccctgagatttgaagtgtgttgttttccttttggtgggtggatcctaagttcatgaattccctcttttctccagccaatttgttttgttgctgattaaattagttctgtctggcaaaggtttgagtctctagtgctggaaaattaatctttgtggtgattcatgattttttttttttttttttaactgaggaccttcaattttgtttttgtgcattgatggttgtctcacaatcacaaatctagtctccaaaattggtgatttcacaggggtgtgctgttaactttcctgtttgtttcatcttcaagctcaattctggttctgggtttatcttttactggaagacagactttgaggtagattccttataagtgggcataagttcaagtgtagagaagtagcaacaatgaaactaatcaagcatccaaatgttgttcgattgtgtgaggtcatgggaagcaagacaaaaatatatattgttttagagtttgtaaccgnnggagagctctttgacaaaattgtaaaccatggaaggatgagtgaaaatgaagctcgtagatatttccagcagcttataaatgctgttgattattgccat

SEQ ID NO: 133022 - DNA, 765 bp, Glycine max
  Clone ID: PAT_MRT3847_91124C.1
gcaaccatgggtgatctcaaacttgttgagcgtccacaaaactatacgcttgctccagaatcaagcaaacaaattaaagccaacattaaggtttcatcaactgaaacaggagttatatttggtaacatagtctatgagacatcttctaatgttcttgagagaacagttattgttctaaatgatatccatattgacatcatggactacatttctcctgcatcttgtgccgatgtggcattcagaactatgtgggctgagtttgagtgggaaaacaaggtatgtctctttcctctttctcccattggctatgtttttaatcaaaaggtaaaaaaatatggtgctatcttttcttgctcaaagcaactccactttcattaaaaaaattacgggacaaatttttattagttactttagcatttagagttatggtgtgctcttttaatgagcccttggtgtttttattaactatgagctcataaaagttatgatttggaatttgttttttaatagcattttgtctccaatatatgcattgatatcttgatggttgacataatgctattttggctttgaagttcatgtatttatagtaacacatttcatggttattgatgttgttgtaattaggttaacgttctttattaacttatgaaagatggcttactaccttggtaataataagatggtacttaatagggatatatgccacaattgatatcgctccttagtgttggtgaagaatttggttactttgtaagaatgtct

SEQ ID NO: 133023 - DNA, 973 bp, Glycine max
  unsure (1)..(973): unsure at all n locations
  Clone ID: PAT_MRT3847_91125C.1
gggccggnattcccgggtcgacccacgcgtccgcttgcaaacccttttcccctctctctttgggtctctaaaccccacattttctctctctaaaaccctccaccactctccccttccttccgatccttctcccgtttccctccaatttccccccaataccgctgggccccatctcctccccttttcccgcctcctcatgtccagcgccgccggagctcccgatcgccgcgcctctccgccgcgggtggctgccggcgcccccacccgcccgccgctcaagcgccacctcgccttcatcacgaaaccgcccttcgccccgcctgacgagtaccacagcttctccagtattggctcccgccgcgccgccgatgaagccgtcgtcgttagatctccgtacatcatgaagcggaagagtggaatgaatgacagtgaaggggagtcactagcacaaaagtggagtaacagtcctggatacactaatgttagcaatgtaacaaataatagtccctttaaaactcctgtgtctgcaaaagggggaaggacacagaaggcaaaggcttccaaaggcagatcatgtcctccgacacccatctcaaatgctggttccccttctcctcttactcctgctagcagctgtcgttatgacagttccttaggtctcttgacaaaaaagttcatcaatttggtcaaacatgcagagggtggtattcttgacctaaataaagcagcagaaactttggaggtgcaaaagaggagaatatatgacataactaatgttttggaaggcattggtctcattgaaaagaagctcaagaacagaatacattggaagggaattgaatctgctacatctggtgatgtggatggtgatatctctttgcttaaggcagaagttgagaaactttctttggaggagcagggaatagatgatcaaataagggaaatgcaagaaaggctgaggaatttgagtgaa

SEQ ID NO: 133024 - DNA, 238 bp, Glycine max
  Clone ID: PAT_MRT3847_91126C.1
aatccaacaaagaacagaatataattaattgggggacaaacaggaaagaagaatctgattctgtctcagaaaatggatccaggaagggaggaagctttaaatcccaaaaaaaatacgtgtatttttcaaccaattgccattaaactttggcatacaatgatactgtatttttgtatcaggcaaaaggataaagaaagacgcggatgtttaattaacgaccgggaagcaacagattact

SEQ ID NO: 133025 - DNA, 668 bp, Glycine max
  Clone ID: PAT_MRT3847_91127C.1
aactgtacaaacacaaaaggctcacactttcaactttgcagagagctttatgagcttgtagtagcagagtggggaggtaccaaacagagcaattgaagttgaacattattaggtgttctagatcctagggtggcatctggaatcacactcttcaatcaacaatgaaattctgggacctattcttcgtggctctcatgccagtcttggagaccctcttgattactctccttggtttattaattgcaacccaacgatttaatctcctgcgaagcgttgaagcaaggaattatttaaataatgtaagttcttgtttattttttattttctctaaatccatttaggaacttatctggaaaggatcatccaaaattatgttgtgcttaccatcaattcaagaggaaggaattttcgcaagaaatcttttcaggtctatatgagttgaactctgattgtacacgaatgaattccgacaattgagttagtgtttatagaagttgccacgtatcactaatctcctcgcagctgatttgagcatcacgttcaatcgcttggttgaaatgtgggttttggttggtgaatatattttaacgttagtggttggctccattctcggttggatgcttaataaaatcgccaaaacccccaaacacctccggggtcttgtaatg

SEQ ID NO: 133026 - DNA, 293 bp, Glycine max
  Clone ID: PAT_MRT3847_91128C.1
ggggcgaccgacgcgtccgcaaaaaattaaaaattactcaatttttatttcttcaaaatcatcaattacatacgagcgccggtctctatataaatgacacgcagcatttcatatccatcctattgctatccttagtgcaccactcgctccattcttataactaaaccaattctccaaacttatttaccgaatcaccttctaattttattaaaaaacaactaataaccaaccccatttctttacattattctacatctaataaaactaaatcaaatcctacttccaatattaac

SEQ ID NO: 133027 - DNA, 783 bp, Glycine max
  unsure (1)..(783): unsure at all n locations
  Clone ID: PAT_MRT3847_91129C.1
cgagaagacgacagaagggaatgaacaacagaaggtatgaagtgtttatgagcttcagaggagaagatactcgtgctactttcacttcacatctctatgccgctcttcaaaatgccggaatcatttttttcaaggatgacgagtcacttccaaggggagatcagatctcagactcactcctgctagcaatcgaacaatctcaaatttctgttgttgttttctcaacaaattacgcagattcgcggtggtgtctgtaagagttagagaaaataatgaattgtaaaagaactatagggcaggtggttctgccagtgttctatgatgtcgatccctctcaagtacgctatcaaactggccactttggagaatcatttcaaaacctttccaacaggattttaaaagatgatgacgagaaagcggtcggagagggcgaatctgataaggaatatatgatgagcagggttttgatcagtcgttggaggaaggtacttcgtgaggctgctagcatcgcaggggttgtagttctaaattccaggtaagtagttaagacttgctgctttctcagaattttattttatgaaatattcaacattttcactatttttagtttgtatatacaaactgagctagattacggaactttntgagtctttaaagcatttcttacaaaggaatatatntaaaaatgaaacanagaggaaatatatatggcatagtgtaagtaattacggtaattaagtgtttgtaaaaaatttataactaacatgaaatnactagtagtat

SEQ ID NO: 133028 - DNA, 234 bp, Glycine max
  Clone ID: PAT_MRT3847_9112C.1
ggaaccctcatgagaccttctatttgtagaccgataaattagtctgtcgatacaggaataaggactagatctattgtctctcagccatcatggatcccaacaaagagaaacatatgcgtcaataacacgccggcattatttcaagccgacttaaataactgaaatctgatgctttaactttaatttaggatataaaatagtcaagcaacacaatggctgttacagaagcttgtc

SEQ ID NO: 133029 - DNA, 447 bp, Glycine max
  Clone ID: PAT_MRT3847_91130C.1
cttattctagggacaggaggagcagatgaactggcacccggttaccttaaactagcctatgacattatacacaaagctggaggagtctgcatagctgatgaagtgcaatgtgggtttgcgcgcacaggaagccatttttgcagattggagacacagggtgtgattcctgatatagttaccatggcaaaaggtcttggcaatggtttgccattagcagctgtacttacaactccagaaatagcaagcgtgatggcccaaaaccattaatataatacttttggagagaaccctgtatgttttgctgggggacttgctgagctcagagttcttgacaacgagaggcgtcaatgtcattgtgctgatgtagggtctcactcgattcagcgtctaaaatctatgatgcatgtacatgacattattggatatgtaagaggaagaagcttaatg

SEQ ID NO: 133030 - DNA, 289 bp, Glycine max
  Clone ID: PAT_MRT3847_91131C.1
tctctactactttttcaacctatgcctgatccacgcccatagcgtcctttgcatctttgccacacaagttattctaatgtgtgccattgaatgttaccgtattgctggttgccccctcggtgaggtcactgacccaatctacccatgtggcagcttcgacccattgggccttgcttatgacccatatgcttttgctgagcttaatgtgaaggaactcataaactgactattggccatgtactctatgttttgcttctttgatcaagccattttcacccgaaagggttca

SEQ ID NO: 133031 - DNA, 406 bp, Glycine max
  Clone ID: PAT_MRT3847_91132C.1
ttacgcgtccggttttgtggtttggtttcgcattgcatacaaaatagctcaaaaggttaagactttaagattccctgcatacaacaaacacttcattcttttttcttctttttcacctctcttgggttggctgtggcgtagggactgcgttttcctctctgttctgttcttttgttttgctatgatgagcacccgcaaaagggtcgcacccggtttctctgtggcacagtgaagatgatttcttttttaattgatatgctgctgggatttggtggcttcttcaagtgggtttctttttttggtcttcccaatggtggtggagggtgggtgcacttgatgtgtgtgtataataaaagaatggactctgctgctggagccttttgatttgatgctcaacacaatacta

SEQ ID NO: 133032 - DNA, 365 bp, Glycine max
  Clone ID: PAT_MRT3847_91133C.1
aacataataacaaaattccttactaaggagagggaggtgacgtatatcaacaaaacaaatttacctgccctccactgtttgaacacgtccgacacaaacaccagtattaccaaaattagatgtgaccgaacactacaaaaaacaaaatgcatagttccaaactattattattgtgggaagagtagcagcacaatactcatcaacaagaaaatgctgtagtacccataaaataccgatttctaccctcacttaaattgatcagtacttgtagacctaaacatagaggctttatgaagcaccatcatcaacctattaattacccatggtggttcccacagttgcctctgacttgaacttggatctta

SEQ ID NO: 133033 - DNA, 908 bp, Glycine max
  Clone ID: PAT_MRT3847_91134C.1
tgccgcatccgtagctctgcttccccattagagaacattttaccaattgagcactttcaaacaacgttgttgttttttgtacacaaccatcagagataaggagagtgaggtgggcatggctagttgtttaatgttactaaccaaagttagtgataccgaaaccccatcaagaaagagggttctaagtggtggtgattttaagtgcaagacttgtaacaggaaattccaatcgtttcaagcacttggggggcaccgagccagccacaagaagctaaagctcatggcttcaaacctttcgtgttcgaccgtgacacaaaagatgcaccagtgccccatttgtggaattgaatttgcgattggacaagcactgggagggcacatgagaaaacatagagcttccttaaacgatggtttgataactcatgatcatgttgtgccaacatctagtggtactaaaaggcttcgtttgtgcttggacttgaacttggcaccgtacgagaatgatctcaacctcaatttaaggacacctactttaaatttgttcgtttgatcgatttgagtgtttttagggcgaattcttgttggaaattgttttatttttattttttgtttcttactttgccgtgctttttagtttatgacgtacgcgtgattctatagggttctatgtatattcatggtgctaacttgaaagtacagggaaaattttgctgactaccgttaagcaaagcatattaagcatactatcatggctcttttcaggaacatgttttgaaaagtcactttcaatatgaaggattcagttactgttagttgagggtagtaattattggttggatctgttatgatagataccattaactgtgagattaaaaacaaaatagaattgcccacacttatctttgtct

SEQ ID NO: 133034 - DNA, 258 bp, Glycine max
  Clone ID: PAT_MRT3847_91135C.1
acgagatgacaaattggagggggaaacaatattaatagtcaccatcctgaaaatgaaaaatgatcacgggccaaatgttaacggaagttaaaaaaaaagcaacatgtagtccacatactgcatttggggtcaaccgtattccaaaaatggtaatggaagacgtactcaggggcctattttagcactaagttaaaattaagtggcgttgtagccacctctacagtggcttatatcagagcaaaatggccccatcagatt

SEQ ID NO: 133035 - DNA, 909 bp, Glycine max
  Clone ID: PAT_MRT3847_91136C.1
ggaagcaaaatgcaaaatgagcaaatttattcatgccgaaattttccatcctctgatacaaacaaaaaaatttgcttgtgcaaaaaagagacaatccccttttccataattattaataaaaaggatttgttaaaaccacaaacattcttcatatttacatttcaaagtaaaccaaacaggtaattaatgtgagcagcaagagcctgcaccaaaaaaagagccaactcttatgctatacttcaattcccaagcataacaaatgaatgacctacttgatgacattttttttaatttgccggtaggaatcgaagacagataccaggggatttaaacaactcacgcatcatacttaactaactgagctagtcccctgagctaaacccctttagttacttgatggcatatgaacggctacatactgactcaagagcctcagtgaacaaagtagaaaaactggtcaatgcctgaaacactccaggcaagcctgtctgtagattgttgagtgtcatggctctagtcacctcaacagcctttgaatgcctcaccatttcatcttcaacgcgcctttggtgtgctgctagttccatttttttttcagcaagagggtctcttgcatccaagccttgtccattaccaggccctgactcaggaggggtaatacctaccatagaataggagctgtaaaacttcctttctatgcttctcagagatgaagattttttctcaaattccttggaagaattctcagttctcctcttaatcttgagctcttcagattgcttgacagatatcacatggacaacattgatgaagcttttgattgcttcggaagcaactgtgtccggaacacggtcaagggctagtttccattcatcacagaaagaaagcacaccagatggttcactgctg

SEQ ID NO: 133036 - DNA, 596 bp, Glycine max
  unsure (1)..(596): unsure at all n locations
  Clone ID: PAT_MRT3847_91137C.1
ggagggaaaaaggcgttcgctncttatataagcgagcctaattttgttttaaaaaacaaattttcttctagcccaagattgttgctttttccaggcagcgggccaattcgaagggacccccccaaaaaggaaggagcccttcaaaaaaagaaaatggttagggtgcccagaaatttcttccgttgaacccaacccccaaaacttaaacatcagcccgataaaaaaacctccctcgaaaaagaaaaaccaaccgtttatgaaaattccacccgtttttaataacccgaagaaaaaaaattccttccccgttggttggggcgcgccctccggaaaaaatcaggaacatcaaccaggaaaaatgggcccctccctttttcttggagaaaaattaaatacccccctcggcgggggaaagcaacaacccgggccctgaagtaagggggggctgcaggaaaaaagaccccccccttagggggggggggggagcccctttatcggggaaaaactccataaggggccggtaaaaaaaaaaaaagcggcggacctaaaaaaggactttcggccgccggcgcgggggaaaaaaatttttttttttt

SEQ ID NO: 133037 - DNA, 3580 bp, Glycine max
  unsure (1)..(3580): unsure at all n locations
  Clone ID: PAT_MRT3847_91138C.1
ccacgcgctccgcagnagcccaaagcccaactctccaatacaacaacgaacaggtagggtttgatgggtgatcgcggttcgggcgctgcgaagccgatttggatgaagcaggcggaggaggcgaagctgaagagcgaggcggagaaggacgcggcggcgaaggcggcgttcgaggccaccttcaaggctttggagaacaaacatgacaagggaggaggaggaggaggaggagggagcgttgctgaatccgacagcgactccgaggaggaggagtacgaggacctggcccacaagcccattggccccgtggacccctccaagtgcaccgccgccgggaccgggatcgccggcggaaccgcgtgcgctccgtcctcctttgtggtggtggccaaggacgccgatgagaggaaggtttccggtggtggcgcgcaaatcaaggttagggtgacgcccgggttgggtgttggagggactgagcaagaagggatggtgaaggatatgggggatggaacttatactgtgacttatgtggtgccaaagagagggaattatatggttagtgttgagtgtaatgggaggcctatcatggggagtccctttcctgtgtttttcagtgcagcaggtaatagtactggagggctgttgggtttagctcctgcatcttcatttccaaatcttgttaatcaaactatgcccaacatgccgaattactctgggtcagtttcaggggcattccctggattgttgggaatgattccaggggttgttgctggagcttctggcggtgctattttgcctggaattggggcctcacttggggaagtttgtcgtgattaccttaatgggcgttgtgcgaaagttgattgtaagttgaatcacccacctcataatttgttaatgactgccttggctgcaacaacctcaatgggaacacttagccaagctcctatggcaccttctgctgctgcaatggctgcagctcaggcaatagttgctgctcaagcccttcaagcacatgcagctcaggtgcaagctcagtctgcaaaagattccactggttcacctgaaaaggctagtaaggatgatgcattgaagaaaacccttcaagttagcaatcttagccctcttctcactgtggaacagctaaaacaactctttggattctgtggcactgttgttgaatgtacaatcactgattcaaagcattttgcttatatagaatactcaaagcctgaagaggcaactgctgctctggcattaaacaacatagatgttggggggcgccctttaaatgttgaaatggcaaaatcacttccaccgaaaccatctgttgcgaattcttcacttgcttcatcatctcttcctctgatgatgcagcaagctgttgcgatgcaacagatgcaattccagcaagcactgcttatgcaacaatctatgactgcacagcaggctgctaaccgggctgcaaccatgaaatctgccacggagttagcagcagcccgagctgcagaaataagtaagaaattgaatcctgatggagttggaactgaagagaaagagacaaagcagaagtccagatcgccctctcctcctcatggaagatctcgatcaaagtcaagatctcctatcaattaccggagaaggaggaggtctcgctcttattcacctgctcgtcattctaaggatcaccgctctaggtcacccttgaggtcccatcattactcaagctatgacagggaaaggcggtcctttagagatattagggaacatagtgatagatacagaagacgagatttagatagatcacttgatcatcattcatctgcttcaagaaggaatagaagtaggagtgtaagcccttatacaaggaaatcatctgtttctccaaaacgtcatagagaaacttcacctcatagaggaaggaaacaatcacgtgctgattctggctctccaagtcgtcgcaggggaagtaggtcttctccaaagattgatgaaaaaaaactaagaaacagaaggcgctcaaggtcaagatcatcagatgataggcttcactctatcaaaaatgaagaaatctcgcatggaaagtctaaacacagagagagaaggcgatccaggtcattatctgtggatgagaagcctcacagaaggagccgatcatccccaagaaaagtggatgaaagtagatccaggcacaaaaaacggttgaggtcaaaatctgtggatgataggcatggttctcctgagagattggatgaaaacagaactagaagatcaaggcatagtgataaaaggcactccagatcaagatctacagaaactagggatcaaactgatgtcagagaggatgaacgtaaaaatcaaaagtcaaaacatcgtgatactaaaaggagcaggtcaaaatctgttgaagggaagcatcgttttaaagataaatcaggtgaaaatagagataagaaatcaaaacgccgtgatagaaagcgttcaaggtcaatatcattagaagataagcatgacaaaggagacacttcacctcatataaattttgatgagagaaactttgaaccgacaaagtcccctgaaggcaagaatcactccagtgataaatatggaagtagaggtgaaaaatcagagcatcaaaagaaaaccccatctaaatcaaaatcagaacaatttgatgggagtgggcccttacgaggaaattacaaggagtatgattcaaaaggaaaatcaccatctgattctggatctgctgaagttaagcatcatttgagtgatggagaaaatgctaccagtgaagaaaattctaaactctttggagatgtgtttcaggaaccaattagaactgcaaaggactcaacaatcctgaatgataacgggacactgacttcagtgaatggtaactacaagtcagaagagtcaagtgaaaatgcaggagctgatgataacccaggatggatatcagtggaaaaagtgggaagtggaaagtattaagcaaacttggcttggagtggtggttctaaatgatatcaaagaatatagctgagtatagatttgttattcaatcttgaatcagaagggtgtcactcaaggctactatcatttcttgtcactatagtgtagatttatttcaagagcgttgcacagattgtggttttctgtggttgaagatttctgcacctgtcaatgattaagggataaagagcgtattctaattcaggattctcgtttaggtttcctgacaagttctttccaaggaatatactgtttcttcttaggaggaccacaattctcagaggatgatgcctccactatttgattggtctccagaatattctgttgccttatgaacattttccattgtttatttcttttgcaggtcggattggtaaagatctggtgtagaatcccacagctgttggtgtggtttaaggtttcaagaagtgtcatgcttttgtcatgatcaaccgtgcagtgcttatatcatgcttcttttactgcttgattgatgtatgttggaatgttattttaagtatactattctttttattgaaggtaatttttactatgtttgggtcttgat

SEQ ID NO: 133038 - DNA, 1266 bp, Glycine max
  Clone ID: PAT_MRT3847_91139C.1
gtcaattagtgtgacttgaaaatttggttgagtgtgagcatttcacgttgcaatcagatttctctaaatagaattatctgaataaatttctcattctcccctcccccctctttggatagcttggttatatgcttcaagagaatgagtgctggcaacacactctttaacaaattgtttctaacaaactttccattattgcttaaaacttattgtaaactacaaaatcctgagtgaagtccattaaataaggagtgagacctgcacaattttgtaatttccaacaaatgtcagctaacagtagagtgtgttagacagaatctgttagagagtgtgttgttggcatttctccttctaagaatacaagtggtggttttctacaatatataccttttgtaaatatcgtctgttgttaacttgttaaactgttttgcattttgcacatgacttgtgctggatgtgtgttgtgaatataataaatctaatcacctagccgagaaaattatgggaaaactctttttctgggggaattcattagaaaatcccatatggcattcagtatgcttaaatttttttaatgatctcattgatctatacttctttagtataaaaccaggaatgattttggtgaactgctttcttggtccttatatgccagtgggtctgtaccatgcaacttgacaaggagagttattatagtttatctcaagtctctcttcctagttttagtgataacttatgtctctcttcttcagtacagtcttagtagtctatatatgcaatatgctataaaaattcacccagcatttgttttcttgtttagttataaatttctccctcctatcaatctctctctgcactggtgagttgtgcaactttaggactctgtacattgagaactatgccgtggttttttgtttttgtttaaccattttatagcttgttccatgtgttactttaaataaactcatgtgcatgggatgcagtcaaactctagcagttacagtttaacaatttgttttatgttttatgactttatcacgagtgtataacatagtgaagcagtggttgatcagtttttagcgactatttgtttactctctgtttatgatacttggaagagtgtaattttgatcctgtatcagtatgacgtataaaacatttatacactatctctgtttataaagataagtcaaactctttaggcagtgtgagctatcatgacaaaaaaagtttaatctaatagtaaaccaaattaaaatctatttg

SEQ ID NO: 133039 - DNA, 409 bp, Glycine max
  Clone ID: PAT_MRT3847_9113C.1
cccacgcgtccgcccacgcgtccgggctccaagagaggattttcctgcagaacaaggggaggtggatgttaatgcccgtaatttgctgcccatggataccacaggaaatgctaattttgaattggtgcaacttttgggagatttacaggcccttgctttaaatccttttcatggtattgaaagaaagatcccttcagctgttcagaagttctttctgcgattcaggtctcttgtttatcaaaaaagcttgtttgtatctccaccaactgagaatgaagctcctgatgttcgtgtcactaaacctccttccagtgtcgggatatctgacagtcctgatgagtatgtcaaagcttcaccggttgtaaaacctttgaaacatattgtttggcctgatgatcctacaaaagct

SEQ ID NO: 133040 - DNA, 273 bp, Glycine max
  Clone ID: PAT_MRT3847_91140C.1
gattcgcatgctaattgaaatgagcaagcaatattgcttaaacagtccagtgcatctctacataggatgcgctatgaatctaatgatgcggacgcactcgataggatcatatgtgatctacagctattactgactatggatcaattacactgttctgcaacataatatgtctcgggtgtacgaatatgctcacatagttctactaatcgctcacaaaagctaagatttatcactcaatgatattagtatacatattgaatctatggtacatgc

SEQ ID NO: 133041 - DNA, 994 bp, Glycine max
  Clone ID: PAT_MRT3847_91141C.1
gggataaatcaggggaaaatagagataagaaatcaaagcatcatgatagaaggcgttcaaggtcaatatcattagaagataagcatgacaaaggaggcacttcactccatataaacttggatgagagaaattttgaactgacaaagtcccctgaaggtaagaatcactacagtgataaatatggaaatagaggtgaaaaatcagagcatcaaaagaaaaccccatctaaatcaaaatcaggacaatttgatgggagtgggcccttacgaggaaattacaaggaggatgattcaaaaggaaaatcaccttctgattctggatctgctgaagttaagcatcatttgaatgatggagaaagtgctaccagtgaagaaaattctaaactctttggagatgtgtttcaggaaccaattataaatgcgaaggactcagcaatcctgaatgataatgggacactgacttcagtgaatggtaactacaaatcagaagggtcaagtgaaaatgcaggagctgatgataacccaggatggatatcagtggaaaaagtgggaagtgaaaaatattaagcaaacttggcttggagtggtggttctaaattatatcaaagaacatagccatgagtatagatttctgttattcaatcttgaattggaagtggtgtcactcaaggctactatcatttcttgtcactatagtgtagatttatttcaaaagcattgcacagatcatggttttttgtggttgaagatttctgcacctgtcaatgattatgggataaagagcatattctaattcaggattctcatttaggtttcctgacaagttttttccaaggaatatactgtttcttcttaggaggaccgcaattctcagaggatggtgcctccactatttgattggtccccagaatattctctgttctcttatgaacatcttccgttgtttatttcttttgcaggttgggttggtaaagatcaggtgtagaatcccacag

SEQ ID NO: 133042 - DNA, 3043 bp, Glycine max
  Clone ID: PAT_MRT3847_91142C.1
ccttcccagaaattaggttttagtatttctttctttctttatttatcagcgattcgtggcaatttttcgaaggtagggtttgatgggtgatcgcggttcgggcgctgcgaagccgatttggatgaagcaggcggaggaggcgaagctgaagagcgaggcggagaaggacgcggcggcgaaggcggcgttcgaggccaccttcaaggctttggagaacaaacatgacaagggaggaggaggaggaggaggagggagcgttgctgaatccgacagcgactccgaggaggaggagtacgaggacctggcccacaagcccattggccccgtggacccctccaagtgcaccgccgccgggaccgggatcgccggcggaaccgcgtgcgctccgtcctcctttgtggtggtggccaaggacgccgatgagaggaaggtttccggtggtggcgcgcaaatcaaggttagggtgacgcccgggttgggtgttggagggactgagcaagaagggatggtgaaggatatgggggatggaacttatactgtgacttatgtggtgccaaagagagggaattatatggttagtgttgagtgtaatgggaggcctatcatggggagtccctttcctgtgtttttcagtgcagcaggtgaggttggctacatggatcaaggacaccctggtaatagtactggagggctgttgggtttagctcctgcatcttcatttccaaatcttgttaatcaaactatgcccaacatgccgaattactctgggtcagtttcaggggcattccctggattgttgggaatgattccaggggttgttgctggagcttctggcggtgctattttgcctggaattggggcctcacttggggaagtttgtcgtgattaccttaatgggcgttgtgcgaaagttgattgtaagttgaatcacccacctcataatttgttaatgactgccttggctgcaacaacctcaatgggaacacttagccaagctcctatggcaccttctgctgctgcaatggctgcagctcaggcaatagttgctgctcaagcccttcaagcacatgcagctcaggtgcaagctcagtctgcaaaagattccactggttcacctgaaaaggctagtaaggatgatgcattgaagaaaacccttcaagttagcaatcttagccctcttctcactgtggaacagctaaaacaactctttggattctgtggcactgttgttgaatgtacaatcactgattcaaagcattttgcttatatagaatactcaaagcctgaagaggcaactgctgctctggcattaaacaacatagatgttggggggcgccctttaaatgttgaaatggcaaaatcacttccaccgaaaccatctgttgcgaattcttcacttgcttcatcatctcttcctctgatgatgcagcaagctgttgcgatgcaacagatgcaattccagcaagcactgcttatgcaacaatctatgactgcacagcaggctgctaaccgggctgcaaccatgaaatctgccacggagttagcagcagcccgagctgcagaaataagtaagaaattgaatcctgatggagttggaactgaagagaaagagacaaagcagaagtccagatcgccctctcctcctcatggaagatctcgatcaaagtcaagatctcctatcaattaccggagaaggaggaggtctcgctcttattcacctgctcgtcattctaaggatcaccgctctaggtcacccttgaggtcccatcattactcaagctatgacagggaaaggcggtcctttagagatattagggaacatagtgatagatacagaagacgagatttagatagatcacttgatcatcattcatctgcttcaagaaggaatagaagtaggagtgtaagcccttatacaaggaaatcatctgtttctccaaaacgtcatagagaaacttcacctcatagaggaaggaaacaatcacgtgctgattctggctctccaagtcgtcgcaggggaagtaggtcttctccaaagattgatgaaaaaaaactaagaaacagaaggcgctcaaggtcaagatcatcagatgataggcttcactctatcaaaaatgaagaaatctcgcatggaaagtctaaacacagagagagaaggcgatccaggtcattatctgtggatgagaagcctcacagaaggagccgatcatccccaagaaaagtggatgaaagtagatccaggcacaaaaaacggttgaggtcaaaatctgtggatgataggcatggttctcctgagagattggatgaaaacagaactagaagatcaaggcatagtgataaaaggcactccagatcaagatctacagaaactagggatcaaactgatgtcagagaggatgaacgtaaaaatcaaaagtcaaaacatcgtgatactaaaaggagcaggtcaaaatctgttgaagggaagcatcgttttaaagataaatcaggtgaaaatagagataagaaatcaaaacgccgtgatagaaagcgttcaaggtcaatatcattagaagataagcatgacaaaggagacacttcacctcatataaattttgatgagagaaactttgaaccgacaaagtcccctgaaggcaagaatcactccagtgataaatatggaagtagaggtgaaaaatcagagcatcaaaagaaaaccccatctaaatcaaaatcagaacaatttgatgggagtgggcccttacgaggaaattacaaggagtatgattcaaaaggaaaatcaccatctgattctggatctgctgaagttaagcatcatttgagtgatggagaaaatgctaccagtgaagaaaattctaaactctttggagatgtgtttcaggaaccaattagaactgcaaaggactcaacaatcctgaatgataacgggacactgacttcagtgaatggtaactacaagtcagaagagtcaagtgaaaatgcaggagctgatgataacccaggatggatatcagtggaaaaagtgggaagtggaaagtattaa

SEQ ID NO: 133043 - DNA, 287 bp, Glycine max
  Clone ID: PAT_MRT3847_91143C.1
aatttactttgcaattatgctactcttcaaaagtggtcaaacatctgcgcgtcttttcggtgctgctatcatcttaaacaaggaccttggttgggatgaacactgaatcttatgggtaggggccgttcattgtagaagatctaagcttactttcacatgcatgcgacaatcatggtcttttattgtgagacctaaatataaaataatgcccgtcatgctaaatcaagttgactgcaacaaccccggcgtaactcaagttaatggccgtggggtacattctcatttca

SEQ ID NO: 133044 - DNA, 1790 bp, Glycine max
  Clone ID: PAT_MRT3847_91144C.1
aattcgctcgagcacacacagctctttccctcttttttttagagagagaaaatgcagagttaaccaccttaaccttaattgcttctccaaaccttaatctttttttttttatttttttatttttttgaggatacttggagctaccaggactagtttttttttttttacccttgtttctttttttgacgtttaggataataattggccaattgggtatctagtcagttgagacatttttcaagaagtagtaaagctccttctacaatattttttgacttggtgctttccttttggatcttacaatgggaaacagtgaggaagagaaatctactaagactgaaaagccttcttcacctgtaacaatggatcaagcgaatcagaccaaccagaccaatattcatgtctatcctgattgggcagccatgcagcatattatgggtcaccatgcatactaccgggccacactcacatggtcaaggagttccatcttcacctgctgctgggactccttcaagcgtagaatcaccaaccaaattctctggaaatactaatcagggtttagtgaagaaattgaaagggtttgatgagcttgcaatgtcaataggcaattgcaatgctgagagtgctgagcgaggagctgaaaacaggctgtcacagagtgtggatactgagggttccagcgacggaagtgatggcaacactgcaggggctaatcaaacaaaaaggaaaagaagccgagaaggaacaccgatcactgatgcagaagggaaaactgagctacaaaatggtccggcttccaaagagactgcatcttccaaaaagattgtgtcagctaccccagctagtgttgcaggaacattagttggacctgtagtttcttcaggtatggccacagcactggagctgaggaacccttcgactgttcattctaaggcaaattccacaagtgccgcacaaccttgtgcagttgtgcgtaatgaaacttggttacagaatgagcgtgagctgaaacgggagaggagaaaacaatctaaccgtgaatctgctagaaggtccaggctgaggaagcaggccgagactgaagaattggcacgaaaagttgagatgttaactgctgagaatgtgtctctaaagtcagaaataactcgactgactgaaggttctgagcagatgaggatggaaaattctgcattgagggaaaaactgataaatactcaactgggaccaagggaagagataactttgagcagcattgacagcaagagggctgcacctgtaagtacagaaaacttgttatcaagagttaacaattccggagctaatgatagacctgcagagaatgagaatgatatctgcgagaccaaaccaaattctggtgcaaagctgcatcaactactggatacaaatcctagagctaatgctgtagcagctggttgaaaccagtaactgcactggctaattatgtaattttggcatattacaagcccaaaattacagcttggtgctaacagttttcagagggatggatcagctgaattttacaatctaattccatctatatagaccagaactaattctttgcttgtgagtttcttagggcataaactctgtattttactagatttcacagaattgaatgacaactttaaaagtttgtaaattgaagagtattagggatttagtttagactttaagagaggcttgtcggccgctgtataattggttgtgtattaactatattggtgtgatcttcctaatggtatcttagtcaaggcattctgactttgggt

SEQ ID NO: 133045 - DNA, 661 bp, Glycine max
  Clone ID: PAT_MRT3847_91145C.1
agtagaaccattatcctcattgtcttatttcttccatgctccaaagtcaagtgatctgtagctacttcttcctgggacgacaccagctattttttatttaaaaatacttagtgtatttccattttcttttttgtggatgaagcaatgaactgatgaaagcttcttatattccctcttgtgaattattgtttatcctctcagaatataaatattagagtgtcattcctgtggtgcattgtattacctattctgtgttttgtgagttgttatcaatatgtacccctaatcaatgtcagactgaaattatgcactgaattgctactggatttggcaatcagttggggtaatatctaggatgagatgtgctttgtccctggattgctcaatctgtaaaaaaaacattgattcgatggtataaaactattaattttatccctttcaaattggttcacccagcaagttttcaagtgtgtttggtctctagtgtagtgaatagtgactgtattataatttaaaatgtctactatatcttcaggcatattatgggccaagagtcaccatgccaccatactacaactcagctgtggcttctggtcacgttcctcacccatacatgtggggaccaccacaggtagcccttctgtcgtcttctcgcagccgt

SEQ ID NO: 133046 - DNA, 2796 bp, Glycine max
  unsure (1)..(2796): unsure at all n locations
  Clone ID: PAT_MRT3847_91146C.1
ctctcagaatataaatattanagtgtcattcctgtggtgcattgtatcacctattctgtgttttgtgagttgttatcaatatgtacccctaatcaatgtcagactgaaattatgcactgaattgctactggatttggcaatcagttggggtaatatctaggatgagatgtgctttgtccctggattgctcaatctgtaaaaaaaacattgattcgatggtataaaactattaattttatccctttcaaattggttcacccagcaagttttcaagtgtgtttggtctctagtgtagtgaatagtgactgtattataatttaaaatgtctactatatcttctatttaagtcagtatggacactggctttacgtccgggctctttccctcgttttttaagagagagaaagtagagagagagacaaacacaactcccacaattgctttgccaaaccttaatttcagggcacttccaagctaccaggaccagttgttgttgttcttccctttttgtgttttttgattcagcgatttttggttttcgttttttttttttcacaaggagaaagttcgatgtctttaagttgaataacttgttgggacatatttgactcggtgctttttcttttggtgcttgcctcatgggaaacagtgaggaagagaaatctgttaaaactggaagcccttcttcttcacctgcaacaactgagcagaccaaccaacctaatattcatgtctatcctgattgggctgccatgcagtattatgggccaagagtcaacattccaccatacttcaactcagctgtggcttctggtcatgctccacacccatacatgtggggaccaccacagcctatgatgcaaccttatgggccaccttatgcagcattttattcgcatggaggggtttatactcaccctgcagttgctattgggccacactcacatggtcaaggagttccatcttcacctgctgctgggactccttcaagcgtagaatcaccaaccaaattatctggaaatactgatcagggtttaatgaagaaattgaaagggtttgatgggcttgcaatgtcaataggcaattgcaatgctgagagtgctgagcgtggagctgaaaacaggcagtcacagagtgtggatactgagggttacagcgacggaagtgatggcaacactgcaggggctaatcaaacaaaaaggaaaagaagccgagagggaacaccgaccactgatgcagaagggaaaactgagctacaaaatggtccggcttccaaagagactgcatcttccaaaaagattgtgtcagctactccagctagtgttgccggaacattagttggacctgtagtttcttcaggtatggccacaacactggaagctgaggaacccttcgactgttcattctaaggcaaattccacaagtgccccacaaccttgtgcagttgtgcgtaatgaaacttggttacagaatgagcgtgagctgaaacgggagagggagaaaacaatctaaccgtgaatctgctagaaggtccaggctgaggaagcaggccgagactgaagaattggcacgaaaagttgagatgttaactgctgagaatgtgtctctgaagtcagaaataactcgactgactgaaggttctgagcagatgaggatggaaaattctgcattgagggaaaaactgataaatactcaactgggacaaagggaagagataactttgagcagcattgacagcaagagggctgcacctgtaagtacagaaaacttgttatcaagagttaacaattccggttctaatgatagaactgcagagaatgagaatgatatctgcgagaacaaaccaaattctggtgcaaagctgcatcaactactggatacaaatcctagagctaatgctgtagcagctggttgaaaccagtaactgcactggctaattatgtaattttggcatattacaagcccaaaattacagcttggtgctaacagttttcagagggatggatcagctgaattttacaatctaattccatctatatagaccagaactaattctttgcttgtgagtttcttagggcataaactctgtattttactagatttcacagaattgaatgacaactttaaaagtttgtaaattgaagagtattagggatttagtttagactttaagagaggcttgtcggccgctgtataattggttgtgtattaactatattggtgtgatctttctaatggtatcttagtcaaggcattctgacttttggttagttttggttttgtatactttaaagcaattcctcatgttgtggctgtggttgccttttaccatgtgtttgttaccacttagtgtgcatttggattgaattaattttagaaatgttaatctgaatgataaaaaatgtaaaatgaagagaactagagatttcagattggatggggtttgttgaaccgctacataattgcgtatgtattaacgattggtgtggactttcaaataaaaaaaaaagaaaaaaaaaaaaaaaaaaaaaaaaaaaacataatactagaaaaaaaaataaagactaacaaaatgctatacaataattcatattatcagtatatctggcaagaagttaatgttaaataactcgtacaacaatgacacaaatggaaaaagaagttttttgcgtatttgaatactgcttggaaataactaagaatcaactttttgaaaaataacaaattggccctaaccgaaaagccataaaaaaaaaatgggcaaccaaaatagaaaaatgagacaacaacctaaaa

SEQ ID NO: 133047 - DNA, 822 bp, Glycine max
  Clone ID: PAT_MRT3847_91147C.1
cctctctttatcacattataattccaccagtatgttcgtgcttggagcaaggggtcgcagattctattaaccaggatgatctcaggttgtttcagacaacccaacactccctcatcaagcaacatcagctacagctcccaagtgccacagaatgtggtgacatgcacatacctaactcaactatgcaactcccccacttatctcactctcagctggtccagaacccttttgtcccactccctaaccatttcagccacagatatattttccatcacaatttctttgaactcctcaaccttcttcttcagaacacgccatggctaaaaatcaatcaacaaccgcaaaatcaagctccactggaacttcacccgcgccgagttcattcaaaactccgctgagccagagtcacgcttctacttggcaatctcacacaatggcaaactccaattctttttgggcgaccttgtccgcgatttgactcggcgccacaaaaagctcgacgttaaggctaacaacgttgttgacccagttctggtgtcgagaagagagcacgtgttcggaagaaggtgttacgtgtcacgtgcggtgttcatggggtcgaagcacgtgatagagatcgagtgcggagggggtgtgctgggagtgaaagtggacggtgagacgcggttggtggtgaaaaggttggcgtggaagttctacggcggttcagtggtatttctctacggcgttgaagtggagttttattgggacgtgttgagttgggtggttaacagagacagcaataacgggcacggcgtctttgtgttccaagtgggagatgga

SEQ ID NO: 133048 - DNA, 401 bp, Glycine max
  Clone ID: PAT_MRT3847_91148C.1
aaaaggaaaaacacaagtttttttaaggggaaacccaaaaaggtaaacaacgaggacctactggatacttcctaaggggaaggggaaaaaaaaaaaagtaaattttgaaaaaaaactagttatgcccccctttacgaggtaaaacgacctaaaagtataacgacccctcaaacaggggggggggaaaagctcgttggagaaacaaaccaaaattatttgttgggaaaaacttaaaaaccgaaaaagccaagctcattagttttttctttttaaaaggtttaaaagaactgaaaaaagattgttactgaaagaaatattcgggttcttgaaccgagggccccaataaagttggccaaaactgtaaaagcaccaaaacaaatgcctccaaaggctgcggccgg

SEQ ID NO: 133049 - DNA, 463 bp, Glycine max
  Clone ID: PAT_MRT3847_91149C.1
attgacaatagctggtgaagaattttatgaagactgaaactcaaaatacactgggttccgtctaccttaacgaatgttcatacaaccctacaattgctactgttggccattgaacacgggcaggggatggatataacacagatgcaaacgcaattgtggtagacaatcttctgttgcaaggactgacaacaagctactccgactgggtcataagcctctacggacattaatggtatcaggacacattgttaaagattctataaggctaggatttgagaaaggactcttcaaggcatgacctttatcatacctccatcaagacggtacatattcatgttgactacctcccttacaacattaatcattgctagtcttggatacactccaaataacaagctccttgcaacaagatcagcgattatctgcattggctctagcctattatgagactgaccatgatagg

SEQ ID NO: 133050 - DNA, 359 bp, Glycine max
  Clone ID: PAT_MRT3847_9114C.1
ggaaaaaaaaggccgcttgggaaacttttattgaaagggttaattcacttcacatgcaattccatagcttcccacaaaaaatattaacatttggcccgtaaaaccctcccaataaacaaaggaccccccccttttttaggcattacgggaaaacccctgattttaaaacggttgccatcagttttcctattcccccaggtatcccccttatgggggaaaataaaatccccccgcccccctggtaaaaacccccctgccacccaaccaaaagggaaaacccgcccgatttcctttcggaaggaagggccctttaaacacccccaacttttttttaagcaaaatttttttttgagggggcc

SEQ ID NO: 133051 - DNA, 259 bp, Glycine max
  Clone ID: PAT_MRT3847_91150C.1
ccgtctcccctctgcttgcgttggcgacatggtgatggccaccgtgaaaaaagggaaacccgatctgaggaagaaagtgttgccagctgtcgttgttcgccaacgcaagccatggcgcccaaaggacggcgtctacatgtatttcgaagataatgctggtgttattgtcaatccccaaggagaaatgaaagggtctgctatcactggtcccattgggaaagaatgtgctgatctgtggccaaagattggaagtgccccc

SEQ ID NO: 133052 - DNA, 229 bp, Glycine max
  Clone ID: PAT_MRT3847_91151C.1
aagcccaaggggacagggcagaaatggcaccacgccaggaggaggcgacccccacgggagccacagcaagcccagacgagcgcgggggccacacagcccaaaaagcgaagggagccccatacaaaaatgacggagaaaaaccgaggaacaagagggaacagcaccacaaaaccaaccacacccacaagaaggcaccagtgcaaacacacacatgagaagcccacagcag

SEQ ID NO: 133053 - DNA, 236 bp, Glycine max
  Clone ID: PAT_MRT3847_91152C.1
tttttattatgatttctcttccttcatcttattataactatgcttttgtcaatagtcccacatgatttcaatgaattcttaacttctttccttgtgcattgtcatggaagaggtgttcaatttcatttgtatgaaacagtgctctgaacctaagggtttaccataatcttttttcatgtaatagtcttggttatgtagtattaaattattgttagagcttattttgctatctattt

SEQ ID NO: 133054 - DNA, 1584 bp, Glycine max
  Clone ID: PAT_MRT3847_91153C.1
gcgatctaaatgtgtgccatccctaatcatttctgaacccttcccccgttcccctttaaagtctctttgtcccttaatagagtgggcattaagtacactatcggggagagaccaaagcgtgtggcaaagagtgttgtgttggtaattaagaaagagaggaaaaatgccgctcaagttggcgggaggagccactgtcggttcccttctcctatgtgttgctatttctctctttcacatcgctggggccgaagatccctacaggttcttcaactggaatgttacttatggtgacatttaccctcttggtgttcgccaaacgggaatattgatcaacgggcaattcccaggtccagatattcattctgttaccaacgacaacctcatcatcaatgtcttcaacagcttggatgagccctttcttctctcttggaatgggatccagcagagaaggaactcattcgaagatggtgtttttggaacaacgtgccccatcccaccagggaagaattttacttacatccttcaagtcaaagatcaaattgggagtttttactatttcccatcccttgcattccacaaagccgctggcggttttggaggcattaggattctcagcagaccaagaattccagttcctttcgctgatcctgccggtgattacactgtcctcattggagattggtacaagctcaaccacacggatttgaagtctcagcttgatagcggtaggaagctgcctttacctgatggaatcctaatcaatggtcgtggctctaatggagcatatttaaatgtggaacaaggaaagacttacaggcttagaatatcaaatgtggggttggaaaattcgctgaacttgcgcatacaaaaccacaaattaaagctggtggaagtggaagggacacacacccttcaaactacgtactcatcccttgacgtccacgtgggccaatcttactcagttctggtaactgcggatcaacctgctcaggactactacattgtggtctcctctcgatttacctacacagttctcaccaccaccggaattctgcgctatagcaactctgcaggcccagtttcaggcccaccccctggtggacctaccatccaaattgattggtctttgaaccaggcccgctccatcaggaccaacctcacagcaagcgggcctaggcccaacccgcaaggctcctaccaactcataaccaatactgccataacatacgaaaagtcatgccaaatacatagttgagtgctttggtttttttattttatgctatgctccaatgggatgatgagtatgtatgattttatccctaaatgaccccagctcgaggtcacattaattatttcccagagaaagatagagagtgtgtgtgagagagaatatatattatattccctttgtattatctcggattttactagtattgttatcaagaagggtgaatcggatcgcgaaagttggcgtttggaacctggctataagcagggtctgtgattcatttaattgttgtagcagtgcagaactttttaatttcaattgctatatgcctatatcttttttcaatattgacagcc

SEQ ID NO: 133055 - DNA, 437 bp, Glycine max
  Clone ID: PAT_MRT3847_91154C.1
aaaaaggaaaaggaaatattctttttttccatattcgggattacccccatcaccttttttatagacctgggctgatatactaaaaggttctaacaacataattcctaacaattttttagggctaggagggggggcaaacaacttttttgatacccccattttcctattgccagttgaacccccctgttttttcctggggaacatccttttggttttttcctaatgaacccccttttccttataaataaactaacccaaacaggtctggaattttctggagtcaagccaacattcctggaattttcgggagtcaagccaacagtaggtgaaacaggattaaggcgttggtcaggtcctcttctgcaaaaaactgcacaaaattcccccacattgccattttttactggctcaccctgttggagtacagatacaaaagg

SEQ ID NO: 133056 - DNA, 232 bp, Glycine max
  Clone ID: PAT_MRT3847_91155C.1
ttatatatggaaacctaataaattatattgcatagcaaacgtttctaaatttttttgtacataagaccattgtggctcacaaggtacatgtaaactcacaaggtacaataatctctgagaacttgcctagcaagatcaagagcaccactttttttgtagattaaatgcaaattgtaagctgcctctctgcgaaggtcacagtaaccaggtttatgagtttcgatgatatctg

SEQ ID NO: 133057 - DNA, 459 bp, Glycine max
  unsure (1)..(459): unsure at all n locations
  Clone ID: PAT_MRT3847_91156C.1
aattcggctcgagttcatttatcagaagaagggcaattttatgatcatgtgatggtgtgcgatacaactaacgcagagagagagagcaatatgatcataaaattgcccttcatttatcagaagaagaagctaggtagctactaaaaacggaaacctcagggttatgtgaaaaaagcaagagatgtttcagagtcccagaaagtttgtgacgccctttactaaatgggtttctgatcttaattggcgtttaggtttaactgggttgatcatccctctggttttattcatcacgttcttctctctgcattattcatccacttcaaacggtttttcagccttttaccctgttcagcagtttctcttcaacatccctnttaagtttatctgcgaggacgatcctgttattttcaaggatgaattgttggggtccgaaattgccgtgtgtttggtaggtggtgc

SEQ ID NO: 133058 - DNA, 1765 bp, Glycine max
  Clone ID: PAT_MRT3847_91157C.1
ttcatttatcagaagaagggcaattttatgatcatgtgatggtgtgcgatacaactaacgcagagagagagagcatcggtcgttttgaatcatattgctctctctctctgcgttagttgtatcgcacaccatcacatgatcataaaattgcccttcatttatcagaagaagaagctaggtagctactaaaaacggaaacctcagggttatgtgaaaaaagcaagagatgtttcagagtcccagaaagtttgtgacgccctttactaaatgggtttctgatcttaattggcgtttaggtttaactgggttgatcatccctctggttttattcatcacgttcttctctctgcattattcatccacttcaaacggtttttcagccttttaccctgttcagcagtttctcttcaacatcccttttaagtttatctgcgaggacgatcctgttatttccaaggatgaattgttgcggtcgaaaattgcggtgtgtttggtaggtggtgccagaaggttcgaactcacgggaccttccataatcgaaatggtgctcaaagaataccccaattcggatctttttcttcacagcccgttagataaagacacgttcaagttctcgatcttgaagtttgcgccaaacgtcgccgccgttcgaatcttccacccccaaccgttgccggagaacgagccgtatgttcgagtcctcaccgcgcataactcgcctaacggaatccaggggcttcttcagtactttaacctagtggagggatgcctaacgatgataaaatcacaccaacagaagcacaacttcacgtacgattggataatccgaacacgtgtggacgggtactggaacgcgccgttgggtcccgaaaacttcgttccgggaaaatacctggtcccaccgggctcctcgtacggaggactcaacgaccgtttaggaatcggcgacctcagaacctcgacggtggcactgtgcgcgtctctctttagttccaaacctcgattccgctggctttcaacaaccttcaatcggaggcagcgttcaaggcccaactcacgacgctgaacgtgagccacgtggcaaaacgactcccgttttgcgtcgtttcggaccgcaggtacgattttccaccggggcggttcggggtgccggtggcggcgctgtcgagcccgggcccactgagtggggccaagtgcaggccatgcagggaggtgtgtgagggtttgtgcgcggaaactgtgatggattcggttgagaaggtgtggagttggacccattgggagaacggtgcgcttcagctttgcgacgctcacgatgcgtgggagagtggttgggagaagaattttgaccggcttgctgggaagaaatttgcggcggctaggaagcgaattcactctatgagaatgggggagtgcgttaaggattttgttcagttgaggaaacggagtgcgcattggagtgcgcctccggtggatgagatttgtacattgggtttgagtccaccgtgaacaccttttctttctttctgtcacacagtttagtaaagtcactactggattttctacttttctttggcggaaataggagaaatatcaattcttttttcactcgttggaatatttatttttcaaatttaaatatataactatatataagtgggtgtgaatatggcactctaataaaataagtacatcgtgttaaagtaaaaagagagagaaatatgtttttagactttaataaacaataataaaattaatattactt

SEQ ID NO: 133059 - DNA, 586 bp, Glycine max
  unsure (1)..(586): unsure at all n locations
  Clone ID: PAT_MRT3847_91158C.1
ggctcgagcttcccttcctccccaagcataacatagcttcctcgattcttcgttctagggtttgaaaagatgaacatttgtggttgttgggtttcatcaatgaaattgcccttcctcgggtggcgcttttcaaggccttttacctctctctgttcttcttctttttcgccacgcattatgaccattcaaagttgttcttctccttcttcttcagcctccttatcaacgtcagagtcgaaagagatgaagaaggaagcttcaccttggttaattgttggcctcggcaatccaggcaaaaagtacgctgccacccgccacaatgtgggctttgagatggttgataccatagctgaagctgaagggatatctatgaccactgtttccttcaaatccttatttggaaaaggttttataggtgatgtaccagtcatacttgcaaaaccacagacttatatgaattcaagtggtgaatctatcttngacgacttggatntgccttttgctaaattgccgcttctaccaaagggtggacatggatgtcacaatgtgatgaagagtgttattaatcacttcaaagggaattctg

SEQ ID NO: 133060 - DNA, 435 bp, Glycine max
  Clone ID: PAT_MRT3847_91159C.1
gcggaaaatgcaaaggttgtgaacattgatgggttcgaggatgttccaccgtatgatgagaatgccttgaagaaagctgtcgctcatcaacccgtaagcattgctattgaagcctctggcagagatttgcaactttatcaatcggtaagcgtctcacagtgattactacattgttcttaagcagtaatgtaaacactatgcaatgtgcaaagtgcaaactccaaaatttatgagaagctacttgtccagctcaattgattgaacagtgtgcctgagttgttggaaatctcctggtacctgtgttcgattcctatggaaaaaaattgttaagaagcttgagacaacaacattcaacaatgtatagatgtcatatgtgtgctaacaatttctggttcttttattttttcagggtgtatttactggtaaatgtgggac

SEQ ID NO: 133061 - DNA, 136 bp, Glycine max
  unsure (1)..(136): unsure at all n locations
  Clone ID: PAT_MRT3847_9115C.1
agtctgcangcaacngngtacgtaagctacggaattacggntncgagggaangaganaatgcatcanagtacaaattggcaacnngngnnatgnggngttgntagatttgtnagngcncanaaatgcaaggacggn

SEQ ID NO: 133062 - DNA, 1415 bp, Glycine max
  Clone ID: PAT_MRT3847_91160C.1
ggctcgagcttcttcccttcctccccaagcataacatagcttcctcgattcttcgttctagggtttgaaaagatgaacatttgtggttgttgggtttcatcaatgaaattgcccttcctcgggtggcgcttttcaaggccttttacctctctctgttcttcttctttttcgccacgcattatgaccattcaaagttgttcttctccttcttcttcagcctccttatcaacgtcagagtcgaaagagatgaagaaggaagcttcaccttggttaattgttggcctcggcaatccaggcaaaaagtacgctgccacccgccacaatgtgggctttgagatggttgataccatagctgaagctgaagggatatctatgaccactgtttccttcaaatccttatttggaaaaggttttataggtgatgtaccagtcatacttgcaaaaccacagacttatatgaattcaagtggtgaatctgttggggccatagtttcatattacaagattccactgaagcaagtacttgtgatctttgacgacttggatttgccttttgctaaattgcggcttctaccaaagggtggacatggaggtcacaatggaatgaagagtgttattaatcacttcaaagggaattctggttttccccgtttaagaattggcattggacgacctcctgggaaaatggaccctgtagcttttgttcttcgcaccttcactaaacagactaagggaagagttgaattttacattacgagatggattagaagctgtgcggattcttacaagagttgctttggtttgatgtgcaacatttgttaatagtgccaaaaagatagagcaaacaggttgaggaatttcttgctttagaatatccctttggcaagtacaaacaaacaggatcgtatagcaaggagatacaacttagagtaaactcgtccaaagctctgttttttaatttgatagggctatgtttgagcaagtattcatccattctttcagaaagcagtttcagcacaatgaattcgaacctgatgcctggaatcttcaggtactcgtacgtttacatactgtggtgtttgatcaattttgagcacttccagcaccttgaattataatattatataatgtgagttgatagctcacacggcactcaacgacggtttttaattctttatcaccatgtactatgtactagaagttcatcactatgtattcatacaagagttgctctggcttgatgtcatgaatctgtccatcacatttcctttccccattctttggctcggctaggcttcttgtacactaaataacagttttttggctgttttctcaacgatctgtaatttttaaccaaagttattgtgtataatatacctacttatctttctataaaatttgctattagcattctc

SEQ ID NO: 133063 - DNA, 410 bp, Glycine max
  unsure (1)..(410): unsure at all n locations
  Clone ID: PAT_MRT3847_91161C.1
gacccacgcgtacgaacacccatacaaacggctgcaaaagacctccaaatgctaagcctcaataccgggcacaatgggaaaacttgattagttgcgctctccacanatgaaacaacactaaatcacgtatattcaacactactcatatgtgaaccttttcaaaaaaaaactgtttttttatcactaacacatcaatgaagatgcattccaaatatatgcttccctaaaccaacaacgaacaaacagacacacatctatttccaatattagacaaacatacctgactactctcttgggaccaatatatatcacattccaaaacatttaacaaacaagcttacatatattctaaatgcctcacactcaccacctaatatatttttgtatttgacaatgaaaacactactatc

SEQ ID NO: 133064 - DNA, 584 bp, Glycine max
  Clone ID: PAT_MRT3847_91162C.1
gccatcgcatcgagatcaatcatcattgaacaaatccaacaacaacgttttcctccaaatataaactcccttgaaccccgttgcacacaaaccactagctcgccacacacaaccaccattcaacaaaacgcaatgacatcaaataagcaacacaaacacacagttccatcaatgaaaatagatagataaacaaataaagagaaatttcattattagttaataggaactgagatgaaagtagatctggcgcactggatctaggctccgacgaactcaacgatgttgtagatctggtgcgtctgcgtcgtgaaccatggattccgatgtgtcaggttcttatccctcacaatggttgttcaaatcgtgatatggtgtcatggttctaggctccaacgaactcgacgacgtcatggatctggtgcgggtgcaccatggatttcgaagcgtcagacgtgaatctctcgcagcaattgttcaaatcgcaaaagtcatgatgatggtgcggatttgttgtcgtgaatctggtgcggctttcatgaagttgatgacgttgcggatttggtgtggcacgtacgagaggaatg

SEQ ID NO: 133065 - DNA, 407 bp, Glycine max
  Clone ID: PAT_MRT3847_91163C.1
gcagggggagagtgccttaagataatagaatgccatatggcgcagatgttatcaccaaacgctgtaccaggtggagttaaagaatgagatgaattgaaagcttatgcttcattggtgcagattactgatgttcttgcagagataaagcgattttctgtcaaggaggtttatacttactacaaaggcgtgactgatgaactacaatatggctctgtcaaaatgaattcccaaatctcacctgagatttatgacgacttatatggagaagctttagacataaaacatactgatcactatgaatactcaaacacactcgagactagtcgaaaaagctatctatcaagaacgatggtgcgcccgagcatattatcagaaagagatcctaatgctgtacagagacaccatca

SEQ ID NO: 133066 - DNA, 276 bp, Glycine max
  Clone ID: PAT_MRT3847_91164C.1
taattcctgataagggaaattctctgactgcggcatctgataatcttcgtcgttggtgtaaaaataaaggtcgcgctcaaccaaattgcccaacttccataaccacattttaaacttattacccttttccccccaacaattatggatgccatccaatcttttcaacaccacacactttgcaaaaacttcacaacacaaccttttgttctctcttgtccgcactcatacaacactttgatccccaaaaaaaatctttttcttttataaattcctttc

SEQ ID NO: 133067 - DNA, 365 bp, Glycine max
  unsure (1)..(365): unsure at all n locations
  Clone ID: PAT_MRT3847_91165C.1
aaaaaccgccacacctttccgccatggcgctgccatggccggtttttaacaacactgattattatcattggtacctccaatgttgtaatttagcaactcaccactaagctgcattccaatttttctcttaaacaattgggtaaacttgactattttcttggtattgaaatcaaattggtggctgatgggactattctactgactcaaagcaaatatatcagagatttgctttagaaaaccaaaattgtagaagcacaacctatttctttccctatgactgctaattacaagttgaccaaagttggctcgaatntattcagtgattcatctctctataggtctgttgttggtgctcttcaatacac

SEQ ID NO: 133068 - DNA, 1862 bp, Glycine max
  Clone ID: PAT_MRT3847_91166C.1
atcgagtgtgggaggccattacaaaggcttttgcaagccaaatgaagtctgctttcactggatcaagttttgttaaagagatttttacaatgggatatccaaagctttactccatgatagagaatctacttgaaagaatttcacatgacacagatatcaaaggagtgttaccagctatcaatttgtctggaaaagagcagataatttcagctgtcgaaatattccagaatgcatttttggctcattgcttgagtcgcctttcagatctagtgaattctgtatttccaatgtccagtcgtggtagtgttccctccaaggaacaaatatcaagaattatatcacgcattcaggaagagatagaaactgttcagatggatgcacgcttaactcttcttgttttgcgtgaaattggcaaggttttaattcttcttgcagaacgagctgaataccagatatccactggtcctgaatcacgtcaagtgggtggtcccgcaacaccagcacagctcaagaactttacattgtgtcagcatctgcaagatgttcatacacggatatcatctatacttaaaggaatgcccagtattgctgcagatgtgttgtctgcttcattaggtgctctatatggtgttgcctgtgattctgtaacagctttattccaggcaatgctggatcgtcttgagtcttgcatattacaaatacatgatcataactttggagtgctcggtatggatgctgctatggacaacaatgcatcaccttacatggaggagctccagaagtgtattcttcactttcgcagtgagtttctttctaggttgttgccttccaggaattcaacagctcctgggacagagaacatatgcaccaggcttgtccagagcatggcttcacgtgttctagtattcttcatccgacatgcatctcttgtgagaccactttcagaatcaggcaagttgaggatggctagggatatggctgaattggagctagctgtgggtcaaaatttgttccctgtcgagcaacttggtgcaccatatcgcgcacttagagcatttcgtcctcttattttcttggaaacgtcccagcttgcatcatcaccacttcttcaagatctgccaccaaatgtcatacttcatcatctgtacacccgtgctcctgaagaattgcagtcaccgctgcaaaggaacaaactaacaccattgcagtattcactatggctagattctcaatgggaagatcaaatctggaagggcatcaaagcaacacttgatgattatgctgcaaatgtgaggagcagaggagataaggagtttagccctgtttatcctcttatgcttcaattgggttcttctttgattgaaaaagatcagacttcctcaaagtcatgatccagtaaagaatttgtagtctagcaaattaaaccacatctggtacttcccatattgcttcttgaaagttattgaaaagagtttggttgtggaaacatgaggaagaggcctgctacttctgctagcaagcatgaggtacaaacatttaaatgattaaattttttttctttctttcatttctattcatcttccttcctccttccttccttcctttttttttttttttcctttttaaatgaaattactgttattggttaatctcgaatttcttgattatttgttgttactttcaatgtagagaaatataaccttttcatggaatgtagaaacaagtgctgttgtatactccccatgattaatagacatgtaaacgattatttcatcaaaaaaaaaaaaaaaaaaaaaaaaaaaaaaaaaaaaaaaaaaaaaaaaaaaaaaaaaaaaaaaaaaaaaaaaaaaaaaaaaaaaaaa

SEQ ID NO: 133069 - DNA, 230 bp, Glycine max
  Clone ID: PAT_MRT3847_91168C.1
gcatgcgatattgcgcggaatgtactatttggcacatacttccgacattacttcaaagaatttagtaacgtgccgaaaactgctggaccaagaaagagactgattcaaaaaaaatgctcaacactcaatagtatgtgacctacgatctgcaggcctcaatattgcgtacatttatacgatggattcctctatcccctgaagagataccctttatagatgctcgacccgcg

SEQ ID NO: 133070 - DNA, 243 bp, Glycine max
  Clone ID: PAT_MRT3847_91169C.1
caataagtaaattcattgagccaaatgcaaccatccaacaaaggtggactaataataataatctaatgatgtgtcaatagtgcagaaactactcaataaatttcttgtacaattgctgggactttacaagttgagtgtttcaaaatactgaaggagtgcaacatagcgcattgaatggggcaaaacattggggatgggggtatgcatggctctgagctgatatactggggtatttctgacggg

SEQ ID NO: 133071 - DNA, 429 bp, Glycine max
  Clone ID: PAT_MRT3847_9116C.1
ggctcgaggaaaatgggtacttctttgtggactttgtgtttaattttggcttgactagcctcttttgcatgatgggcctttccacagacgccagtaggatgttccattccgcagaaactacgtacccacttgggcttttgatcacatctaatccttcagtggaggatctgaaattcaactttatctagacaagttcactggctctgacttccagactaaagggtcatactgatatggccacttaagaatgaacataaagatggtctctggcgaatcagctggcacagcacactgctatttatctatctacctacaatgcgagagcacgacgagatagaacttgagctgtagcggaacacaacacgacgaccttacattttgcaaacaaatgtgcataccgcatgcgcgggtgacagtgagcatagaatc

SEQ ID NO: 133072 - DNA, 308 bp, Glycine max
  Clone ID: PAT_MRT3847_91170C.1
ggggttgtactaacctctgtttactatgaacaggggctctaaagaataagtctaattaagaattattttcatcaaagattaaacttgattactatccaaacaattcaactttaatatattaaccatatatgttcaatcacttgttggttagttagtgtatgaattctttaagactttaatcatattggatttatataattagtaggtaagcttataaactccaagtaactaattaactagggaatgaaatttacattcgggaatgacacatggaagaaagctagcggcatatttatcatcgtcatctt

SEQ ID NO: 133073 - DNA, 723 bp, Glycine max
  Clone ID: PAT_MRT3847_91171C.1
tctacctttttttttgttttcttttctctctctcctctgactactccctgttttccggcgtttttccggcgggtcccctttccaaaaccttaaacttcccattcccaaattccctcccaccgttcatatcttaaatcatcaacttcgcaacaatacgtaaatatcgatacatatctatttttttttcttacaaaaattatacgtttgaatttcatattattttgccacaaattgtattattattactactactactattattattattattattattattattattattattattagggattagggatactaatcatcgtttcaaatttctatcttaattaacccgtgaatttttgtttttaaatattttcgtgggtttcaactttcaatcaaagtttgaaaaaaaggaaacaaatttgaaacttgttatttgtttttgaatttttaaatttctttgtcttgcccaaaccgtttccctcgttgtggttgtgttttctcggtgtttttgttgagggaaaaacgcgaagaaggggaaaacttttggaggcaagttttgttttagggtagttgtgattcggatggtttttgtgaggttatacatgggatttttgctggaaaaaaatagtgacttttgctgtttttttttttgaaatttggtttggtttgcttcttgatgggggaagaagagggtgatgattaatttaagggtgaatttgaagaatc

SEQ ID NO: 133074 - DNA, 349 bp, Glycine max
  Clone ID: PAT_MRT3847_91172C.1
gcaaaatgaccaagttcacaatcctcctcatctctcttcgcttctgcatcgcccacacttgcagcgcctccaaatggcagcaccagcaagatagctgccgcaagcagctccagggggtgaacctcacgccctgcgagaagcacatcatggagaagatccaaggccgcggcgatgacgatgatgatgatgacgacgaaaaacacaaaaacaccataacatgggagagaaaaaagaagcggcgaagaatgaagcagataagaagcctgaatcaggagcaaagcaaaacgacgaaccagtacctgtcgttttgaaactcgacatgcattgcgaggggatgtgtcaagaagat

SEQ ID NO: 133075 - DNA, 191 bp, Glycine max
  Clone ID: PAT_MRT3847_91173C.1
cgaaactcaaaactggaacccaaccagaaggcgttcctcaagatggctgactccggaagtcattcccaactgactcatggaggctaactgaccgaggccttctagtaattactgcagcgcagatgctacatagggtgatcatgaatgactcggctgactcggactcggacatgctcgcgaaccacttcagc

SEQ ID NO: 133076 - DNA, 307 bp, Glycine max
  Clone ID: PAT_MRT3847_91174C.1
cggacgcgtgggttttgtatcaattataccctttactgactattatgaccttggaaattcaaatgttcatgggttttaatacaccatttaaaaagaaaaaaaaaaaaaaaaaaaaaaaaaaaaaaaaaaaaaaaaaaaaaaaaaaaaaaaaaaaaaaaaaaaaaaaaaaaaaaaaaaaaaaaaaaaaaaaaaaaaaaaaaaaagggggggtcgatataaaggatacaggttaaagttagagagatttcaaatatataaattttaataaagggacactaataaaatgttcacggtgcccgctattttt

SEQ ID NO: 133077 - DNA, 364 bp, Glycine max
  Clone ID: PAT_MRT3847_91175C.1
ccctgtgtcacaaaacacaaactgggggtcgtgttaattctctgccggttcaaatacctcctttctcgggaaaatcttcacgctgcgttttcccgggaatttctcgttcccccgttcccgctaatcgtttcagagatcgaaaccagcgtttcaatctccgttcaattccctctcctttccgtttccccgcgagttctcaaaggggaaacacaaaaaataacaaccccactagtataccttcgttctctcattcccttacgacttcattggtcaatttagggtttcaaaacccttctttttgccgttctcgtgcgttggaagattcaaaaacatgtggcagcaaccttatatattgccaaatttg

SEQ ID NO: 133078 - DNA, 382 bp, Glycine max
  Clone ID: PAT_MRT3847_91176C.1
ttcttcccacgcgtccgcccacgcgtccggaaatagagctaataactgagaaagtaacataaaaagctaaagctggtgaaatcttggtttagtgctcccactctcctatttggtataggacttcgagggtagacttttttatttctgacctttctttcactatcttctattcactgaaccgcattgccgtacaaaggggtcttatttgaaaaacacttgggcggtggtgcaaatgttttgcttcgctaatactctcttgagacatcaggctcactgaaaaaacattttttacttgcaaaaatttggacatcttggttggtttttatacaatttcatctcaatttagaaaatcctctaccgcattacattaggtggcatcttg

SEQ ID NO: 133079 - DNA, 168 bp, Glycine max
  Clone ID: PAT_MRT3847_91177C.1
cgccgtttttctttctgttagaagaaaatggttacagagcacggcatcaaattcggcgtccacctgatcaccaagcgcttcggcaagatcgttgctaaagtatgcgaaaagctatttagccatggacccctcactttggatcagttggttcgctacactgactttact

SEQ ID NO: 133080 - DNA, 512 bp, Glycine max
  Clone ID: PAT_MRT3847_91178C.1
cgggaggaacatgcagcaaggattcttgatattttgagctccaagagatctgggaaaatagagagagatttatggaaggcatttttattgcaatctaagggtgatttgagagatcttattttcatgaaaccgctacacattagattaaggttaagttgtcaggatcatccaaaggctgataacggaagggattttatcttaacagactcttcaattaaggtggacgtattgctcaattgacagtagattcagctgcacagttgcattttttattcctatcacatgttttattgtttgtactgtgtcatcacttggtgtttagtaacctgtgtctcattgctatttattagctggagaaggttatttaccaaaatacattttattatttgaaaatttgatttcatgtgcttggcttttttagccgggactatattgttgcctgacggtagagtcagttcttgaagacctcaatggcttataaatgaagtgagggtttctcctttggattaaaa

SEQ ID NO: 133081 - DNA, 729 bp, Glycine max
  Clone ID: PAT_MRT3847_91179C.1
ggaacaagcatgctaacccaaaaaagtggataccaaaaattgtagtatcgtaatatcattttaatccaaatttatgtttatgcttaaacttgtaaatgattgatgctacaacaagccaaaattatcaccagcttgcactgtggtcaaaactgaaatgagtgcaaaaaatcctgatcctatcaaaactaaaaaaagtgacagcttgctaattcagcctctgcttgctcttgcttcttctcatctttgccttaaatcttgattttgccatcagagtctgtactgtatttgcaaagttcccaacagccattaagaccaacaggacaccgcaaaatattacctgccactcagaaacaaccccaacaactgcagtcctgagcaacaacagtccaacatatgcctcaaatccctgcaacgtgaaaagtatgggacacaataaccacagttggccatccacaccagctgtttccccccacacaacatccatcctcttagcctttcccaatgcaatacgagtatagagtctttggcgttgatatctgttttgcaaaagcattgcaactccttgcatcatagcccactggtattaaaagttgtacacctctctgcttttttgcacagtctggttgtcctttaatctcccaagttagactcacgagggccatcaccatagcacaatagtgatgatatatccaacagggacgaagagcacatcacatgactcatcgagcc

SEQ ID NO: 133082 - DNA, 419 bp, Glycine max
  Clone ID: PAT_MRT3847_9117C.1
agctcactaccttgcggtcgtccttttgtttcctgtggaagtgttaaagcaaatgccaaaacgtttggtatatttgacacatatgaggaaacactactcattaagtgcttatcctgtatgcatcggctaatctacagctggttccttctgaatctagagaaagctgtgatacgatctcctacgcgctcttgccagggttgttgaactagagtcagtgaagctggataactggggcaaatctctaatgcaacttaccgaaatatatctctagtactaggcaagccccacctagctatcacggttacggggtgataccatagatcctttgtacccggtgtatggcaaagtagacctaaactgacacttgctcagctgagggcatattaaaggtaacaacgaacgttgttacgtccgtcaaa

SEQ ID NO: 133083 - DNA, 162 bp, Glycine max
  Clone ID: PAT_MRT3847_91180C.1
actaagcgtgtttgcgttttactgaaaagattgtcctaggcgaaaaaagacctttgttgtatagacaattgacagtcacttgcccttgacttttgaaagactatcaaagacatttttttccctgagacaatcacagttatatggccttttctttttcaaaac

SEQ ID NO: 133084 - DNA, 256 bp, Glycine max
  unsure (1)..(256): unsure at all n locations
  Clone ID: PAT_MRT3847_91181C.1
tttaccnctccagaacaattccgaagtcaactagcgtgactactcgcctaccaccctttttttttttttttttttgaaaagcanctttccaataaatgattattttggggagaggaaaacactggtctcacanttacaccaacatactgtccaactctttcttagaatcgaattacttataatacaagttttgaaggtaatattttcatctcaccatattcatgtaatgatatataacagctcataaaaacataca

SEQ ID NO: 133085 - DNA, 243 bp, Glycine max
  unsure (1)..(243): unsure at all n locations
  Clone ID: PAT_MRT3847_91182C.1
ctgtgaatctgacacttttaattggttcaggaatatccatcacttttttatcaattgaagaattggaatagagaggtttttgactctttgaaaaatgaatccttccttataaaagaagcttgatgcgttagatgctagaaggggtttgagctttaataattttcttgaactggaatatatanaaagatttaggagtatgaacaagtgccagtgtggacaaggagatccattagtattagaaat

SEQ ID NO: 133086 - DNA, 496 bp, Glycine max
  Clone ID: PAT_MRT3847_91183C.1
aaaaataaaatgacttatattttggtctgggttttggaacttgttgactcggtaataaactcgagagtctaccgaatttacttagaatttataaagtttgctcagaatctactaaaaacagaatttactcaaaagtcaattcgcagagaacaagtcaactcggaagaatttgatatccatgcctttagggacacttcctacttcgctggtcgctcgctcctcaaactaatatcttcatcccatttacttttgaatagcttaggctgggttgtttgttccttaactcaggtgtgagggttcgtccatcttccacagtttgattgccttgggaaaaagtttgcgtaagggatgatagttttctcaactctacctccatataaatagaatctgatggctcccctttgaatagaaggaaaaagtatgtcctgtgaaccaatgaaacatttcacgcatcccagaattcaatgatctttctttgtagcccctggaattttga

SEQ ID NO: 133087 - DNA, 497 bp, Glycine max
  Clone ID: PAT_MRT3847_91184C.1
agaataaactaagaggagacaacagatacatccttggttggctctgggtttaaggagggaaattgattcttgttctttgggaaggataaggaatcaatctgatcgctggaagagaggaagtagcaatagtaatggaaatggggatttccaagacgacaacaaaaacaagcactgaggttaccgacaacaattccaattccaatagcaatagcagcagcaccactcagactgaaactgacaaccatatctccgttgctgctccctacgccgtaggagaaaaggtcttagtctatcactctgattgtctttacgaagccaagctgaggcaagctgagtaccacaacactaaaggctggcacttcctcgttcattatcttttgggatgaatggcttgacctggatcgtttgatgaaacacactgaggaaaatatgcgcaaaaaacatgaccttgacgagaagcttggcaatgataagaatgcaaaaatcccgcgtggttc

SEQ ID NO: 133088 - DNA, 323 bp, Glycine max
  Clone ID: PAT_MRT3847_91185C.1
cccccaaaaaatataaaaaacccccctttccctttaaataaaattttccagttaaaaaggagagccccaaaaagcgggggtgttacgggcccaacaaccaaaaacaaggggggtttgccccaaaaacggaccctcctaacaaaccgccctttattttggggccgtcaatagggggggactttcctgaccgggcccccgattttttaagagaagaggcgggtgcgccgtttttccttggaggagcacagcgcaagcttttttaactcccgcgtgggcccacaaaaaaaaaatttgggaaaacccccccaggccctcttttcccg

SEQ ID NO: 133089 - DNA, 376 bp, Glycine max
  Clone ID: PAT_MRT3847_91186C.1
cccgggggaaaataaaaaaaaagggctttttttttgttttcatgtccaaggaacttgaccctttttaccagtaaactgttgtcttagattaaaaaaaactaatttggatcgtttggatgggaaattaaattttttattttcgggttaaaagaaaggataaaaaattaaggagcccccaaagcttgccttgtctcgtgggttgtagcaaaaaaatggatgatttttgctcaaacaagatgaatttttcttctagggctccacccaataccagggattcatgaccttgaagaaccctttgttatacgcgaccaacaccgttctttgggcaaaagcctcccaattgagctggattacagggcccagccccctgaaattt

SEQ ID NO: 133090 - DNA, 1713 bp, Glycine max
  Clone ID: PAT_MRT3847_91187C.1
agccttttttgttcatcctgactatatatttttcacgagtaaactcatgaccatgtagtggccctttttcaacggagtatgttacagtattaagttgtttgtggaacaacttaataagatgctgataacatcgaaagttggtgttttggttcctgccaatcgcagctgtccagtgtactcgggcgtggtgtctgttcaccacggctggagtgttaaataacactaacagtcaaagtgaagaacatgcaaatgaagaagacattgtaaatgaaaaacataagagacgtgaaaagaagaaagcaaaggaggagagggagaagcaaataagggctgctgaggaaagattactggaggatgatgtccctagaactgctgatgagtttgaaaagctgattagaagctctcctaatagcagtttcacctggataaaatatatggatttcatggtttctatggttgatgttgagaaagcccgctcaattgccgaaagggctttgaggacaataaatatccgagaagagaatgagaagcttaacatctggaaggcctactttaatttggaaaataagtatggaaaccctagagaggaggctgttatgaaagtattccaaagagctctacagtacaatgatcccaaaaaggtctacctagcactcttgggaatgtatgagaggactgaacagcataatttagccgatgaacttctcaataaaatgacaaagaagttcaagcattcatgcaaagtttggttgaggcgtatacaaagtcttttgaagcaaaacaaggatggaatccaaccggtcattgatcgagcttcattaagccttcctaaacacaagcatattaaatttttctctcagacagcgattcttgaattcaaggttgggtttccagatcgagggcgatccatgtttgaaaaaatcctacgggagtacccaaagagaacagacttatggagtgtttatcttgatcaagaaattcaacataaagacgaagatatcattcatgcactgtttgaaagggctgttagtctgagcctcccacctaaaaagatgaagttcttattcaaaaagtatcttgattatgagatgtcccaaggtgatcaagaacggattgaatctgtgaagaggaaagcaatagaatatgtcgagagtctaaacaattgaacatggcttgatacaaattcacctctgctttagttttgaattctacaacttacagccactctggatatcctaagacaaatagagtgttttttataaggcatgataacaaagtggagtggttctaacactacctagtagtgctgccaagtgctagtgtgctttttgcagcacaagatgaatgcatcaaatgagcacaagagaaagacagacctttgataattagaggcaatataggccccctgtattctgtcttttgccatgtttattccatttaggctgtaactttttggtttgacacaaattgatttttcttgggcgcagaggttaggacaatgttgtaacgttgttagtgttttggttgtaaccaaattttgggaatgtaaacattactttatcgttttatatgcttatgctccaaaatgaaaaattgtagctttattttcccaaaaaaaaaaaaaaaaaaaaaaaaaattaaaaataaaaagctttcggggggccccccatttgggcgcccccccccccgggaattttttcggggggggcactc

SEQ ID NO: 133091 - DNA, 267 bp, Glycine max
  Clone ID: PAT_MRT3847_91188C.1
caatttgaacaatattctttactgacattttcaattatagtgtaaattaattttattcaatatgattataatccattatatattaccctaactaaatttaaaaatttgcttaaaatacatttatattttacacaacatcttactaaaaattcttacaatataatatttaaacttctacataaagaattttaaacttcactaacttttcaaactgaaaatatatttttaaaactataatagtttaattatcttctactaactacaata

SEQ ID NO: 133092 - DNA, 274 bp, Glycine max
  unsure (1)..(274): unsure at all n locations
  Clone ID: PAT_MRT3847_91189C.1
attttgaaaannatacagatcangggnaatcatacataaatggannaactaccatcantggattcatacaagagaggnaaacttataaanatccnacaagatnatanatcatccacaaatcataataaaaacatatgtatcaaataangtcttaaattatananagtaaccnagtagaaccataacacataaagnncctaaccagttttaaacntttggnnaataaagtnctatgaagtttccaaacntcattcactgagtancncattagnac

SEQ ID NO: 133093 - DNA, 600 bp, Glycine max
  Clone ID: PAT_MRT3847_9118C.1
tacggctgcggaagacgacagaaaggttcctttctttcagctcataatatctaggcatttaaataaagatttagtgaacacaacaaccacaaagccccaatctacttaagctataaacagtggtttaggcatgaattggaggatccatggacggaaaaaaaatctgttaatcgtgtggtacgtggaaagattccttcttattagttatcaatcaaattcaagcatcaaacgcactcgctcatgtcgtcgacaaggaccaatgatataggttcctccagcggagtaacaagaaagaaaacatcaaacagtacatgtcattagtgtgtgttttggctttttcaacagaaaagttattgataagtgaatgaatactattggacaatgaatgagagattcttgtgtgttgcctaaactcaattgttagtgaagttagaaacattgttttgaaaatcgcactgatcaaactcattcaactggtttaatcgtgttttatcggtctgaattaaaaaagaaaactggtttaactgagcctaacgatcaatccagacaccccaaaaatcgtcttaattaaataaatttacttcttccatttctcttccc

SEQ ID NO: 133094 - DNA, 369 bp, Glycine max
  unsure (1)..(369): unsure at all n locations
  Clone ID: PAT_MRT3847_91190C.1
tcnctcttcgtccgcttggaagaaaggctgattaatggttaatattgtgatgtctgggattgcaccagtcaaaaggagtgattgggcctcattggttcaagtgtttttaacaaacagcaacagttcagagcatttcgatgcatgtaagtggacaaaattggaaccacattcctgggaattgatcttcccaatataggtgtgtggtccttataatggtttttaaatgtggagttctgtgtgggcaaatcaaactttatggcatttgagttttcctattgacaattccaaacattcttcagttttagatattcctcttgggagtttctcaagattttgtaattgctggtattactcttatgtcagcttttt

SEQ ID NO: 133095 - DNA, 152 bp, Glycine max
  Clone ID: PAT_MRT3847_91191C.1
caacaccccaccttcaattttccacctctgtcttgtccgaaatctccatccgggtcattagtatctgagcctatcttgtattcttttgcaacccttgactccattcctcgtttcaagagagaaaaagggttgccttttctttgtaattcttg

SEQ ID NO: 133096 - DNA, 272 bp, Glycine max
  Clone ID: PAT_MRT3847_91192C.1
ccctgtcaccgttcatccactcgatctgttcaattcagggctttattcgagatctttattgttcgtcgcgtcgatacaaatacaatccatcatgacaatcgccgattcagtctttccgatggataatgtggccagttgcatactgcttccgccggaggaggaaaaccggatcgtgtcggagttcctcaaggcgtcggagcttaatttgaaagaaggcaacttatttacgttatttctaacaggtggttttcaaggtggcagagttatgttgg

SEQ ID NO: 133097 - DNA, 550 bp, Glycine max
  Clone ID: PAT_MRT3847_91193C.1
cgttcgcgtgggtgctggtcgatgtgcgtgtgaatgtgatgtatgcaaagcatagatccttcggtattgggcggttcactgatcaaccgatgtcaaagctgtctgtcaaatggcagggcaaacgtgtgtcgatgcccgagtacttcaccttgcgatacggcatcaccatcgacttccctgattttcctgccgttattccgaacactccagtgccaaaaggtcgtccagtagagacgttccccattgagcaattagtcatcatggaggatcagcgcgtgcctttggagaagatggactcgggcttgtctggaaagctcttgaaagctaacaccgttcctccgaatgaacgaatggacaagattctgcagtgtgcgttcaaaatgaatgtgttcaatgtggataacccagtgctgagcgctcttggtatcaccgtcgaccaaacatcaaatcgcgtcgtgatcggtgtgcgttccagtccgcgtattctctacgccaagaatcagataatcaacccatgtccggacatacccgatggaccatagtggcgcac

SEQ ID NO: 133098 - DNA, 168 bp, Glycine max
  Clone ID: PAT_MRT3847_91194C.1
gctacgcgtccggccacgcgtctgtagacgcgtccggctacgcgtccggacgttaaaaaaaaaaaaaaccaaatgtatgggtcagggaacaccgttcagtgtgcaccggtatgatctttcgggggaccggaagccgtacggtggcgacacgaaagagaaaaagttcga

SEQ ID NO: 133099 - DNA, 459 bp, Glycine max
  Clone ID: PAT_MRT3847_91195C.1
ggtacgagttgtttccaccatgagaattggaccgataaggcccatttttaggcccacgcccaaatccagatccatttccacccttgacctctttctctactgcccgagtcacttgtaacagcttcgttctactcatttctcccattgttgccaaagtgcgaacccttcccctaatctccgattgcaaaccatggaggaagtaaccctggaattgcttctctggtaatcgcggaatctgagcgattaaatactcaaattctgtgatatagtcctctaccgatccctcctgtttcaactctgtgagctgttcgtacacgtctccgtcgccatgaccaccgtatctctcgagtaacgctattttcaacgattcccaagtcagatcttcatcttctccgatgagggagttgaagaaatgtatggtgggtccgtccatacaaagttgggccaagctcaccttca

SEQ ID NO: 133100 - DNA, 304 bp, Glycine max
  unsure (1)..(304): unsure at all n locations
  Clone ID: PAT_MRT3847_91196C.1
tccggatccggtcgccacgcgtcggccaggggcctctcatcaggctccgctcaacaaacggccaccggcccaagtncgtataaccgcattgcccgcaccggctcgacgccgtcatcgccaccgccaagaaaccgggcgccgttagccgcttgccgctcctggccaaccgtcttcttcacattgcaggtgggcccgacaaacgtaaaccttctcgcttaagctggtcggggaggcttggttttaactgatgctaacttaccgaccttattaccgcgcgcccgaatcgtgcgtcgtttgagcggag

SEQ ID NO: 133101 - DNA, 252 bp, Glycine max
  Clone ID: PAT_MRT3847_91197C.1
aacgaagcaggctaattggaattgggtggtaaaaaatttgggggtccaattaccaacccttacttaagggagactaacgaatttgcccgccaaaattgtaagaaccgcagccgtgtaaaatacattatttttcctgtgaagggaacaagaaatgcgagtatgagttctgacattactatctgttgacaatctttcggttccactcgagcatttgtgaagtgcaccgtacacgcttgaatgggacacacacta

SEQ ID NO: 133102 - DNA, 500 bp, Glycine max
  unsure (1)..(500): unsure at all n locations
  Clone ID: PAT_MRT3847_91198C.1
tttgctgtttgngaactctgcagtctgcacgcgtgctggtcggatgagtctgatgttcagtcgtttttttggtgagtcacgtgatctacagcgccacatggcccattattacagaaaacgggtcctctgttttctagagataatgtataaccagatcccatatgacagggaccaagtattgtacgagagaatgccctgcctacagaacaacggcgggtctatgtgagatgcttgtcaaccctgacccgatactaagcgaacccgaaaaaaactggttcctcctgcaataataatgcatgacgggtgaagcgaatagctctgtcggatggggtgacatccggagcgccctacgaaattcaaaccgcccgcctgggccggccgtatgcgcctatccagactaaaagcatcgacccgatgagtcagacctgaagccacaaataccgcatatcgaataggatcacgctcaccaaggatcctggtcctggaatgtccgcaatttt

SEQ ID NO: 133103 - DNA, 405 bp, Glycine max
  unsure (1)..(405): unsure at all n locations
  Clone ID: PAT_MRT3847_91199C.1
gggaacatggacgtgcgatgctgattctgggatgacaaatgctcacgaggagagagagaaaactgtgtctgaattgtggaaaatttaaccatggctattacaacaacacaagctttgacccccttgtagtatcacgtacaagtggagtagaaccacattttgcgccaatttcaccttcacaagctttgacgctactacactctactgcaatctactgctattcaagctcattcacacttaatgcaaacgaaccttatgcagcttccatgccgttaagcgcttttccgccgatgtggagtggcaggactgcacnggctaaatggggattgatgtgcccatctgtgtagcctatacttgttattctgatacgcgagccattcgatactggatgcactttatttcttc

SEQ ID NO: 133104 - DNA, 251 bp, Glycine max
  Clone ID: PAT_MRT3847_9119C.1
attaaaacccatgaacatttgaatttcccagggcattatagtcaataaagggttttattgattccaaaccttaatgattgaaattaatgccaacccaaaaagccattaaaacttattacctgggcaaagggttccttaattatttggggggggcaaaattattccaaaaaaatgggaaaaccttaattttccttaaaaggcaaatttttttaaaaaactgctcttaagggggtggggaagtttttttttgg

SEQ ID NO: 133105 - DNA, 161 bp, Glycine max
  Clone ID: PAT_MRT3847_911C.1
aaacctaatcgataaaggattggggaccaatttgggggctggtcatattcagatcaagcttttttttccttttgggatttagtccggaatagggtggggtcaaagacttgagaaaaaaatctggtcttgggaataaataggtggcactgcaatatggggcc

SEQ ID NO: 133106 - DNA, 544 bp, Glycine max
  Clone ID: PAT_MRT3847_91200C.1
ctcagggtctaggtgtaaatcaaattggactctccacaaaacatttctctaattctcatgtattattgttttttggtaatgggatgaaaaagaaaaataaaacaaaaagccaaagttacttgggaattagagtatacattacatcatttctctctttgagatgctctcatatctttgctaaaaaaatctgctctataattgccttcgtgaaaagagtgatgaagcattacttgccattcttcactcaaactgtcacggatgctttggagatagtggcatacacgtgagagggtgagaaacaatgattgatcaacataataccccagctggtcccaagccaagccatatttaagccatgtaaaagtctaagagctttaatattcacatgtaagtattatattgttcacacgtgacacgggattacttaaagtttgacagactataagattaaagactcaaccaaatcctaagagtctgcaatgatgatgaaaaaggtttttctgggcccaaccagtcaacaactagatatgttaagtcctttatt

SEQ ID NO: 133107 - DNA, 164 bp, Glycine max
  Clone ID: PAT_MRT3847_91201C.1
gttctttctattgctttgagacatcgggttctgctcttctcattatgccccatataccaagagatggaccgacatgtattgtccatcttcgtgagttgcgctggccttgacatcgatcttgaatgcgaacgatacttagctccaataggattctgaggggttca

SEQ ID NO: 133108 - DNA, 374 bp, Glycine max
  Clone ID: PAT_MRT3847_91202C.1
gaaagagaaccgagctgaagccaaaaaacaaaacagcacactccaaatcaatctaatttttatttttaaaccccaaaaaccttggactgtgcacaatccttcggggtgcgtgtaacccactcaaacacattctacattccccacttgtaacaacaaacaatactccttccaaacatctagctctcacaattgaagacccactctgcaactttctcaccaatatgacacataatcacatgaacttttcctacttgacccacctaactcttacaacactcttatattgcatctactcccttatatattaaggattgcacattaattctgaagtgaagtagaacatcgccattgtgtaccctgagcacaacacatta

SEQ ID NO: 133109 - DNA, 466 bp, Glycine max
  Clone ID: PAT_MRT3847_91203C.1
agcgtatggggcaggatcgagttgtagagatatacagatatatcttatgagttggcattaaatttgtggtaattaagtgtgagatgactatttctgtttgtgattaatcaaagtacgtccatacaaaagcaccaatttttagctctcacacagatttggatcatctaacaacatcatatattcttgttggagagagatataacaaaagaaaaaaatataattaataagccttataatcaatcagggcaagttttttagtattttaaaataagcaagtctttcactctccctctcttcaatgtggttaagttgttattcaataagatgaggtgattcaaattcctctcatttttaatatatatatatatatatatatatatatatatatatatatatctcattaatgatgaggacatcaaagatcacacccaagtcgagaaggaaatccaagactcaatacaagaca

SEQ ID NO: 133110 - DNA, 1637 bp, Glycine max
  Clone ID: PAT_MRT3847_91204C.1
aacctgtatgaaattgcctcaggactatgattagtaggattacttaagtggtgatttcgggaatctgtacgcactgatggcgatgagtcagatctgtgacatcggaactggtgtggttcacagtgagagttagcaagggactctgtgtttcgtacacgctcactctctctcccaaccctttcttttacttccacaattcttcttcttcctttggagctgcgatcctctgcttcgatggccaccgtgcaactccaatccctaacccttgttcgctcctcagcacttccttccgccaccttctcccctccgatcgccgtctccggccgccgcaactccgccgcgctgccgcgctactccggcctccggctccgacccgccgctgagaccagtttcccgactcacgccagctcgagaaccgcttctcgcggcggaggtgtcaagtgcgaggcaggagacaccgctgttgaagttgctcccgttactgatgcaaattggcaatcacttgtgattgaatccgagtctcctgtactggttgaattctgggctccatggtgtggtccctgccgtatgatccagactcgataattcgacgagcctggcactaggaatatacgtggtaaatctaaagtgctagcaaactccaatactgatgagagtccttctgactgctactaagtatgggatacgaagtatcccaactgtcattatttttcaagaatggtgagaagaatggtacagtcataggagctttgccccatccaacattgaccgaaagcattgaaaaattcttgggtgggcgtaagtgaaagcatcagctggcagtagagatatttttctccgcagcttccctctcatatacgcaatatatcaactgttttggttttttgtaacttagataaccatttttcagtctttatagctgtggatgcaaccatattttctcttctctttatacaattattatagttaacaatatgttgcgtaaattttgcatttattatagcatgttttaatggtttcctctcatctaagccaaatatctcaagtttgggtgatttgtttcttaaataaccatttatggtcctgtataattatggatcaaccatattttctgtgctgtttacataatcgtagttgttgcgtaaagttgctatctattatagtacgatttaaaattccgtttacatctttggcttcctgctccttcacctttcactgaacattgtatggggtataaggcaaattggattagattactcccctataaactttgggggtcttacggatgttaaaaaaaaaatgaggtgttgggttttgtaatattattctcaatattgtcaatttgggagttttaagaatggaaaacaacatctacaaatctttaggagatgtttgtttcaaagtatgtaaagatttccgaggatgtgagcttaggaatgtcattttcatgcttggtataagttttaaaagaacattccctggaatgcaaaatcttaatttctacatgggcagatgcaaaatcttcatgtataccttgcgtcacattctcatgataagtgtgaattttgaattcacgacaatgaaagttccttgcttgattaaaaatacacacttatcatgagaatgtgacgcaaggt

SEQ ID NO: 133111 - DNA, 173 bp, Glycine max
  Clone ID: PAT_MRT3847_91205C.1
agctcggattcggctgagctgggaagaccatgacctttcactataccctgctcctcctcaaaagccgaagcttgcccctccggtcaaaactgagtaccgggagcggtacctcaaagggaaaagccataattcaaagggggccaaagcctaaaacgcttacgcatttttttcaa

SEQ ID NO: 133112 - DNA, 571 bp, Glycine max
  Clone ID: PAT_MRT3847_91206C.1
cattatcataagcatatggtattaataccaaataaaaggtctgagaacagtgatacagagaagcagttttacagagaagataacaaaatgcgcatttagcatgcgtcgcctgtaagtatatgaatgaattattttgtagtctaggtggaacaaagatagaatgcatcagcctcattgctacaaatcttacaacatgaaccagcatttacaagaaaaaaatttctagtgagactatttgcttgcatatatcttggctttaatttattcatcacaggaagcttcttccagtaaatcaagaaaccctttgtgagcactcttttgaccagtgggtaccttgggttgacatccccaagtggatgcagcctcaaacttagtccataactccttcttcaaagtattttcgccaggacatttccccgtttgaaacgaactttcaggcaagggagtgctctttacatgtgataagttgccaacaaaatgatcttggttgcaagacttcttggcttgatcatgatcttttgaaacatatcatcttcaaacttgctgacttgttcattaagaatactgtcag

SEQ ID NO: 133113 - DNA, 210 bp, Glycine max
  Clone ID: PAT_MRT3847_91207C.1
gaaaacgcagacaatgggatccttcgtccagcttgcaccacattcaccggaagcttccaacgcactggcttcccttgcatcatagacggcagcatgcttcccctgggatgttaccaatgcttgtgaaccctatcaaggtcactagtgcaagactgccatctccatctgcgtctacaccagcctcattcaccacagtggcatctttccgcc

SEQ ID NO: 133114 - DNA, 378 bp, Glycine max
  Clone ID: PAT_MRT3847_91208C.1
gattcgctcgcagtcttcccctatttcgaaagatgttagtttgctcaatttgctgatttgattttcatccatttctcacacacactcctttcctcttcttccgtcttcacctatttcaaacagaggtgtgtgttcgcggttctcatccatcatttcactcatgccacttctcaggtttaatcactatctactgccaaaacttttagcctcccatttccatgctaacaacaatttctcctctattgctttgtcccttcattatgcaacaagttctgttttttctgcttcttattcaaccactaatctcagacatcaaactgagggtaaatacagcaactttgggaatttcaatgatgatttacggaaagtaggtcctgg

SEQ ID NO: 133115 - DNA, 814 bp, Glycine max
  Clone ID: PAT_MRT3847_91209C.1
aattccattactctctctcaaacattattgcttctctcatagaacacatatcacctgtgtctcacacctctatctggtgattacaccccgccacaacaccatcactgcctcaatgcgccatcatccctgctccaccacttactcctaccccgccacaacacctccactgctacgcctagtgccattacgtgtgcaccaccattcctgatgatctcttaaaggttgttggaggatcatcttctctgtgttagccaccatgacaagaattgagggagcacaatggccgtctcctatcagaatcgtgagcacacatgatgtcccctcttatgcatagtcattcaggtaagtgggcttagtgcggttccttattgggtctggtagttggaatgtctcctgtggtgctgctattgcaatcagtccgtcaacaaagcaatgacacctcagcacaagaacacagacgaaacagtatctccatcgtgagttccgtggttctcttttcaggcgtcaataattcaatctctatgagctcaaaaactgcaccactttcaaccatcatgatcctgtttctcccccagtggcaagcgattaacatggcatgaaaagcagccttcgtgtcttgttggttagtcccactttccattacgctggagctagcttcttgcatgaatgtgttgagtaacatcaatgcatgggaacttcacagcaatttgaattctccatctcatcaaagcccaaaacccgcgttagggaatccaatatttgatcatttttctctgctagaaaaagctttatttcctcttctgggaaattcaac

SEQ ID NO: 133116 - DNA, 390 bp, Glycine max
  Clone ID: PAT_MRT3847_9120C.1
tatggagactgcttttgaaactaaaaattatgatcttccctccagtcaggttcgaatatataaaatgttttctgcccactaagatacactatcagtaaaaatgtccggtactgtatgagaaagcttctccagaaatacttttaagagaagaaataagaagaaaaaaatgcaataaacttctttacaagataaagttagatcagttagccattatttaatttgtagatgccttctcatcttttagaaaagttatatgagagaacttctacaaatcaattaatgattaatcaatgaaaagataattttagcttatctaaatttcatttcatttttttaaaaaaaaaattgtctcttaaaagtatttctaaaaaaatttacccaaatagatga

SEQ ID NO: 133117 - DNA, 372 bp, Glycine max
  Clone ID: PAT_MRT3847_91210C.1
tcgctcacgcgtccgtccactcgtccgctgctcgtgcctctagggttatcatatctccatttccagggcctctctctcagtttccaagaatcttaatctatggtaaagtcttacccaaccgtgagcgctgattaccatgttgccgttgagaatgcgaataataagctcataggcttcatcgctgataagagattcgctcctctaatgctccgcttggcatgtcactctgctggaacttactacgtgagctctaagaccggtggtcccttctgaaccataaagcactcctcctaactcgctcacggctctaacaactgccttgacattcctgttaggcttttgtagccacttaaagctgattttactattttg

SEQ ID NO: 133118 - DNA, 707 bp, Glycine max
  Clone ID: PAT_MRT3847_91211C.1
agcaaatgaaatggggccaataataactcacaaatgaaaagcaagaacattaaagggcctaaagtaccattgagcatatcaatgtaaaggcaattgcttcctgcagtccccgaattgcttcctgcacttcccatagaacatgacactgtttttttaagcctaggagctttgaccatgaaattctcatctaaaaacaaatagaacaagtcaaaaagagttggccattgaaaaatgaaggcctgcaggctgcagcataatgatacacaaatatagatggtaagataaatccctcgaaacactctcctgcagctacatggctcaataagaaaagatccaagattgaaaccacaagaacaagaaccaatttacatcgaagtgcttaataacatcggcaagatgaagaattcatggtgaagcccttttttttttcatcctaataaacgtaaggcaatattctccatggaacaagtttacgatactcggcccatatctctctatacttctcggcgcaacgagcttcatcccttctctctctccagattaacagaataagaagataaattggatagaagtatggaattggtgaacttatcccacatggtaagctaaaggagagagcaagcatcaaatcccctaggtaattacagtgtctagcaataccccaataaccagaaagcagtagctttccaccaatgactttttggagc

SEQ ID NO: 133119 - DNA, 525 bp, Glycine max
  Clone ID: PAT_MRT3847_91212C.1
tcgagtaatttaccgtgctacatgtgtgtagtgccgccttcttggggggggggggggggggggggggggggggggggggggggggggggggggggggggggggagacctaaatgaaataggatagggtattacggataagcagataagcccggaagagtaggatgaggtatgaacccgattaggagccatgaaggcccaaaaaatggataggggttcggcttaatataacaaaaaacaaagaaacaactaactgaccagtggcctaggatgaaaaggccacttaccccgagaggataaagagggtataagggtacaaaaggtacgaaccccaaactgatatgataggctacccctagagacctaaggtaaatactaatgccgcacccacggcaaccacccatttcaggggtactaccaagggtaataaatgtccataccaaactgtccaaggtagtgttacataggcctgtacgtgttaagacaatggttataagtggcctaagtcttgtctccggctgttggag

SEQ ID NO: 133120 - DNA, 393 bp, Glycine max
  Clone ID: PAT_MRT3847_91213C.1
ggggtagagataattaaattgttgtaaatggggcgtgcattacagatgattgcaatctagttttgatccttgctgagaaaagagtgagaatatggtaggaactgaaaattaggatataaaataggaagaccaagcaccttacaaacagaagtagccctctgttaatactaaaatatggaagaaaacaggaagataactatggagattgtgcagcagaacagaatacttcatcagtttagcccacccgagcctttcaacctcactcaattcttacttttacacttttccttccccctctttaccctcatgcccacagttcaggtaccaccactcaacatgtgacaactatctgtgtgtgtacagcctttccacagttcaggtaaaattttaaat

SEQ ID NO: 133121 - DNA, 433 bp, Glycine max
  Clone ID: PAT_MRT3847_91214C.1
ggaagggttgtcgtcttcatcagcaatcacacagaaaacatgggaactcgagaacaacatcatcccaatagacactccgaacaacaccactacctgctgcaccgctaccaccacaaccaacgccgacgactcgatcttctactacgacgagagcgaacaaaacaagttccagcgcaacaagccctaggccaacaacccccactacttcaaacacataaaaatctccacactcgcactcctcaagatgatcatccacgcacactccgacaacaccatcggaatcatgtgcctcatgcgaagcaataccaacaccgacgccatcatcgtgatagacgccttctgcctcgcgagtcgaaacgccgaaactcgcgtgagtacccagaccggatgggtagggtgcgatgtgggatgtgcgcaggagaagcagacaggc

SEQ ID NO: 133122 - DNA, 230 bp, Glycine max
  Clone ID: PAT_MRT3847_91215C.1
ggaccggcatactattcgtatttgtatttgcacttcactccttgctaacaaagatcagcaacttccatgtgacaatcttgctaatcgctttccccacttattttcaatggtccttcccttccccttacaccttatttttatcattaacacgtttgtcgaaatccaaggtcgtacttctcacataaagaacttgcgcattttgtgacattcttggaaccctacgggcccgt

SEQ ID NO: 133123 - DNA, 324 bp, Glycine max
  Clone ID: PAT_MRT3847_91216C.1
aaaagggccaaaacgaaccacgccgaaaaacatgcccgacaaataccagatcatgcctaacggattccgatcatccagcgagtcccgactggggtaaccccccctcatttcctaagggtccatgggacccctcccttattccacaagggggttccccggggtccgttcgaaccccgggctgggcccctttccaaaccagttattcacccccctcatcccaacttccaagcctatatggccagatctgctccactgggaacattccccggggattcgcccaaaaacctccaatgagccgttgcacccgacccagcactttagccc

SEQ ID NO: 133124 - DNA, 250 bp, Glycine max
  Clone ID: PAT_MRT3847_91217C.1
cttcttcgttccttccccaactcaatcttcgccttcgtccacaacaactcctccttcacgatcgctgccaacgttactttccatttgtaaccttcatgctcgagacaaaaattgcgaacgcagcatctggtattgccgtccatgctgagtgcaagctacagtttctggagatcaacgcgaacaggacgtaccggtatatcgttttcaggattgaggagaaatcgcagcaagttattgtggagaagccggg

SEQ ID NO: 133125 - DNA, 516 bp, Glycine max
  Clone ID: PAT_MRT3847_91218C.1
ggggcaaaattcaaaaaggccttgttttattgcaaggaggaaacaggacaattttgcctaggaataaaaaaggaaaaaaggtgggaaaccctttttttcaaaaattcttttttaaataaatttgggaaaaacccactagtttctgaccaaagatttttggataattcacaaaatttatattggaatttttttttaatgggacttaaacctttccacaaaaaacctaacatcccccttgattatcaaccccaattggttttaccatgggttgccatttaaaaaaaaccttccaaaacctggtatccaaaaaaagggggggttttaggaaaagcaattatggggcatttttgggaagacccggacccgactgaaaatttggggcccccctttaaactaaaggtttatttgccaggggaaaaaaccctggaaattcttcggtaacaagggtaataagggagattttccattttcatcccccctgggcaacccaatcttgggaatcaaaattggtggggg

SEQ ID NO: 133126 - DNA, 707 bp, Glycine max
  unsure (1)..(707): unsure at all n locations
  Clone ID: PAT_MRT3847_91219C.1
gtggaatcaagtttttgggatgacatggaatttgctttaatagatgataaaataggaagtagggtctttatcacaaccagaaacaaggaggttccaaatttctgtaagagatctgccattgttcttcagcatgacctgcaacctttaactcttgaacaatctttgaatttgttttataaaagggcatttggatctgacttgggtggacgttgtccagatcatcttaaggacatatccgctgaaatggttaaaaagtgtggaggtttgccactggcaattgtggccattggtggtcttttatctcgcatagaaagagatgcaacctgctggaaaaagtttagtgaaaatctaagcaaagaactagaggatgatctatctcctgtgacgaaaattctgagtttcagttatcatgatttgcctgacaatctcaaaccatgcttcttgtattttggagtatatccagaagattatgaagttgaaaatgtaagattgattcgacaatgggtagctgagggattcatcaaatttgaagctgataaaactttagaggaagttgcagaacaatatttaagagagttgattcagagaagtttggttcaagtatcctcatttactggtgatggaaaacctaanatttgtcgtgttcatgatttagtacgagacatgatccttaaaattgctgtagatttaagtttttgtcattttgc

SEQ ID NO: 133127 - DNA, 290 bp, Glycine max
  unsure (1)..(290): unsure at all n locations
  Clone ID: PAT_MRT3847_9121C.1
cataattattattcacacctttagtttagatttctttccctttctcttgagtttatttggttagatgatttgcgagggtttttttgataaaaaaagtatcgaataatancactaactaattattcggaataaatatcacttatagcttccaaccatggaggatccaaataaagctccagaagcgtcttttcagaataaaatgggatgagggaagatagaattcaaacggatcgagaacaccaccaataggcaagtcaccttttgcaagcgccgaaacgttttgctaaaaa

SEQ ID NO: 133128 - DNA, 509 bp, Glycine max
  Clone ID: PAT_MRT3847_91220C.1
ttttaactgaaacttgcatttctatttaagccttctcctcacttgtgttacagtacagagacctgatttgatttctatttcttttcataacctgacagctatacaacatgctcttgggggtgtcccactaaaattactattataaggaaaaaggacaaactaatttctattttacatgagacagaattaaatcctaaaagagggttcgaattttgtacaaggtttcatggtacagcattggctttggtgcaggacaaatatgccaattgaatgaagaaaaccaaagtcagctctactgcaatagaagcatggtctatttcaacatttcttattaaattgaagaaccagatccattatcatagcattcactggatgcagatgattctcaagtgatcatcatgagaagtatccatgctgtgtctaaatttggcctttccagagtattcttctgtgaatgatcaacaaaaatatgattcatcatgccatcaacgaatcaactcataggcctt

SEQ ID NO: 133129 - DNA, 279 bp, Glycine max
  unsure (1)..(279): unsure at all n locations
  Clone ID: PAT_MRT3847_91221C.1
tctggccccttgcnnnctgtnngngcttgttggnggcttttgnngctggtggngntttcccttcnngggctgcnntgnntntgtncccncctnttcgtgnngctgttgnnnnnnngggngtgcttcttgngtggcctcctncgcctggtgnngntnnncccccngttcctcttttgnngggtgcctttgcttctgnnngnngnnnngcttnnntgcttnncttctcnnttgcntntgggnngnctcctgtggggctttccngggttggnnggtttctgt

SEQ ID NO: 133130 - DNA, 296 bp, Glycine max
  unsure (1)..(296): unsure at all n locations
  Clone ID: PAT_MRT3847_91222C.1
tcccggtcgcgagctcctagtcgcggccgccttgtttagggatgaccttttttttttttactttccaactcctcctttcttcctccatggctgcacctcgctgcctaacgtgaaattagcaattttccatctgggctttcgaattgcgcagaaaccggttttcttgctttgggcttgcttagaagagtcanaatgatgtgtgtcgcggcaaagctttgattttgctggcaaaactaagactctggctgattttcaatgcttgctttcgatgggacactgtgacgaactatgccaag

SEQ ID NO: 133131 - DNA, 390 bp, Glycine max
  Clone ID: PAT_MRT3847_91223C.1
gtcttattaaattttctttttggacagccttcattaatgacaacctagtcgggtttcaacttcataaaacttaggggctactggattctactaatgtatgaaattggccactgctctggttgacgatgacatttcccagaccataacaatgttaggggcggtacaggacaactgtctttaaataaacctgctgtacatgcacacacaatattatgggcacaggacacaagagagtgcattacttctaaaatgaaactatttatctttaatgctccttaacaaaatgattgccatatacgtgatcgatcccaattatgcattgcacagaaaaatatgctggtggtttgacttttatcaggaaagaacgccatacttcgttgcctggacaac

SEQ ID NO: 133132 - DNA, 230 bp, Glycine max
  Clone ID: PAT_MRT3847_91224C.1
ctaaaacacagcattatgtccttctctacaaatatcctgaaaaactcaatcatggctagagattcttcggattcaggtccatttagaatgcttgaggggaatgtgacgattatcaatggtggtgcgagtagtctaagcgcagctactgcaagaatcttctctaaacatggatcacatgtaatcatagctgatattcaaggcgacttaggcctctctgtcgccatacagtt

SEQ ID NO: 133133 - DNA, 361 bp, Glycine max
  Clone ID: PAT_MRT3847_91225C.1
aaaaacaaaaaaaaacagggccccctttttttttaagataataaggggatcatttcccctaaaagggcccaacatttttaattttaatttttttaaaaaaatttttctccaaataatttatccgggtggaaggactcgccccccgaaattgacctcttttactttaacccgtaatattttcattttaaatccagtcctcccccccggggggaaacgattgaacacagccccctaccctttccttaactaaacctaggggggggggggctaaaaatgttcagcaaggccctcccttagttccttacaccttaggaccccttttgttcagttccaaaatgtaatcacccggccccgtgggtcc

SEQ ID NO: 133134 - DNA, 546 bp, Glycine max
  Clone ID: PAT_MRT3847_91226C.1
ggaaaggggcatctcttattcatttatataaacactatatactctcttaattcaaaatttaaaactttacactcccttttcttttcttcaaaaccccgcatccaaattttctccaatacatggccatctagatccggaaacctgaggaattatgtaccatcaaggggggggaattagggactatcaagggggggtttatacattctggccatactatctaaatatgggagggttgggaaacataataagggatatataataggaggggtttctaatttcacattggccagcattttgacggagccccggcaggcttctcactataatatgggttcaagggagcatatatacgttcaacaacggggagacatttcaactcacttcaatggtagctggccataccatcatctactcttcgggctttatactgggcttccaagaaacatatacaaggggggtgggggattttccaagggaacatacactttaaacatacaaacaattatattaggaggcctcccaaatcttagagtggggttccctcca

SEQ ID NO: 133135 - DNA, 325 bp, Glycine max
  Clone ID: PAT_MRT3847_91227C.1
ggttctctcaccgctccttcataggggaaccctgggtgactttatccttaacaatccatcacctcaccaaatcttaccacccaaccacctcttctttcattcattgaggacgaacctatttctcaattaaacaatatgctcctataaaatggaacaccacctcatgtagaaagggctgctgatacttatcctgatgctgtgctttctccaccatgccaaactaaattaaatttatcacaaactaactctctgccgctctaaagaatacaatcttacttactacttcattaaactgaatcacacttttataccaaaacccaaattc

SEQ ID NO: 133136 - DNA, 574 bp, Glycine max
  Clone ID: PAT_MRT3847_91228C.1
tcgatctatggctaggaatgtaccagagtaccgtacaccacacgtgggccaactagcctaatggtacataagcggcgaacactgccttgtatgtttaactatacacagcgatacatgtgggcggttagctgtatagataaatacccggtgttacacagttgctcgccacggttgagaaagtaagagcgaaataaagatagtttattagggcaccaagggcacaggcaggcggcgaggtggttgtaaccccaaaaccgacgcggtttactacggttaccgttggttagtgggggccgtatacggccccaaccaagcagcatgatacaagtattaaaacccgagttaagtatgcaaccctagcggtgggggcgactccttaatatgcacagaatgcgggtgacgctattgtacggctagtgcggtaacatgccccggaatacgacaggtgggtaacaggttgaaccgaaggaagaatagctgggggcacacttaagtagctacggagcgcggatacgatagcgaggactactaagacgcgatagctcacaaagaggcaaatataggggagagagac

SEQ ID NO: 133137 - DNA, 938 bp, Glycine max
  unsure (1)..(938): unsure at all n locations
  Clone ID: PAT_MRT3847_91229C.1
ctcggaattcggctcgtggtacttggttcaggagaatcaacaaattaacactagggagataatttcaatcatcaaattgtaaccatgccaatccgttcccgtgaacctgcacagaggccaggattgttagaccgtcaaagaccactacatgcagtccttggcggaggaaagcttgctgatatattgctatggaaagacaagatatcatcggcatcaatggtagctgggttctccatcatttggttcctctttgaagtggtcgaatacaattttcttactctactatgtcacatcctcatggccattatgctcatcctattcgtatggtataatgcagctggacttatcacatggaacctgccacaaatctatgattttcaaatccccgaacccacctttagattcttgttccaaaaactcaactcgttcttgaggagattttatgacatttcaactgggaaagacctcacactattctttgtgacaattgcgggtctatggatcatgtcagccattgggaattactttaccactttgaatcttctatacatcatgttcctctgcctggtgacccttcccattatgtatgaaagatatgaatatgaggtgaattatctagcaagcaaaggaaaccaagacgtgcagagattgttcaacacattggatactaaagttctcaccaagattccaaggggacctgtgaaagaaaagaagaaatgaagtttacatatgcaatgcacgtacgaaataaaatataaggctacaattagatctatttcctgccttaagtacgtaaaagaaaataatgcttgtaaatttatttctcttaaaaaccaaagtgattgcaacaacatatttctatgaaatatttagggtgatgtaatagttcacggttcatattatttaatatatattncaactacaacgataacattcat

SEQ ID NO: 133138 - DNA, 528 bp, Glycine max
  Clone ID: PAT_MRT3847_9122C.1
ggttgtaatgtttaaaataaaaaaaaaaaaaaaaaaaaaaaaaaaaaaaaaaaaaaaaaaaaaaaaaaaaaaaaaaaaaaaaaaaaaaaaaaaaaaaaaaaaaaaaaaaaaaaaaaaaaaaaaaaaaaaaaaaaaaaaaataaaaattgggggggccctttttaaaggtccaaattttacttcccggggttgggaaggaaaaaatttttttttggggcacccaaatttaatttacgggcccgggttttaaaaaggtggggattggaaaacccttggtttaaccaaattaattccctttgaaaaaattccctttttcccaagtgggggtaaaacaaaaagggccccaccgattggcctttccaaaaatttgccaaccttaaagggaaaagggacccccccttttaggggccattaaagcggggggggggggggggtaaccccaagggtaacctttaaatttgcaaggcccttaggcccggtttttttggtttttttccttttttttttggccagtttggcggtttttcc

SEQ ID NO: 133139 - DNA, 581 bp, Glycine max
  unsure (1)..(581): unsure at all n locations
  Clone ID: PAT_MRT3847_91230C.1
tttatatgtgatgacaatggtaacaatgaaaaacaagataacagaaataaagacaaaatatgcagttgatttttacaggtaacaaaacaatatcagtgggcaaagccagcaacctctttgacaggttcctcttctcccctgttgtctccttctttcacagccaaaacaaccaaaatcaacaacaacggatagctcacagtagtgagcacccaattcacaatcaactgagccatagcggacacattatggttatcaatttgccaagccactgctgcccctgcactttgtatgcctttatagaacccagcatacctgctaagaatctcagaatcattggccagggcaccgataacccaatagaccatgctttggaacacggcatcaagcaacccaaaactgaaatacaaaacaaaaggcccagcatagcgagaaccggagtccttgaaatccaagatcaccccggggtcatgcttaatctgattcgcaagtgcaccaccccaaatagcagaagcaagaagagcaaccacaccaatccccacnnnccctctcttcctcctgctcctaaagctgaaatccatcac

SEQ ID NO: 133140 - DNA, 336 bp, Glycine max
  Clone ID: PAT_MRT3847_91231C.1
ctttcataaagcgtacagtgtcaaccttttgtgacgacaacgttgtgccatggcctcccacatatagtgcgtctcatgtagaccagatttacacagaaacaagagcccggtgctattcacgtgactactcttctgtgcgtggtgcgaccggcgagcccgtcgctctaactgtaaactacaactctgcgctctcagggttcactgaaaagcattgcaaactgtaggatgtgaagccacggtggctattatgtacgctggaacatatgtgcatgccaaggcttagactccacgagctgcaacagagaacagcgagagagagtctattgatgctacgat

SEQ ID NO: 133141 - DNA, 396 bp, Glycine max
  unsure (1)..(396): unsure at all n locations
  Clone ID: PAT_MRT3847_91232C.1
aagcaanccggctcgaggggtatgggtctggttggggtgggggaggaaattatgagtccccttaaactaagatatggtttttgtttttaggcatataatagacagcattcaatcttgttgttgtcatattatatatgatttccaaaaataaaattgcagtgtggctttcgtggtcgttctgcttcattcatgcatgcatgggggtgctacactagcctagtgtcactaggtatcatggttatagttgggctgttacatataaatattactgtgtatcatgtagaatggtgttataaaaatatcatgacatatatcttatatctacgacttcgtcaccgatcccgttaagctcggcaatgccgtccaagcctatttcttctaccgtttcatcaccaa

SEQ ID NO: 133142 - DNA, 316 bp, Glycine max
  Clone ID: PAT_MRT3847_91233C.1
agtgttctgccacaagacaacccaaaatctttccggtggcaatcttgggcaaagaatgcataatgaaaacctttttggggactttaaaaaatacaaaattcttcttgcaatatcttaacaactctacatcatcaatatctaatccttctcttagaattacagcacagtatatctcctgcccatactttaaatcaagcactccaaaagcaactacctaagcaatatctaaatgtgaaaagaagacagcatccacttctattggtgatatcttttctcctcctgagttaataatctccttgatccaacccacgagaac

SEQ ID NO: 133143 - DNA, 205 bp, Glycine max
  Clone ID: PAT_MRT3847_91234C.1
ggatattcttggcggggcaaccatcgtaggtttcgtggaggactaggaagtcttcaacgtgtgcgtgagcgaccttttttcttaactgggcaccgacaaggacgggttttttttttacccggagatgcttaatgagttgcagatgctgagggtgttcgagacccactttttgtgttacgcgtaatgtgacccatatgaacctgct

SEQ ID NO: 133144 - DNA, 271 bp, Glycine max
  Clone ID: PAT_MRT3847_91235C.1
ggaataggacaacactacatgcattgttttttatatgcattaaaatacaacaattatacaacaaaactgatattacaacccgcgtttccagaacaacatatatctgaacaacatgagatgcagccgaagcattctataccaatgcaaaaatgtgccaaagcggttggacattgggtggttatccgggtacagcaccggatgcagcacatgcaggagcagaacctgcacaaggttccaaaacagaaaggggctgacccgaaaacaaagggca

SEQ ID NO: 133145 - DNA, 1691 bp, Glycine max
  unsure (1)..(1691): unsure at all n locations
  Clone ID: PAT_MRT3847_91236C.1
ctagagtccggtttccaccgagcaaacccaaacactctcttgtgtttttttttttttatctcactccacccccttcgctcttctagctgcatgaaattccctcctatattgttaggggtttcgttcattcactcgctcactcacacacacacgcgcgcattgaacaaatgatgtgaattcgttgttgttgccgttgcaaattggatcccactctctcgcagactcacttccgttgtaactaacgttacttttccctccaaacggtccctaacagcttctaccaaacaaactcacgccgcgatgttggatctcaacctcaacgccgattccgcctccgacttgcaaatggagagctccggcagcttcaattcctccgtcgtcaatgccgccgacaccgacgactcctgctcctacggcgacgccgttgcctacaactttgccatcctcaacaacgccgccacctccgacgggcttcccctcggcgccgccggagaaccgtccgttcgcaccatccagctctttccggcggccgattcgggagcctcggcgccgctcttgcttgatttctcgtcgaaggtggatcagcacggtgctccgccggagcagaggatcactccccggcaacagcaggtgaagaagagccgaagaggaccgcggtcgcgaagctcgcaatatcgcggcgttactttctatcgcagaaccggaagatgggaatcgcacatttgggactgtgggaaacaagtgtacttgggtggatttgacaccgcgcatgttgcggcaagggcttatgatcgagctgcgatcaagttccgtggcgttgatgcggatatcaattttaacgttagcgattacgatgaagatataaagcagatgagtaacttcacgaaggaggagtttgtgcacattttgcggcgacagagcactggtttttcgaggggaagctccaaatacaggggagttactctgcataagtgcgggcgatgggaagctcgtatggggcagtttcttggtaaaaagtatatatatcttgggctattcgacagtgaattagaggctgcaagagcgtatgataaggcagctataaaatgcaatggaagggaagcagttacaaacttcgagcccagcttgtatgaaggggatgtaagttcctcccgtgccaaattgggcatggcaagtccaaggtccttatggcagggcaactcttgctccacccttctctactgcagcatcatcaggattcccttcaacaataataccatcagctgcggatactcaaattcgttttccaaacatgacattcctccactcgcattttccatcatcaatcactaactccggcaccatatcccctttcttcttcggtagctgaatgcattgctaggtagaccaaagcaattgcaaatcttcttgatttcaccatatggttgacaaactagtaggactagttacaagtagcaattgaatttgcttggttctacagcttttactatttgccattctactagttttcttcaatatatgtaaagaaatgccatgccccgatggcttcttgaactctgcttttactgatttttgagactaagcgtttactttggtatctccaacattcaatctcggtgcttttctatctagaaaatacttgaaaagatgagtttgatctttttgaaaaanaaaaaaaaaaaaaaaaaaaa

SEQ ID NO: 133146 - DNA, 336 bp, Glycine max
  Clone ID: PAT_MRT3847_91237C.1
gttatttttggtatttaggaacatttacgaacgtacttccttcatggtaatttcatgaaaaattaaaaaataaaagcaaccccaagatttgaatacataaatattactagtccttaaaatttaaaaacgatactgattttcataaaataataaattatgacacaatgcttggtggaacagttttttctacaccaaacacagctttaaacttaaagccaggccaagggtatcatgaaaactttaaattttgataagaatgacttattaataaatcctttgatgacatatcatatgcagattcttaatttcttacttggccttttttgggtgggattc

SEQ ID NO: 133147 - DNA, 191 bp, Glycine max
  Clone ID: PAT_MRT3847_91238C.1
aaaaaggaaaaaatttttaatttttcaaaaaaaatttccctccttaatatagctttgaaaataattttttaggcccccctccccccttttgtacaaaaagggatcccgttccccaaaatttggatcaccttttagttcacccctacataataatggccaacactgttttaccatggggcaaacacaaaggg

SEQ ID NO: 133148 - DNA, 222 bp, Glycine max
  Clone ID: PAT_MRT3847_91239C.1
ctgtaattggcctattattcttttgccagtgtgaaattaaattcatcgaatctgcatcataaatctctaggcagggatgtttagtctgtactcgataatgaacatggattattgttaatgtagcttagtttctcagaatcttatttgtgcttatgttctgaatttcgaactagctttatatttttatgcttgatattgtgcttaaaaaagaatcgacacttg

SEQ ID NO: 133149 - DNA, 500 bp, Glycine max
  Clone ID: PAT_MRT3847_9123C.1
ggctcgagctacaaaagctctctctgtcgctcttggcacctgaatccaagctctgggtcgcggatgtgacgcaacatcaaagatgaggctaacatactgcaggggcgcacctgcctcaacgctagttcacacaaaccaggatcacaccgagagccttctcattacgcatgacctcagcctgcccaaagactatatggatgttgaaaggacacctccaaaggaacatgcatagacgaccactgtggatagtatgcagcagatggcaaaacaattcagtgaaaggacgcgcatcaccggacatcttccactgggaagcaagggtaacatgctcaatagaacagggagctggatggctgatgcaacactcaccaaatcccttgccacgggtggatattcaatgactctacccgaactgaaactgatcaagctgaccacggacttgactgaagaagatcagctcgctgaaccgtacactcgccatacaacactctagcataggt

SEQ ID NO: 133150 - DNA, 935 bp, Glycine max
  Clone ID: PAT_MRT3847_91240C.1
acgaggattattttaagcatgcaactcatcatgatatatgagcaacctaatactataatgctagttacacttataaaaagatggtcatttcgtggatggaaagggatagatagttaattattataaggactcaatattttatatttttaattaattagtcacgcatgcatcatcatcttgtgttcattgataatataatagatataatggtacaatccaatagacatgtagaagataagaatgggacatgcaatgcatcataaattattaactggtgccatgcatgggatttcattattcaagtactttacctaggccttcataatttgcttgatgatgcttaataatattagataccatggaaagggtgaaaggttcgtgctagcgagtggtagggatcctgctctggtgaacaagggatgtgatttcctgaaagaccattacttgattccaccaaactggaggcaagatgcgaacaagggcatgatcagaagcaataatggacgctggatgcaacctgagcgaccaaagcttgaagatcaccctgaagatatgcatcaccatctcaccctactgggtctggcttcatctgatatatgaattaatatcgaagaaggagagtacatgagtgtttacagttattggacggagagaaatctatagagcttgccagggcaaattaagctgctactaagacctggattaatttatcagtgaaacataatttgtgcatggctgcatggatcctgaccaaaataatcatgtggccggataaagttataatagtcatctttattagtgtttttctccaacgccttcgcatttcacgggcatgtataagcaatgtgatgtcataaaaagttaaatagtacaattactcattttatctttacagttgtacatattaaattatatttttttagactctgcacttt

SEQ ID NO: 133151 - DNA, 156 bp, Glycine max
  unsure (1)..(156): unsure at all n locations
  Clone ID: PAT_MRT3847_91241C.1
gaccgccaacgtcacgcctcagcagacccttcacgagatatcagtctcancaaggtgcgttgggaggaattttccaggcacctgccttgtgttcggccttggccatgacagcctaatgtggccatcgttaaatattggcggccgaccggttttctt

SEQ ID NO: 133152 - DNA, 207 bp, Glycine max
  Clone ID: PAT_MRT3847_91242C.1
ttaacctcctacaatcaaaaaactgttcaagtcttttcattgaatttaccaaaagttcaccggctccacatcatcaccaatacacctctaaccctctctcttctctcctacaaaattcttaacctcaaaattttatcgtaagagaaatcttcttctcatattccatctcccattttgaccgtaactaaattggcacctttaccttcc

SEQ ID NO: 133153 - DNA, 469 bp, Glycine max
  Clone ID: PAT_MRT3847_91243C.1
tgcacagtatgaagccattgccaatgatgacaccgtgtttacatttttaactaataaagatgctccaaaatataaaatagtccgagtagatttgaaagaaccaactgcttgggctgatgttctccaagagtctgaaaaagatgtactggagtcagcatgtgctgtaaatggcaaccaactgatagtaagttacttgagtgatgtgaagtatcttctacaagtaagagacttaaaaacaggatccttgctgcatcaattaccaattgagattggcagtgtttctgaaatttctgcacgacgtgaagatagcgtggttttcattggctttacaagcttctgaactcccggcatcatctaccagtgcaacctaggaacagagattcctgatatgaagatatttcgtgaaattgttgtccctgggtttgatcggtctgaatttcatgttaaacaggatttcgtgactagtaaa

SEQ ID NO: 133154 - DNA, 361 bp, Glycine max
  Clone ID: PAT_MRT3847_91244C.1
aaacagtataatcttgattttatagaatcaagtcatgataagctcatgtttagaacatatatagacaactcgatccaatgcgcaacaacaaacaaaatctctgattggagtcgaagggtttttttataacccttacaaattaagatgtagctttcccaaaaacagttttcacttaagaggaataaacctggatgagagagttgcaccaattccagcgctcctgagcttaacgggtttgtttgaaatttaatactcagcatgataatgcccaattattacaggtttgattctaacctgattaaaggatttgccatttgacactccaatatagctaccaattatcttaggcacaattattatg

SEQ ID NO: 133155 - DNA, 159 bp, Glycine max
  unsure (1)..(159): unsure at all n locations
  Clone ID: PAT_MRT3847_91245C.1
attttgttgccaacaccaagactaaggttgttttnnctnctgctgggccttgttctttgctacaccttcaatggcctaccatttggggacctaatttttcatgaaatttatgtcccgtatcctttgctttccaaaaacatttttattgacacgcctaga

SEQ ID NO: 133156 - DNA, 220 bp, Glycine max
  unsure (1)..(220): unsure at all n locations
  Clone ID: PAT_MRT3847_91246C.1
cccacacatcctnccacacaatcaaccacactatcgatcacgcatcaacaaacccacctcgttgcatttaataagtggcttacaactatccanagtatactacaaaaaacttccataaagtgacaatttcccataaacaactctatccacatcatcgacacccatctaattcacaaactctttctccaaaaccactttcacctctacaccatttacaaca

SEQ ID NO: 133157 - DNA, 284 bp, Glycine max
  Clone ID: PAT_MRT3847_91247C.1
gggagcccatgttatcctattaattagacaaagccctttcaaatataaacttgaaaccttaaattctttcccttgataattagagtctaaaacctagaaaaccccccaatttacagtggcacaggccaccacaaggcctacctatggtcaggtgataacctcatagaacccaacctttctcatgccgagatacccttgtcccttttctaccataagaagcaaagtaacctgggaggaggaacctccatggaatataaatgtccagggcggaaaaagggcttgtt

SEQ ID NO: 133158 - DNA, 158 bp, Glycine max
  Clone ID: PAT_MRT3847_91248C.1
cggggaaaatagccgcgaagtactgaatattttttgtcagtctcttgttaaccttcaaagccaaatatcgtgtacatagtcaaacgaggcctctaacaaggaagtgtctccatctatagagctcatcctccattactttaatgtttcttggctttaac

SEQ ID NO: 133159 - DNA, 153 bp, Glycine max
  Clone ID: PAT_MRT3847_91249C.1
agcgtaccaacttttcctataaggagtcggattaaaacttggcctaatcatgggcataacttttttctgggggaaaatggtattcccttacaattccacaccacattccaacccgaaaccttaagggtgaaagccgggggggcttatgggggg

SEQ ID NO: 133160 - DNA, 526 bp, Glycine max
  Clone ID: PAT_MRT3847_9124C.1
gaagaataccccctcttttgctgcatcagaggagttgtaaattaagagcatggctgcacaagctcttgtatcatcatcttctcttaccttctcagcggaggctgcaagacaaagtcttggacccagatcactccaatctccatttggcttctcccagaaaacctccttttttttgtaaggcagctggtaccccccctgtcaagcaaggatcagaaagggcctttgggggtttgctttcaagcaaagtcttccttccttgggttggaagcccttcccggtggatttgggaatttgacctcttgggacttttcctaccctcgaaaggaacaggaggggcttttttgaccccaaaaggggctaaaaatttggggaagatatacacagggcgccttatcccaagtttggggggcaacatttgggcactaaacccccccgaatatttttgggaggggttgtgtgtttcccctcccgagaaacaacccttccctttgtgtttaaaaacgggggtgtgtgtccccccctgggg

SEQ ID NO: 133161 - DNA, 248 bp, Glycine max
  unsure (1)..(248): unsure at all n locations
  Clone ID: PAT_MRT3847_91250C.1
agcanccgcggcagcgacggcaaccctgcaacaacaacacttacgatgcgaagaatgtctctggtggccaacgaggatttccagcacattctgcgtgtgctgaacaccaacgaggatgggaagcagaagagatgttcgcaatgacctccatcaagggttttggaaggagattcgttcacattgatagcaagaaggctgatgttgacatgaacttaagggctggtgagttgactgctgctgagtggata

SEQ ID NO: 133162 - DNA, 366 bp, Glycine max
  Clone ID: PAT_MRT3847_91251C.1
atcgtgttaagatatagcaccagtgtaattttcatgtttcaaggtttaaaagcatctcaaaggcaagaattcaatttgggttattaactctcttttattggattccttgttgtcaataagatttaagaacactctaattttctttcaatcgtagaatccttaacttatttttagtgggtttcattttatgtctccattcactcaagaacccttgttttgacttgaaaatttattttgtaagggttaaacaaccttggttgtagttgatcatataagcaatttctataagaattcatttgctccaatgatattttcaagttgcttaactttaagaactaacagaaacacctgcattagagctgctca

SEQ ID NO: 133163 - DNA, 347 bp, Glycine max
  Clone ID: PAT_MRT3847_91252C.1
aaaataaaaccaaaaatcaagggcttttaaataaaaggaaaaaagggggaccccagggccaaggccaaactaaaaaccccgggccaagccccgggctaccccccccgggggggcaccaaaaaagctcctacaggggggcaccaaaaaaaaaaccgggggggaaacccacccaaccccccaccggaaaaaccccgggggaaacccacctaaagcccgcgggcgaaaaccccccttcgcccagggggacaaacacccaaaagagccgccccctaggaccctccaaagaaatgcgcaccccgaagggcaaaagcgccccccccgggaggggcccaacaaccggggggggg

SEQ ID NO: 133164 - DNA, 439 bp, Glycine max
  Clone ID: PAT_MRT3847_91253C.1
acgagctgatttctgatctttggatgaagttcagctttaatctatgtctatttttcataattccatatattattggggggcataggtgaaggtttgcatttatttacaccttactaaagttcctatggattatggcagtcttcccatcttctggtttgaatgcaaagttggaactttttcatatgtaacacgtatcacaagaaccatagtgctgaagttaagctattgaagttaatagaaaatgatcaggtcactgtgacaagaccatatttaagtttaacagcatttgcaagactaattaaggtttaattatgtccctgggctttaatttacagcgagaagggaaatgtcttctttgctcaagtcctgtgttggaaactatatttgcaaaatggttttctcatctagcaatgcacggtaaatttagccatgtaatcca

SEQ ID NO: 133165 - DNA, 205 bp, Glycine max
  Clone ID: PAT_MRT3847_91254C.1
accggttgaaaaaaacgacagaagggcactcccaaaggtaatgatgataacgacactattattggcacacgacggcgtttttgtttaaggcatcgaagatgatgttgcactatacccagttaactaaacaaaaatgctaggtattctgactaaaagcagattgtttttattaaaacggaaacaaaatgttattaagggatctaga

SEQ ID NO: 133166 - DNA, 1051 bp, Glycine max
  Clone ID: PAT_MRT3847_91255C.1
gaaaataaagtattatttttgtaatttattatttaaacatatcaactcaaaagaaacgcaaaaaatatcccaaaaattacataaggtactgttggcccaaatagtaaccaacacattggaatcaacatagacatcccaagtgttactcatacaattctgtattgattggtatggtttacagcattgaagtcttcaattgacaaagtttggcagctctttccactatgacagtagcatgatttttccaaagatcaaagtataaggcagacagaactaagaagttcgctcattccatcagtccatcttaacgatgcacataaaaacgtagcatcaccatggaagataggcaaccttaacaacaccagtatgcatagtgctcgtctttgcgatggttactaacaaggcctccacacttcaaacagatgaagctgcttccatcagagaccgcatccaacactacttgcatcctgccactttctgccagtatggaagtcccatgagcatcaggttctggactaattgagggggtggtaatgttattggcaggtggttcgatcactacaggctcagcttcagcaatggcacactcagcaaacagagaagccagttgatcaactgcagcattctcttgcagtctacttctatacacctcgcgggcacgatgcaaggaatgaaaaacagcttcatcaccacctttagtcttcattgctacaaccacagcttggagggcctgggaaggtttgccttgagtgatgagctgacgagccaatgtgagcaaatcgcgaacgacgccgttctggccggaactcgatgcctgcggctgaggctgcgatgatgatgcctctgcttccaccatttctgagtccatcatatgatctttctcttcttttctttttcttttattattattctctatttctatagcctaactataacaattattaatgtgtcatatcaaataaaaaagggttcgtttttctgacacttttcgctttaattgaatctgaatggaatttgatttttgatggtaaaatgaattatgatgaataac

SEQ ID NO: 133167 - DNA, 384 bp, Glycine max
  unsure (1)..(384): unsure at all n locations
  Clone ID: PAT_MRT3847_91256C.1
accgggacagaatggccgggtcgacccatgcgtacggccaggcgtncgaacacgtgtgagaaggactacaaaagggctggatacaaacaacagagggatgattaacattgatggattgcgattcaggttgcataaacttggtcattaagttcccgaattagatgtacaaactcttatggaagctggtgatgtaaatggtgatgggcacctacattatggaaagtttgtaaccatttctgctcatctaagaaagatgggaaatgattagcatgttcgcaaaacctttcaattttttgatcactacaaaagttaggatattgtgaacgaggagctgcttagcgacttatctgatgatcttgaccccaacagcgattaagttatcag

SEQ ID NO: 133168 - DNA, 875 bp, Glycine max
  Clone ID: PAT_MRT3847_91257C.1
aaccttcaaaaaatcagggatccttaatctaatcgaattatgcagttgctacgtatgtgacttgaagtacaagcttgagtcttgtcttgagaccatgaggtttaagagccactctgtcgccgccgctgctgcaactttcaactctcgttgtttccgtgaccacaacacaaacagaatgaatcgtcgcgcaaagctttccctcttgaacgcgttcttcagaacccgacgcccttttcaccaatccccaattgctgctccattcactccaccgacccacgtcgcgtccacctcaaagttccactctttttccaatacccctcacacccacttcgcgattcggcataatccgagaagtttcagtggtgggtccggtgtgttggaccacaccaaggaggtggacaccatcaacctcaagtttgcagaggcgagggaagagatagagatggcgttggagtccaaagacaccgtttatttcgacgaggaagccgagtgtgcacgggccgctgtcaacgaggttttgagcatgttcgaggggctgttggctaagttgccagagagggaaagaggggttttgcagaggtctatgggtctcaaaattgaacaattgaaggctgaacttgcacaattgaatgagtaagaggttgattgtgtggctagaattgttttagggtgttttattggctgtagttttgaataaatgcactagaagcctagccaagccaactcttcatgacctatatgtgaggactgactagtgagttgtgactactatggttcttttcatttaaagggttattcttttggcattcttgttatagggtttgcacttgttgtattggtttaataataagaccttcatttaaagggatgatgtt

SEQ ID NO: 133169 - DNA, 434 bp, Glycine max
  Clone ID: PAT_MRT3847_91258C.1
gtgttttggtagtgttactctaatctagagaaaaatacagtattactcatggtaaagaaatagtagttgtaaaaattaaatttataacgcgtaataataaattttaaatgagatttaaatcattcttatttcatttttattgctgttttagaatatgttttatctgaaactatttttatttctgggtttttgaatgataaaagggtctggctcatcacattttaaactgtttttcctgcttttaattaagtaaagatgaagcacacttatctattattttaactgctggctttctttttagtaaatttttcttttggcattttcatgaaggaaaaagattggttcaccacttttctgtgtagatatccacccataaaaagatatgaataattaatgtaattgatgatatgcttaataagagacaaaaataaagg

SEQ ID NO: 133170 - DNA, 226 bp, Glycine max
  Clone ID: PAT_MRT3847_91259C.1
tccaattgcaattctagtgaactccattcatttattgtcttttattttgacttgtgcacattcatcatattcacaaattccattcaaaccacatatgaattaattgatttgggtgatgagcgcgtgaaaaagaagaagaagatgatggcacggaagaataaaagggttgcgcccgaagaagcccttagggccattgggttgggttacgaactcaccaacgatctga

SEQ ID NO: 133171 - DNA, 352 bp, Glycine max
  Clone ID: PAT_MRT3847_9125C.1
gctcaatcagaagccacagagagagcaggcatcagggatgcaggagatgatgccagtaggagctaactgcacccagaatatgcatgatagagacagagctgataggagatcctgacaatgtcgataaaataatcaaataagacaaagactaatgatcaaatgtacccagaagacaattataagatgcagtagcatctataattagcgataggtagcaagagatgaaggctcaagcagacacaactcgacatagatcaagataagcagctacaagataagacctcacagagcactgaacgaacatataaaagactgcatccagaattatcagggaatcatcaaggaaaggata

SEQ ID NO: 133172 - DNA, 491 bp, Glycine max
  unsure (1)..(491): unsure at all n locations
  Clone ID: PAT_MRT3847_91260C.1
cgccgcagtccggccgattttgggcgcggggccccgccaccgtcggcctggaatctggcattcctgtataatttggtaagcaagaccagaaagcatgataattgtggattttgtctgcagccttcaaatctgaattccccatctttgtaaggttgtggcctagaggtggtcaggaaagncacctgactaccattattagcactccgacttgggaaattgagaataatactactaaaaaaaaagtcagatttttgtattttccgttttgctattctgctaaattatttgaagaaccgagacatgtactggtattatatatgtgtctccttcgatcttgtgctagattgaagtgaatggggacaattctgctcctttgtacaaattcttgaagttggggaaatggggaattcttggtgatgatattcagtggaacttttccaagtttgtgggtgataagaatggacaagtagagggtcgctattatcccacca

SEQ ID NO: 133173 - DNA, 365 bp, Glycine max
  Clone ID: PAT_MRT3847_91261C.1
aatcgcgaaaagggattaccaattttttgggcgggaaaaaaaaatccctctatggggggaaaaaaaaaggcaaggcccatttggccaagtttaattggactattccattttgcccatttgccttggagcctttcccacttaataaaaagctttccactttaaccaatctatgggggggaaaactttccagaggggccaagggccggccaacttcctgggaagggttgctgccctgggccaaattgcctaagttcattaacttggcccttatttcctaaaaggcaaattttggttcaggctacccccctttccttggggggaacaccccccccccgtttcagggaccttcttttgtaggccccaaa

SEQ ID NO: 133174 - DNA, 235 bp, Glycine max
  Clone ID: PAT_MRT3847_91262C.1
acatcccctgaagaaaaataattatttcctttgggggtcataataaaaaaaaaattttattggtcggcaaagaaacaacccaaccattgacactgcatgcaatatttgagtaatcttgaaaattcaaccaactattctgagggcttgtggtgcctccataaaatagatgagagccagcttgagggcataggtttgtatttataagatgtaccttgacagttggatattataatgt

SEQ ID NO: 133175 - DNA, 310 bp, Glycine max
  Clone ID: PAT_MRT3847_91263C.1
ctcgagctataggccaaccatggatccatatagctttaaatgcatagaagcgttgctaatagtaatggtgggtatgatgatgatgatgatgatgcaagtagtctgtgccgaagaggatataacgtgcattgatagggatagggatgcactcctccaattcaaagttgccattgtggatgactatggcttgctatcatattgcaccactgctgaatgctgtcttcaggaacggatatcgctgtaccaaccgtaccgggcaagttctaatgctcgatcttcacggtcagactaactattaattcattatgga

SEQ ID NO: 133176 - DNA, 278 bp, Glycine max
  unsure (1)..(278): unsure at all n locations
  Clone ID: PAT_MRT3847_91264C.1
agggntngcagtcantgctctgttncaccgattttgggcgngtanatcngaancanatcgttttctcttccattggnaaacatggcaactcaaatgagcaggangagaaagtttgttgcggacngagtgttctttgaccgaactgancgaggttctgacacgtgaattggncggangacggtnactccggngtcgaaggnagggttacgccgatgcgcaccgngatcatcatcagangcaccagaacccnagccgntctaggtgagaagggnaggaga

SEQ ID NO: 133177 - DNA, 620 bp, Glycine max
  Clone ID: PAT_MRT3847_91265C.1
ccacgcgtccgattgaccctgatttcactctcttttagtgatttgtgttccttgttttatgtttaggacccttatcatggtcctggtcaagcaatggggctttcattctcggttcccgagggaatcaaagtcccttccagtttggtaaatatatttaaggaacttcaccaagaccttggctgctccattccaactcatggaaatcttcaaaaatgggctgtgcaggtacaatatccgacatgtgcctgacttatgtgtagggatttgtctttttacaaagattgcaataaggggaatgtggatcctcaagcaataatcacaattgggactagcagttttcatactcaatttgatggtgttctcttgctgaatgctgttctcacaggttagactctttatttttgtgaaattataatgaagtatattgatgacttacaggtatcattttgtttatatttcactacctgcttgcttatctagtatgaatctgtccttcaccatgtttggtgttttatgcttgtattctagtggttttcttttttattggtattatacttttgagttcagtcaggaagcatcaagcaaattctcatgccaaaaaaggctgggaacaatttact

SEQ ID NO: 133178 - DNA, 567 bp, Glycine max
  Clone ID: PAT_MRT3847_91266C.1
ctttttctcattttcttatacttttgccttgtagcattggccacttaattataatttaggcatatggaactcagttttaagcaccaacttgggctagtttgtgtcatattgttcttccctgcactgtgtaactgtcaggaatatattggccctgttgatgattactggaatccaattggagcttgtgggttcggcgaatatggaaagacggtgaataatggcattgtcgcagcagtgtctgagccgctatggagggatggagctggctgtggtacatgctatcaggtatgctgcaaactgcaatgctgcgatgagaagggagtatacgtggtagtaagtgatgcacagggagacagaagaaactccagcttgaccttgagccctggagccttgtcaatattagtacacaacaaacctggatgtgcaaatcggatcaaacatgacatgggcgatattgtaatcaaaagggtgccctgtagataccctggcaacatcaagctccgtgtccaggagagcagcaaaaacccaggctactttgcagttgtcattctcgacgtaaatggaata

SEQ ID NO: 133179 - DNA, 417 bp, Glycine max
  Clone ID: PAT_MRT3847_91267C.1
gggccctacaaaaaccttgcatagaggggaaaaaaaaaaccggatatcaaaaaagctaactttagctgaaaaaaaaaaaatctttacccccctgttttttgttttttttaaaaaaatcctcccccaataagggggggccccaagaaaaaaaaattataaccagggccctccactttggaaccccccaaccgaatttacccccggaatcctatggggggaaaaacaaacggggccaatcccccgggtgggaagcccctaaaaacaaggggggaatgggtcaatttgatttggcctaacccacaaacacctacgttccggagattcccttttaaaaccaaaggggggcccccgggggcgggatcctttgccattaaaacacaccctcaaaggttcttaaagaaaagggccccaaaaggg

SEQ ID NO: 133180 - DNA, 468 bp, Glycine max
  Clone ID: PAT_MRT3847_91268C.1
gtaagctcctattatttattaaagacccggcctactaaaactcttattaaagacttgacctattaaagctcctactagactagaacaatatattcacttcaactaataaaacaaaatacaactattaagataataattgtcatgcaggattggtgtaaaaatatttatattgttaaataattaaaaaatattattcacataatttttaatataattatcataaaataataaaattacaatatataataatttataatcaaatgacaattgtaaatcttttatattgtgaaggcattttaattagcttcaaatatttgtattattcatttaaataacattagttcattctttatgaaccactaaatataaaattgcatctaggtacaaatattaaaaaaatccaaaaaattattttaacattttcatttctaatacacaattaatttgattcatatttaaaatatattt

SEQ ID NO: 133181 - DNA, 415 bp, Glycine max
  unsure (1)..(415): unsure at all n locations
  Clone ID: PAT_MRT3847_91269C.1
tatttatttttttttttttttttttttgaaaatccaaacgaagaaaataatactataccaggggcaactataacatgctgaggcacaaccatacatagcaaaatttaacatccaatacattcgnnngaattgtatataacaaaatatactattcttatatgcatttattgtgtataaatgaatttaataaattcataaacggttggttgctaaagtgggttcaagattcataaaacttaatatctgaatgtccggaaactgtacggtaactgttcctcctatattcatttccaccatattggttaggcaaagcatactcctcattgcttatatgatcagatattggtaagctctttgacctgaacattttactcttcatttaaagatttatgtggtaatgttcaaaagagcattt

SEQ ID NO: 133182 - DNA, 528 bp, Glycine max
  Clone ID: PAT_MRT3847_9126C.1
atgaaggttttggaacacataatggaagggtcaaggaaacaagagatttgcttcgcaacttcttctctgttaacaacaatcacttcttctttctttcctacgataggtgcaatggttgtaggaagaggagtcgcgcacaattacagaggtggtggtgtcgcgcatgcagtgataaggttgggtggctacgacagtggtggtggcttaggtggcagtgacatgtgcatacatgaattctgcaacgagtggcctagggtaggttttgagcgtgtgggagaagataaaatggttgggatagaggagcttctgggtctatctccaaactcccgtgacgcggctatcttcagaaatgcttcgttgagaaccaattcagcttcaacagcgggaacaccaccaccactctcagacatccacaagggctcttatggaaacatgcttagacctgttctcattgcagacctaatagctgttgtttgggccattttcttcgtcgtgattccaattggttctgtctacatttattcgtga

SEQ ID NO: 133183 - DNA, 108 bp, Glycine max
  Clone ID: PAT_MRT3847_91270C.1
gttcccagcctatcactcacttaggagctggtccctgcagtccgtccggattccggcacccacctcgtcgtgcaaacacgagggactgacaaagacaatctcacactc

SEQ ID NO: 133184 - DNA, 431 bp, Glycine max
  Clone ID: PAT_MRT3847_91271C.1
cgccacgacgtcgcgtctgtcacagatgttaccactaggctcatactctttgcttctgactataggggcgaggagatattagatacggaggtaggttacagggagacggcaggtacaagtggtaccagatttttggccagagaaataaaatatggcgcgagtagagttaaatgatttagacaatgaataaagaacctaacttggattgagctttggccttttgcacttctgaatgtaggtcattcctgatagttggctgaggtatagatgactaggcggtagccaaataattaaatatgtggatctttaatttcatcaaaataagagatgttttaattgtcaataataaatattttatttcaagaatattaaaatttaaaaatattatataatgaagaaattaaagatgcagcttttaatatcgagaaaaa

SEQ ID NO: 133185 - DNA, 353 bp, Glycine max
  unsure (1)..(353): unsure at all n locations
  Clone ID: PAT_MRT3847_91272C.1
ggctcgagtacgggctgcgagaagacgacangaagggggtgtgcaatgtttgccattttgcttattccccatctttcagnctctcggagatgttggctgtggattttcgacagggcttcagcgctagttataccattgtttatatgcgatttgtacctgtgcaattaatagatggtgatataaatcaaccatcctcgtgattattagcattctcggggaccatcaaccatgttaaatatctcacaacaatttgggtgcgtcttgcttaatcttgttgttcgcatattaatacatggatatgcttctctgagatatcaggtgacatatcaangcagctcagtatttcaaagaac

SEQ ID NO: 133186 - DNA, 796 bp, Glycine max
  Clone ID: PAT_MRT3847_91273C.1
attcatctctacttctctctctctcctctctcttcgtctaatttccccccgaaaaatccaatttttactttagggttttgaaatcccagctactgctttcgcctgatctgcgattagcgattgggtggcggcctctatttccgaggctgtgataagcttatcttgcacctgaagagtgatgtgctgagacatggcacttaaagtttctgctggtaaggctgccgagattgcaattgggtccattggtcgtggctatgatatatctactgatataaggctcaagtattgtaaaggggattccataaattcacgtttaattgagatagatgaaactgatgtaagagaggtggtactacctggtggagtttcaataccaaatgtttccaaatcaataaaatgtgataaaggggaacgcatacggttcaggtccgatgttctgtcttttcaacagatgtcagagcaattcaatcaggagttatctttgactggcaagattccctcaggtcttttcaatacaatgtttgaattttctgggagttggcaaagagatgcagcccatacaaagtcccttgctttgatggggtcttaattacactttacactgttgcattagagaagtctcagatggtcctctgtgaccacgttaaaaaagctgtaccatcatcatgggaccctcctgcattagcaaggtttattgatacctttggtacccatataattgttggtatgaaaatgggtggaaaagatgtaatatatttgaagcagcagcactcatcaactctccaacctgctgatg

SEQ ID NO: 133187 - DNA, 467 bp, Glycine max
  Clone ID: PAT_MRT3847_91274C.1
gagaaagcggggaattttcattaaaaagggggcggggaacaagccttagggcaaaaaacaggggaacaaacccccctacttattttaaaaaaaggggccggcccggaagcaaaacccaaacccccggaaagggaacccggggaacccttaccagcccttggaacacacaacctgggtttaaaggtcaaacaggaaaaacccccccaactaggggcttttaacaacaaaacccctaggacaacctttacaaaaacccccgaacggggaaaaaggcttggattggaagcccccccccgggaaaaaaaaaaaccctggggggggacaaaaaaggaaggggggctttgggttttaaagccccccctggaacaaaaattgggggcatttttcggaactttttcggaatccaaagggggaaattcctttggaacccctaaaggggaaaccggatggggggaaaccctcggggg

SEQ ID NO: 133188 - DNA, 272 bp, Glycine max
  Clone ID: PAT_MRT3847_91275C.1
ccttcatgttttcaatcatcccagttgataacatctccaagctctatctatatttgtggcaaaccctataataccttacatagacatcatcctatttaccttttccactttatctactacactcacatttcacaccaccgatcatacccgacctatgctgatacttatattcctctgactcctatatctctcatataaaacctctctcactatcaatcaatactgctttaaattattacaccctttaaactattctacacattttatccaat

SEQ ID NO: 133189 - DNA, 612 bp, Glycine max
  Clone ID: PAT_MRT3847_91276C.1
caaggttttgttttgcctgctgcagtcttcaacgcctcagttgtatttcgcagtttgcttactctgtctcaaatcatggtaaccttcaatctttccgtcgagccgaaacccttcaccaatgacgtggtgatcatctccgataaagacacccggtggggttttgggggcactctcctcaaagcttttcaactgtgtggtttccgtgcagtcttagtcggggctggtaatgagctaggaagaaaggaaattgaagaatccatggttgttattcctgtcttctccatggaccttgtatcctctccagatcacttggaggaacttgccacggtggttgatgagaagaggatgtgtcaaatgtttctgccttttctttacaagctggaactcaaagatgtgcgatatctgatgggtggaaaactgtttgagaaattttacgaggttctgactaaagtgactgatttgactggctttcgtttcggggatggagttacatatgaataccagtgtgtcgaaaagattgttcaagtgagcgctaaacacgctgcttccacgattggagtaatttctcgagtgacggaagcgatgttgcttttgtctcccgaatctgacaat

SEQ ID NO: 133190 - DNA, 1391 bp, Glycine max
  Clone ID: PAT_MRT3847_91277C.1
gtgatctctacatgacgtaattgggtctggtattatctctctcttttgagtagtgagcatggagattggtcctctcttcccccacttagcgtggtggcagcaagtcaacgcctctacttgctgccaggacgctgttttctactttctatgcgctgtttatgttcttgtctcttctttttttttgattcaattggttagaattcaagttagagtacctgagtatggttggactactcagaagatttttcatctcatgaacttcattgtcaacggagtgcgtgcagtggtgtttggattgcacaagctagtttttcttttgcatcctaaggtgttgatttcggtgctattagatcttccaggactactttttttctcaacatatacacttcttgtccttttctgggtagaaatttatcaccaggcaaggggtttaccaactgataagctcaagatagtctatatttcagtaaatgctgccatgtatcttatccaggtttgtatttggatatacctctggatagatgacaacaatgttgtgcagttcattggagagatatttattgcagttgtgtcgtttatggctgcactaggcttcttgatatacggaggaagattatttttcatgctgagacgcttcccaattgaatctaaaggaagaaggaagaaactcaatgaggttggatcggtcacaaccatctgtttcacctgttttctgataagatgcattatgggttttctgtctgcatttgattcagatgcatctcttaatgttttggatcatcctattttggacttgatttattacatgctggttgaggtcctaccttcagctttagtcctctacatcctgcgcaaattgcccccaaagagaatatcagcccaatatcatcccatccgttaactgctgttcatattggatcctaatttattaatttatctgcccattgtttattatttcaatggttcttggttagatggatacttttaagctcatcaggaaaaacagataaagaaaaaggatgcagataaagactcatggcagcagttcttatgtgagtgatactcagcagttgctacctaggaaggaaattttggattcaggttttgtacggtatacatgcaatgacaagcctcaagaacttgagttattctctgcagtttggatgatgtagtgtttcgggcacaagcttgtcaatgacgcatctacttcaacattttattttatacaaagttgagtgtctcttaatcttaaatattctgaatttgtttattagttagaaatacttcaatttgaacaaaatgaacattgtctcttgaattatatgaagggtctcgcttggaatctaataccctattcgtacaccaacaaacccatatcaaacaaataaaaa

SEQ ID NO: 133191 - DNA, 148 bp, Glycine max
  Clone ID: PAT_MRT3847_91278C.1
gacagcaaatgtagagaatgccgagttgtctgaaacacatcatagcggaacactgggcgctctagaggattcatgtttattgttggcggtcagggcaggtcacaggtcttcgaaagtgtcaacgagtgtcaattcactggccttcgtt

SEQ ID NO: 133192 - DNA, 817 bp, Glycine max
  Clone ID: PAT_MRT3847_91279C.1
ccacgccgtccgatgacatattgtgtctggtattatctctctcttgagagttgagagcatggagattggtcctctcttccccaacttagcgtggtggcagcaagtcaacgcctctacttgctgccaggacgctgttttctacttcctatgcgctgcttatgctcttgtctcttccaccgctttggtacatacatctccttctttattaactactcattcatttttggcttttttattattctgctctgtagattcaattggttagaattgaagttagagtacctgagtatggctggactacgcagaaaatttttcatctcatgaacttcattgtcaacggagttcgtgctgtggtgtttggattgcacaagctagtttttcttttgcatcctaaggtgttgatttcggtgctattagatctgccaggactactttttttctcaacatatacacttcctgtccttttctgggcagaaatttatcaccaggcaaggggtttaccaactgataagctcaagatagtctatatttcagtaaatgctgccctgtatcttatccaggtttgtatttggatatacctctggataaatgacaacagtgttgtggagttcattggagagtcatttattgcagttgtgtcttttatggctgcactaggcttcttgatatatggaggaagattatttttcatgctgaggcgcttcccaattgaatctaaaggaagaaggaagaaactcaatgaggttggatctgtcacaaccatctgtttcacgtgttttctgataagatgcattatgggttttctgtctgcatttga

SEQ ID NO: 133193 - DNA, 1779 bp, Glycine max
  Clone ID: PAT_MRT3847_9127C.1
ggtgtgtgaaattgagtgacttggttttgtagatgtctggtatcccaagtgggcgatcctacagcgatattctcttctctcctcctatgcgccttatctcatcccaagtggtcattctctttttctctatcactgctgcctgcaaacaaaagatatttatattgcattaaaaagatgaaaaaaaagggcaagagtgtgtggtccttttaagttgaacatgatggaatggctcccttcgcgtctttctcttttgggtatcacgccacacgtcttcccaaatcaggaaacactttctcatcttccctttcccagtctcacaccctaacctcatggaaggctctgtcaacgaacgtcttcattttgggaagatgggatatggatgcaatcattaccggagaagatgcaggattcgtgctccctgctgcaacgagatctactcatgccgtcactgtcataacgatgccgcgagcttgttgaagaatccctttgatcgccacgagctcgttcgccaagatgttaaacaagttgtttgttcattgtatgccatttatttgcctatttcggatacgggcacaatcagtatcgaagaaattgcagaattagagcaccatgttgccatgatctctacttatgatgtcattttcgtaccaagtcactgtgctgactgagcgacctgctttgttggggacgaacttgtctggccacgatgttcaacatgtggtctttttagtttgtgacactgagcaaccagttgctcaagtttgcacaaactgtggtgtcaaaatgggagaatatttctgcaagatctgcaaattcttcgatgatgatactgggaaaaaacagtttcattgtgatgattgtgggatttgtagacttggtggtcgtgagaattattcccactgcagtaagtgtgggtgttgctattcaactagtctgcgtgataatcatttgtgtgtggagaactccatgaggcatcattgtcccatttgttatgagtacctttttgactcattgaaagacattgctgttatgaaatgtggtcacacaatgcatagtgaatgttacctagagatgctaaagcgtgacaagtattgttgtcccatatgctccaagtcggtgatggacatgtctaaggcatggaagagaattgatgaagagattgaagcaactgtcatgcctgatgattatcggtacagaaaggtttggatactatgtaatgactgtaatgacacaactgaagtttacttccacattcttggacaaaaatgtggtcactgcagttcatataatactcgtgctatagctcctccagttctttctcaatgactagattcttgcggttttggagacagattttttagggcagaaaattaaaattatgactcaattatgcagagccttatttgattcatcatcaagattaatgatgtactgtgccctgaaacttttctagggttactcttcctccaccatttggagtaggactagtggtgttgttatgagccactaattgagttgatataaacatgtgtatattgtaatatagggtaatgtggtttagccatcatgagctgctagtaatcatgtttgctagtgacgtgttgatgttggaggttgcatggattggcttgtctttgccattattgaatttaatcaacacaacagactcaatgatttcttccctgcataaatcaatcatatgctattacctttatagtgattgaaaaaaaaaaaaaaattcctgcggctgcgaattcttccctcgtgccgaattcttgg

SEQ ID NO: 133194 - DNA, 407 bp, Glycine max
  Clone ID: PAT_MRT3847_91280C.1
cttgagggtctagccatgtgtgatagtggtgaaattgctatcgctatctctcttaggaatgatgccccatatgttttaagttttgttaaagtcatagaggtttctgacaccaaacttttccgtataaagttcaaagaaggtttactgcttttccccggtactgtgactcaagttggcattgtttactgtagtcaccggcacttggatttacatgactttgtgcctaaagtctccaccttgcgagagaactgcaaactgctgattcttactaatgactcaactagttccttgattgaaattccatgtgaggacattttatatatttgttttgaacattaaaaggaaaaggcttcatctgatcaagtagaaagccaggtccaagatacccaatttgaccatacgaaaac

SEQ ID NO: 133195 - DNA, 307 bp, Glycine max
  Clone ID: PAT_MRT3847_91281C.1
tcccaattacatttaattttaccttcacctcgttaatatctatctgggccgttacacctatctacgagtaagctcaaattgtgaaagcaccattcatgatgaatcatgttctatctttcatcataggaattatggcaagctctattttgatccaagttaaacatttattttcctgtcttatttctttgaataaaagactgtaatgttttatatctatgctacattgtttatgattcagatcatgttgattcaatttgattcattgccattttgcacgtcctgtacttatcttgttcaatttacttac

SEQ ID NO: 133196 - DNA, 552 bp, Glycine max
  Clone ID: PAT_MRT3847_91282C.1
attgttgactcaaggttagaaggagattttgacattaactcagcttggaaagccgtagaaatagcaatggcgtgtgtttccttaaatcccagtgaaaggccaatcatgagggtaatagtgactgaactaaaggaaactttagcaaccgaattagctcgaactaaacacaacagtgctgattcaataaattcaatcgaaccggtcaccatgaatctggacactgaattcactccactggctagataaaagataagaataacaaaataatcttgtaataaataatgtgttcaaagatggagatgaactaggtaagaggtcttcctcttgtgcaattccagaatgagatcaagtcacataagaggaattgatgttacataataagaagttggtatatgctcttacttttgaacagtgatacttgtataactggtacacttgcactccgtttgaatctgtgtttgagagtggtgaatgtagtgtagtgtgcaaagttgcaaagagaataagagtaaataacaagaaatgaaaatcagtttttgtttttccttggaa

SEQ ID NO: 133197 - DNA, 285 bp, Glycine max
  Clone ID: PAT_MRT3847_91283C.1
cctgactcttgtacacatatgcacattttcgagaattaagtgcaaggtaagtgcttcaagtgactagcatgaagcgcatattacggacaaatgaacgtagacagtgctggtgaagagagtgcagatctcatcctcacggccactggacttacggtgcactcacgctatcttcgtatcaactatccattcacccattagagagcacttctgttgcactcaaagtgctatccttggaatcctgatcctgatatatataagacttggagacagagtacgactgtctat

SEQ ID NO: 133198 - DNA, 271 bp, Glycine max
  Clone ID: PAT_MRT3847_91284C.1
cctggagaggctgtgaagtacaagagctctttgcatgcattccacacaatcgtcgcaaattacggtgccaagtcaatcttcaaatcgtgctggtgaaacatattgcgtgctgttccaggtgctggtgtcgcttgatggcatatgacaacctggcagcatatcttgttcggaaagaactacggatcagggggaggtcgctaatgtgatgacgacaattcccggggataatcatgcacgattcccttgtcatttgactaaattaggatgacaa

SEQ ID NO: 133199 - DNA, 250 bp, Glycine max
  Clone ID: PAT_MRT3847_91285C.1
ggctcgagtgcatttttcaagaaacacatgatcgctttctattacacactatatacacatacagacgctgaagcttataggatgtctgcctgcacgcataaacatgggaaacatcttgaggtgattgaggcttcagcctctagacattgattgtaataactgatacgtaactttatatctatagattatgctaagaactgtaccccatcagaggcacttgttttgagcggtgagaatgatcatgacaccc

SEQ ID NO: 133200 - DNA, 387 bp, Glycine max
  Clone ID: PAT_MRT3847_91286C.1
ggggaaataacataaaacacaaatttctaaacccaagatatttgcacgttactagaaccaaaacaatgtaagaggtcacatatatgttagagaactcaaaattgggggagcaatgatacccatccccacacttaatatatgtagtgtcctcaatgcgtaaaaaaataagaaaaaaaatttataagagatttaaattaaatggcctaatttagtttactgaaataacaactgaatgaaaatgccgaaactaaaaaactaaccgactatgatcgtggttaagtcaccacggtcgtactcgacacctaaactaactgcctgggttacggacaaataaaacaaccgttgttctgatagacaatttgtcttaataatttaaaagaaaacatg

SEQ ID NO: 133201 - DNA, 449 bp, Glycine max
  Clone ID: PAT_MRT3847_91287C.1
cccacgcgtccgcttggctgctataagtgcattttggaaaaaaaaaaaaaaaaaaaaaaaaaaaaaaaaaaaaaaaaaaaaaaaaaaaaaaaaaaaaaaaaaaaaaaaaaaaaaaaaaaaaaaaaaaaaaaaaaaaaaaaaaaaaaaaaaaaaaaagaagaacaaaaaaaaaagagcccgcctttcaaaagatttcaattttagcaaactggccttaaaaagaaagtacctttacaaaaattgcgcaaaatgaaaaaaaaaaagcccgaacgataaaacagtggattaaaaaaaaaaagctttaacacaacaaatattgttgaaaaaacaacaaaaattttcgccaaatcggcaaaaacaaacaagtccctcaacactaattggccactcaaaaacgctcggttgaccccaattataaaatggaccagtcactccgtaaaggggaaaaa

SEQ ID NO: 133202 - DNA, 302 bp, Glycine max
  Clone ID: PAT_MRT3847_91288C.1
actttaaatcgctggtctagctatttgaatggtagagcctagcggttttttgcataggcatttgatgatggaatcttgcagcacgggttattttggctcacttgaggaaaaatgatgtagatggactgatgagtgctatttatgggaggggtcggagactagacaccatctctgtaacgcttagaaattttccataaaggattagttgatgtgttgaacgtgtccgacgcagagcttgtaagatggtatacttgagatttgatggctaggcccattgtctatagaagagattgactggttat

SEQ ID NO: 133203 - DNA, 433 bp, Glycine max
  Clone ID: PAT_MRT3847_91289C.1
cacgatttgcagaatctccaagagagcatcatgaagacaaagcagcatatggatgttattatttggggtacgagacatcaatttttggaagatgtgagatcacgttttactgatagttcgtcatggtcatcagttgttcggacaaggaaatcagaagcaattagacgtgcttggcctgatccaataaatcaatctgtggagtcatcaggacatgatgggtctctatttattgaagatgcaatgaataatcttgatctggaggaggggtttaggaatgaaattgtagagggattggaaattgcatccttgcagaaggacagtgaatcatttttggggtcaaatactgatcagattctgggttactatcccttcaaaaatcttcgttctgctgttgacttgctctttttacgtggaggctctgatatggtgattg

SEQ ID NO: 133204 - DNA, 1609 bp, Glycine max
  Clone ID: PAT_MRT3847_9128C.1
tccacgcgtccggttttgtagatctctggtatcccaagtgggcgatcctacagcgatattctcttctctcctcctatgcgccttatctcatcccaagtggtcattctctttttctctatcactgctgcctgcaaacaaaagatatttatattgcattaaaaagatgaaaaaaaagggcaagagtgtgagagggtgtgtggtccttttaagttgaacatgatggaatggccgtctttctcttttgggtcttcccaaatcaggaaacactttctcatcttccctttcccagtctcacacccaaacctcatggaaggctctgtcaacgaacgtcttgattttgggaagatgggatatgggtgcaatcattaccggagaagatgcaggattcgtgctccctgctgcaacgagatctactcatgccgtcactgtcataacgacgctgcgagcttgttgaagaatccctttgatcgccacgagctcgttcgccaagatgttaaacaagttgtttgttcagtttgtgacactgagcaacctgttgctcaagtttgcacaaactgtggcgtcaaaatgggagaatacttctgcaacatctgcaaattcttcgatgatgatgttgagaaagaacaatttcactgtgatgattgtgggatctgcagggttggtggtcgagataattttttccactgcaagaagtgtggatcttgttatgcaattggtctgcgtgataatcatttgtgtgtggagaactccatgcggcatcactgtcccatttgttacgagtacctttttgattcattgaaagacacttttgattcattgttatgaaatgtggtcacacaatgcaccatgaatgttacctggagatgataaaaaatgacaaatattgttgtcccatatgctccaagtcagtgattgacatgtctaagacatggaagagaattgatgaagagattgaagcaaccgtcatgcctgaagattatcgaaacaggaaggtttggatactatgtaatgactgcaatgacacaacagaagtttacttccacattcttggccaaaaatgtggtcactgcagatcatataatactcgtgcagttgcgcctccagttcttccccaatgaccagattcttgggttcaagaagggaaaactgtcagcagaaaattaaagttagcaccctgttattattatagagggctattgaattaattgagcatcaaaagtgattggtgtattgtgtcctagatagttttcttaggttattcttcctccaacatatggagtgggattgttgtctcttggttattgggctggtatgaacatctttatactgtaacagagggaaaacatttttcccggtcatgaattgctggtaatagtgatgtatttgatactgggtgattgattgcattgtcagccattgtggttctctataatttggtcgggattatttgatccttgtagtttttctcgcacattggaataaactgtgatcgttagttttgatcattctattcccagccattattttacaaaagtggaaatagtcatctttttgtggttaaattgaccattccctacagagttgaatgaattgaaacttattatttttt

SEQ ID NO: 133205 - DNA, 288 bp, Glycine max
  Clone ID: PAT_MRT3847_91290C.1
cttagatccactctatgaatggaacagtcaagatcttggactaagatatggccgtatatcgtaggcgagtgtctcttgaatttcgttattaactgtaagatcgggggacgagcgacagacactgaaaccgacacaattgatttacaaggtgactgcaagcacactgattgtccgattatcatccctgcagcgtatcacaagagagatctatcccatatgcactacgctgataggcattcatagcgattgaaccacacccagacgggtggcaccacagatatcatctta

SEQ ID NO: 133206 - DNA, 246 bp, Glycine max
  Clone ID: PAT_MRT3847_91291C.1
accctactccgaggtgaaatgccagttggagcttgcttggaagcaccaacaacttggcttgagaccattcctgaagagtgcttgagcaacaaaggaatacatctggcgaacaataagatcagactccaaaacagtaaccaacaagctacttttatgccaagacccgaatccatccaagaccattgtgtcaagaagatgcaccgactctctaatatccatactcaaaaaaatggatatgggggagaa

SEQ ID NO: 133207 - DNA, 249 bp, Glycine max
  unsure (1)..(249): unsure at all n locations
  Clone ID: PAT_MRT3847_91292C.1
ggaaggaaggagtgaacaacaaacccaaccaatacccattgcaanagggccctccacaaaattttttngggnccgnnnnggngancccacagaaacaaccccaaacgagaggcaggagggaaacacactttttcactaatacctgggcatgggggagtactagacagagcggacagggatgtgttcacgggtgcttctacatacaactttaataaaaccggtttaccacttgatggagtatgacatgaa

SEQ ID NO: 133208 - DNA, 251 bp, Glycine max
  Clone ID: PAT_MRT3847_91293C.1
ccacgcgtccttactgctgttagaacacttcataaagggaactaaattgtgaattaaattacatcaccagggcgtgcatattaacatgatgatgaatatccttctttgttttacaataataattgtctcacggcatcttcttgtgaatgttactcccaaagcatatgctactactttttcccctttcgatctttatcctcgtttatttggcaataactttctctcaaccaccatcaacaattttttcccat

SEQ ID NO: 133209 - DNA, 554 bp, Glycine max
  Clone ID: PAT_MRT3847_91294C.1
cgggtctttccctcgggtccgatttattatctaggttcttaaattcattttatttgaaaactagagttgatgaaaatatataatactacatagcctatgaaaatataatattacatagcctgtgaaaattttaaaaatcaacttgtttttgttacatagcctgtgaaaatatgatattacatagcttgtgaaacttcttattgactatgtcccaacttgtcatttcaattgttgatttgtaactgctatttattatgttctttttctccagtttgctttgatgcaagtgtgaatgtgaagacatttataagactaatacttgataagttgtaaatctgtgggtttgttggcatttcattagtgattcagtgagtctatgcatgactatgattttatcctttgcaacttaaagcattatcagtccttaaggttgtggttgttttttttttcatgataccttctcttttattgtagcctttttggttttaatgctgggaagttttctttgtccattaggtttattctgtgcttgagtgatcctgttcttgttccat

SEQ ID NO: 133210 - DNA, 403 bp, Glycine max
  Clone ID: PAT_MRT3847_91295C.1
ggttggaacctttgggctgatttatgtgcttgcatggtcgtgagaagatgatagaagggggcctcgagaccgagtctacgccgggcgcgggcgagaaagaatctataacagagaataataatataaccttacggtcgaccccgatctaatccacagcttcttcctcttctcccgtgtcttctccccctcctattttttctttaccgggctttgatgattattattataataattccgctattgttgatatgtttttcttcttgataattctccttagcgctcctccccctgatgacacctaaacctagtagaccgatcttttgcccatcaactatgacctactgtttatctacttattaattattccgtagggcgggtagaattcaccaccaaaaggtgaaac

SEQ ID NO: 133211 - DNA, 521 bp, Glycine max
  Clone ID: PAT_MRT3847_91296C.1
attgaggttgaagagggtgatcagagtgccggctattagttccaagaatgctgatatcccacccgatgagtattcgtggagaaaatatggacagaaacctatcaaaggctctccacaccctagaggttattacaagtgcaccagcgtgagaggctgccctgcacgtaaacacgtggagcgtgctgtggacgattccaacatgctcgttgtcacctacgaaggagaacataatcactcgcaaatcacttctgaggtggcaaatgttatccttgaatcttcttagcctaccttaattaagactagcgccaatgcttttagttcattcatatataggattttttaattgttatggtctttgtctcttaaaaaaataaatccccctcctctttccttgaagtagttactttaaaattcgttgaaatactttattaaaaacaggagtactattggttggtctttgtaagacttattatatagaaaatgtaaagaaattaaacagcactaaagtgttgagttgaaaa

SEQ ID NO: 133212 - DNA, 518 bp, Glycine max
  Clone ID: PAT_MRT3847_91297C.1
ctcaagctaatttagcttgccggcaccggacatcatggatctgtccaaaaccacctaccacacaaacgtccctgatcattccaccttcgcctatcgctatgatcccacctaccttgccaggtttaagatcgcggaggaatcgatccttaaagaagccacgatccacatcatacacgacgagctgatgctcgacgggaattccaggcttgacctggcatcgtaggtgacgacttgtatggaacctgtccgtgacaaagtcatcgctgctgacattgacaaaaatgacgtccacatggatgattacgctgtcaccactgaactccataaccctagcgtaacatgatacctcaccttttcaatgctccactatatgagtgacacacttgcagaggtggcggctcgtttggctcatcagagggcataatgtgggatgtactgtcattgaatacgagatggggcaatcgaaagaatctggtatggaagccttatgacaatcccaacattgtcactggtgccaa

SEQ ID NO: 133213 - DNA, 255 bp, Glycine max
  Clone ID: PAT_MRT3847_91298C.1
ctggcgcgcagaggtgatgtggacgaacgttcacaagggaaagcagagagtttctgaggaagctcttgatagggaaggtagtgagcttcataatggactacaacgtgccgtccataagtcgggacttgagaaccgtttttctcggggacaagaatgttcccatgctgattgtttctcaaggatgggttaaggtcagtgtacatgagcagcagaaaggagaagcgagtccgtacctggcagaattgttacggttgg

SEQ ID NO: 133214 - DNA, 511 bp, Glycine max
  unsure (1)..(511): unsure at all n locations
  Clone ID: PAT_MRT3847_91299C.1
tcgagggctcgagccgctcgagccggaaaaagcgttcaactcgtttgagggtggtgagtatgaccccaagcagcagcagcagcagcaggtccggtgatagaaacggcagcgttgtgatggagacgccgttgaaatgaaattgaaaaaggaatccacggtggctgacgtggacgataacgccatctttccgccggcggccctcaagatgtctacggcgaggatagggcttacggagggatcactttgttaccccttgggggagtgtttctgcttgccagtggttatacactattgtgcgagatccccatttcaaccaaaggggttggccttcacttgaagatgagagnggatgncccactacttgcgtggtcttcttcccccatcagttatttcctcaagaaactcaggtgaagaaaatgatccagcacgtacgccagtatcaagttcctttgcagaagtacatggcaatgatggatcttcaggagagaaatgaacggttattttacaaact

SEQ ID NO: 133215 - DNA, 245 bp, Glycine max
  Clone ID: PAT_MRT3847_9129C.1
gaagctaaaattattttttaaagattataaacaaacatttctacgggttgtttttaaaaaagggtaagcccctacaacttgcacatatgtttcaccatctttacataaaatccttgtttcatgttcactttctcaacaaagagaaacaacaaaatgaatcacacaagggtaaaattaagagactttttcttttctcttctctcaagcaacaaactcacaattaaccctgtgatagtatatccaaa

SEQ ID NO: 133216 - DNA, 214 bp, Glycine max
  Clone ID: PAT_MRT3847_912C.1
cacccttgaggtggagagctctgacaccattgacaatgttaaggccaagattcaggacaaagagggtatcccaccagatcaacagacggtgatctttgctgggaagcaacttgaggatggccggactcttgctgactacaacatccctcatcgagtacactcttcaccttgtactccgtcttcgtggtgggatttaaaagtctgagaacgctct

SEQ ID NO: 133217 - DNA, 228 bp, Glycine max
  Clone ID: PAT_MRT3847_91300C.1
gaaaacctaagcttagaacaggtactagccagagacagacagaggagcgtgaaatgccggagatagacagcgggagagtccattaacgaaacagctacacacattcgtgcttctgccaaggctagcatggagaagaccaaggccactgtccaagagacggcagctagaatgacagcacgtgatccggtgctttaggagttggcaacccataagaaagaggcaacgatg

SEQ ID NO: 133218 - DNA, 1503 bp, Glycine max
  Clone ID: PAT_MRT3847_91301C.1
ccacgcgtccggtgaaactcaaactcccttatctcacctcacctgtagaataattgaatagatcttcaactccattgcttcattacttcattacttcattacttcaacctctactcaaattttcaaaaccctagctaataaactaccaaatttcgagtaataataactaaaggagaagaatattttttagttttatttcatttttttcctatttttttagggagggaaactggagagcgacatggaattcgacgagcaagaggagcatgaggaggaggaggaaatggggatgccggagccggcggtggcggtggcggcgccgcagacttttgactcgcggtcgaaaatcggcggcggcgaggcgcggaagagcgcgttcggcgtggcggcggtgcggtaccgagaatgccagaagaaccacgccgtcagcttcggcggccacgccgttgacggctgctgcgagttcatggccgccggagacgacggcatgctggaaggcgtcatctgcgccgcatgcaactgccaccggaatttccaccgcaaggagatcgacggcgagatgtcctccttccaccaccgcgcgcaacctccaccgccgccgttgcaccaccaccaccaattctccccgtactaccaccaccgcgtcccgcagcaccccaccgccgccggctacatccaccaccacctcacacctccgatgtcgcagcaccgcccgctcgccctcccggccgccgcatccggcggcggcctcagccgcgaagaagaagacatgtcaaaccctagcagcagcggcggcggaggtggcggtggcggcggtggatccaaaaaacggttccgaactaagttcacgcaagaacaaaaagataagatgctcgcattcgcagaacaactagggtggagaatccagaaacacgatgaatctgctgtggaacagttctgtgctgagatcaatgtgaagcgaaacgttctcaaagtttggatgcacaataacaagagcactctcggtaagaaaccctaatttcgcagattgttgtgataatagtataattctttctctcgatctttccgttcgatgagagaaaaatgtaatttgaaatttaattgatggagatcaagctagggttcttcctttccttaatttttaatttcagcttattctagcgttgcaaagtaaggatgattaaagtgcatgattaggttaacatgtactacgattgtacattaattgcgaattaatgatcggtgattagtttgtctgtaaagagatcgagaccgaataaaggcaaggtaacgaagttaagtaaatgatagtgtttttgcattgtataatcatatgtgataatgtgatggatgcttaagattagcacataagagattaagccatttttaggtttgataagttaaattattcaacgtgtaagacatgcaaatggaaaggtgattaagcttgttttgtattcgttaattattattggtttatgtcatggtttcctgcatttactc

SEQ ID NO: 133219 - DNA, 586 bp, Glycine max
  unsure (1)..(586): unsure at all n locations
  Clone ID: PAT_MRT3847_91302C.1
ccacgcgtccgaatattactatctttgcgaccacatcaaactccctctggctgaatctctatccactagcacacatttctattgcttcttatcaacgcaaacttaatcaataccgcaaattctaccgccggtatgatcaattcaaaccttattgatcttttgcactagggacattaccaaattctgcgatctgtggagttccttgtgacatagggacaggggctgctggattccgactcattgcgaaggagatggcacttagcgcgccgaagtttagaatttgtacatattatctcgctctgaatcgatctttcgtggatctctaatggcgaaagctcaggtgctgacaaacaccaccgagtggcttggcaagctagagcatcttgaagctggccagcgccggctggaagagtgtcgtataaagaaagctgcatagcgacaccaagaacgctgcttcctctggccaagctcacagttctgatgactgcttgaataacaaacagtcttctgaagttgaaaatgtacgtgttaatgaggcacatggagttaccacgtctgatgctgtcgngggatctgttactgacac

SEQ ID NO: 133220 - DNA, 354 bp, Glycine max
  Clone ID: PAT_MRT3847_91303C.1
ctctaaacctctgcactccatgcttctctcgcatgcttcaccaccctttttcttcttcttcttctctccccaacactcacactcctttgccttctctattatttttctccccttcctcactccccaaccctaaccaatccaccttcataagcaccaaagcttccgtgagcgagagccacaatgaaacctccgacgacaccgctgccaacttatttgaccaacaactcatcctccgactcgccgcaaccgccaaagacgccgacgaggccttactaatgatcgccgacaactcctcccgaaacgacggcgtcgtttccacctccgattgctgttccattattttcgcagcactta

SEQ ID NO: 133221 - DNA, 287 bp, Glycine max
  Clone ID: PAT_MRT3847_91304C.1
tagagcgtgcggaatcggggcccccccgagctcactactagtcggcggcggtcgccctttttttttatcttaccatcttatctttactatcatcgttgttactcgcctattcatgtggggtaaaaggccacacttcattctgatccatgtacgtaccgtcacgagggcaaaaaaagtggtgcggggttttgaacgccggccctcagaaaaagcagtgggagcaccggtcctggcctcctcatggtcctggtctgtggactcaggcaagtcgaacgggagctcctcgt

SEQ ID NO: 133222 - DNA, 597 bp, Glycine max
  Clone ID: PAT_MRT3847_91305C.1
ccagtgtggatttaatcgtttgcaccggcttaaacttattaggcagtgcactcgatgcagttacttgcggagcctcctccatctgcatccaacttatcagtgctaccaaggctgatggagggaaatgaaaagctggaaaggctacaaatgggagacgaaagataacatttccaaccataggagctcacgaagaagcatacgatgctcaatttgattgggacagtgactacggaataaccggtgcattttatattaagaacttcatgcataacgagttgtacctcaagtctttaattgctcgaagacatttcaaaccatggaaccattcacttcatatgtaactcctgggtttacaatttaaaacactacaggactgatcgcattttctttgccaacaatacatattttccaagcgagacaccggctacacttgtcaagtacagagaagaagaattgaagaatgtatgaggggatggaactggtgagcgcaacgaatgggatacgatctatgattatgacgtctacaatgacttgggcgacccagatacgggtgaaaagtatgcacgccccgttcttggaggttctgccttaccttac

SEQ ID NO: 133223 - DNA, 701 bp, Glycine max
  Clone ID: PAT_MRT3847_91306C.1
caaaattatgaagtcttttgatacctctccggggagatgcttttcttctccacagcatgatgacaatttactacacaaaagcatttctgttgatgcctatacatacaccaacacagaaaaggaaattgccaccaagggcacaggaaaaagcagaagttttacacataggattcatgaccatgtaaaaatgggtcctaatctgtctgagattctgaagggtaagttgagtttgggggcaaggattatacaagaaggaggaagagggagcatcttcaagagtgtttttgggatgcaagaaaaagagcaattgttaaaggcctctcagtgttatttatataccacagctggtcctattgctggaattctctttgtctcaactgaaaaggttgcattttatagtgaaaggcccataaccttctcttctgcgacaggagagttagtcagggcaccttacaaggttttgataccaatagggagaataaaagaggtgaatgaaagccagaatgtgaacaaggcagaacagaagtacatagagatagtgactgaggatgattctgaattttggtttgtgggatttttgcggtatgagaaagctctcaagaatctcaataaagccatttccatggccaatcaattctgaaagaggaaaattattgttagcttcctagatttttagagatatacatagttttttttttttt

SEQ ID NO: 133224 - DNA, 207 bp, Glycine max
  Clone ID: PAT_MRT3847_91307C.1
ggctcgagacggatgattatgagggtgtgaaagtatggtgggtcaatagcaaagttatgtcaccaacaaggtccccaatgtcttattatccaaatcaggagaaaaggttctacaagctcacttttcacagctagcatagggactctttttctggtgcctatttggagcatggtattagggatggaaaattgatttcgtttgagaaca

SEQ ID NO: 133225 - DNA, 256 bp, Glycine max
  Clone ID: PAT_MRT3847_91308C.1
agcttatggtggtggattcagagcagccaatcaagctgtgaataaatatggtttacgttgcactttggagcatattcgtttgactggtaatttcccactgtaataaggacaagttgtcataggagtttggagtctagtgtttgatgttggattggtacaaatatgagagacaaggttggactgctatttcctcctgttatttcattccccagggggaatgtggtgttcctatatatgtatggatgtccatgtccaa

SEQ ID NO: 133226 - DNA, 445 bp, Glycine max
  Clone ID: PAT_MRT3847_91309C.1
gaccacgcgtccgcacaggcgtgcgagaacacatacgggcgatttatgattaacgaaaacgggaaattattgggtattggggacagatagtcttggttttttctcatctaataaaggtttgatgacttttagtaaaaaatagattatagaactttctaaacaaaattacaaaaaaaaacattaatcattccgaaggcttaccattcttcacatacatttataaatcatctctatatataaaaaacattattgtattgaattgaatgagcgtctttaagagctatttttttaacaaaattaaaacctttttagtaatttttctttcacgaaaacattttcataaatttatctaaccttttatctctttgaatctatcctttccatattggatttttaaattgaatctcaataattctaaaataaattttcgatagttaaaaaaata

SEQ ID NO: 133227 - DNA, 261 bp, Glycine max
  Clone ID: PAT_MRT3847_9130C.1
acgcttaattgatcaagaagtcgtggatttaactgatgctaatacttacgtgaaccttggtgatacgtgcaggtgtacatgcggtaacactagtagaagctatgatcactgcttgaacatagagcattcgctaataggcagatgcaggtactatcatcgatgttattgcacatatatacattgattcaatacattcagtataattagaatcaaatacatgcagagatgtttgataaaaaatgtgtctactgtatactatat

SEQ ID NO: 133228 - DNA, 361 bp, Glycine max
  Clone ID: PAT_MRT3847_91310C.1
gccacgcgtacggaagagcaggcctaatgtaggcgcttgacttatgaaaaattcacaatgtcttagcagctgctactggacactgtaagcaaacttgattactaaaggctaaagcatgataaaggggaggaggatgaaagggagaggaggccaataatactgttcatgtttagaaaggatcacactaagagaaggggtatacttaaaattacaagcttgagaacacttatgagaaaaagggctatgactattgatttcatgagaatgtgacatgctaaccctatgagaacattcaaggacagtgaacctcattgtcgtgaccattgtgctaggaactacttgcgcatgcacgtgaacccta

SEQ ID NO: 133229 - DNA, 487 bp, Glycine max
  Clone ID: PAT_MRT3847_91311C.1
ttacagacagcattttcttctctgcagcattcaaatcctgtcacagtgacgaaacgacacgaattgaagacaaaagagtcaaacataaatgatagatacatagatttcattcagagtttagtcaaatgcttcgttcacggcggcgctccccttacggcgcctacctctgcgccgtgatctccgccgtgctcctcctcttctccgtctccctcctctactcccgcctctcccgctcccacccccactcccaccacctcccccgtccctccctcgtttcccactccacctccgccgacatctccatcgcctcctccgacgaccccatcgacgagctcgacttcatcgacgaaaccctagatcccccctccctccgcctcaaccctcccccctaccacctcttcttcgatcccctctccgcctccctccgccgctcctttcaccaccgtcactccgacaacaacaataaatttccctttccaatccttct

SEQ ID NO: 133230 - DNA, 625 bp, Glycine max
  Clone ID: PAT_MRT3847_91312C.1
aattatctggcaacgaaaattcattttatttaattatccacaactacgaacatttattttcaatccattactttactccacatatgtcccaccaatagatgaatttaatggtattcataactgtccaagtgattttttatcatctaaaatttcaacaatcaagatttttgtctttgcttctttcgttgtgcataaactaaacaagtagtcataactcatgtgtgcacaaagacaaagacaaagacagatacccttagaagttagaacgtccaaactcattgctagcagatacagaaaaagccatcaattaaaaaatcaaaactcacttattatcaagtgaaagaatgaggagggctaggaggcagaataaataggtcaattctgcttcaaaactcgtgacaattagatattggttgtctctgctcaaatcctggctcaagtcacactatgctttggccctttctatataggagtcatgctctgtactaacaactatggcatcaccagctacaatgtgagatggtacttcaactgtaaggccattgtccagtactacctttttattcctcgaagtggctgcaatggcttccttgacattacacgttacgcgttttggaactgatgc

SEQ ID NO: 133231 - DNA, 802 bp, Glycine max
  Clone ID: PAT_MRT3847_91313C.1
acgaggttcgttcctctcacatggcatgacaccaataataacacattcccttttctctggttgttacattacaatacaaccttcagctcttgttcacgaaacacgcgctttttcacagccttcgaagtcaaagattctggctgagcagtcctaagtaagtcattgtagaagtcatggttctagagtccattttgtcgtcttcgaagtcaccatctttcaggaggcagtttgcaaagcatgaactgggcagttggtcgacactcttgaagaggcaccgcttcctcttatttgctcttgctctactaactgtcctctgtaccatttatctatattttgcagttacatttgcagccaatgactcctgctctgggttgaatggacctctgaaagattcctgtcatatggagcatgttaaggcttctgtagccaagagtaaactgaaaggtctgagacatttctgattccaattcaagttgtgctggagagtttttatcttttcctttaggagacatgaaatcgaaatatgatttttcggctcagtgttactataatatgtattatttatctatactgtttatcttagtatttgtgagccaaaatgtacaatccatgttagaaagcaatttcttgattgctcattttggggggctgctttatgatggctaatataagttcggtgagcatcctagcagcccaaatcaaatttgagtttttacaatgttgatggttaattcaaaactttagtagatttctcatttgtgaaaatacggttggttcatttttaaatatgaactttttcatg

SEQ ID NO: 133232 - DNA, 305 bp, Glycine max
  unsure (1)..(305): unsure at all n locations
  Clone ID: PAT_MRT3847_91314C.1
gcatgggcacgcgnttacgtaagncttgggattccttctagaagnncggccgnncccttttnnttttttttttttttttttntttttttttttttttttttttttttttttttttttttttttttttggaagggaagccagggaaacctcggggaaatcctttttaaaaaactggggttttttaaaaggctaaatttttccaccttgcttggccaacaggggggggaggcggagctagggtttggtctgaaaacaaaaacgacagacagaggaacagggcacgacacgacgcaacaaaacgggac

SEQ ID NO: 133233 - DNA, 321 bp, Glycine max
  Clone ID: PAT_MRT3847_91315C.1
ctgtctgattcctaaattatataaaatttgaaatactcattccgttaggggaaagagattgcctgtgtgtgagtgagtattgctggtaaaggcgacggtcctgctatccgaatcgatttgggaacgacgtcctcttgcctaggtgtgtggccacacgatcgagtctaaattataccctacgatcaggctaacacaactaccccatgctacgtggctatcacccacacagaacagctgatccatgatgcttcgaaaaaccacgaccatatgcacccaaccctcaccgattatgatgcttaacacctgattggacagcgtttt

SEQ ID NO: 133234 - DNA, 255 bp, Glycine max
  Clone ID: PAT_MRT3847_91316C.1
aaaaccccgggatacactcacatggggcaaaaaaaaaaattgggcccgtatagccaaacagcggtgatggaagcaaatcgctgaagaagaaaaatgcgcaaggcctaaaacaagttccacgaaagtgcggaaagcgaaactttagcctcggacctggccaaaaaaggccccccgaggccctgaccgagggggaatcagttcttcagagccggcccgtgggggaagaccagggacggatcattaggaaaaacaaac

SEQ ID NO: 133235 - DNA, 575 bp, Glycine max
  Clone ID: PAT_MRT3847_91317C.1
ctttattctcacgagtcaatgagtcatccttattctttgatagtgcaaccaacaactatcatgtggctgtcatcattattctttgatagtgctaatctccatttaaattcaataaaaaagtcatcttcaacttctgggaattcattcttgaggagctatagaaaacttaatcacatagttattgtctagtacatataaatcctagagccctgctttactgaatgaagctgcaaatttcatacaagacataactcattagagagtagaatcagcaattaaatcactatgggagaaagtaagtgtaggccacttggattcttgatagggctaccctttgctgttctttccttggtgttatctgtggtaggtgctgttatttggatcattgggtctatgttgagctgcttgtgcccttgttgcatctgtttctcagggcttgccaattgcgccgttggccttgtgaaacttccagtgaaagtcattcggtggtttactcatcagataccttgctgatcaactgctaatggatttccaagttttaaaattgatgtatcatgtaaacacttttttgtatt

SEQ ID NO: 133236 - DNA, 458 bp, Glycine max
  Clone ID: PAT_MRT3847_91318C.1
ctcactcgtccgaaaattccgaacccgaattcgaacaaaaatataaactcgcagcgattgtgcggatcccttggttactatttccttttttctattaaatgaaaaactttacaacctatttcaagaataagaacatattttatataatcgaaatctctgttaagaaaaatatctattttttttagtttacttgactgtcatgatgggtttattcgggagaacgaaagttgacccaaaagaacaggtccgagagcttcaacgtaagctaaggcttgaaaattcaagactcaaccgacaaattggggccatccaacgcgaggaagaaaaagtgaaacgggaaatcaaaacagcagcgaaaaagggggacagagaagtgtgcattctgttggcgaagtcaatagtcaactcgagaaagtgagcaaactccacggaacaatcgcacaaatcaattccataaa

SEQ ID NO: 133237 - DNA, 462 bp, Glycine max
  Clone ID: PAT_MRT3847_91319C.1
ggccagcaaagataattatattcatatatatgagaaaagtaccagaggtacttgagatacatataattggatggccataatctggatccaaatcagactaaaatagagtctggataggaaccataaggcttcaccctgccatgaattaaaatgctaatacaaaaagccttgtctgatattagtagaccattggttaaaaaagtactgcaaagcctttctccagatttgataaccatgtccacaaaaggaaagaagcatcatcaatcaatttgttgctgtcaaaggattcgttggtgaagatgatcttatttctcttctgccaaattgtcatagttacagccggccaccagcacttccatctattagtccttgtaccaccagccagtatggaaccatgatggagaaagtgttgccttgggtcaatcggtagagctgctgaaatattcagccaagataatgatt

SEQ ID NO: 133238 - DNA, 271 bp, Glycine max
  Clone ID: PAT_MRT3847_9131C.1
ttcgctcatttgtccgaacagactgacaaacagcagggtggcctgaattgaggccatgtccctggcatggatggtggagtgaatatagaaagagatgaccagagtgagggccacagcttgtgtaacttcattgttgcgaaggttgatgtgtggtaagatgtttgctcacaagtgtctgcacttgaatcaagtgtagagggtcgagatactggacgagctgttgaaatgactgcaaatatttaagccatggattaaatccatgaaatggctt

SEQ ID NO: 133239 - DNA, 2164 bp, Glycine max
  Clone ID: PAT_MRT3847_91320C.1
gaaacggctcgagattgtatatacggtccgcttccctcctgtccgcttaaaccgattctagggtttctgcctttcaaaaactccgtttttgtgaacaactccaccaccgatttccaattccttcgtcccaatcaaattcacgaaatgggtaagaagaaacaaaagaacccgcaacaatcctccgaaaccgacgccgtttcaaccccttccagcattttcagcaaactcttcgccaacgcgccggaacagaccaccgcaaccgccgctgcctctctattttccgatgacaatccctttcgaagaaaatccgctccactttcttactcaacaaaccgcactcaaaaccctaacaatggcgaccaccccgtgaacaccgattccagcgaggagaagaagcggaagaggaccaaagacaaaacctcagccccagcccccgacaccgtttccgtaatcgaacctttggaggaaccggggaagaagaggaaacgcgattccgacgagggaaaagaccttagtgtgggtgcagaagcgatagggaagaggaaaaggaaaagggacgaagttgagaaagagtgggaggagaagaagtatggggctgtggaggaagggattgagaataaaaccgttgggattaagaggaagacgttggatgacccagctgatatgatggtttcaaaggagggttttgataacgaggataagctcttgaggactgttttcgttgggaatttgcccctcaaggtgaaaaagaagactcttttgaaggagtttaagaagtttggtgaggttgagtctgtgaggattcgttctgtccctatacaagataccaagaaacctaggaagggagctatccttgcgaagaaaataaatgatgctgctgatagtgttcatgcgtacattgttttcaaaacagagcaatcggcacaggcttctttggcacacaacatgtccctggttgaaggaaatcacattcgtgttgatagggcatgcccaccccgcaagaaacataaaggggagagtactccactttatgatgataagagaactgtttttgtgggcaacctcccatttgatgtgaaggatgaagagctttatcaattattttgtggtatatccaacctggaatcaagtatagaagctgtcagagttgttcgagatcctcatcttaatgttggaaagggtattgcttatgtgctatttaaaacaaaggaagctgctaaatttgttgttaagaaacggaacttgaagcttcgtgaccgagagttgagactctctcatgccaaagcagatgctaccccgtctaaaaggccaaacccatcatcagctcatgctcctagtacccctgcaaaaaggccatacccattagcacatgctcctagtacccctgcaaagaagttttctgtggcttcacggtctccatcaagcagtaataacatgtcaaaatcaaacagaaaaaccaacacatcttatcagggtctacgtgcaaccaaatctgatgtgcacaagaaaatccaaggaggagaaaaaccaaaagaacgcaagacaaaaagaccttcagtagctgccagaaaggctaaagcaaacttggtcaagcagagtgatctaccaaaacaagcagggatgaaacgcaaggttgatagtcgtactccagacagcaccctacgtaataggaaagtaaaaaagaacaggtagcatgtttcttatgtaagggatttgttagctctggttagaatttggctctaatcgttgacggagaaaagaatttgtcaacactggcatggttttaaggcaatgggagattttttcaagaatgttctcagcagacttaaaggcacatttggcagcgaatggttaagaattaagaaaaatcagtggactgggatacaatttactcatttaaaaggatttaacattatcgttgctcttcattttattttaaatttgttgtgtaattttagtttatagtatgctcttattggtaagttgtaacttccactgttgggccttgttaaggcttgtagcatttcctgccttggaaaggagcattcgtcaattcttttctccttaaccttttttcttatattgtttcacactttaatatgacaatgaattcaggtgaatttaattttttcattttatcatctgaatggattggtaggcagtg

SEQ ID NO: 133240 - DNA, 555 bp, Glycine max
  Clone ID: PAT_MRT3847_91321C.1
agtctttctttttgctaagactatctcagctacctatcaaccaaagggggaccaccatgtttacaataatcgaaatcatgcctatagaatgaaatccctaaactagatgagatacgcctcgaagccagagagcgccctcaaagcaatacaaaatcacgactaagatgatcatgccaagggatgaccaaaaaacacacatcgtgaagcagagtatgagatgaaaacacacatactaaaacaccgggcataacactactacactgttttaagcctcatcgtcctgaagttcttgctcatctatatacccatagacctcgtgatcagcagttgcctcttggtagtgctggtactcacacacaaggtcattcatgtcgctatcacctccagtgaactccatttgatccataccttgattagtataccaatgtaagaaagcctttctgcggaacatagcctagacttgctcgctcacccttctgaacatttctagaataaaggtacaactgccaatgaatgtcgatgccatacataacccagtttgagggactgaacaga

SEQ ID NO: 133241 - DNA, 551 bp, Glycine max
  Clone ID: PAT_MRT3847_91322C.1
ttgcttcggatttattgcaattcaccggcataacattcttgcagcttgacaaatctcctgctccacgaaggggggttaaagtttaggtggtggacacagcttcgtcggggtacccatttgggtcagaagagaattcctaatccacaccctgaccacaaggacagactcctttaccacatctatggcattgacatctatggctccatgccccatgacggctctaacagccaacttgttgacttaaaacaacccgaccttcaaggccaccactggggaaacattgtaactgatcgtgcggcaacaaaagtcaaatgaccacccggtggttataaaatcatacggttcgggtcaggtgattagcgaggtccctttctcctgcaatgattgatggctgcaggatactctgtcaaggagaatccatactgcttatggtgtgactatatacgggtgggggtctgagtgaaccacttaacatttgattttttttgaatgaaaaatgaaacccaaaagaatcatcaaattaagagctttatgcttctccctttgttggc

SEQ ID NO: 133242 - DNA, 416 bp, Glycine max
  Clone ID: PAT_MRT3847_91323C.1
atttttcaactattttctttttctatttattttttatttattttggtatttttttctatttgattttctttctttttcttttttttttatttcttttttttttttttttattttttttttttttttttttttttattttttttttttattatttctatttttttttttttttattttttttttttttttgcctccggggggggggtcccaagggcaggggcgttgtcaacccgagctggtgactcgcgctttctaggaattccccgttggagacccacaattgccatggtctttccccatcccgatgaaatttcaaagattacccggccctgtcggcccagggttttaacccgttgaatacctcaaggtagcgcgcgtgcggcccaaaacattttagggccttacagacctgtttt

SEQ ID NO: 133243 - DNA, 542 bp, Glycine max
  Clone ID: PAT_MRT3847_91324C.1
gttttcagcagttattgaatgctatgagactctaaaggacatcatactgaagcttctgctagatgaagaagataggcaggctgtgagcagtatatgcactaaagtagaacggtgcatacgagaagaaacatttgtcaaagaattcaagatgagtggcttgccttcactcattgagaagtcggagaagttattaactctgctgcaatctgatgatggcaaactagactccaagatagccaatgccttgcaagatattgtagaaattgtcatacatgatgttatgatcaatggccatttttttctgcaaaaatctcagcaacatcatgtaaagcgaggggagcagtttgtcaacatcaacacttcttttacacacaataaatcagtgacgagaaaggttattaggcttcatttgcttttaacagtcaaggaatcagccacaaatgtgccccaaaatctagaagcccgccgccgtattacattctttgcaaactccttatttatgaatatgccaaaggctcccaaagttcgggacatgttgtccg

SEQ ID NO: 133244 - DNA, 300 bp, Glycine max
  Clone ID: PAT_MRT3847_91325C.1
acatttttcatatcccttccatccccgcccttttcgagcatttttatatatacttcattaaaaaatatcaaatatattcactcaaagtctctacaaaattatgcagctctttataatcccttactttacctttttttccttcaacacactgccaactaattcacacactattgcatacatacctccctgttttaatttatagcttaaccaccatattatcatatatttatgcttcaactataatctatactttatattatataacataagcctctttccttacatgtatatatctatact

SEQ ID NO: 133245 - DNA, 1367 bp, Glycine max
  Clone ID: PAT_MRT3847_91326C.1
gcgcgttcgcagtagctaatccggctcgcacatggcgtcactaggcaccccagcgcatgttagcagtaacaagaagcccttgcatcgttggagttggaaggcgaagcgtgtgacgtgcgcagtgtcaccccccacatggcgtgaagggcggcgcacggtgtcgttgtctcttgttctctcccacttgcttctcattcctaaccgtgatactgccctagcaagtcctttcgataagtatgttaagagaaaaaagcttgatcctctggaggtttatataccagctgtcatacttacagagtttcagatcaaggacttagaaaaaacattagaggatgaggaaccccaatttgccctctgccggtctctaacttcgttctggggcctgctgcatcacttccgtataaatatctagattatttgcactgtatttatcttacattggcagatctaacaactcaaacgatgatgtaaatgaatgtcttgttttgcttaaataactaaagtccttgcttactaatccatggttaatacaaatcgtgacttcagtcaacatgcatgcagtcactgcttgagtcgttatatgtaatcctccaagtgcctaggttgcctgatactccttcgtgggcgttcctcgtgagttccaagtggtgaatcttcattcctgcttctgctgctaacactgctaacatatgatgccaagcttctatttgcctaccgaagtagtcactttggttgttactatctccatcgaggagtgaaaaaataaagagaagattgtaaactgcttgatacagccatacttgacttcattatcaagcaaatttcaaaagactcctaaacaacacagaacaacgaactgcttcagtgattgctgttcaaagctcactccattgatgatatccatgtctaaagtgattcactttgtagtagattaattatttatgtaattatgtgtatgaaagttaattagagggtcacaatctttctataggtggtgcagtacgcatttgacagtggcaatggtaaaactgcattcaatgatgttgatgaatgcctgaggtcactggaagaacttgattccttgcttcttcatgcatcaagaaatgatcctgaagcctcagtcaaatcaatgaagacaaaaatcaattctgcccttggcgctctggacagcctcttacaaaccgtaccttcagatgtgctgagtaaaggagaggttatagctgattcatacagggaaccggaagacgaggaaacagggagtttggaccctgatttaaagcaactagaatcaatactatgaatacctaacatacttgccgtttctgagtagccacgatagttaagacttaagaccatggaacctatgt

SEQ ID NO: 133246 - DNA, 151 bp, Glycine max
  unsure (1)..(151): unsure at all n locations
  Clone ID: PAT_MRT3847_91327C.1
gtgccacgaaactaaggaaaaacgtgtagggagtggccattntgaaccttcaaaaccaacacggctaaatcttcccttgctaccgttagcgcagatgcagacatcccttagatgatgccgaacaaaagggttcagtaggtgctatatgtgc

SEQ ID NO: 133247 - DNA, 896 bp, Glycine max
  Clone ID: PAT_MRT3847_91328C.1
cctcagcctcgaggggtttcgcacctgacttgatataaagacggagagggtttctagttaggtttaagcgtcgagcctctgttctgttcatttgcatttccatttttcacactctctctgctttcaccatgtggacacttcgtcgagcttctcttcgtctcagtacgagccaaggacttaacgcgggagctacccgtgcttcggctgtcaaattagtgccaatcactgttgaagaaaatgaggctggtatccctcagtctcgtcaaatcactcacagtagatttctgtccgctgacacattttgccgcacgggtcgggtgtccctgaaatttgctgtgggcacgcgtgaactttcctcacaagctggtgctagcagcacgaaagtggatgatgatgatttggagggtgggttgtctgagctggagatacagggaagtaatgatgaatctgatgctgacctgtctgatgaagacgaggatggtggaaaaccagttgatgagatggacttatcagatgctgacccaaccaagaaaaaatcacaaggtagaaggactcaatcggaactattcaaggcaattgcaaatgctcctgggttgtctgttgattctgctctcaataagtgggttgagcatgggaaagaactaagtcggaaggagatcttgttggctgtgcgtgagcttcggagacgtaaaatgtatgggagggctttccagctctttcagtggttagagtcaaacaagaagcttgaatttatggagagtgattatgcttctcaacttgatttgattgccaagttgcgtggccttccaaaggcagagaaatacattgagagtgttccagaatcttttagaggcgagctattataccgaacattactggctaactgtgctagtcag

SEQ ID NO: 133248 - DNA, 380 bp, Glycine max
  Clone ID: PAT_MRT3847_91329C.1
atatgtaacccattttttaaacataaatatttgttgaactgaattgtctccgttaacccatggggaacctaatcctacaagcgctatggccaaaccctgttgctcacttgaccacaatctaatcgcttctactagcgaaaatgaagatgttctgcccatgaaaaatgtagaggatgctgatccgagagtgacggccacatataagctcatagacgcccttgatgatactctgaagaagctggcccacttacagtgtgatgtgaagtgcaaaactgatggtataggtctctgagccccccagttcataaataaagttgaaattatggggctcaaaccattagaatgtgcatggtgaacgataggagattgttcttcttaac

SEQ ID NO: 133249 - DNA, 317 bp, Glycine max
  Clone ID: PAT_MRT3847_9132C.1
agcaagcaaaaattggaaaaccccattaaaaccccaaagggacataattggggggaagtccaaaccttttacataaagaatcaaaaattctttttcctttgaaagaaacccggaatacaacagagaattttgggggtccaaacttaattccttttaacccaagaattggcataaaaaagttgtcccctccttccttttacggttggggaacaagtaaaagggggaaacttaaggttttttttccaaattggctggggaagaccccttacctttttgaagggggtaccccttagagctaaaaaattcgggggttcttg

SEQ ID NO: 133250 - DNA, 289 bp, Glycine max
  unsure (1)..(289): unsure at all n locations
  Clone ID: PAT_MRT3847_91330C.1
cttgtttctcaacaagnagagattgccatcaggattgatgaaaacatggatgatacattggcaaatgtagagggggcgcaaggggctttgttgaagtatctgaacaacatatcttctaataggtggctgatgatcaagattttctttatattaatattttttcttatggttttcttattttttgtggcatagtcattctaatgacagaaaaatgaaaacgaggacacacatgacgcccttattgctggtgataagcgttttgtatttcattaataatatttctttcttc

SEQ ID NO: 133251 - DNA, 518 bp, Glycine max
  Clone ID: PAT_MRT3847_91331C.1
acgagattcagcatatgtctcaaaggcccacgattcctcactcttcttccatagcctgcggccttcactctcatctcctggtctccagtgagatgaaccctagctccaattggtcccattagttacctctttcctgcatctcatatatcccattctttctcattcacacagcatcatgggcgtcaaaggttttgttgaaggaggcatcgcttccatcatcgcaggatgttccacacacccacttgatctcatcaaggtccgcatgcagctccagggtgaaaacaatttgcccaaaccggttcaaaatctccgacccgcactcgccttccaaaccggttcgaccctacacatggcgctttataagggttttattcctacgatctcaaggcagggaccgttcactgttgtgctgttcgtgactctggaacaggttcgcaagttgcttaaggatttctgatgatgacgaagatgtatgctactttcattttcaataagatgcgttttgtgtttgtcttgtg

SEQ ID NO: 133252 - DNA, 1578 bp, Glycine max
  Clone ID: PAT_MRT3847_91332C.1
taataaatttgatttgatacgtatttaacaccaatcagaagcgctgtgttatgactggtgccctccagaaaagaaggagccaaggtcccttccctataaccgcgtctttccacaactgtaatcgcgttagaaagtagattaattgctaacacacacccacggcacgttactactataaattccccttcccatccctttatttttcccccacaacacatcgttttttcagcatatgtctcaaaggcccacggttcctcactcctcttccatagcctgcggccttcactctcatctcctggtctccagtgagatgaaccctagctccaattggtccctttaatcaattacctcttaattagtaattacttaatctcaattagcctttcactctcccacacaacaacatcatgggcgtcaaaggttttgtcgaaggaggcatcgcttccatcattgcaggatgttccacacacccacttgatctcatcaaggtccgcatgcagcttcagggcgaaaacaatttgcccaaaccggttcaaaatctccgacccgcactcgccttccaaaccggttcgaccgtccacgtggcagcggctattccgcagacccgcgtgggtcccatcgcggttggggttcgcctcgtccagcaagaaggccttgcggccttgttctccggcgtctccgccactgtcctccgccagacgctctactccaccacccgtatgggcctctacgacgtcctcaagaccaagtggaccgactccgtcaccggcaccatgccgctcagccgcaagatcgaggccggtctcatcgccggtggcatcggcgccgccgtggggaaccccgccgacgtggccatggtccgaatgcaggcagacgggcgcctccctccggcacagcggcgcaactacaagtccgtcgtggacgccatcacgcgaatggcgaagcaagaaggcgtcactagcctttggagaggctcatcgcttacggtgaaccgcgccatgctcgtgacggcgtcgcagctcgcgtcgtacgaccagttcaaagaaacgatcttggagaacggcatgatgcgcgacgggctcgggacccatgtcacggcgagcttcgcggcggggttcgtggcggcggtggcgtcgaaccccgtcgacgtgatcaagacgagggtgatgaacatgagggtggagcccggggcgacgccgccctacgccggcgcgttagattgtgctctgaagactgtgcgcgcggagggtcccatggcgctttataaggggtttattcctacgatctcgaggcagggaccgttcactgtggtgctgttcgtgacactggaacaggttcgcaagttgcttaaggatttctgatgaggatgatgacgagaagatgtatgctactttccttttcaataagatgctttttctgtttgtgttatgttttaatagtactagtgatgtagttctaggatggcaattttgttattctattaatcaatgagaagtgctgtttattttccgaattagactgtggcacggcaaattgtttttaaaaaataaaaataaaagcaggttatcgatatttttc

SEQ ID NO: 133253 - DNA, 2201 bp, Glycine max
  Clone ID: PAT_MRT3847_91333C.1
tgacaaacacagattttatgtgattagtcgcggtatttaaaataaaaaatgaaagtagacaaataaaaaagagaaggagaatgtttgaagttgattgtggctgataatgaagtgggaagtttaaaacaagccttggaaggtaaatatgtggagccagggcctggtggtgacccaataagaaatccaaaagtcttgccaacaggaaagaatattcatgccctggaccctcaatctattcctacaactgcagcgatgcagagtgccaaaatagtggtagataggttgattgagaggcagaaagctgagaatgggggaaaatatcctgagacaattgcacttgtattgtggggaactgataatattaaaacatatggtgaatccctggctcaagtcttgtggatgattggtgtggaaccagtggctgatacctttggcagggtaaaccgggtggaacctgtaagtcttgaagagcttggaaggcctaggattgatgttgttgttaattgctcaggagtgtttagagaccttttcatcaatcagatgaatcttctggatagagcagtgaagatggttgctgaattagatgaaccagcagagcaaaactatgtaaaaaaaacacatcgtttattcagcatatgtctcaaaggcccacgattcctcactcttcttccatagcctgcggccttcactctcatctcctggtctccagtgagatgaaccctagctccaattggtcccattagttacctctttcctgcatctcatatatcccattctttctcattcacacagcatcatgggcgtcaaaggttttgttgaaggaggcatcgcttccatcatcgcaggatgttccacacacccacttgatctcatcaaggtccgcatgcagctccagggtgaaaacaatttgcccaaaccggttcaaaatctccgacccgcactcgccttccaaaccggttcgaccctacacgtggcagctgcagttccgccgccccgcgtgggccccatctcggttggggttcgcctcgtccagcaagagggcctcgccgccttgttctccggcgtctccgccaccgtcctccgccagacgctctactccaccacccgcatgggcctctacgacgtgctcaagaccaagtggaccgactccgtcaccggcaccatgccactcggaaaaaagatcgaggccgggctcatcgccggcggcatcggcgccgccgtgggaaaccccgccgacgtggcgatggtccgaatgcaggccgacggccgcctccctccggcgcagcggcgcaactacaagtccgttgtggacgccatcacgcgaatggcgaagcaagagggcgtcactagcctgtggagaggctcatcgcttacggtgaaccgcgccatgctcgtgacggcgtcgcagctggcttcctacgaccagttcaaagaaatgattctcgagaacggcgtgatgcgcgacggcctcgggacccacgtcacggcgagcttcgcggcggggttcgtggcggcggtggcgtccaaccccatcgacgtgatcaagaccagggtgatgaacatgagggtggagcccggggaggcgccgccgtacgccggcgcgttggattgtgctctgaagacggtgcgcgcggagggtcccatggcgctttataagggttttattcctacgatctcaaggcagggaccgttcactgttgtgctgttcgtgactctggaacaggttcgcaagttgcttaaggatttctgatgatgacgaagatgtatgctactttcattttcaataagatgcgttttgtgtttgtcttgtgctctaatactagtgatgtagttctggaatggtaattttgttattctattaatcaatgagaagcacacattattctccgaattaaacttaaaaaaaaaaaaaaaaaaaaaaaaaaaaaaaaaaaaaaaaaaaaaaaaaaaaaaaaaaaaaaaaaaaaataaaaaaaaaaaaaaaaaacttgggggggggcccggaccccaaattccccttatggggagtgaaataaccccccctaatggcccgggttttaaaaacgtgggaatgggaaaaccctgggggttcccaacttaattgccttggaaaaaaacccccttttccccggtgggggaaaaagaaaaagggcccccccggacggccttcccaacaattggcacacctgaatgggaaatgg

SEQ ID NO: 133254 - DNA, 625 bp, Glycine max
  Clone ID: PAT_MRT3847_91334C.1
gtccggattcccgggtcgacccacgcgtccgagaggctccgcatccgtgaagaacgcgatgcccccaggcctccaagaagcgccaccttctacacctacctcatcaccacgctcatcaacctccttgaatacggtggcgccggttctgagttcgccgtcaagaggcgattccgtgacgtggtggcactctcgaaacagctggcagaggcgtaccgcgggttcttcatcccggagcggctggacaagagcatgatggagagccaggtgatgcagaagcaggagttcgtggggcaacggcgcgtggcgctggagaagtacctcaggaagctggcggcgcactcggtgatcgggcggagtgaggagctcaggctgtttctcgaggccaaggggcggcttccgctggccaaaaccacttacgttgcatcacggatgctcgatggcaccgtgagactgccaaggcaactgtttagtggagaggcggagttgggagagatggctcagctggccaagggcaggagggacttgctcaagattttcaaggagttgaagtaggccccttgttgtggaggaggataaggagtttatggagaggaaggataagtttgtggattttgtgcactatctt

SEQ ID NO: 133255 - DNA, 464 bp, Glycine max
  Clone ID: PAT_MRT3847_91335C.1
cgcatactctactgtctacctactacattgacatggacccgtagatgctccggccccacatcgccaaaagtaaaacctcctggacatgaaactgtggagcttgaatgctgtaacaacagatactgtcaagccgttgtatcatagagaactattatgccggctgatatcatcatgcggacaatcttacaaaacaaggaagggaacgaactccataccatggagcatatgccagatggcactaatataaaagggaacactgactccacccatgacaagcatgacactgacatgaatattattacttaaataaaaactgtgtcaaatactcaacatccaaaccttgtctaatcgattatattcgagccttcagagacctaacccctcattagaccctgaaggtgtggaaaataaaagcctcactagagacctactctggcgcactgaatgaaaacatgattctagac

SEQ ID NO: 133256 - DNA, 274 bp, Glycine max
  Clone ID: PAT_MRT3847_91336C.1
cagttcgatcgatataagtctcattagcgttcgctccttcgtttgttgcccaggagcctttcattttctctatacccattggttaaactctcagactgttcattatcgatgctaataaaagcgtgtgctcctttgatcactggtcttcgtctggaatggctggagattcgatgtggagtagttggataagcagtcgagagttgttctcccaacgaatccggctaacgtccttccgcacgccggagtttagaccattggcgctagaaataaatag

SEQ ID NO: 133257 - DNA, 555 bp, Glycine max
  Clone ID: PAT_MRT3847_91337C.1
cttcgccgcctgttagcgctttgttgtcatatgatgatatagatgacatgtggatgcatttcgcagaccacgtactagctgtgggtgagctttgtgtagtgcctgggtaggtatttgcggattacatggagtggtttttctagatatctcacccattcatgataccgacccaagcaggtgaccaacccagacatgtacctgccccatgtttttgaggactacatgcagccgaccatcccacaggttccagtggcatttgacccccctcgacatgcagtggatgattacgaaggctatgaggcaatcccagaaaggtttaagtgtgtgctcaaccttaggatggtcactgcaggcacagagttacatgatattatgcaagattgtctcacgatcgctaggggggtgccagtgcagatggaagtgtcagggctcgacagagacaacgcacagaccattgattattgtttttatgttttgtagtcaacataattttttgtatttgttacacttttttgtttaatatagtttacttgttttgcattgtaaaaaaaaaaa

SEQ ID NO: 133258 - DNA, 463 bp, Glycine max
  Clone ID: PAT_MRT3847_91338C.1
tttttttttttttttttacaagaacatgaatatatgcttctttctcattatagttgttacagagtccctttcacacaaaaataattttgtacacaatagacaatattggcacatcacttcacatttacataattatagctagtctcacctcattttgtgaaagctttcactcattctactaccacatggttatgtgagcagatgcaaggcatagaaattagcaacgggcattttgctttgagaatggcttgatttgcccagtggataggcatggtgctttttactacatatacatatacatatatgcttcaatggactgtacagtggacctcttattttaagttaaactgtttgttcctcacctcaaaattgaatcaaaagtataataattcgacacaataattaacaattcatttccaaacattttggagtaccattaaaatacaaactttacacaccaggc

SEQ ID NO: 133259 - DNA, 334 bp, Glycine max
  Clone ID: PAT_MRT3847_91339C.1
gcacgaggttctgttctttatgtttatcattataactattggcttttaggccagacaaagatgccatttaaccattgatcttcaactatattctttatttctttacacctgtgtacttgggttgcccttggtttttctgtaccaattttctacttatcagaagcttagaagattgcagttttagagaatcatgtgaatttctttttgtgaaatttttgtttcctttccgcttataacaaattgaacttagtggagaactgcattgacattcgttattatttgtagttcagtgttgcgttaggaatgacatttaaaattgtaaataattgtttgc

SEQ ID NO: 133260 - DNA, 269 bp, Glycine max
  unsure (1)..(269): unsure at all n locations
  Clone ID: PAT_MRT3847_9133C.1
agatnnaanctcgnctccgcgnntccngaccngnagnnatttacgtgacgtttgncacngntgtacngnncncgcacntcaatcaggtncancnnnngnntngancnncanagncgctttncanacccagnntnagnnatgngnngnntntnntnnntanngcgttnacngacangggcaannnggtnntnngtnngnngangggntnttngccccagnnnnnnncgaanngnnaanttgtngaantngagnantnganntcnntannn

SEQ ID NO: 133261 - DNA, 742 bp, Glycine max
  unsure (1)..(742): unsure at all n locations
  Clone ID: PAT_MRT3847_91340C.1
tagttagtcatgttgctgtttggggatctaataatcattacatatggttgcatggtgatattggattctatacctgtctttccgaattacgggactatttatcatttggcaaggtcccctacatattggatgacaattttgcttataataattgtggcattgctacctcggtttctntgcaaagctgtttatcaaatcttntgtccttcggatatccagatagctagagaagctgataccatgagaaaacagcatggtgatttgcaatcaaggctaccagtttccaattaacttgtagaaactagagaatctcattggaatggtttccattgtatttgtccatcacattgcattcttgtggcagttggctgtacaagtgaccaggtgagtagcagcagcagattgcaccaatgtgaaaatatacttacatcctatatagtaatcaagtgtgtcgtggggaatcacatgtaaagttatcaagcaattagtcgtggttgaaatgagaaagggggcattggcgacatgattatgatccactggccttgagagttccttgtttgagagaatggttacaatacagggtaacctgatgtacaatagttctgtataaatcaggcttatattatccccatttttgaaaaagaaaagaaaagaaaggaataaattgtctcaagaaaggataaaataaaataatgtacatttccacaatccacccatagctaccctgtccagatttttagtc

SEQ ID NO: 133262 - DNA, 464 bp, Glycine max
  unsure (1)..(464): unsure at all n locations
  Clone ID: PAT_MRT3847_91341C.1
ggtaccgggcccacgtacataggctcggataagctggatatgatattcatgggtggttagaaggataaggtgtgaagagagagcaaagaataatgatggagagggagaagaacaagaggcatttggtgttgatataaggtcgctgatttgctgaaatcaagtggacacgaattcacagctctagacatggctgcatatggcatcaatcaaaagcagaagggcgagcttaattcgatcacagaatattttgagccattgatggaatttctgctgtctttggcagaagaagagcaagtaatccttgtgggtcatagctctggtcgtctatgcatatctgtagccatggaattgatccctacccagattgcagctgcagtatttgataaaactccaagaggtatatatattaaccattcttttctgctaaataatttctaactcctagtntcatcatatcatatata

SEQ ID NO: 133263 - DNA, 171 bp, Glycine max
  Clone ID: PAT_MRT3847_91342C.1
ggctcgaggcatatttgaatcttcataatatcattgctgttaaaattggtctggacagataacgagtaactggtgtgaccatgattggttgaacaagataacatgaaaaaatattccacatgtaaagatatgaagacattttgcaatgagaaaaaataatgagctttattt

SEQ ID NO: 133264 - DNA, 486 bp, Glycine max
  Clone ID: PAT_MRT3847_91343C.1
cccacgcgtccgtacggctgcgagaagacgacagaaggggttgcttgagttggaataaatttgctaagaatcaaatagctagtagtgattatgaaggaattgtgactgtttgggatgtaaccactcggaaggtaaatgtttaattcaaatggtcagtttgttcttgtatcagatctttgggtatcttcattcattaatattgttttgattgtcatgtgcttgcttaagttttctacagattatttacgcatggctatcattttaactttggcagagtttaatggaatatgaagagcatgaaaagcgtgcatggagtgtagacttttcaagaacagatccctctatgcttgtatctggtagcgatgactgtaaggtcaaaatttggtgcactaatcaggaagctagtgttctaaatatagacatgaaagcaaacatatgttgtgtcaaatataatcctggatctggcaattatattgcagttgggtc

SEQ ID NO: 133265 - DNA, 1634 bp, Glycine max
  Clone ID: PAT_MRT3847_91344C.1
gttgcttgagttggaataaatgtgctaagaatcaaatagctagtagtgattatgaaggaattgtgactgtttgggatgtaaccactcggaaggtaaatgttgaattcaaatggtcagtttgttcttgtatcagatctttgggtatcttcattcattaatattgttttgattgtcatgtgcttgcttaagttttctacagattatttacgcatggctatcattttaactttggcagagtttaatggaatatgaagagcatgaaaagcgtgcatggagtgtagacttttcaagaacagatccctctatgcttgtatctggtagcgatgacttgaagattttcagtcagtcttgacaactttcacacgctatagccgattgagagtcattgcagaactaagacatggggatttaaccatgtatattgcactttgcagcatagagtttgactgcgatgatgatttgtttgctactgctggagtttcccggcgcatcaaagtttttgacttttctgctgttgtgaatgaacctacagatgctcactgtcctgttgtggagatgtctacacgttcaaaacttagttgcttgagttggaataaatatgctaagaatcaaatagctagtagtgattatgaaggaattgtgactgtttgggatgtaaccactcgaaagagtttaatggaatatgaagagcatgaaaagcgtgcatggagtgttgatttttcaagaacagatccctctatgcttgtatctggtagcgatgactgtaaggtcaaaatttggtgtacaaatcaggaagctagtgttctaaatatagacatgaaagcaaacatatgctgtgtcaaatataatcctggatctggcaattatattgcagttggatcagcagaccatcacatccattattatgatttgagaaatatcagccgtccagtccatgttttcagtgggcacaggaaggctgtttcatatgtgaaatttctgtctaatgatgaacttgcttctgcatcaacagatagtacactgcgattatgggatgtgaaggaaaacttgccagttcgtactttcaaaggccatgcaaatgagaaaaactttgttggccttacagtaagcagtgaatatattgcgtgtggcagtgaaacaaatgaagtctttgtgtaccacaaggaaatctcgagacctttgacttgccacagatttgggtcccctgatatggatgacgctgaagatgaggctggatcgtacttcattagtgctgtatgctggaagagtgatcgccccactattctaactgcaaatagtcaaggcaccatcaaagtgctggtgcttgcagcttgaacacgagaaaaaagaatagaatgtggaattggtattatcttttcccatgctattatgattgtatcatttattaattgtacatagttttcaagtgtatatggcaggctttagggatcttaatgagatattagttgagtgcttaaacctttatcaacaaacctatttaagggactgaactttaatttttaccaattgaggacctcaaatttattaaattttgtattaataaatgctcaggagacaaaatataatatcaaatttggcatgtgataataatgataatatcagcaaacacaaaa

SEQ ID NO: 133266 - DNA, 813 bp, Glycine max
  unsure (1)..(813): unsure at all n locations
  Clone ID: PAT_MRT3847_91345C.1
tcccggngtcgacccacgcgtccgcttttttccttttgttactctcgatcttctgtttgcaaaattaaagttaattggagatttgaggggggaatcaactatgtgccaaatgacaaatttgcccaattgaagtttgtagttgtcaaattcggattgccttcacttggcatttggcacacatttatcctcatttccgctattatctttattttattttaaaaattcaaaaacactccaattctaaccttcccccaaacaccaacaaccaccctaacccttgtacccaccggcgtttgcgcatgccaacgccaccttgacccattccggtgggtgaccccattccctacaaaccaccacaccgcgacgagacgatgatgaaccaccacatttcatcgacgagccaccacacctccagcctcacttcgccaacaatgcctctatttttggttttttcttttcagatctcgttgtgatagtgtatggtggcgctatgcgtgtaggttttagttttttttttccagatctggctgcggggaagaaatggtgcaccacgttgacaacccaccgcaccacctgcctcgctttcgccaacaatggttgtttatcgtttttttgttttccagttctagaatttgcagtgttaaagatgaaataattaaacaatgttttttttgtcgagtttgcaaacagaaggggaaatactttagatttggggttcttcatgtagaggaaaagggcttggaaggattcggatgccattttcgcaatttctccttatctttagatatggaatttttttatttttttttggaa

SEQ ID NO: 133267 - DNA, 343 bp, Glycine max
  Clone ID: PAT_MRT3847_91346C.1
gaacagagacaagtgaacacttattcacatatttcactacaaacagcggactccataagtgtaaacatggattacatcctcacttttgtggcgaggcaccaacgtactgtcagtttaattcaggcgtgtggacacctacggctctaactggcctaagacatggctctgacacttgcccacgaatgatccaggagcactgatgggacccatgcgtcccaagggacagtattatcaggtgaggactatgcccggatccagggatcaatgctggtgagaaaacacatggcgggaactagctggacagtgcattatgtggaccagactggaaccagaccgagcctat

SEQ ID NO: 133268 - DNA, 784 bp, Glycine max
  unsure (1)..(784): unsure at all n locations
  Clone ID: PAT_MRT3847_91347C.1
tattatttgcagctgctatgtttgctgtagcggccattctatagtcaacaattccaatacagcattttcgggggtagtcactcgactcactcccagccatcttccttcattaactactttatttgtttcttactttgttactattgtgtgacaaattttgaccttttaatacatttaagatgaaattgacattagtgcttttatgtttttgcttccccttcccatatgacaaattgtgtacaacaagatttcaaatataaggcatgcttcaacagcatcctctgccagcaagttggatatatatgctcaagtgaatggctaattttggacattgagatttttgttgctatagccatgggtatgcgtgtgtgtgtgtgtgtattggtatgtacatggttgcattgttttaacaaattgctttgtttttatcagcaagaacctttttgggcatttgttatttcatatgtaattaatgctatcaaagnaagaagttcatatcttcccacggactattgcacatcatctatgttccacattttattcttattgctcaccattttanggtgtttgatttaatttgcatcaatgtatatttcttatttgatttttaaatgtaggatgcatcgaaataagggtcaatttacttcatcaaagaatcagggatggactaatagttgggggttcagaatcaagagtcagggcagggatgctgttcaatcaaaaaaccttgggctgcacacattgtgggaataagttcaaaaatcactcccatgatgcctaaggg

SEQ ID NO: 133269 - DNA, 743 bp, Glycine max
  unsure (1)..(743): unsure at all n locations
  Clone ID: PAT_MRT3847_91348C.1
ttacgaattcgagctttgtacccggggatcctctagagtcgacctgcagaagtgattaagatagaaggccttgttattaattgctctggcgtgaaactgaaaccttcaagttcttggattaattgccttgatattaatcgctcaccagacttgaattattaaccttttctacaacatgagtgatagtaaaacaccttgaataatttttttatattgttctgtaatagagcaagatccaaaggtgatagtggcatgcttatttattgtatagtggcctttaactcattcactataatgtttatttatttacagagtcatctccttgacaactatctagtatctagcaatcactatctcccttactcacattttatgtcagtagtacgttttattttgttgatttatttttcatctaacacactattatattagcttgcacattgggaaaaattgatcatcacaggtcttctatcaatttctttaaatacaccttttaggatctacttgagtcatgttatgagtttttttttctttccattgttagaacacctgtaaaactgaatggttggaccttcgttatccttttttttgccatatttacttcttttcaaacttggttttatcatactcagattcatatgtcaggtgccaatccaaattaattgagcactctattgacaaacttgtataaataattctagccgacaaacttctncatgcatcttgataaattaaataagtcg

SEQ ID NO: 133270 - DNA, 270 bp, Glycine max
  Clone ID: PAT_MRT3847_91349C.1
aacgtattcgggagtggtgaccttgccgcagtcatgcagccaggcagcgacatgcagcgcctcccattcgtcttcgctgggttggtagcctttgaacgccggtgtctggctggccgcggcggcctcggcgatcatcagcgtcagcaccggcacccgttggcagtggccgccggtgtaaggactcttggcatcgatggcgccggccaataactggatgaacgcgtccagcagttgtttctgccgggcttgcaggcgctggctttcgatgca

SEQ ID NO: 133271 - DNA, 244 bp, Glycine max
  Clone ID: PAT_MRT3847_9134C.1
aaaagcatttttttttttatttttttagaagcgaaacacaccataccattggctttaaagtacataattcatgagactgaaccctaacaacgattgcgcgctcatctaaccctagtaagggaggacaaaataaaagttcaaaaactaattatcataaaaggatgtgggttgtaaaccatcctatgaaagtctaatcccaacaactactatgcaaaacaattttcttttccaacatcactcctac

SEQ ID NO: 133272 - DNA, 956 bp, Glycine max
  unsure (1)..(956): unsure at all n locations
  Clone ID: PAT_MRT3847_91350C.1
cccacgcgtccgcccacgcttccgaaactattgaaggagcgtttggtcgaaaaatttctgagatttttgagaattttgaagaagtgcctgttgcatctggaagtattgcccaagtgcatcgtgcttctctaaaatatcgttaccctgggcagcaagcaaaacccctggtggttgctgtaaaagttagacatcctggtgtcggagaatctatcacaagggattttgctattatcaatttggtggcaaagtcttcaaagttcatccatgctcttaattgggtaaggttggatgaaagtgttcaacagttcgcagttttcatgatgtctcaagttgaccttgcacgggaagctgctcacttgagccgcttcatttacaattaattcggctcgaggggatgtctcttttcctaagcctgtctatccacttgtgcatcctgcagttttggtggaaacctatgaaaatggagaaagtgtatcacattatgtagatgaacttcaaggacatgaaaggattaaaagtgctcttgctcacattggtactaatgcacttttgaagatgcttctgttttgagggcaaaaatgagatttcagatatcctctgttagcagcgctacagtgctgcaaaaccatgctttcttggctgcaaaaacaactgtgacaccggcaagtgaaaaatgcactgatatacatgcttgtggccgccgatgactgctccaccatgtaccgctgcaaaagtggacaacttcattcatgcagacatgcatcctggaaatattcttgtacggaacaagcctcacaaacggcttttcaaatcaaagccacatgtaattttccttgatgtaggcatgactgctgaactctctggcagtgatcgggtaaatttattggaattttcanagctgttgcccatcgagatggtcggacagctgcagagtgcacactcaagttatcaaagca

SEQ ID NO: 133273 - DNA, 516 bp, Glycine max
  Clone ID: PAT_MRT3847_91351C.1
gcacgacaccaagaaaagcactaagttccaatataaccgcgacccatttctctcctcgttactccaagaaaaacccacaaagcaaaatcgcaacttgaatatcattagggacatggttgaaaagaacaagagatcatcatggttctccaagaggctgaagagagagtcgcagaggtggaaatacctgggcgctgcaatattcaagtggaagagcctttcttctttccctgtttccttcttcaaccacgtcgctttcaagattctctctctctttgaagccattttcctcgttctcactgcttgctttttctacctcatgtgtggatgccgcttttgaattcgcacacaagcaaccctttcgtgtaattcatttttcctcccttcttgagcctgtaatcaactttccagctgtgtgtgtatttttaatgtctataacggaaatgaagaggattgtgtcagattcatgcataatccttaaaaaccattaagcactcttctcaactcttttcaaatttt

SEQ ID NO: 133274 - DNA, 366 bp, Glycine max
  Clone ID: PAT_MRT3847_91352C.1
gaaaaagaaacacttaaaaggagaagaaaataggaaggaaaaatgcattgaatttttcccacaagctaaaattaacttgtatgataatggaatgttggtagacacaataactagaaatattgtcaccactctaaactgttttgggtacaatatattggtgaaggttgtgaaatgttagaaaaccaacccatgtgtaggaaataaggaaacttttagtgagtggtgacacatttgaactagaatttgggtattttgtatccggtccagaaaatcgttttgtttaaagacaataacaacacattaacttcgtgggattgcaaggaaaaaaatgttgggagaaattgtagttgtattggattggtaaaa

SEQ ID NO: 133275 - DNA, 229 bp, Glycine max
  Clone ID: PAT_MRT3847_91353C.1
ttcttctttttttttttttttttttttttcttgggggtttttttttttggggctatctactgctcataatacaataaataaataaaagttcttgcaataaacattggtccatgctttgaacaacaaagtaacttgctttaaaaggaaaaggccctttttatttaaccccgtaaagaattcttcttccctgaaaaagggggaaatttcggcttttttttctttttagggg

SEQ ID NO: 133276 - DNA, 286 bp, Glycine max
  unsure (1)..(286): unsure at all n locations
  Clone ID: PAT_MRT3847_91354C.1
actgattaatgaagagtacaagatatggaagaagaacagtctttcttgtatgatctggtcattacgcatgccctcgagtggccttccctcactgtggagtggttcctgaccgccatgaaccacctggcaaagactactccctccagaagtcatcttgggcaccacactttgaaaatgagccaattactatgctggcgnagtccaantcctctgatgngcnngatatgccgccatatgatgngacgcctgacntggggtttgctgtgcaatgnaggccagtcnccag

SEQ ID NO: 133277 - DNA, 1842 bp, Glycine max
  Clone ID: PAT_MRT3847_91355C.1
ctgggccatatcacactctgttagcatatggagaagaacactccattgttgacattgagaagagaagagaagcaggagaatgcaatgggggctttgtacatgtcagttatggagatactcttgttcctcttcatattcatatgctctctcacaccaatctcacagtcacagggattacatcaatctcccccttttctctttggcacttcttcttcttcgtaccagtatgaaggagcttatttgagtgatggcaaagggataagcaactgggatgtcttcactcacaaaccaggtagtatatctgacgaaagcaacggtgatgttgctgttgatcaataccaccggtatctggaggatattgatctaatggaagctataaaagtcaatagctaccggttttcaatatcatgggcaagaattctaccaaaaggaagatttggagaagtaaacttggcgggtatcaactactataacagacttatagaagcattgctactcaaagggatccaaccatttgtaacattattccactttgacatccctcaagaacttgaggacagatacggaggttggcttagtccccaatcacaggaagattttcaattatttgcagatatctgttttaaatccttcggtgacagagtaaagtactgggtaaccttcaatgagccaaattatctagtcccacttgcgtaccgtttaggtatattcccaccattgcgctgctccagcaaatttgggaattgcagtgagggagattcagagaaagagccctttgtggcagcccataatatgatcctatcacatgcagctgcagttgatctttatagaaacaaataccagactgagcaggggggggaaatcggcattgtcctacactgtgactcatttgagccgttgagcaattccacagcagataaattggctactgaaagagcacaatcattcagcattaattggatcttggatccaatcttatttggtaagtacccaaaagagatggagatgattctaggaaccaccttacctaaattttccagtaatgacaaagcaaaactgaggcaaggactggatttcattggcataaatcactatgcaagttattatgtacgagactgcatatcatcagtgtgtgaatctgggccaggagtttccacaacagagggtttatatcaacgaactacaatcggagagcttactccgtttgattggctcagtgtttacccactaggcatgaagagtattcttatgtatctaaaagacagatataataacactccaatgttcattaccgaaaatggatatggcaatttgtatgatccagatcttaccgaggaagaatatcttaatgattttaagagaatagagttcatgtctggtcacttagataatctaatggctgcaataagggaaggagcagatgtgagaggttactttgcctggtctttgctcgacaactttgagtggctatatgggttttcagtgagatttggacttcaccacgtagatttttccacgctgaagagaactccaaaattatcagcaatttggtacgagcatttcattgaaaactataaactaactgatagcattgtgcccgaacatggcagagaaaagggaatctggaacaagccaactacccaactcagaaccttagtaagtccagagcctagaatgaataacttggattaatttgcaatgaaataccatatgctttctcttttgaatctttatatttgatccaccacttttcggacttgaacaagattgttaacgacaactaagtcctttcaatcgttcttagcattttttagtgtataaattatactaattatgattaaa

SEQ ID NO: 133278 - DNA, 255 bp, Glycine max
  Clone ID: PAT_MRT3847_91356C.1
gcaacaccaacactcgcattcgagaaagcctagggtttgcgtttgcggcatgagtcgccgtggcatggacgacgacgacgaggaggaatacgaggagcaggacgagcaggtcgccgacttcgacgaggaggaggacgagcaggtcgccgacttcgtcgaggaggaggaggagggcagccaccgaggacgcggcggcggtggcggcaggaaaggggaagatctggctttatcgatgacgacgccgaggaggtcgac

SEQ ID NO: 133279 - DNA, 125 bp, Glycine max
  Clone ID: PAT_MRT3847_91357C.1
gattgttattgtccagactattgagacattggtaatacttgcatatgctctcgcatgacagcggatcggtgtgtacatcacttctgacgcaccatatgaggagggactctcggatgtacttgctg

SEQ ID NO: 133280 - DNA, 304 bp, Glycine max
  Clone ID: PAT_MRT3847_91358C.1
tttttttttttttttttttttttttttttttttttttttttttttttttttttttttttttttttttttttttttttttttttaaaaacccaaaacccggttaaatgggttcccccggcaaaaggggaagggtacacatacaactttcgaggaaaacgggcttttccttttttaagaggggaaaattgcccaattttttgggcaaggggggccccaggggcatttcaattttggggtaaagcctaaggggggtcacccgaaaaagaacgggcccccgggggggaaaaaaaacttttttgggccc

SEQ ID NO: 133281 - DNA, 476 bp, Glycine max
  Clone ID: PAT_MRT3847_91359C.1
accggtccgattaattcccggttcacatcacacagttcggttccgccctacttcatcatctcaagggcaagattagaaccctctccctggattcacggcagctatacttccgaagaaaaagggggggaaaaagaaaggaaaatatggctgcagaagaacaaaccccccagatacaaaacacatatcaaccacatcgccaatcaaggaataaaacagcctatgccatcacaccccccaattgctcttcaagagctcctctccgcatgaatagaatccttcttgcactcatgatcctcaggctttgccttaacaagccaaacatccctctcccttagaactcttctttctccattgaaagcaattgagcctttaaggcccagaaggacccttcctttctcttgcaaccccctccctcaaaattttcccatacggacagacaacatgcctcagcgggccgaagacaaaccacccccccc

SEQ ID NO: 133282 - DNA, 237 bp, Glycine max
  Clone ID: PAT_MRT3847_9135C.1
ccgatggccactccaagacccgcgccgcctccatcgactcgcaattctccggcgacttcaaccacgtctcacctccgcacatttactccgttggcatgcctcagcctatgtacgactcgtaccaccagtttcagcagtatcctccgtacgaggtggacattaagacagagcggcaaatgtttgtcaacgatattcccacccgaagggactccacaatctcaaccttcagcacttcca

SEQ ID NO: 133283 - DNA, 608 bp, Glycine max
  unsure (1)..(608): unsure at all n locations
  Clone ID: PAT_MRT3847_91360C.1
ggtcctccgttggttataataataacaataaaaaattcattagattgaaggtttctttgtttctcaaaaccctcttgattctactcctcttcatcctccaattcataacccttttacagtttcacctttccctgcttctctcaattgtgcttggcctttaactggctatccacgttgccggtcgatgatcaccgtttctctgtttgcttcgtatcccataattcacctcaattcggttgtggccatatatattcttctttgatcacgacccatataccggtttccattgaaaactgatcacggcttttctggctttatctagaactgaaatgccattttcaagaacctgaggattcaaagctctagtcttggcacagtgttacaagttcataatggatttgaagattcaacatattaaatgggtggggaatatttaccagaagtttgaagcagtgtgtcaggaggtggatgatattgtaggccaggatgcagttaaatatcttgagaatcaggtccaaaatgttggagacagtgtgaaaaagttctattctggagttgtacatgagctacttccttttcctacctcggctgattcanaagatgaatct

SEQ ID NO: 133284 - DNA, 209 bp, Glycine max
  unsure (1)..(209): unsure at all n locations
  Clone ID: PAT_MRT3847_91361C.1
gaagaattggnagcagangaagaggaggagttaaaaancaaccatgtcagaatcaaacgcacttgcaaatggtttagctggtgccaggtggtggnattattgctcaaatcatnanttatccttctntcaaggcggtaagtacggggtnagaanactgagagancnctncaagagggaacaaggcaaggttttaccttncaactccnnnt

SEQ ID NO: 133285 - DNA, 936 bp, Glycine max
  unsure (1)..(936): unsure at all n locations
  Clone ID: PAT_MRT3847_91362C.1
aacggcacgatccttttttgcggttttttttttttttttttttttttttttttttactaaaaacaatcacattttattgaacgagaccaaagaaaaacgctaaaattagatgctccactccaaaccaagaccaagatcacataacagataatttgaaactgaaaaacaccaccactcactacatgactaaagcaatagggaataaacaaacaaaaacaaaaatcagccaatgactatcattgctttaacagctcttaaaagcatcttcaagggctggaggcgatccattcccttttaacaacccttgtgggttcattcttccatctgctggatttgcaggagcagattcattgatcaagggtgcatcaagagacttcggaaatgtaaccgccccaaatgggaaatcactgggcttgctgaactgttttggaaactgctggtccttaaactttttctcctgaggcaccttttcaccaaagtttcaggttccaagagaatgaaattaacatatggagagaagttctggaactagtagccaatctctctggttgggatatcagatataagcaacaacatgcagtgattgaagaaattgtccagcagataaaaaatatcttgggttccaaattttcaactcttccatatgataatctagttgggatggaatctcattttgctaaattatcaaagctaatatgtctgggaccagctaatgatgttcgagttgttggaattactgggatgggtggaataggaaagtcaactcttggtcgagctttatatgaaagaatctctcatcaatttaattctctttgttatattgatgatgtgcaattcaaacttccttttaaccggaggattcaaagtgttaccactggaagtgaaataccaaggtggttcaataatcagcatgagggaaatngtgtaagcttagac

SEQ ID NO: 133286 - DNA, 525 bp, Glycine max
  Clone ID: PAT_MRT3847_91363C.1
ggggctcgagggccatcgacgcagtttgaaatcatctgctcctgctcgtttttctgttctgcacgttggaacattctcttcagaaaaagggtgaatttgtgtttctgttataccctattaagtgaggaatcattttttggctttttgcccctaaaaaaatggtgcaagttgtgtcattgagcactctggcaacctgtggaaatagcaggttatgtggatcctcaccatcttggatggcaccctttgagccatacaagagatcccaaattacctcttccaatggcagacacttggtttggaacaattctgtgcagagcttgttcttaacaaggcacagtgattttagggctgaagcagcatggatgtttagagggggagaacaagggttggatgcgagttcggagcacagcgagagcgctaatgaggatatcttgatgttcttctttcagctcgacttggccacaagagtgcagtacgctttaaatatggagcagtatgacattgcaaagcagctgaggaacaaac

SEQ ID NO: 133287 - DNA, 225 bp, Glycine max
  Clone ID: PAT_MRT3847_91364C.1
aatgacgtgtcgagcatggggaaggtaatcctggattgagaggctgaggccagtttcaatcaactggtcctccgtagttgggaagactctctgagagcactttaaacctgagatgatggtttgggccatgcctaagagctccacattgtgaaaagaagcattgaatcactggcagcgaaggcatttactggcccaaatttatttgggtgggccgtgcttgaacgt

SEQ ID NO: 133288 - DNA, 1088 bp, Glycine max
  Clone ID: PAT_MRT3847_91365C.1
ctccctctcggaactttgaaaacgtgcaagcaaaccccacacccccgacaacagtccccgtttgttccgctgcaaaacaaaaacaccgcgtcttccccgtgcggggaaaaagaaaagaaaagaaaagaaccctcaattttccgggaaaaccctccccacaatggtttcccgggaaaacaccaattggctcttcgattacggcttgatcgacgatattcccgttccggacgccaccttcggcgtcaattcctccgccttcacatggccccctaacgccttgaacgcttcctccaatgtcggcgttgaaattgatggctcgttgggggattctgacagtctcaaagagtctggctcaaagaaaagggttaggtctgagtcatgtgctgcttctggctccaaggcatgtcgggagaagttgagaagggataggcttaatgacaagtttgttgaattgggcgccattttggagcctggaaggcctgccaaaacagacaaggctgctatcctgattgatgctgtccgaatggtgacccagttacggggtgaagcccagaagttgaaagacactaatcagggtcttcaagaaaagattaaagagttaaaggctgagaagaacgaacttcgcgatgagaaacagaggctcaaggcagagaaggagaaactggagcagcagctgaaatctttgaatgcacagcctagtttcatgcctccccctgctgcaatccctgctgcatttgcggcacaaggccaagcccatggcaacaagttggtaccttttattagttatcccggagttgcaatgtggcaattcatgccacctgctgcagtggatacctcacaggatcatgttctccgtccaccagttgcctaagctggcactgtacaattctctgggccagcattttggctcaaggttgtatccattttaccaataccttcttggctttgttagttctcttctaagtattctaactggacccagtggtgacttctgactatatctggcatatgatactattatgattaatgctggtagttgcatgtaaatcagtcaatgttaaataaccctgtctggctgtcttcacccc

SEQ ID NO: 133289 - DNA, 408 bp, Glycine max
  Clone ID: PAT_MRT3847_91366C.1
ccctttcattcttttatgattcttcactcaatttcattagaagctgcttctgagataaaaatatcagcttttgtagttcacactctagttgcttctgcaaaatggtaggaagtgttgatgttctagctcatgattccagcattaatggaacaatgaaacagtggcctgaagatttcagttccatgacgattatgagagatcatgtgacactcacaattggagagaatggcattggcaatggggttgttcagaatggtagataaaatggagaaagaaagatagtgcttggaagaaatattcacaccacgtgccttgaagtcactgagcctgatatagatgatgaggttactgcggaaagggaagcttatatggcaggcgtgttggctaaatacaaaaaatttctgactg

SEQ ID NO: 133290 - DNA, 352 bp, Glycine max
  Clone ID: PAT_MRT3847_91367C.1
ggacctttgcctgatcacctgctccactagttgccttcgacttaccaaacttggcgcccttctcgcctccggccaactatccgacatcgtcggtgtccctaccttcaaacgcactgaggagcatgccctctcccttgacattcccctctccgtcctctacaacatcccccgcctagatctcgccatcgacggcacctacgaggttgatcctgatctcaacctcgtcaaaggccgcggtggctccctcctccgcgagaagatggtcgaggcctcctccgacaagttcatcgtgtgtcgtcacgacaccatgcttgtgcacgtgtcttgcggaagctggctggccatgcaggtg

SEQ ID NO: 133291 - DNA, 578 bp, Glycine max
  Clone ID: PAT_MRT3847_91368C.1
gtcatggattactgggatgtcttgtaatcctgataactccattagcttcttagtattatagtaaatctttcggaaatttgacagccaaagttactcgtgatttttgttttcagtttgagacggattgatatcaattatgctacagttcctggtgattatacagtttttgtttttgataaaaaaaaaaaaaaaaaaaaaaaaaaaaaaaaaaaaaaaaaaaaaaaaaaaaaaaaaaaaaaaaaaaaaaaaaaaaaaaaaaaaaaaaaaaaaaaaaaaaaaaaaaaaaaaaaaaaaaaaaaaaaaaaaaaaaaaaaaaaaaaaaagggggggccccttttaaagaacccaattttatccccccggggggggaaacatattttttttttttgggggcccaaaaattaatttccggggcgggttttttaaaccgcgggaggggaaaaaccccgggggtccccaaatttaatggccttggaaaaaaaccccctttcccagtggggggtaaaagaaaaagaggccccccacttcccctttcccaaaattttccccccccttaaaggggcaaaaggggacccccc

SEQ ID NO: 133292 - DNA, 147 bp, Glycine max
  unsure (1)..(147): unsure at all n locations
  Clone ID: PAT_MRT3847_91369C.1
gttntganntttttcgctgaatcnaggattcaattccgatgcgattccgagcttgttagatncacganaacgttttcgtttcccagattctnnttgtaaaaaaaaataatcttnnngttgnnnanccaggngacgatcatcgtnatt

SEQ ID NO: 133293 - DNA, 392 bp, Glycine max
  Clone ID: PAT_MRT3847_9136C.1
agagaaaacccttccctttttcacttttttttttttatgaacccccccaaaaaggggtaattttttaacataaagctccccccccttcaaggaatgaaggaatttttttcccaccaaaagaaaaaaaggccctttttctatataagtaaagggcttcccgtggggaaaaccaacccaaaaaacgctaatttttttccaatttccccggttgaagctgaaaaaaaagcgggggccccctttggatatacaaatcccaccttggatttcttaactttattcgccaaaaaacaattggtataaccccctccaatggccaatttgtagaagaaatatacgaacattttggtggcccgccccaattccccaaaaaaagaaagggaccttccatcctt

SEQ ID NO: 133294 - DNA, 345 bp, Glycine max
  Clone ID: PAT_MRT3847_91370C.1
ggaaatttctgttgtatgctgctattaaacatgcagggactccaacaactgcgttcaacaggctagttcagtgacattagcatttacattgagggtcaaggtctcattgctcgggctcataaagtcattctcgggatatatagcgtcctattaacaaagatgttcacaaatggaatgtgtgagagcaactcacctgaggtttgtttaaaggatgtgtcttcagcagcattgaatgctatgcttgaattcatgtactgtatggatctcaagtattgagcataatgatgacttgggaccattgtactccaacttcctctgttatctgacatattcttaatctttttt

SEQ ID NO: 133295 - DNA, 539 bp, Glycine max
  unsure (1)..(539): unsure at all n locations
  Clone ID: PAT_MRT3847_91371C.1
cctacgcgtccgactctgataatagatgatgattcattgtttttgacatgtctaattatggaagaaataactgtttcattctaaggagcttaaatatcattgtcataaaaagtggtgggaactgttccaagaaagttgcatcagtgatgtaggtagctgaatctatttatttagaaagatcatatttttttgcatcactatttactatggttttctgttgagctaacagctatcttgctaatattgttggaattgcaacttctatttattagtagttttgttggattaaatttacgagaaagaacatgaatcatgctggcagggggcttgttaatgacacatacaagatggacctaattcttgtacatcctccgcatttgattgctttagcttgcatatacattgctagtgtgctcagggagaaagacaccactgcttgggttgagaacttcgtgttgatatgaatgtgtntaaaacatatcaatggagatacttgtatttatgaaagcatagaatgtcactgatgagagaataatgct

SEQ ID NO: 133296 - DNA, 730 bp, Glycine max
  Clone ID: PAT_MRT3847_91372C.1
cgcctcttttcctctccgtctccgacctccgatcctccctcgccgagacatcctccgacggtggcagaatcgtaattttccgcggcaccgtcgacacacctcgaaaaccttgagacccggtgtcttggtttctcgcaagtccagcgataacagcgtcgttcttcaaagaactcaaacgagtttttatctgatctctggagaaatatggctgccaatttctggacatcatctcattaatttaactagcgtgactctgataaatatatttttttatatatctgtttagatattaaatgcagacaacagaagccactccaaaatatgttgcttaaaacaacctttttattgtacctgaaattgaagaagtctcagtattccttgactatgggcactacatttatccttttttggtcatgagcttcaaagtttagattagtttcttgtttatcatttaatgcatatggtcactataacactgataatagatgatgattcattgtttttgacatgtctaattatggaagaaataactgtttcattctaaggagcttaaatatcattgtcataaaaagttgtgggaactgttccaactttactgttgctatgttagagtcttctctcatttgcttttgaatgtgaagtatcctccaagaaagttgcatcagtgatgcaggtagctgaatctatttatttagaaagatcatattttttcgcatcactatttactatg

SEQ ID NO: 133297 - DNA, 1485 bp, Glycine max
  Clone ID: PAT_MRT3847_91373C.1
gaaccaggcaatcatatttttgttcatgttttaccaaagaaaaaaaaatcctctacaataaatattacattatgtataaaaaaattacaagtcatgaataaagcctataacaatatccatatccatgcttgtggggcttagctcatctagttatctccatccatgacaaacatgttacttgagttcgaattcaagaataatcaattggtaagttgtgtaaatttcttgtaatgtgcctcctaaactcggagctgcccaaattctaaaccagggaagccatgtcctcaccctgaatttttatgttccaaaagacattaaaaaaaaccaggtttcactaactggtagtattctctttgcccatagagttccgctagatcagccatggactctgatttgatcacagccttcccttcaggcagttctaggcaagaataatgcattatcatttcctttaatgtatgcttggtgctttttaaatcgttatcccacaagatgcacttcctaatatattctcttttcacagcttcataagaaactttgccttcaggcgaaaacattgaagcattccagagtgcccctctggcaaccatcactgatgagtctcctgctccaggacaaatacctgacatgagatcgaattcaagaataatcaattggtgagtcgtggaaatttcttgtaatgtgcctactatagttggagtattccaaattctaaaccatgtaaggcatatccttaccctgaattcttgtgctccaaaagacattaaaaaaatcccggcataactaactggtggtattctgtcagcctatagagttccgctagatcaaccatgacctctgatttgatcacagccattccttccggatgttgtaaagaaatcttgaatatgatctggtttggtcaacagtgcagcatccatcccaccactcacagaaaatgacttcgcgcaacccatgttaatatctacagcagcaacatcattacacactaactgagcagtagctagggccctcacagcatctgatgtgcctatttgaaacacaaccctatctttttcttcatcacaggttctaaacacaacattgtttgtccccttctccacaaaatcagtggatccaatgagttcgttaattcggcgctcgcactttagcatcttgtggtcaatgatttcctcgcagtaagtgatatctgcaccatattgagcagctagtaatctaaatgggagagtgccaacgcggaccataggagcgagaacaagtttgttgcggtactccatggttgtcggatgggtttgacaaatccggtttccgacgttgcctggagctatttttcgtgagcgagatagataaagaatcaaagctgcgaattctaagaatgcaaagggaatttttcttctgtgggatggggcggtatcggtttagacgagagacccttcctttgtttccacggaaaacgccggttgtaagtgcatctttggattataa

SEQ ID NO: 133298 - DNA, 112 bp, Glycine max
  Clone ID: PAT_MRT3847_91374C.1
tagtgtgtcaaagattttattgggaattcctgggaatgacaaatgtgctgaatgcagtgctcctgatccatactggtcatctctaaaccttggtatattgctgtgtattgat

SEQ ID NO: 133299 - DNA, 143 bp, Glycine max
  Clone ID: PAT_MRT3847_91375C.1
aggtaagcgtgggcggacgcgtggggataaatatctgtatcagtttatcttggtttaattatacatttacatagaaactgaaacataactaacaacattgtaaatgtataattaaaccaagataaatatctctatcagtttat

SEQ ID NO: 133300 - DNA, 539 bp, Glycine max
  Clone ID: PAT_MRT3847_91376C.1
cgatatactgaatttatctgtaaaaataacaatattttctttgacatgtacaattttttttcatagatttacactagcatctaacctctatgctaaaaatcagatgctttctgtaaaattgaaatgagttgttctacatctagtttaaatatgcctacgtttggaagatgaagacctagagtatattcctcttcagtaaagtccacttttttcaatgttgttttgtaactcgtagtagctgatattgggtgaactctcgcaattgaaacacaatgtctatccccaagttcgaacaaccaaaatctccactctgtcatggtcttcccatccactttagctgatatatttgtccatcttgtgtgagaaaattccactttattcagcccttcagtaagtccactccctatagctttaacatatgcttctttaaggctccaatacctgtaaaattccgtcaatacatcattcaaagtgcctgaattgactatgttatcccattccagacttgaaaagtatgatgagaagaattgaatgaattc

SEQ ID NO: 133301 - DNA, 194 bp, Glycine max
  Clone ID: PAT_MRT3847_91377C.1
tttgttttgttattcatttttcttatgggttttggtggtttttaaaaaaccccattataaattaaacgcaacttaaaacatccctcaacagcataggaaatggtctaaaacccttttgctgttggggaaattagaaatatttgaaactttttttaccatcaaaaccatatttattcctcataaaaaacaaactt

SEQ ID NO: 133302 - DNA, 333 bp, Glycine max
  Clone ID: PAT_MRT3847_91378C.1
atccgacttgcttcctcttcttataactctgcgcttcacatcctcaagacctagccattagcaatggcataccaacaacattaccgcggggccaacacctccgtaccaacaacatcatcgagcgatccaagcaacactcacactaacagatctaatcgctacaacaacaccgggctacggagaagtctcgcgcgcccaagaagccttaaagatctgattcgcgcacccatatggaggttcaatgattgtgtgtctgtggctcggtggtggctggttcaaggcggcgacccgtgacgttatttctgaagaaaggggtcccgcacgcatatctgg

SEQ ID NO: 133303 - DNA, 274 bp, Glycine max
  Clone ID: PAT_MRT3847_91379C.1
caatatcgaacgagttaaaaaaaaaaaaattataaaaaaatctcaaaaaaaaatataaccatggtataataatggagctattgcaggaacgaaccaaagaccatgcataactaccatgaggaagaacatcgtgaagctgacaggacaaacactcccattccaactgaactgctagagcttttaaagcctatccctgcaaaacgctaaaatcaatgaactctctaagcaaatggatgatacacagtacccaaaaacattcttatataatgaaaac

SEQ ID NO: 133304 - DNA, 314 bp, Glycine max
  Clone ID: PAT_MRT3847_9137C.1
ggggacgccacatttaatttttttgccccccaacaaaaattggaaccccggttccccaaaaggtaaccaattccccgaaataggtttcacaaccaaaaaaatattggccccctggaccaaattatcggggcctgggccgccaaactccttctggttgaaaaaataaaagagccttcctaaaaatgttataaaacaggcccaaaggcctttaatattaacaccctgaaggttttaaatgaggacctgaaaaattgtgtggaaggggagcccatggatggaaaaaactctccccaaaagaaaaattgtcgaacccg

SEQ ID NO: 133305 - DNA, 271 bp, Glycine max
  unsure (1)..(271): unsure at all n locations
  Clone ID: PAT_MRT3847_91380C.1
tcaatntgctgcanggngtggggtcggatcnngacagtnganatttcancactctacgaccgttcgggcaangggtaatattggataattnttgcatncgtaaagcaaaccatgctgtctaaacaaatttccatcaagtatggcnanancggtgtagtacttttttantancatgaaggcnncatnaacaacgggtactacttttaggntngangggcatttccatcngattaaagggtnactnatgcaccagccaaggtgaanggggncc

SEQ ID NO: 133306 - DNA, 372 bp, Glycine max
  Clone ID: PAT_MRT3847_91381C.1
ttattttgtttatcttttatttttattttttttttattttttcttttgtgcatggtttgttaattttgacttctatattatacacatttaaagcataacacgtatcacagtttatcatattgcagtaaaacggcgcgataaaaaaagatcaacataggggaatagacacactggaaaaaaacaaagcgaagcccccaaacaaaacaaaccaaattggaaacaaacaaatcaagccccaaaaatacacgcacgggaattatccaaaggaaaagggaaaaaagaactatagatatgaaacaaaaaagatccgtgccgcccgaactgtgcgccactacaagtacaggggagaaaaaaagggacccagaagtggct

SEQ ID NO: 133307 - DNA, 301 bp, Glycine max
  Clone ID: PAT_MRT3847_91382C.1
gttttggtttttttttttttttttttttttatgaggaaacaggggtaattgagttttttaccataaaaaaattaaagggtttcccttctcttcgctttttacttttgagagagattttgagtgggcagtgaataggatgagactaattttgagttttttatataaaggggagtttacttaatttacttaagaattcttgagttttttacaatcgaatcccttctgggggcttctcgcggccggatccttctgggggcttctctcaaccggacccttctgggggcttctaccaggcggaccc

SEQ ID NO: 133308 - DNA, 201 bp, Glycine max
  Clone ID: PAT_MRT3847_91383C.1
gcgtacgtgagctcgtggttacgcagatacgttgctggccttgttcaccacgccggacacggtcgtgtaggaggcactagcttactctccgacatctcatctcgtaacgggcttcgcagtcaccatgctgctttcagtcgctgccgatgcgtgatcactggagtgtgcgccagctgcaatcgattttcgcttgggagagcc

SEQ ID NO: 133309 - DNA, 500 bp, Glycine max
  Clone ID: PAT_MRT3847_91384C.1
cggccgctcgagcggcgggcggggtctacagtagcctctctatctttttctttctttcatcatcgaaatcaccgccatgtgttccatgataagcgcgcaaggggtggcggttaatcgcatacaagaccggcatcatgtacgagaccaaggagtacacctaccaggtatgtggccgagcacaacaccaaaaaagactgcttcctgccgatccacgacaaggcctaccactgtgtaaagttcgacgacgagcaccccggagaaagaagaggccacgcgcaacaaaagaaccccaagcctgttcccctcaccctcttctccttattcccccgccaaacacaaaacaaccaaacagcccacaacaactctttttttcaaaaccccacccatccagaaccgccgttggattctctcccccccccccttacccccaccgcctctccccaatccaaccaaaacaatatcccactatacccatcccccccctacctaccccccccccc

SEQ ID NO: 133310 - DNA, 279 bp, Glycine max
  Clone ID: PAT_MRT3847_91385C.1
tacggctgcgagaagacgacagaaggggtaccacaacttttaaaaaccatcttttgatcaaaacttcgcctttcgtcgttaatattgttttatttaataatttaatttattgctcaaagtatttcttttgaattattttttttccaaagaacaaattactttaccaatttttagtttagaaatttcgtgatgttgatgcccacaaagaagcacagcaagttaaagtactttatattaaactgtaaaattaaagccgactaccatgaatatataactttg

SEQ ID NO: 133311 - DNA, 489 bp, Glycine max
  unsure (1)..(489): unsure at all n locations
  Clone ID: PAT_MRT3847_91386C.1
ataaaatttaagtattagattgtgatttactaagttggccccaatatgaataagatcatacaacaaatggtaattaaaagttgaaggaaagaggagaatatatattccattcgaatatctggtacatatgttagccaataatgatacttaccgttttgtgtaataattttaataacgacaggaaaaaatagtagaaagtggtaagaatatgtattgtcagactgcttccgtccagataatcttctaggcttctttttctacctcaatgttaagttgattgtggctgagtgtgacattgaatgttaataatctagccatatttctttctcagacccggctcaagtattcacctgataacctactatattgcagtattttttaatttagatctacggaaagataatcgaacaaaaatgtgttctaatagtttgacaatattcaaccaatgaatactcaaaaatgtgttatttgaccatcaaanannaaaaa

SEQ ID NO: 133312 - DNA, 382 bp, Glycine max
  Clone ID: PAT_MRT3847_91387C.1
cacacaaatcaaattacacaatgtctgcctaccattacacaaaatgtggtctctttccaacttgaagccaggggtttacataggcccatggcgctagaggtgcacccactaataagcctacattaactattggttacatgcaaaagccgaacattttaacactcctcattaagacccgatatatacagatcgattaaatgaagggaagcactaactcgcgcacatccgttctagattgggcgtttttgattcctccaacttgagtaatcgtgagccaactgattgaatctggagcccttgaatggacatgctttgattaacacctgtggtttcagggttgcaaaaactgaaccaatgaatggtccttctcctagatattcag

SEQ ID NO: 133313 - DNA, 202 bp, Glycine max
  Clone ID: PAT_MRT3847_91388C.1
cgacgtaatggtttgcaacgaaaggctgttctcagaatcagacattcccaccctaccatacctacctgcagtgctgtaataaaccctatggctgcacccgtcaaccccaatatttgtatgagaagccatgcgatcatgtcatgttgaaggctactacagtccggtaattttcactagtttgatcagcatatgggccattgga

SEQ ID NO: 133314 - DNA, 546 bp, Glycine max
  Clone ID: PAT_MRT3847_91389C.1
aattcggctcgaggttggacaagaacaggagaaaggcaagctgcaagaatgagagttaggtaccttaaagcagttctcaggcaagaagtagcatactttgatttgcatgtcacaagcacatcggaggtcatcaccagcgtctctaatgatagcctcgtaattcaagattgtcttagtgaaaaggtcccaaactttttgatgaatgcgtccatgtttgttgggagctacatagtggcttttgcattattgtggagattggccattgtggggttcccttttgtggccctacttgtgatccccggtttcatgtatgggaggacattaatggggttggctagcaagataagagaagagtacaataaagcaggcacaatagcagaacaagcaatatcctccatcagaaccgtttattcttttgtgggggaaagcaagactattgatgctttctctgaagccctacaagggtctgttgagttgggactgagacaaggcttagcaaaaggtttagctattggaaagcatggtgttgtctttgctatatgggca

SEQ ID NO: 133315 - DNA, 137 bp, Glycine max
  Clone ID: PAT_MRT3847_9138C.1
tcccggcacgaattcccggctcgaccacgcgtcagttgcgatgcgacaacacaacggaacgggtacaaccaagatatcacacggtacaggtgctagaaaactacaacagggtacagtttccaaaagacgacagaaag

SEQ ID NO: 133316 - DNA, 269 bp, Glycine max
  Clone ID: PAT_MRT3847_91390C.1
cacatgggaacaaagtaggaccacatgtccagaccactcccggaactttacaggagacatgacctttatttttttgtctttagaggggccaacaaaacacaatactgatattccaccctaccttcttacaccttctataacctatctaacgtcaacttgcctgccctggaaacacaatctgctaccccgacatgtaatactcttatgggccagcgacctgttggaccatctggaacctcagcgtaaagacgacatttctatcgacacag

SEQ ID NO: 133317 - DNA, 189 bp, Glycine max
  Clone ID: PAT_MRT3847_91391C.1
attctgctctcggagagattataggtatcgcggaggaggctcacaacgcgagaatattatagagcaggagtgtgatcgcgagactcgctcataggggcgccacggagcactcgctgtgtaagcacctcgtaccgcatctcgtcgctgtgtatcacgtgatctcgtacgacaccatatgggctcggacca

SEQ ID NO: 133318 - DNA, 392 bp, Glycine max
  Clone ID: PAT_MRT3847_91392C.1
aaaagaaaaagagagttttttttttattcaaaaataaaaaatccccttttttaagcaaggctgccaatttcatattattaaaagcaaaaaggaaagcaaataaaaaaggctcagatcaaattatagaaatttgattttgacccaaaattataatcctaatacatcaaagcgaaataatctggtcttgatcctaattattcaatctcctaaaaaataaattccaaaaataaacatccctctgtttaaataattcttaatataaacatataactgtcaacacccccccttaaattgttgcataaaattccaacaatttcaactttcttacaaaaaactcaaaattgggcctaaacaaaccttttttaaaaatttcaccaactttctttttaaaa

SEQ ID NO: 133319 - DNA, 184 bp, Glycine max
  Clone ID: PAT_MRT3847_91393C.1
gtcggacatttatccttggaacctgagggatacaccatctgatgtaggacaactcctaggtatgcttcttaagctgatcaatgccatgcacgctgtggattttgagcccttctgtggctactctttgctacccagtgtgctcatcctacattatgacggagagatgtatgctttggttgtatac

SEQ ID NO: 133320 - DNA, 1178 bp, Glycine max
  Clone ID: PAT_MRT3847_91394C.1
ggctcgagaatttgcattgatatgtaaatatgcaatggactagcaacattactaaatacattcgtgtacgatatccatatgttaaagccgtaacctatggactatcacacaacagttctgctactgattacctttgtgagtgcaaccattattctcatattcattcggagattattcaaccaaacctcagaatcagaatatgcaaagcttccaccagggcctcgtccatttcctatcataggaaacatcttggaacttggcacaaatccacacatagcactcaccaaattctcaaagatttatggacctcttatgacttttaaacttggcagaataaccaccatagttatctcctctcctcaagtagccaaagaagtactacttgaaaatggtcaagtcctttctagcagaacaattccacattcagtccatgcacttgaccatcacatatactctactgtgtggctgccaccatcagctcaatggaggaaccttaggcgagtttgtgcaacaaaaatattctctccacaattgcttgactccactcaaatccttcgccaacaaaaggttaaagatttattggattttgtgaaagaacgatgcaagaaaggtggggttgtggatattggagaggttgtctttacaacaatccttaattccatttcaaccactttcttctctatggatttgtctgattctacatctgaaaagtctcatgagttcatgaacattattcgaggcataatggaagaaattggaaggcctaatgttgcagacttgtttcccattcttcgtccacttgaccctcaacgtgtccttgctaggacgaccaattattttaagaggttgcttaagattatcgatgaaattattgaagaaagaatgccttcaagagtttcaaaatccgaccactccaaggtgtgcaaggatgtattggattcacttcttaacgatattgaagaaacgggttctcttttgagtcgcaatgagatgttacatttatttctggatttacttgttgctggggttgacacaacatcaagcacggttgaatggattatggcagagttgctacgcaacccagataaattggtaaaagcaaggaaagagttatctaaagcaattggaaaagatgtaacacttgaagaatcacaaatcttaaagttgccattcttaca

SEQ ID NO: 133321 - DNA, 341 bp, Glycine max
  Clone ID: PAT_MRT3847_91395C.1
tgggaagcaaggacggaagaaataaaccgaatgagagcattaacctcgtcttcatccacgttcattccaaagcgttattccttcatcgtcttcctctcgattctcttcgctcttcgatcctcgtcagggggctgctccgaataccaccaccatcacgcgccgatggccactataggatgcttacacgactcgcaaggctctcaggacagcgtccagagtgaggcccacgctcagttcgcacgtcgatgaatacatgaagaagcacaactcacttctggagttctcaacggtggtgatgacacatgaacacgttgttgcgggaaccctgcatcaccgtactc

SEQ ID NO: 133322 - DNA, 522 bp, Glycine max
  unsure (1)..(522): unsure at all n locations
  Clone ID: PAT_MRT3847_91396C.1
ccaaaatcagcacttagaagaatttaacggaagattagtaaaaaagaaaagagagagagcgtgaaggtcgggggatagggtttgccttgactcacgttggcaaattttccttttgcttcttcttgtccaaaccgaatcatttatttttggattcaactttctttctctcggcgcggtgttattagcgattggaacagtgcgagcgatgccggaagaagaagtgctggagctcaagttccgtctctacgatggatccgacatcggacccttccgttactcccctgcctccaccatcgccatgctcaaggaccgcatttttgcagactggcccagaggttttttttttttttttttttttttttcattttgntntttttttttttttttctttttagcatttttaacctcttctacctcaattgaaatggttcgtttagggtttgtttgttaaattctgatgatggggttgagttggctttaacctactactagggcttcgcctccgacttcttgagcttccac

SEQ ID NO: 133323 - DNA, 406 bp, Glycine max
  Clone ID: PAT_MRT3847_91397C.1
cggctcgagcgcgagggctggtgaaatgtctcgttggtctttccgctacggaatcaggctccacaattcatcacctgcttgggaagccaatgcttgtgttttaggcggcggttgtataaggccagacttttttacactgcatatctcaatgccactgtttgggttgagcagacatcctctggtcccaggctgaaactgtgtcgactatcttatatggcggggtccatataccatgcccttggaacttgcctggccagggactggttttaaacgaagatccaccctctgctaaaggctgattaatatgtgagtgctctactttttctgcgtgctcactgttatatgaccatgaatggggctatctatcaaatgaacccgaacgatgtctagatgccacggtgtgata

SEQ ID NO: 133324 - DNA, 750 bp, Glycine max
  Clone ID: PAT_MRT3847_91398C.1
tcttttccttatcccttcatctttcccatcatcttctttccccttgactttctctgcatcaattttgtcatactttttcttcttttccttcttctcttcatcatccttcccatcatcttctttcttcttgatcttctctgcatcagttttgccatccttgtctttcttctcctttttcttcttttccttcttctcttcatcatctcggcacaagtcccagcaccaccatctccttctacaattccatccccaatgtctcctttggcaccttctacaccaccaccgtcccgttctcttcctgctcctccaacgtctcttacgccaccacttccatctacagattccgctcccactcctccaccacctattggatttggaggaggtggtggaagtggaattggaaaaggtggtggtggctcaggcgttggaataggctcaggaagtggtagtggtggcgttcaaggtggtggtggacaaggacgtggtgttgggataggaagtggcgttggcagtggtaccggctatggtggcggtggaactggcattggcagtggtgacagtagtagaggaggtggacgacgctttgctggtgttggatattgagagaggaactccttcttgtgtgtctttcttgtgttgatatagctaatggggaccatcaaactgtatgtcatggttttaaccttttacgtggctaaataaaagaattttccgcgtttcatagaaaaaaaaaaaaaaaaaaaaaaaata

SEQ ID NO: 133325 - DNA, 1624 bp, Glycine max
  Clone ID: PAT_MRT3847_91399C.1
tcattcagcaagtagttgtgcttctgctgcaccttcccacaccttctcattccgcggccaccatagcacccagaacatcataatagctacctcgcacaatttcttggcaaaaaaggtttcagggtgatccctatcctcaactgtaaatatagtaggttttccatttacttgaataatactttgcccgggagatttcctgacttgaagatatttcatatttcttctaatagctgcaactccttcccacatttcagctgatgcatatatgttagccatctccacgtatggaactgccacttggggctccaattcaaatagctgttcagacacatacttgcccatctccatcttaccatgaagtttgcaagcagagagcaatgcactccatattccagaatcaggttcaaaaggcatacttttaataatttctaaagcttctctgagatgtcctttacgaccaagaagatcaaccatacaagaataatgatctataccagggtttatgccatacttttgagtcatcatgttgaagcactccaatcctctttctactaaacctccatgtgcacaagcttggagaacagcaagaaatgttatgtggtttggtttcattcccatttctaacatcataaaaaataactccaaggcatctttaacgtctccattcaatgcacaagcagtaatcatggttgtccaggagacgacagttctgttagccatggtgtagaaaagctccttagcatcattaaaacctccacacttggcatacatgtcaattagtgcgttacaaactacaacattatctttcaacccgttgttaatagagtaattgtcaatccattttccaagttcaagcgcccctgtctggccacaacctgaaatcaaagcaagcacagtaaccaaatctggtttctcaccagcagcttccattgcattaaacaaggtcattgcctcactcatatatcctttctcagcatatgcactaatcattacagtccatgaaacacaagtcttgtcagacatgccattaaacaaaaatcttgcagaatgaacatccccgcactttgaatacatacaaatgagagtattcaccacacatacatcagaatcacaacccaacttgactccatgagaatgtactagcaaaccatgaaatagtgccttaggttgcatgcacgatgaaagcaaattgagaattgtgctaatgtctggggaaaagccaccatctagcatccctttgtaacaattaacagccttgacatgcttctcaaaattcgcatatgcagcaatcattgaattccaggacacaacagacctcagaccagagttaatttcatcaaacagagtctctgccgagcacaagttaccacacttggaatatgcagcaatcaaagtgttagccacagaaacatccatatgtacaccaatccgaatcccaaaggaataaactgcacccaaagatgtcagacttttcacacgcaaaatcgaatcaatgagtagcaagacagtgactgcgtcgggacgaattccagaaagcctcatgtgacgtagaagacaagacagcctatcaaggaagccagactgagcaaatcccaacagcattgcattccaagaagcaatgtcc

SEQ ID NO: 133326 - DNA, 471 bp, Glycine max
  Clone ID: PAT_MRT3847_9139C.1
gttctcagtctgccgtgcagatcctttagcatcctattgttggacaaaatagactatcctcaaacttgacactttagtatccttgcggattgttctgagcgcagctaggacgcaagcttcaacatccctaaaaagttatcgcataatatatcttgatccaaagcatctttcttaaatcgagataatcctgggagcacttagcattcttactaatttattcttactgggttcttgtttcatccccaattgttaccacagttcatagatatttttttagagtaggagttcagaaaagctaaatttgccttttgtcttcagagaatgaagcttctattaatgattgtcactccaatacgattttaaatctttgttttaaaaaccctttttctgaagatctgcaatttttcacaattttcactgagatgcctttcgttttttagacatatctaacttattccacttttatactca

SEQ ID NO: 133327 - DNA, 1519 bp, Glycine max
  Clone ID: PAT_MRT3847_913C.1
ggcgctgccgtattgcttgaaggcgttggagattcatatgaagcggttggggatgaactcagtggaggttgcgcacgacaggaagcttcttgggattgtgtatagcgggttggaggagcacgagaaggcgctggagcagaatgttttggcgcagaggattttgaagaactggaatctgaacgcggatttgttgcgtgctgagattgacgctgcgaatatgatgattgctctggggaggtatgatgaggctgtttgtactttgaagggtgttgtgcagcagacagagaaggatagcgagactcgggcacttgtgcttgtgtcgatggcgaaagcattgtgtaatcaggagaagtttgtggactgcaaaagctgcttggaggtttctcttgggattcttgacaaaagggaacgaatttccccggtggaagttgctgaggcgtactcggagatatcaatgcagtatgaaaccatgaatgagtttgaaactgcgatttcgttgctgaagaggacactagctttgcttgagatgcagccacaagagcagcactcggagggaagtatttctgcaagaataggttggttactgttgttgactggtaaggtgcagcaggctattccttatttggaaagtgctgctgaaagattgaaagatagctttggtcccaagcattttggagtgggttatatctacaacaatttgggggcagcatatttggagttggatagaccccagtcagcagctcaaatgtttgcagtagctaaggatatcatggatacatctcttggtccacatcatgcagatacaattgaagcatgtcaaaacctttcaaaggcttatggcgagatgggaaggtatggatggtttttgttggtttgactttgtatcttgatattgtttctcttgatttgttgattctgagaacaatttgttttgggtacattattgtaatgtgatgtacatctatgtaattttagtctaaaaatgcaatacttttgaacatgacccattagtgtgccattcaaattccagtccttgccattgaatttcaacagcaagttgttgatgcttgggaaagccatggagctagtgcagaagatgaacttagagaaggccaacgacttcttgaccaattaaagaaaaaagcccgtgacgcctctgcaaacgagcttcatatgaaggctttgccaaatgagcttcctatcaaggctttgcccttaccacataaatcctgaacagttttgcagattttccctttcacactgccattgcatattgcaatgaatatctattactttggtgatagtttgacagttttgtggattccttacagatttatgtaggtaactactgaaattaagtaatacttatatcccatatcccaatcatatagtattttggatttgtcattatattattcaggttattttttttaaattttaaatcagtactcagttgtttgtcattaataatatggaatttcctcttcaaataatatagttcttttcctatttgtttttt

SEQ ID NO: 133328 - DNA, 478 bp, Glycine max
  unsure (1)..(478): unsure at all n locations
  Clone ID: PAT_MRT3847_91400C.1
atctttttattttttttttttttttttttggaaaagaaaatgaaaacctatggataaaaaaaggggaaaaatctgcaacctttgggggaaaccccaccctgggttattacacctttctttttctttccttacaaatttactttacattacattacctacacttccttggaggttttgttttttgtttgtttccccgacatttatatatgcatatatatccctganntatatatacccgatttttatattatggataattgcgcccccaacacgcatttggatccctaggacacggacccccccaataattaaaaaaaaataattggaacaatggaagaaaaaacaagaaaaaagacccccgggagggtttggaatatattcgcttttctttgttcctgggaaaaacaaaaaaaaaagcatgtggggggaagataattaaagctggggccgcccccccgggggattattctttcccaag

SEQ ID NO: 133329 - DNA, 301 bp, Glycine max
  unsure (1)..(301): unsure at all n locations
  Clone ID: PAT_MRT3847_91401C.1
gacgtacgcttatctaccatcaaattatttaccattaactaaacactccttcttgataaaaaccaatgggcatagccaccttactggctgggaaccattatccacttcttcccaanccactcttacccatatcgtgaagcaacataaccattgacattctatcgaatttataacctctcacttccgacactctcataaagaaaacactcttatagtttacatcctatattaaaacttgctctagattatactaggattcttttcacaccacaccatcacttgcatttactcttttcataca

SEQ ID NO: 133330 - DNA, 307 bp, Glycine max
  Clone ID: PAT_MRT3847_91402C.1
accccaaaagggaaaaaaaattttttccggaaaacttggccccgttggcattgggatgctttttaaatcatcaaaggaatttttcggggggacctaatattttttcagggaatagtttgatttttaattgaaccatacaactttgcccagggcccaaaaggcaaattttttccaaactgcaaacatcaggggtcaggggggttttcgtttttttgcttggaaaagggttaataagcccgcccttttggttttgtttttgggaaccccaacttttgcctaaagccattagtttttttgacaaaatttt

SEQ ID NO: 133331 - DNA, 264 bp, Glycine max
  Clone ID: PAT_MRT3847_91403C.1
ctggcccgcggcgtccaccacattgactactataagacaaccagcaccggccgcctgcctgtgaagtggatggcgcccgaggccttgtttgaccgggtgtacacacaccagagtgacgtgtggtcttttgggatcctgctatgggagatcttcaccctcgggggctccccgtatcctggcatcccggtggaggagctgttctcgctgctgcgggagggacatcggatggaccgacccccacactgccccccagagctgtacggg

SEQ ID NO: 133332 - DNA, 313 bp, Glycine max
  Clone ID: PAT_MRT3847_91404C.1
gtctcatatccatttgcttttttggggggaatttaaagggaaatggggttaaaaacgcccctcaacaaaaatgggcagggcgaatgttcctagccattctcaagtcatgtgataaacttactttttcgtacccccatccacaaatccgtaagcctatgaactaactttaactacagccaactccactttattcgcgtaaaatgattacacacctgtctacaatggacggtcattacacggctcaagaaaacctacacaaaccttctctttgacacataacacaaaattgacaggtccaatattctcatccctc

SEQ ID NO: 133333 - DNA, 295 bp, Glycine max
  Clone ID: PAT_MRT3847_91405C.1
tccgggccagacccacgcgtttctttttcgcggccgacggatgggggacgacggcagatgggggtcgaaaggatacgtgaccactatcgacacaactgtgggggtcttaggtgggctcctccagacaattgtctctcgccaccgctggagccctaaccttaccctgactccagccaagaagggacacgagatgctatctctccaagggaaggacagctgaggtgctatcccgcacgcacgcacttgacgggcccgtcgggacgcctacagggcagagcacctctgtctctaggag

SEQ ID NO: 133334 - DNA, 156 bp, Glycine max
  Clone ID: PAT_MRT3847_91406C.1
ggaaaataattctagaatccacctacagttttttaattcaaaaataagggtgggaactctaacaaattacataagtaaactggatatcatatcttaaagttccaacacttatgtaattggttgggtgacctatggtgaaaaatttctctattattt

SEQ ID NO: 133335 - DNA, 850 bp, Glycine max
  Clone ID: PAT_MRT3847_91407C.1
cccaaacagattaatttattgccggaaaacatcaaaagaaaatgttgaatctttacaacaataatataaatgatgaaaaaaagctcaaagccagtgtctcaaggtgcatgattttggagacacttttcagcttcagaaatgactgaactcaaaggggtagagattgtccccggcaaattgtagtgaaaattcctcatctgggaagttgactccaggctcagatgactctaatctacatgatagacttccgctctagcaacatagagacccaatctggaagtgcaaaagaccactcctttactcaccagtatagctcggtttccgcttctcagcaaacgcagccaagccttctaatcgatctttagtattcaagacctgatcatagcaatcttcttccaattccaaagctgatgttagatcagtctcaactccctcattaatagctcttttagccattcttaaagctacaggacccttctgattgatatcatgagcaattgcaagtgcttttgaataagcttcaccagcaggaacacagtaattgactagacccaaggacagtgcctctttgccatcaatctttcgaccagtaaatataatatcctttgctattgcttttccaaccaatctaggcagtcgctgagttccacctgccccagggattattgcaagtcctgtctctggcaaacccatcagagcattttctccgcaaattcgaatatcacatgcaagagccatttcaagtccaccaccaagagctactccttcaataacagcaatagttggaacacgaacatcctctagaaatgagaatgtggagcgaagagatttcacaaaaatcttagcctct

SEQ ID NO: 133336 - DNA, 365 bp, Glycine max
  Clone ID: PAT_MRT3847_91408C.1
gattggaaagatatcaaagctaaggctaggtagctagctagtactaaaaagctagattgatcgatcatcttaatttccacgggaaaaaaagaggtgataatggaatcatcacttgttgaagacattgtgattgtgggagctggaattgctggtctcgcaacatccttggcacttcacaggctgggtgtcccaagtttggtgttagaatattcagatactttgagggtcactgggtttgctttaacaacatggactaacgcttggaaagctttggatgctcttggcgtaggaaccattcttcgtcaccaacatgtccagctaaaagagaatgtgactaaatctttgattttaaggcagcaaacatc

SEQ ID NO: 133337 - DNA, 298 bp, Glycine max
  unsure (1)..(298): unsure at all n locations
  Clone ID: PAT_MRT3847_91409C.1
tggagcgagctccgaatntgctagtattcgctcacttaagcctccttaacctggaggaccacaaatgcggagagggtgagattacactacaacgaccacgaatccataattcaagctctaagtcaccacaaccccctttgaaagagtaaaactgaaattatcttgtacgaaaaaacgcatttccactcctactatgtcggcgagaaaaagcacacttctctcagcaaatgcatcttgcttttgcctactctttaaggccttcacattagctagatgcatagaaagatgatgattaaga

SEQ ID NO: 133338 - DNA, 710 bp, Glycine max
  Clone ID: PAT_MRT3847_9140C.1
ccacgcgtccgctggaccaaagtagcacaaccgctttttgcactaaacttcaatgactagatccttcttccgtcctgatatcggtggactccgtctgtactggctacaaacagatatgatggagaccctttgcgaactgtggggcgaaaactacagtccacgaacctgcgacaaatgagatatgcactaaacacgaaggacagtatttgttgaagcacaaagcacttactgaagaaaggataccacactgtagcaaactgagcggtctgctcacatgctgctattcgggaggacatcaggcttaatcttggaccgatggatgagctttctaacctcttgaacggagatatacttgttgcgaatgtgagggagataacccggatgacaatttcagtaggcaattggctgactatatcatctacataatagacgagtacggcggagatacaaatcctagggaaggcggtcctgaaatcacgcaggctgatctccttgagagaaacaggactgaccgtgctcatgcaagtgaggctgatttgggaggcatgcagtgtgatgctctagcgctgagagatggagggccatttgtcattgcacagacgaagcgtaagatcggagtctaagaaatcgggaaccttgtgctctcttaactgtatttgcatatgtatgtgcaggcgaagcataagactggagtagaagagattgggaat

SEQ ID NO: 133339 - DNA, 340 bp, Glycine max
  Clone ID: PAT_MRT3847_91410C.1
ccatctcgtatcatggaaccataaagcattactacaactccaacttttttggattccaaactcacagcaatgcctattgtaccctcttcgaaatacactaattcacccgccattacttcatctggaccatgcatacgatctataccgtggcctagttgaagtacgggaccctgatttacaatgttgacttccagatcatattgctcaatgcgttcacggatgattgtactaaactcatcggggcgaatggttaccatgaaaagttgttaatcttattattttagaagaaaaaaatattgccgcttctctatttgacggcagaaagactaatcagctcttt

SEQ ID NO: 133340 - DNA, 374 bp, Glycine max
  Clone ID: PAT_MRT3847_91411C.1
ccactggatggactgccaccccatggctggtttttcaggcttcaactgattgttttatttcctctgaggaatgcgttcccagtacctattgtgtcttgaatccacaagatccttgcgtggtaaataggtggatgggaaaactgcctttcccccatggccctcacctaagcgttaaacgaatgcctctttctatcgggggaggcgctggtgcaaagaatgctattctcatgaatctgccaaatgctgtcctttcaatgtggagatattatgctggcgatctcgtattggaagattataagatgacttgtccgtacattaaatgcacagcctgtttcttcatagcacttggaaatttggctgatgacaccatcaat

SEQ ID NO: 133341 - DNA, 940 bp, Glycine max
  Clone ID: PAT_MRT3847_91412C.1
tctcgagccgatggcagaaatcacggctgcgagaagacgacagaaggggacagcaacacacattgttaaaagtttctttatttcaagtgaagttagttagttatatttatatacacaatcatgtcaatgagatcaattggtacaagccttagccttatggtatggcttgtaattgcaacatcagcattagcaaaatctgataaccccccagtcctagacacacaaggcaaccctcttgagcctggcaaagattactacatcaaacctgccataaccgacgttggaggccgcgtcactttgttaagcagaaacaatccatgccctctatatgtaggtcaagagaattctgatgcagcagagggcttaccccttttcttcaccccttttgcagaagaagatgatgttgtgaaggtgaatagggacttcaaggtgacattctcagctgcctcaatatgtgtgcagggcacaaattggaatttggctgagaaggatagtgagagtggaaggaggctcattgctgcatcaggcagggatgattactttagaattactgagacaccaatcaaaggttcatattatataggttggtgtcctacagatgtatgccccttttgtaggtttgactgtggcattgttggtggtttgcgtgagaatgggaagattttgttggccttggatggtaatgtgctcccagttgtgtttgagaaagcatactaatatgtgtagcttcaattttgtgtttgaaatttctgttcttgtaatattgtaacagttgtgaaatgattggagctacttggtaggaccaaagaaagatagcatgtctattttctttttcttaatttatagaataaagctcgaaattgttgtgtgtaatttataggataaagttatatatgttgtctttattatatagaattttatgatttcaaaactcaaaaaa

SEQ ID NO: 133342 - DNA, 638 bp, Glycine max
  unsure (1)..(638): unsure at all n locations
  Clone ID: PAT_MRT3847_91413C.1
ctcgagccgaatgtattaaattttcacaacatccaacccaacttccccaatatttctttacactctttcttcttctgctttcttccctcacccctctaaaaatcacaaagattctaccttttgatgcaaatgggatcaacccaccaaccctagggtcacataccagcaagattcattctttcattcaatctcaaaccaaacaacccccatttcaattatggcaccatttcccacttcccattacttcagggccttcactttctccattttgttcctcaaaaccctagcttttgacccaattcctctgttttcctatgctggctttggaaaagatctgaaatttaagcccaacgtggccctttttggtaatgcaaaggttctcaatgaagggtctgggattcatttctctggctttgggagttcaagaggcactgggagaatcatgtacaagaaacctatcaagctttctcaaggtaaaccaaggcaattagtgtctttttctacttactttgcattttcagtgtccttggaagatggnggtggcttggcttttgttatggctccaaagggttctcaaggtaatgtgttttatcaaagttcttcttctgggttgaatgatggaaaaattgaagttggtg

SEQ ID NO: 133343 - DNA, 441 bp, Glycine max
  Clone ID: PAT_MRT3847_91414C.1
gaagctcctcgtctagtttctccaaaacctgaagtgtatgagttaattagtttctccaaatcctgaagtgtatgagttgattttaccttatggtaaaagctcaattatatatatttttttttttattttcttctcttataagtacttattttagaagttcatttaaacagggggataattgttaagattgtaacaaaatacatatacatgattaacaaaaaatatttcaatcgttggttttactatgcattatctcttctaaagtgtaccaactcacttgagagaagccaagtacaaagtttttaagctacttcataattttaatctagtcaagttggaccattcttcaaaattttataactaatcactgtttcatcaaacagagaaacatatggtattggtaatgaaaatggatcaaacacatagcagaatataatttac

SEQ ID NO: 133344 - DNA, 233 bp, Glycine max
  Clone ID: PAT_MRT3847_91415C.1
ttttcttttcgttcggccacgcgttagcgcaagcgtgcgggagtgagaaaccgtttgcaccacaagaggaatgtcggcttgctcgatgacatatgggatggataaatttgggatcacattgagtcagttgtgatagatacaaaatatggaagtacggtgttaatacaacctgttgtgagaaggttgcagaatatgagtaggacactattcatttgctgaggcgcgataagctt

SEQ ID NO: 133345 - DNA, 317 bp, Glycine max
  Clone ID: PAT_MRT3847_91416C.1
ggtcgccctttttttttttgttttttttttttttttaaactttttgaaattggttttaaaggccctaaaacttggtgtgcttaaaaaaaatgtagtaaggggtttttacaaacacaacacattaaaacagaatgattaaaggggttttgcctccggcgatcaaaaacccaattttgggaacaaaagttgcgaaatgattgtgggaacttcaaaatatgtccgaaaaacaaggcttctaggaacgaataccgtgggcaagaaaccaacatttattgtaacccttagaaacgacctgccctggtgaaaccaaaccgcac

SEQ ID NO: 133346 - DNA, 405 bp, Glycine max
  Clone ID: PAT_MRT3847_91417C.1
attcatccgaatctgattctgatgatgattcaagtgaagataaggtatttatataatctagaaagcagattttataatgaactgctgatgatcttgactcttgcatgatttgtctgatggtatatagtgaaatgaaatgctttgaagaatttaagtccaaaatactaatgattggcctgaaaaaaggcagaataataagtgttgattgtaacacaatgatggcattgtcattgctagatatatgagagaacgtagattgttgggcagtgaagcattcctttgatggttcctacagtgataaaaacttgtaaacatagatgaaatgtttttatgtgtgcattctgactagttattccgattagtgaattatcgattgaaggagattttaaatgattgatatttaat

SEQ ID NO: 133347 - DNA, 415 bp, Glycine max
  Clone ID: PAT_MRT3847_91418C.1
ggaccttccaattctgttgttgactgtttaagctttttattcacaaattaaaattataaagcatgttttccaaaccaaggacttagccttcaaatttatgctgctacaaaatgtatatatgatggataactctattgtaatgttattcacttctccatttccaaattttcaagtacatttctttctgcccccttttttgtgacggaaaaaatttgatgaatcgggtgacaaattccctcttcggaaattggcctgctgaaatcccttacatgggttaaagataatagtatgtatcaggctgatggttatgaaaactttggagcatagtaggtccatggaacatttgctgacttgtaattgttgctacattttttgatattgccttcaagggtcatatgggtttatcagtagatga

SEQ ID NO: 133348 - DNA, 318 bp, Glycine max
  Clone ID: PAT_MRT3847_91419C.1
caaaaatttatccattctctttccctttttttcttcgggtgcacccgttcaatgggagtttctacatactagtgcgggcttataattttattataccctttacttatcacgaaatttgtatcaagaaaagcttttatcgtttgaatattattctttctctctcactctatcttcaattcatatattcacttggataccaacttccttgaatcttgcactcctatcttagctcgcgtacatgctcctctgcagcttgaaattcatgagtaaaataaacttgcgagatccacagctttaatctgctaatactctagctaa

SEQ ID NO: 133349 - DNA, 520 bp, Glycine max
  Clone ID: PAT_MRT3847_9141C.1
accctttctcattctcattctctcttccatttttttttcctaccatcgttcgaagacgatgccttggtgctgttgttctccaaatgccggacgaaaatgacggagatgccgaacgaaaaactcaaaggttatgcttcgtttttcctctctatgtgcttttttgtcgatttttttcacagcatgttcattgtttcttttaaagctatcatttttatctccaaactccatgaatgtgcttcgttttccctctccatgtgctttttttttttcactgcatgttcgttatttcttctaaagctaccatttttatcgcaaaaagcttcgatttttatctccaaactccatgaatgtgcttcgttttccctctccatgtgcttttttttccactgcatgttcgttatttcttctaaagctaccatttttatcgcaaaaagcttcgatttttatctccaaactccatgaatgtgtttcgttttccctctccatgtgcttttttttttattatttttttcactgtatg

SEQ ID NO: 133350 - DNA, 530 bp, Glycine max
  Clone ID: PAT_MRT3847_91420C.1
ttgccgtgctagcatgtgagcacgtcctcctgcttgggggggggggggggggggggaaaatatggtcaagtagcattgttgcacactgagggtggcaacaagtactctataagtgcctacacggcttagagctagatagccatgaagactaaaaagctaaaagcgagcaactagaccaaacccaaaaacgcaagcagatatagtggagccagtaaaaattaaaccctaaacgtgaacgtggacaattagaagtaagaagagttaaagtagggggcaaccttttaagtggttaaaataaacgaacccggtgctacgaataccaatggaagtacaagttgtagatatggtgttagtagtacagaatgtagtaaagcagtgcagcgtaactgccgaatcaacaaggttattaagcttattaaatttgtgctacaaggcccactttgtggcacagggcggccgtataaaggttacccactagttaaaggggggcgatgtaggcctaaattatgtcactaaccctagtggtgttg

SEQ ID NO: 133351 - DNA, 385 bp, Glycine max
  unsure (1)..(385): unsure at all n locations
  Clone ID: PAT_MRT3847_91421C.1
gggggaaaataaaaccataaaattgggcccctttgaaaaaatttttgggggaaaataaatttgaaatgggacctcggggcttgacaaatccccctggtcatgagggactggttcaaaaaaaaaaattgggcccaaaattatttgcttaatccgggggggggtaaaaaaccaccttcaaaacccttttnaccttttnaaagtttttcaaaaggggggccctctttcccgggccggttctgaaaatttgaaaaattttacaaatttctttggcttccctttgatattacgggggttaaacacacccccccagggctttggaaaccctggaaaatgttttgaggggaaaagttgaaggccccaaaaaaaattttataagggggccaaa

SEQ ID NO: 133352 - DNA, 405 bp, Glycine max
  Clone ID: PAT_MRT3847_91422C.1
gttccttggtgacccccttcctttctgatgttttcttcttttttctcctttttcaaaaaaaaaaaaaaacctcttctgggcttaaccaacatgggcctaaacggggggcttccccaacctttttttttaaggggcaacttttttccctgcttccacaaacgtggcatttgttttttcttatcccgcgttgtttgctgccagctctctagccaatgccttttctcttttccaatatcaaaaccctgcttttttggttggctgtggaagaacaagggacaaaattcccttgggcttttttgcgggctctccccctccccctcccggggggcccaaaggcccacccccgcccttggtgctccaccccggggggaccccccccctctttcttttggggcttgagaaagg

SEQ ID NO: 133353 - DNA, 352 bp, Glycine max
  Clone ID: PAT_MRT3847_91423C.1
gggatggatacatatacgacgactccaggggaagaagtagaggctgttgattaccaatatgacacaagatgcaggagctctgatagagatcgttattatgatgatggacaacactcatctcgaggagagcagatgctaaagctgaacaccaatctctggacgcaaggattgagcggaaactttctgagcaaaacatgggtgctcctcctagctatgaagaagctgacagtgaatctggcagccctgtgcacagtgaaagagatgaggatactatagcagtacctgctactagagactgctgtactaatgtgaatgatgatcctaggcaaacctctgctactacgggatcttt

SEQ ID NO: 133354 - DNA, 1298 bp, Glycine max
  unsure (1)..(1298): unsure at all n locations
  Clone ID: PAT_MRT3847_91424C.1
ngaatctcaaatccacaaaccaacgggaaagaagatacatcaaactaattatctaccatgctttctgctattaattattcccttcttgcaaccattttcttagtgctaaccttaatttttccttcagaaggccaattgagttcaaccttctattctagcacatgctccaatgtgtcttctatagtgaggagtgctgttcagcaggctcttcaatctgattcacgaattggtgcaagcctctctcgcctccactttcatgattgctttgtcaatgggtgtgatgcgtccattttgttagaccaaggtggtaacatcacacaaagtgagaaaaatgctgctcccaacgtcaattccattcgaggctttgatgttgttgataacatcaagagctccctcgaaagttcatgccctggagttgtatcttgtgctgatattcttgctcttgcagcagaatcttctgtgtccttgtcaggaggaccttcatggaacgtactacttggaagaagggacggtttaactgcaaaccaagctggtgccaatagctcccttccctctccatttgagagccttgccaatgtcacttccaaattctctgctgttggcttagacacaaccgatcttgttgcattatctggtgcacacacttttggtcgtgcccaatgccaatttttctcccaaaggttattcaacttcagtggcacaggaagccctgatccaaccttgaactcaacctatttggccactcttcagcaaaattgtccccaaagtgggagtggatctacattgaacaaccttgacccttctacccctgacacttttgacaacaactatttcaccaatcttctcatcaaccaaggtcttctccaaacagatcaagaactcttctcctctaatggctcttccacaatctccatcgttaacaactttgccaacaaccaatcagccttcttcgaagcttttgtgcagtcaatgatcaacatgggtaacatcagccctttgactggatcccaaggagaaattagaactgattgtaagaaattgaatggaagttgaaaagagagagagagagcataaaacaatatctacaagaagttgtagaatcttgatacaacatatagttttgattttgcatttgtgtatgtgagtgtagctaagatatggttaagcaattgatgtaggtcaagtttttgcatgtgtgtacgtcccaggggatttatagttttgtttttgccggtgtcaaggaccacaaaatggtttagatttttctttttccaatgagaaattattaccccttctat

SEQ ID NO: 133355 - DNA, 1764 bp, Glycine max
  unsure (1)..(1764): unsure at all n locations
  Clone ID: PAT_MRT3847_91425C.1
ttttggtttttttttttttttttttttttagggcatagaacgtagaactatgtacacttagttgtgttgcttagttgtcaagcttatagcacaatggtcagtgaacgatgtacacttatttaatactattgggtataacatcaattcctcccacttctgatagataatcagctagattcaaaatcaggcaattacactaataagaattcttagtttttcagtttttctgaacagaagattatatatattatgcttaatccttcaacgaatgtgaaaactatttatataatacagctagctaacaacaactacttgtcatacagatgcaagtgaacggctttcaatacaaagtacaaacagcttaaaaaaatgctgaatggaagagcaccagtgttagggtggtaatgtacaacccagttgcgatttctatacattttggttcctcattgatttatcagcaagaagaacatcttcaatccaagctacaatgttgaatgctaagccttctaatactcttgagtagctttctaatatcgcttttcctacatcctggttgtattgaattttgcatgtgtccaatgatgtttgtgaaagttcgggatatctttgcttcaagcaaaacaacaaagtctcagctctctcagctaagatgtagtttttgtcacttcggtcagtgtcagccatgagatccttaactttgttccaagatgtttttgagtggctcagacaagcttttcgcctccaagtgaacattgaagactcaaccttatctgccagctcaagtgcttcatgttcagaacttattttgagacagtcaagaaggtgatcaggtgagaacttgtctgcagaatacatacagcggtaaattgtgtccccccccttctgtcgtcttcgcagccgaagattagacatatatgtttctgggatatccatctctgcaagaacactgctatttattgccattgctgctttatgaatttgattagcacagtctcttttctcattcaagtgcttccttgacttatcagagaggcctccagggtgaacacaaggaactggcagccaccacttttcatctttcctctgaacaatccttcgaaatgagcctccacgtgaccgagttgaattccccgatatgctcccttgctccgcgtaccaaaattcagtatccttgaaactatccaatatttctatgagcattgtgtcaagcttctgcaaagctgggaggttgatgtaaacatctgatcttgcttgcttgtcatcatctaagagacaccacntagataacatattagacacattatgagatgcacaaaaattgggtttgtggactccaatagtacttagtagttatcacactagtactccatgatcacctatgaacatagacacatactatgatatcaaagtaggatccactactcagcttaagtagctcattttgcttaatttatgcagtttaagtagctcattttgctgctcttaatgggaacgggtgcactgttaaaataaagttttttctgatttccaataaaaaatatcatcaacttcaaagaaatgaaccttttctgattggtatgcacctttattttacagggaattttctctctagctccctgaaaattttgtctaattcaattttagtccaccagaccagctaccaaatttaaaaaccttatacatcactggacctcatacttcataagcatgtggattatactttgaaccccttgaagatttagacacattggaaacaataaattt

SEQ ID NO: 133356 - DNA, 1658 bp, Glycine max
  Clone ID: PAT_MRT3847_91426C.1
cttgctgggtttgctgggtttgccgtgtttgcgttctttgttccatcggagaagacccttttcccttttagcttcactcttttctctctctttatctgtcaacgatccaagtctacttctgaagcatctttttactgtcacttgacatggcatcaagacaccgtgttcacagagaacccttgaatgctcgaaggggttacccaccggaagggccatatgctcgggtggctcccatgcctcgaccactgcctcctattcctcctcatccgtctgtgttggaagaggaacttgaatttcagcatgccgagatgcgaaggctcgtggcagacaacaggaggttgattgatgaccgaatggcgttgcagcgagaccttggggccgctaaggaggagcttcatcgcatgaatcttgccattggtgacattcgcgccgagcatgaggcgcattcgagggagcttgttgagaaaggcatgaagatggaggctgaccttagggcaaatgagcctttgaagaatgaggtcatgcaactgcgatctgaagttaagaaacttaacaatctcaaacaagagctgacaggtaaggttcagacactcactcaagatgttgcaaggttacaagcagataatcaacaaattcctatgatgagggctgagattgatggtttgcaccaagagctaatgcgtgccagaaccatggtggattacgaaaagaaggcaaacatggagttcatggaacagaggcagtcaatggagaaaaatttggtttccatggcccgggaagttgagaaattacgtgctgagcttgctagtgctgatagcagacattggggtgctggtatgtcaggtgggccttatggaacaaaatttggtagcccagagggttttccagctccatatgcagatggatatggcagtgttcacctgggtgctgcagataaaggtcctatgtatggggcgggtgctgcctcaagaaaggagcatgagaagccacacatgaatcgtcgttgaaattcaagttattgctattggtgatgaagaaaggcttgctatcactttgccttctctatttgcagaatagctgagattgagtttgatgtccttctgtgtatgcatgcgacaacagtggtcattttatctggaactctggatatatttagtcctaaactggcatatgtaggttttagtgtcgctttgcttttttttaaagaaaacattgctgcagtatctcagtttataatttagtatgatggaattcttcactttatctaaaatctgtatatgggtgatttatcactagtcccactcatgaaaggtgccaagttaagtatttcaggaaattgaataggcgtgttgagcttcccaaatttcccagactgaaatctctttaatgcaactgtaagaacattcggggcctctgaaactgtcagcttcttgtagtacagatagcacccgtgattcaaccaacacagatgacttctccgaatatctttttggtgattcagggaatggttggagtagtgtgtggaggaattctgattctgacacatcctcctcctcctcatcttctcccttgaattggggacattcgcccatatctgatgtggtccgatatgattcagtctccctactactgctgttgcctcgatccgagctcccggc

SEQ ID NO: 133357 - DNA, 889 bp, Glycine max
  Clone ID: PAT_MRT3847_91427C.1
cggccgctcgaggcagcgggtccattgtactcgagccgattttgaattccatttgtgctctcacgcacaaatatatataggcacacacgcgcttataatttatggtacatgagaagtgttttttgtccattgtagattgtcacatatagagaaacagaattagaagaagggtagctgggaaactttggcaattgaaacctttttttccattgagtgatagagagcatggagaacatgaagatgaacaacgatgaaaggtttgcacaaaagggtgtcccagttcatagccaggttatgaagatcaagcaagagtcagagaaaattgttgattggtcccctggcaagccagagataagatctgttcttcgcgaaataagccggcaaatttcccgatcgccgttggggatctccggccaaccgatttcagttggtgagtcataggttcagtatatggttaagggtttttggattagtgtgttgatgtacacaggtggaagagggaggttctgtttgcttcccctgctcctgttctgttttcctctgttttttggtcagagaatatttaggcatttagctatattctccactttttttcttttttctttttgttgtatataataataataatagtgttattggatatatcatatgtgttttatttttttatttttttgtttggttagctttagttttctggtttgatatgttctatcaagttgggtggggcttggggaattgattttgaaggttcctcaattttgaatggttcagtcatatacttagaaagaagttaaaagaagaagaaaagtaagatccaattggttgcttgtaactcgtactagcctttgtgtttgaagtcttccatgattgtaatttgggttttctggtc

SEQ ID NO: 133358 - DNA, 402 bp, Glycine max
  Clone ID: PAT_MRT3847_91428C.1
attcttatcacatcttaattgattgtttttgctcttaatctttttcaatggaggctgaggttttaagagctaccatgtcaccaccaccttttcctctgtctggttcttcaacaaaaactcacagggcttgctttcccttcaaccccatctcatggaatggcaaaacattgggtctttctcttcaggcatttcccccatcatcctctggacatgtgccatcagagaaaagtgatgatggaagtgaaaacctgacccttgaaagtataagacgtagtttaattcgtcaagaggatagcataatctatagccttttgaagagagcacaacatttatacaatgcgaaaacatacgaccctgaaaacttctccatggatggatttcatggctcggtggttgaatact

SEQ ID NO: 133359 - DNA, 605 bp, Glycine max
  unsure (1)..(605): unsure at all n locations
  Clone ID: PAT_MRT3847_91429C.1
aaggcggggataataactcacaataaggggaaatggggcccggcccccccctaagttttttttttttttttttnnnnnnnnnnnnnnnnnnnnnnntnnnnntnnttnnnnnnnttttttttnttnttcagtgctgtaattcaaatagtttgttttcttccctaacaaattcactttcaattacagatcaaatcaaaactaaattacattacataagaaggaaaaagaataattgcttatcttgagtaaaaatcacaatacagaaatcaaaatagcgaaaattaggtcagggaattgttttgacgagaagagaggcatagagagagagaaagctgcgcctgctggcactggtggcgcttgtgagcggtgccggcgctggagcagagggtgcgcaccgcctccgattccccaggacacgccagagaaacgaggcacatcgccagcccctggttaaggtgccggcacgctgagtcgcgactcggacccgccggaactcgccggtggcactcccgcagcgccttctccacgcgctcgcacgtgtcttctcttctcatctttctcgttccttccagatcgcacgcaacgcaacgcaaccgaaccctcgt

SEQ ID NO: 133360 - DNA, 551 bp, Glycine max
  Clone ID: PAT_MRT3847_9142C.1
gttagatatggagagaatggtcgtttcctgtcttattcaatacagaggaatgggcatgtcggtaattgcaaagaaaaactttggaagaggagagttctttaatttttattgtttatttatttggtacttgaaatgctttccagtttccaactagcagtactgtggctttctggagtttttggactgtatgactttcttcccttttttctctacattctgtttgcctaagactttttttttcttctgaaaatagctcctctaaagtgagaaagtatgattatattcaccattgttttgaattaaaatattctgtaaacttattgcatttaaaatcaatgatggattcattctctgagaatgtcgagagtctgagatctctcccaaaccaacccttcacactagaactgaatgtcactagtcttctttccctatctatttatagccaattgtttccattctattaaaactgtaactaacaattactggctatgactccttcaattaacagaaccattgggcttacctaacaatactctcccccaatgttatca

SEQ ID NO: 133361 - DNA, 260 bp, Glycine max
  Clone ID: PAT_MRT3847_91430C.1
gagttcagtggagtggccaaagttggcgcattgattagcattgaaacttgcatggaaattatggatcttctgtacgaaaaagaggaaatgtcgattctgtttaggtctcctcactccattgctgcatcaatcttggtatatatattccctagttatttcaaagttccaagtaatatctcatataagcaatttactatttcaaagttgtaatatacttttgcagtgcctcatatgtaatgacagtccctaaacagaaatgg

SEQ ID NO: 133362 - DNA, 360 bp, Glycine max
  Clone ID: PAT_MRT3847_91431C.1
cgctacgaagctggaattggctcgagatttgaactgtttaatggtgaattttatattaaatagtaaattaattaaagatgttcaattctgaattgatttcaaaaaattaattttaaattaaattgatttttaatcaatttaactgattctaagagtgaaaataattctcactgtccttagttaaaaaaatatttggtgaaaaactaaaaccaaaatattttataaaacaatttgattaatcaattgattttataaaataatacactttttattatttgggtaaaaatcaatttatttaattgatatatctgattcgttgaataggttttgtttttacaccctttaacccaattcaaattt

SEQ ID NO: 133363 - DNA, 508 bp, Glycine max
  Clone ID: PAT_MRT3847_91432C.1
acaagaaaaattattaggatatagctttcctcatcccacactactatgcgatccaaccatggtcccacagttccggtgcaacacattaggcatttaaaaatgcacctattttcacctaaaaatgtgaaaaattgatatatgcaacgactaacaccatttgggctctggaaaagaaacctatacagggtaacattgtactcctagcccatggaccatcacattatattctcaccttggtggaaatcaccagtgaccatacctatgggcacttagaaggaggaccaatgagtttgctaccatgaacgatcacgcccactctgcccatagctctaggacggatactcaacactttcatatgtgcccacagaacatgctggcctcacctgtattggacccatattacgctgtgcgcagcggtataatgctcgttagcttgcccggcacacatatcgctcagttccgcgatagaaatgctgaccttatgcgagctcagaacgtgtaatacaac

SEQ ID NO: 133364 - DNA, 461 bp, Glycine max
  unsure (1)..(461): unsure at all n locations
  Clone ID: PAT_MRT3847_91433C.1
cataaaaataaanaatactatcttctctgctctctttctactttgtgccttcaccacctcatacctacctctaaccaccggtgaaatctatacccaccgtgatattcttcacaattctcacacatactttatcttctacgcttttccaccccgcggcagagtataattctctcccacttgaaacaaaactttccctctcactgtcttgcacactctcttctggaggggctttccaccaatattatcttcccngttaccaatccctttcatctgcgaaagacaactcttcaacatcctgttccgtattgtgccatagtgcgccaccactccttctaagtngaccatttttgagagttttccagaatcacctcctgttaaactcactttgtactacaacacactaccttgtgtagtttaaaatttagaaacttaccctttccataacacctttaccctttttt

SEQ ID NO: 133365 - DNA, 475 bp, Glycine max
  Clone ID: PAT_MRT3847_91434C.1
accaaaaaaaaaaaaaaggaaacaaaaaacaaaaaaaaaaggaccggtattaaggggggggaaccccaaaatcagggccaggaaattttaaagggaaaaaaagaacctttaaactaaataaaaaaaaaaaccccccccaacggggggcaattttaataaaacaaggacccttattttaaaacccgaaaaaaaaaaagggggggaacccccagggcccatttttttaggcaatttagcccccaaggggaaaaaaccccaaaggggcaaccccccccggggtctcccccaattccttttggaaggagccattccccccccaatttttccccaaaaaatttttaaagacccaaaaggggacccctttttaaaccccaacccccaaaggggggggggggggggcaaaacccggggaagggccccccaaaagggcacaagggaaaccccccttccgggaaaaagggacccctttcccccc

SEQ ID NO: 133366 - DNA, 263 bp, Glycine max
  unsure (1)..(263): unsure at all n locations
  Clone ID: PAT_MRT3847_91435C.1
gttctaacagttcccactcactttcgcaattacgcattgtgtttctctctttccgcggcgtagatctgaacagtttagaaaaccctaactgctctcatcactctctttgctttttttcctctccgatcaatgacctctttggtcgcgctaagtcatggcaggacttgcacacgagggatcacagtttgatgctcgtcaatatgatcagtagatgaatgantgcttacatctgatggacaggattttttcacatcttatgatga

SEQ ID NO: 133367 - DNA, 405 bp, Glycine max
  Clone ID: PAT_MRT3847_91436C.1
aaacgatggaagatgacgcagcgattgaggtgaggaaccatgtttccccagaaccagagccagagtcggaggaggattccagttgttgttgcccaatctgcttgggaccattccttcaactttcctacctcgacaaatgttttcgtatgccctcaccctattttctgttgctcaattttctgtgttttttaatcctaaagtttataaatttgttgcatatgctatagaccctttattgggtttcattcatgaattgggttgcatgctctaatttgtagtcttgggaaacctttttgtttgaaagtaactctcggtaattatatatcaacacaagatttgttttattagaggatcattacttgaaagttcagattttagcaacaattaaaagtaattgtactatat

SEQ ID NO: 133368 - DNA, 382 bp, Glycine max
  Clone ID: PAT_MRT3847_91437C.1
accacaaccaaacacacaagggagaatgctttaacagtgtgagacttgggaaagtgcaaatgaactaccaagtaaaaatacaattatataacggagattacaggctggggatctgcctccaactacacaataactgggacttttaaaatatttaatatcattcttttgtggcaggcacctccgcctccgcctcagaggaataatcatgccgcaatttggggggggaggtgggataagcctgtgcctgccatgtgaatggttacactaaacaggggccaattttttggggggaggacgggggcgtggaacgagaccaaataattccaggacctgtgaccggtatttggtggggatagaaaaggttcccgggggggtttgagaa

SEQ ID NO: 133369 - DNA, 401 bp, Glycine max
  unsure (1)..(401): unsure at all n locations
  Clone ID: PAT_MRT3847_91438C.1
tctccattggtccttaaacactcatcagtcatcaccatggcctagctagttttttccctttgattggtgatgtggaatggctgctcctccgctttcanttccagagagcatcctcatcaaaacgagtgccagatccaaaaactcaatgccctcaaaccgcattaccgtatacagtcagaaggagggctcattgagacatggaaccctatcaacaagccattccagtgtgccggcgttgccctctctcgctgtaccctcaaccgcaactcccttcgtagacctttctacaccaacggtccccatgtaatctacatccaacaaggtaagggtatttttggtcttatatacccgtgttgtcctatctcatttgaatagcctcatctacctcatcatagatgaca

SEQ ID NO: 133370 - DNA, 250 bp, Glycine max
  Clone ID: PAT_MRT3847_91439C.1
gcccgaaagcaaggttttttaaaatttttgccgaagaagcctacaaaacccccgcagctcctgggcttacaagctccacatcaaactttactctcaactatgacaagcctcaataaatcgagattgcacccacagatattataagccgaaagcaatcttgataaccacaaaccccaaaccttaggtagtaaagataccaggaaccagcttattaagaagaactaaaatataggcgaagacataaatcata

SEQ ID NO: 133371 - DNA, 192 bp, Glycine max
  Clone ID: PAT_MRT3847_9143C.1
gccggaccggaattcctggcctttcccatgcgactgtctattcttagggaccgccaggcatcaggggccacacacaggatactacagggacagttccataactataagcgcggtctggcctgcgacaaccaaactccggaccttacgaagatcccgggggaacacatacatggagcacagcgttcaccaatt

SEQ ID NO: 133372 - DNA, 276 bp, Glycine max
  Clone ID: PAT_MRT3847_91440C.1
cctactttcttttttggtttctttcattccatgaaagggtgaaaaacaaatctcattacatagaaagagctggtgcctatttggatatcaggatcactcgtacaatacttctggccctagatgctcttgtacagaaaacattcgaactttgattttacggaccaaatccactggcttcactaaaaaactcaacagagttatgttgacaacaatgtttacactaaatttgcccataattatgcaacccattgctgattatctccctttcaagacctt

SEQ ID NO: 133373 - DNA, 426 bp, Glycine max
  Clone ID: PAT_MRT3847_91441C.1
gggggcagaataaaacggtacagggacaaaaccgcggacgttttgacctcataatcctgatcacgttatgcggggacatgcgaatactgtcctccgctaaaccctcaaattcctcaacaccccatgctaccccctcaaatccataggcatagtgggcctaagtccacaaatactaacccaggctcttcagtgggcctgcaggcccaacccttcctcttacttacacattctcactcgggacaccgccgacccctcctacctccggtccctttgcacccgtacgggccttctcctcaactgcgtgggccccttacagctccacggtgagcccgtcgtggacgactgctccgcagctgactgctactacctagacatcttctgcgagcccgagttcatagagcgcgtggaggccgagcaccacaagcg

SEQ ID NO: 133374 - DNA, 444 bp, Glycine max
  Clone ID: PAT_MRT3847_91442C.1
gccactcccacacagactgatgcctgatcgcgacagagggtagttcctcaatgcaatgaagttcaggctcaaatggacaccacttggtgaaaattggctctagatgatgatgaaactcccaaaggttacatgttggctcttacaattgatcaatctaaaatggcacttgccaaagacacagatggcggaaccattctgcgtagagatgtattggcaaacttattgacacagggctatcccagagcagagtcctgatttgcagcccactcatcgtgttaaaggaatgattgaaatgttggccacagtcggtattcctgagaatacaggaatagcagtggcctgcgctatgaataggacatctagggggcgcgccagatctgatatttacaccatctggtctgaagactgcgaatgatggaatcctgcttgaccaaaagccatgac

SEQ ID NO: 133375 - DNA, 569 bp, Glycine max
  Clone ID: PAT_MRT3847_91443C.1
tccaggtccgtcactccgtcacgtggattgtggcctagccttaggtaaagcgtggtggggcgtgggcgggtgtggataaggggaggggctggtgtggttggccacaacacggggcttgggtaaataataaaccaccatatacaaactactaagtggtagtaagagatgtagtggccgtattgtactgtatgttggttggtagtgggtgctactgtggtgcttaaaccgtttaaaacaaaactagtaggacaacgccgatataaatagcccttagctgtttaatgcaagaagtagcagcctaaactaaacgtgaaaatattatatacgcacaggtgcaattaacataaacaaacccagaacgataggaatgcaaccagtgtaaacaatggcccttaacagacgacgcgcacgcaaggccatgtacggatatgattacttaacgtgccgacttggaggcccgagcccaaggatgggcgccgacggccatggccaatatttaacagccatggcgtatgtagtgagcatatgcctacgcagtgtatggccatgtacgcacaattagcgctgtc

SEQ ID NO: 133376 - DNA, 1445 bp, Glycine max
  Clone ID: PAT_MRT3847_91444C.1
cccacgcgtccgggcttctggaatcgcatagtcacatcacattcgcagcagccaaaccaaaccacaccgaaacctccaaaaccctagcacgccaccgtccatggcgacgacacgatccgcgccgctcctcaagcacctcctcacccgtctcaacccttctcgctccgtcacgtacatgccccgtcccggcgacggcacccctcgcggcgtgacgctgatcccgggcgacggaatcgggcctctagtaaccggcgcggtggagcaggtgatggaggcgatgcacgcgccgctgtacttcgagaagtacgaggtgcacggcgacatgaaggcggtgccggcggaggtgctggaatcgatcaggaagaacaaggtatgtctgaagggaggactggccactcccatgggcggtggagtgaactcgctgaacgtgcagctgaggaaggagctcgatctctacgcctcgctcgtgaactgcttcaacctccctggcctccccacgcgccacgacaacgttgacatcgtcgtcatcagggagaacaccgagggcgagtactccggcctcgaacacgaggtcgtccccggcgtggtcgaaagcctcaaggtaataacaaagttctgctcagagcgcattgctaaatatgcttttgagtatgcttacctaaataacagaaagaaggtgactgctgtgcacaaagcaaacattatgaaacttgcagatggtttattcttggaatcttgtcgagaggttgccacaaggtatcctggaatcaagtacaatgaaattattgtagacaactgctgcatgcagcttgtttcaaaaccggagcagtttgatgtcatggtaacccccaatctttatggaaatcttgttgcaaatacagcggcaggtattgctggaggcactggagtcatgccgggaggtaatgttggggctgatcacgctgtgtttgaacaaggtgcttcagcaggaaatgttggcaatgataaagtagtagaacaacagaaagcgaacccagtggcactccttctctcgtcggccatgatgcttagacatctccagtttcctgcatttgctgaccgattggaaactgccgttaaaaaagtgattctggaaggcaaatatcggacaaaggaccttggagggacaagcaccacccaagaggttgttgatgcagtgatagatgctttagactgattcatttattttctcatcttccaaacgaaatcagcctcgtgtatttttggctaactaattttatcaacattatttttgcaccctttatctgcgaaattgccatttttttggtccataataatgttaaatattcaacacaaaaaccgatatgataagaatttatagagtttgatagctggtgtttgttactattcttttttaagcatgaattttatgtatgcttttaagtttcaaagtttcttgtattatt

SEQ ID NO: 133377 - DNA, 188 bp, Glycine max
  Clone ID: PAT_MRT3847_91445C.1
acgcttgtggttatggctatggagcaggagcacaggggttagaacaggctaaaaggagcgccacaatcgagaaggagaatgatttgttgaatagcaggggttcgaaatagctggatgaggttcgacagcacaggttgaattgatcgattctctgcagagatgggaagatgctcatgaggaaaaagatc

SEQ ID NO: 133378 - DNA, 800 bp, Glycine max
  unsure (1)..(800): unsure at all n locations
  Clone ID: PAT_MRT3847_91446C.1
cggtccggaattcccggngtcgacccacgcgtccgcaaagcagtggagagaaacaccagcagcagcggcagggtccaaagcaaacgccagaaaatccaaaccttttttaccccaaaaaaaccttttagcataatacatgcactgttgttttagcaaacacacctctacgaatctcaaaccaaataccaccatataatactaccaatgtcccatgaatctcttcacctttcttctctcttgctataatcattttcaaccaaacccaaacccaaacccctttctctcataaacaaagcaacaaaggttcatcccagttaggagttaggacctctcttcctttttcatttcctcgaatcccaaacaccacaaaaaccaaaacccacctaaaaaatgcaatcattcccctccactctcgcatgctttactttttcaacgtcactagtactagtactactcttatttctactacctttttctcgggccgggttactctccgaaccggtaagcgaccccaaccagccactcgaaccgggctccaacacggtccctgcctttcccgtccagacccaggccctcaccctgccgcctcgacctctccgacgagctattctgcggagtcaaggacgcctgcgggaaagacctcgaccggagccgctgctgtcccgtcctcgccgcctggctctttgncgnccacgcccgcaccgccctcgaagttttcgtcgccccgccttcattcttcggcgacctttcgatgatgcccgacgactcacaaaaatgcgttaactcgctccaggactcgc

SEQ ID NO: 133379 - DNA, 422 bp, Glycine max
  Clone ID: PAT_MRT3847_91447C.1
gtcggttcatctccctttccctgaatgaatcactgatcatgctgttttggactttagagtagaccatactgcttaaactcgagtcaacattattttgcgtcatctaggtggtgtcaaaaaaggttgtctgggtgtagttcccccccttgttttagatttctaggttttgctttttagtattttttaggaataaaacctgcatctgttaaatttggaccccatagtggatattattgtttatggtcttggccttttggtttgtgtcactcttgcttagaaactcgtctagctagccaacatgcatctttttatcaatttttaagttagataataggtatcgatggacatgaagtatgggaggggtagcataattgtgtccactgtatttttaattgtttgatattggatctagggtggtcgac

SEQ ID NO: 133380 - DNA, 388 bp, Glycine max
  Clone ID: PAT_MRT3847_91448C.1
aaaaaggaaaattttgcccaaaaaaacaaaaaacagttcccggcccttattctaggggaatgggggtttttcccacaagaacggaaggcgtttcccccgggttgggagggggaaacaatacagttttctaaaaaaaaacgaaatattttcccggttaattgggtaaaaatttaaccttacccaaaaggctcccccccggggtgggccccccaacccccgggggggggggcccacagggacagcttttggcgttttaaaggggggggccccccccgtttttattttacccaaatctttgggtccccatatccccacggcctctttttttccagaatatttcccacaaaaatcaaaaaaaaatttggttgggggccaaaactccattttt

SEQ ID NO: 133381 - DNA, 165 bp, Glycine max
  unsure (1)..(165): unsure at all n locations
  Clone ID: PAT_MRT3847_91449C.1
ancttcgagtnggtgttangcgtgcaatganacaacngggtaangtnccatcatcngttatnctcaagcnacagcangcatctcggtgnncttgcaantgcttggcatgcnatattgactggcaccatgttcantgtgattacaagcncnggactagtccagcag

SEQ ID NO: 133382 - DNA, 455 bp, Glycine max
  Clone ID: PAT_MRT3847_9144C.1
ccgatccaattaaacaggtcgggtaatggattttatttttttagtccaacctgatccaatccataccatataattaaatttattatatataattaattatcaaatacaaaacacattaatttttacctcacattgtttattaaattattaaattaaacctcattatttttttcttttttaagttgtttttatgtgtcttgattttgtttgttttctcattctaatacaatgctttatttttatataaaataaaatattgtattagcatttaaattattaattctattagtaaaatattatcacaatttgatctcttttgaatgcatttagttattatatacttaccaaattttaggcaaaaaaaaaattattgttctaaaaaaatattttttttacaaaataatttttttttcttcaaatattcagactggattaaccaaattaacccatttatg

SEQ ID NO: 133383 - DNA, 1914 bp, Glycine max
  Clone ID: PAT_MRT3847_91450C.1
ctcatatcaaaaacatcgccaatattcacgtccgacggctgcgagaagacgacagaaggtgggcgaaaacccgaaaagcttaatcgcttcgtgttcagttctccgatccaaacagaaccttattattatcattcccctttccgttttctcgttctcctttcagtttcagcgagaaaacgaaaacgaaaacgcgcttcgttcgatcgcgtgcgtgcgtcgcaatgaacaacgatttcgtttggcttccttcgctgtattccgatccggaactattcacctatctggagccattcgtgttccgcagttctccgagctcgcatttcctgcaatcgatggcgaacaattccagaagcttcgcgctcgaggaggcgttcggacacgtgtcgcggttcgccggcgcgttgctgttctggctctcgcgcgcgtcgagttccaatttggcgcgttccttgcgcggttctccgccgctccggttcggtagcgtgcaggttaaggctgggtcgacgacgaatgtgcgcgtgttcgggtttccgttcggatcgaagtggaaatcgtcgttttcgagtgtgaggttggggaagatttcgagtttggcgatgaggatgatttggagagaagcgaagaggcttagcttgttccccgttctgtcgctggctgttgcgttggttccaccgtttcaaaacttgtcatcaaatgtactagctagcccgttgctcaatcctgatgtgcaaatttttggagccatggaccaagtgcctaaggaagttgaatgccaaggatgttcgtttctaccgtgtcttgagttgagccaggcaaaacctgcagtggagcctaaaactggtattgaatttcctttggttctagacaatctattcactggagagaagaattacaacttaaactctgaggtcctggttggaacaggatccagaaccatgacaattgttaaaatcaagtcactgaaggtctatgcttttggagtttatgttcatccatattccctctgtgagaaattggggccaaaatatgcatcaatttctgctgatgaattgaataaccatcatgacttctacaaggatcttctcagggaggatatcaatatgactgttagacttgttgcaaattgcaggggtatgaaaattaacagcgtgaaagatgcttttgaaaaatcacttcgagctcgattagtaaaggcaaatccatccacagactttggcacgagaatccatccacggactttagctgcctaaagacatttggttcatacttcacagagaatatctcaattcctttgggaacagtaattgagttcaaacgaacagttgatggacgtctgatcactaaaattagtgggaatcagataggaagtgttcacagcaaagatttgtgtcgggctttctttgacatgtacattggagatgtccctgtgtgtgaacaaactaaaaaggagattggcatgaatgctgcgaatattattaggaagtgctaaaacaattcattttctatccacttgtcctacttttagaatggacaattggacatggatagcatggcaaattggcgtatacccttaacttataatagaagcagtggtttcttgaaattgatttcaacctgcttttaaaatcattcgctggcattacttccccaggtgtgtcctttgaatcatagaagtctttaggatagcttaaattggattttcattggaaaattctttctgttcctattgactatatcattatattcatcgccttgatgcccccctatccctcatgttagatgtactcatattttagagaatgaaaagggaaaaaaatgcagataagaatgtttgtgcccgtttgctcaaccaaaaaaaaaaaaaaaaaaaaaaaaaaaaaagggaaaagggcggagactgagcatcgtacgcgg

SEQ ID NO: 133384 - DNA, 326 bp, Glycine max
  unsure (1)..(326): unsure at all n locations
  Clone ID: PAT_MRT3847_91451C.1
agggaaggcccacacggcaatggcgatggtgcagttattcaacggaggctatcacgtcatcaccaaanttncactcaacntcggggtcaaccaaatgcggttctgcgtctttccnatctcattnccctcnccattctcncccctctcncttacatccncnaaaagcgtacacgggcacccttaacaaaacaccttcttgtttcattcttatttcttttatttacttgggaatttttcaaaaccacccctccttttttatttgcttaaactatactaatccaacttattcttttggaatttaagcaaccactccggtctttactttt

SEQ ID NO: 133385 - DNA, 1202 bp, Glycine max
  Clone ID: PAT_MRT3847_91452C.1
gtcattgttttgaactttagagcatgatcataattgacattttttatgcaagactctgttgcatccttgagatgttaatttattattcactgatagttttctatttagtcatagccttgtgacttgaaactggggaagtattcaacatgtattttgggtttgcaggatacgagttccttatccatttcaatggggagcacctacatttgatgcaggtgaagcctttgccatgatgatggcatcctttgttgctcttgtagagtccagtggagcttttattgctgtctatcggtatgcaagtgcaacaccattaccaccatctattcttagtcgcggcatcggttggcagggagttggcattctgttatcaggattgtttggaactggcaatggatcctctgtatctgtagaaaatgctggtcttttggctttaactcgtgttggcagtcgaagagtggtgcaaatagcggccggttttatgattttcttttctaattctggggaaatttggagccgtttttgcatccattccacctccaattgttgccgcactgtactgcttgttcttcgcttatgttggagcgggaggtctaagttttcttcaattctgcaacctcaacagttttagaacaatatttgtattaggctactccatcttcatgggcttgtctgtgtcacagtacttcaatgagtacacagcaattaatggttatggtccagttcacaaagcaagatggttcaatgatataatcaatgtcccattccaatcaaaagcatttgttgcgggttgtgtggcatatttcttggacaaccccctacccaagaaggaagctgctattaggaaagatagaggaaaacattggtgggacaagtaccgttccttcaagactgacacaagaagtgaagagttttattcactgcctttcaacctaaataaatacttcccatctgtgtaactgtgcagcttaactaataaaaatagggggtttcatttcttccaaaaaaaatgagtcaccagagtctctgagtggtcgtgatttgactttttctgatatgagattggattttattacaggttatagttataatgaagtcctcttttgctatagaatattctataacatttgttctattgcttttctttctgtaaatgctgacttggaaagtggattcactgtagtaaagtgctcattttatttatc

SEQ ID NO: 133386 - DNA, 527 bp, Glycine max
  unsure (1)..(527): unsure at all n locations
  Clone ID: PAT_MRT3847_91453C.1
atttgttattagcttttgtcatgaattcacgtacactaacaattttatgtgcttttcagttcaatgatataatcaatgtcccattccaatcaaaagcatttgttgcgggttgtgtggcatatttcttggacaacacactacacaagaaggaagctgctattaggaaagatagaggaaaacattggtgggacaagtaccgttccttcaagactgacacaagaagtgaagagttttattcactgcctttcaacctaaataaatacttcccatctgtgtaactgtgcagcttaactaataaaaatagggggtttcatttcttccaaaaaaaatgagtcaccagagtctctgagtggtcgtgatttgactttttctgatatgagattggattttattacaggttatagttataatgaagtcctcttttgctatagaatattctataacatttgttctattgcttttctttctgtaaatgctgacttggaaagtggattcactgtagtaaagtgctcattntatttatcana

SEQ ID NO: 133387 - DNA, 398 bp, Glycine max
  unsure (1)..(398): unsure at all n locations
  Clone ID: PAT_MRT3847_91454C.1
ccnatacctactttgcancntcctaagannaacncatgcanctgttgcacttgcttgagctgcgttccncccctgctgtgtgtntgttgtgcttcctgtgctgtgctgtgctgtgcggctcaacancaccncgncgctgtgtgatgtgtntgtgcctnagtgctncagctnacagcaatgcncantcgngngcaggaaccgcagnaaatgagnggancccaaaagttgcccccctgggctgtgncncggggncggtggttgngttcccaaaccaatttnaaanggccctttctgcgnctgcaaatgggngngnggagccttnacgcgnggcaatggtctncgngtcnanccttgggcggtacantttgcaaancgccaattcggnttatgggattaca

SEQ ID NO: 133388 - DNA, 346 bp, Glycine max
  Clone ID: PAT_MRT3847_91455C.1
gcgcgaggatgagcgacaggaagacgcacacgcgctcgcgcaggtgctgaagggactgtgcaagggtatgtgcatcgatatgaacatacacctctgccacgtcctcggtcatatgcacatgaatgtgtgtatcaatgtcggtgacagagacctcgaccgtctccgcgtctgcctgcacgaccacgacgacgacgacctcaagcacatgcacgaacatgtgcgggtccatgacggctaccgcgagctatatggcgatgtccctcataaccacagaaatagcgcaggtcttgatcatgatcaagatggggacggagacgggtatgtcaaatgatatgaagagggcgag

SEQ ID NO: 133389 - DNA, 2613 bp, Glycine max
  Clone ID: PAT_MRT3847_91456C.1
gtcattgttttgaactttagagcatgatcataattgacattttttatgcaagactctgttgcatgcttgagatattaatttattatggactgatgattttctatttagtcatagccttgtgacttgaaactggggaagtattcaacatgtattttgggtttgcacaattattgtcgtaactattactcactctaatattctcatactcacagctactttatcatttttctccctttcttttcttcttctgttcagcttagacactcatttttattagttttgttgctgagtgtgtgtgaaactgtgaaagagagttatggcaggaggtggtggagctccagcacctaagattgatgagccacaacctcatcccccgaaggatcagttaccgaatgtttcttactgcattacgagtcctcctccatggcctgaggccatacttcttggttttcaacattatcttgtgatgctcggtacaactgtgctaattcccactgctcttgttccccagatgggaggtggcaatgaggagaaggcaaaagttatccaaactctactttttgtagctggaattaacacattgctgcaaactctgtttggaactcgattgcctgcagtaattggagggtcttatacttacgttgcaacaacaatctctattattctttctggtcgattcagtgatgagccagatcctatagagaaattcaagaggataatgcgggcaacccaaggtgctcttattgttgcttcaactcttcaaatagtactaggctttagtggcctttggcgaaatgttgcaaggttgttctatggagctaggttcttaagtccactttcagcagttcctttggtatctcttgttggttttgggctttatgagttaggctttcctggggttgctaaatgtgtagagattggactgccagagcttatattactagtatttatttcacagtttgtacctcatgtgctacatgcaggaaaacatgtcttcgatcggttcgctgttttatttacaattgcaattgtatggttatatgcttatctgctcactgttggaggggcatacaaccatgctgcacctaaaacacagtcaaccttgtcgcactgatcgatctggtttaagtaaaatctgccccatggatacgagttccttatccatttcaatggggagcacctacatttgatgcaggtgaagcctttgccatgatgatggcatcctttgttgctcttgtagagtccagtggagcttttattgctgtctatcggtatgcaagtgcaacaccattaccaccatctattcttagtcgcggcatcggttggcagggagttggcattctgttatcaggattgtttggaactggcaatggatcctctgtatctgtagaaaatgctggtcttttggctttaactcgtgtttggcagtcgaagagtggtgcaaatatcggccggttttatgattttcttttcaattctcgggaaatttggagccgtttttgcatccattccacctcccattgttgctgcactgtactgcttgtttttcgcttatgttggtatcgggaggtctaagttttcttcaattctgcaacctcaacagttttagaacaatatttgtattaggctactccatcttcattggcttgtttgtgtcgcagtacttcaatgaggttcacagcaattaatcgttatggtccggttcacaccaaagcaagatggttcaatgatataatcaatgtcccgttccaatcaaaagcctttgttgcgggttgtgtggcatttttattggaaaacacactacataagaaggaagctgctattcggaaagatagaggaaagcattggtgggacaagtaccgttccttcaagactgacacaagaagtgaagagttttattcactgcctttcaacctcaacaaatacttcccatctgtataacagtgcagcttaactaataaaaatagggggtttcatttcatccaaaattgagtcacaagagtctctgaaaggtcgtgatttgacttttaatgatatgagattggatcttatgacaggtaatagttatatgaagacctcttctgctatagaatattccataacatttgttatattgcttttctttatgtaaatgcgtgcttggaatttcaataatatatttaatgtaggtggtctcatcatcttcaccacggtctagttctaatatttaatttaaatcttgttacacgccatagctctatgaatagtccatcctattatatttatagcattttgtaatacatttattttattgctcttgtttctgtaaatcctgatcaaacaagtggattgacgtagcaaatgcgcatggttaaatcctcgcccccttcatttttgttacgttcactttagaatgccccctccatgcaatgcattttgtactcaattgtctattgaattatattgtactgtttattaatctagacataaacccgcacagtgcgggtagataagcaaaaatgctttagctgttacaatttaattaaggtatttttcgtgcttaaaaaaaaaaaaaaaaaaaaaaaaaaaaaaaaaaaaaaaaaaaaaaaaaaaaaaaaaaaaaaaccaaaaaaa

SEQ ID NO: 133390 - DNA, 309 bp, Glycine max
  Clone ID: PAT_MRT3847_91457C.1
aattaggaatagacagaagaagaatgggataatcacatgtgtgagcaattatactatcctggtttttcttgggtaacttgggcatgccctcatacctgggactgcatttaaatttacattatatattccttgttttatatttaacttacattactttgattcagtaaggcctggtcttttcaaaagttttgtactgacagaagaaaccatgttttggctatttttttttgctgcagaaaactctattttaagagtgaaatcattggatcaataaggcaataagacattagttccaaaatcaaaagtgtc

SEQ ID NO: 133391 - DNA, 489 bp, Glycine max
  Clone ID: PAT_MRT3847_91458C.1
ccacgcgtccgtgagtattttagagagaaaagagagaagcttagtgatttcagaacacaatggagcaaccacaactcttgcatgacccaaatttccctctcttaaaaccccttcttcacccgccgtaaccaccaccgccactcacaaacccctttcaaccacacccatcaccaccacctccaacggtgagcgtcgagaagaccactccgtcgaaaccgccgccaccgttgccgccgacgcggaggcgttcggcgacctcgggctggcggaatgggcggtgaagacgtgccgggagctcgggatgcggaggccgcgccccgtgcagcggcggtgcatcccgcgcgtgctggagggccggcacgtgctgggcatcgacgagacagggagcgggaagacggccgccttcgcgctcccgatcctgcaccgtctcgccgagcatcccttcggcgtgttcgccctcgtggtgacgcccacgcgcgagctcgcctt

SEQ ID NO: 133392 - DNA, 342 bp, Glycine max
  Clone ID: PAT_MRT3847_91459C.1
ctgttacctcccgggggaccacccgggaattaggaacgggaaccagaggggggaccaattatgcctatagggggttccttataaaaaatggccaaacgagggcaatagcacacaccctgcggaaaaggaggattacgatgaaaattccggagagcctaaggccggaacgaataaagcgtaaacccgggggggcaatggagggggccaacgagggaaaccggggggccaaacggccaatgtacagggcaaaaacctggagaggcgtttgtgaatagaacccaaaagcgagggaaaacacgttgaaaagggccccaggggagggcctccatcgacgggcccaaa

SEQ ID NO: 133393 - DNA, 475 bp, Glycine max
  unsure (1)..(475): unsure at all n locations
  Clone ID: PAT_MRT3847_9145C.1
gaaccttgggctgatttagtgcttgagaagtgatagaaggggacatctaacaagtcaccgcgcaagcgctacttcaataaacgtgataataacataagctgcaacgacgatcccggccaggaccgcccccactgtggctgcctccatcccgacaatccttaacgtggccggacctatcagcatattaaagatgctgggcttcaactaacgctacgacaacgttgaccgtctaacaaagccattccatcgcaagggaacagttccccgctgcaacggagcccgtgtgcgccatgaagagaaagtaagtacaatataataacgctaaaacgacaaagaccgtacctacccaacccgcgtcttgttgcgcgaagcccttcaccgcgatatanaaatccttaaacgtaaacgtaagcgcaagaatcagtcagacgtcagagacccgactatcaaacacgcagcggacaacgaccccaac

SEQ ID NO: 133394 - DNA, 419 bp, Glycine max
  Clone ID: PAT_MRT3847_91460C.1
cccttaaacccccaaaggtaactggagtttttttttttggagcgtggcctaaaagccccggacctgcgcaaaggttttttccgaaaggggggggggttaaaaaaaaagggggggtgtttcgcctcccccaacgtttctgggggggggaagaaaaaagaaattgtcccccctggaaacaaaaaaaggcggggggccccaccccccggggggggggcccctgggaaaaacaggggggggggggaccccccttgctgggggtccccagaggttttaacgaaacggggcgaaaaacttgggggggccttttggcccaaaaggttgccccctgggcccccagaaaaaaaaggggctctcagggccaacccttgggggcgccccaaaaataaaccggggacctatggggaggtttgggggggggg

SEQ ID NO: 133395 - DNA, 274 bp, Glycine max
  Clone ID: PAT_MRT3847_91461C.1
aataaccctaccagttgaagatatctactattttaccctggctgctgcacatggcgcggcacgttgcttccgtgcccacctttgtcacttttaccgtcacaccggcccatctgaacgactccttgatttacggagagcatcaatgaatcccatgaacacaacaacctctaaactggaatggccagacaagtcgcattaatggccaccaacatatccctctcagatgctcgatgctatcgcgggaatggactctctgtaccttgacggacgtatc

SEQ ID NO: 133396 - DNA, 171 bp, Glycine max
  Clone ID: PAT_MRT3847_91462C.1
tctacgctagctgatccctcggggaattccagctccacaatttcatgacacaaggaggtttgcgtgacacaatggaatctggaattaatgtcgtcttcgtacttcggcctacacttacaccctctgaattgagatctgaattcctccgcgaagacaaagtcgatgcgtaca

SEQ ID NO: 133397 - DNA, 187 bp, Glycine max
  Clone ID: PAT_MRT3847_91463C.1
ggttgcagatgacaagataggtaaagtgagttggcgcactatgaagaacgcgatgatagcattcttggaccctgtaccctccattctatgctacctgtcataccaatctaccattagtactcattcttattgaacttctatgcggacgtagtgctatcaccaccctctgatattggacaatgtcctt

SEQ ID NO: 133398 - DNA, 2077 bp, Glycine max
  Clone ID: PAT_MRT3847_91464C.1
gaagctcttgtgttgtactcttgctgcatcttgagtctttaaagaagtaaaccaacaacacaccacatccccattcaaacaattctctttctctcttccccactcaacactccttataatcgattacaactaaagaaaaaaaaggggtttttcaatttgaatcctttccattcccacaccaaccaaccaagaaaccataaggcacattgttattatgaagaaattgaagaactactacatgcacctgcggcaccaccaccaccaccaccacgccgcggcggagcgcaagtgggtgttcccactcgccattggctccctcctctccctcttcctcctcttcctcgccaccctcacctccccggagggaacccccatcctccccttctaccgctccatcaccgccgcctcctactccgtcttcgtcgaatccaagctccgccccctccccgtcgtctcctccctcccccctccgccgcgcctcgcctacctcgtctccggctcaaagggcgacggcgccgccgtcacccgcgtcctcttggccctctaccaccccaacaaccgctacgtggtccacctcgacctcggatcctcgcgagagtgacgctccgatttggtgaggttcgtggagggccacgcgctgttcaagcggttcgggaatgtgagggttataaagaaggcgaacctcgtcacgtacaggggacccaccatggtcgcacacgtgacactggccggaaagatcatgatcgggcagggcctgtaattattgatgttcatcaatctcagcgccttcgattacccacttgtcacacaagatggtacgagatctgctgcatacgttttcgtacctgccgcgggatctgaatttcattgatcatacgagtgacattggatggaaagatcatcatcgtgcgaggccgatcatcgttgatccgggtttgtatatgaataagaagcaagatgtgttttggattacacagaggaggagtaggccaacggctttcaagcttttcacaggttcggcttggatggcactgtcaaaatctttcattgattactgcatatggggatgggacaacctacctcgaaccgtactcatgtactattcaaatttcatatcttcccctgaaggatacttccacacagttatttgcaatgcacaagagttcaggaacacaactgtgaacagtgatttacatttcatttcttgggacaatcctcccaagcagcatcctcactaccttacagttgatgacatgaaagggatggttggcagcaatgctccgtttgcaaggaaattccacagagaagatccagttttggataaaattgatgctgaactattatccagaggtcctggaatgactgttcccggaggttggtgcatagggaaaagggagaatggcaccgatccctgctctgaagtcggtgatactaacgttctgaggcctggcccaggttccaagagacttgaaacattaatcaactcattgttgtcgaatgaaaagttccggccaagacagtgcatgtgaggtgaaaaacaagaatcaactggctaaggccaaagacagttctggaggattattttccactggctttagtttacatgtgcacatttagttagcatgatcagtaaattagtttttcttttcagtaggagaagaaatagtgaaagcatacacactcttcaatattgagaagaaaaaagtgtgagacaattccggtgaaatgttgatgactagagagttggatcacacactgtaatagtatggtatatatgtcagttgactctgttgtccctggtcacctcttcctccctttgaccaatctcagcaaaatcagtgaccagcattgaaggttccctagcttatcacaagggataaagaggatgacatggtaggagagggggaacaaaagaacagaaactgtgtgaaatgaaaatggtaatactttttcttatgtattttttctttctttctttctttctttctcatatttggttttccaattgatgtttgttatacggctaacttttcctttatccttcactcaatgcatctctacgtatgctttggtactg

SEQ ID NO: 133399 - DNA, 852 bp, Glycine max
  unsure (1)..(852): unsure at all n locations
  Clone ID: PAT_MRT3847_91465C.1
acgagcatcctccttgttagaaagaattgaaaacagcgctggccttcgtgttgctctgatttgaattttgaaacaatggaaaagaaatcacctgaaccacccgaagaagcatcacagtcacgagactcatcgcgagataaccagacctggataactgcacaaaacattctgagagaaaaactgatcacagaggactgtttcgcatggaaattacaagctggttccaaagaggaagaagcattgagatacgttggtggggttgacataagcttctcaaaggatgacccatcaagggcatgtggcacccttgtagtcttggacttccacactcttcaagttctctatcaagatttctctttggtcactcttcaagtcccttatgtgcctggctttctagcatttagagaggccccagttcttctgcagcttctagagaaaatgaaaaggagcaataatcctttctaccctcagctattaatggttgatggaaacggaatacttcatccccgaggttttgggctggcctgtcatattggagttgaggccaatctcccaacaattgggattggaaagaatttgcatcctggtggtggcccttcccgttctttccttttttctcgatttatagccaataaatttgatttttctttttctattttttagggagccaagtgacatatgttatatctagacaaggttagaaaataatgcatcagaatctcgagtgggttggttgaatggaataanataggttctcgaatctgacaggatacagattcaaacccccacttgtcnttttgtgataaggtaaatgtaatattctctttacccgctcttgacctggaaggtctc

SEQ ID NO: 133400 - DNA, 1016 bp, Glycine max
  unsure (1)..(1016): unsure at all n locations
  Clone ID: PAT_MRT3847_91466C.1
tttttaccccccgtggaaaaagggggtttttttcccaggtcttttttttggggcacccccgggttttcccccccccggcgttttaaaaacccccccccttattttttttttggggccccaaaaaaaaaaaatttatttccccaacccgggggaaaaaacttggtccctttaaaggggccccccccntttttttttttttttttttttttttttttttttttttttttttttttttttttttttttttttttttttttttttttttttttttttttttttttttttttttttttttttttttttttttttttttttttttttttttttttaaaaaaaaatacataaaaagtatttccatttcatttggcacagtttctgttcttttgtccgtccccccgcccatgtcatcctctttatccctttcgtgttccacagaaaagctaggggggaagaggtgaccagggacaacagagtcaactgtcatatataccatactattacagtgtgtgatccaactctctagtcatcacatttcaccagaatttgtctcacttttttttttttttctcaatatcaaagactgtatgctttcactatttcttctcctacttgaaagaaacactaatttactgatcatcctaactaaatgagcacgtgtaaactaaagccagtgaaaaataatcttttctagaagactgccttagcccatttgattcttcttcttcttcacctcatacgcactgccttggccggaacttttcattcgacaacaatgagctgattaatgtttcaagcctcttggaaccttggccaggcctcaggacgttaggatcaccgacttcagagcagggatcggtgccattctccctttttcctatgcaccaacctccgggaacagccattccaggacctctggataatagttcagcatcaattttgtccaacactggatcttctctgtggaatttccttgcaaagggagcattgctgccaaccatgcctttcatgtcatcaac

SEQ ID NO: 133401 - DNA, 520 bp, Glycine max
  unsure (1)..(520): unsure at all n locations
  Clone ID: PAT_MRT3847_91467C.1
tcgaanattggcgagagatgcaacgatcgtttaaacggattgattcacggttcgaggagaagaagaagagggcggtgaagagcctcctccagttatgatcctcatttcggatctttatcaccctctcatgcatcaccctctgtacaccgcttatgaggaacctcgctaccacgcggatgcacctctcaaactgcaatgctccgacgacgattttcttcgtctcccatgcaataacggataaaagtccgatacccgtttgcgccagagacatcgtccttgtcactcagtcactccccatcttcctcatatgtcgtgttttcgtggatgcaaatgctagctcacattgagaccctctctatgttcttgatgatcacgattgtgactgtttcctatctgattctgtcgcgtgtgcctgttcttttcttctcgctgaacattagtgatcttggatacaatgatttattgactaccgctcggtatatacacatatagtatagtactatttccatgctttaaagaa

SEQ ID NO: 133402 - DNA, 488 bp, Glycine max
  Clone ID: PAT_MRT3847_91468C.1
ccttaaaaaggaccctgttttaccccccaaacaaaggctaaccaaaaggggccctacgggccaaaaaaaactatttaaattaaagctaccctaaaacaactcctttttttggcaaaaattaaaaaacaaaaaaaaggacctttatgttccccaaacccgggttttttatttatcctaaacccaggcgggaaaaaacaaggtggatcaaagctagcccatacgaaaaacattcaaaccaaaaaatcaagcttttgtttgctgtttttaaaaaaaagggccaggggagggcctcccaacaaacaaaaaaaggtaaattagtgggctttaacaaaaacagggatacccctgggggactgacccaagcccatggggagggggcaaatgttgttctaaaccttccaacaaaagttgttgaacaaaaaaccaaccatgttgggcaccttcctaacgggaaggggggacccagggaaaattcgttttcccctccc

SEQ ID NO: 133403 - DNA, 425 bp, Glycine max
  Clone ID: PAT_MRT3847_91469C.1
cttagaaagccggcccggaacgggcggcgggggaaccccttgaagggtttggcatttggttgaattggccccgggcaaaaatgggggcccccctggggggacccactaccggacagttttgagcaagggcccggggatccctgggggggaaaatcgaacaaacgggaggggaaagaacccctatggggtaaaaggccaacaggaacaactccgggaaaggcccattggccccactccaaaaatacgggggaaaaatcggggatggcccccccaatttaaaaccccgggcccaaaaggggatggcccaagttaaacggtgtacccaaaaggttttaaaagcccaaagccggggtattgcccggacggggcaaattttaaaacgccaaaagaaaccaaaccgggccaaccccgaacgggaaaacaaa

SEQ ID NO: 133404 - DNA, 300 bp, Glycine max
  unsure (1)..(300): unsure at all n locations
  Clone ID: PAT_MRT3847_9146C.1
actaaacaccacgcgngagcgcaaacacacagcaacaccagcgagtgggacacacaaccccaacccagggcgaccgccggaacaaaccaagacccaaccacggagaaagagacccccggacgagcgacgggaacagagaaaaagcacaaacgggacgtgcccctggccccactcgaatcaagaagaagaagaaaaagaagaacgtggggagcaggcggcagaaacaaccgggaaagaaaagaggaacgggaaaaagaccacgggacagagggggcagacccgcacaagtcaagcgaggag

SEQ ID NO: 133405 - DNA, 331 bp, Glycine max
  Clone ID: PAT_MRT3847_91470C.1
gccaattattgggttggtttttttttttttaaaaaacaaaacccttgttctttattttctcttcattcaaggggaaaaaattcatttgccctttaagggttttgctttgcttccccgctttgcttaattgggtttacaaaggaaaaaaggggttaaattccccattccttaaaaggaaaattatgtccattaaaaattgtttaaaattaccaaaattgaaaccaaggctttggcattcaatgtaaaaagagctttttttcttagttaacggggtaacttttcccctttaggtaagggggaaaagggacttaaagtttttttgaagattttt

SEQ ID NO: 133406 - DNA, 256 bp, Glycine max
  Clone ID: PAT_MRT3847_91471C.1
aggggggggatgggatatctttaacttgaacctgtccgatgccatggccagagccaaagcgcctgatatccacctgcagaaacagctgaggacctacatggaatatatggttgcactcccctcaatctatgacccctatttcattgctgccaaccaaggagaccgcgccaacaactttatcaaagtcgcatagtatgaacaagttcaacaaatcatccaagacatttatgagtctaacgaaagcactaaggctgac

SEQ ID NO: 133407 - DNA, 424 bp, Glycine max
  Clone ID: PAT_MRT3847_91472C.1
tacacatgtgaatccccccccaatctaggctcttctcccttccagttacatggtcaattagttagatgacatcaacatctttgatgacatggaaatgatgtttttgggactggttggatagtcctccatgggaaaatccgcatgtcatagtgttgaagatgcctctaatctattgagcaggttcattttcctgctcttgttggggttggtgctcacgtctttgttggtgatgcctaggtctccctctatcttctgttttgtttccccttctgtcttgtcctctatcacttcccctgcgatggtcctcattgtgacctccaagtcgtccttcagcctggttgctactgggtcttttcacgaactgggttaggtaacccgcttgtataaatttctcaatcttgcccttgagagcttaatagtcttt

SEQ ID NO: 133408 - DNA, 367 bp, Glycine max
  Clone ID: PAT_MRT3847_91473C.1
aaacaaataaaataaaacaagtgatccattcagagtgtggcaaatacactctaggggctcatcatgtggtaatttacacccccacaccggggtaaaacaaaaagattctcatgagttttcccaagaagaagactccccctacatcaataacaactaattcaagcaggcacatacaaaaacaagagcctaatcccttgtcttgaaagggagggctcggatgactatcttttgatacacaccaacaagggcggctcccttgaaaggtgcagcccacaaaatacattggttatgccatgcatggtctctgttgtagatgatggcagctcccagactcctagctgggttaatgccagctcgagccgaattt

SEQ ID NO: 133409 - DNA, 111 bp, Glycine max
  Clone ID: PAT_MRT3847_91474C.1
cgcactcattgcacatagggctgccgcttcattaagtgaatgaaatattacctactattgcacaaatgcaaaaggacactcattaacctgatgccttacaaagaaagccat

SEQ ID NO: 133410 - DNA, 464 bp, Glycine max
  Clone ID: PAT_MRT3847_91475C.1
aaattatgatttttgtttttttttttgaatattaatggggtaaaatttttttttggggaagggataaaaaatggcatggaaatttaaaagggggaaaagttgccctgtttaaaagtacgctaaagtttttaaccgaaaaaaagaaaaaaaaggtttcccccttttttttttaaaggggggggggtttttttttttttaaaaaaaaaaattttttttaaaggggttagagggcccctgggggaaacccaggggggggccggggggttaaccgggaaattttggccggggtcctggggggatacaaattttttttatgggggggcttataaaaattggggggaaaatgggaaaaaaggttttccggggaaaaaattgttttttcccaaaatttccacaaaaatatacagccgcggaattttaaaaggaaaaatttggggggcaataggggggccaaacccccttta

SEQ ID NO: 133411 - DNA, 267 bp, Glycine max
  Clone ID: PAT_MRT3847_91476C.1
aatcgagccgaatcggctcgagcggctgcgagaagacgacagaaggagatcataacttgtgctaaggtagcctttcaataaattaaatttttgcttataaaaaaaaggttaggaaactttatcatttcgagttgacccaatgaccaaatcaatccaaactaaattaaaagagaaattttaagttggtttcaaaccatcggtttagtttgcagtccatgtgcagcaagtatagtgttgcttatttaataaatatcattttgcctttaa

SEQ ID NO: 133412 - DNA, 400 bp, Glycine max
  Clone ID: PAT_MRT3847_91477C.1
ctctcatagcagggctcttagacacctccatcggcctctagccctggctacttcaagactgaagaccattgctgcaaaaagtaggctcgtcctgcagagaaagcgggagctcctactcctgcccatgataatctagccaagaggtataagcccgacagacagatcttctagcctaagggtctataggaccgatctaagatcccagaccacttgaccacagaagtcccaaggaactatggttgatacccagtcagtcttaacttgaactcacaagacaattgcacatatcaagcatgagaattgattcgcgcaccatgcactctacacgatactggtataagaatcacgcctcgaatctaagagcatatactgatcatactacagtgagccaaatctatgc

SEQ ID NO: 133413 - DNA, 282 bp, Glycine max
  unsure (1)..(282): unsure at all n locations
  Clone ID: PAT_MRT3847_91478C.1
atccgaacctattcgtttccgtccaccgcaaacacgccatcaacgacctcgccatccacccctccggcgaggtagccctcaccatctcacaagacaagtgtttcgccgttgttgatctcatgcatggcctcgtcgtggactgccggagcttctgccgcccgctcggcaannaagagagtttgagtttggtgaagttcaatgctgccggcgacaggtttttcgtcgccnccactggagaaggtctccgtctacgtcaccaagactgagcggtttttgttagaa

SEQ ID NO: 133414 - DNA, 463 bp, Glycine max
  Clone ID: PAT_MRT3847_91479C.1
aagatggtaattatcagttctaatgtttggttccattctttttgtattttagttaatttggacttttctctatttgagaatctatttgacgttgtcaaagcttgaaattttataaacttctgacttaattaaaactgcaatgccatgcgcttgtagatgacaagactgagaaatatataaatcccctgctcggtctctctctgtctcacacatttagtagttcctatcctgtttgggcataagactaaatgaaattgattgacctggctactggttgtgaggaattgaatgggcagtgggacagttttgaagtatagcttataaaatgcgaaagaatgaacttttccatatccataacctgctcaggaataaatgaccatttgaaaagatctattaggaaacgtcaagttcgataggaagttgatgatgacccagttacactaaatatgttatgtatacccat

SEQ ID NO: 133415 - DNA, 340 bp, Glycine max
  Clone ID: PAT_MRT3847_9147C.1
tttgcgtagttttaatttgacggggggttgtgaatccttacattttttaagtagcttttattgttttagttagtcttgcttgaggacaagcaagactctaagtttggggtgttgataaatgtcaaatttattggatttttatatgtattttgtgacgtttatttggcattttatgttttagttatttttagtgattttttgttaattttccagcaaaaatatcccgcttaattaagtgtcagagctccaatggtccaaaatcaacagaaagttctagaaaaagaaattacgagaattgtaaattaaagttaggaaaatcaaaagcaaaatatttttcaag

SEQ ID NO: 133416 - DNA, 500 bp, Glycine max
  Clone ID: PAT_MRT3847_91480C.1
aatagaaaaagaggccaaaaaaaacccgatacaatcaatatcatatgaaaaagacatcatacaaaattccaggggaaaataatgcctaaaatttcctgatttaaaaccccaaccccttgtctccatttgactattacaacgtattcaagtcctgagatctaatgtattaatctcacatctactccgacaatcaaaatctgccatccttggaagacgtgaaaacaataacaaaccattttaccaaatcgctaatatgctttagcttctctcctccatccactttaacttcactgcatacctcttttttttttttaaaaaatatgctttctgtactcaaaaattatggtttaagtactaattccttaaatatactaatttactgtctcttcttactccttttctttggagtttctatatctgctaatgcttctactttctcttttttctgttttttcccttcatcggcaaaatcggaatttctttctttaaaccttgttttt

SEQ ID NO: 133417 - DNA, 571 bp, Glycine max
  unsure (1)..(571): unsure at all n locations
  Clone ID: PAT_MRT3847_91481C.1
acgcatagtcaatgaccccaaaagaatgatctggtgacatatcaagaccacttttgttttcatcattgccaaaattatgcactttaattaatttatattttaataaaaaaaataattgtattcagtaggggttagtaatcgataagaattgaaaagaaaaacttaaacgatagaaatccactataggattccatgactgactcatgctgagacacggaggctaataattaatgaacagttgaagtacgctgtcgatttagattataattaagttgaattcaagcttcaacatgataagcatttaattatctgcaaaaactaagaattggtctaaaatattatataaagtatgcttcaacnnntaggatcgacggtgaagattacgatttacaaaagaatcaaataatgaatagctaggacaattattcaatatttaatataataatatgaagtcagatttcatctttaccataaattattataatacttannntactatcttttcttaataataataattagagtggtgtacaganngaaagaaagaaaaaaagtaattaaagtgatgtga

SEQ ID NO: 133418 - DNA, 1672 bp, Glycine max
  Clone ID: PAT_MRT3847_91482C.1
acccccgcgcacctctgtagtgtagccaccaccaatcacaaatagccctcttggccttcaatttcgtccaattccaaatcatggctagctcttcagttttcacgtcttacattgttttgagtctagtgatggcactagcaattagcggtttcaatttcaaaggggcagaggcagcacgtgccttctttgtgtttggtgattctctcgttgacaatggcaacaacaactacttagccaccacagctagagcagacgctccaccttatggcattgattatccaactcgcagacccactggccgtttctctaatggcctcaatattcctgattttatcagtcaagaacttgggtcagagtccacgttgccatatttaagtcctgagctcaacggggaaagattgctcgtgggtgccaactttgcttctgctggcattggaatcctcaatgacactggagtccaatttgtaaacatcattagaatcacaagacaactggaatacttccaagaataccaacaaagggtgagtgccctcgtcggagatgagaaaacaaaggaattagtaaatggagcactagtcctcatcacctgtggaggtaacgattttgtgaacaactactacttggtgcctaactctgctagatcccgccaattcgctttgccagattatgtcacgtatgtgatctctgagtacaagaaggttctgcggaggctatatgatcttggagcacgtagggtgttggtgacaggaactggtccactgggttgtgttccagcggaattagccctgcgtggcagaaatggagaatgctcagaggagctgcagcgtgcctctgccttgtacaacccacaacttgttgagatgatcaaacaactcaataaggaagttggttcagatgtcttcgttgcagccaacacacaactcatgcacgatgatttcgtcactaatcctcaagcatatggatttattacgtcaaaagtagcatgttgcggtcaaggaccctttaatggtcttggactatgcacggtagtgtccaacttatgtccaaaccgtcacgaattcgcgttttgggatccattccatccatcggaaaaagccaacaggttgatcgttcagcagattatgtcaggaacctcaaagtacatgcacccaatgaatctcagcactattttggccttggattccaagaaatactaatcatacatcttccatacactacagttacagaaaagcagcgtttgttaatttatttgtgtgatatttccgtattggaatgtccagaaagtgaagaattatatatgtttttccgctccttcgaataatgacatgtgccttcttctccattgaagcaaagagaaaccgcagaataagtgagttcttttgtgtgattttgaggaatgagaatgtatttaggggagggtcaattgatactacttctatcttggatcttattagggtctagttatggttttggttttgagaaaaattagagggttcttactattcagattggtatattgaacctttctattgtatctcttagtgttgacctactttgtatcttgttaatggattagagtactccttgtactctccaaaatctattaaaattttgcttatgaaaaaagttggtaatcttcaataaactcttgttttttaatcttcaaaaaaaa

SEQ ID NO: 133419 - DNA, 576 bp, Glycine max
  unsure (1)..(576): unsure at all n locations
  Clone ID: PAT_MRT3847_91483C.1
ggctcgaggctccaaatagccctcttggccttcaatttcgtccaattccaaatcatggctagctcttcagttttcacgtcttacattgttttgagtctagtgatggcactagcaattagcggtttcaatttcaaaggggcagaggcagcacgtgccttctttgtgtttggtgattctctcgttgacaatggcaacaacaactacttagccaccacagctagagcagacgctccaccttatggcattgattatccaactcgcagacccactggccgtttctctaatggcctcaatattcctgattttatcagctgagttctaattttgatttctccatcgctaatatattttgtgctgactaattaatactatatggcttttttttttgagggacgttacatgcgttcgaacccatttcctgatgaaattgtcttactacaattatacggaccaagaatgcccataactaatatatgacttattatgccatgtagtgtaagttaatttgtgattaaattttgcaggtcaagaacttgggtcagagtccacgttgccatatntaagtcctgagctcaa

SEQ ID NO: 133420 - DNA, 510 bp, Glycine max
  Clone ID: PAT_MRT3847_91484C.1
cggacgcgtgggtttttttctaacaattatagttttttttaataatcattattatctattttcagttatagaatacacgtttattttattctgtaatacatataaaaaaaaaactttgtcaaggtagttttggtgcatcacatcaaagccgttgaaatattaacagagaagcgcatggtttggaaataaagaaggaaatgaaatacaaagccgttggtgcatcacatcaatatctctcttgtaacagtccttccgagaccatcctccatcaactttgagcttttcctagagtcatgttgtgttttcatctttcctctaccaagcacatctttgtcagattcagaagcatcgccactctgatatctttgtctcctctatcctagggattttgacggtttagtcaattattatacccgttctcattgttgctggatgaatgttttttaattactattggttttctgtgtttttttgagtgacctgttgaattaattgcttacactttatgat

SEQ ID NO: 133421 - DNA, 810 bp, Glycine max
  unsure (1)..(810): unsure at all n locations
  Clone ID: PAT_MRT3847_91485C.1
gcttgatgcctgcgttggatagtctttacatgatcaacctttaagtattaactgttgtcctcaactctgatccactttgttaatttagtttctccaaaatttgatgcatcattattgtcttaagtcttagtcacggaggttttttttttaacttttagattgtgatcttgaaccatatttcatttctttcggatggctcttgcaagttgcgattttgaaggcatacaccccgacttgtttgtgtaattttgggtcactgttgttggtaacatttttgtcttggaggattgcccctgaatagaggaaaatacttgtcatggtgaaattctgttagatgactaatggccctttgattctattttttttgtaatgagaactaaactgggaatgttcaatatgattaagctgatgtaagtttcattagaatttgaatggatttgaatttggagttaagaaattgagaggtaaataggaagtcctagttcactagttgcgtttgctctatgatttttttttttggcatgtagagcataatgggcaaagtcattgtatttcaatgctattatgctacttttatggcctattagttattttgcttacaaagtcactaactcagaagaaatggatgcattttctgccttttctttaaatgaaggcacacaattgaggagatccatatggctcgtatcagttgtaagtgatgatccaaacgatttcattttgcatttgtggtggtaagctcgaagtagaacttgnattgatctctggcacctattatagtatatatttgagcatactagtttatttttt

SEQ ID NO: 133422 - DNA, 279 bp, Glycine max
  unsure (1)..(279): unsure at all n locations
  Clone ID: PAT_MRT3847_91486C.1
cncttgtgggttgaattttttgataacccttgttgatgggttgactcactttttttctcttgggctgctctgctgttcttccacttgcactcaaatactacttgaggtgagtgggactcttgcacatgccagcaacactcttcagcccctctcaatatcacttggaaattttcttgttctgctttttgtttctcactctctgtgtgtgtattggntacgggagtctcattaattttcctcccctggttattttgtatgatagtagatgtatatntcatt

SEQ ID NO: 133423 - DNA, 346 bp, Glycine max
  Clone ID: PAT_MRT3847_91487C.1
ctttagcttccgcttgtttatttgttgatttcaaccttgtcgatgatgatgacggcaacaaaaacggggtctacaaattggggttcaatggtaatcgcatgcaaggcaacctgggctgtcctcctgctgtagatctttcgcagggtgggacaacgaagatacaagaacgagcccacgccttatgctctggactatcataggtgatgctcaacttagagggatacatagaaagagaacttattattgcgctgcatcaaagatactgtcccatcatgcacggtgtggttggggacacaaccacactgtggttatctcataccatggcatggtgaacgacatcctcaac

SEQ ID NO: 133424 - DNA, 250 bp, Glycine max
  unsure (1)..(250): unsure at all n locations
  Clone ID: PAT_MRT3847_91488C.1
ttttccaataaaggtcagccaaaatctngtcaacattctggtgncnaaccacnacnagaanagtanacggnaaatcagaggagaatgtttctccgnggactttggacggccacactgagcaaatattncaggcaacatttggtanccnaatggtatanatggtccttnaacaattggagcagttcgtcctctgaacattccagatgtgggtttgaatggngggannattcaaatagggcaagcaagtggt

SEQ ID NO: 133425 - DNA, 320 bp, Glycine max
  Clone ID: PAT_MRT3847_91489C.1
ggctcgagattgagtcatagaaatcgtatggttgttaatacttaagagtgctggttgatcaatgagataacattgctggaattttgagtaatttcgtaacggagtggtgatctgtgaggggtggcccaaccattggactaatttttaagggtggatcgtaaatttgttatttgccgaattgtcgcgtatttttgagttataccttggtattactggtattaatgagaatgtggttaatgtgtttttacgtaactattgtgtggtatcaataaaagttttctttataaaatgggggggcggacgtctagttagctctatac

SEQ ID NO: 133426 - DNA, 134 bp, Glycine max
  unsure (1)..(134): unsure at all n locations
  Clone ID: PAT_MRT3847_9148C.1
accgcgcatgcacgcgggcgnanctcggattccccggagattaagcgaaacggtcaagttataatcttttgaacctttcgatcgcgtgggatagaagataggaagatgggtgcgtacatatcggacgatgatta

SEQ ID NO: 133427 - DNA, 420 bp, Glycine max
  Clone ID: PAT_MRT3847_91490C.1
tgcttgaaggcacgcaacccgtgagattgttattggcaaaaaccacaactgaagctggagaagatcccaggttctgaggaattgtggacgtgaagcgattattgttcaaaaagatagcgtcgaggcttttgttgaaaagctcagaaggtagttccccttcaaagttattgaacctaaggtcaaggaatttaaggtctggaattggaagcacaggctcagggaatcgcccaacaaagcgattgttgctgatgtctgcctcataaagaagcttaagcttggaaaaactttttgggagaaccccacaaaacctgtttgagtttatatgaaaaagtgcaaggtcggttaacaatccgatttcggggggaatgtaacctgcgatgtctgcatggttaaggtcaatccctgctacaacgtcgatct

SEQ ID NO: 133428 - DNA, 297 bp, Glycine max
  unsure (1)..(297): unsure at all n locations
  Clone ID: PAT_MRT3847_91491C.1
ttaatgttttatcaaaaacaaaacacaagccgggggaaggggatataaaaagggaaacaaccagcataacgncagggaccagccacaagatgggggagaccttccatgtgggagggcacattaaggaggaagagcataatggtgagcaccatgctggagaatacaaaggggagcaccatggtgaacacaagtatgagtacaaaggagagcatcattggtgaacacatagctggagagtaccttggtgagcacaagccacagcacaaagaggggtacctaagacaaagtcaaggacaa

SEQ ID NO: 133429 - DNA, 430 bp, Glycine max
  Clone ID: PAT_MRT3847_91492C.1
gtcactttcaatttatggttagctgcttgtgcctcacagaatgatgttgaaactgcagaaagagttctgcttgagttaaagaaggcaaaaatagatccggactgggtaacatacagtacattgaccaatttatacataaaaaatgctagccttgaaaaagctggagctactgttaaagaaatggagaacagaacctcgaggaaaactcgagttgcatattcctctcttcttagcttgcatacaaacatggggaacaaagatgacgttaatcgaatatgggagaaaatgaaggcctcttttcgcaaaatgaatgataatgaagatatttgcatgatatcctcactgttgaaacttggagactttgcttgagctgaggatctttatggggagtgggagttggtttccggtcccaatgttgtcagagtttaaa

SEQ ID NO: 133430 - DNA, 453 bp, Glycine max
  Clone ID: PAT_MRT3847_91493C.1
gtccgatttccggtcgaccacgcgtccgcctactactccacgattagtgagagcaaagctttttatgtttttcggatttgcattgagatattaccatataatatcgcggaaaaggaaaaaatggaggcacccattatgttaccccttgaaaggacttcgtcaattgaaagagagcccaggactcttaatatcaaccaaatccaatccgctagggagttagcaatatatatattgaacacaaagaccatagaagaagcgtccagaattttcacggaggggttgcagccagtggttagtgctgcttgctgcatgagatccggcacaacaatggacatggatttgggtgaagaacttgaagtgttgaactccaaagacgcaacaacacaagtagccccagcagcagcattcagagacatagcatctgcacctttctagaacaatttgaacaactca

SEQ ID NO: 133431 - DNA, 290 bp, Glycine max
  Clone ID: PAT_MRT3847_91494C.1
caattactataaagcttctcgggctagggggtcaaaatgcacggggggagcattataaacaacaatttcctacattactaaactcccaaacagtgatataacattacacatataccaggaacttaacatcctttaaaaaaactgacacaccctaaatataaaatatagcattctttctttttttgcatacttctccaaacaatttattcttgagtgcacattctttgaagccattatctatatttctttaaattaattatcttatgaagaatgaataggatttttcctta

SEQ ID NO: 133432 - DNA, 562 bp, Glycine max
  unsure (1)..(562): unsure at all n locations
  Clone ID: PAT_MRT3847_91495C.1
tccacgattagtgagagcaaagctttttatgtttttcggatttgcattgagatattaccatataatatcgcggaaaaggaaaaaatggaggcacccattatgttaccccttgaaaggacttcgtcaattgaaagagagcccaggactcttaatatcaaccaaatccaatccgctaggggtttaatgtttggtggatttaattaatttacaggagttagcaatatatatattgaacacaaagaccatagaagaagcgtccagaattttcacggaggggttgcagccagtggttagtgctgcttgctgcatgagatccggcacaacaatggacatggatttgggtgaagaacttgaagtgttgaactccaaagacgcaacaacacaagtagccccagcagcagcattcagagacatagcatctgcacctttctagaacaatttgaacaactcaattgacttgagttcttcatgatgttgtgcaataattgtagaatatactccacttattagttagtttgtacatatcgtttgccatacacgttgaaattntgggttcttaagt

SEQ ID NO: 133433 - DNA, 146 bp, Glycine max
  Clone ID: PAT_MRT3847_91496C.1
tttattttttggttcaacttgagcgtcaatattgcccaaccatttcaatagcataacaggttacatgtgaagatagctgcagaagggcgaagatccacatcggaaaaaaaaacattcaaacatacacgtgaagatttcactgtcca

SEQ ID NO: 133434 - DNA, 701 bp, Glycine max
  unsure (1)..(701): unsure at all n locations
  Clone ID: PAT_MRT3847_91497C.1
gggagcaattgtttgttggtggctaccatgtttcctaggaaggacaactgttacattagtcttttggatttcagggacaagaagatggtgtggtgttggtctgatgtgggggctccttttgccgtggatgagaaacgggtcagggatgctattgccatggaggataataactccatttgtgtggtcaatgagtttgaggatttggggttcatggatttgagaagttctgctgccaatagcattaggtggagctccaggagtaggttgatgaaggggaagatgcctgaggaaccttgttatcctaaactggcattgcatgggggacagcttttttcgtccatgaatgattgtatttcggtgttctgtggtcctgaatgggttttgacgtctaggctcagacgaagctatggtggttcaatttgtgatttttccattggaggggataggcttttcgcgcttcatagtgaggagaatgtggttgatatttgggagactccaacaccaccaattatatgattttagttttttagtgataagttacttttctttggtttgctgtaaaccagactgcttctggttttctagatagagttgagtttaaaaacttggatatacgagattgagtagtttatagcttggcatacatgtaggtcttacctatacnntgagatgtatggattggggtatgtgaatatctatag

SEQ ID NO: 133435 - DNA, 485 bp, Glycine max
  Clone ID: PAT_MRT3847_91498C.1
accggaaaaaaaaaaaaaaaataacccaaacccccaaagggaaaaaacccccccaaccccaagaaaaaaaaggcggaacaacattacccccaaaaaaaacccaaaataaaaaaaaaaaacaaaaaaaagggggagcgggccattactatccccaacaaaaaaaaccaagccctttcccccctgaaaaggggggcaaaaaggaaaaaacaagggcccccccaccaaaaggaaccctttgaaatggactaaaaacaaaactggaacaccgaaaagtatcacccccccaaaatttattatccatgaccccccggggaaggcaagacaaagcatttttgggggagggagagggcagggtctataactttcaacccaggaaaaaaaaaggcccctatatccacataaaaatgcccaaagggggggggggaaaaaaaattcacaaagcgggattgggtttttccccccaaaaaacccctaaacattacaag

SEQ ID NO: 133436 - DNA, 113 bp, Glycine max
  Clone ID: PAT_MRT3847_91499C.1
gtgaaggacgagtcaagaagcaagaacgaagtgttgtgcgacgatataggcagatgtgcaatcaccacagtggaagcgccagacggtcctccccggctttccatttgttctct

SEQ ID NO: 133437 - DNA, 470 bp, Glycine max
  Clone ID: PAT_MRT3847_9149C.1
gagaatgtaacggttcactccgcctatataatatggaaagtactcacaagtcacacactatatatacgtgggttaatttccactcatatgcacctttgtagtttgtactaacacaagcagcaagtgcttggtctatatccacaaacatggtagttggaggttcgaataccggtgttcatggatggcgagacatcaagagtctcaccgtccaagtcatcaccgggagatggttcgtggtgttcgcctcctttctaatcatggccgccgctggagccacctacatgttcggtctctattccagcgacatcaaaacaaccctcggttacgaccaaaccactctcaatctcctcagtttcttcaaggacttgggcaccaacgttggggtcatctcaggcctaatcaacgaggtcgctccaccttgggttgtcctcgccattggtgccatcctcaacttctttggctacttcatg

SEQ ID NO: 133438 - DNA, 326 bp, Glycine max
  Clone ID: PAT_MRT3847_914C.1
atcaagtgcaatttcaatccccagaatctttttaatcgtcatctttcaagcaactgccgggtctcctttccaactaccaacccatatgctatcattcccattgcctcagacgagcccactgacactgatgaacacattccactacctaccaccgccaagccttctctcaaacacaaggatgagcacactcctgacgccaaggctaatactaccaacgaaccagtacctaacacggtctccataccacctcatccgcttgcactcattcttcctacgaacacactattcacgacactactacctaactgtatgttacatcagcttcg

SEQ ID NO: 133439 - DNA, 132 bp, Glycine max
  Clone ID: PAT_MRT3847_91500C.1
gtaattcttttttttttttcacataagaatcatatatgtgtaggattacagtttaaagtgacacaatattcggaaaaatgggaatctatctagctacatgtttgaccactaagtggagtcttatacattgaa

SEQ ID NO: 133440 - DNA, 304 bp, Glycine max
  Clone ID: PAT_MRT3847_91501C.1
tttctattcgacaccacaattttttttttctgttcaggcctctttttaatgagtttatttggtgttggttcttgattattgtatgaactcatcaaacttttttagtttatttgaatgcaatcctttgtttttttcatttttaatgagtttatatatatttatatattttttcttttggcccgctatgacatccgtcattttccgctacgccatttgccatatttgtatggcggacttttgacttttcgtcttgataccggcatcctccattaacaacattggatatcatacattacaattttaa

SEQ ID NO: 133441 - DNA, 237 bp, Glycine max
  Clone ID: PAT_MRT3847_91502C.1
gacatcctctgtgaccctaattaggcatcgtcgccgccgtcttatttaagttgaagttgcgacaatggtccatttgtaatagaaaaaactcattttgaaatcttagttatcttttttaatggattctacactaaaaaaaaaaaaaaaaaaaaaaaaaaaaaaaaaaaaaaaaaaaaaaaaaaaaaaaaaaaaaaaaaaaaaaaaaaaaaaaaaaaaaaaaaaaacctgggggggggc

SEQ ID NO: 133442 - DNA, 414 bp, Glycine max
  Clone ID: PAT_MRT3847_91503C.1
ggctcgagaacatggcttacttaagctccttagtgctgctccttgcagctctaattgtatccggtcacgtacttgcaaactatgagaatcccccagtgtacaagcctcccactgcgaaaccaccagtttataagcccccaattcagaagccttctgtatacaaacctccatttgaaaaccccccattttatatgcctacagtatagaagccgacattgtacaagcccctagttgagaaacccccagtgtacatgcgcgtcatctgaaaaaccaccactgtacacacctatagttgagataccaccagtgcacatgcccatcacttgacaaaccattattgctcacgccgtcattatgaagaccattagtgtacaagcgcacacttgtaaaaccaccagtgatcatgccctcatt

SEQ ID NO: 133443 - DNA, 488 bp, Glycine max
  Clone ID: PAT_MRT3847_91504C.1
acataccttccttgctcctccaagctcaacctactttagctcaaatgggtcatatcatgaataaaggattcacacaaaaaagttattggtttccatggatcacaaaagttggatttatggtgctggcctcgtgtgcctgcatggtgacatcagaggaaaaaattgaagaccctttaagtggttcattgtgcattagtgaatgtgctacatgtcctacaatatgttcacaaccccctcctccatcacttgcaacaacattttcaaatcatccacctccttcttcacctctaacaccagaatcacacattccctctcctccacaacacacaacaacatcatcagttccaccccctcctccactcttaacatcatacccttcccctccttcttcactcttgacatcaaatccaccccctcctccactcttaacatcatttcaaccacctcctccacttttaatatcatatgatccaccaccttctccactc

SEQ ID NO: 133444 - DNA, 201 bp, Glycine max
  Clone ID: PAT_MRT3847_91505C.1
ctttttaagacatggcgagtttatggtcacagcttcactagtgttagtgatataatctggaaatgcaagatgctcatcatgagaaactaggcgaacaagttagcgagaatagtggtctgtacagagcatatgaagcttgccaattgatacagaaacgaacgatgaactgttgagtcggtgtaaatcggtgggtgactacca

SEQ ID NO: 133445 - DNA, 190 bp, Glycine max
  Clone ID: PAT_MRT3847_91506C.1
acaataggacgaatgagccgagagctagtaaagggaaccagctcggtctcgaagtcatatatgcaccagctgaatagactttcaagcttgcggatgctggaatgcggacaccataaaggcgacttaaatggattcgtcacttacgtaatacgcggtcctggaattagagtacctccagctatagtcacgg

SEQ ID NO: 133446 - DNA, 324 bp, Glycine max
  Clone ID: PAT_MRT3847_91507C.1
gcgtatgtgtgtccgacgacaacagaaggggttctgacgggcgttgcaagagagtgcctcagatggttgcatctctccctggacaaactgctgggcacacaggatgtatctggagcaatttatctgcactctgccgggaagatacagagatagctatggctggctgtagtgtgctaatgctatactgaggtgtattgattaaagtatgcatagcgcgggcctaactgacacaaaatcgttcactgacatagtgtgggtattacaacagtcaacagggatagaacccagcttaagctgtcttgcccaggtgaggaaacaaggacc

SEQ ID NO: 133447 - DNA, 247 bp, Glycine max
  Clone ID: PAT_MRT3847_91508C.1
cgctactgaaggtcagttcagagatgaatgctactaacctactcaaacgagatatcgtacatttaaatcttaagttgtcacaacttcaagctttgcttgatgagaaagaggcacagttacgccaatttagaagtatggaaggggggagtactggttcatcgagcaatttgcgtgaagaaactgctcgtgtgtcgaaagattcttcagagctttttccaactggcattccacaagtaggtcaaacaga

SEQ ID NO: 133448 - DNA, 139 bp, Glycine max
  Clone ID: PAT_MRT3847_91509C.1
gctcggaatacggctcgagaaatgcacgaatcacccatatttttttcagggcgctgcacccgggcctcccttggggcaggttaacatcacatttcctgtgccggtaaactggctctacttaataagcaacttcataaac

SEQ ID NO: 133449 - DNA, 358 bp, Glycine max
  Clone ID: PAT_MRT3847_9150C.1
aatacaaacggagaattttattaatgaaaaaagtcggtgcagtgtctaattattgtgcattacataaaaggaattctatctatagcaatgtcttgtaaattttgccttgctcctgtacttatttataaacagcttgtatcatacataaagagctttcaaagacctgcaaacacttcaagagcattttctttgagatttgaaacgaagtaagaggtgtactctccatatttgaatggatgataacgaaggggatgaattttctcatccaccaactcaaggggcacctcaatgtccatctcttccattggcattgcaaaaaggccaaatgaatatctctctttgtttccattcatcacca

SEQ ID NO: 133450 - DNA, 289 bp, Glycine max
  unsure (1)..(289): unsure at all n locations
  Clone ID: PAT_MRT3847_91510C.1
gatgaagacccagaatgtgatgtttgttgtgttggtggtgtgccttgccgtgtgcgtgggcacttcctggggccatgatttcattgatgacgccaaaaccaaagcagggcaggccaaggacaccgccgttgacgctgccgcaccaacggttaactccgtcattgatgccgcagcaccgaccgtcgatgcccccgcaccgaccattgatgctgccgcgcagaagtctgggtcttttgcttcatgggcttatggcaaaatttcccatggcttgnggttcaaatcgggagac

SEQ ID NO: 133451 - DNA, 394 bp, Glycine max
  Clone ID: PAT_MRT3847_91511C.1
tgttcgcttacgcgtccgtacgggcgtgcgaagtcgacggagggggcagacaggggctgaaggtaagagcaaagaaagcctctgcctccttaccaaacccttctaacactgaataatgacctctcccggggcctctgtagctgatacacccacgctttctatttgcacacaatcgcgcacaattagatccatctaaaagcgcaaggcacttgcacctggttatgcttcaattgctccccctcccaaatcaatacgactggacctggtgcgcgacttgacgatggagggcgaggaaactgaaatggtgaaccatccttgtgtggaccccacacctaacactgacactgacatggccgagagagctagtgttctttatgagccagccgctactacc

SEQ ID NO: 133452 - DNA, 470 bp, Glycine max
  Clone ID: PAT_MRT3847_91512C.1
gaaggaatggagggtggtgacgttgggcgctgggtgttggagttccttcttcgaagtcggaaaccactagtgtaaagacacaacaaccataatttcggatttgttaatattataaggcttgtatatgcatagagagtaagcttttaataatccgttggaagtgaacgagacactgattgaagaacaaagtagatatgcagatgtaccttgcccacatgttattaataacaatgaggctgatacgatgggaaaggataaaacttatgtccctaggccaagtttattgggaagaaatttaacgatgcaatcctaattttttatttttgttacctgattccactcttttttagatactagttatttcataattaaaatgtatataatttaatgctctaagtctaagtcgttgtttttgaaaccaacaagtagaaaaaaaggttgggacatggaattggaagacaagttggagt

SEQ ID NO: 133453 - DNA, 469 bp, Glycine max
  unsure (1)..(469): unsure at all n locations
  Clone ID: PAT_MRT3847_91513C.1
ggctcgagctcgagccgaaagaattgaaaattgagaacgaacctggttctggttttagttgaaacgtgtttagaagagattgtgcatgccggcgtgaaccatgaccggctcctccccttccttgctccgccgcgacgaaaacagaggaacaccgccgatgctgtccaacggaatcaaacttctccaattcgggtcggactcgccggccatgtggacgccggagaaggcgacgtatacggcggcgccgacgcgctccgttacgaaggtccggaagggagtggcgttggcctggctgcagaggcgccatgactccgacagcagcggcgtggacgagacgaaggttgcgagcatcttgcgggactcaaacctgccaccacggatcgattcgattctactcaactcaattgcttccacttttcctcgaaagtttcgaggctttgaattttctttattttaattntgcttttgg

SEQ ID NO: 133454 - DNA, 212 bp, Glycine max
  Clone ID: PAT_MRT3847_91514C.1
ctcgagccgtttcatttcattcacaagcttttttcttctctaactataaataatagactgctcaattctgtatgcagatctccaattatcacttataattctcagataccacttgatctcgattatcatcaatcattatctcttcctgtctacgttaaatatctttaataatagactagtaccaaaccaatgtcggagtgatcccaacttcc

SEQ ID NO: 133455 - DNA, 260 bp, Glycine max
  unsure (1)..(260): unsure at all n locations
  Clone ID: PAT_MRT3847_91515C.1
nnnnnnnnnttttttgtctctttttttctcgttaactgcaacaaactcactctggcttacagagttatgcacagaccgcttatactacgcccacctgctcttaaaaggttcgtatcctctgccaactacgtttattaaaagttgggactatgtccctgggacccttgggccaaccctggctacgaaacccgccttgaatggcgctaccggccttttcttaccccacttttcaccctggagaaagaagagaccgttctcct

SEQ ID NO: 133456 - DNA, 508 bp, Glycine max
  Clone ID: PAT_MRT3847_91516C.1
gagagcatggaaaaagaatttttgcgtctaatagttaaatcaatttttttgaaaggataaaaataaaaataaaaataaaaataaataatattagggatgggcttttcgaaagccaaagaatatggaacaatatcaatgccacgtacatcctcagctgaaatttaaggatgactaatcaaaattctgatgcatatatatgtacatttctgtacacaacgatgaaacagctactctgctgctatacaatttttcacttctctggcttcttttaccttccactttgcatatatggggcaatcttcatgtcgccagtttacctttagagacttgagtatcatctgatgaatctagggattgagatctggctttgctcgtaattctattatatccatatccaaaagaagttccatttgtttccgatagttcagtgagctcagccagatgacgggatctgaattcatttatagtcgctgcaatctccgatgtaagaagattagcctgagcaagc

SEQ ID NO: 133457 - DNA, 174 bp, Glycine max
  Clone ID: PAT_MRT3847_91517C.1
aaccgccgggtcgacccacgcggccgatcacacgcacttccgggcccatttataattcacaaggatcatctaaaccgcggaaccgagataggctctacaggactttaaaacccttcatcattctttctttgccgaattacggagtgggatttatttatacatatgtctaaacca

SEQ ID NO: 133458 - DNA, 680 bp, Glycine max
  Clone ID: PAT_MRT3847_91518C.1
taagaatctcagcaacaccaattagacaataaacagcgacgatgaaagcaatgacagcaacgacaacgtttgatgtctctgccgcttgcttccgtgcccctccttcttgttcaccgaatccatgccacaccagtttttcagttataaactccctgaatcctcacaagggacgacggataagcgttgctgttccacctaagtttccaagcttccggtaagcgtgaagaaagtgttagtcatgaatcatgatgattcataagcttctagaaacgagtgttttgttttttctccttctgtgggtggaattaaattattagattgaagtatggaacataacgtaataaagttatcatctcaatgttttcgtgattaaaaaaaaaaaagatccattaccctgaatagaatcagaagataagcataatatggatcatattctaatcgtggtaggctgctaacgtgctaaagtctaaactactctaaaacatattattatatttcattccattttacttaacttcttttttttaaaatcttttttcatcaattcaaacctagcttgtgacacgagtagtgattaataatttagtaatagtatgtgggaactagcctgagtgaatggatggggaactgaaggaggaaagccttctcaagggaattggaggcttttaagttccaacttt

SEQ ID NO: 133459 - DNA, 275 bp, Glycine max
  Clone ID: PAT_MRT3847_91519C.1
cagtggcattcaaaacgcgaggctctcgccgtttcgggtaatgcgcctcgaaattctggaatcgggagcctcgcggcgggtttggatctggaattgggggagggggaattgaatccaattgaaccgttagggtttggggcgcgggtgaggggggttgcatttatgaaggaagcggtgttgttaggagataagaagagcgagaggaaaagaggaggagggagggtggtttgggaagggttgatgatgatggggttgaagggacaaagtaataataa

SEQ ID NO: 133460 - DNA, 656 bp, Glycine max
  Clone ID: PAT_MRT3847_9151C.1
atatgggattctaggcgtggtgtgaggatcaagaccgcccgtggacgaggagcatatgtgcgccaaataacttatcggaatataacatttgagaatgttcgagttggaatagttatgaagacagattacaatgaacaccctgatgatgggtatgatcctatggcactcccaattctcagagacataagctttaccacggtccatggccaaggagttcgtgtgccagtacgcatacacggtagtgaggagattcctgtgagaaatgtgacttttcaagacatgtcagttggtctaacctacaagaaaaagcatatctttcagtgtgcatttgttcaaggccgtgtaataggtaccatctatcctgctccctgtgagaaccttgatcggtacaatgagcaaggacagttggttaagcattctgcgtcccagaatgtaacagatatagattatgatatttgaggtttcatgttcactaattcctggccttgttccttttacttgggcctcaatttatgtccgtattagatcaaatttttttgtggaggttggagaagtcaagtcatgccttttttattttattatgtaatgtcacttttctactccattttatagctttctgaagtggagctgtaaatacagaaaattttcatatgcgt

SEQ ID NO: 133461 - DNA, 1614 bp, Glycine max
  Clone ID: PAT_MRT3847_91520C.1
agcctccggcgtcccgtgttgacaacacaagagaagatacgaagctctctcaatcttattttctgattaacactaacaaataacaatgacggatgctgctgaagacgctacacgccgccgtaatgcggtggccgagtaccgcaagaagcttcttcaacacaaggaattggagtccagagtacgatccgtccgagagaatttgcgtgcctcaaagaaagagttcaacaaaactgaagatgatctgaagtctcttcaaagcgttggacagatcattggcgaagttcttaggcctctcgacaatgaacgcttgattgttaaggcaagcagcggacctaggtatgtggttggctgccgcagtaaagtagataaggaaaaactgactgctggtacgagagtcgttcttgatatgacgacgctcaccataatgcgggctcttccacgtgaagttgatccagtagtttacaatatgctgcatgaggatcctggtaatatcagttactctgctgttggtggtttatccgatcagataagggaattgagggaatcaattgaattacctctgatgaatcctgagctcttcattcgagttggaattaaacctcctaagggtgttcttctttatgggcctcctggtactgggaaaacattgttagctagggcaattgccagtaacatagatgctaacttcttgaaggttgtttcaagtgcaataattgataaatacattggagaaagtgccaggttaattcgagaaatgtttggctatgcacgtgatcaccagccttgcatcatttttatggatgagatcgatgccattggtggtcgtcgtttcagtgagggaacaagtgctgatcgtgagattcagagaacactaatggagttgcttaatcaacttgatgggtttgatcaacttgggaaggttaaaatgataatggcaacaaaccgtcctgatgtactggatcctgctcttctgcgtcctggaagattagatagaaaaatagaaattccattgccaaatgaacaatcaaggatggaaattctcaagattcatgctgctgggattgctaagcacggtgaaatagattatgaagctgttgtgaagcttgcggagggctttaatggagctgatcttcgaaatgtgtgcacggaagctggaatggcagcaattcgtgcagaacgtgattatgtgatccatgaagattttatgaaggctgttagaaaactgaatgatgcaaagaaactcgaatccagtgctcactacagtgctgattttggcaaagactaaaagctattataaaattctgagccatggatatctagggaaaacttcatgcaattaggttaactcagacggtctgaccttaagatgaagtggtctcttttagctatgccttctattgtccgacttatgcagttccatagagaagatgtttagttgaatcatttgcctaagctaattgaattattattatttttgttttctttgggattatgctatacaaattactgatctttgaatttagagtttgcgtgcctccccatttatggttaaagactgcttgttgagtgaatttgcgttgcaagcttcaataaatctgatttggtgtttaatct

SEQ ID NO: 133462 - DNA, 565 bp, Glycine max
  unsure (1)..(565): unsure at all n locations
  Clone ID: PAT_MRT3847_91521C.1
cccacgcgtccgcccacgcgtccgtacggctgcgagaagacgacagaagggggatgcatacaacacaacacaaaataagagacttctctcatctatcgttataatttactttgatacgaagctctctcgatctaattttccgactaacactaacaatgacggatgcagctgaagacgctacacgacgccgtaatgcggtggccgagtaccgcaagaaacttcttcaacacaaggaattggaatccagagtacgatccgtcagagaaaatttgcgtgcctcgaagaaagagttcaacaaaactgaagatgatttgaagtctcttcaaagcgttggacagatcattggcgaagttcttaggcctctcgacaatgaacgcttgattgttaaggcaagcagcggacctaggtatgtggttggctgccgcagtaaagtagataaggaaaaactgaccgctggtacaagagtggttcttgatatgaccacgctaaccataatgcgagctcttccacgtgaaggtgatccagtagtttacaatatgcttcatgaggatcctgcnaatatcag

SEQ ID NO: 133463 - DNA, 510 bp, Glycine max
  Clone ID: PAT_MRT3847_91522C.1
ttgcttgcgaacagtatctgtccaacacttctgttgaacaattgtttttcgtcctggatctatatggttattttgggagagttagtgaaaagatagcaaaggccgtaaaaaggaaacaattggaggacattagggacaaatcttttagtggaaagctgatggacaaggttcctagtgatgctgctgtgagtttatcagtgaaaaacctccaacttcgatttctggagtcatcttctgtgaatattgaggggatgcctttagtgcaatttgttggagatgatctgtttactagtgccactcacagaacccttggtggggccattattgtttcatcctttttacgttgggggagtgttgtgataggttgtgtagatgatgaggggcacttgccgtgtgaaaatggctcgttcttgagttctaaggaaaatgctctcttattgagtgataatggatatcctcaactaagaactgttttcgggtgcataagaacgagaaacatctattgaatgg

SEQ ID NO: 133464 - DNA, 595 bp, Glycine max
  Clone ID: PAT_MRT3847_91523C.1
cccgcgtccgtttctaactccgtctctgccgtcacaaaaaagagaaaagtctccgtgtcgtcgtgactaacagtgtgagtgagtgtttgtgtaaatcggggaaattgttgggctattcaagagatcggcagcggcgtcatgggtggagatggagccacggcaaacgcggaggcgcagtacgccacggcgaagatatcggtgtggtgggacatcgagaactgccacgtccccaagggttcggatccgcacgcgatcgcgcagaacatcagttccgccctcgttcgcatgaactactgcggccccgtctccatctccgcctacggcgacaccactcgcatccccgcctctgtgcagcacgcgctctccagcaccggtatctccctcaaccacgtccccgccggcgtgaaagacgcaagtgacaagaagattcttgttgatatgctgttctgggcagtggacaatcctgcacctgctaattatttattaatttcgggtgaccgagacttctcaaatgctctccatcaacttcggatgaggagatataatattccttcttgcacaacctcagaaagcatctgcacccctagttgcagct

SEQ ID NO: 133465 - DNA, 2633 bp, Glycine max
  Clone ID: PAT_MRT3847_91524C.1
cctcgggcgaccgcacgcatcgtatagaaaagatagaggaaagtcgccttgtcatcattaacagtgtttgtgtatatcggagaaattagggtattgaagaggtcgctcatggacggagatggagcgacgacgatcgcggaggcgcagtacgcgacggcgaagacatcggtgtggtgggacatcgagaactgccacgtccccaagggttcggatccgcacgccatcgcgcagaacatcagttctgctctcgttcgcatgaactactgcggccccgtctccatctcctcctacggtgacaccacgcgcatcccagcatctgtacagcacgcgctctccagtaccggaatctccctcaatcacgtcccggccggtgtgaaagacgcaagagacgagaagattcttgttgatatgctgttctgggcactagacatgggatcaaattgaaaagttttaaacaactcctgctggaaggacctctcgaatgggctccatcaactacggatgaggagatattatattctacttgcgcaaccttaaaagacctctgttcccctgattgcatccgccaatagagtatgtcattggcctagaaaaatagcttgacgacctcctctttcgaatggtgaatcacaacaacttggtaatggtagcctcagccatgtatcatcttctgactccttacaaattccggttacaagtgctactcagatacaacaacaggtggattcctactcagaagtacatgtaggaaattcaaaatttacaaatggaggaaggggatttgattctagatatcaggggaaaacaaattggagaaacctgagcctatcgaatggacctagagacatgaatcctctgcctgttgtacttcaagataatcgtaatcgtaataatgcaaactcttctcaacctggcaactttaatctaaatgttccatcaagtgctacaaatcatggtcatggcaatactgatcagttatggagcaataacagtaatctacagggcaatcttcaattcgcttattcaccaagattaagaccaaataacttatcactgcttcctgcttttgaatctagttgttcatatactcaaaatgcccatacttttccaacttcagattttcaacctatgactcattgtcccagttttacatcaagaacacataccaatgtttcagttattggtgatcggagcatttgtggataaggtaatagttttcatatgctgtttgtttttacgacatgggaagtagggtacccaatcaaattttactgggtgaactgtggaatgttggtcctgaaacttttttgttggcttatgttcgttggtggctgtcttcgaaatgttacaagttaaactgctggacagagaactcttaatttgcacaaaattaaaggagactgcactcttcaaatcctgcatgaagctcatgattcgttatcttaacacaaatacccggtaagctaatgattttagaatttgactatgaaaatatgttacggagtactcaaaatgattcaaagatggtgaaacaaaatgtcagtgcatcctattgcatctcttgttgctgatggtgcctacggaattgtgatattttattattcatctggaattagcttctggatacctggctcaatgctcagaattcggtaattcagtggggaattaagctgatcttgccgcttcctattgccttgaaatgttgtccaaatttaaatttgctctgtatcatatagattatttagttgtatgccctcagctttaagtttttatttttacttttttggttggaaataataccggttatgactggagcaaggttcaatttgtgtttaatctgattaagctttctcaatagtgtgactggtgttgactcatagcgagtcatagctgtacataaactcagatttggacttggtgcaatccatctggttggcagccacttaacattactcttcccgagataaaccccacttcaggggttgtagctggtgggcaaatttccccatctggggtagttttagaaactatttccccagatggggtcgtttctaaaaataattgcagcatggggcagttttttacgtgcatggaagacccaaaccggtgtcagtgagcaacccgccagatgcaatggcgatatgaccgtgcagagcctaagtcgccagtcctaatggcgatacgcagaagcagctgggaaccgccagtcaaactggcgagttccatggtacaggcgtgcaggcgcttttgcaggggtgcaggagcttgcttttcagaaaagggagttgcaactgccattggcgagttgcttgcaagttgcaactcccattggcgggttgcacaagaagaaatagccatcaccaatggcggtttgttaccagtgctcacgttttgaacttgaactcacgttttcagctccaaattagaaataaatctttcattgctcacggcttcaaattagaaatttctttcttctttcattgtatgctgagagctctagttgtgtgtggtcagtgacttagagttttctgaatacagaaagagccttgagttttgtaagtgtgtagggatttctgttttaaatttgtttggttgaagttaaatatttgaattaggtttataattttgaaatt

SEQ ID NO: 133466 - DNA, 171 bp, Glycine max
  Clone ID: PAT_MRT3847_91525C.1
cgtgtacgcagactccggctccggctcgacgcagtcttgggatcgctactcgaccacactagtttttgtcatcatctcgaactgctgcagcttacccggcaccccgtcgacctctgcgcttctcgtctggttagtattctgatgctgtcgtctatggtcgctatgcgcaga

SEQ ID NO: 133467 - DNA, 256 bp, Glycine max
  Clone ID: PAT_MRT3847_91526C.1
ggctcgaggtaacatttctcagacggagtcgagttctacgagaaatatcatgctatatatcgtatagacatattatatgttatagcttgtggacagtaacactactgaacaatcactctcgatacctgatcgcgactactcatgacattcgttgtcatatacagatcgctacttagggacacttaaaacacactggttatacggctatacatatcctgcatacacaacatatgctgtgactcgaatacagctgatg

SEQ ID NO: 133468 - DNA, 1652 bp, Glycine max
  unsure (1)..(1652): unsure at all n locations
  Clone ID: PAT_MRT3847_91527C.1
gtttgtaagagtagaagagctgtatattgattcaatttcttgtttttccttcagaactcataagaattgagcaagtattgattttgattactaatgctgtggtgggttttggtcaaaatttcagaatcttaatggaaaactcagaccacgacgaacccgaaaagaagaggcctcatctcacctctgtctcttcccgcactcctcgaaactccatcaactctcctaccaacaacaaaactgctgacgcaggagtcttacagttccagaatcagcagcttgttcaacagatagacatccaaaaacatgctttgcatgatcttgaagaaaaaattagagaattaaaaggaaagcaaagttcctatgacgacttgttaattgcattgaaccaactctggactcagttggttgatgatatgattcttcttggaatacgagctgggagaggcaaaggcaaagacacattgcaacatttgactgacattgataatcctcaaggttcagttcctttgtgtcctgctgaggatatgtttctatgtagattaatccagaaagattccattaaaggaatcagtgatgatgagatcattagttatgttgaggaggcccttgctttgcgtcagtcatatacaagggagctgttgaaactcctgaaagataccattgatgatcagatggaaagagcaggcagtatagctccagttntaaattcggctcgagcttctgaagatgctataatccaaatgtctaagattgatgatatgacgaaagaggaggtagataatttccgtgaagtggttgatactctccatgcaaaacataaagagtatacagttgctattcaaaattctattaatgagtactcacaagatcaatctgagattaaacgccttgcaggtgagcttgatgagattgtggctgaactagaagagagtagaagaaaactagtcaatctggaaatgcaaaaggatgcagcaataggaatgaattcccccaaagcagatgcagtgaatggaaacctgtcccctgaaaacattgcttacaggaccatgggtttgcgtgagttgaaggattcaattgaggaagcaaagatagtggatgctgatcgtctttctgagcttcaagatgcacaagaagacaatcagaccttgacgaagcagttccaagatcttcagaatgaactgaaagatgataagtatgtgcgcacttctcgaatatactctttggctaatgatcagcttcaacattggatgactgaattggcccgatataaaacatcggtagaatctctgcaggctggcagtgttcatgttgcaaaatgggagaatgaactaaatttgaaattggagtctgctgatagtgcaaggcagatccttggcaattctgaccataggattgatgacctagagcttcagttgcagaagtgtattattgaaaagaatgatcttgaaattaaaatggaagaagctaaacaggatactgggagaaaagatatcaaatctgagtttcatgttatggctttagctttatctaaagaaatgggaatgatggaaggtcaattaaagcgatggaaagatgcagctcatgaggctgtatcattacgtgagacagcacattcactaagagaagcattgagcacgaagacaagtgaactt

SEQ ID NO: 133469 - DNA, 298 bp, Glycine max
  Clone ID: PAT_MRT3847_91528C.1
cgttcttttttttttttttttttttttttttttttttttttttttttttttttgggtataaggtcatttttattttttcttctattgttaattttttaatttaaaaacccttatctcaatacaaaaactgggaaaatgttttgagcctacgatgactgaacataaactgaaaatgagcccatcacagcagatcagcaacattggatggcaactcctatacccacacatcgagcaccccccgacataaaaccccccccctaaaaacaccaaagacacaaaggttatggaaacacctttt

SEQ ID NO: 133470 - DNA, 287 bp, Glycine max
  Clone ID: PAT_MRT3847_91529C.1
gaaggaaaataaaaatattaaaatggcccctttaaatggtcaaggttcaagggaacaaaataccccaaccaaaatcacctttctcattttaaagagaacccccgccccattttaaagggccaaaagggcataaatgcaacgggaaaaatcgatggcggggtgggaaaaaaaaaaaattaaccgggagtccctaaacagcatattacttgaccctggaagccttgacccttttaaaaagctctttaacattggtggccctcccaaagagggcccctacacgccccaaa

SEQ ID NO: 133471 - DNA, 288 bp, Glycine max
  Clone ID: PAT_MRT3847_9152C.1
agtgcataagaaaactataaagcgagacctaagggatataaacagttactcattcttcaacgccagcaaattaattttgatggacaggatatacagcacctacgttaccacatggtactataaaaacctgactaaatactaggcccaaaatgggcctccactgaaagaactgtccatggcggaaaaagcaagccttccatcacatacattttaaagcgcataaacaagtgggagtgactacccttattaatataagagagcctatttgtggggacacactattgggca

SEQ ID NO: 133472 - DNA, 345 bp, Glycine max
  Clone ID: PAT_MRT3847_91530C.1
agctcgaggttcatgatcccaattgaacctcattaacaaaatacgaacgaatcctagctagacgctcatgacctatttacactacagatcgataactcatggatctggggaagaataagaccgtcagcgattaagctggttcagctgaccgcagagccatctataacgtccagtcccacatacttccccaaacacttgggaatactaccactcgatgccacatacgaacagcacagagaaatccgctgccacgtctgtcaacgtcactcataccaacaaggctatgacacacattctggtgctactgctggacacgcaatacgtgaccaatcgattgaagagact

SEQ ID NO: 133473 - DNA, 245 bp, Glycine max
  Clone ID: PAT_MRT3847_91531C.1
tctgcatgcatagcacatggccaccgcaccttctgcagccgtagtgtatcccctaattcactggcctcaattgcacgcgcacgcaaagtgagctgccgcaggtaaagtctcagctccccaggccacaagagagggggcataacggcttccctaaaagacgtaggagtctctgaagggtccactgtcgtaagagcagagctgactaacaacgccatggacaacgaagtgtcactgggaggtgatga

SEQ ID NO: 133474 - DNA, 282 bp, Glycine max
  Clone ID: PAT_MRT3847_91532C.1
caaccacactctttgcacagtgtaatgcgctttgtttaagcgaataaaatactacgcttctcctttacgagagggaaagggctcttcttgatccgagaggttggagactcttactgttcttaagatagcgcgtatggtttagatcagtggcgtgagaactaagaatatttctccttaacgccaaaaagaacatccattaactgtcctgggaaaaggatcaactctttacaaaaaaccaatttattttacctttcccaagggctgtgggaatccttttgttga

SEQ ID NO: 133475 - DNA, 247 bp, Glycine max
  unsure (1)..(247): unsure at all n locations
  Clone ID: PAT_MRT3847_91533C.1
ccgagatgaacaagnggtcattcaagtatgcctgggtgctcgacangctcnaagctgagcgtgaaagaggnattaccattgatattnctttgtggaantntganaccancangtactactgcacggtcattgatgctcccnggacatcgtgacnttatcaagaacntgattactggtncctcccaggccgactgtgctgtccttattattgantccnccactggtggttttnnaagctggtatttcc

SEQ ID NO: 133476 - DNA, 431 bp, Glycine max
  Clone ID: PAT_MRT3847_91534C.1
actccaaaaaattagagcaccttccattcattaataagctataactaacttttaaaaagctctttttgcactgcatatctgaaaacagcatttacagaaaactaaagtgatcaactgataactttactttcacaaaagtgctcaaagactaatgcaaacactgctgacttggaaatggaggataggggaatccggtattgtcctatagcaaacagtcctttaaaagatggccggtcgcacactaccaaattcgtgctacagatgaattccccatgtccactaccattgccactatgattggggggcaacccccataacttgatcacacattgctgagaaatgcaccaacaaaatggtcgtgcctaccacaaaaactggagactcgtgaaacgggaaccttccaggatgagcattgcttccatcatcaccaa

SEQ ID NO: 133477 - DNA, 285 bp, Glycine max
  Clone ID: PAT_MRT3847_91535C.1
attgcatgttcccgtacagttcactgttatacgttgtgatacctgtggggctgcagggtccacacagagatctctttgtcacaagtgccatgaaggcgcagagcacacttactgtatgcatcctgatgagcagtcagaactagaagcaaactggaagttcgtgaagattggacatgtcaagagtgcatgccgagggaaggaaagatctaatggtgaaacttcatttcctggacatagattactggtaagcaatgacaacactcacaaagacccaaactttccaaa

SEQ ID NO: 133478 - DNA, 402 bp, Glycine max
  Clone ID: PAT_MRT3847_91536C.1
aattcccggctcgacccacgcgtccgccgacgcgtgggcggatgcgtgagcgggagagaaagggatagagaaggggattctccaattgattcaccaatgtactcaccattgcacatcgcagttctcgacgacgatatcgatggcaagtgcaatggaacgtgctaggcagtccactggcagatccgctggaaggaaggatctgaggaagcaagtggcacgcaagtcagctcgggagtcaggcgcggtgaccggcggagtgagcatcacgcaacgaatcatggcactaacggagactctgaaggagaatcggaggtacgagcttatgatcggacttctgatacgccagatgctagtcaaaaagctcgtccaagatttcgctcacgatctcagaattgatatcag

SEQ ID NO: 133479 - DNA, 532 bp, Glycine max
  Clone ID: PAT_MRT3847_91537C.1
acattgaatatttttttatttattttttatgttttaaaccttaaacactgtacacttaaaaatgaacctaggagggcaaaaaaaaataaaatgatttgaggtcaaaaacaagaagaggcgttacacattgagctcgcatacatgaaagaccacataggacatcctcaaacaacgcacgaaatgaagaggccgcacatacccctttagcggccatcgagattgcaatcaataacaactcctgaaagcaaggggtcaacactatacgatccacaaactttctacaaccaacttgaccgccaaaggatgcctgcgtgattcaccaatcatcacataagggcttaaattcaaaaattaaccatttataataagcaaacggttcaaaggtggacgtagcagctagaatagcaccacccaagatgcaacctataaattgcggaccaataaaaaaccgctcaccattatctttaaaactttcttcaaacaatatctatcataattaagggaaaacgtcacatacagtgaaacatgtcac

SEQ ID NO: 133480 - DNA, 559 bp, Glycine max
  Clone ID: PAT_MRT3847_91538C.1
cttacctttccaatcttcttgttgcgtttctggttcttgttttcttcttcccttcacccttcaaaagggtgccccttaataaggatgaacctctcatagattcacgtatgctccagaaatttgaactattattttgcaactcttcttgccaaattttgaagggacatttgggttgtctataaatgaacgagaacaggattgattgtgtaggacggactcaacaaagctatggcctaaatggtgattggaattctgagtttggcaattgttctagtcaatattttgatgtgagacaggcttcaaatatgggaacttgcaatcagccacttgcaatggccagtggtggaggagtggaacaggaaccacacataggccaaaacaaatcatctagcagcatcataagccgtttcaagtctcctgcttcagccttttatgcaacagaaatgtgcatgggtggtttccctcaatatgatagccaaattggcaatccatctttgatgtctcattcctccaagtttaatgatatggaatttcctttatatcaatctctcaggcaaag

SEQ ID NO: 133481 - DNA, 350 bp, Glycine max
  Clone ID: PAT_MRT3847_91539C.1
gtctagccgtgttggctcgcagcaactatgttctgtctggcgattatgctaggtttgatggctctactaccaaacaaggtatgagcaccatggcagttatgatcaacaggccttgtagcggtgacgaataattgatgcgtgaaaagacacacctgctggacgcgtcccgcctgatgatggctatttgtacaaaagatgtacggagagtggaatgtggaatcccttctggatgtgcgatcacagttatttgcacgagcacatttaatgacatgctcattagatatgactatcaaaaattactgcgctatgctaaagctccaagtgtggttccaccttcctttaaaaattta

SEQ ID NO: 133482 - DNA, 304 bp, Glycine max
  Clone ID: PAT_MRT3847_9153C.1
ggatttgctgaaactgctcaaacgcatcgcactcaactttctcaaatgaggcgtatgaatggtccggcttgaccccaatgaaatctacatagtttccattgctcattctctccagaacatagtgaaggttggtaatgatgggtttattatcacgaagaccacctctatttactctgcctcacgtgcccaccaaatgaaggagaccagaaggaactgacgttattctggatatggtgatcctaagggtgcaagggatgcaacgcttaccattaaaatcctgagaatgaggataatgcgactgctt

SEQ ID NO: 133483 - DNA, 235 bp, Glycine max
  Clone ID: PAT_MRT3847_91540C.1
cccgggcgggcacccccgcaatttccccgcggatccacacgcgcgtctgcatcctctgcatgatctggaatttgtggggggtttctctcgttcgtttgtgtaatccaatcccggacattaggcatgaccctcttgttgagcatgctctgcctatttgaaaatttccacacctcttttaattgtcgcaatgatgcgtgaagtgtgtgctatttcaatgcacccctaactacggctc

SEQ ID NO: 133484 - DNA, 350 bp, Glycine max
  unsure (1)..(350): unsure at all n locations
  Clone ID: PAT_MRT3847_91541C.1
ggggaancagggcgaacccaancgacgggggcgagnncgagggccnnnccgggnncggcaaccacnncnccnccgaggcccggggcggagcncngccggcggcgcagaacagcccccncgncggcccgnacggacnanacgccgagcaaancnccggcaccnccnncacnncnccncgcaaccgcaaccncnncagngggnnnaaacggancaaaccancagggacncacgaaccgggcaagccaagagnaccgggnaaggggaggannnngagggagnncaacaacnccagcagnncggcnaacccaacncagcnnaagaggaagcccannggagcacccganncgcca

SEQ ID NO: 133485 - DNA, 364 bp, Glycine max
  Clone ID: PAT_MRT3847_91542C.1
aaaaaaaaaaatttttgtataaatttttatttttaaaaaataaaaaaagttaaaattattattggttaaatttttatttttttatgttttttatcttttctatttatagtatctaagtttatttccctttccttgcaattactaactttttttttagggtaacctaatttaatttcacttacttcccttttaaaacgttttgattgtcaataccttgccttacccaaattaaatccctttccatcactttttcttttgcttacctgtttttattttattttatgtccctttcctattttcctttccatacatttccctaatttgaatttttactggaccttccctttttccttaatttaaaccc

SEQ ID NO: 133486 - DNA, 1063 bp, Glycine max
  Clone ID: PAT_MRT3847_91543C.1
tctcgagccgaatcggctcgagtacggctgcgagaagacgcagaaagcggtaggagtcataacaccttttctttatcatcctaaccttcttcgtccccccgatgttgcatgtattcgttttcgttaacgagttgcccgatcttctccctcaagaggcaccatggaggaaagagtggggattttgttactgattttgttgggtgctgcttgggcttgtgatacaagagagctagcaataatctctgaattaaacagaaaatcagatgtctgtgaactttgtgaggagtatactgctgaggcacttgattatctaaatgataaagagaaccagagagagattatcgattcccttcacaatatttgcaatcatattctctctttcaaacagcagtgcatcgaattggtggatcattatgccccacgtttcttcttagaaattgcatcagttcagcctggagaactctgcaaacagatccacatctgtcaatctgcaaagatttcttcagaagttgaaggaaatagctgtgactcttgcaaagatactgtttcagccttactggttaagttgaatgatcctgataccaagcttgaaataatggaggcactgttgaaggcatgcaattctatggacaagttttccaagaagtgcaagaggatggtttttgagtatggacctttgattcttgtcaaggcagagaagttcctgaaaacagcagatatatgcactacattacatgcctgccctgcttccactgcagttagcaacaaggaagcctcaatcatggaagtgcctttgatttctgactcttaatcatgggagaagagttctattagatttatggagcacttattgctttagttctattcctaatgtatttatctacattaaaatccatgtgcttgtaaccatgtgctcctggtatactacaactactctcactgaatgtcgaagtgaagtatatgattttgagatgccacaattttacatgtatttcttcattttgaataatgcatggcaggcaggcactaagtcaagatggaatgcaagacacactttcgcctt

SEQ ID NO: 133487 - DNA, 3975 bp, Glycine max
  Clone ID: PAT_MRT3847_91544C.1
tgagttcaaggtgattaaacaactaaacaaaaatccagccaaaatttctctgttggagctgcttatgaactccgagcctcatcagacattgttggtcaagattttgaacgaggcccatgtagcgcaagacatatccatggagggtttcgggtgtataatcaataacatcacgaccgacaactacctcattttcaccaatgaagagatacctatcaagggcaagggacacaatagagccttgcacatatctatcaaatgtttggaccatgcagtggccaaagtgcttatcgacaatggctcttccctcaacgtcatgcccaaggctactttggacaagctgccttttaatgcatcgcacctaagaccaagctttatggcagtcaccgggatgtaaggggggagatcgatctcccgattcaaatcaaaccccatgtgtgccaaattaccttccaagtaatggacttaaatcctacctacaactgcttattaggccggccttggattcattcggttggggtggtcccgtcaacactgcaccagaagttaaaatttgtggtggagggacatttgattatagtttcgagagaataagacatacttgtaagttgtccatcttcaatgccttatgtagaggctgtagaggaatcattggaaacatcctttgaagcattagaagttgtgagcaatgcttacgtggagtctcccccagtgcagccgtgctcatctagtgccactttgatggtggctcaggtgatgttagggcacggatatgagcccagaatgggtttaggatgaaacagggatggcatagcaagtctagtggagttcacggagaatcgcggaaggtttgggttgggaaacaagcctacacgcgccaacatgaagagaatcgtcctagcaaggagggagagaagctcagctcatccgcaagagccacaagtgaaaagagtccctttttgtcacattgataaaagcttcgtcagcgcatggtggatgtacgaggggcgggttgccgtgataaacgatgaaacccctaaaggccaatcaaattgggtgcggtcgtgtgctccaaagtttgaattgggaaattggcaagtcaatacacaacccttcttcatttgatcttgcacttttgtatattttcattgttctgcatatttttttttgttgcgattaaatgatacaaatccagcaatgagtcttgtgaaagtagtgataccaaggactcggatgttgattttgagcaactaataaatcaagtcgaggatggagaagatgaggattgggggctttctccagagttgaaaagaatggtcgagcaagaagatagggaagtgaagccacaccaagaggaaacggaagttgtaaagttaggtgtgggtgaagaaagaaaggaggtcaaggttggcaccggcatgtccatgaacgtctgagatgaattggtagctctattgtgagactaccaagacatcttcgcttggtcataccaagatatgcctggtttgagttctaacatcgtacatcatagattacctctaaattctgagtgttccctggtaaagcaaaagctgaggaggatgaagcctgagatgtccctgaagataaaaaaagaggtgaaaaagaaatttgacactggcttcttggctgttgcttgatacccggagtgggttgccaacatcgtgccagtccctaaaaaggatggaaaggtgcaaatatgcatggactatcgggatctaaactgagccagttcaaaggataactttcctttgccgcacatcgatatcctcgtagataacatgaccaattttgccttgttttcctccatggatgggctctcgggctataatcaaataaagatggcatcggaggacatggagaagatgaccttcgtcaccctatggggaaccttctgctataaagtaatgtcctttgggctcaagaacgatggggctacaaaccagcaggctatggcagtgttattccatgacatgatgcataaagagattcaggtctatgtggatgacatgatcgctaagtcaaagaccaaggaggaacaccttgtcaacttacaaaagttgttcaagaggctgcataaatactgattaaggttgaatcctacaaagtgcacttttagggtcaaatctggaaagttgctcggttttatcgtgagccagaaagagatagaggtagacccggacaaagtgaaggtcatcctcgaaatgcccgagccacacactgagaagtaggtatgaggcttcctaggacgtttgaactacatagtgaggttcatatcatagctgaccgctacttgtgagcctctcttcaagttattacgtaagaaccaatttgtccaatgggacaacaattgtcaagtggcattcgaaaggattaagcggtgcctcatgaatcctcctgtgcttttgccaccggtgcctgaaagatcccttatcctgtatatgactgtgttggatgagtcaatggggtgcgtgttggggcagcatgacgagttcagaaaaagggaacaggtcgtttattacttaagcaagaagttcacaacatgtgaaatgaactactctttgctcgaaaggacatgctatgccctggtgtgggcagctcaccgtttaaggcagtacatgctgaaccacaacagttggttggtgtctaaaatggatccagtcaagtacatctttgaaaaacccgttttcactggacggatcgctcgatggtaggttctactgtcagaatttgacattggttatgtcactcaaaaggctataaaagggaatttcttggcagattacctggctcaacagtccatcaataactactagcctatgcatccagaattctcggatgaagacatcatgaccttgtttgaggaggatgtagaggatgaagatagggacaaatggattgtgtggtttgacgatgcgtctaatgcactaggccatggagttggggtggttttggtttccctcgacgaacaatatataccattcatgactaggttgggttttgtctgcataaacaacgtagctgagtatgaggcatgcgcccttgggatccaagtggcaattgacttcaaggtcaagttgctcaagatatatggggactcagccttggtaatccaccagttgagaggggaatgggagactagggatcataagttggtaccctaccaggcctacatcaggaagttgatagaattctttgatgacatatcctttcatcacattcctcaagacgagaatcagatagtcgatgcccttgccactctagcgtccatgttcccactaaccccgcatggggatttttcgtacattgaattcagatgtcgtggcaagcctgcacattattgcttgatagaggaagagcaagatggtcaaccttggtacttcaatatcaaacgatacatcaaagacaaggaatacccacaggatgcctctgacaacgataagagaatgttgtgaaggctggcagctggcttcttcctgagcggaaatatcctatacaagaggaaccatgacatggtgttgcttcgatgtgtggatgtcagggaggctgagcaaatgctggtagaggtgcatgagggatcctttggaacacatgccaacagacatgccatggcccggaagattctgagagcagggtattactggctcactatggagaacgattgttgcatccatgtgaggaaatgccacaagtgccaggcattcactggtaatgtcaatgctccgcccatacctttgaacgtcttggcagcaccttggtcgttctctatgtggggtatagacgtgatcggagttattaagcccaaggcttcaaatggacatcgcttcatcttagttgccattgactactacaccaaatgggctgaagcagcttcgaacgctagtgtgactaggagtgtggtgattaggttcataaaaaaggagataatttaccggtataggttgcctaggaagattatca

SEQ ID NO: 133488 - DNA, 260 bp, Glycine max
  unsure (1)..(260): unsure at all n locations
  Clone ID: PAT_MRT3847_91545C.1
gaagaagaacaacnaccacagcacacnncgaggaagaaccaacacaaagacacaagccgaaggaaaagaccacaagaaaagccacccacaccgaaacaagaaaaaaaaacacagaacagacacgaaaacacgcaagcgaggagcaacaccaaacacagcaaccccaacggggaccacagcaaccccggccacaacaacctccccaacgaccaaccacgacgacaattatcctctctctttcccagaccaagtagttgggg

SEQ ID NO: 133489 - DNA, 350 bp, Glycine max
  Clone ID: PAT_MRT3847_91546C.1
ctcgccctttttttttttttttttttttctttttgttttgcttttgttttttctctttcttctggtgtgggttttttgttttgtccaaaaaaaacaaggcgaaagccaccgtttcctggcttcggggaccccagctaaccacgcgggggcaaaacgcgccccccggctcccgggactcggggcctgaggcccaggtcttgcactgggcggcatttagccccaaacaagaaacagggagtggtggaaggctctgctcacgcccgaacacattatcaggatccacctcggccaaaattcccaccaaccggttgaaaaaatcctcgacgggcggggggggccaagcaattgcc

SEQ ID NO: 133490 - DNA, 304 bp, Glycine max
  Clone ID: PAT_MRT3847_91547C.1
attacgtccttcaatggtaatgaacattgaatatgtaacagcaccctaaggatcataacgctctccaaagctgtacgatcttctgcagggatgaccgagaagccgtcacatattacactcatcccttaccgctcggccacaataatacacgacaccattcatcatgctacagtgcaccatcacttggaatccttgtttcacacgcataccctatagctctattgcacacactcgaaaccccctgtgctggaagtatatcgaattaactagtaacgaaataggaccgaacgctcaaaaaccacat

SEQ ID NO: 133491 - DNA, 338 bp, Glycine max
  Clone ID: PAT_MRT3847_91548C.1
gatgagacgatgtgccagttgcgatttgaatcctcagtttctttcttcaacgtctcgatcatagacagatcccaatcatctcgcaagagctaagttcccctcatttctatagccagagaagtagccactgtcgccgttggaccagctcccgtacctgcctcacgcggatccacccacgttgagataacgaagagaccagaactgaagcgaagaggaaaaggcaccaaagagacttaacctaaaaaggtttccagaccgtcacaatctcacgttcagcgttcctacgaagtgatggttaatgatgcaactacctcactaaaggagaaaaccggttcgag

SEQ ID NO: 133492 - DNA, 1008 bp, Glycine max
  Clone ID: PAT_MRT3847_91549C.1
cggggattcaaaaacagtgatacaactcaaaaaagagaagtgattgatgcaattgaaaagccaaacataaacaagccaaatgctgttcaggataatgcttctcagcacctccttaccttgcgtcaggaaattttggctcataaaaggaaggcagttactttgaaaagagaagggaaactaacagaagctaaggaggaactccggcaggccaagctgttggagaagggcttggaggatggaagtatgcagccagacactgcttctgcctctgtgaagaatgttgtacaaaagaaacaagaattgtcaaatgttagtgcaaaaccattgagtagccgtgatcgatttaaattgcaacaggagtctctagggcacaaacgtcaagccctaaagctacggagggaaggccgaatagaggaagctgaagctttgtttgaacgggcaaaggcaattgaaacccagttggaggagttgacagctcaagattccaataaatcagatggtgtagatgatgtgactgttgaggattttctcgatcctcaactcttgtctgctctgaaagctgttggacttgatgatgtaagtgttgtgtcaaaagccccagaaagagaagagactgtgaaatccaatgctaaagttgaaaactctaaccaagagagaattcagctagaagaaagaatcaaagaagaaaaagtcaaggcacttaatttgaaacgttctgggaaacaagctgaagccttagatgctcttcgacgtgccaaattgtatgaaaagaagctaaattcattgacatctggttcatgatgaagtaaagactgcaacttcaaagtgggaagtcctcccttgttcaaatcggtagttacttttaattcagtttaatttgtgaattttcattgaaagagtactagaaggtgcagaggaggttgctccttccattacatgcacgtttgctttattatgttcataaacattggagaatatatatgtgatcgttcgcaagttacaattttc

SEQ ID NO: 133493 - DNA, 351 bp, Glycine max
  Clone ID: PAT_MRT3847_9154C.1
gactcaaattgacttgcgtcataaacataaaccccttatataccacctgacatggagggttatttaactcctcatcattgcagagggacgctacgactatgtaacaccacttcataaggtatatacaattgacacgcgcagacatttcacctgtggagtggttctgaaaggacaactgaccctctttcggacgggaacctgtgatgagtccctgggcgacgacaaactttatggcccaatttctctgctcgaagacatgattcagcccaccatggtggggctctgaagaggaacctaggtgagctttatccatacccatgcccgtaaaatggcactgcaaaggaaccgcca

SEQ ID NO: 133494 - DNA, 742 bp, Glycine max
  Clone ID: PAT_MRT3847_91550C.1
ggaaagcggcttctattccctcaactcaccataatataactttccattttttctctagacacttctctctctctctctctctctctccagctttagcaaatacgcaaggcaaaacattcacagcgatagctagcaaacaccctcaagataacaactttctccaatggcagcaccaaagctggttcctttattgttattactaaccataataacaacaacgaagaatgtgttgggtcaaggaggaacagcgagctggtgtgtagcgaggagtgacgccagcagcgacgcactgcaaacggcgttggactatgcttgtggggccggtggggattgtcttcctcttcaaccagatggactctgttttctccctaacaccattcaagctcacgcttcttatgccttcaacagctactaccagcgcaggaccagagctcctggttcatgtgattttgctgccactgccaccattgccactagtgatcccagctatggatcttgtgtttacccttcttctgcaagtgctgctggaggaccaaatacaccaaccacaacacctccaatgaacaacccaaatgtgcctacatctaccacaacaacaccaatctttggtgggggcaacactggtggactaactcctggaatgagcactccattcccagacagttctagagcacattcagaggcaacagcaacatggtttttagctttatgttcctctcttattatattcattatctcttag

SEQ ID NO: 133495 - DNA, 1335 bp, Glycine max
  Clone ID: PAT_MRT3847_91551C.1
ctcagccggccactctatggatatggtagatttacttgccagtgatgatagtaacatgtctgaaatatttactcaaaaacatacagaatataaactttgttcagctaattcatctcaagctgatcctactattcatttggacacttcagtgaattttaaccaagatcggggattcaaaaacagtgatacaactcaaaaaagagaagtgattgatgcaattgaaaagccaaacataaacaagccaaatgctgttcaggataatgtttttcagcatcaccttcccttgcgtcaggaaattttggctcataaaaggaaggcagttactttgaaaagagaagggaaactaacagaagctaaggaggaacttcggcaggccaagctgttggagaagggcttggaggatggaaatatgctgccagacactgcctcttcctctgcctctgccactgtgaactatgcttcccatgcatcaaatgttgtacaaaagaaacaagaatcgtcaaatgttagtgcaaagccattgagtagtcgtgatcgatttaaattgcaacaggagtctctagggcacaaacgtcaagccctaaagctacggagggaaggccaaatagaggaagctgaagctttgtttgaactagcaaaggcaattgaaacccagctggaggagttgacagctcaagattccaataagtcagagggtgtagatgatgtggctgttgaggattttcttgatcctcaactcttgtctgctctgaaagctgttggacttgatgatgtaagtgttgtgtcaaaaccccacccagaaagacaagagactgtgaaatccaatgctaaagttgagaactctaaccaagagagaattcagctagaagaaagaatcaaagaagaaaaagtcaaggcacttaatttgaaacgttctgggaaacaagccgaagccttagatgctcttcgacgtgccaaattgtatgaaaagaagctaaattcattaacatctggttgatgatgaagtaaagactgcaacttcaaagtgggaagtcctctcgtgttcaaatcggtagttacttttaattcagtttagtttgtgagttttcattgaaagagtactagaaggtgcagaggaggttgctccttccattacatgcacgtttgctttattttgttcataaatattggagaatttatatgtgataattctcaagttacaattttcaaatgtggttctaaacatgaatcaatgttgtataatgtgtttatataaagtgttaaacatggccattcccatgagatattgccagaaaaagaaaaataaaaaaaagggcgcccgcgggtacgtgagct

SEQ ID NO: 133496 - DNA, 169 bp, Glycine max
  Clone ID: PAT_MRT3847_91552C.1
ccttccaaaagaaagcctttttgccgggcctcccacaaaaatacattttacaggggcccgaacctggtcccaatggaccagagccccatcaagtttttaggggcccaaacccccaaccaatatgaagggccgggaaccggtttcttacaggaccaataacccaaagggt

SEQ ID NO: 133497 - DNA, 144 bp, Glycine max
  unsure (1)..(144): unsure at all n locations
  Clone ID: PAT_MRT3847_91553C.1
tgctcacccgccngagaacacaggnnacngngcgcncnaacaaacanncncgnncacactnncagaangngngaagangggggcgggaggccgaaccgangnnccnccngccaacaggaagncagaggnggacccnnngaagcg

SEQ ID NO: 133498 - DNA, 533 bp, Glycine max
  Clone ID: PAT_MRT3847_91554C.1
aaaacaaaaaaaaaaaaaaaaaaaaaaaaaaaaaaaaaaaaaaaaacaaaaaaaaaaaaaaaaaaaaagggccgaacgttctccaggatacaagtttacataacgcgagcttgcgaccatattagtgtattttatagtgaaaactagggggcggtcggttttaggggtccttggctttactgaccgcgtgctagggcaggtattgtttttttttttgggtggccttaatttaatttccctggtccgccgttttacaaggtggggttgggaaaacccggggggttccttatttaattggcttggaacaaattccccttttggccggttgttgttttttggaaggggcccgaacggttggcctttccacccgtttgcgaacctttatggttgatgggaccctgccttgaactggtttatttttctgtgggttattttgttgtttcggcccaggggtttcgttattttggccagggccttaggcccccttctttgggtttttttccttttttttggggcctggtccgcggtttttc

SEQ ID NO: 133499 - DNA, 199 bp, Glycine max
  Clone ID: PAT_MRT3847_91555C.1
tcttatcagacaaaaatataggcggtcagacacattgacacccactcccaaccacataacgcacttctttttctatcaacaggtgaacagcgggaatacaggggtaaaagaaggtgtcttattagctagacacaagaaagttggaccccttataggtgagcggccaactcccgaatgagatccttcaagactttgacta

SEQ ID NO: 133500 - DNA, 429 bp, Glycine max
  Clone ID: PAT_MRT3847_91556C.1
ccatgagaaacagtattgtgttcctccataaatgcataacccttaagtgaaaattcccagaaagaaaaataactaactatcgaagacattaccttccagaggttaagttactgtgcctcaatcattccctgaaaataaacattacttacacttacaatctcaatctccttgttagtgaatcacaaggcaaagttggagcacaacagcagtggggaaacagaaccagaaccagaaccagaacacagtcctcattgtgctagtatgttttgtatgtggtctgcaacaatgtcggccacaatctcaggcgagaaccgtcttatcatgtcatcccttgcctttctgcctttagttgtagcctcagtgagattatccaccacctgtctcataaaaacccgaagtttatcctcggaaggttcagcccaaaggtgt

SEQ ID NO: 133501 - DNA, 243 bp, Glycine max
  Clone ID: PAT_MRT3847_91557C.1
gagctatgacccgggtactgcgcgctcactagagctcggacgcccctcgaggtttgtatttgttcaaaataggggttctgctactgagcgcatgacaagtttgatctcaagtgaggatcctgctattcaccagcctgctaactattatcatccgctgacctgtgaatacactgtaagatcccctctctctcgaggcagatgaagtatacgggtacccattccgtctgccatgtgctacatatg

SEQ ID NO: 133502 - DNA, 786 bp, Glycine max
  Clone ID: PAT_MRT3847_91558C.1
ccacgcgtccgggcaaaaactcttcagttgtttgaaatgggtttctctgagaatgaagtatcatcagcaattgataaattaggttcagaggctccaatttcagagcttgcaaactttatttttgcagaacaaaatgggatcgattatgtgatggaatataagtttcccaccacttctacttattctgtggggatcaaagaagaaccagaaatggatttatatggtacagcagaagtgaaagttgaggattttagcaatgaacctccacaatcaagccaggtcaacttagaggaaacttataatgatgatatggtgaaggaagaagagggtattgatgcatttcccagctatgtttctgaccaatatttggatgttgtggagaatggtagaggtaaaaggcccaagtatgaacatgatgatgattcaatcacttgtcttgaaccttcttgggtggaagaaagggttgatgttgttgttgccgaaatgtcaagacgtcccaaaccaaatccatccaggtgtcttagtagtgtggcagcaaagccaccatttttcttatttgggaatgtttcaaacatatcctacgactcatggacaaagatgtctaagtttttatatggtattgaacctgaatttgcgaatgctcagtccttttctgctttagatagaatagaaggttacatacacaatcttccacttgaaaacagattccacatcctcccaaagccgcctatgactattgaagatgcaatgccgctgacaaagaaatggtggccaccttgggattca

SEQ ID NO: 133503 - DNA, 335 bp, Glycine max
  Clone ID: PAT_MRT3847_91559C.1
aaaagaagttcccaagaagaggacacaccacaaaatgaagaagggtctcctcattgtgttgctcatcattcagatccactacaatgttgttgtcaacggcaatgagttggaatcagagttctcatttgattcccatgtggccagaatgctctatgatgtgagtctctctgtgtctggcaaaacaggcaatagatacaacaaagctgttagatgtccacaaagcaaaggttaccgtagctgcttgccatccagaaatggacgacgtggccctagacaacgttgtgctgatttcactagggtttgctaaaaacatgtttcagtcttgataattttca

SEQ ID NO: 133504 - DNA, 545 bp, Glycine max
  Clone ID: PAT_MRT3847_9155C.1
tttttttaattttattttttttttttttttttttttttttttttttttttttttttttttttttttttttttttttttttttttaaaaaaaccttaacccccttaaaaaaaggaaccttatttttttggccccggggttcccaacaatgttcaaaagacaaaaaaaattttcccacaaagggtttcccccacaaaaaggccaaccccgccccccaaaaattgaccaaaacctatttttgcccctttaaaaccccgcctggtcaaaaggtttaaatataacagtttttttcaaaggccctttcccaacccctaacccttacaaattatgaaccttttttcccaaaaaaggttaagccccccccccacccatagtaccccccctttttattattgaaaaattggggaacctttcaaaccccaaattttttggagcccccgaaaactttaaagacccccctggggggcttaaaaaagagagggaacccctttttaatgcccccaaggggggcccgagaaatccccacacgggaaatgcccccgccccc

SEQ ID NO: 133505 - DNA, 240 bp, Glycine max
  Clone ID: PAT_MRT3847_91560C.1
tggatcctgtagagcggccgcttttttttttttttttttttttttttttttatgaatgaattaggtcagagttacattggaggggcaattttgatgaaaaacaatatacgctgatacatataaatataactttctaaagcattcactcttggtcattcccacctctctagtgaagcaagtgccgaatagcagcaactgcatcacctttatgctcacgcaaaggtcttttagcaacctttt

SEQ ID NO: 133506 - DNA, 390 bp, Glycine max
  Clone ID: PAT_MRT3847_91561C.1
cgcaatgctgctcctggcgctgcaaactttttgactgatatgatatttactggacaccatgataatgctgaatttgctctagcgatgttcccaactgaaccctatgttcttatcagaggataggacatatcattctagtagcgtagcattgtagaccatataacttctgctgtcacagacattaaatgttgatgatcaattatgacacttgtctctcaatctgtagaaagctgtgatcgaactgctgatgagcctactgttcgaccaccatggatttattgcacgcatgaagatacagttgcagatgcgacttattgcccatttagtgcacaggagttctagattgctgtatatgattcttgggttatattatggtatgcacgtgttggc

SEQ ID NO: 133507 - DNA, 819 bp, Glycine max
  unsure (1)..(819): unsure at all n locations
  Clone ID: PAT_MRT3847_91562C.1
aattcggctcgtcacgaaactcgtttttgcaattgccagatctcttcattcaattacaacagcagaagaaacagaagcttctagagagaaagaaatagggaattgaagatgggttgcagaaacagggactcaatcacagagaatcacacttcgtcatcatcatcttcttctgattcactcagtgaagccttgcttttcaccaccatgtgcatcgttggccaccccgtcgatgttcacgttaaggatggctctgtctattctggaatcttccacactgcttctgttcacgccgactacggtattgttttgaagaaagcaaggatgaccaagaagggaaagggcaacaataatgtcggaaatgagggcttcgtggatacattagtgattctatccagtgatcttgtgcaagttgtagctaagggagtaatgcttcatgcagatgttgttggtggaaacataactggtggcgatgaggaagcagttgcgcataatgtttgttccgagagtctaacgtgtgaggtagagaatcatacagggcctttgatggacacaaaacagacaagccggagacgacaagtcaaactcaaacgggaaaactgataactgcggagagaagtctgagtttgttaatgaaaaaactgatgaaaagattcaaagcctcaattcaagccatgaaaccgatacatcgctaggccaagaagtagctgttgagcatgggagtacagataggacatcaattccttctgatnatggattactctgcnacacacccctgcatctgntaaggccagtgatcgggatagtgaaaggtctacttct

SEQ ID NO: 133508 - DNA, 235 bp, Glycine max
  Clone ID: PAT_MRT3847_91563C.1
cttcaggtgcatcacttcacatcatggtcttttctgatttttatcttccgcttcaatactgatttgagaaaaatggatggaaaatagcggggaagttggtcattctgttattctttatttttttggctattgcttggttagatgatacaaaactgtgcatatgagatcatggggatgcaagcaaaatttcaactatgatttcactttagagcagataaatactaaattgtggagc

SEQ ID NO: 133509 - DNA, 143 bp, Glycine max
  Clone ID: PAT_MRT3847_91564C.1
ggtttgcaaacaaaaaggatagcggagctacgatcaaagaatgggtaaccttcagacactgtgtgacaaaaccacggcctcaccggggacaattgttcactcaaaacacgagggtgaccaaaatacagcgcaagggaactaaa

SEQ ID NO: 133510 - DNA, 668 bp, Glycine max
  unsure (1)..(668): unsure at all n locations
  Clone ID: PAT_MRT3847_91565C.1
ncgggtctgaaagagcatggggaagacacccattatggcattacaaacttgttgtcaacaggtaacgaaagactggaaaaggataaatcttcaattaagctgaattcttcttcaaatggaacatactaactcaaccactccaacttcctcaaccccaaagaagataaacagaggagttttagaacatcattattcttagccactgccactactgccaccaccacaccaacaacaactatcaaggaatcgaattcctgtcgaaacaaatgtgaactgcttcacagacagggcaaactgacactgatattcataactagcacaggaagcatgtcatggctgtggctgcaaccactgcatcatcacctgatgctgcagtggcatctgctcaagctgcagctgctgtgatccgttagacttctacttccaatgcaacatccaaaagtattgaacatgctgctgccattacaatccaatctgactttctctctcacttggcaaaaaaagcattgtgtgctctaaaacgattatcgaagatgcaggcactagtaaggggtcacttgtggagaaaacaggccaaggcaacactgaaatgcctgcaggctttggtgacaaccaagccagagctcatgctcagatgatccaaatggggtcagaaggaaaggccaatc

SEQ ID NO: 133511 - DNA, 158 bp, Glycine max
  unsure (1)..(158): unsure at all n locations
  Clone ID: PAT_MRT3847_91566C.1
acgaaacaattaaaaataccaagtctgatagtgcacaaggagatgctgatacatgtgccatatggagaggtctttgaggtggcttccgatttcnaatacctggaattctaacactatgattacaattttattctacggatgtagcttctgttcattct

SEQ ID NO: 133512 - DNA, 777 bp, Glycine max
  Clone ID: PAT_MRT3847_91567C.1
caccattaaatattttattcgattaaaggtagttctctcaaattagagcttccccaaataatcgctttgctattgcttgcagttctgtcagtgaattttgtgtttgcaaagtacaaacaaattttctagcaaagtatcgatggatgcttgcatggattaaaaaatggataatggttacaattgaaagtatggaacactaatgcgaggtttataacgctttaggttcgccaactacatcagttagcttttgtggtgtggttctcccaagattcttctgaattagcctttcacatgtctctcagctgcacgagtggtgtgggtagtgactccaacattttagtgttcgcttggaactagtcaaagggcctgagggttctcccaaagttcttataagatagacagctgtcttcttgaccacaaatccatgcccaaaagtcacgaaaatcttcaccttgtctccaggttccaaatgtgatatgatgccctgccaatctacatcattgaaggaaattactgtatcttgcttgtatatcttgatggaacacttcgtgtaattaaccattaagacataaataagacattcagctgctgtgtttttagggtttgttaaataaacaacacacaaagccattcccttcatgcgacaattctcaggcacagtgaaatacactgaatttccctcacccatacggaccaaccaatgaggatcattgtcacctggaagaaaagcatcacaagaatcattgattgccaatccctgtagcatgagcaaaaaac

SEQ ID NO: 133513 - DNA, 489 bp, Glycine max
  Clone ID: PAT_MRT3847_91568C.1
aggctgagggaggaaacggagagggttatctctatgcaggcactgggttcggctgagtaataagggtggaaggtgccatgagaggtccaatgtgacatccgataaagtacgcccaggcccctattaagtataccgcaagcgtgtcatatatgttataaggcacaccatttccagttgacattgcaataccaaatgaatgcttctacagttgaccgcaaccatatatatatcaatgtggctggcaccacaatatgcgatatacatcatggctttagactgggaagggaaacacctatgcatccttctataactaacttacatacatatatgactgctatgagagatcctgaaacaacacctattcatgatgaaatgagaacacctatgcgtgacctaacatggaatacttatactacattgagtcctgcaaagaataactgataatatagacatacacgctattgttcatcctgtccatagtattaaaca

SEQ ID NO: 133514 - DNA, 264 bp, Glycine max
  Clone ID: PAT_MRT3847_91569C.1
catcacatcaataccctcaattaatcttccttatatcatcctaaacatattaactctctcacaatatacactttcaaatactatcttttacttaaacactactcatattacactatcaattccaaaaatacctttactacactcaacaacatcacatacctaatctatcatactatttattaacctacttatattattctatctattactaacatacatttcatcaaatacctattacctattcactaaacttcactcaataaa

SEQ ID NO: 133515 - DNA, 827 bp, Glycine max
  Clone ID: PAT_MRT3847_9156C.1
ccacgcgtccgcactgacactgataacgagtctctcttcagtcttcattcaccctctgtcagtgaatgttcaattgatacaacaaaaccccaacctatacccaaccaccgccatgtatctctacagtcttactctgcagcgccccaccggcatcatctgcgccataaacggcaacttctccggcggcaagagccaggaaatcgtggtggcccgcggtaaggttctcgatctcctccgccccgacgacaatggtcggatccaaaccattctctccgtcgaaatctttggcgccatccgctccctcgcccagttccgcctcatgggcgcccagaaggactacatcgtcgtcggctccgactccggccgcatcgtcatccttgaatacaacaaggagaagaacgtcttcgacaaaatccaccaagaaacctttggcaaatccggttgccgccgaattgtccccggtcagtacctcgccatcgatcccaaaggtagggccgttatgattggcgcctgcgagaagcagaaactcgtttatgttttgaatcgggacactgctgctaggttaaccatttcttcccctttagaggctcataaatcccacactttagtttactcaatttgtggcgttgattgtggctttgagaaccctatttttgctgccattgaattggattactctgaggctgaccaggattccactggcctggctgcttctgaggctcagaagcatttgaccttttacgagcttgatcttggccttaaccatgtttccagaaagtggtccgagcagggtgataatgggggccaattgcttgttactgttcctg

SEQ ID NO: 133516 - DNA, 153 bp, Glycine max
  Clone ID: PAT_MRT3847_91570C.1
ctctaacgtccgttctctccactgtgtaacctcttattctataaggtcaacctttggggcaatgcctaatggctgcgggccacgccgaatataattggacaattgaggaaacaatgaagaagaagatgatgcagatctcacactataagatta

SEQ ID NO: 133517 - DNA, 375 bp, Glycine max
  Clone ID: PAT_MRT3847_91571C.1
ttcactcccgcccatgcgtccgtccacacatccggttaactgacagaacagaacatcaagggtcttagatggataagaccctcacatcaaccctttcaaccactccccataatccaaccctttctcacatgcacaggtaatctatatctctctgtcccccacacaatttcctcacttatgaaggtatcggagtcttcaaatatagaattcacgtcctttcaccaaagacgcgcgtttgttcgttaattgtataacggtgctgagttggttctcaagacagattttttagtgaagaatccaacacccttgttacgttggtgctgctgttgatgctgacgtgtgctttttaaacaacctagttctattagtaatata

SEQ ID NO: 133518 - DNA, 250 bp, Glycine max
  Clone ID: PAT_MRT3847_91572C.1
aaatcaatctttatgtgatacaagcacctctctctcccctctcttttccacacaacattcgagcttgcgaaaggggagagtacagttcactctctcttcccaaatcaatacgaaatatggctgaaactctatacctcacattgctactctcagtctgaatcatcttcacaaccctctctcttaaaacctctcgcacgatcacaaccccatcacacagcaatgttctcgatatctcttcttctctccacca

SEQ ID NO: 133519 - DNA, 208 bp, Glycine max
  Clone ID: PAT_MRT3847_91573C.1
ccactcctacaaccacacatacggaccctgctaaactaccactcttctgcatccacagtgacacaccagtatactggttccaaccgggcgggacgaaagaaacgactagctgatcctagatcactaactaaaactactttaatactaattcaatatactaatagaatagagataacactgtcattatatatagatatcccttcaacac

SEQ ID NO: 133520 - DNA, 1572 bp, Glycine max
  Clone ID: PAT_MRT3847_91574C.1
tgttatttcttccttctgcccactttcccggccttgtctaattcttttctctgactctgtacacactcactactccaatcctacggaccctttcttcttttccttttccttcaccataaaactcttctccatcacacacacacacaccactgtgctgctaaccatggcaaatttcacttctttttcttcatctctgtcacaccttcttcccctttcttctccttcttcttctgcagctttcgacgattcttccgaagactcctgcagtatatgcttagagcccttcagcgttcatgacccatctactgtcacctgttgcaaacatgaatatcatctgcattgcattattgaatggtcacaaagaagcaaagagtgcccaatctgttggcaatcacttgctttgaaagatcctgccagccaagagcttctagctgcagtggaagatgagaaatgcatgagatcaagaaacattgctaattctcgtgccccccttggacaacttaatgaaagccacgatgattcttgctcagatgactctgattttgatgatcagattatgaagcgcctagtttctgctgcaagaagagctcattttgttcagagacaggaaaggaagagatcacctagtgctggtccatcagaggctcttggtgttaactcttccatgcatgtttctgaggtgcaaacaactcttacaacttcatcatctgggggtagtttgccagcttctggtgtaccatctactgttagcattcaacctccagcactaaatactactcctgagagtgcaaggagaccaaacacttctgagatttccttccctgagtccttcaaatcaaagttttctgctgcttcagccagatataaggaatcaatttcaaaaagtacgcttggtcttaaagagaagttacttgctcataatgtctcggttaaagagctgagtaaaggtgttcagcgcgagatgaatgcaggcattgctggagttgcacggatgattgaacgccttgatcttagctcaaaacggtccagtgctcctctcattgctgtccatagtgtggctacttcagacttcccttcttcagggaagtctgttgaagagaatggcattgggggttctcctagtaaagagaatggaggtgcagttcatgatgttagttcagatgttcccccacttgttactaacatgcaatcttttcgaacaaaaactcctccatttcttcagagtggacatggaatggtatgaagacttagcttgtggtcatcatcaacttgactatgctgtctcaattgtcctagaagagtgcaagagacgccctctgataaccaatgtactcattggtatgcgtcctgcattgttatcaatggtaaattacgcgtaggaattaaaattatgtacaatcaattgataagagccagcggtttcatccgttggacgattattcaatgcatctctgatatagtttcatggtttcttatccatgtttacacctttatttttttcgattaaagtttacatcttttacatgccagtccttttaatgatataaaataaaggctctctgttttcctttt

SEQ ID NO: 133521 - DNA, 343 bp, Glycine max
  Clone ID: PAT_MRT3847_91575C.1
ggctcgagacctacctctttatcttctctctcaacaactttaccatctttctcctcgaacatgtctcactttgggggcaagtaccatgatgagctaatcaccaatgctgcgtacattggcactcctggaaagggcattcttgctggtgatgagccaacaaggacaattggctagcgtgtggccagcatcaacggagagatcattgaacaccacaggcgagctcttagggagcatgctcacactgctcctggcgtgcttcaacatctgagtggtgttatcctctgtgaggaaacccttctaccaaatcacaggttgatggcaatcccctttgagaatcgtcttg

SEQ ID NO: 133522 - DNA, 500 bp, Glycine max
  Clone ID: PAT_MRT3847_91576C.1
cctggcgttacagaggttagtattatattatctcaatgcattccggttattctttttatgaaatggttgtatttttaatttttttaatgagaattgtgtcaaaactgtatgaagcatggaattgttaattttgaagtttttgattgaaattcacataacagcaatgcatggggtttctaatcttattagtcgtaaacataccagcttgcctaaataagcatggtacatattattataggtaattggcgaggtcttatcctagagaaaactatttttattttgctccattggcttagatttttagccattctcttagataccacattcaacgctgtaaagtaattctcggattaagtttcaattctataatagggtggagggtaattatacaacagatgggatgcgtaatttctcaaataagaaatgtgtcaagtgcaatgagtacttaccctagggagcttcttgtaattatccctttattttgatcttaatgaacaatt

SEQ ID NO: 133523 - DNA, 351 bp, Glycine max
  Clone ID: PAT_MRT3847_91577C.1
ttggggggggggggggggagggggggggcgggctagtgcgggggggggctggggggggtagggaggagggtgaaggacgggcgggttaagaataaagaaaggggatccggtaccaaggcccatacatcctagcacaggggaattaaagatgtgactgtagcgcaagaataaagcttggggagaaacatatgtgggaaaacacaccaatatttcgattttacatgagagactacgtctagaatagtagcagagttcaaatggtgttgaacgtagatgcgcactactggttggactaacaactggtgatgggctgtgccagtgtttgtcgcagacccagtttagcaggttatt

SEQ ID NO: 133524 - DNA, 242 bp, Glycine max
  Clone ID: PAT_MRT3847_91578C.1
cacaataccaattagcctaacactctcaacccaacacaagttttttttttttcttcagtttttctcttcccaaagagtttttgttttgtcttttgtccttctcatgggtgggtttgaacagaagatgaaggatagggcaaaggagctcaaggtcttgctcaaaaaaggggtgaagattgtgggaaattcttgcaaaaagggttgaaccaaattaaaacgattcaaacgtgattagggggatt

SEQ ID NO: 133525 - DNA, 5601 bp, Glycine max
  Clone ID: PAT_MRT3847_91579C.1
ggctcgagacaaaagaagagacatagaaagagaaagagaaccgtttgagaattttagagacgttaacggacttctaatccacaattcgccggaatttgggaaccggggtcgcgtccggagcctctcggcttagttagttagggtttctttttctctttcttctcttccattcggtttcgaattctcgcgattcgcgatgggggaacgacgctgaggttgaatttcaaggttctggtttttcgtcgtcgctgtggagtgaagaattctgtgttgctggtgatgtttacgccgccgagggtttggtcgggttggtccctgactccgaacaagagcggggttcggggaggaaccgggtcgggttcggaattgggtccgaattcgggagatggagcgagcgcgaagggaaaaggtgtcgtggttgttgagaatggtgggaacttggatcgcgaggttttggttgagagggtttccagcctcgagaaagagctttatgagtatcaattcaatatgggactgctcttgattgagaaaaaagagtggagttctaagtatactgaactaagtcaagatttagtagaagtgaaggatgctctagaacgagaaaaagctgctcatttaatttctctatctgaggctgagaagcgagaagagaatctgaggaaggccttgggtgttgagaaggagtgtgtgcttgatcttgagaaggctctgcgagaaatgcggtcagagcatgcaaaaattaaatttacagcagacaaatgctttagtagctgtctttagaagtgaagccaaattgcattctgccgatgccaaatttgcagaaatcagcagaaagagttcagagtttgataggaaatcacaagagctggagtctcaagaatctacacttcgaagggatcgattatccttcatcggctgcagagaaaacagaagggcatgagagtacattgtctaagcagagagaggacttgcgggaatgggagaagaaactacaggagggtgaagagaggctggccaagggtcaaagaattatcaacgaaagagagcaaagggctaatgagaatgacagactatgcagacagaaagaaaaggaccttgaagaggcacagaagaagattgatgcaactaatgtaacactgagaaataaagaagatgatgtgaacaataggtttgcgaatattactctaaaagagaaggaatatgattctctgagaataaacttggatatcaaagagaaggagttatctgcatgggaggaaaagctcaatgctagagaaaaagttgagatgcagaaacttcttgatgaacaaaatactattcttgatgtgaagaagcaggagtttgaggtggaattggatgagaaaagaaaatcctttgaagatggattgaagaataaattggtggaagtggaaaagaaagaagctgaaatcactcacatggaggagaaagttgcgaaacggaaacaagccttgggaaagaaagcagagaagcttaaagagaaagagatagagtatgaacaaaaagtcaaagctttctcgaattcgcagaagttaattaaatccgaggaaaaaagtttggtgactgagaaagggaaaatagaaagtgagagagaggaattgctcacacataaggctgaagttgagaaaataagagctaacaatgaagaagagtcgttgaggataaatgaagagattgatcgacttaaagtgactgaggaggagaggtctgaatatctgcgcttgcagtcacaattgaagcatgaagttgatcagtacagacaccagaaagaactacttctgaaggaagctgaagacttaaggcaacagaaagagacttttgaaagagaatgggatgagctagatctgaagagaacagatgttgagaaagagctgaaaagtgtgattcaacagaaggaagaaatattaaaactacaacaatatgaagaagaaaagttaaggaatgagaagcaggacacacaggcatatgtgcaaagggagttagaaactcttaagttggctaaagagtcatttgctgcagaaatggagttggagaagtcaagcctagctgaaaaagctcaaagtgagaggaaccaaatacttctggattttgagctgcagaaaaaggaacttgaagctgatatgcagaatcagttagagcagaaggaaaaagatttgatagagaggaagaagttatttgaggaaaaaagagagagtgaattaaacaatattaacttcttgagagaagtagctaatagagaaatggatgaaatgaagcttcaaagaagtaagttagagaaggagaaacaagaagctgatgagaataaaaaacatcttgaaaggcaaaggatggaaatgcaagaggacatagatgtacttgttgacctcaacaggaagctgaaaaatcagcgggaacaatttattgtggaaagacgacgctttattgagtttgttgagaaacttcggagttgccagaactgtggggaaatgatctctgaatttgtgctttctgatttacaatcctctgttgacattgagaacttggaagtgccatctctcccaaaattagcagctgatattgtacagggagtttctaatgaaaatttagcttcttcaaggcaaaatactggattgtctcctgcaactgatcccaagtcacctgtttctggtggcactgtctcttggctacgtaaatgcacctctaagatttttaaaatctccccgattagaaagattgaatctgaagattcgggtactttaagagatgttgtgactttgtctgttgagcaaactaatgtggaagattcaccaggaagaattcctgatgctgaaaatgaagcagagttgtcatttgctgttgtaaatgattcttttgatgctcggagggtacaatctggcaatgatatcatagaggttgaagctgaccatgatccttcagttgaaaacctgaacaatgttgacagtaaggcaccagaagatttgcaggctcctgattcaaaggttgggcagcagaaatcccgcaagggagggggaagacccagagtaaagcgtatacacactgtgaaagctgttatcaagaaggctagggatatacttggggaatctggtaaagcattacctggggaatctgtagatcattacgagaatgagtttcaaaatgtacataatgaagattctgccaatgtgaattctgaaaggaagaaaacacacaattggagagtaccagagagaagcaggaagcataacaaggtacattccgtactgcagatttcaaaattggggaaatctgccgaaaccgcgtccgcggctgcgagaagacgacagaaggggcagcgcaagagaaggcgacagaaggctgctgctccccccgcacaaactgctggtgaatcaagatataatttgagacgactcaaaactggagcaacaacttcatctgctagagctatgtctggtggtggcaaagaaagtcagggagaggttgatcgtgtaaaagatacagaagagggaattattgactcaaaaacttctcattcacattcagtgggcattactaatgagaatggtgaaagcatacatcttgagcagtctctgaaaggtgtggagacaagggccggttatggtggtgataccacggagacctttgccaacaatatggccttgagtgaggaggtgaatggaacagcagatgatgtggaggagaatgatgctgagtataggagtgaatcccgtggggaagatgctggtggagttgacaatgaggatgatgaagaagattacctgcaacccggtgaagcttcaatagggaagaagctttggaatttttttacaacataacaacacaagcttattgataacaatgaagctgtgtcttgacctcatcaactttagggatgatgtcggaagttatcttgtattaacacaattggaagtagatctctaaattataaccacgaggggtagtacttaggtgaggtgattgagtttctctattttttttttcttgtacgttttcatggatgtttggatggaacctctggtatttgtttatagttttaggcattcgatagtgtagctaaagtttagatattggattttagctacctccccttggaaattgattgaatccaaatgtttgtatctcttatgctaaatgtgattgtttgaatttattgagggtgcttttgtatcccatcgtgtgaactacgggtgacaatttgggtttgccagttgggcgtgtcaaggagtgggtaatttcattgagagaacccaaggggttggcgtagtagtacgtcagttctaaacctttccattgttgaaaatgttttattaagttgattgtaatccaaaggaacttgcttttggggcgtagaaatcccgcaagggagggggaagacccagagtaaagcgtacgcacactgtgaaagctgtcatcaaagaggccaggggtatacttggggaatctgctgaagcattacctggggaatctgtggatgatcatgagaatgagtttccaaatggaaatgctgaggattctgccaatgtgaattctgaaagtcagaaaccatccaatagaagaataccagcgaatgtcaggaagcgaaaccgggttcaaacatcatctcaaatgactgtaagtgggcatggtggcgatgccagtgaaggacattctgatagtctaattccaggacagcgcaagagaaggcgacagaaggctgctgctccccccgcacaaactgctggtgaatcaagatataatttgagacgacccaaaattggagcaacaacttcatctgttagagctatgtctggtggtggcaaagaaagtcagggagaggttgatcgtgtaaaagatacaggagaggggattgttgactcaaaaacttctcattcacattcggtgggcattactaatgagaatggtggaagcatacatcttgagcagtctctgaaaggtgcggagacaagggacggttatggtggtgataccatcgggacctttgtcaacaatatggccttgagtgaggaggtgaacggaacagcagatgatgtggaggagaatgatgctgagtataggagtgaatcccatggggaagatgctgctggtggagttgagaatgaggatgacgaagattacctgcaacccggtgaagcttcaatagggaagaagctttggaatttttttacaacataacaccacaagcttcttgataatgaagctgtgtcttgacctcatcaactttagggatgatgtcggaagtttatcttgtattaacaattggaagtagatctctaaattataaccacgaggggtagtacttaggagaggtgattgaatttctctagttttttttttcttgtacgttttcatggatgtttggatggaacctctggtatttgttgatagttttaggcattctcgatagtgtagctaaagtttagatattggattttagctacctccccttggaaattgattgaatccaaatgtttgtatctcttctgctaaatgtgattgtttgaatttaatgagggtgcttgtgtaaaaaaaaaaaaaaaaaaaaaaaaaaaaaagggcgggcggttttagaggatccaagcttacgta

SEQ ID NO: 133526 - DNA, 148 bp, Glycine max
  Clone ID: PAT_MRT3847_9157C.1
gtcaaaacttgcttgcttcccatatatctcataagtcttttatagaagttaatgaagaatgcggttaaggtgcaactttcaacgctgcaactatacaatatgtgtgtgccatatttccaactgaaatagactttttatcttgccaccc

SEQ ID NO: 133527 - DNA, 571 bp, Glycine max
  Clone ID: PAT_MRT3847_91580C.1
gagatgaaaggagtgcttaactgctttatatactatatttgagtgcaaaaacagtaaatttgttccatttatactcttcacttaatccgaagaagcgtcaattctgtacgcaggaatgtactatgctagttatccaattggttgttacggggccattttacttgagtgcaattaattacccaagctggatgaattcttcaaaatccacttctacataaagcaagctaaaaacgtacaccaaatctgattttgtcgaaccaactaaagattttaattccagttgggacagctatgatcatggtagctgcagtgaagtaggcactggtatccacgtctaagcccacagtaaacatatgatgagcccaaacaagaaatccaagaacacctacactgacttatcatggcataaaccatgcctagatacccgaagatacagaattaattacacgttattctttttctttatagcagaataatttatccttccgatatgctttgctgactatccaatatctaacatttgtaagcaaatgtttctggcatgttgctaaaagctttcattgtattgctg

SEQ ID NO: 133528 - DNA, 385 bp, Glycine max
  Clone ID: PAT_MRT3847_91581C.1
ggtttcaggcagctattctttttaaaatttttgtttttatatcactatgtgggatgaatgtcgacaatgatgacgactcccgaggactattgtctcattatagttcaatcggacatctactttcactgccagggagttatggagatgattgtcgaggatctatgatgtttggttttttaagactggattcgattctttattgttcagtgtgtgtgtagtgttctaagtgctttatatgccctttgaaactgaggccaattgtactaagccaattaacttcaatcttgacgcagcaaatttatctaatttaacatcattgagacccaaaattcaaatttatactgttatataaactgttctatcacttacacatctcatttactat

SEQ ID NO: 133529 - DNA, 1404 bp, Glycine max
  Clone ID: PAT_MRT3847_91582C.1
cggtcttgaatttccgggtggaacccacgcgtccgtacggctgcgagaagacgacagaagggggtggcagagagcgaacccaaaactagagctaccttcccttcaaaccttccactcttctctccttttccaatcaagggaataatatttcttagagatattccgaaaccatggctcacgccaatcctatgatttttgttgttggaattctaggtaaccttgtctccttctgttgctttctagcaccagtaccaacattctatcgagtttgtaagaagaaaaccacggaaggtttccaatcacttccttacgtggctgcactcttcacttcaatgctttggatattttatgcttacataaagacgggcgaaatacttctcatcaccattaacgcattcggttgtttcatagagacagtttaccttgtcatctatatcacttattgccccaagaaagctaggttctttaccttcaagatgattttcttgttcaacgttggagtgattttcttggtagttcttcttacccacgttctagcaaaagaacgaacagcccgtatcgagctccttgggtggatttgtgttgtcctctctaccagtgtgtttgcagcacctttaagcatcattaaagtggttattcgtaccaaaagtgtagagttcatgcctattactctgtcactcctcctcacagtaagtgcaatgatgtggatggcatacggtattctcctgagggacatctatgttacacttccgaactttgtgggtatcacatttggaacaattcagatagtgctctacttaatatacagaaagaacaagcccgttaaggatcaaaagctgccagaacacaaagacgatgttgccaatgatgaaaacgtcaacacagctgtgagcggtgagaatcggggagcaaacgccactggattcgttgatattgagattggagagaagaagcaagttcaggaacaagcagacaaaaaacaggaccagcaagctgttaatgctcgtgaccaaacagaacacaacaacaatagcaacaaaacaagggaaggttgagaaatttaatgaagggatacatgtgcacgtgttatgcctctctctctctgccaccatgtgttgttcaattcgtgtgaaatcttaagagggttaatgggggcagaggcgttatacaatataggtcgatatctatgtctatatctcttttgcctagttgttactttctattttatgtaacctctgttttgttttctgtgttacgttgaagtaatcaaataatacaatagaaattgtccccaaatcttattcggaaaaaaaaaaaaatgaaccgattgaatctgcatgaatagatactgattatgtttctacaaaaaaaaaaaaaaaaaaaaaaaaaaaaactggccgctct

SEQ ID NO: 133530 - DNA, 879 bp, Glycine max
  Clone ID: PAT_MRT3847_91583C.1
gaaactgataacgaccgttgagcaggatctaagccacgcagggagcttcctggcgcggttcgtggaggccttgcattattacagcgcgttgttcgacgcgctaggggatggtttgggtgcggacagcctggagaggcacacggtggagcagcatctgttgggctgcgagatcaggaacatcgtggccgtgggcgggcccaagaggaccggcgaggttaagttggagaggtggggggatgagtcgaaacgggccgggtttgggcccgtttcgctcaggggcaacccggctgcacaagcgagcttgttgctgggaatgttcccttggagagggtatacactggtcgaagagaatggttccctcaagcttggttggaaggatttgtctctgttgatcgcctccgcttggcaaccgtcagatttgatgattacttatcctgattgaaacttttatgaatcattgcaactatcaactatgcttttggaatttatttaaaaataattgtttaattgattcagactcaaattgttagggttttctcccattagatgggagaggttatgcaatatggtatgagatgatgggggttgtgtatagtaataaattaataataccgataatgatgtggttgtggataccaaacaccagtcctcataggttcaataaataatgatagtagtagtagaattaagaagggaatgacgttagatccacgtccactggttccactacgctacacacaaagcccaagaatatttctacttctacttctactagtcaatttcctcatcgccttcttgtggagagagtgagagttcaccttacaattttcttggtggactcaactttttttttatgtcttcccatgtttaatgaattgt

SEQ ID NO: 133531 - DNA, 457 bp, Glycine max
  Clone ID: PAT_MRT3847_91584C.1
cttgcacttttgcacaagactcttatgcccttaacctcgaattatatgtatttaattacatgacctgctagtacttttcatttaactatgttcttatccctccccctcctccctccatgttgaaagcttgctaagctttcagcttgtccggaaaggaaacccaaacttacaacccattcatttgtacactttttaagaaaatggtgcattttaaatgtaaaaatgttttgttatttgaaaatattttttttttaaaatcccggtaagtatacatgtaggtggtttgggtatgtatggagaaaaactgcaggcaaaacaattaatgaagattcaaaggttaaccgtttgtctatatcaaacaagatttactgcaaaacataacattgtttgatcaatgtatgtagccaaccccacctagtggtaaaaaggctgaattgttgtttaaagattttatggt

SEQ ID NO: 133532 - DNA, 593 bp, Glycine max
  Clone ID: PAT_MRT3847_91585C.1
cactgagcatcgtctagctatctcgatcgaactgtccaaggtcctgtcacgcaggggaaccccaatgattgcaccgttatagagtggccaaattgcatgcgaagccaggcccgatacacccagtcccaggggcgaagttagcccgtgtaggggctgaaaaacgagcctgggtggttcgcgggccacagcccactataaacagttaattgcgggagcggaggcagcggctgctggtatgtatggtatgtgagcaaccacgagccgtatgagtagcccaaaaagggagcaatgcccagccgttacacagtgggatgacgtagcaaggcctacatcggagcgggcagataaggtcacaaccgttgtcagagcgcaaccgcgttgggttttagcgtaaacgtaggcctaatattacacaaagaggatgaaataaccgttttgggttatgattgcggttgcacagaggaaagtgccagaacaagttacgtgggcatgatacagattcggcgggtacaaaacgtgggcatgcgtaagcagtggccaaggcggttgtatacgtgcaacccagatttgagcacgggtggagtgagagacca

SEQ ID NO: 133533 - DNA, 121 bp, Glycine max
  Clone ID: PAT_MRT3847_91586C.1
cggcctagcgattaagtaatagctcgtccatctacagcacatttcagagagaagcttccctggcttctagatgcactgccatcagctgatccgcgccaaggcgtagtcccccaccccccac

SEQ ID NO: 133534 - DNA, 341 bp, Glycine max
  Clone ID: PAT_MRT3847_91587C.1
ctcactgtcgcgtggtcggactcttttgttctatggtggggcgctggactaggcaggcaccggcagtgttcctgcatacccgggggcgagcgaggatgcaggcatggtcgacgctcccgagggagtggatctaccactgctggtttcagtcacatcacctatgctataatcccacccatatacatggttgcctgaaggaggtgttcaagatgaatgggttccgtcatcagcgggcagatcaactacgaggagcttaaggctgttctggagcatgtggttgcaagggtatatccgactcttcatgatgatctgtccgctgctcccctttttctagatccatc

SEQ ID NO: 133535 - DNA, 451 bp, Glycine max
  Clone ID: PAT_MRT3847_91588C.1
gctgatctctccatggaacacagcgcatccttcaacaataacagcctctcttcacaacgcagcctcgcttcagtcccttccctcaactcacactctcacctcttcattccttccactacctctcactcgtgcctcaccactctcaaaccccacacttcctcctccgtatacatctcctgccttaccctcgccggcaacttgctctacactggctcctccgacagagaaatcagatcctggaaccacactcatttcatccaaaaaccaaccaccaccaacaacaacgttgtaattgcaggaaaaggtgctgtgaagtccatagtggtccactccgacaaactcttcaccgcccaccaagacaacaaaatccgcgtctggagagtcacaaacctcgaacacgaccagaaccagaagtacacacgtgtggccacactccccacgctcggcgacc

SEQ ID NO: 133536 - DNA, 232 bp, Glycine max
  Clone ID: PAT_MRT3847_91589C.1
ttagtgcaaaccccagaaacttttattgcatggaataaggaacttttcagcccgactgctcatatgagggccttgtctcccggtatcatttacaaggcgctggccaacactctatattatgaaacacaagagcctctcttctacccttggagctcaggttgctaacctctcctgcggtggcaacgagctttgcacacaccaattggatgtggggggcaaggaacctttttgg

SEQ ID NO: 133537 - DNA, 535 bp, Glycine max
  Clone ID: PAT_MRT3847_9158C.1
caaaggccccaggaataagttttagtatccattatctataaaggtaaaggatggctttcaccaatctaaacattgggaaaaaaaggggctagccccaatttttttctccatgaaacccatccaacattggaaacaagctttccatgaaaactttaaatacttccaaggaaacccgccaagttaaaaaaccttttaacctccactatcctttttaggaattttttccatgtgggcatttcctttattatcccctaaataaccatacatgtttttaagtggagctaaattactcaaagcaaaagttctttaactctcctttttcggaggactaaaacgggattaatactgagcagggccagtttgaaggctccaatttttactccaactccggttcctaaaatagggctaactaccatgtgaaaaaccccgggtgttttttttttttgggaactaaaacctttggaaaaaataaaaactcctttttttttttttttcccgttccttatccctccggattctgcccctatccggatct

SEQ ID NO: 133538 - DNA, 374 bp, Glycine max
  Clone ID: PAT_MRT3847_91590C.1
atagaatgccatcaacagtcatactgggtccgagtgaacagaatgggcgcggatctagagcaacactgaagtggcactttgatttaacaccatcaattggtgatgctgacttatctcaggctctcaaattaaaaaccgcttcacggatcgagctataaataaaaatgaattccgttaaggtgcgaaagaaaaatattaaaattgatgcggcatcattaggtatgatacataggggtttacgaaatttaaaagactatttaaggagtgtgttggaactcattccattgcattgggaccagtacaggcctttcaaaacggggcttcaatttcactgcaccagtaacttccgttcatttcctaccgttaagattaaa

SEQ ID NO: 133539 - DNA, 491 bp, Glycine max
  Clone ID: PAT_MRT3847_91591C.1
tcggttgaccaacaccttgcatttgtcagcattgagcaacagagcccggatatcgcccagggtgtgcacggccacttcaccaacctccgagtacatgcccctcagccatgtccttgcaaccaaacttggtgctcgcctcacagaggttaggaagaatggcacctgtgcttggttgaggccagatggcaagacacaagtaaccgtcgagtactacaatgacaatggtgccatggttccagttcgtgttcacactgtcctaatttccacccaacatgatgagactgtgagcaatgatcaaattgctgcggaccttaaagagcatgttatcaagcctgtcattcctgagaagtaccttgatgagaagaccatcttccaccttaacccttctggccgttttgtcattggtggccctcatggtgatgctggtctcactggaagaagatcatcattgatacctatggtggctggggtgctcatggtggaggtgcctt

SEQ ID NO: 133540 - DNA, 972 bp, Glycine max
  unsure (1)..(972): unsure at all n locations
  Clone ID: PAT_MRT3847_91592C.1
acagtaactgtaattaagcatggcatggaattgctcaagatctcactgctgaaacgcaaacacaaaccagatgcatcatcaaggttggcagcaaccggcatatccacagataccagagaaagatttgcattgctcagcatcttcagtgctaacgtttcacatatcacaaggaacttgtcctctgtcaaagagttgctgtccttgttcagcgtccaagtttcctatgccattggtgtccctgagcccttgtcagtgtttgtggacacttatggaactgggaagattcctgacaaggagattcttcaaattgtgaaggagaatttcgacttcagacctggaatgatccccattaacttggaccttaaaaggggtggccataggttcctcaagacagctgcttatggacactttggaagggatgaccctgacttcacctgggaagttgtgaagccactcaagtctgagaagcctcaagcttaagattgttgtgaagttaatcactcccttcaatggatgtcttgctaggtgtggatgaataatttgcgtgttccatgactactactacttcattcataggtctaatgtcatctcatcaatacttaaactgttttttttttttccttttctccttttactcacaatttattttttggttatgcaatgttaccgttttgatgcaatggaaattttatcagaattttgtaccaattgattgcattttgagagggtgaaaaaaaaaaaaaaaaaaaaaaaaaaaactcgagggggggcccggtacccaattcgccctatagtgagtcgtattacgcgcgctcactggccgtcgttntacaacgtcgtgactgggaaaaccctggcgttacccaacttaatcgccttgcagcacatccccctttcgccagctggcgtaatagcgaagaggcccgcaccgatcgtccttcccaacagttgcgcagcctgaatggngaatgg

SEQ ID NO: 133541 - DNA, 4349 bp, Glycine max
  Clone ID: PAT_MRT3847_91593C.1
tctcgagccgattcggctcgaggaggaacagagagcgataaccaaacgcagggtaataagccaccccatatctcttttctcatcttcttcggaaccctaaatttctctctttccgatgacgaccatgatgctttcgccttagtttcgtttctttgctctctctctctctctccctccctctctctctctctcactgtttccaacgtctttttcctctttccaccactacgcattctccgcgctttccactcacgatcttcacttcgatcgcgattcacctccctgatccctttctattttccgcagcttgccggatcgatctgtgagaggaattttgccattatttgggggtgactgaagtgggctatgatttgaatggagagaggatgccagagttgagaagtggagctagaaggtcgaaacggcttggagatcttcagcctggtccactgcctgttgatcaaggagagaattggcaacaacctgctgctccgaatcgaactaggaggagagttggaggtggtagaggaagaggtggtaatgccacagctgtaggcaaagggccatcaccagctgtacccacaaggcgaactgcagctggtagaggccgcggagcaagattgattgatctggaccctgaaccttgcgaagtcttgccagaacctgttgctttaggggctccggaaccagtttacaataacgtagaggtagtggccaataataatattgtgatggagggtggaagtggagataaggtggcgggagctgaagaagaaccaagcacaactcctgtccctgagagggtacaagtaggtaactctcctatatataagatagagaggaaattgggtaagggtggttttggtcaagtttatgttggccggaggttaagtggtggctctgatcgaacaggtcctgatgcggttgaggttgcacttaagtttgagcacagaaacagcaaaggttgcaactatgggcctccttatgagtggcaagtatacagcactctgaatggctgttatggcattccctgggttcattacaagggtcggcaaggagatttctacattttggtcatggacatgcttgggcccagtctttgggatgtatggaattctgttggtcaacaaatgtcaccaaatatggttgcgtgcattgcagtagaggcaatatcaattcttgagaagctccacttgaaagggtttgtgcatggagatgtgaaacctgaaaactttttgcttggtcaacctggatcagctgaagataagaagttatatcttattgatcttggtctggcttctagatggaaggatgcatcatctggtctacatgttgattatgatcagagacctgatatattcaggggaacaataaggtatgctagtgtacatgcacatttaggtaggactggaagtcgaagggatgaccttgagtcactggcatacacactagtatttctcataaaagggagattaccttggcagggttatcagggtgacaataaaagttttcttgtttgtaagaagaaaatggccacttccccggagttgatgtgctgctttgttcctgctccatttaagcagtttcttgaagctgttactaatatgagatttgatgaggagcccaattatgccaagcttatatcactttttgaaagcttgattgaaccatgcactccgttgagacctattagaatagatggagctttaaaggttggccaaaagcgaggaaggatgcttataaatctggaagaagatgagcaacctaagaagaaagtgcgattggggagtcctgctactcagtggatatcagtgtataatgctcgccgtcccatgaagcagagatatcactataatgttgcagacactaggctacggcagcatgtagacaagggtattgaggatgggttgtatataagctgtgtggcctctgcagcaaatctgtgggctctaatcatggatgcaggaacaggtttttcttcacaagtttatgagttatccccggccttcctgcacaaggactggattatggagcagtgggagaaaaattactatatcagttcaatagctggcgcagttaatggaagttccttggttgtcatgtccaaaggaactccttacacgcagcagtcctacaaagtgagtgaatcatttcctttcaaatggataaacaagaagtggaaagaaggattccatgttacctcaatgactactgctggcagtcgctggggtgttgttatgtccaggaatgctgggtattctgatcaggttgtggagcttgactttttgtatcccagtgaaggaatccatcgtcgatgggagaatggttaccggattacttctatggctgctactagtgatcaggcagccttcatactgagcataccaaaacgcaaattacttgatgaaactcaggagacactgcgtacatctgctttccctagcacccatgttaaggaaaaatgggccaagaatctctacattgcctctatatgttatgggcgaactgtttgctagcttctgtagtgaacatttgctgtatcatgaaaaatgaagcaaaattatagtgatgagaatatttcatgattattaaagttgaatgggtaggtttgcttttgaccccagatcccgtcaaaaaaatccccccctcataaaaatttcgttataattgtataaagaaatcaaaaggtaaaggaggaaaggcagagtgagttatgctggtggaagcgatgatgatctattgaagagtattaacgtcacagcgttggctattttggccatgttttcatggttgtgctttaaacaatttgagaattttgtatgtaatggtataaatttttacctacatcaaacttaaacaatgaattctaagatttgatgcgtgccttgaacaggaccctgacagcaaggttgcctgtgagacatgcaccaagaccaacatggtcatggtcttcggagagatcacaaccaaggccaacgtagactatgaaaagattgtccgcgacacatgccgcgaaattggattcatctctgatgatgttggtcttgatgctgacaaatgcaaggtgttggtcaacattgagcaacagagcccggatatctaccagggtgtgcacggccacttcaccaagcgcccaaaggaggttggtgctggtgaccagggtcacatgtttgggtatgccaccgctgaaacccccgagtacatgcccctcagccatctccttgcaaccaaacttggtgctcgcctcacagaggttaggaagaatggcacctgtgcttggttgaggccagatggtaagacacaagtaaccgtcgagtactacaatgacaatggtgccatggttccagttcgtgtccacactgtcctaatttccacccaacatgatgagactgtgagcaatgatcaaattgctgcggaccttaaagagcatgttatcaagcctgtcattcctgagaagtaccttgatgagaagaccatcttccaccttaacccttctggccgttttgtcattggtggccctcatggtgatgctggtctcactggaagaaagatcatcattgatacctatggtggctggggtgctcatggtggaggtgccttttcagggaaggaccctaccaaggttgacagaagtggtgcctatattgtaaggcaggctgcaaagagtgtcgtggcaaatggccttgctagaaggtgcattgtgcaagtttcctatgccattggtgtccctgagccctttgtcagtgtttgtggacacttatggaactgggaagattcctgacaaggagattctgcaaattgtgaaggataatttcgacttcagacctggaatgatcaccattaacttggaccttaaaaggggtggtcataggttcctcaagacagctgcttatggacactttggaagggatgatgcagacttcacctgggaagttgtgaagccactcaagtcagagaagcctcaagcttaagagtgttgttaagttaatcactcccttcagtggatgtcttgctgggtgtggatgaataatttgcgtgtttcatgactactactactactactccattcaatgtctaatgccatctcatcaatacctaaactgttcgttttttttttttctccctatactcacaatttattgtttggctatgcaatgttactgtgttgatgcaatggaaattttatcagaattttgtcccaattgattgcattttgaaagggtgaaaaagacctcctcaatgtatttttatctaaatgcaagtatattctttcacgaaattgaaaatttgtttcctttgaacacaagcaatttgacttctttggaatgcatcgacaatattgatttggc

SEQ ID NO: 133542 - DNA, 2915 bp, Glycine max
  Clone ID: PAT_MRT3847_91594C.1
aattcccgggtcgacccacgcgtccggagccatttgggagttaggttctgcacgctctgcttccagcgagtgttctttcttcgtttcaacaccttaatttgcacacgctgcttcttcagcttgagaaatggcacaagaaacctttctattcacatctgaatctgtaaacgagggtcaccccgacaagctgtgcgaccagatctctgatgcagtgctcgatgcgtgccttgaacaggaccctgacagcaaggttgcctgtgagacatgcaccaagaccaacatggtcatggtctttggagagatcacaaccaaggccaacgtagactatgagaagattgtccgtgacacatgccgcgaaattggattcatctctgatgatgttggtcttgatgctgacaaatgcaaggtgttggtcaacattgagcagcagagccctgatatcgcccagggtgtgcacggtcacttcaccaagcgcccagaggaggttggtgctggtgaccagggtcacatgtttggctatgccactgatgaaacccctgagtacatgcccctcagccatgtccttgcaaccaaactcggtgctcgcctcaccgaggttaggaaaaatggtacctgtgcttggctgaggccagatggcaagacacaagtaactgttgagtactacaatgacaatggtgccatggttccagttcgtgtccacactgtcctaatttccacccaacatgatgagactgtgagcaatgaccaaattgctgctgaccttaaagagcatgttatcaagcctgtcattcctgagaagtacctggatgagaagaccatcttccaccttaacccttctggccgttttgtcattggtggccctcatggtgatgctggtctcactggaagaaagatcatcattgatacctatggtgggtggggtgctcatggtggaggtgccttttcagggaaggaccctaccaaggttgacagaagtggtgcctatatcgtgaggcaggctgcaaagagtgttgtggcaaatggccttgccagaaggtgcattgtccaagtttcctatgccattggtgtccctgagcccttgtcagtgtttgtggacacttatggaactgggaagattcctgacaaggagattcttcaaattgtgaaggagaatttcgacttcagacctggaatgatcaccattaacttggaccttaagaggggtggccataggttcctcaagacagctgcttatggacactttggaagggatgaccctgacttcacctgggaagttgtgaagccactcaagtttgagaagcctcaagcttaagattgttgtgaagttaatcactcccttcaatggatgtcttgctaggtgtggatgaataatttgaagaatctccttgtcaggaatcttcccagttccataagtgtccacaaacactgacaagggctcagggacaccaatggcataggaaacttggacaatgcaccttctggcaaggccatttgccacaacactctttgcagcctgcctcacgatataggcaccacttctgtcaaccttggtagggtccttccctgaaaaggcacctccaccatgagcaccccacccaccataggtatcaatgatgatctttcttccagtgagaccagcatcaccatgagggccaccaatgacaaaacggccagaagggttaaggtggaagatggtcttctcatccaggtacttctcaggaatgaccggtttgataacatgctctttaaggtcagcagcaatttggtcattgctcacagtctcatcatgttgggtggaaattaggacagtgtggacacgaactggaaccatggcaccattgtcattgtagtactcaacagttacttgtgtcttgccatctggcctcagccaagcacaggtaccatttttcctaacctcggtgaggcgagcaccgagtttggttgcaaggacatggctgaggggcatgtactcaggggtttcatcagtggcatagccaaacatgtgaccctggtcaccagcaccaacctcctctgggcgcttggtgaagtgaccgtgcacaccctgggcgatatcagggctctgctgctcaatgttgaccaacaccttgcatttgtcagcatcaagaccaacatcatcagagatgaatccaatttcgcggcatgtgtcacggacaatcttctcatagtctacgttggccttggttgtgatctctccaaagaccatgaccatgttggtcttggtgcatgtctcacaggcaaccttgctgtcagggtcctgttcaaggcacgcatcgagcactgcatcagagatctggtcgcacagcttgtcggggtgaccctcgtttacagattcagatgtgaatagaaaggtttcttgtgccatttctcaagctacaggaaacaaaaaaacaacacaatgtttattacaaagcacaaaagccttaaaaaaatacaacttctcttggagcttttgaatggtagatagctccagaatcgagatcatgttgcaaaaggaataaattaaagcacgcatctctacaacaaattgaaagaaaaactcgaaagtttatgccaagattgattaaaatagtttatcttgatctacttttttgaaaaagcttttggtcctgaaaaaaataattgcagacaaaacgatagcaaagtatatatatatatatatatatatatatatatatatatatataaagaatccctgggcatcaagttggacagaatatattggatttcaagaaggacaaaacttggaagcagttctttaggtgttattcacttattctccaatcagaattggaatttcattttggtaaaacctgaagaagcagcgtgtgcaaattaaggtgttgaaacgaagaaagaacactcgctggaagcagagcgtgcagaacctaactccc

SEQ ID NO: 133543 - DNA, 533 bp, Glycine max
  Clone ID: PAT_MRT3847_91595C.1
cccccaaatggaccaacgggaataagaaaaaaatcaaattttttttgggtttcccaaagttttaacaaattttttttatttttccagagagaacttagccaagttttttgaccccccctccccaaggggtgtcccaagtaacaggctcacagttgtaaaattttccaaaggatccaaatggggaaccctttttttttttttatagaaaaaagcatcacctggcctttgtttgccccacaggtccgaaacgtttcccaacaggtattaacccccccgggcggtcctactagttttgaagttaaaacaacttcggcaaagtcatcaaaatttttgtctacccccccttttttttttttttttaggaccccctttcccaacattgacctttataaaatcatttcccacatttactcatccggcaattttttttgcaaaggtttttccagcaaaaatttgttgggcggccccaaggatgaagtttccaaattaaaaaatccaattccctccacccttaattgggggaggaggacggg

SEQ ID NO: 133544 - DNA, 726 bp, Glycine max
  Clone ID: PAT_MRT3847_91596C.1
ggtttcgccaaaaattgcaggactcaagttcctctacgagctcgatttgagcaacaacttgttctctggggcgttccccacatcggtcctcaacatcccaaccttatccttcttggacattaggttcaactccttcagcggcacattgcccccacaaattttcatgcaaaccttagacgttcttttcctcaacgacaacaatttcatgctgacacttcccaacaacctaggcaacgccccagttgtttatctaacattagccaacaacaaattcaccggccccattccacgtagcattggcaaagcctcgtccacgttgatcgaagtgttactattgaacaaccttttaacaggttgtcttccttatgaaattggtttcttgaaaaatctcacattgtttgatgttggtgggaacctcttaactggtccaattccatggtcatttgggtgcttgaagaaagtggagcagcttaacctagctaggaacttcttgtacggacaggttccggaagtggtgtgtgcgttggggaatttggcgaacttttcgttgtcttataattattttactaaagtgggaccattgtgtaagatgctgattcaaaggggtgttcttgatgtgaggaagaactgcattttcgggcttccggatcagagatcggtgagggagtgcatggcattctttttgatttctaagtcttgttctgaccctgcgttgtttaactttcg

SEQ ID NO: 133545 - DNA, 152 bp, Glycine max
  Clone ID: PAT_MRT3847_91597C.1
tacactttttaaaaaactacatatggcgaaacatatcattctttctttactgcgtaattctgccaaatctcaattctctctcttctaaaaaccatctttcttttgtattactaaatctccaacactcaaaattcatacttgatttgcaaatc

SEQ ID NO: 133546 - DNA, 893 bp, Glycine max
  Clone ID: PAT_MRT3847_91598C.1
gattgttaaagaacaaataaatgtaaagaattacttggggtgggagggaaaagcaaaaaagcaaaatacaaagatcattggcaaagtggtaaactaaaacatggcctttgattccttaatttgattgatgacttaggcagaggtacaaagctaactgtgtttcccatcatggaactgagcatttttggaggatttaaaagtcttcaaaaactctgtagccttctccaactcttccttctgctttgaattgtcccacttgtgctcatttgccaatatttcaatcacacgaggcaatgcctttcgtgctgcgttagtttcaaggaaagcaagacgagttctcctagcaatgaaatcaatagcagattcacaatattcattacgagcacagtacgccacttctgcctccagataagggtaaccgtgggcaagtcgtttacccaaattttcattctgagcaatggtagccacacgctcggctaatgttccatatgcctgagacaagtgctttgcaacagcagaatccattaccccgggaacaactttaccactatatgtacttttcatgcgcttatactgttgagcaagaactgtaaaagaagaaggctcccacccttcaccaccaacaagccggagattgttggtcacacatatactggtgggggtcagctttccagactttatagctgcattaacagcatcttctgccatgcttcgataggtagtccacttgccaccagtgatggtgaccaaaccagggtaatcctcccaaacaacatgatcccttgagatactctcagtatttttggctgttgggtccaatgctaatggccgaatgccactccaagcagaaagaacatcaacacggcgtactttaacattaaggtaatcctcgt

SEQ ID NO: 133547 - DNA, 350 bp, Glycine max
  Clone ID: PAT_MRT3847_91599C.1
acggtgtgacgatggtagatcttcaagccaccgaactttcaggcatgcatgccttatcgggaacaggtagctggcactgccccgtacacatttaaccatcggctctgcatatgcttactgtggtgaacttggcgagaggatcgtgactgctggtcgatacaacgaagatcacgcaagatattgcttgcagcagctaatatctggagtcagctactgacattcaatggtaattggtcataaagatcgaaaagcggcaaacactgtgctggatggaaattcgattcctagcttaaaatttgtgactttggttatcacaagtctgcgctactgcactctgaacctaaatcaac

SEQ ID NO: 133548 - DNA, 323 bp, Glycine max
  Clone ID: PAT_MRT3847_9159C.1
actcgaaaacacattttttcaaacgaagcctccttatagggagaggcgttgaagccacatacaaagagtgcaactggctcaaaacttctgtggcgcatgcaaatgaaataggaaacactcgatgcattaataggacggcaagcgtttgctctatcacactcctcacacaccgttggcataaagccacacacattgtagcaaacctcttgcatataatatacatcacggacatctcttactgaatagtgactaaaaggagtcagggcaataaacataggccaacaggtctacctcaacggtctagaacagagcgtcagacctga

SEQ ID NO: 133549 - DNA, 256 bp, Glycine max
  unsure (1)..(256): unsure at all n locations
  Clone ID: PAT_MRT3847_915C.1
ctctaccatcttcaattcttgtttcttttgcatgataactttgcctcatcactcacccaaaaatcatcaaatcatcaaatcataagttcgtaacaccccaaaattacatggcctcggaaacccaccatcatgtgcaaggcctaacacccgaggaactancccaacttgaacctatcataaaaaaataccatctatncgangcntntncnaacaatngttttccntnatnanaccagggtttnnngccnncgggagc

SEQ ID NO: 133550 - DNA, 180 bp, Glycine max
  Clone ID: PAT_MRT3847_91600C.1
cacacagttatactctacactctaaacactctatctctctctctctccatctatcatacctggggggaatcaccaaaccgtggattaccctactttcaaactcatcatactcggtgacaccaacacatgtatgaccaacttcttgaaaatacatcctaccactgaattcataaagaaata

SEQ ID NO: 133551 - DNA, 196 bp, Glycine max
  unsure (1)..(196): unsure at all n locations
  Clone ID: PAT_MRT3847_91601C.1
tcgcangcncgcnnacgcanagcnccggaatcnngntncnggnnnnanatnngcggaaaccggntaacngcntctccgggaatgcctccngtcaaanaggnttgccgtngnnnagcatncccgcnctgtnatgcatnccggcattgacaanntcgcngangcanttgggctcacnnttnggttcaganggnngtat

SEQ ID NO: 133552 - DNA, 271 bp, Glycine max
  Clone ID: PAT_MRT3847_91602C.1
gttgaaggtgtaaaggaatttgataccagatggattgggtgggctggtgtgaatgtgcctgatgatgttgggcagagagcattgacaaaagctttagctgaaatgcgatgcataccagtatttcttgatgaggagatagttaaccagtactataatggctactgcaacaacatcttatggcctctatttcattaccttgggcttccacaagaagatcgaccatctacaactcgtactttccaatcccaatttgatgcatataagaaggcaa

SEQ ID NO: 133553 - DNA, 513 bp, Glycine max
  Clone ID: PAT_MRT3847_91603C.1
ctaagaggaggaggaaaataacccgccggaagcggcgtaataatactactgtagtgcagcgttggtcccacaataggaggtactcttctaccctcttccggggggagatgactattattagttattacttcgacaacaaaaaagagtacgacccaccgctggttgattgccctactaaatcccgcctcgacattaaaagaatattgatgtttccccactaaccgaatacttctgtcggtagaaactgctgattttattccatccataaaaaaattattttccctatgaggactagtatcaataaaaaaactactatttactgctgataagttgtgatgagaagataccaccccacctctttatgtttggaggatgagaatacattgttgcaaagctactccttcttttttttttgacggaaggtgggaacttcttctgaggtcgaatcctactgcgaggaggactacagaacatcaattgttgaagaaaaaacaacagaagcatcttgttgtt

SEQ ID NO: 133554 - DNA, 1979 bp, Glycine max
  Clone ID: PAT_MRT3847_91604C.1
gactctgcggagatatgggccgcccttgggactgtatttatgcattggaggaagaggatgaagacggaatcatcgccggcgggatcggagaagacggcggtggagccgccgggtttgatttgacttctctgtgtagagcgtatcatattcaccagactttagggttagaggatcggtttaagcagtattattttgagaacaggaagcttcagttgacttcggattttcaggtttcgtcgatgactccttttctggagtctcatcaaacgttctttgcgcagattgcagggttcttcgtggtggaggatcgtgttttgagggccgggggtgggttgatttcgaaaatggaagttgagaacctttgggatattgctgttagtaaaatgtgttctgtgttggaggatcagttctctagaatgcaaactgccaatcatttattgcttattaaggattatgtgagtctgttaggagtgacgctgcggagatatgggtatcccattgatgcgttgcttgatgttttgagcaaacatagggataagtaccatgagttgcttttgtctgactgtaggaagctgattgcggaggcagttgcggctgataaatttgagcagatgttgatgaagaaggagtatgagtattccatgaatgtgctttctttccagatacagacttcggatatcatacctgcttttccctatgtggcgccattttcgtccactgtgccagattgttgtttgacatctcaagtcttcattggagattctgtgagtttcatgtcatacatatcgcagcagatagtctagacttttgttagtgattctgttaagaggtttaatgtgaatgctattaatggaattgaagtagacattcggctcttagagtcattttctgtttcccaggcaatgcatatggcagcgaatatggttgtcttggagcgtgcttgtgatttcttctttcgccatgctgcacagctttcaggtgttcccttgagaatggtggagagaagcagaaggaagttccctctaagaaaagcccgtgatgccacaagacagtggctctctgggctactcaaagccaaggttgatggatttatgacattgatcgaaaatgtaaattggatgggtgacgaggcacctcagagtggaaatgaatatgtaaacgaggtcataatttatttggaaattttggtttcaactgctcaacagatattgccatctcaagtccttaagagagttttacaggaagtttttgctcacatatcggagaagatagttgggactttagttagtgattctgttaagaggtttaatgtaaatgctattactggaattgaagttgacatccggctcttagaatcatttgctgataatcaggcctcccttttctctgatggggatgttgatgttctgagagcatcacttgccagctcaaagcaactgattaatttgctgttaagcaatcatccagagaacttcttgaatccagtgatcagggagaggagttacaatactttggaccacaagaaagtggtgattgtttcagaaaagttgagggatccttccgatcggctctttggaacctttggtagtcgtggggcgaggcagaatcccaaaaggaaatcattggatacattgataaaaagacttagggatgttagctgattaagcttatagctgtatgtaaggtattttctcttgttttattttcttgttttgtctctagttccattttgatgatgaattatttaatagtgagttgtcgataaaattatttgctttaggccaggctgtcactgtgttccaaatgcattttaagattttccaagatatttgtttgaaatgtataattcttatgctcttgttttttggatttgatttaaatactttcatatcattttattgtgtctgttttgaactgtgttcctcctgtttgttaaaatgtctttaatgtgtaacatgatgcttgcttttcctgagtaa

SEQ ID NO: 133555 - DNA, 292 bp, Glycine max
  Clone ID: PAT_MRT3847_91605C.1
ttcactacaaacacaggctttgaatcttatggtttccctctaccaattatctgggcaggaaccatgaaacaatgaaaaaattatgcatattccatacacatggaccttggctgaattatctatctttgatgatgtggaaatcactggtaataattctaccacccttgacatgtttttacacgatatgaaacatgtactatttcccgatggtcttatgcggtaattcaccaagatgttaatcaacacagactggaacagtgccgacatatatgctcttatcaccaaacttctg

SEQ ID NO: 133556 - DNA, 539 bp, Glycine max
  Clone ID: PAT_MRT3847_91606C.1
acaagggtgcaaatctattaaattatggttgaacccaaactgggaacatgctggaccgactaagtgagtgcaagtgccaagaggacataacgtgtcgtgaactacgctcttggtgatgggctcgaaaccctctagcacagatttacggtgagcacgcttgagagcgtaacattatactggtaagttaataacaccttaatgggagacttaacagctctaggatggaaatttatgttgcttgttagcagtgtcaaactctttatgatggatacatggcaatgcttggaatctcgccactgtgtgctacgtgtacactccaacaggacgatgccctcactactgagcgattccaactgtcaaaagcgcgtgttttggaataagactgagctccctgtcgtcacgtcctgcattggagccgacgtaagctcgttggcatgctatgtaatggagatctggcatgaggccttcggaggcaacggtaccgacatgctgagcgcaccttccttgtttcatactaacggccagattcttgtgacggg

SEQ ID NO: 133557 - DNA, 374 bp, Glycine max
  Clone ID: PAT_MRT3847_91607C.1
agctcgagcactatgggaatacaaacattgccttttcaccaacacgatctacatacacagggtcggggagctccaattgaaactccctcaggaccaacaaagctttaatcccacaatacgacgcggtgattacaaacattaaggaagaactccggcccaagcctggaccatccacatcaaacctcgccgaggacgcagaggagcacgacaaaaaccccgacgacaccgacaagggcaagcggcaagcagaacaaactgtatccccggccgcggccggtgcaaccaaatgggccgaggacagctggaagaccaaaaaagcgctgcagcggaccgaagaccccaaccaggaggagctagaggtcggtctccgcacc

SEQ ID NO: 133558 - DNA, 1822 bp, Glycine max
  Clone ID: PAT_MRT3847_91608C.1
ctcgagccggttcgagctgtggaggaggggagaataataataataatgatggaggcaaacaaggagttgaactcagcacagcacagagacaagagcttcagatgaagaagtcaaaacttgtgaccatgctagatgaggtggagcaaagggaccgacagtatcaccaccaaatgcaagttgtgataacatcatttgagcaagcagcgggtgttggagctgcaaagtcttacacagcccttgcgttaaagacaatctcaaagcaatttcggtgtctcaaagatgcaatctcttcacaaatcaagacaactagcaagaccttaggtgaagataattgcctgggagttaaggtagagggttcgaggctaaggtatgttgatcatcaacagagacaacaacgtgcattacagcttggaatgatccaacacaacgcttggaggccccaaagaggcttgcctgaacgtgctgtctctgtccttcgtgcttggctttttgaacatttcttgcacccctatcctaaggactccgataaggttatgcttgcaaaacaaactgggcttactcggagccaggtatctaactggtttataaatgcccgagttcggctatggaagccaatggtagaagaaatgtacttggaagaggtaaaacaagagccaaacaatagctcccaggataacaacaacacaaaaggatcaaatgaatcaagcaaggagttatggtcagaagctaatgctgctgcacaagaatcaggtgcaatgagatttgatcagattaacattctccaatcaaaggcagaaagcttcaagaacaaccaaaccacttccccaacagagatctccaattccaactcactccaatctggtttccatcttgctgacatgcaaagtccaaacaagccaaaaagcacttctgagatgcatcagaattctccaggtagcattctttcagtggacatggaaatgaagcctcatcatcatggagaaacaaataatatcactagagaaggccagaacaacaacacaacaacaaagtttggcattgaaagccatggtgggggttttggagcatttcccaatatggaagacattggaaggtttcatcatcatgtcacagagcaacttgctcctaggttccatggaaatggtgtttctctcactcttggacttccacacagtactgagaataacctttccctctcaggaacaacccaacatggattcctctcacagaacatgcacttgggaatgagaaacagtgaaaatgatgagttttgtggtgcaatcaacactaccccaccttcttctcactcaggtatcagttatgagagcattgacattcaaaacagaaagaggtttgctgcgcagttgttgcgggatttcgtggcttaaaagaattgataattaactagctagctaggataattaatcaatgaagaacaccccacgaaagaattgaattattttcttctttttctgatgttgcaatatattatatatccacaaaacacaatgcagttcagagtgttacgacacactaacttagcagaagaatagcaacaggaggggaaaaaaaaagaaataaaagaaatggagaagtttatggtaacttgctccatgtataaagatggaaactggttcaagattatgaacttgcagggaattcagatttacatgttctgaattagtttaatttaaggattcaagttgagttggggaaggtatattgtatatggtattgaaaagtagctaggtacaatacaaggaattgaatggtttgtttggataggtaatgtattatatattggatttggagttatatgcct

SEQ ID NO: 133559 - DNA, 300 bp, Glycine max
  Clone ID: PAT_MRT3847_91609C.1
aataaaaaagaccatattaaaaattcttttgattccttagacaatggtccggcgtgctctcctctccctgtgtgctctattctccaactgtgacatgtggcaaaacttgagctggctctttccttttctttgggaaaaaacccaacacctaaccgttttggtgagtgctgtgaagaacgggcatcacacactgtgttttctctgacattttgggttccaatgggaactagatgtccacactattactgtacatactacccttgggcactataatagcgcccaaaaactcgctcataaaga

SEQ ID NO: 133560 - DNA, 295 bp, Glycine max
  Clone ID: PAT_MRT3847_9160C.1
cgagatagtgacagaaggggacgacctgtatactaaggctgttggcttcaatttggcccttaatgatttctcttttaaggtggataagtctggattcgtttagataagttcgaactgaaattctgaatatcaaaactgtaagcccatatatgcagattctagtagtactattgcgattactggactgttacatgaacctggggcatatggacctgcattaatgcatgtaataattaagctctatcgctatgaagtaatttcagctggttcatcaataggttacagcaattgctgg

SEQ ID NO: 133561 - DNA, 286 bp, Glycine max
  unsure (1)..(286): unsure at all n locations
  Clone ID: PAT_MRT3847_91610C.1
gacaagttgtattcnantaangttaataagtntgcaaaaattatgaaccttagacanagtgtngttggtgaatggtaaacnncttactgatgggnagntgtatgagggtncgcntattnctgtatctaaatattagtgnaggggaaaanatgtagntcanataccctttcatngcacaggaggaaattctgtcttctagtncnaggtnatntcagaatgncaatggtgagtaaacatagcaagcctnagctatngcaatgcatgtgggagctatanaaattancat

SEQ ID NO: 133562 - DNA, 2233 bp, Glycine max
  unsure (1)..(2233): unsure at all n locations
  Clone ID: PAT_MRT3847_91611C.1
tcgcccacgcgtccgtacggctgcgagaagacgacagaaggggaccctcaacaacctaaaaaatattcactaagatttatttcccttattttattcatttattctttgttcctagtctttatcttataatttctcattgcttgcccggtaattcaagatcaacttggaaaatttgcaagatttgggatgaaatctggtcggatcttgctttgtgggatggggattttggtgggtcttatttcaatacaaagctcttcctctctcaatcccatctccctctcttcttcttcttcttcttcttcataacacaaacacaaaacataaacctttcttccaaccaacccttttttccaattctttgtttcttcaaaaatcttcaatccaatttttcaccttttcacaaatggggatggctgcagtggagtcacagtttcatgtcttggctgttgatgacagaattatagataggatactcattgagaggctccgcacaacctttttctattaagttactacatttgattttgttcactactttttagttcttctctggatgccatagaatgatgagatcaatctcatgtataccatctgttctgtcccaacaaccataacgcctcaggaggtggaggttaattttgttataacagattactctatgcctggcatgacaggctatgacttgcttatgaaaatcaaggaatcttcatctttgagaaacataccagtggtgattatgtcatctgaaaatgtgccttcaaggattaacagatgtttggaggaaggagccgaagaatttttcttgaagcctgtgaggttgtcagatttgaacaagcttaaaccccacatgaagaaaaccaagttcaaagatcaaaagcaagaaacagtagaaaggtttgaagactcagaagttcaacagcaacagtcacaacaacaaatcatcatccaaaatgagcatcaccaagcaccaaaattacaagttcttcagccagagtcagaatcagagtcacatccacaaccaactattgaacaacagcaacaaattctacaacaagccaacaacaataacaagaggaagaccatggaacagggcctttcacctgagactgacagaacaagaccaagatacagtggcatagccactgtggtatgatcataaaaatcattggcaaaaattttcttgaatttcaaaaaatgtaattctcatataactttttttttctttcttttaaaaacaaattaactcaagtgttggttaatataggctctataggagtgtaatagagttgtttcctgtacacattttcctggaaatatttccttccaattttgcttccccccaatataatgaaaaggaaaaaaaatataggaattgagtggaacagggcctttcacctgagactgacagaacaagaccaagatacagtggcatagccactgtggtatgatcataaatcattggcaaataattttcttgaatttcaaaaatgtaattctcataacttctttcttcttcttttaaaaaaaattaacttaagtgttggttaatataggctctataggagtgtagtagagttgtttcctgtacacattttcctggaaatatttccttccaattttgcttccccccaatataaatgaaaaagaaaaaagaaatattgaattgaaaagaaattatcagatgataaataaatcaaaagcaagaaacagtagaaaggtttgaagactcagaagttcaacagcaacagtcacaacaacaaatcatcatccaaaatgagcatcaccaagcaccaaaattacaagttcttcagccagagtcagaatcagagtcacatccacaaccaactattgaacaacagcaacaaattctacaacaagccaacaacaataacaagaggaagaccatggaacagggcctttcacctgagactgacagaacaagaccaagatacagtggcatagccactgtggtatgatcataaaaatcattggcaaaaattttcttgaatttcaaaaaatgtaattctcatataactttttttttctttcttttaaaaacaaattaactcaagtgttggttaatataggctctataggagtgtaatagagttgtttcctgtacacattttcctggaaatatttccttccaattttgctaccacccaatataatgaaaaggaaaaaaaatattgaattgagtaagaaattactccnnnnaaaaaaannnnnnnna

SEQ ID NO: 133563 - DNA, 1389 bp, Glycine max
  Clone ID: PAT_MRT3847_91612C.1
gaaccctcaacatattcactaagatttatttcctttattttattcatttaattatttgttcctagtctttatcttataataattttcgcattgcttgcccggtaattcaagatcaacttggaaaatttgcaagatttgggatgaaatctggtcggatcttgctttgtgggatggggattttggtgggtcttatttcaatacaaagctcttcctcttcctcttccaaaaatcccatctctttctcttttttttcatcataacacaaaacacaaaacataaacctttcttccaaccaacccttttttccaattctttgtttcttccaaaatcttcaatccaatttttcaccttttcacaaatggggatttctgcagcggagtcacaggttcatgtcttggctgtcgatgacagcatcatagataggaaactcagtgcaacgcaacgcgggaggagaggacaagggattggatccgctagtctgtgggaggaaggcctctaggcccttctggggaagggaatacatgagagctttaggagggagaagtatagttagctgggctgcgtgtgaatgatgcaaccaaccacagcacaccgctttgttggaaccttgtaaaaatgggatctgagcctggctttctttcttatcaattctggtgcagagctagacagtcagtcacttgattaagaacctaccctgcttcaattacaggaaaagcatactaatcttaccaatgtcatctgaaaatgtgccttcaaggattaacagatgtttggaggaaggagcagaagaatttttcttgaagcctgtgaggctgtcagatttaaacaagcttaaaccccatatgaagaaaaccaagttgaaagatcaaaaacaaggaacagtagaaaagcttgaagacttagaagttcaacagcaacagccacaacaacaaatcatcatccaaaatgagcagcaacaagcaccaaaatcccgagatcttcttcagccagagtcagagtcacatccacatgcacaaccaactattgaacaacagcaacaatcactacaacaagccaacaacaatagcaagaggaagaccatggaacagggcctttcacctgagactgacagaacaagaccaagatacagtggcatagccactgtggtatgatcataaatcattggcaaataattttcttgaatttcaaaaatgtaattctcataacttctttcttcttcttttaaaaaaaattaacttaagtgttggttaatataggctctataggagtgtagtagagttgtttcctgtacacattttcctggaaatatttccttccaattttgcttccccccaatataaatgaaaaagaaaaaagaaatattgaattgaaaataaattatcagatgat

SEQ ID NO: 133564 - DNA, 482 bp, Glycine max
  Clone ID: PAT_MRT3847_91613C.1
cctctgggcgccgcttttttttttttttttttttttttttttttgggagagggagccgagttgccgacttgtctgtggattgtgattgctttgatgagatggggatagagagagagcattttcgaggctccgagagagttgagctgcctcgagcgagagagtgcttggggtggtgcaggggggagagagccggggttttgggaccgagacgtttctttctccctgttcgtcaaccggtgctggtgagattgagtcggatgggcgaggtgaacggcggcaggggtggcacttggccttgtcaggagtgtgttttcctcgaggcccccaggaggatggggccttttgtggccccccaaggcttggctgacctggagatcttgttggggttgggagctcgtgtgccttgcttttctttggcttgaatttcttcttcttcttccccttgctgggacttgggttgttcctgttgctgttgacctttg

SEQ ID NO: 133565 - DNA, 528 bp, Glycine max
  Clone ID: PAT_MRT3847_91614C.1
attgattcagaaggttggttgaggactggtgatcttggttacattgatgagaatggatttgtttatatagtcgaacgaataaaggagctaatcaagcacaatggttatcaggtggctcctgcagaattggaatctgtgctgctaagtcacccccttatagttgacgcagcagttataccggttgaagatgaagaaactggacagataccaatggcatatgtggtgagagcagctggttctgaactctcagaaaaccaagtcattcaatttgttgcaggccaggtggctccatataagaaagtgagaaaggtgagtttcattgacactattccaaagtcagctgctggcaagatattgcggaaggatcttgtttctcaaagcaaatatcaacttgtctccaagttatgactaacatgtataaatggtggtattagtattccataatgttttacttgattctaagatatcaaatagttagtcttagatttacttaagcaggctaagggtctcaattttccagtggatatt

SEQ ID NO: 133566 - DNA, 420 bp, Glycine max
  Clone ID: PAT_MRT3847_91615C.1
caaaaaagttcttgccaaaagtgactgacaaagagtaggtcacaatcggagacaagacttcgaggaaggccatgtagttttgccacgctatcaatgaataaacatgcaacagtatgggccgtatgcgaagaaggaagcataccaagatgaatccctttagaaaaatggtccacaactaccaagatcgctgtgtggacgtgatacggtaggaggccagtaatgaagtccaacgacaggtcttcccaaggacggtggggtaccaatagtggacataacaggtcaacaattcgcttagtctcatactttgtatgttgacaatcaaggcaattgggtaacatctgtgcgcattccaaaccaatagatgttctttgaaagtcaagctagtgttttcgcgattccggtatgaccccctgttgttgt

SEQ ID NO: 133567 - DNA, 536 bp, Glycine max
  unsure (1)..(536): unsure at all n locations
  Clone ID: PAT_MRT3847_91616C.1
cgaacaatccaactgtgttattcttatgaagaacaacatttattaacctacatatctatggaaacccaaatctatacctccaactgtatccagaaacttaaattggggcaatagtaacgaagctcatgctccatatgaaatttacaagcaaaagaaggcacaaagcgacagagctctacctgctcaccaccgaatcgacaaggaggaaaaagagagtcctagttctgtttttcaccatcgtattatcataatatctagaaacaccaagctgaaaaaccacgtactatatattcagatccctatatgcaagttttaatcctgtattcagatcaaaccaaaactgaaaaaagtgaaaagataaagaacgttagagattaaacccacatatatatatttatgtatatagagagagagagagagagagaggcgcttggtgatgatgatatanaccagtatatacgtgaatttgcttgatctagcggacaatgggaccacagcgcttgaattccccgctaagagagaagaaagatcatatg

SEQ ID NO: 133568 - DNA, 514 bp, Glycine max
  unsure (1)..(514): unsure at all n locations
  Clone ID: PAT_MRT3847_91617C.1
ggctcgagcgcatcgctgctactcaccagtttcactggataaatatgagagaaaactctgcagacatgttggattatcaagacctccttacaggtgatgagacttccctcggactccttcctttacaatgaaattgaaaatggaatgctgtgcgaagttgacgggaagtgggttgataagggagcaattgatgtagacattggtgcaaacccttctgctgatggaggagaaaataagggagtcgaagactcatctgttaaggttggtgacattgttgatacattcatacttcaacagcaacccgattttgataacaaacagtccgttacctgtaggaagaggtttatcaagaatatcactaccaagctcgatgcagacaaacatgactttgctaaaaagcacattgacggagcaactaaggacctgctctctaagattaacgatttacaggtttttggtggggagagcatgaatgatgatgcttgctcggactntgcatactacaaggatggtg

SEQ ID NO: 133569 - DNA, 283 bp, Glycine max
  unsure (1)..(283): unsure at all n locations
  Clone ID: PAT_MRT3847_91618C.1
gaattcggcacgaggatcaataaaagttttgctggtggaagatgatgattcgacacgccatgttgtgcgtgctctgttacggaattgtagttatgaaggtattaatgttgtctttgtggtaaatcatgccttagcaccaaggttaacaaattgagattcaagctgtgaattgctaagctaattttttattcattaattataatttgtatcgaattgtaagattaagaagcaaggaaaaataactccaaacgtatcatacnnnnnnatgtgttccatgtaataa

SEQ ID NO: 133570 - DNA, 463 bp, Glycine max
  unsure (1)..(463): unsure at all n locations
  Clone ID: PAT_MRT3847_91619C.1
cccccccgagaggaagaggcgcgctctagaattggaaaaagccagctcgactaaagnnaaatttgttagtggaaaaancttcaaatatgatataattggtggtggatcacattcttcagaagacgttcctgaaaaagaagatcaagaaaaacccaaaaagattgatgccagattgagacaaagaatagatcctcaacacaatgaggctcttgcccagacggaaacaaattcgtttaaaccgtctcttgatgatggtgaaactcctaaagggcccatggcggatcttaaaagtccccaatccaaaagtgcacttcccaaaaacccagtcggagggaccactcggcgtagcgatctattggcaaatctttcgacagaggggaattttagagccagcgttgattggcaggcgacgcccccggaatagagggaacgactaaaatggcggcccacaggcggcattccc

SEQ ID NO: 133571 - DNA, 264 bp, Glycine max
  Clone ID: PAT_MRT3847_9161C.1
tgtatctttcttctctccagcatcgcagtgtaatgcgtatctctccgtatattgacttcgactgtgagaagacactggtcgccattaatatcttgaccaagaaacccacgggcatagaggcaggccgtcgtgaggcacgtgaagtgatgacagacactcgatcgcataagaattcgccatggttgctcgtccgtattgcaattggtatcgtcgtgctgggattcgtcggtttcttcgtgaggctcatttgcattccaattaaca

SEQ ID NO: 133572 - DNA, 297 bp, Glycine max
  unsure (1)..(297): unsure at all n locations
  Clone ID: PAT_MRT3847_91620C.1
ggaaagccagggaaaacaangagcaccgaacgacgcggaagacggaggaacacacggaagggaaacaagcaaggacggaagagcgaagcgcggacgcaagcaaggacagcaagacgaaaaccagcacagcggacgaagangccaaagaaaaacagggaccagaagcaacagaagcaggagaagagagcgaccaaagccgggagcaggaaaaggcaacccagcgacgagcaaagccccgacaagaacagaagggacaaccaaccacaaagaccccaaagcaagcaggaaacacgaaca

SEQ ID NO: 133573 - DNA, 300 bp, Glycine max
  Clone ID: PAT_MRT3847_91621C.1
agctccaattcggtcgaggaaatcgaacttcactaaaggtttttttttagaactgaactgggaaaaggggtgtgtgataatgaacgtgccctatacaacaaggataagaagaaaggacccgaaactggaaagggctgatgatgacatcacatgaaggtgaacacatcactgaccatagcttggactattccagacccaaaaaaaaaatgaaggtccataaaacatggaacttgaataaacagacaacttaccctatcttaaggaataggaacatatgatacaaaaaggcaagtcttaaaa

SEQ ID NO: 133574 - DNA, 393 bp, Glycine max
  Clone ID: PAT_MRT3847_91622C.1
attatattatggtgaagggatgctgtgttggaccgaagaagcgggttatcactcttcgtcagtcgcttctcaagcagacatctcgggtggctctggaagagatcaagctcaagttcatcgacacctcctccaagtttggacatggccgcttccagaccactcaggagaaacacaagttttatggtcgcttgaaggcttaaattcttgttttccggataacttgtgcgatgaaaatttttgcagcaaaacaagacattttagtggtgttttttgttgagtcagacaatgggtacaacacattcgcagagttgtgtttcttttagtttgtgctttgaacagttgtattttttcccctcttttattataatatcaactaatttattatggctcaac

SEQ ID NO: 133575 - DNA, 753 bp, Glycine max
  Clone ID: PAT_MRT3847_91623C.1
ctttactatattacttgaaaaataataaatagaaaaaattactcaaaataagggtaggatgcgttggtaataccttattttttttcataaaacctgttttttgtttaatttgattcctttacccatacaatatcgtctgtttgttttcatatacaagaccggtaaataggaagtagaaaggggcaagttcatgatgttagaagtagcaagtagagatgaggaaaggatgggaggatgaagacaaagtttgtgtgggacctcagaaaaacaaaaatctcttaattaattggtcttggtggaaatgatgatgggttctaaatcaagtgaaaataaggggttgtacagtgctttcattatcggaaaggcgtgttgtaaaattattttcagtcgtgctgttttggtttgttttgtggcattattcattgtatctgtttgtggtgaacgcggtacttctggtgccttctgttcttttggtctaataataataataataataataataataataataataataataataataatattattattattattattatttaaaaaaaaacaattttaggtcgaccaatataattaaataaatgtattttaaattaaattcattaattattttcaaggtcgtcgtttgtcttgattacaccaatcaatatctaattaatataggttatttaatcttattttaactgaggtcaattagacatttttatcatcaaaatctttctatcttctcttcttatctccata

SEQ ID NO: 133576 - DNA, 741 bp, Glycine max
  Clone ID: PAT_MRT3847_91624C.1
cggtttcgtgggattgaatttattttttcacagttatctaatcacaatattattatatataataaatttattaatttttaaaataattattttaaaataagtcaaataatattttatgattagataatattataaaactatttaaaacattaaactcttgatttaaaataaaaaatagatgtttgtatgagttaaaatatttattgtaaaaattaacaaattattttaaaatattaatcaatcaaaaatcaatattaatatgatttttaagataattattataaaaattaataaatttatcttatataataaattatgataacggtctaatttttttttcacaattactacataacctattttttcaaataatatatatatatatatatatatatatatatatatatatatatatatatatattctcagtttatagagctttaatgttattattatcataaaattcatataaaaagtaatttttattaattaataatataaaattctttctacttgtaataataataattcagctggtatattggattgaaaaacaaaccatcatcatcagacgttgatttctgtacgttgattaaaccagcaaatgtattttatttatttattttattactcatgaggtgtaattgtaacgttacatttttacagcgtgatgacgcatgttccttactgagaacacagccaaattaaaatactccagctaatataactttgtttctgcac

SEQ ID NO: 133577 - DNA, 591 bp, Glycine max
  Clone ID: PAT_MRT3847_91625C.1
gccaataggaactcccttaacataaaacgatgcagtgtgtaatgagaaaacgcagtgggaagtgggaacaaatactcaacgctgtttctgtatctgttgcaaattgaaggcaaaggttccaagagcaaagtttctggcctatataccatgggaagcagaggagtaattgcggacaagtggtccatgagaattctttgggcatgtgctattggaagtgccgtcagcctgtatatggttgctgtagaaaggcaagcacagaataggcagaggatgctggctgaagaattgaaagcaatggagtcaggggaaagcaacggcaaagatggatgaactgtgttatgctataattttatgaaaaatatgtagtatcaaatagcagatgcagagtttcagattttctgaaacttatgatgtaaaaggtttctgtgtccatcttttgtccattcgctaacagtacaatttctaaaggtttgagcattttccagtgggaaaataatgtactagattttcatttcaaatctgttacggaaaggattgaaatgagctttgcaacctcatttttaacattttagaaaataaatttgttgagtc

SEQ ID NO: 133578 - DNA, 1716 bp, Glycine max
  Clone ID: PAT_MRT3847_91626C.1
tgttacattccctgtgaccttgagagcctggcaggttggcttggtggatgctgatgctggtgcagggaagactgtctctgggaacaatatgaggcattccaaagatggaagcagcccatcactgttgatccactatgctggtccaatgaaaacctctgaagatactccaacaaatggatctactgtgccccctggcagacgccttgttgttccactgcagatttgtgttttgcagggtttgtcttttgtgaaggctcagcttctttcaatggagtttcctgctcatgtcggtgaaactcttccgaagttggatgacttaaataacaagtctactgatgttgaatcagaaacaaaaatggacagattggtgaaaatagatcctttcagaggaagttggggactgcgattccttgaacttgagttatctaatccaactgatgtcgtgtttgaaatcaatgtctctgtcaaactggagaactctagcaacgaggacaatcattttgctgatcagggtgctacagaatatgtctatcctaaaacaagaattgatagagattgctcagccagggttctagtgcctcttgagcattttaaattacctgttcttgatgactccttttttatgaaggactcacaagcagatgggaatggcggaggaagaaatgcatccttttctgaaaagaacaccaaagctgaactcaatgcttgtatcaagaaccttatatccagcccacgcgtccgcccacattccggaagggatgcgagaagaccacagaagggcaaggaagctatcctggcagctctccatacttcggtcatggatgttttactgccggatccattgacatttggcttcaggcttgttagagatggttctgaatcaggaaaaccttattctgataaagattctgaattagttgaatctcctgcttccaaaggttctgtgattgcacatgaaatgacaccaatggaagttctggttcgcaataacaccaaggatatgatcaaaatgagtcttaatattacatgcagagatgtagctggggaaaattgtgtagatggtaccaaagcaactgttctatggactggtgttctgagtgatattactatggaaattcccccacttcaacaaattaaacactctttctgcctacattttcttgtccccggagagtatacattacttgctgcagcagtgattgatgatgcaaatgacattcttcgagctcgtgcaaagaccacttcagctgctgagccaattttctgtcgtggaccaccatatcatgttcgtgttcttgggactgcctgaagttatggtccttaaatctgatgtgaaacttgtaaagttttgcggatttcacaatttacactcaaagtatgaggttttctcttggttatctagaatgaatcacttgagttacactaggtgatgcttctaggggtcttctgcttgaaatttctttgaagtgtactttctaaattaagaattcagcggaaatttatctgtatatcaaatcaaatgtactatgataagagattagagggtttggaaattttgtaacttgtttatttttgccaatactgatacttgttctaatttctgttttgttggatgtacgtattcttgacacagcttttgtagttaattattttacgcaataacaagccgtcattattaacaaatttatcaaatagaagagagtaggggggtagggt

SEQ ID NO: 133579 - DNA, 1687 bp, Glycine max
  Clone ID: PAT_MRT3847_91627C.1
caattgcaagaaaaagcaatggaagctcaatcacaccaccgactcaatgtcctttttcttccatatccgacacctggccatttacttcctatggtagacacagcaagactatttgccaagcatggtgttagtgttactattctcactacccctgctattgcttcaacattccaaaatgccatagacagtgacttcaattgtggatatcacatcagaactcaagtggttccattcccttcagcccaagttggtctcattgatggacttgaaaacatgaaagatgccactaccctagaaatgttggttaaaatcggttatggactatcaacgctccaagatgaaattgagcttcggtttcaagaccttcaaccagattgtatagtgactgatatgatgtatccttggacagtggaatcagctgaaaaactaggcattccaaggattttcttttacagctcaagctacttctccaactgtgcttctcattttatcaggaagcatagacctcatgagagcttagtctctgacagccacaagtttacaattcctggtttgcctcatagaatagagatgaccccttcgcagctagcagattggatcaggtctaagactcgtgctacagcctatttagagccaacttttgaatcagagagcagaagctatggggcactgtataatagttttcatgaacttgaaagtgagtatgagcaacttcataagaacacattggggataaaatcttggaatattggaccagtttcagcctgggttaacaaggatgatggagaaaaggccaataggggacacaaggaggaccttgcagaagagccagaattgctaaattggcttaactctaagcaaaatgagtctgtactttatgtaagttttggaagcctcacaaggctccctcatgctcaacttgttgaactggctcatgggcttgaacattctggtcatagtttcatctgggttataaggaaaaaggatgagaatggagacagttttcttcaagagtttgagcagaagatgaaagaaagcaagaacggttatatcatatggaactgggcaccacagttgctgatattggaccaccctgcgataggaggcattgtgactcactgtggttggaattcaattcttgaaagtgtgagtgctggattgccaatgatcacatggccaatgtttgcagagcaattcttcaatgagaagttgctagttgatgtgttgaagattggagtcccagtgggagctaaagaaaacaaattgtgggcaagcatgggcaaggaggaagtgatgggaagggaagagattgcaaaggctgtggtgcagtttatggcaaaagaagagagcagagaagtgaggaagagagcaagagagcttggtgatgcttccaagaagagtatagagaagggtggatcctcttaccacaacttgatgcagttgttagatgagctcatctcattgaagaaaactaggacatgtgagaaaccaaattaggtcattcaaatattggactcatctaagtgcttttaaataaaatgttttgttccatttaagttttaagttcagctagctaattacttgtgtactgttttgatataagaagattttagttttcaccaaatatttcatgctttgaaactctaagttaggaaaaggaaatcttctaatgaatgaagtttcatct

SEQ ID NO: 133580 - DNA, 354 bp, Glycine max
  Clone ID: PAT_MRT3847_91628C.1
aacgggaccaagggaaaaaaccttatacagaggctaaacccccaaaaaattccatattaacaaaatttaagggggaaaaaaaaaaaaaaaaccgccaatttaaaaaacctaatctaactaacaaggggtcccaagctgaaatctttgctaaaaaatattctcatctaaaaaaaaaaacccccccagtttttttgaaattccaaaaaaaccacaactctgctaaaaagcctctgccggccaatgcttgttccatattaggttaaaaacaactttcaccagccggaggggattaaaatcatccaaattcaaaaagaaattttgagagggaatcgctttttaagcccctttgttttt

SEQ ID NO: 133581 - DNA, 266 bp, Glycine max
  Clone ID: PAT_MRT3847_91629C.1
atcacatctactcgatgaaataggatcttagattacagtgacataacaccaatagatcacacacagaaaaatgcacactaaattgagtacgttctaaatacaatgtgtacaaaactacggtccacctcttgtaacttaacaaaatccaatgtacacttgagggatcgacaatgatattgatgttttgcatcccacatgttcaagaaggatgtctcacaggttatgactgaaatggttatactaagtttcgctatattcatcggtaa

SEQ ID NO: 133582 - DNA, 248 bp, Glycine max
  Clone ID: PAT_MRT3847_9162C.1
tcctcttctcctttcgctaaaacttttttttttttctcaactcaaacttaacctgcaaactttttcgactgaatctttccttgcagaaataaattctccccctacccttccaactggtgttgctgagacccatgattctcatcccactgacctacccatcacactttactcaccatttttcacatcctctacaaattccagccctagttctttctatacctgcacctatacccttgtcacacagggtt
